United States Patent Application Publication US 2014/0057251 A1 - sequence listing, part 120

SEQ ID NO: 221715 - DNA, 2439 bp, Cannabis indica
aaaacaaaaattatactttcaattttgtgattaaaaaattaaaaaacaaaagtagttaccaaacggcaatctcgtatagaaaattaaacaaaattagaacctaataatttttattttctaaaaatgttgtaccatattcattcacgtgtgacccttcctcttctccacactcatacaacttgtttgggtctctcctccatacaaatatcaacaactaccaacaatataaaagctttttcgatctccatgaataccaatgagaaacattgggttgatctcaataaatcccatcgagaagcttcgctttaacattcaggcatggcagtgtgatgagcgaggggagatcttcataaagcagatgaggaaagatcaatgactgaggagagatctagatgatcaacgaataaaagccattgagggagttctccttgaatgctaatttacccacacgtttttgggttttgttttgaaaaaacaaatttgattttttatttgttagaaaaaaaaaaacaaatattatgttgtttaatgtattttctttgattattttgttaattaattatttttatttggttgattcacatttattaatggtatttgttcaattatttcaatatttttttttgttgatttgaaaatatggaaagacactactaaattaaatttctaggtaatataataagaagagtaagtttgtattaaaatttcaatacaaaaaatttgttgttttcatatttttttaagttttgttacgttgttgttattcgtattttgggtaagggtcacgtggatcacaaataaaagcttaaggcccatcaatgggctcaaataatgcaaactgggccaagcccaagatctatttgcctttcgagagaacatcaatacaactcggccaaaaaaaaggttctgccaagcctagtcagcatctgcaaagtcataactctgtgtatctagaagaatttctcagaaagctaattatagtttcttgtttactattttgcatagaataaggaattactttccttaaatctcggataaaaagtaaaatcttcctaagatacgaaattatacaattggagacgaagtaattaatatatcagtaattacccacaatcataggatatcgtattaacggatatgatcgtgatcaattctccatattagcatacatgtattgtcttatgggttggacttcatgttgcttaatttttatagtctacgcaagtatacgtaatctattacagtttaatactcacgcatgtgagatcgattcacatgaaattgatattgaatactaaattaaattgatatttttatttggtaaaattgataataatgttaggtaattaaataactaaaaattgaaagataatgttgaatgattaggaatatgaatcatgttaattcagtttcccaattgttaatgtgaattattaattctctcccttttagtgatgacttattatcaaaataaccctaactcttctcagatcattaaggtcataaatcatatattatctacttgcatctctgaagtaaattaacatataacttgcattaattatagaatcttaaagtcacgtaagctatgtaaatgctcttgttttacatcaaaacttatgtttgttctattagagcattcctaatatttacttctcagattttatattaagatcataaatcacattaaagatggctagtctaaaacatgtaattaaaataaataagaacaaattacacaatccatggaagaaaaactaataatcacattaactaaattagagaaacatcaactaacattcatcatatccttaaattgagaatttagttcataaaactcatgttcgcatccataataatatttgaaacaaaaattaatataaaaaaaataaaaagggaaaaagtaaaactagttggcgatcttactccgggtgaccacaattgcttccttcttcagttttagggttctatttctaagtatctagcttctaacacatgaaacccttatatggaaaatatgcagatattttcgaatggtgaaattacaaaaatgcctagaaatcttgtgtgtagcctatagtcatgactacctaatgcctagtcgcaaccataggctaatctcgaaaagcatgctctttgccaaacttccaaagtcgcgaccatagtcgcaaccacataattcgtcgcgaccatgaaaagtggtggccgtgactactggagcaaattccagcttcttgagattttttctttaacttgtcctatctttttcgtagaatttaaactttaataccttaggaacttgaaataaaggaaatcaagcgcaaatccattccaaaagatagcattaaagaagaaaacaactctgaaatcaacccaaaccttaggcttaaaatagcctaacaaattcccccaaactaaatccttactcgccctcgagta

SEQ ID NO: 221716 - DNA, 1058 bp, Cannabis indica
agcaacttcttcattggaagcactcttaaagaaagaactcttaaaaaacttctacttgtaagtaacatatcacactttatcttccagtaatacctgtgtgatttgaatggcagtgctagaaaggtacgcaagctcttcacttcatgtaattccttgactttgttgatgtcatatgttaccttctttgtatatgacaagtggcgtgtctttgttgaaagtttaagtagatcattatgcaaatccaacctaaagcaaaaatcatttgatacgagtatggccaaatcatgtaccaagtcatgcatttggagcaatgatttttctttatttgaatgttgaaacaatgaccttgatgaaagatcctcaaggtattcctccccatgtgcctccatctttttgctttctcgatcaagaggcagaaaaccttgtgccatccacagcaaaatcaattcttttctcccaaattcgtaatctttaggaaatatggaacaataagcaaaacattgtttaaggcgtgtaggtaagtgacggtagctcaaccataaagctggaagaatagatccctctttcttgtacaactcctcccatgtgtcactattaagtatgtcctcccacttttcagaatttcgttcggagcgcaataatccaccaagagattttattgctaatggaaggcctttgcacttgtctactatttgtctacccaatacctccaaatctttgtacttagtactcaagtcatcgttgtttctaaaagcatgtttgacaaataatttccaacaatcttcatttgacaaagtttggagatgatgaatattccctgtggccatagtagaggcgacaacttcacttcgggtagttacaacaattttacttccatttgctccagaatcgaaacaactcttcaaagagtcccacaaagaataagactcgttccaaacatcatcatgaacaaacataaacttcttcccctgcaatgcttccttcaattttcttcgaatttcgtctgggttctcaatatcacatttggttgaagtaaccccctcaaagatctctcttgt

SEQ ID NO: 221717 - DNA, 1409 bp, Cannabis indica
taagatactaaaaagtattttgttataatctaaataaacttatttttgtaaaataattttgatagatttctaaaataactgataaggaaattcaatttcatcttaaacattgtatattttacactaaaaaaaatcaactagtacataatttcttataattttattgtaacttatcgtttaactaaaagtgtaaaaaaaaaaaataacaccgtattatcttgacttaaacaataaaataacgcaatataacctacaaaactaaaaataaaattatagttttaaagttaactatgagatattaaaaatatcaaaatttatatgtatgaaataagtaaccaaatgtgttatcaataagagagagagagttaccaaaatatatgattcccacatctcaaaatatatttataatttttaaaataaaaaaaaaatacaaagtatcttaaaaaataaaataacataatataacataaaattttaaaataaaattatgattttaaaaataactaattataataagtaaccgtatgagataaaattcttaaaataaattttctaatagtaaagtaatcaattgataacttatttaaattaaaagcaactaaatgtttgttatttttaaaacttcaaaaagcaaaaagtttagaaaacgagatttttttaattttttctatttttggtaattgatttgaatttaagtatttatgctgatgtgacacttggatatttgtgtaaataatttttttaaagatatttttgtaaaaaaaatattttaatgtataatattgaaaaaattcatttttaaatattcaattagaaatcggatgttggatgaggtgtctaaaaatctaatacatccaacatccaattgaactaattattattttcatttactttggatgagtaattaaattttatattattatacgtaaaatatagatttgtatatatgataattaacattaaaagtttacttccttttttttttattatttgtggatctaatccagtttaatatatattgaacctaaaatattaaatggatccgatctgataaaaaaatattaggtctaaaattttggataaatctaaattaaaccaataaatatatatgaaatacatccaattgatagaattgatctaatctaacatcatatggatgttgaaccaattctatgactgaaattatttagatcagattagataataaaacctaacatctaatatatagttggatcgaagctgaatagacctacaaatattagaagtggtctaataaacacccctaacactaatacaatcaagtgaccaaaccaccaaacatgataatctcgtaaagtgataattttgctaaagataaagaatgtgcaacactaatagcaatcttagaacaatattgaaaagaaatacca

SEQ ID NO: 221718 - DNA, 2508 bp, Cannabis indica
tcatgtcattggccttaacctagagcgttcttgtctctacggctctatccactccaacaacactctctttcaccttgttcatctccagaagcttaatcttaattacaataacttcagtttctctccaaatcccactgccatgggaatattttgggagttgaaatttcttcgcttgagttcttctttcttccaaggttagattccatctgaaatttcacttttgtctaagatgtctggccttgagttgtcaggtgactttgttggtaatgatcaaccacttttgagtttgaaacttacaaaaatgaatcatggaaaccccgcaacgatatacattgaaaaatccctaaagatctcatgaactcaagtcttcaaagcttgaaagtgatagatctatccaacagcttgataacaggctaccagctcaacagacagtgcccgttctcagatggtgaagaagagtctttcttaccacaaggaagtggggggcaatggtggaaagggaagaaaaggcattccgggagcaacaacccagcttctcacagtttcaggtggaccaaattgcagtatgatcgacagaggaactccatatgaaacaggtaagtgagagagaaattcctcctgtggatgcccaaacagcagtgtcaggaggacaatgaaaaatgacaaaccactgaggggaccaagtgataatcccattcccatagtagcgataaggggaaaagtgaaaaacccgtgcgggaacatcatcatcgtcatcggtggctgtattctgttttacatcatgagctagaaagtgatttggtccacctgaaagtgatagatatgatgaactcaagtcttctgcaggttgattaatcgtcaaacagtgtccgttctcagatggtgaagagtctttcttaccacgaggaagtgaaggcaatggtggaaagggaagaaaaggcattccgggagcaacaacccaacttcccacagtttcaggtagaccaaattgttgtatgatggacagaggaactccatatgaaacaggtaagcgagagagaaatttctcctgtggatgcccaaaaactattgagggaccaagtgataatcccattcccatagaaggcaaaagaggagatgagaaccctggtggaacatcatcatcatcatcatcatcatctgcagtattctgttttacatcatgagctagatcaactttatcaagctgatcatttgtacagccagatacaactttgtcctctgtgctcgtgctcgtctggggtaatgagctagactccacattcagttccttacgttgaagagaactagaagctggatttgtcactactggatactcccatgatacctgatcccatcggcttttgcgcttgcgagttcttttcgcactgatagagcaaacactggtatgtgatgcagaagaaccctcctggatgcctgcactcaccaaggttgaagcaacaacacaatcaaatgctactgaaggtctccgagcatggtcggattcggaccaatcattctgtgagacagaaaatctgttgctgttttcgtccctgtccatatgagcaagttttctaccttgttttctaagccacctgtcacggaaattccgtgcaaaaaacatagtaataatcaagaaacatttgaaagcatatcacagtttaagattttccaatatactattttagtccactcgattaagtctaatctcaactctgagagtttaaagagcataacacaggttgatttaatctaactgctttaacactaactgatcagagattataaataaataacagtaagcaaataatcatcgaacaaaaagaaaaacagaaaccctagcagagatttcgaaacattacaatcggaacttaggaacgaactgtacatacactgggaagtcggaacgaaataagagaaaaaaaaaatcatcaaaatctaatcaagcattatatcgacaggttcgttggaattacaaaagtcggtattacatgaaccatttctaattaatcaaagaaacttacagaggttttaacgagttcatcagtgtaagcctcggcgaggatcgggatggtgactcggcgcgtgggatgatccatgtgactgagcggatgagtgtttagtgatgcagttggaagatgaggcgttgagcttgacgacgctagcgcaggcagccatggctccaaatacccaaacgacgacgaaagttgactgattgattattgggatgatgagaaatccaagagaccgatagagagggaaaagagacgaaaatagggtttttttctctgttttttgaattagaaaatgggctaatttgtaattttgtccttttaaatttttatagtgttctatactatgttctttaaatttttaaaaaacaataaaaaaaaaaagagcaatttgcggcgaaacccccttatgttttgatttttatacacttaacccccttatctttatttttggtgacaaaacccccttatgttttaatttttatacacttaaccccct

SEQ ID NO: 221719 - DNA, 3481 bp, Cannabis indica
gggtgaccttctgatgtttcttcgataaatcaaccatcagggtattaatggcatcgctctttctcttattttgtggaggcatcgcggcagagggagtcacaatgttaacttttgggttatgattataagtagggccttgcttcaagaaagtcatatgggaaagcaatggaatggttaaaaaatcaagaagtcgagaaaaaaaaaaagaaatattctcagtaattgcaaagatgtatcacctgatacttgtctcggagtttgcttagaaagacgcttgtttatttttttttttctattttgcttctcaatattttccttgtatactggctcttgctaaagtttagcgtctgctagatacaacttgttgtctcgcaattttgtagtggtacacaatagatgccaattgtgatcttggacgggaagactgctcagaacctcaacaattttcacacgatctttatccaaaacaaatcaaaatattctacctgcgagcatagataagtgttattattcacaaaagaatagaaataatcatcaagtataaatatatgtgtcatacaaggttaacggttgaagttaattctaattcctgacattttaaatgcgtagaaccacttcgatttccaatctcccatattagaaacggtgcccttagccccgttgacttcagaattggcccatttactgaagccaattgtcatggccaaacttttttatatcataaaaatagctaaaattcttgactgtgggttctcctcgcatgtattccatatacattgcgtaaaacctaaggattatggggtagttgttgggcgtaagctggaatggagagacatcgtaataagtcaggatatcctttatgaaaggatgaaaaggaagcatgatgccgcaatgaatgatagggattgaaaccattatgttttgggttggaataattgcaggattggtaaggggaagatgaggtcgttgcatcgacattgaatttgaaggggcggtatgaatcatattcaacctttcaaatgttgttaggtcagactttttaacctgggaaactaagtctttgcaggagaatggttcatccagaggagcgttatccactgagaacgtttcgctcccctcaccatctacatcatcttcaaccccgcgagcaggtaacttggagtcttcacccatatcctcgacctctgcgtctaggacagctcgtggataaatgaagttgccctgagtagataccgtgaattcacttctccacatctctagagtaatcgatggtccttctaattcttggagcacgtggttaatctcagtggtatatagtgaaccttctcgagctcctcccgcaggaacctcgtcttccaatagcaatgtgggataaactttcatttttttgtaattcatcgacgaaagtcccatctctagaattttacccttggctgtccgataaatcgctcatctgaaagataaaagatctttttagcatggtgtgagtgcgatttaaataaagaagtgttctcacccaaacaacaaatttcaagtgcgacaaaactaactattatctcaaaaagtggctgggagttcccagtatcttaaggttcatgcagctccatgaacattaggttgatgggacacccccaccacttcgagactcggttgcttccaatcaaaacttgaatgcatatgcgtaaaaataaaacgaccaactccaaagaagaacgaagtgtttgggggtttcacagtgagctaagtttacgcaaaaaattaagcattaaatctctacaaaactcccaaccactaccaaattttacttgaaggcgaataaatctaaatatgcgagtatgcccaaaattctatcataaagatatgaatattcaaagtttttcataaaacccgtgagtatttaaattttaggcaatttattttctaaataaaatactttattttgcttaaattttttattctatcaataagctctattaatctcatgcaccatattctatccctaaaaactcggtaggcgtatgaacattcagaaaagcaaattcatagaagctacgagaaagaaattactaaccttctgtgtaaaaatcctttctcttgaattcgttatcactctacaaagatccctcaaccttcgagaaatcatctcaggagaatggggattcgaaacttcaagaaatttctgcagtttgaaattctcaagaaatgagagagtgaaattcgaaaatgagagggaaaataaaatgagaatcagtttgtatttgatgaggttaaatactatactccttatttattgggatggagacacgtgtcaggggaatgcctaaggtctctcaatccaacgatctccaaacagcatgcctacacatatctcgaaggatcttgatgacgtgacaacttgaagaaataaaaataataattatagccgtcttttcaaaaccatcgacaagacaatcaaagatcaccatctcgtgacaataactcgcctgtctcaatctctgatagttcccctaatgacacgactgccaatcgcaaaactaggggcatgtgttatagtgcgaattttttacctggaaactcgagagcagtctcctatgatattgatacatggatccaattctcgaggaatggatgagctgttaattagtgactctcaaagagttaacctagcctaatccaactcgcgagatgatggaagcttgacagggtctagttgcatattataccttgcatggtgtaagataagcagggatgagagattttaaataagtcacgcatgtatcgacatatatacgatgactaagtattattctcctgcgattaagtaaagattgcttctttacataacgactggtctaaatgacaatgtgttcgacgactcaaaaaggactcacatgtctcatgtttcaacacgcgagatgttcgacaacgcgagtcagatacaacgcagacatcctagtgctgggccattagccgtttagcaaatataggacacacctaaagtctgcgagcttgtgcgagaatatgaacaggaaactctcactcagtagatcacatacgttgatgtacttattattgtaacaaattaaactatttttcatttattctttacgtttattctgatttaatactgttatttaattgtaaaacgaatctataaccgatctgttatgtaaaactaaaaagatacttgctttctatataaaggagttacctaaattaataaactaagtagaaatcatttgcaacacactacaaaaaattcttatttttatttacaacaaaatttgtgactaaaagtgaaaaaattgtgactaattataaattattattcctatgttgtgactaaaaggtccatgactaaatatattagtcacaaaaatttacaatttgttagtgactaaatgtattttaaagtcacaatacttgttgtgactaaaacgaaattaagtgacaacttataactaaatattatgttttagtc

SEQ ID NO: 221720 - DNA, 2693 bp, Cannabis indica
ttctagctttgtattgtacacttctacattggttactcttaatgttttcttagacagtctaagcgtgtttcattttaatgggggtttagaggtaaaatgatgcttggtctgtttagcttcctggagtttataggcttgtatttgggattctaagaagcttgataggggagccagatgacattgtaaagttttattgtaaaacactcctacattgctcaaattcttatgtagaaatgatattagaatgactggtggtgtttttggaggtaggatggggctggaaatagtatcactacttagtgatgtgatccttttgattcgtgcgtaaacatcaattagagacactatattgtagtgagtacttattaataaacttgggttttatttcattgttttggtaggttttctgagattcatgaatttgtaaaaccaaatgatgaggtagctttgaatttaatgaactcatgtgcagtttctgtgacagaggagtttcctgacatagtcttttcctatggatatagtgatgagtacaggtacgacctattatttgttttatgtttaatataattatcatactctcttcacttctgcttattgtatttcattccaatttacatattatcttcttgttgattgcagtttcgctctcaagaaaacaacaaggttctatcaaaggcgtgcaaggttttatttcttagttttcaaatttcactatcattgtcttagctgcatatgttattgtcttagtctgtttggatgtgctaacaagaagaaaattcctccaatttttttttttcctttaccttgctaatctactgggctttactggaagagtacattaaaataatgctatgtttctttcaaagcatatgtgcatgtaatacaaatgcaaatatatgttattgtatattctatctatgtgcatttgtgtgtgtgcacatattttaatgatgattgataggtataataaccataaacttcactacaaccatgataacatttttgcaagtaaatattagggtcagctcaagaaagtagtattagtggttacgcatagcattgtgtaatattatcatttagatatgtgttcgctttgagatccttctttcctttgttctcgtcattattgtgaagtgctaactagtggaaattgaatctgcagcaaaatacagtctcttgttgtttcctttttaacctcagtatatgttactaaatggaaggaattcttccatgataaggagttaagatatccgccatcttttcgtgcacgagtaatatgttgtgcgtcaatagaagtccttcaagcatatctttcttggagacaaaatgattgtgagtaggttgaattcctagtacttttaagataagcaataaagtgaaactctaattactgagataggttgaattcttatttttattattttgtttttcactcagaatttgtaaactattagattttaagtgagaaagcctatggatgtgacgttaccgttcacgaattctctttcacaggtcatataaacaaccaacatgccacgtgttttcatgagctggttaaacatggaaagactgaaaaggaagcacagcagtatttgaaggtgtgagcattaattacatggttacgagctaacttttgacttgttgaagggtttaaaatagtgacgatgtcatcctagagtaaaagaatttgtgtttcgggaatctttatattttgtgacaatgtcaatatctctactttaattacttgaggatatttaggaaaaccttattgttaattttcttttcttccaaatttctaattaacttaactattattaattatgtaaattggcaatactaatggttttatgaaatactaattcttattttaccttatgcgaagttaattgtgaatatgtgcaggaaagtggaaagaaggagaagcatgacctcctatttgaacaatttggtatcaactatgaaaagctgcccgtcatggtacgacaaggatcctgcatcttaaaaactgaggtaataatctaccttgttaaaatgaaagtgccatattaatcttatatttaaagttacattttcctaaacataattattgctgttaaaagagagacttcactccttaaaattagggcatagtaaaattgacttgacttttatatttggactttatgtcaatctgaagtcaaaacacttgaagtttgtcattgacataagatgattagatacagctggatgtgtatattatctttagcttgatttcttctttttgatgtttgttgaattcctatcctgggttctacttatgtattcacatgggttacctaaggttgaaaggaatttttttggcctgttgaaaatgtgtaaaagtaacccatcttgtttaacttgttataatttaaagacaaaaggtcttaatctgctacaatatcttgactggtattctatctggccacaagtacccgtgaattttgtcatgttgagaactcattcttatattgtttagacagaagacatagtgaagtacaacgagagtggggctccagtcaagagacttcggaggaagacgagtacagtccactcaaaaaatatagttgggaaaagtttttggaatctgtacccaaaacttctgaaggaacttggcggttttgtggatgatattagaaaaattgaaccagattatattaggtccttcctatggg

SEQ ID NO: 221721 - DNA, 5927 bp, Cannabis indica
gctccagggaaattggaaactaatagggaaatattgtttagtagacaatgaaaatcagaaacatgattttgagaagcttgcaatcctttgaccactaacagagaatcagtctctatgtagtgtattggcaattgaatgtccttgagccattgcaagctataaatcaaagccatagcttccataatttctggtttaaagcatccttgaaaaggcatagccattgcagctattatgtctcctgtgctattgcgaaggactgctccgaaaccagttttattgttcattgtattacatgctgcatcagtattaagcttcagccgacctgatggcggattcatccaaggaggatcattaaacggcaatctggtagagagagcagcagaggttacggcttggactggtttaatatgtgcagcctgataatcttccaagtaatcgacagcaaagaacaaggccatctctggtggttttgttttggatccatgtctctccttgtttctctcattccaaatgctccatagaatagtagcaaattgctcaatttgtttagtggaccaagaggaagatacctgctgtaaaaaatccataagagacatattacttgacaaaaaatcattgatggaaaaggtagatatctgccaaattttccttggtcgtttgcaaaggaaaagtgcatgtatgatcgtctcatttgatctgtgacataaggagcatattgccgagtcacttatatgccttttgtgaaggattccagccacggggagacattcatgtatagcacgccataggaaaatacgaattttggacggtaaggataaggaccagaattttttccaccattgaatagagagattggagcttgtagcaggttgttgttcttccagtttggtagcaagggcataacctgatttgacagaatacataccatttgtttcatgatgccatataagttgatcattttgagcacaaagagttagtggtatgctctgaatttttgcaacatcagattccaaaaacagttgctgtagcaaattgtggttccattgtcgattcccagtaattaattctgaaaccttcattgctgtatcagaatctttaaaaatcaaaggccgaaaagaagtgaaacctggtagccaaggatctgaggcacaaaaaatctgttcaccattacccactcgccaacgcaaacctttaaggagcagttgtttcccccaaacaatacttctccaagtgagagatgggtagttgcctaaatcagcgtccaaaaaagagttatacttaaaatatcgggcttgcagaattctgtgtaagagcgatgagggattagaaaagattaaccaagcttgtttggctaataaagcttggttaaagtggacaaagcttttgaatcccataccgccttcaacttttgaatgacaaagcttccaagttttccaattaatcccagacgatgaggaattggatccccaccaaaatttattcatcataacctccatttggtgaattaaagatttggataggcgaaaacaactcatcgcatatgttggaatagattgggccaccgctttgagtagaacttcctttccaccaatagagaatagttgttcttgccaggcagaaagattgttccatagcttttcctttatctctccaaacaaaactttcttgtctctcccagagtatgacgggagtcctagataacgttcgtggcatggcttgattggcatttgtagagtttgctgaatgttatgttgaatagatacagatgtgttgggagagaaggatagtaccgatttttcagcatttaatctttgacccgaagcacggcaatagaaatctaaggatctcttgatagcgtcaatagatcttttatttgcacggctcagaacgagactgtcatctgcgaagaataaatgagaaacagatggggcacctcgagcaactctcaatccttgaagatgaccacggttctcctcatattgaaaaagtctggaaagaccctcagcacaaatgatgaagaggtaaggggatagaggatcaccttggcgtatgccacggcttggaacaacctgaccttgaattgaaccattaatcagaaacgaaaacgagacactgttcaagcatcgctgtataaggtcaaccaccgtaggagcaaatcctaaagcaatcatcatgctacgaaggaaatgccactccactctgtcaaaagctttactcatgtctagcttcatagctgcataaccttctttccctctttttagatgcttcagagaatgtaataattcaaaagctaccaatacattatctgtaattagtctcgattgcaagaaagcactctgagaatctgatatcacttcagaaaggaaaggctttaaccgaattacaattgattttgaaaccagtttatacagcacattgcatagactgatagggcgtagttgagagacttctcgtggctttttcaccttaggaattaaggtaattaaggtcttgttaaaagcagatggatcagccccattgttgagaatgtcaaggactgttttggtaaccaaatcacccacaatatgccaataattggtgtaaaacataaccgacataccgtcaagacctggactgctatcttcacccatggatttaagcgcaataaagacatcctcggcagtgtagggaagtgttaaaatgttgttcatgtcagcagtaattttgcacggaacagtggcaataacatgttgaagagcctccatatcaataccttcagtagtataaatattgttaaaatagttctcgaccgtgctaccgatgccttgaacagaagaatgttccacaccatgatcatcaaccagagatttgatggagttaaaagagtgtcgattatttgccttctggtgaaaaaattttgtattagaatcgcccgattgaagccatgaaactcttgatcgttgtttccaatactcttcttcttgtgcaagtagttcatctagaacagattcacttgatttgagcatgtcaaagtgtgttggactagtatcggatgagttattgagggtggcaaccttatcttgagtgatttttattttttttgggaggtccctgaatttagtccgatgccatgaggagagatgagtcgagattgcagccatgttctgaataacttgagtagcaggatttatagcagcatctgaccaatatttggcaataatttcagagcaaaaatcctcttgaagccatattttttcgaaccgaaaacgagattttggcttctgtagtgccaaatgttgcagaggagagattttggccagtaaagctctatggtcagactgataaaagtctaagtgtgtcacagaaaaatcattgaagacttcataccagtaagaattaacaaagcagtagtccaatctctctttgacatttatgccattgacattgttattatgccaagtgaaacgttctccctcaaattgaatttcatgaagatcacagtagtcaatgacatctctgaaatcatcaatctgtttttcattcttcagggggccacctagcttgtcagagtgcgtgataatttcattaaaatctcctagcactagccatggaacaagaggagcagtgtctttaagtttttccaacagttcccaagtgaagagtctttgggaaacaacaggagctccgtaaaaaccggagaagtggcaagtaggaccatcatcaagagccaaataacagtcaataaaatttattccatagtttaaaatagttacattaatatgcgacttccaaagaaaaagcaaacccccactaagacctactctaggaacttctagaccattaggaaaattaaaagcattacgaaacttagtaattgaacctacactaagtttggactccataataaaaattacatcaggtttattttgattgatgagcaaacgaagctgacggaatgacttcgggttgctcaaaccccgagcattccaactaatgatattcatgatgagtggcgaggctgatgatcagccttcgccaaagaaacaccgctgccatcagctaccagtgagttgtgtgaaatctcagaggtaggctcaggttgttggtgagaaatacaattagtggagtcattgaaaggggcgcctctagtgcgacagcgttttaaaacatttcgaacattgcctcctgtggtaaccagttgtctttttgcaaaaatagaagacattctattctctttgaaagcatccgaatctgagttgaaagtagatggcataaggttcacttcagcaggagaaaaagtcggtgttgtagcagtggtgggagtagcagttaatttatcctgactgatagagcaatgaggaatagtagcatgaagatacgcaggaggaacggctattggcagagcaattgatcgactcggggaggtagatgaagattggaccatgttaactgtgcaggccgaagaactagaaacaaaactctgcgtagattgtacattgagtgaagagttgttggaaccagaagattgtccacgatcaatagggagagttgtaagataagagtccaaactactcatgttgaagtgcttagttgttgaagagtctgaagtaataatttcctcttccccatatgattttgcactggatatcacttctttggttgtagaagtccttgctattggatcttgcataccaggagaaacaccaacaccagattggttgagtgaagtagcaacgcctttccccttctctttgtcagtaatagaaggtggaagagcaggtagttgtttattatgaggaatgatttggctaatagtgtttcgggcaagcctagtaatgaaaggccaaggaccttctttagaaaaatcctgtctatagcggttgtaaccagcattaggaagggcagatccttccatccatggaccgtaagggagatccggttctaatccttcatcaattttctccagaaattgtgggcatttatcaaacacatgtccaattataccacactcatagcaaaaatcagggagtctttcataacgataatctagccataaatcatcagccatccaaggaaaagtaacagtttgccctctaagtaaaggtttggagacatcgatagccactcgaatccgtaaaaaaggaccccatccttcattaagagagtcttcatggacatcaatgaaagtaccaatgagattaccaataacacgagcaagagtttcagacttactaagaaagggtaatctaaacacttggatccaaaagggagtaattgtgtaagattccattggtgcattctgcagaacacttggagtgcagagaatcatatgttggttgtgaaaatgccaaggttctttagttaaaacccttctaagatccccttcacagccgaaagtaaccatgtaagactcaaattcatagttcgcaacagtaactgcaaacctgcctttccaatttgaggagataaagttgttgaattgcttaggattatatcctctacgagagtagattttgcaaatgagttgataagtggttggccttggcggtggtgcagcaatggatgacaagttaataacttctctttctctagtcgatagagcctgagagatatccggatggaaagagtccattatagttgcttcagggagcaataaactatgggaagcagaacaaggaaacagtagaaacaggacggcggagaagaacaaggccagcggataacgattagaatgaggttggtgggaacggttgttggtagcaaatttgaaaaagaactggccaaaaccagttaaaaagaataaaccagaataactgccacagagcaaaaataagggcagacaatgctcacgtagatataaaaatatttaacttataatattacatattaattattatttaataaactaattattatttaaaacataacttaaaattcattaaaagaat

SEQ ID NO: 221722 - DNA, 2250 bp, Cannabis indica
aaacctttagttcttttaatttttccagttccatccgatacggggccttagatacaggctctacccccgataacaattcaatctcaaaatcaatctcctgctttggtggtaatctaggtaactcctctggaaagacatttagaatgtctcgtaccactggaacgtgttcaggtcccactggtacttctctcgtggtatcgaccacactgggtaaataaccaatacatctatctcgtaattaatcccttgccttaagcattgagatcattggaatttgggatacttaaacacttcccataaacacaaatgggtcctcaccctcgggttcaaacgtcatcatcttcctcttataattggtgattacattataatttattagccaatccatccccaatattacatcaaatcttctagatttaattcaattaaatttactgacagttctctaccttccacatacattataagggacctaacccacctactggagataaccgattccccaataggcagtaaagtaccaaaaccacttggtaaaacatcacagggcttgttcaaactaaaaatgactctactcgacacataagagtgcgtagaaccaaaatcaattaaagcagacaatataataccatcaatagaaatttaacctatcacggtagaaggaccatcatcaacctctgcatggttcaaagcaaatacccgagcaaaaactagagcatcctctttctttatttctagtctttgtaactatggacaattccttttcagatgacctactaccccacactagaagcaggctcaagcttgacatttgcctttatagcgtctcttgcaccttgggcactcaggataggttctttagtttttgttcccacctcggcataaactttgattaccttaaaatttcttattaggacctatggttggtgggtcattgggtcttttcttacaatcattggggtcaacacccctattctgaccaatattgggacacaacctcaaagaatctcttctcatgttaattttctttcatatttgattttgagcaccctcagcagtaagggctaactcaaccatttaagcataagttttaacaaacctcagttgcttagcaactacaaccacatcacgagcaatatgttcttccaaccctcagataaacttagccttcctagaagcctcactggccacttcatcaaaggaaaacttagccaaccagtcaaatttggtggcatactcggtcactgtcatactgccctaagccaatcgtataaacttctctgccttagaagctggatggattcattgtagtaattttcataaaacaaggtctgaaatgtatcccaagtaatgttattcaaatcatgaccctgaggcacagtttcccaccaaatgtgagcatcatgtcgcaacatgaatatagcatacccaacccgattgttaccttcgactcacataaagtcaaagatagacattatcatgatcatccaccttaagtgggttagcacacccttgaacactagtggattttactttttgaactgctcatacaatagctccaaacggtttctcacgtcatgcgacacaaacaaaggtgtcggaagaataaaattacgagcaggacaaacttgttgccctctcaattttatagtatgatctccttgctgccaaatggtctcttacattgaaacatacatttattccaaatttttgtggtagtagaggattcgcatcctcactgactgccttaagcctagaaagctcgtggttaatcctactgaattaccttcggtgcataatctaatacacctgcaaccataagctctttaaaatttagaattctcgagccaacaccaatgctaataaatatttccatacttatatatatataacatcactgcctataacctatcatgctcttctaataactcatgcatcataaagaaataaatattccaaacaattaacaaataatcaattcaatcaataaacacttactataccataagtcgaacgagtcttcacagccaatgtacatatccaaccagtctttaggatctttaaaccttggtggctctcataccatgttgtaatcgcccttcccttgtttagaaacttttaactaagatgccactatactagtttgttacaaaatattgttacataatcaaagtattacaaaatacagatcctatcaacgaagcacaaaagacggcgaggatgatatgtacattgcggttagtattggtt

SEQ ID NO: 221723 - DNA, 2130 bp, Cannabis indica
acgtgtcgtatgcctagtgacctttcacacacgaaaagtgatgcacatgtgtcttccaagctctgggaagctccaagagatgcatgcatgcgccttatgatctcctgggtagtcagtttcttccaatggatggcaaggcacttggtagcttttttggaaagactcccccagtaggatgaatgctactttggtagagtttccctaactagtttttaatggcacgagttactttctttgatgtaactccagggttgtagttacatcgtgatgacagagaccttctgagtgaactttgccgaaaatggcctgcctcaacaaaaagtaccataaccaggccggaccagaggcccagcagacgtcgacggtactaatggtctcctcttagctgccgcgattacaggatcaatttccgatcaacttcatggctcagcataaaggtatgggacgtagtcatcaacaatggatctggccctcgcttcagcaccagcgctgaagccttgggatggctaggttcattatatgtgacgacactttatgagttagtcgtcgtaaatgcatctggtcttagcaccgtcggctggccccaacacctcttgctcctcgttgtgtctgtgtatggacggcgaggaacacgtgcttgaggatactagtggtcggtcatcctaccagggagttggctagccaaatcttggtttttttggggtgagcgcgagtacggagagtgtttctaggccacgtgcgttcatcttctacactttctttgggcgctcaagggtgtaaaccctcgtcttaacaatacatctggccaagagcccctgacctttggccggaccttgacaacaagtcagttggccttccttcttctttttacgcaggggctcttctttttacaggcttgtgtcgccgaccttcgtgcatgtttctttcctcaactctcaatgaaagcaccaaaatatttaccgagtttttggcaacaaaatatttttttagagctttagaaagtaaaggtaggataaatagcaagataaaaaataagatatttttacgtggttcaggcgttaactatccttagtccatgagtctattttattagggtcatcggctagtaattatttatacaaatagagatacaatagactaaaactcctttccaccgtgttcctcttgaagaagaggaagcttagtaggaatactctggagttgataataggtttacaaaaatgtgttttcttgggatgacgaagaatgagtcttctatcccaaaaaaaggtgttcctctctgatgctttttcaagggtatttatagaccaactcctttccatgtgctgcagtagatggattatcgctggggcaaaatcggaccgttggaatggtaggtggcactttcccatatggcatttaagggtgtcagatcgtacaagctaggcttctcctttttccatttcccttatccttagccattggatcattttggtcaggtacaaaggacacacatgttctgtacgatagcgtgtcgtgggagacaacttcttacattgtacccgaaaaagtctgattattaggtccatagtctgacacgtttaggtggggcttccgtgggctaaaggcacaacccgatttagtgtgtctcagaatgccttggcctttctaggaaaatccatactcttcttgggagaagatagctttagttcaaggaatggagggagttcttggctcacggataccgtccatgtagctagcagtcggggaactcctctttacagaggcccttcccgcgaagttggtgctttatcttctcggagcatcgattgaggaagcagggcgactgatgaattcttagcctttctctattaaaattcgacgtgtcatgatgacaaaaatgtggataacagtgggagcccttatgggttcatagtttacttagagtttttcttttgtaattaattgttgatggtgtttgaggtttacataatctgtataatgtgaaaactcatacacacacacatatatatatatagaacattgtttaatttatttttttcttcatgaaaatgactatatatatacctgcctcttgaatttatgtctcctctgtcctaaaattttcttatttcaaagagtctatgtcat

SEQ ID NO: 221724 - DNA, 1848 bp, Cannabis indica
gataactggagaaggggaataagctcttcagcagtttttttagcaccataatagtttatttgcatgcattctttggctgactcataagtttgagtagttttcttaatatcaccttcttttggggtctgcattaaaagaaatacgcaagtatatattttatgatctaaaatatattttataataattaccatactatagaatatgattaattgattataactctttaaacatttactggaaacttaatagtgataaattgtattttactcatattgtgatactaagaagtatttacagacaatcatatcagtacatattattaaccaaacaacaataaataaataaagatagtatgttgttcaccaaaaggatcatagcacacaataaatcacctattttaaaaattcaaaatcttaccttagcatttaaagaagctataattgcatgtacgtcttcttctgttccaccaatggctgcattgttcacctgggcatagctcaaaacatttcatcatttgttgtattgtatgaaaaaaaaatgtataaatccaaaatggaaaagtaataattggaaaatataatcctctctttaagaactaaccaaataaaaatctcagctatatgggagttttattttcatcacccaagtcaaagcactgattctacaaaataaaacaattggcaaaaataacaactaaagaaaaaaactagcagtctgttattaactttcaggaatataaggttaagagtctgacagaaaaaaagaagaagaaaagagtagtactatagaagagcttgtagttaaataatatctaaaactaagaccgcaactgaaaacttggctctaatactattgctaagaatataatcagttagcatattcttataaatggatcattgttaatttgttctcattacccaaaccattttccatgtgggtacacttcataataatgttaggaggaataaatcgtcacatgcacgtttaaatcaatcaaatttaaattttgttcaagtaaaagactaataaaaaccagaagttatagaaaaactctttcgaaagtgaaattagatatttaccaaaatatcaagtttgccgaaatgtgttttaatgaaatcaaccatagcaacaatgctagctggatcagccacgtcgagctggtgaaaaagcactttgtgagagaggtttttctctttctctttgagtttctccaaagcttcaaggccccttttctcatctcttgctgttaagatcacaataactccattcaaggccaattgtctcactatctctactccaatccccttactcgcccctgttacaattgcatatctgcaaatatgcatatgcatgcaaatatgtttattcatcaaaagagcctaaaaaaggaaaatcgtagacaaaaaacagagacgcggtatattatatgtttggtgcagaactccaaatgttgttaacctttctgaagctccagacattgttgatgaaacttgggtttgtaataaaaaatgtaagttttcttttcttttggttcgtttagtgatgaatgaatgaatggcttcaaaatttagcctcgtataaagtactaaaacttgcttgttgatcaaaatcttttttctctgtccaatttgaaggccaagtgtttttctttcggcttagttgcacatttataagtcaatgttacattttgagtacaaagagtcacttcatcataggataagtgatttcttagacaagtggatgatgtgtacctgattattgtatctattttgttgtgactcttgtgagatagatattttggagtggtgagatattaagtgacatttggttgggaggaataaaaatata

SEQ ID NO: 221725 - DNA, 5123 bp, Cannabis indica
atgtagttttgtaaagaatattttttgagatacaaaatacactatcagtatttgaataataagattttttttctctcaaatttgctgtctcgtttctcatcgattctgtccctatttatagtaagggtattcaacaaaatttacaaacggcctaactcgaataaattgcccaaaccaaatcgaataaactgataaaaaaacaaaccgaaataatacaatgaaaattgaaactgcccaataaatattttgggtggtttataaattattctaaatagcctaattaatccaaataaatcaaattaaaccgaattatatatttttttaaataaaagtgtatataatatattacataaattacattttttttttatttaagcgtttatatattacaacatgttttacctgggactattttgcatttaaagtttagatattttagtgtttaacttaaaatttagactttagaactaaaagtaaaaaaaaaaataacgactttctctttccctttctctctcttgcagctcgcgctggtgccatggccaaaacgagggcaaaagtgcagggaaaaatcattctatctgctaagaacggaaaaatgggggcctgattcaagttctgaggctcaaaaaaccagatctatggacgagatcctgggagtcgaaccgattgaattctctgacgaagagaaaacagaggatgcgatacctgggcaagcttcgatggaggaagatcaaagaagagaagaaatcagaatggaatttgcacaattcatggaagctaaacaatttcgcaaggctaatagacaagcttccatggcagtatctcaaggtaagaaagtcattacccctatcatgagatctggttacattgtgaaaaacctggataacaaattttctgaatctgtaatgaaacctaaggtgaaaataacatttgataatatagaagagaagtggccttctggaaatcttcaatggtctgctatgtgctaggagtttttagcggtgttggaaggattcattaggcgcacttagaaggacaaagtagataaaattagaatgttatcatatggaattttcattgtcggatggagacagtgctttgaagggaggatatatatgtattcttcaataaaagacctatgatcatgaagacttgggaccctaatgtcaactttaagaaggaagatattaaggcaatccccatttgaattcaattggaagagctagagataaagtactaggggcagaaattattgtttaagattgctggccaatcggggaatccattaatggtggatgataccaccaaggaaagggataagctgaatttccttagaatccttctcgaagtgaagttgcattaggaatttccaaatttaatctattttgagaatgaatatgggaataatgttacaatagcagtgaagtatgagtggaagcctatactttgtggttattgtaaaggcatgggacatgaaactcaagaatgtagaaagaaagaaagtaagaagcaagaatgggtggtaaaggaagataatagagaagctgggaaaggagacaagcatatacatgtagataatgatggcttcaagcaagttactaaaggttggaaagttaagggaaaagatgttcacagtactatggacactgtaaattcttttcaagtgataactgagaataatgatgaggggagtaaagaggctagttcgagctctattgagatgggaaaaactggagggggggagttacccctcttccaaatggatagaatactcagttggaacgtctgggatctcaaccaattgaaaaagcaaaatgcagtcaagtcattgattgcaaaacaaaaagtagggttggttgggctccttgagacgagaataaaggcccataagattggtgccttatatgttaaaatgttcacaggctggtgttttacgagtaatagtgcttggcacaaaggaggaaggattatggttgcttggaatccacacatgcttaatgtgaatatagtttactgcactagtcaacttattcacttaaatgtggcaactgtggataatagaagttctttttatgttactttcctatatggatttaataaggaggaagaaagaagtagtctttggagagatttatgtgccctggattcaaaagatcctaggctaatcctaggtgacttcaatgaaattttgtccaaagaagagaggattggtgcccgagttaagtatcactcttcaaaggagttcataaattgtgtagcaagctgcaatttggaggatgtgaaatatagtggaaattttttcacttggaataataagcagcaggggaaagacaaaatatactccaaaattgatagaatacttgccaacaatgcatggatggatgcatatcctgaagctgaaagaagttttcctcaatgaaggagtctttaaccattctccttgtttattaacagcttataatgatattccacaagggaggaagccattcacatattttaaaatgtggagcaatcatccagagtacaaacaaaagttctctcattgctggaatcaaaaaatcaagggtgcccctatgtaccggctagttaccaagttgaaattgtgtaaaaagatacttagagaactgaaccaacacagtttctctattatataggcagctgatgagagagccagaggaagattagaaagagattcagaacaaactgagggcagatccactaaatcagctactgcagcaggaggaaaaaaacttacagggaagattatgcagaagtccataaagccttcagctcctttcttcatcagaagactaaactcacttgggcaaaagcaggtgatgaaaatactgccttgtagcatgccagcattaaacaaaggagaagtcaaaatagaatttattctattgttgatgcacctggagaaagaattgataatcctactgaggttattgctacattccttgattattatcaatctctgcttggctttaacttgcaaaataggaaacaggtgcaaatagagatcatgttgtagggtcctctcgtatctaaacaacaagttgacttgctaattgctccctacactagagaagaggtcaaacaaattatttttgacataccaggcatcaaggccccgggactggacggatttggaagttttttcttccaagataattggaaaatagttggagaagatacaactgcagccatcatgtcattcttgaattttgggcaaatgcttaaggaaattaactctacggtattaactcttgtacctaaagttaaatgtcctaatgctgtggccgaatataggccaatgtcttgctgcaatgtagtatataaagcatcaaccaaattaataagcagcaaccaaattaataagcagcaaccaaattaatatgttctcgtctcaagcatatcttacctgaaatcattgctcagaatcaagaagggtttattaaagggaggtcaatagctcataacattatggtgtgccaggatttagtgaggcattataaaaggaaatcgacaaaagctaactgtatgatcaagcttgatcttcagaaagcttatgataagattgaatgggactttatagaagaaatgtttcatgccttccaattcccaggcaaatttatccaactgataatgacttgcattagtacacctcgattctctttgcttttcaatggttcacttcatggtttttttgaagcaagaagaggacttaggcagggagatccgatgtctccccttctttttgtgttaggcctaaagtacttgtctaggataatgcaaaaagtaagggagaaagagggatttggatatcatgaacgatgctctggattgaagttgaatcatttatcctttacagatgatgtcttattattctgcaaaggagactttaaaaacatctattttatgcttcaaggcttgaagttgttctcgaagacctcaggcctaaatcctaatccaagcaagtcggtagtttattgtagtggaatggatcccaaagaagttcaaagagtgattgatgcatcgattgggtattcccatatgtgcaaagaagatctcagccaaggaatgcagcatcctagttgaaaaaatggcagccaagattataacttggagttcgagaaatctttcttttgcaggaagggcaatgttgatcaactcagtacttctcacaatacattcttactagagtcagattatggtgcttcctaaaaagattctaaaggagattatagcagtatgtagagcattcttatggaaaagtcaagcctcatctattggagctggatctataacatgggacaacatgtgtaatgcaaaaagtgaaggtggaatgggattcaaaaacataatggagtggaacaaagcagcaatggtcaagtatgtatgggcaatagcaacaaagaaggataacatgtgggtaaaatgggtgcatgatgtttacataaaaggagaatcctagtgggattacaaaccccatccacaaagcagctggtactagaaaaagatagttggtatcaaagaagaggtaaaaacactttctgatacttctcaatttctgaatgaaaaatatactattgccaaagggtatcagttgtttcataactctagagatagagttacatggcataatcaagtttgggggagattcaatcttcccaaacacagttttatctactagttagccattcaatacagtttgaaaactaaagaaagattacacagattcaatgtaattgatgatgctgattgtgtgttttgtcaagcaaatgaggaaacaatggatttgttctttcaatgtccatttagcctacaatgctttcagcggctgaaagtttggctcgactggagttcttcttcaagctcgttggagaaagcaacaagatggattgaaagagcaaaggtctctcggttcaaaaagaaggtatatgttgtgctgctgctctagcttctttattgtacaatatttggagagctagaaatggaaaaatatggcaagaggaaaatgtaaatatagaatattttataacacaaagattcaaataacttatttcacacatgtgtaatataaaaaagaatgtgtgaaacagactgtttgaaccttgttt

SEQ ID NO: 221726 - DNA, 1398 bp, Cannabis indica
aaaattttataatattttaaattattttataatatttatattattaatattaggtggactaatgaaatttcgccacgtgacagtgacaatctactttggcacttaacagactaaagtgaatgaaaaaaatacagaacaaaacgattgtggaggttggggagtttagcctaattttttcagtctaggggttaatcgtgccaaacttcaaaatttaagaagtttaactgcaaataatctatgttttggcttgtaacatagtttaaaaatattttctaaaaacatgttttataaaactatttttacttttatttttttaaatgagaataaaaatttaaaaattttgaaaagaaaattactttcaattttttaaacaattttttttcttaattaatattttagatttcgatcctaacctggaccttgggacccgaacttcgacctcggtctcacttccggactccaaccacatcctcgaccccaaagctagacttaaactcgatttaaataaaatctaaaaataatgagaaatttgcagcaaaagtacctaaaaagtttactatgatacagattagtcctcaacctccaaaaatagcgacaatagtcctcaatgtcacatattttgtaagtttgttagtcctaaatttgacaaatatgttaagttattcataactgacatgtgttgagtcattattgatccaaataatacttttaataaaaaataatttaaattaaaaagttaaaaatatattttaaaatataattttttttctccttcctcttctacctccagccacacccgacccctcttattcacttttcttttttttctcaaactcaatcctcccttaaccatggaagaattgtgaaaagacaaacctttatgccccaaccccaactctaaagccccaaatctctctatctcggggctcgatatttttcacctctgacgaagtcttgtcgtaaaaaatggaggccaccacgggcctcaacgttgttaataggaggcaaggccaccatggcctttgtcgagtttcaaattgaggttcccgtagctcccttcgctgttcagtcgccgtcaaaagcctaccggagtaaaaaattttgggtccgatctagtcatatccgagatccattgagtaaaatgactttcaaaaatgtattctattcgtaaagatcttttagatctcgtcgatagtttctgcaagcttcgccttcaacggtagacggccactgtgcgcggtggaactcaggttagctcgaggaccggagtgtagctagataggggtgggttgggatcagggtgttgctggaggaagaaaacaaagttggggtggtgtggttggaggaagaaaatgatataggggtggtgggggtggactgctggaggtagaagacgaa

SEQ ID NO: 221727 - DNA, 1709 bp, Cannabis indica
agctccactatgatcgcgtgctgacaaaacttctccaacagatgctaatagatccacatgttgcttaattcgaagtagatattcattcaggccaagattacctttcttgatatttgaagctttgttctgaactcgagtatcttggctgagacttgaagtgtgaaatatttttctaatgtacgccagatctgaccagctgattcgcatcccactatgcgagtcagcaaggttatggacattgatgagagaagctaggacacaagtaattgatcttgaacataccactcaatgtaagcaacatttaaagtgttcaaggcttgatctgcatcagataagaacttaggtggaggtgcaacaccttggatgtaatgcagcaatctgtttcctctgatggctgccataacctgttgcttccacaacaagaagttgtgattattgagcttcatcgagagactgtgattaaagaacacagtggatgatttgtttgaatcctttcctttgccatgggctgatccaggatcggttgtatgttgattgcttaaattgctagtgataacattcgccattaatggtggatagtgctctgataccatgttgaaattccttcttgacatgattgcaaaagacagagaataacaaagaacaaagaacaatgaacaagaagaaagaaaacgaaagagagtagagaaagattgaatcaacaaagaaatgattaattattgagctaagcttcgagagcttagaacttatacacaagagaaagacagtgagaagttagttaggacaaccaattgatagctcaccaagattacaacagtattataataaaatcaataagctgacagcaaagtaactaacaaacctaactaacttttaactgtcttaacaatatccatttttctctaattaaagttttactcaaactctccacaaacctacacatccatctccaaagaacacaaatctactatgtttgaaattatgtcttagttatgtgagagtatgaggataattttgatacaatactaataaacaatgtatatttaaattaaattttatatgaaggtaaatttagttaatgtataaaaaaaattattacatgaaaaatacaaattgacactttagttacaaaaatacctccataagttgtggacaatatttatactttttaggtgcttttaattacaaaaatacctcttacacaatcaaacgatggttgctgggtggttggctgaaggttgcatcagaaaacgatttcaatcagatgaaagttgctgggtggttggccgaaggttgcattagacgaaggcttcaatcagacaaaggttattgggtggttggttgaaggttacatcagacaaaggtttcaatcaaacaaaataactattagcaaaatggttatgcaactgtaatgcaactgttatgaaacattaaaaattaggggtggcaaaacaggtttcaacacgccactcgaacacgaacacgacacgaattttacgggttagggtcgagaaaattagacgcgggtcgaaaacgggtcgacacgacttgacacgaaataaaaacaggtcaaacacgacacgacccgcttaacacgaatgtgacacgtttgacacgatttttttaaatataataaaataaagaattaataataataatataataatataaaaatatatatttagtgatttaatgttaagttaaaaata

SEQ ID NO: 221728 - DNA, 2219 bp, Cannabis indica
cgatcactatgaactgagccatccgtgtccttgttgtggggctttctccaactgtcaaaggcagacagatgtatcccacaggtgcaagaccttggccaaagaacctgtacatcagttgtgtacatggtgctagatttatcaattggaacccatcttttcataagttgacttgaaaagtatgtttgaggaggctccattatgaatcatgcacctagaaattgtcatgttccctacttgtgctgttatgaccaaggggccattatgagggaacttgacctaggcaacatcctcctctgtgaaggagatggtgagctttccaagcttaagctgtttgggatccctttcctctacaaccagaacgttgcttttttgctcatgacagagattctgagcgtagcgctccataacttttcttattttgcctagtatatggggtttgccaatgatgacccttaggcaacctaccactgccagtggtattggttctccattttggacaccttgtgtctgtgtctggtcgtctcgcacataacgacgcagatgggaattatgctttctaatcaagaactcaattttcaactttaagtgctctcactcattggtatcatggccaaaatcattgtgaaattgacaaaatttaatggtgtctctcttactcatttctttccttatgggaggaggcttcctgtacggaactatggactctatatccgtacaaactattttaagagttgcttttaggagggtgaatcatgtaaatctcgtttcctctcatttgagccttatggcgtgggggatttattaatttttccctttgtgcctttttcttggacaaagttgttgtaccacacttgcctccagtattttggccatgggagggctggctgcctatgctggcaggcgtgtggggcataactgagggttgtccaccactcaaagcctgtctggaacctacttgtctcccattttgggcctgttagacagcttcttcatgcttgacaaatccttcttcccgatcaaggaaatcgaccatgttttgagttgagtgtcgacgaatgtccatccacaactcactcaaaggtagtatgccactcatgatggttgtgtaccttccttcttccttcagattcttgaccttggtggcctcagtcatgaatcttttgagatagcattttagaggtttccttggcctttatttgacctctactaattcttctagcctataagacattttcaggaagatgagaactgtgtgtaaaactctcttgtgaaagagttccacgaatagaaccttctagtagcatgtttgaaaaaccactactatgggattttagactagatttccaggaagattcgacaaggggtattaacctcaacattttgcaaatccatttgaattttaaaatatttaatgtgagccaagggatcttctttccctgtgtagatcctctaagtaggtctcttaaacttggtaggcaaaggcaaagcattgatgcacccagaaaaaggtggccctcagtcctgttcaactctaagtcagacagctttatgcaagacagaccttgtatcatgttcttgagttgctccaattgtgctttcactaaaggataaacttaagctttgtttgctcaggcaagttttgacctgcgagcccttggctggctaggctgtctggtggggggacaggaaaatggccagctacccccctcctgggttagttcataagtattattgtaagtcttttatttttggtaacaatcaccccaatagtgactactaagagtagggcttacaaaatatgaatcaatagtagaagctcatcaaatagaatgaccttgaatctcacctaaacgggacaacgttagattcttatttcaattgaataaaaggttgctaaaatggtgtctattttagatgagctgacaatgtaacatcctcgcttcaagcctccattgggtccttacactcatggaataatagctcttatacacgagtatgtcactctaggtgcttcatggactaatgactgaccctacagaccaacacaagtggttccatcgtcctttgtcctctcttgcacgcttcctggaaaaacttcccaggaggtcacccatcttgaaattaccccaggttaagcacgcttaaccgtggagttctttcatataggctagcgaaaaacaagatccgccttattgatatgtcactctaggtgcttcatg

SEQ ID NO: 221729 - DNA, 4038 bp, Cannabis indica
tcacacgaaataaattaacgagtttggatcacacacctaaccaaaaatggttcatggatcttttaaggatgggatctttggtggggttgttcttgctattgacaaggattcctttgactggtttgtgatcactttgctgagagtgctcttgctacagaaatagaggcaatttccttagccttgagatgggtattcgatcatgatcactgggataatttcattattctatttgatgccaaggtattggtccatgctattcacaagagaaaaccttcgttatcgactttatttttctccttgttgaaactctcgtagttatttttggattgtaatgttaatttcatttattttgttgataagcttgctaaagatgttcaatctttttagagcgaattaatgaattgtaaaagggagagatttcccaattgtgatccaactcttgtttggaattaatttgacgtgaactgggggattatttatttatttatttttttttaaaaaaagaaaaatttaggtagtttttgacacagttaatatgtttagatatgatatttgcttataatacttattgttggacatgacacatacacaacccaacaagaataccatatctccatatgacacttcattcttgggaggtacttctctcccagcccaattataaaaacatgtttattaatttctttgtgtacgaacaagaagtaattcaatcaaaaatcaaaattcaaaataattttttatagtactaatatctttgaccaaccaatgggaaagtaattatatcagaggagttggaaagtattatataaccaccgtcttataattcacgtgattacatgcattgtccatgcacctacgtaatgagttgttgactatatatattagctttgggagtattactattagtactcattgagctcaattccactctaagttaattctacatataattactcaaatttcaaataacatataatatatacaaattgggcctcacaaaagatccattaactacttttcaaagtaggccttttatggatttggataaggtggaaatagtatcgagtcagccatttttgcatgttatacaacaaatctaattattttaacaaacattatactccactcacaccaatatatattctattatatatttggtgcctagtaggtataacttcacttgcatcaagataaaagtagttgaattttttctctaattatacccttttttcgcctacaattctataaatccaatatatatcacacatattaatttcattcacaagttcacaatcacagcttaacttttatttatttatttacattctctcaacatatatcaaactaaagtacaaaactacaaaattgatatcaaccggcattgacaatttcactaacaaaattaaatgaccgaccaataaaaatattataatttgcgtaccaaaattatactctaaaaattcaaaacattcatttcacacacaatataggttgactttcttcttttcgtgtactaattatgacacattcaataaaattagaccctgaatttaactatttattaaaaagtaaaaaaccgctacttaatcaatctaataagacaaaaataaccaattatgggcctaatcgaaatcaggggaacaaaataaataaataataaaaaaatatataaaaagaaaagaagataatcagccggaaaagccgctcaactcaccggaatttccgagagctgttagactttttacgagaagatatccggtcaacggtggccggttgacttttacatagagcagagctagccgtgatcgccaaagaacagaggtccggcaacgaaaggggtttctgggcacgcgactccggcaacaagaagtagatttgacccgactgaagctcctcctcttcggcggcgcgtgtgagacacgctcccactgacatagtctccgcgctgcagaggaagaagttggggttcttggatgtgatctgtttggcttggatcggagtcgggaactcatggaggcggccatctacggcgttgatcaccttggcggtggcggcggttgttgacagccgtcggattcgatctgacgccgacatttggttttgtgatccggctgttataagccttctggtggttggaatttgagtggaagcacagacccccatttgattttttttttttgagattttgattttgatgattgaattgaattgaatctgtattgatataaatactatatatcgataatgtgaatagatagatggatagataggattatagaagacgtagctaataactaagttagagtaagattttggaattttatgaaagaaacatggcctccctatattttttctctattaaatattattgtagctgcaatttgttatatataaatttatcggctcacctttaattaattaaattgttgtatatatattttgccctccaatttaatcattttagaaacaaaattaaagctaaaccataaggcgtatctttaatattgatatttatatattttcatttaataaataatataaaaaatcactgaatgccaccctaatgtgatattgagcattgttatttacgtttttagattgatgaccgacgtacttccaaagtaataaatcagtccacagcagagtcaggcaacaactctgggtctagatgcaagtccaacttacaaacatgataagactcgagaaggccagaccactttggttcggaaaagctatcttgcctagaagacgaaaagtccattaggataccatcaaggagtaattcaaaacaggtaactgaagagacactcagaagtatcaggaaaccattctacgtggcatcctccaggcacaaggccccacaaagtcagaggtttgccctatacgtcaggcgcacaccaccaaaagaaaacacattttggtccaacctctctataccaacatggttgtgcacgacacctatcatcaccaaacaccccacacatgcggatgaatgttgtctcataaattaagccttacttaactggcacaagtcaatatatattgtatattttaccacatcactgtgcctagttgacacatttaaaccctacaaggtccgagttcacctatacccaactcaagcatatacataaagggttgaaaaattatttctcacgtcaagggctaaggattatggtttttgatgaacttcagcaataatactcttgcgtaaaaatgctttaaaattgttctactttaataatattgactcatgaactaagatttattaatggtccaaccacgtaaaaatcatcgtctcttcatttttaattttttcctcttcaagtttaatctatttattaatcaatttttgaaaatctcagtaaatagacaccttaaggtgccaatagtaagaaatactaaaaagcatcagtagtgtctaacaccctccacagtgtcatatcgctattgatacaattaagtatatatcatgtctcatatactttaatacaataaattttataatatatcactaacaaattgtaaggcaccatctctaaatggtgttggacaccactgataccttatagcaatacttttctaaaaatgccatgtgacacattaaggtgccaagcaccacaagacatggtttactgttattattgcatttaaatatcaagtcctaatttaataaaagatacagggaactgctaactgattataaatacacatttggtaccttgtgttttgtcaaataataaatacttagggcttgtccaaggacacggtattttatatatatatgtcgtttcattttgatccaagggggcactattaaagataacattttgaagtttattcttgttaagctatttttagcctaagttttgggtcacattttatagttgtttttcttccttattattgtttttggaatagaattacgcttgttttctatgatttcaggtttctacacttgggatgtataaattggataaatttcagaaaacaatgatctataaaatagagaaaattttgaaagagaataaagctgaa

SEQ ID NO: 221730 - DNA, 2149 bp, Cannabis indica
actcccctatctcatatcaggggtgaagctataaataaaattgaagagagatgactacatatttttatatcttgtccaaactttaaaatttcaacaagattatagaattagatataataaaatatatttaattatattaaaatgacttttatggaataacattttatattttcatcttacacagtttctaagtaattcaaatctgaacaataatattttagctattcttcaaaaaaataaataaataaataaattaaggtgcggaatgttgaacttgtgacctctttaacttttaaaatgatcttcactactacatcaaacgatcttacctaattttgtttgaccagaaatatatttgtataaagccctaaaaaagacaaatcctatcttttctactcctagagaaccttgtgtgtatcaaattaaatatagaaaaatatataaacttcaacttgtataagcaaaagtgtgtttttttattaaataaaataataaataaatcattttctatggatagaaaaaattttgtatttttttaaaaagaagtattttataaataacataatataagttattttgtagaaagaaaaattattaaagaaaaaaatttaaagaattaataacaaaatgttaattggagagaaatattgagattgacctaaataatagtgtatgtatagttgtaatttaatatcatgttaattatataatttacttagtgaaagctcaaaaatattatagatgttgattgtaacttataatatactaatgttgtataagttcttatagaaaatttatataatcttatatatatttatataagtctttaattatttttttatttgtagtatacttcttatatgtaagttcatgtgagtctatatatatgagatacaaatggactacagcaaaatttataaatataataaaataattaatttaaaagagttaaaagaagagaatattaaaatttttgtttctaataaattttaataaaaaaataatttattagcaaaaatctattaaataaattttttaaatatattctaattaaataaagtatattaaatttctaattaaaatttggataccataatttttaaatttcatagaattataaaaatagtaatctgattccacgcaacaactataaattatttaaaaagtctaaatatcatctcgaaaataaaaaatatactaaggacatgaaataaattatactgatatgtataatttattatttaatacttttaaaaagataaagaataatttatttgatatttgaacatgtatcagatggctgatgctggaatcaagtacattccatccaacaccttttcttactatgatcaggtgttggacaacactgctatgcttggggttgttcccccgagatatggttggaatggcggcgagattggctttgatggttaggggtaatgccattgttcctgctatggaaataaccaagtggtttgacaccaactagttagtttttatttatctctattttattttttagtttttcaaaagctatcaataagtttggtaactttgtttgaatgaatgactcagctaatgttgtatatcttctttgcgcaaccactatattgtccctgaattgggtccggatgttaagttctcttatgcatcacacaaggcaagaatttaaggaagctaaagctgtaagtataagtgtcttacaaatttctccattcttttatgccatcaacttgtctaagaatttgataacatgaggggaagttccgcaataatatcttctgtttgtttgttggtagttcgttattaaaagttatttttaatttgctctacaaattaattacataaatcagagatacttctattctcataatttacaactgttgaatattgatgattacagaagatactattaaagaattcaaatacccaataaatactttcaattaataggacacacacacctgagtattgatatgtgcactaattttttataaaacatatgacatgtttttcacccagacataattagccataattatttgagggtaggatccactatgttaagaaggtatgccatgtcattgtgagtaaaatcttggtaagttacttgtgtgcacatatcattgctttcaatctctatatatat

SEQ ID NO: 221731 - DNA, 2090 bp, Cannabis indica
aaaaatatttaatatatttatggcaacaaataaccttaaaattaataaaagttaaaacataaaaaggttactcttttctagatttctacaaaacccaccttatgtgaaaggatgccttctttaaaccacctaaacactaacaataaataataataatgttgcattgtcaactcaacttttgaaaaacagttgaagcaaggacataaacgagttcaacaccgaactggaaataccaaactcggcccgctgcaatgtcaccgcactgcaatgatgctgaaagaaaacagtgttgtatgtggtatgtgatggtttcttgtatctgtttggacatgattgagaagctttccacaatcccattgtggccaaatgactggaatataatatgaacatgcatgatcaatatcaaaattccaagtgagattccatggattaagtttcacagttggcaattagaattttacctgttgggtgttgatgttacagaagctcaactctgcatagaataaaattggggagccagttcagttaaccacaagtaatcaattctagttattttgtggatatacttatggttagtttggattagttcattgtagattaagcattctggctttttctggaataacacagaagaagggtggatctgcaccatctgaccacttgccaaagtcctgccattttgtaaaatgtgatagaaaaataaataaatacaagaacttgaacaaccttggccaataaagagctctagtagatgaccttgtttgcctttattggaaaataaaggcttcaaagttccaaaagaaatgctaagttgatacctataggttccctcgggttgctttagagctgcattgaggaagaatgaagcagcaagacatctgcggaagtttagtgtgtcgtctccacaagagacaatacgaagacccatttgttgaacatgttctcggatttggctgccagagaagacacagatgcatggcttgaccttggagtcacttaagaaatcataaatgtaaaaaccattattaagcaaagaataagcatactaacttgtgaatatcacgggcatgtcttagggagcgactattaatgaagttttccttgcaccattttcttaggatcttgtcagctttctctttaccacaggtcaagttcttcttctccataaactcgttagctgctcgaaatacattaatcaaagtgaggtgatctccctcaggacttgaaaagaatttcattgcagctcttgcctatcccatacaacaaatacatacaataatattagatcataatttaatataaaaactttaaaaggaaagaaagtacttaagaggataaagatttgctaatcaacaacttgtttgtgtaatagttttatctttttatataaagaagcatatgcacgcacctcatctaacttgtcccggggagcataaaatatagactccaccgaaagcattgcaacagttatcaacatttcttgcaagcacttgaactcactggctacgataagggcctttgaataaacaggatctaaaggaagcttcgacatttgacgaccaactggatcagagagtttacattcatctgttaaagcacctagcaaaaacaattgctccaatgatttgacaatagctgacctgcttaaatatatcaatttagatcttatgtattcagaaaagttgaaaaacaacgaccaagttgacagcattaacttagtttaccaatcacccaaatagccccctccacgccaatatatatgaaaagaatatatatcaatacatatacatataaattaaattccacaaaattaaatattgtactccataggtcgtaggcctgaggtgcatcaaaaatcaactctagacaaattcatccaaaaataacaatgagaattttgtaagaaaaccaaaatgccagattcataaaaataaatttttatcgtccaaaattataaactaaaaactaaatacccataactaataacaaaagcaggttcataagctacatacattcacagttctatgaaaaagaaaaaaaaaaacactgcaccttgaataatggtacgaaacaaaagtatagaataatgg

SEQ ID NO: 221732 - DNA, 1614 bp, Cannabis indica
tttttgttttggggtaaatcagcaccaataatattaggcctgtaaattaattctctattacatattctcaaaccactctgtcaatcaagctcaaattctttagcatcaccactcctattttttatatcttgctgtatttttttttaaacgaactatagtagttaattacttttgattccacacaacaatttcgacatgcccacaagtactataccacctctgtcaatgtcaacacaaccacctgttttctaaatttagatagatttacttgtatgacaatcaaaaaataagtggtcccttgactcctttttccagttcaatactattcttgctaggcttaggtttggaaagctatagactaattggattttggtgtaattaatagaagtaattatacaatttcatgcatttgtattattgtgtacttagagtgtaactactcttcaattcttatagctcgcatgagagttagtgtatctactacaaaagattcattttaactaacaaagttctatttgcagacaagtattacacatctcaaataatttaaaaaaaaataagtttaatataatttttaaaaattactcttaatatttttaattttttttttaattttaattttaatatttattttaattatattttcaaattttaaatcatgtgtaattttttgtctaataaaatttcatataattttttattttattttctgtaataatatttaaaatataattttttataagtatactttttaagaatattaattagaaaataaacttaaaaatacaattaacataatcaaagatatatattttatgtaaaataaaaattattataatatagagtgcaagtattttataaatttttggttgtgtacataaaacttttcttcaaagcagttgtttttttttttttattttaacagaattttacataacaatacagatagtaactaacagaacaacttatattgtaagccagattcacataataacccacatggaaactattagaacaaccaaacctataaaaatgatataaaaaaaagttaaaaattggtatatagagtaattcccttcagtatgaactactaatatatatattcttgtgtaattactaattattttaccaaataaaacactaaattttatatttaaatacatttttttaaaaaaaatatagtataattaccactaccatatatatatagttaatttaatgtacttacactcttcaattcaagaattgaatataattttatatgtaaattgtaattattaactatttatcaaacaagaaataataatttatataaaattaccattttaattatatccaaaatctaattatataattacagtaccgacctattaattacacttacttactttttaagcaaaaccaaatgatatgctcaaatatttttcaacaaattaaacctatacatttcattgttcatataatattcactacttcatttttttttattttgaaatagacaactacctaattggctatatatatacattttctatcaaaaaaattgactatatacatatcctagatgatttttacatgggacaagaaaattattattgtgtactgtaacttact

SEQ ID NO: 221733 - DNA, 2528 bp, Cannabis indica
ttaaaactaacaattaagtatataagtttatattattatacatttaatcatttatgttatatataataaaactaaaagttaaaaaaattaaatccaaaatcgggttggtcgggttggtcagtttaattgggcgggttggacgtatttttaacccgcccaattaacagatttgggcggtttgtaattttttcaggttatttcggtttgtaatttttgtcggttttttcggtttggtttgggcgggttattcggtttgggcggtttacaaatttttttttacaaccctattttaaacataacttcttctttgttgtatagaacgtgttagtgtaaattatttaaagtaaatttatttagataccacaaaacttttaattgggcaagagtttaccagctacttgtggaaatctttactggatcttgctataggcatgagctgaattgtagaaacctcatccattggaaaatatcactgggtgagaaacaagagttagtgttggctaccatcacatgatgaaatcagtaagatgctttttaggatggggagtggtaaggcccctggaccggatggcatgtcagtcctcttctacaagcactattgggagttcgtggggaatgaattttgtgaggttattctggatttcttcgttacgggccgtatgcacaagggttttaatgataggaatttagttcttatccccaagactcaaaatctgaaaagaacgaaccattataggtctatttctctgtgcaatgtaacgtataaggtcatttccaactcattgccaacaaaattaagcccattctcccaagaattatttgtccgatgcaagcggcttttgtgctgggtaggagagttcaagataataatgtaattgttcaagaaattatccataccttaaccgtaagaacggtaaagaaggcttttttgcaatcaagattgacctgatgaaagcctatgatatgctgagttggaagtttattaggcatgtgcttgagtgctttgaagttatggagaaagtttgtaactgggttgagcaatgtatttccaccacctctctaaatgtgtgccttaatggtggtcaagttggtaagattaagccctcgtgtggattgcgccaaggtgacccgctatttccttacttatatatttgggctgctgatattctttctagattattgaatgaagccttggggaagggagttattacaggaattagactgagccgaaagggctcgtttctctctttgcggatgacatcatcttggttggtagggctaacctagaagaagctagaggaatctaggactgcctggaagagttctgctcttggtcaggccatcaggttaacaagcttaaaacatctattttttttagtaagaataccctagatcaggttaaaaatgaaattaaagctattctgggtattggagatgtggttgcaaacactaagtacctgggactccctcttattaggtccagactaaaggatgcagactacaacttcattttggaaaacctgacagccaagctgcagggctggaaagctaaaactctctcaaaagctgttcgagcgaatcttattaagtcggtgggtgtatccttgcccagttatgccatgcaaactactcaactatcgaatggacttatgcataagattgatggcatggttcgaaacttctggtggggttttgagaaagacaatcacgggatgcatcttaaggcatcggataaattatgcctctgcgaatcccgtggaggtctgggttatcaaaaaatgaagaaaatgaacctggctttcctggccaaatgggagtggaacctgttaactggaaatcagtctctctgttgccgaatctttgaagcaaagtacatgaaaggaaaagatttcctctcctacaagttcaataattcagattcgtggttttggaagaatgtggttaaggccaaggcaattttgagaaaatgggcttgcaaactagtaggggatggtaaggatacgagaatttggaggatccctggttacctcatggacgagatttctaccctaaggcaagaaatgttggagagacggttggcttggtttgtgatctcctttcggaagatggagattgggatatgcagaaattaaattctctatttgagaaagagtccgtctcgaccatcctaagagggggaaaccctctagtcagggttcagataagtgaatctggactaaagagagtaatggccgattctcgtataaatgtgcttatcgtatccaagcctttgatagggcgcccacatcaatgttgctccttcgctgtggaacaagatgtggaatagtaacattttggaacgacataagatgatgtggtggagcattctctcaaaggctctatctgttcgtgctattatttccaaaagattctatattgaggatgcatcctgccccttgtgtggggctaaagaggaaacattagaacacttatttctcaattgtaattgggccttgcacttgtggaaagcgtccccgtgggggattttt

SEQ ID NO: 221734 - DNA, 1884 bp, Cannabis indica
atttatattttttttcgtaatgtacttaaaaaagagcaaccttgtttttcagaaattcaggatttgtagacaaggattgaatcaaagcatttcatcctgttatgaagagattaaaccaagtaaatctgaatcaaaaaaacttggacaagtgaaaaaaattctcaagttcattagaggccatatttatgtataccttaatccaaagtgctgaacaatcaaagttagtgagaagccatttgtgtgcattcatgttgaacgagtcagcttcttcaaccccgtcgatgtagtggcgatattcgggacatatgcaagcacttccggcatatgcagcatcgatatggagccaaattccataactctgaaaaaggacacattagtaccactataagattttgaatacatagatatttggtgttggtattagttaaggtttcatttaccttggtaatctttgctaaatctgttaaaggatcaactgcagtggatgaagtggtaccaacctgtagagacaaatgaaaaggcttcttttatcaacaaaagaaaatttgaattggattatgtaatgcaataaagtctacttgacacatttcaaccacttggatcaaaagatttaagtcaaatttgcaacgaaacccttttaacatttacaattgttacacaaatgacccccttaatatgccgcgcaatgaaatattgccacatgtgtcatatgtatcatttaacaggtttaattagcacttaacaacgaaaagggtagtgttgcaacaaaatcttaacagaagggactatttttttttactagaatcatatgtgtaacaattgcaaatgttaaaaaggtttcactgcaaataactctaaatttttcttattgatttgagcaaataatagatttaaaattgagaaagttctcatataaaggctatctagtagtacttaagcagagaaaaactacagatgaatacagcttagtatgaaagagttgtcatttcctaccgttgcacataagaaaaatggaattaaaccattggcaacatcggttgaaatcgcttcacttagtgcagcgggagagatggcgtaattagtagaagaatctgttcttagaagcctgcaattctctggatgaatgcccccaatctgtattttaaaccataataatcacatttaatttaaacaagcattatcaatacaaacacctctcaaagtttcaaaggcttagaaagttcagcctagaaagagtgctgcatagattaaacaaacacttccaccaaacatgttcaaggaaaatagacaaatttccatatcagaaaaacatgtagcaatagacttagctaagacattggaaatcttaaacacatgagagagattgatatagaagatacctgacaagccttttgcaaagctgaatgagtctgatcagaagcataaacaacaagtttcccaagagcatttttaccaaacttgcccaaaaacttatcgcgagcagccaatagtacaacaagaacagcttcacttgctgtgccctgaatgactccaccaccttgtcctgtataaaaaaggaaattccaatcaaaatttcatgaactaatcacacttcctcagaaaactaaactcagctataaacaagttctagatattgatcaatctaaacaaactaaggctgcgtttggtttggttagaagtaatgaaatgaaaaggaattaagtttgatttcattcttttgttcggttgcattgtaaaatactcgaatgtcattctaacagtcggtaggaataggaatgaaatataacggaataaaataaaaaatgcataaaaagaattgataaagaaaaattaataactttttttttgtaaataccattttagatcttgtgttttgcaaaagtt

SEQ ID NO: 221735 - DNA, 3085 bp, Cannabis indica
gtgttggaagaccattttccatacatctcttcatgtcattcacctcttcattccacactcttcatatttctactatttccttcttactattttctttctacaattttacattttgaagagcatgtcaaatatgtttatcttttgtaatttttacttcaatctagttatgagcttctaattttttttttaagattattaagataatgatgaagcaaaatataactagataatatttatttttgtatgttgatttgccattggtgctataaagttcaaggaattttctatcaaaaatatgtctttttcaccttcaatatcatgtattttttattgttagagcatgttacacttggttcttcattatgcaaaaatatgacattctttgattaaatgtctttcgctaaattgtttacttataattcttagaacataagtatcatatttttcctaaacctaatttctttgattttgtgtagttttattaaattgtaacacatttaatgattagaaattatacattttctaagtgaagaaaaatcctacttttttgaaagaaacttgttttgaaatagaaaatatattttgaaaaatatagtgcaatttatttcaattatatatgaacttggaaatcaatatacttataaatactattgaacttgtattttgtagattctaatatcttaataagcttatttagacatcttattttgaaatcattttcatactcactcatctttaatcataagtcttttgttacttgtctttcactttatttttctaaataaaaatctcatcaaatctttggagctaggttagaatattcttattttgtttgaaatagttacttttgatgttagtcaactcccatcggttagaccttgcacttacatgaacaaaatattccgaaacgattcgtgcacttgcaagtataaatattaaaacactcacttttggatacaacatatactcatctcattaatctcctcattgcgtagctaagtccgagaactagaaatcacagagtagattcgcttttcctttcctggtcggtggtgcgaggtgtcggggtctcctggtctcggtggctacgttggccttaccaaagatggggccccaagccttcgcactttgcttccttcctcgattatattccatgaacattatattccatctcactagttgcttgtcgggttgtccatgggccacctattcccttcctccattaagcgttcataaccattcgtgcctcctctattctggggcatctagccacctatacccattccccagtgcgcaggcattggtaggttaggccttgaggcgatcacctgaaggccatcgatttgtacctccacctcttggcgaaaattagaacgtctcgacttcttctcaacgattctaggtaaagaaatggcgttcttttgtgtgtcgcttcccacagaccgcgccgaattgttgacggtaagaactcgtcaaaagaaataataagaactcaagacaatatttcaagatctaaatagaagaatacacaaagtgaattttaccctctttactattcaaaaaaactactatttcactaatattttttctccaagcgagtcccctttacaatgagctccaaggctctatttatagtgagttctttacattttacaacctcattagatccctaagtctaagtatgtaaagtcactttcacacagataacctagaattacaggtaacctgatgtctcagacatcttaagttacaccagaacttcctcttttacctgtacctgagatgaaatgaaccttgtcccctataccaatacttattgtgtcgtcgctatcttgcctggggaaccatggcttaaccaactctagcctcgatatcttctccttacttccattttcatgaggagactaggtgcatgggaaccgcgggccgggggggggggggcgaggctagaggtatgcatgctggggagcctccctatgcgtggagaagctaacagcgtggagcctccctgtgcgtggagcagctgctacgtggagcctccctgtgcgtggagcagctggcagcatggagcctccctgtgcgtcgagcagctggcagcatggagcctcttctgtgtggagcagcagcatccttggagcctccctgtgtgtggagcagctcgcagcgtggagcctccttgtgcatggagctgcccgctgatgtctgtggagctacagaggaaggaagaatttgataggatgtggagatgtgacgaggagatgaggacaaaagaagtgaggaccgtcctttttcccttttacttgtcttgaaaatttttcattattcctctttcttttattgtctataagaacacttatttgctgaatttctacgattaacagttaccaaacatattaattaataggtatgtgtatgttagcatttgtagagtaaaataattaataaagtgaatcatatttaagagaatccaagattaaatatattcattagagaattttttctacaaaataacttgtcgtgaattaacttataattgactgcgatgcaaacaattcaaagaagttaattaattaattaaactagaggattaacaaaattcaaaaaaaaaaaaaacaatgtaagaaaaccaaatgagtaataataatgatgtattttaacataaacactacaaaaaattgctatttttaatgacaactttttagtcacagcataaattttttgtgactaaacgtgacttttagtcacaacaaaaacttacttgaaactaaaacatagtatttagctacaagttgtcacgaatttaattttagtcaagtcacaacaaattgtaatttttgtaacgaatacttttagccacaaacctttcagtcacaacataggaatgataattgataaattttgttgtaactaaaactaaattttttggtagtgaaaatatgtgctgaaagattacacatactaattatatgcttaagaagtaaggagaatatgaagaatatttttttacacattaaccacatttattttaaaaataaaatttaattcaaatatatattatatcgaaattatcctcacaccctcacat

SEQ ID NO: 221736 - DNA, 3013 bp, Cannabis indica
ttgcttactctttcactgttttttattttctagttttaatcctttcttaatttttatttaatcaaatagaagtaaaagtttaatgttaacatacttaactacaatcctttgggatcaacctcactctcggtgagattactacttgtaacgatacgtgcacttgcgtgtgcaaaatttcacaacaagtaagtcctctatattctttagtgccaataccacagacacgatcaaagctagaattttggctttgcttcatatggagattgcagatgaaaattgtacttatttgggtctcctatgcacgatgagaagaaacaaaaatgcaatcttgggttttcttgaggaaaaaatgcgaaaacaaattcagagttgggaagggagactcttgcccaaaccaggccatgaagtgttattaaaagttgttgctcaagctcttcctagttatacaatgtctatttttcttttgcccttggagacatgttctaaacttgaaggcatgatgttgaagtactggtggagcatttcctctaataacacccgtgcaattagttggatgagttggaagtgtcttactaaacataaagatgatggcagaatgggttttcgtactcctcatgactataacctgtcacttcttggtaagcaaggatggaaccttctcttaaatgaaaactttcttagtgggtgtgtttataaggctcggtactatccttgagaaaactttctatcagctttccttgggggtaatcataactttatatggaaaagtatttttgattcccaagacctggttaaggcagttgctagaatttgtattcgttcgagtataaatacgaacattctcaatatgcctttgcccccatctgatgataatccttatgtcacttctactcacacgatgttacaacatagcaatgtttgtcagcttatcaagattaacaatagagaatgggatgctaatgttgtccatgatattttcaattcaagggatattcagcatataatgagtattcctcttagcaagcttactaatagtgatacctgctactggaggaaggaagcaactggtatctaatggacgcgacatctgaaatgtggaatcacttttggaagttaaaaatacccccaaaagtccttcactttgcttggagagctttgtcgggtagtttggcgactcatgtgcaactgtaaaacaagcatgtctcggtcaatcttcacttcctattctgcaatggagctgctaaaactatttactatcttcttattgagtgttccttctccaaatcatgctggaacgtgtctgctatagctttacctccattgacagcaactgacttccatgactggtttactgaagtttggtcacggcacaagggtgatggtgttgaagaaattttaatggtcagctggtccatttggaaagctcgcaatgagcttttatggaacaatcgtactcgctcaactgctaatgttttgtctattgcacataatgttcttggtcaatggaaatatgctcaaacatgtcattttgagctgttgcactttcactctgactgtggtggcagcaaggatttttagactaaacctaatgaaggaatgatcaagattgtggatggagcaacctttgaagccgagaatgcatatgggattggtttaattattcgtgattcaaatggtgctatcattttggctactactacttactcgactggttctttaagtgcatcgatggctgaaatgatgagcattaaagaggatttaagttggataaaagcttctaatctttcaaacattattattgagactgattgtcttattgctatacaagtcttgcacagtttggtggatatgccttctatctttggttatattgtgcaagagtgtaaacttttattatcttcgttcaataatgttaatgtttatcatgttaaacgatctgctaacaaggccacacactatttgactcgtggctcttgttattggtttgatcgtagttttactgagagtactagtcctactactcttcagtcttttgtaattacagatttggctatttaatgaaattctctactttcaatcaaaaaaaaaaaaaataagtgaatagagagagattgactccatctaaaaccgattcccatattaagctcattttcaatttccatcaatagtatttattcttgaaaccagcaactaaattttttcaccaatatattgtttaagtttttcatcaaaaattcaaaattcaaaacatatctttttctaattttttctactttggtaagtaaaataaaaattagagaatcgtatcatctagtggaatctccaatgaaaaatttatcaacaaacaactcaatattcaatcaaagatttaaggtatgcatttcatgttttactctttcttcaattgtaatttgtatgattttatctatgttgtttattatttttcaattttatatttttattatctttcaactcttatctattatcatcatcatgtcattatctctattctcttttatttttttattcttaaaaatataaatttaagtatttatataatgaaaaacttaatagagaaaaaaatatgtaatttgttacactcttgtttaatgtcgtcaatccatcatatttttttttaattgtaattatttaattgagattaattattgattgttattaattagttaatcactacttgtagtatgttttcttattgtagaaaaatatcgttgcataaatcaaaaaattaatttcaaatgagcattagacaattgacgattgtgaacgttctcaatttgaagctttaaactttgaaacaaaattagcaacgaatacagataccaagttatttgtttccatgtttgctcttctaattaataatcttactctattgatcattctttgaaacattatattcgttgttgttgttgattttttttttttctattatgtctctaaaacctaaaaaacaatgagtctcggtatgaaaagacgtaagaaaaagaaaaaaaaa

SEQ ID NO: 221737 - DNA, 1121 bp, Cannabis indica
atatattttgatataaattttcttacatagatgtaattttacagaaatttgtataattgtgcataataattaaataaatataattgatatactaatatctccatttagttcacttgtgaataataatttttacaaaagagatattgttaattcgaaaaattaataagactagtctttgagattaatcaacgttaattcaagagactagcaggactagcttctaaaagtagtcacgagtaacctattcggcatgaacttagcatgcagccactcaacatgctacaacttgcagccacccgggatgtagcagtttgcagccactcgacatgttgcagccactcagcattctgcaacttgcagccactcaacatgcactactaggcatgcacccgacatgcaccacacaacatgcaccacacaacatgtacttgacgtgcaatcactcgacatccatgtgtgtatgcctctcaacacacttgcttgaatgtgtctcgacattaaatacaacatttggacattgcaatgagtcacgacatctctcaacaagatggccaatgcttagtgagttgtaaggaaagtaataaaaaaagacatcacacacgagtatagtcacactatttgacacctgagtatggggagaggacgagtaatgggggcatctcgtctacaagctctgatgttttgacaaaaggtacactacagccactactcgtgcccctaggaccacctaacaccactattatgtactgccttccaaatgtcacaggcatagactaagcagtcatactgatctcttatttctttattaaatgaagccagcaagatatacctagcacaattattatcatcatgacatcggttaaaagctcccctaactgcatatccagaatgtttacgtaattagatctagggagatttaatagagattaattgaaatagattctccttttgtaagagaagttctatatagattctccattcggtttgaaagttagcatcaaatacaattactctataatagggatagtcattcacattgtattgttgttccattttatttgttattagattgaaataaaatacaaataacgcaggaagtaagcaataggatataaatacaa

SEQ ID NO: 221738 - DNA, 2139 bp, Cannabis indica
gcaattttgaatggggaacaatcagtaagaatttcaataaatcgaatgtttggtgattccaaaagtcacaagacttcgcttgttaaggagtatcggcctattagcttttgtagtgtgatgtgtaagattgtggctaaagctgcgacttaaagattgaaaggtactttgtctccgctgatatcttcgtttcatagtgcttttgtgcctggtcgagctattcatggttatggtgggctttaaattgctgcattcactttttaagaagaataatggcgttaggggggtttatggccttgaagttggatatgattaaggcgtatgatagagttgagtgatgtttcttacgtgaaattatgagcaagtttggttttccatacaagtgggtggatttgattatggattgtgttactacggttgagtatgcttttttggtcaatggtaagcctaggggttgtgtggctcctacaagaggtttgaggcaagggtgtccactttcaccatatttatttcttttctgtgctgaggcactttcaacccttcttcgacaagctaagttgaatggtgatttgatgggatttttgtgttctgggtctgggcctcgagtgttacatcttttctttactgatgacaacttgatatttggtagagccaatggtagggaggcagaaactattcatcgaattctttagtattatgagcgtgcatcaagccagcaagtcaattttgataaatctgctatcacatttagcctgaatgttcaacatgaggatcgtacaagtgtattgggtatattaggcttaaggttagtggcgactcatgataaggtcttgggcttgccaacagttattgtgaggaataagaagtggacttttgctagtgtttgtgacaaagtttagaaacgggtttgggggtggaagcgaagtttctttttggcaggtggccaagagattcttattaaggccattctgcaagcggttcctaattatctaatgagtatgtttcagctacctgtggcaacgtgtaataaactttgttcaatcattctacaattttggtggggtacaaagagtgataagagaaaaattgcttgggtgaaatgggagaatgtttgtcaaccgaagtccaaggggagtttaggatttaaggatctgatgctctttaatcaagctatggttgctaagcaagtttggcggttactccaatcgccgaattagttgcccagatgtgtcttgaagtacaagtatttttcgcacacatcaattttggaggctaaagatcgccaatgatcgtctcatttgtggtcaagtctgatatagggttcggagttgttgcgggcggggatgaggaaggtagtgggggacggccagagtattgatgcatttcgggatccttgaattccccggcctagaacgtttcatcctataacggctgttcttacaggtagtgtgatggttagcgatttaattggtgtggacgagtcttaggatatccatacattgtcccaatattttttgaggttggatataaatgtcatactcggtatctcgttggggagtggtgtatgtgaagatcagtggtgttggcattatacttctaatggttgctatacggtaaaaagtgggtatgcggttgctcttgatatggtgagtgacaggaatggatgctcttctgtgaatcaatcttaatggtggaatgggatgtggaatttacaggtaccatagaaagtcaaaatatttctttggaggatatatcatcgggctctcccaactaattcctaacttatcaaacgtaagattcctgttcagctgatgtgtcacagatgtggtgaggatactgagacttcggagcatgctttagttttttgctcttcattgtttccaatatggtctaagcttcaggtttggagtcttctataccgaggtaggaatgggcctttggcagagttgcttgtttatctttttgatgagcttggtcagactaattttgcgttgttgtcagtgatttggtgtgggtgtggtatgataggaactctgttctgtttggaaaaaagcagtctagatttgaagtgattattgagttagctaaggaagttttggaggagtttcagagggtgggcatgagtgctggaagtcgggtttt

SEQ ID NO: 221739 - DNA, 4288 bp, Cannabis indica
atatggtacgtatacttattaccaactacaatatgtatcatcattttacaacttaatatttattatgtttatgatctaataattattatacattaattaatgaaggattccaagaaacccttgaaggatgttgtggaacagggttgtttgaaataggtccactatgtgttgtgggtatgccaacatgtcttgatgcctccaaatacatcttctgggattccatgcacccaactcaagctgcatacttggctatttcaaaccaatatcaacaattgcttgatcagtaccttaactaaattctttcatttaatacatattagatttagtttgctaatcgttgattatttgattagtttatatgattctagtcgtttagaaatatatttataactatttttggctttttcttaaatattccgttagaagagagagttttagttaccaaatattcttggtagcagttagtatagttagttactaaagtttgatagcacacttattaagttaccaaatattgttggtagcagttagtatagttagttactaaattttgatagcacacttatttagttaccaaatttaattaaagaaattatgttattttggttgcatatttatagttgcagcttccaatatttcgatttggtccccttggtacaaatttttacccttctgaattatattttattttaattttatggatttttttaatgttattaaatttttttatggtatatgaattatttttttataataatgtatgtgattaaatctatcaatatatatttgtaacaatttatgattttttttttaatttctccattgattcattctaaatgttattcatgaagaaaatgttgataacaagcaaaggatttttcctacttaccaaaaaaaaaagcaaagcatttttccaagctccaaatctaatacgacaatagcccgtagctaccctacatgggcggtttttaaaatggctcacgtaagactcggtctctagactctgttgtttattagagccgagtgcgcatataaataatagtcttttgcactatacaactagaattttcagcaagagtatacaaactccttaatcttgtttcacactcttacccttctttttccaaatttcgagggttgtgatatgcaataagaatcttcattattcaattacaacttaataagtgcaatgcctctgaattacaaaagcaggcagaaagaatacagccaactagtcccactgaatttccctgtgaaaagtccactcggatgggtttaatgtcgttttcccgtcagctgcaacaagatcatatggtgagtcctctgaaaattctgttggcatggatttccagtgtagacatggcttccactcagcattcttgagtaccttcaatatctcctccaccactaccttgcttccttcttcggataaatgaaccccatccctgaaaaataaaaaaccgaaagaagctaaatttcctcttcaaagggaatgcaaaactgaatccacaacattttgtaatcttctatcatgtaagagtaagaccactgatttatattcagttaaacaagctttgaaagagtgtttgtcaccggggttgcgaaaagtgacaacctccattagctatgatcattgtctcactaagtcatccattcagggatcattagctgacaaatggagaaagcagtgttgataacttgtgagcgtgcatttacacaaactactgccattgacgaccaccctaccaggtatggttggctaattcgaacaatcattaatccacactaatcaacgctactagagaactcaagataatagcaggataaaaaagaaagcacgaaaacagcaatggacgattcaggtcaacataattcactgtcaaaatcataaaaaagaaaaaaaaaaaaaagaacgaccagggggacttacgtaaagcaagcattcatccaatcatctctgttctgaaacgcggtaaagagatcaataacctttacacctgtttccttgcccaccctcaatgcaaccttctgaatattgtcggcacaactcattagttcttactagctcactgaagaacccactgtataaaacacctgttttagaactctgttgtattactatggtaagaaaaataatgtagatattgcataccttgcatttccacgaattttctcctcattcacaggaggagaactaagaaaaataatgcgtattgaatctgaaaggctctggttacaaaattattaaggtgtgagaaaatgattcaagtaagaaagcaaagcaaatggtttaaattaaatgttggtactttcaaaccatgtaaactaaaagataggatatacaatggtataaagctttttaatataaactctctccttgttctgagtcaattatcgttctactgacagttgatacaaactaattttaacaattcaatatatgatattgatcccaagaagtaaaaacccagatgcccattagtgaaagaaaaattgaagaattcgtgtccaaatagacatgtcatggctataacttaaaccaaagtcttcactaagtcataacaagcctgtttcttcgtcacacacacacccctaactagggtctatttcttcagtccttagacacaatgataaattgttatccgggtgaaggaagtacctggagatgttttgcaatctttctcatattctccttgtattcaggaagtggtacatgaggtcctagaccggacgagtgaggccccattgaatcattaccaccaaaataaactaccaccaaagatggctgtacagaagcatcctaaaacaaatagaatggaatcagactacaactaacagaggcgacaaaattaatgctcctcaaagtaatgccctttgttgactgtcaatcaacaaagaccattatcaccttcatgtttcaacaaattgatacagaaacatctatatatgagcatgcaagcactgtgaatttgataaaaggtaagagcttgggagagaaagaaaatgatgtttttgcagctagagtatacgttttaaagcaaggatagacagataataatagtaataatattaagtaaaagagactaatatgttttgtagctacagtaggtgttagtaccttcggaaaaacttgatccagaacctgtacagcacgacgtgagttccaaccataataccctcttaacaagatgtctgcctacaaaagttcaatacccaattccacagatgcatcagcaaaaatttcaaaatagtatataaaggatcccaaatcaagattaagagtaatatcttcatggaataatatatatttttccaagtcaaaaccatagcacatataatatagaatcaatcttcaaccaatgacccttgacaacctattgttccttttgccagtttatttgaaatgaccgtgtgtttgtgccccaaaaagaaacacgaaaacccaatctagcactaattaataattttttaatattaattaaataataataataccataaccaaccaaatcttcctgaagaactctttgagaaatgttttaagagaaacccatttttcacttagaacaaaagaacttttttttactcaaaaaaaaaatatatcagaccaatttaaaatattatgaatgatttaagggaatttcaagatgaatttttataatacttgattatgcatagaaaagctcgaagaatatcatagacatcaatatcaataataaacattgttccattatatatccactattataaaaataaagagagagaaagttgagtatagcattactttgcgagcatatatatcagagagaatggctccccaaccgccattactgtagctcaactggacaatagaggatccaaatagaacgaactgtggtctgggcgtacccaccatctcttcttgtctccgagtctgagggctacactgattgattcgttgttattctacaaagaaacgaagaagaagaagaagtccaattaatattggtcttttatttttctttctaaaaccacttctatatatgtatttttataaaatataaatattaggggaaatgtatttatttatggactagtttctttgtatatttatttattttattttttttgcagaaagcttatttgtagtttcaagtacccaacccaactttttttttttggacaaaacatatcatataactcgcattaattaatagagataaaatttgggtaataattaaagagatttttacacctcatgtcaaaattgacatcttttttacatttttatcaatacacggttttttaaa

SEQ ID NO: 221740 - DNA, 2550 bp, Cannabis indica
gaaactcatcactaggaagccacggatccagagcaaattggatagataaaccatccccaaccctcattcgtaacctagccttaagaacatcttgagcctccattaagcttctccaaataaagctcggattagagcctaattcagcattcaaaaaatctccctgagcataatatctcgcttgatacacgcgactcaccaaagaattaggattagtgataagacgctacccttgcttacccaacataggaatattaaactctcgatgactcctaaaccccattccaccatcgaacttatgcttcaccaagtgggaccaactcatccaactaatgcccttgttttgattccaagaagatttccaccaaaaccttgccattagactctcgatctccttacacactccaaccgagagaagaaagacgctcattgcataagtaggtaacgattgcacaaccgttttttatcaacacttccttacccgcacgagaaagaaatttggtatcccaacttttgattcgctttagcaccttatccttaagaaaccccaacacaatgttcttattccttccaatagtgtttggaagacccaagtaagagctattagcatccgcttcaaccatccccaaagccatacatatatgatatcggacatccccccttgtgttacagctaaagaaaactgaggacttcgccttgtttaccacttgatcagacgccaattcaaaaatccaaagtaactccataacgcggctagcctcttcaaccgaagcttgacaatacaagtaactatcatccgcgaacaacatatgggaaactctcggggccccattagcaacacgacatccatgtcacaactggttccgttcaaatctccttacaagagcagagaaaccttcggcacacacaatgaataaataaggagaaatagggtctccttggcgaatacctctagacgggacaataggccccatctttctaccaccatggacattatgataccgaaccgaaacaacacaatgtaacacaagatccacccacttctcggcaaagcccattttcctcaacatatccttcaagaacctccactccactctgtcatgagctttgctcatatcaagttttaacgccatataatcttgctttccactcgttttccttttcaagtaatgcatgacttcaaaagagaccattatgttatccgagataagtcttccagggataaacgcgctttggaaatcagaaacaacttgatcaagaaccttctttagacggttagccaaaacttttgaaaggaccttataaaccacattacataaagaaataggcctcaactcccccttattacaagggctactctttttcgaaatcaacacgagattggtatcatttaaaccgaatggaagcaccccgtttccatgaaatcccgaacaagccgaatcacatctctccccacaatatcccaatatttctgataaaaccccggactcatcccatccggaccaagagatttgtcaggatgcatttgaaaaagtgtcgcacgaacctcctcttcctcaaccatactgagaagcattgcattttggtcttctataatagagggttgaacttcttgtagaacattgctaatatcaacattggaagcctcaaacaatctattaaaatagtcaaccatcaccccgcctagccctgcctcccagtccacccacaccccatcttctcgttagagtcgctgaatgtgattttgcctcttcctcgagctagcaaggctatgaaaatatttgctatttgtatccccagagcgaagccaaaactgcttcgatctttgcttccaatagatttctctttgcgttaaaatttcaaacaactcctcttgcttctccttatgaagcttgaccgaatcctcatcccttctcttcttcaatcttcgaataaccattttgcattggcttattcggtctttaaagttcccggtaaactccttcccccaagcttccaaagcctcaccacaactttgaattttatcaactaaaccactcccactcattacttcccagctactccgaacaacctctttacacataggctcacgtaaccaagtgttctcaaaacggaacgatcgattatgcaacccagaagaatacgcttcaggtgttagaagaatcggacaatggtccgatgttgaaatctctacattatacaacttttccaaaggaaataactgaagccaagaatgagaaactaaagctttatctaacctttcctctacccaatgactagagcctttgcctttctcccaagtaaacggataaccttccaagcttaaatcaaccaacccgcactgatcaaaggcattgcgaaatccttccactagccaattaggatagcttcggcctcctctcttttcatcttgaccccctaaattgttcatgtctcatatcaaacactaaggaagttgggactccagattcaaagagtgaaaaagatcccaagtatttcttcttaacgcacggtttggctctccatatactcccgtcaacctccaatgtctca

SEQ ID NO: 221741 - DNA, 5920 bp, Cannabis indica
atgtattgggggttatccatattacctaaaaaaaccatcaaagaaaagaaaggaaacaattccccgaaaaacactatcgacagcttgttcataataccacattacactaattttcggttggattaatttttctcagggaaatcgttggcaactacgcagacatcatatttgcaaacagcgatgaagctaaagcattatgtgatttttcatccgaagaaagtccagttgcagctgcaagatatctaagccattttgtacctctagtctcagtaaccgatggaccaagaggatcctacatcggtgtgaaaggagaagctgtatatatccccccttctccatgcgtaccggtggacacttgtggtgcaggcgatgcatacgcctctggcattttgtacggtctattacgagggatgtctgacttgaaaagaatgggcagtctagctgctcgaatagctgccactgtcgttggacaacaaggtactcgtcttagagttcaagacgcggtaaagttagccgagtgttttgcatttcatctcgacaattcaagttcaaattccactggtaatattcagtcagatttcgggtcagatcatatatcaagctgctagtgaggtatcatattcataagttgattttctttccatgtgttcatatcatttctacattgtaaattgaatcatttcattattctaattgccaaaagtgaaaaatgagaaagagaaaaaacaatgtttgaacaaggcattaatggagttggccttggttatagaatcatgattaaatatgtttatatgtattattactttcatggctttggattaggagtgtgacatttttttacctcgatttataatcttgtagggttttgctctctcgaactatgaaaatatttataaatttatttcttcgttcgcattcttttatttttgtaaattgtttcttgatgtaagactgattcagagctaatatactataattcgagagtccaagcaaaaaataattgcgttgatagtattagaacgataaaattcgaaattgtgtctcataattttagaggtatcacttgaatatttaaagtcattatacttagtctcacgaaatataaccaaaagggagaatttacttatttctatagttcgagagaaatgttgtacaaaagaataatttatttaggggtgaaattgtgtaagtatcataattgagttgagaaatgagagaagatgtattttcaatttaaaagaacaactcaagaaagaaaggaatcaaaagcttgattatatttaaactgtaataagttttactgtcaatcttttagttaatggttcgaaaatatatgttaaaatatatttttttttaaaatatttttcatggcattatttgttatgcctacaatattatttttgtaaatttttaaaaattttaaaatagtttaccgtgttaaaaatacgtttgaaattttttaaacacatgtagtaaattaaaatatcaaatttaattatatataaaattcaataattaattatactaacaacaccataataacaaaaataagcatcactaagaatttttaacattcctcacgcagtaatgtaataacttatcaaaacaatatctttaatgaatcagattcttatattatattatataaattgcaacttgcaccactttcaataaatatatgtatatatatattttaattcattgcatattattttgatgcaatcatcatagaccacacacaaaaatgccttttttttttcttttaaatttctagaaaataatatattaataaaaacagagcaccatcaatgcagccaaaataattgatataataataagaatatttctttatttattgaatggtttgatttgttcaacaaagtacaactcaaaagaaaatataaagatagatagaagaagaagaagaagcattatatttataattatagtttgacacgtgtgaatgtggtgtaatctgaatagaaaaagtcagcaatgtcctcagtcacacgtgtgacatgccttaaacttcaaagcataacactttttcattcaattcaaatttcaaagtctttcactttgacaattacaactcttactacttatcactttgaatttcactaatgaacaacttttcattccctcatgtttatgtatagataaaatggaaggttatttagagtttttgactctcgaactttaattagagataaaaatttagtaaaattaataaacagataatgaacttattaacgttattttcattttctacttgtgcctctcattctcgctttactcttactctgcttaactctcgatgagtttaggattgggaaatccttattggatatggagacccattattaggtagactcggtcctaggcataagcgggttagacctgtgtttaaagcctacctagctcaaggatccaaaaaatttcatttttttttttaaaaattacatattttttaattgattttaaaaaatactatattttttcctaaataagagcccacaaatattttgagcatcgaccctgccattaggtaccatcaagattaataagaaaataatgtaattgaattgaaaataaaaataaaaaacaagatattaactttaaaataattaaatattaattctaccaattaaaaaaataattacataataaattagggaagattaatagttaactttataagtataaagtaggtagtattaccctgatctcgccttgaaccctctttgggtatataaaattgcaccccacctcgtcccactacccattaaggtagataatccccgccccattcagagtgggtatccgtcactgcagatcaaatttttatcactaactttgacatatattaaagtatggccctcaaatttttaagaccgttaaaaattctctccgaacttttgaatttgttggattcaatgacttttatttaattctgtttaattttattaacatgtctccatgtacgaaattgtgcctcctaaaatttaatatgtactaaatcctgctcttaaactttaatatatacaaaattatatctcttaaactttcatctatatcaaacttttgctagtaaaatagagagaatttttaaaagcctaaaaatttcataggtacaatttattcctaattagcttaaatgaaaatagtgatcaaactacataatcccactttattttcatttcatattcataattttacaacacaagagaagagaacaaaactcatgtatattaaattagtctacaaaacaaaccactacactatatcaaaatatatattacacaaattcacctactacatttacaattatcatcattcatcatcatcattagtacataacatatatgtaatgtatgtatatgtttgtattattacttcctttcctatatacattattaaagtatatattgactcttatgcttttttcattattaaaaatatacaaagacaagaagtgcttaatctgagtaaagtgtttaaatatcatatcatatcatatcatatcatatgagaagtcaaaagtgaatgagaagacctcccatgggagctctatgagggattccctttcttctcttcccattacttctataacttaaaccagttgttgtacccttcaaactactcatcttattacttcttctattgttgttaaagtagttgctgatattgctgctactactcccaccagactcattttcaacctcaccttcttcttcttccacttcataaccatcaccaccccttttcttctttctcccaacaatctgtgaattcaattggatattagtatatatataagcattacataacataatggctaattatgacttttgctctgaattgaacttttcgggccgtaaaattctgggtttcttgtccaattttacaatgattaatttggtatatcaaaattcggaaattgaatgggattagacagaagttgttaaatctaacaatttaaaaaatcataactagcattagatgaaaagggtaagagagattgaatgaatgatgaccttgcaagcaagagagcagaaagcaaatgaatcaagtagtgttctgtgacaaacaaggcatgtattggtgacacctttaccaggcctaggttgaggcctttcattcaagaacacaatccttgcactgttgattatgtatgtttggactccacttatatccacatgtttctgaatctctgatactcttatcacatcatggtaagaagacctccttatctgacaaaaaaacaatcaaaccccatcaaaccaaagaagaagactacacatgtatagttatagttacatgtactactgttaatctcctattacagtaccgaaattctgtaactataacgaatactgctatttcagacgtgaaaattaactaagagattgtaattagcacttatatatacctgaatggtattgtgatttgaatgagaagaagagagacatagagagcaaagggcaccaaggtgtaagcaatccaagcagaacatattacattcactcttgtgtgaatcaacatggattttacaaggaacaaagaatcttgtttgaagtaatggtttaatccatggaggccatttactactacttcttcttctaatcaattcttcttcttcttcaagtgtttcttcatgtttatcttctggtcttcctcctccctgtcaagaatcaaactttactcataaagatcatatttttattattaagagacaaataaacaaacaagtagtgaacaagatgatgaaattgattagtaccatgattcttctgcttttgggtttgatttctctgactgttggagtaggttcttgatcatgatcatcatccatgtctttgtattgggaaaaacaaaaatgagaaaaaaggaagctttttattgtattttttagagaaagaaaagaagggttaaagggttgtgtgtttcattggtttgagtgtgtttaaaagtctaatgaggattgggggagaaatagaatagtaggaatgaatgtgttttgttttgtttgtatgtgaaaatattgctataagttattagtggtgtctaatattgctaagaagtgctgttttatgattagttagtgagattttataaaggttattattttaaaggataaacggtgacgaaactcttttattttaaaagttaaatattaccgtcaaatattaattggataattattgtatacacctatttatacatgacagtaaaattttgaaatcaatacagtagtaatcgaattatatataattgacgccttattaattttgtaaaaaaataaataaaaaaaaagcgagttaagtgtataaaatcaaaatataagaaggtttcgctgccaataattctattttaaattatgtaaggttcgatacttgattgtagaataataagaagatactttaactggtattagatactaatggtattttttagcatttgtgaaagacattagtcatggtctagcttcttcttatttttttattatttaaagtaataaataatatagaataaatagaaaaaggaatggttggagaggagagaagagaataagatgagaagagaacaaatggtagttgaataaaaggaacacttggaagttgaaaagagaaacacaacacaacacaacataacataacactacacatgagagatgatataatatgatatgatagggagtaagtggatgaatcactcttaaagtcccatcccacacacacaccataataataaataaattattaaaaagtgatgtgtgtgatgattcatcacccaaaaaacaacatcactacactacaaataaatgcacattctttttattctttttattattattgtttagattttgttaatagaaatttataaaaatataattttttaaaaaaattatttaataaaa

SEQ ID NO: 221742 - DNA, 1207 bp, Cannabis indica
atacgcctaagttagttagggtgttacaggggtcctggacaggcagttaaatcacacttttatatgtcctactccaatgatcttgaatgctgcccattttgaacagttcagaccaattagcttatgtaattttgggtacaagattatctcttgtattcttatagaccggttaaaaggtgtgttggatcagcttattttgcctttttaatcggcttttatcctaggacgacggatccctgaatgttccttgttggcccaagaagtgcttcactctatgaaatctaagaagcgaaaagttggagttatggccgtaaagacggacatgaacaaggcgtacgataaattggaatgggatttccttttgagagttcttaaagtaaatggtttcagcagctttgtttgcaaactgatcatgcagtgtttatcttcggttagctactcgattttacttaatggtgctcatttgtctcccttcaatcctaattgtggactccgacaaggagattcactatgaccctttctttttatcctttgcagcgaagttttatccaaacttatccttcgtgctgaaaaggatggtgagctagctggtgtgcgtgttgcgagaaatacattacctataacccacctcctatatgaagatgattccatattcttttgtcatgccactacaaggaacgctgggacacttatgaaatgtttgcagaagtacgagcaatggtcgggccaaaatggtaagtaaagtgaaaagtggagtggttttctcccctaacactaatcgcagatgccgtgaagagatcaaggggattcttggtgtcaaaagcattaatcccaaggagaaataactgggcaatcccttcttctttacttcaaataaaagagaggattaccacaattggaggggtggaaagccaaaaaattgtcccaagctgggaggactacgctgattagctcggtcctctaaatatacctaactattttatgtctatggctcaagtccctagtactctttgtgatgatcttgatcaggtggttgtaagattttggtggggctggaaaatatggaagaaaaagaagatattgtgccctgaggagttggaatgagattcgctagaccaaaaagatgtggagggcttggtttctgatggtttaaagatatgaacctggctctgttggaaatatttatcaggacctagatttactaaca

SEQ ID NO: 221743 - DNA, 2650 bp, Cannabis indica
tctgataaagaggaacatgtgaaaaaatgtgttttaatgatgcaatcattgggaaagtgtctttatcagaccaaccatttggtcttgttgattggtcttgatactttgtattttccttgtttctgggcagagattgtagatcaatctaaatcaaattgatcccataagcttaataagtccacaaattaagtcaagtgggcccacttggtttcagcccaatactcacaaccctaccacattcatcatcatcatcctcatttcccttcacactcaacccaaccgcctcctcactatcacccattcgaactcaaccccaccccagcatcacattcgactcacacacctgaaccagtagcttccattcgataaacagcaccaaaccgaacccaaacacccccattcggaccatctccgttcaaccagcaacccagcttccattcgcctgagtcatcaccccgttgactcgccaaactcgaaccagcgatccaccttcaactcgcacaaccatttcgcccgaattgcttgagcaaaatccgttcactccagaccatactcacgaacccgcaccaactccattcccctcatctcagtccaccaaacaccacattaaactcgaacccaccatttccatcccacttcagctcaagccgaagtcactcaagccaccacgaatcacgtgctgaaactccacgcaccaaaattcaagctgccatcattaccaatactatccatttttgctagaaaccaagaaagccagccagactctccatttcaccattccaatcacacacaaattcaagaagcaaggttagtctctgtgactacagtgaaccgtacttaggaattgaacatggtgaatttgtgaatttacacaattggtttaaagaaacaaagagatatttagtttgagttgattgtgggattgttagtgtatgagttggatgatttgagaagaatacatagtgggaatgtacaatagatgccaagtagtgtgtggttttgatttgtgcgggtgatgaaatttggatttcagtggtacttgagaatagttggtatgattgcaacttttggtgtggctgtgagctttttctggtgtaaatttataatcattgttgttgttgtttgagtagtttcaaattgaaaagaaacagggagcttttgttgtgctgccgagggtgaaagaatttggtgtaaatgctttgaattttagttcctgtggtttggaaagagtggtgatttttgagcaagattggtgtgtggacattgtagtgtagtgtaagaataattattgtgttgagtggcagaggttaaaaagaaaagaagagggggaattcgctgtggttgtttagtgtgcaagtgaaaaagaagagaaagtgctgaatgtcaagagggttgccaacagaaaaaaaaaacagaaatcacttcatgaaattttattgcaaggcagccgagacaaagtattacgataaggtggacaatcgagaattttatatggagcgaggattagtggcacatatagaggacattgacgagttacctgaatgggttagtgaaatggttcataagaggaattggggactttttgtcaagcagagaggacaggcagtcatggaagttgttaaagaattctacgccaattttttgtcccaagaatggcctactaaagtggttgtgcgtgaagtaccggtgtcattcttcgctgaagaaatcaacaacttgtttgggttacaatcaatcgaatgccattacccctccctcaaaggtcaagtgggcgacgagacattgaatgacatgatgcctgagatcgccaagccaaagttcgagtgggacctcgataattatggaaaccttcgatttcggcgcactgacttggagcacgatttgaaatgtctttacacattcgtgcaaactgccctatgccccacctcacatgattccagtatcagcatagattgcgcatgcatgctgtactgcattaagatgggttgggatgttgatgtaggggctctcctagccaaacaaatggccgattgtgcgcatcgggggaaaggaaaattatttctgccagctactatcactgctctttgtcgcgaggcgggtctaccgatgtggaacgaagaaggagcattgaatgccaggaggcctatcagttttggttcaccacgagctccgaaaacaactcctgcttctgcgtcgacctcagccacggagcctcccacagatcgctttgctcactttgagcaattgcaacagaaaatgtgtggtcgtttgcacgcgatgtgggaatatgagcaaaagtgtgacgcagttatggagcgtgcatttaggaggacaacgccacgatttgagcccaagttcccgccgatacctcagcaagttctcgacctgtgggctgggccatcagcttcgaatacggaggatccccacgaggactccgagtagagggagtttcctaatacctaagctaatttctacttttctgttatgtgtcgtttttagtccgtattgtgctaattgtgtgttgtcttttgtgtttgaaacttttatgtcatgtcatttatgtggttgttagtttgacattgagagatttaagagtttttatgtggtctgtgttccgctcgatgattatattttccgctcattccattat

SEQ ID NO: 221744 - DNA, 1437 bp, Cannabis indica
ttgtaggatcttcaaagccttctagttgccacatatatacaactctttcaaggtttccattaagaaaagcattgtttatgtcgagttgtctaatatcttagtttttttgaaacaatactcagaataattatgactgtagaaactttgacaacaggactaaaggtttctccatagtccaacgcagctctctgatagaaacccttagccacaagtcttgatttgtacctttgaaaagacccatctgcatttctttttaattctatgaacccacttacatccaatcaggttgttggcctctgacctgggaagtaaaatctacgttttgttattcttgagacctatgctttcatcattcatagctttattccaccctttgtactgaagtgcttcaatcacaatccttggctttgagcttgaaaatgccagctttagccttggtgatcatgtgatgtgtggggccagtatttgcagtaggattctcatgtgatgaaacttcaacatctgaagctaaagtctcaaggtctcttgagccttcactttgatgttcctgctgtatgtgatatttatctctgctggtgtcaacaaatgcaccttttcaggtgacacaaatccatgatcaagatagtcaaagcttgagagtggtgagtttgagtggtttacctgattttgtgaaggtgctgctgtagaagttgaatctgaggaagcttgagatggtgcgagaacatttgtgttttaagaggtggaactgaagtgcttaaagtgaacattaggaagttgtgaccaagattcattatgaatgacaagtttcttttttggagattgagtattcaagaaaccagactggaaaggggacatgctttcattgaagacaacatttcgagagatataaactctccctattgtatgcaaacattcataacctctatgtgcgtcattgtatcccaaatttacacacctaagtgaatgaatttgaaacttatggttctgctaaggtcttatgcagtgagaacaagcaactccaaaagtcttaagtttcttgtaatctagtttcctacaaaaaaagagtttcaaaatgtgccttgttgtgtaaaattgatgttgggagtctgttaatcaaatacactaaattttgaaaagcatcaacctagtatttgagtggcatactagcttgagcaagtagagttaaccccatctcgactatatgcctatgcttcctttcacctctctctcattttgggctgaagtgtgaggacatgagtgttgaaagtgaattccattggttcttactaatgtctaaaacacttgatactctccaacccagtcacactatatacttttgattttagtgtcaaattggatttcaacaaagtctttgaaatttataaaagcaatcaatgcattagatttttgttttaatggatatagccaagtgtatct

SEQ ID NO: 221745 - DNA, 2083 bp, Cannabis indica
tagtgactccaaagatggaaaggcttgatgatgagtggaattaatgatataatggaacccatcattattcccaaaactcaattcctttaatctaggaaaaccatcgttatggaggtcatgaaaaacattgttgacacagttcaatccatctaatgataaatattcggatcctttcatcaccaaatccagtccactcccactcccatatatttgatccaattgagagacttgtaggcgtaacatcctgctggaagcttctttatatttgtaaaaggggaaatctccacctccaatcgatattccgtatctctccaatctttttgtaaacaaaccctttggcaaaacatgttcacttggtacatataaatgtaaagctgtgatttgttgcaaactctttatctcagtaagactggcactttttataattctgccgtcttcattaacaatcttatcccatccttcaaatgtataagggagatacaactcttcaatccgtgtcaaatttgaaatgacatttgcctctatgactattaaattatcacattttcgtagatctagcacttgcaagcaccgcaattctcctatttcttttggtaaccgcgtaatgaaagaagaatgggacagatcaagagcttttaaattctttaactcaccaatcactgctatgtcttccagagaagaattacacagacataatgattggagattttgaagcaaatgaaaagacgaaggtaatgatctcagggatgtaccatttatacccaaaactttaagctgccctgtttgttcaaaaaagtcattcggaattgattccaaataagaccaactagacagaagaagtaattctagcataggacaatccaatttttgaggaagattgtaataatcatcatagtcaagaaaagaaattgctttagatgctttatgtctttcatggaatacaaattcttcatacatagcagcactagtaatattattcatcatcatatgcccatgcccatgatcttcctttgcaatttttatgcaaacatctcgaatgacatcgtgcatcttcactgtaattttactccttccatccaacaacagacaatgagatttcagtgtatcaaccaatgaattcaccctatttcttgcttcactcactgcgtagatgccttgaagcaagcgccaacccatgctgtatctcatcaggtcttccacttgtatttcttgatcttccttatgtaaagcacaaagcaataacaatggtttcgcctcctccttctcatgacctccaagaaaatcgtaactcaacttaatgctcgagtagactttgtcactcacatctgaactcttcagtcgtcgtaatgcatccttccatatagtttcctcctttttgtatttcaaagcatgtgccactgttgcaatggaaatcggcaagcctccacattcattaacaatcttaagtgccaaatccttaatgtaatctactctagtgtctccaatgatgctcttaaacaaattgatggcttcactcgattctaaagctccaattaagaacacattactctcgggaatctgcatggattctagtaaaacttgtcgatatctagaggttactagaatcttgcacccgtcgtggattccaatagcttctacatcaaattcattccaaatatcgtcaaggattaataaaatcgtgctttcgtcttgcttcaatcgcatttgaagcagttgtgctcttttgtctatgctttcgttttggttgaaaattgtcatacctagcatttcagcaatatgttgctgaatctcttttatgtttggtgcttgagaaattgtggtgataaccaccgtgctaaacaacttctcttccttagctcgtctagcgatttctttggcaagcatagttttgccaattccgcccattccatgcaaccctatcctcatcctattagcatctcccacaactgccattatgtcctctagaatgaccctccttgaatcaaaactctcgtacccttttgttgctgttgcagttgctgtttctattgttgttgctgctgtggttattgttggagacaaactatgtaggtgagggggataa

SEQ ID NO: 221746 - DNA, 1358 bp, Cannabis indica
tacaaattaactacacttcttcttgcaaagaggagatttgcaatttcgatttagttacctttcaattccaaattctctcattgtggcattgatggttgcttccgaagcttcgttttctcgaagttgagacaatttgtgtgtggctagttcatgttcgatttcaaaatcaagtttggtgaaagttttctttaatgtttcaccaaactcgaatgctttctctggtactattccatctctttcaccgcttacgtaagctataataaataataagttttatttatatataaaaaaatatttattcacaaattatcattaattaatagttatgatataagataaatattattttgaatcttgtgtgttttttaaaagttaccaatcaattcttattttgttaacaacaattttgatgaaataatactctgagcttcaatttttgtcaaacactaaaacatataatacttatacatggaggtgcaggtgttatggcatgaatatgaatgttttttttttttttgtgtgtatttattcgtattagaaactggttttagattatattaaaaaagtattgacgaaaaattgagcttaaagtattaaaatatatgatccaatttgtcagttgtgacttattataaatcatcattaatttatatgttatgactaaaaagtccgtactaattgtattaattacaagattaaatcacaattcgttgtaactaaatatattttttagtcacaatacttgttgtgactaaataattagtgacaatttgtataaatatattgttgtgactaaaaatcacatttaatcaaaaaaattattgcgactaaaaattattagtaaaagtaatattttttatagtaagcatgcatgggatcaaaaataatattatcctttataattatacataatgataattaatattattgctataaattatagtaatgaatgagtaatgaaaatattaattactaaccagttgacaaatggagtagcttctttaatttaatgcacttctttgcaaaactcaaaagatttaaaattccgattgtattagtggccagagctacatcatacctgtaaaaattagcaaaattaattatttatgtattggtgattaattgacatattttatactcattaagtaatattagaaatagtgtgacattcacattgaattaaaatgaattttaagtcacgtttgattggaaataattaaaatataagaataacagaataagaattgaaataaaataaatttagaataaaattttaaatacataataaaaattattaattttttttctcatcttatatttaaatagtatttctttttattttaaataaaatatagtat

SEQ ID NO: 221747 - DNA, 2224 bp, Cannabis indica
tttactagtgttctactgttgttttgagttatattgctttgtgttttactggtgttttataaaaacacagtatttttgaaaaaaattccgtgtgacagttatttttgtaaaagttaacccaaatttcagtatttttgtaaatttccctttatctcggcacgtaatgtcttaatttttcctgggcggaaggtcctagttttggccttttttgggtttaagtataattttatcattatattttctttgtctttctttttctttttttggggcttatagtcttgttcaatcctcatgagttactatatctagcctgttgggcttttttattgaatttttcaatatttggttgagctttgatcattttatttttatgccattttttcctcaaacattatgtaaatgtgacatcttctaaaaaattagtgatattacataataattattaaattaaattattagaatttgatacttaaatacatcgacaataatatgacacatttagataccactaaataccattagtactgttttagcatttgtcaaagctgtaatcagggacggagggactttagcctatatgtaggcttaagtcctcactcaagtatatacatcaaattttttacatgtagatatatacatatattaattcatttcactcaatttattaaaacccaatttacaatagccctcactcaatatcttaatcatgattcatgagcctattctcattctaatcaagcccattttaaaagtagcccaatacacataataaaaaaaataacactttattaaaaaaataaaataatactatcgacaatgttttattttattttgttgaagatgaaaatttaaaaggatgcatttatgaattatttattttaatatttatttaagctctcactcagctaattttctgacttcgtcactggccgagttgtgtaaatgtataattctcactctttagttctaatggcattatggtgtgtctagtgctttaactatttttttttttttttgagtagatccagtgatttaattattgtagtatgagttgtatttcacatcatcagtgtgttggtaccattgttattgattattatgtattatcttgtattgaaaaagaaagaaaaaaatagagttttgagtacctcacaatgttcacatgcaagtgcaacttggattctacaacttgtatcttcctctatatatatcacttctagttggttctacccactcttattgggtcagattaatttcagtgtcactatagtataaatatattataaatatatttttcttcatttatatcacactcaaacaaatattatattatgaattgattgaggaaggttatgaattgattgagcatctcatataatctcaattaatgttgaatctcacaatctaatatttatttctttctcactcctataatttttaacaacttttgtataaaaataattaaacaactttaaaagttgttgtttgaaaatctttcttctcagcccttttcactccaatggtaaataattatttaatgttgccaaaaatatgttcactcacatcataagccagctctccccattagagttaatcttatattatttctaatagagcactaaataagtagtgtaatattatattttgttaaacttagccatgctaaaaatttgacctattacgtacaaaatataaacttaatacacaattaatacatttctttatttagaatagttttattaagcattaataagtgatttaatgcaatttcttaattacaatattgttattattttttaaaatatatttgattttattacttttatgtcaatttgttattttactaattataatatttactttttaatttcctttggtcaaatttaatacaattttttacatacatttttttacatcaaaatacacgatattatttttaacttagattggagtcacatccatcttacatgaatattattggttaattaatcagaaaaatttatcacataattatggtattgtgtaaagattacatatatgatatatccccacgtttactattccccttattacatcttattcaatctccattcattcattcattcattttcaggaccacttaatacattttatatgcttttcaaaaaaataaaataataaataatacattttatatgtacaactgttataggaaacatctaagggctaatatatgtatatatat

SEQ ID NO: 221748 - DNA, 3074 bp, Cannabis indica
ctcaaaagaatatgcacatatatttaggatctcctttagagatatttgacttgataactctggaggcttggatactttttttatattattgttgaatatctttttgtttaccaaaactctgttatgtttattaatagtttgtattaaatgagtattggctattaatttatacattgcttaactttttttaaaaaaaaataaataaataaataatctcattaaaattttatgagtaaacttagtagaagaaatcttatgccgaaaaagagtgtcaagacaatgtcacactagttagcccaccaagcaaaataatcatccaaaaaaaaagatttagttttgccaatgagtgagctacattgattattagcaatcttaggataataagcaaaagtaaaatcactaggaagttacagaaagccaaaatatctctccaacaatgcaacctagagaagaatatatattccattccaccataacatgagcatagccaagacaaagacaaagtccaagctcatgtaaaatggttatagctttgtgttggatttattttaacaggatatagatttactaacatttataattttataatattcaaacattttaaatataaattccctaaaacaatgaaataaatatataaaagttgaaaaaaaaatttacattgattgtagcggaataatatgactcatttcattcagatccctaacccttgatttattctgttgcattgtatgatcaatatctgaacttggatttagttgacaaaaatctacaatcttctacactatcttgagtactgtcttgaattgtgtgggcaatcactcatacattatagggttcaaaaaatttaagaagaagaagaaaaggaatttgaaaatagagataactctgtttattttctatttttctgacaaagagagttaattatgtttttaaactaagagctataatatctatttataaggtaactattagggatgggttttgaattaaaatagaataataataaaaaaaaaagataaaaatgactttatttaaaggagtttttacactacaaattgaaattcctaacttttttactggggcagaattttttcaaaaatactgtatttttttttcaaaaacaccatataagttttatactgtgttaagttttcacggttatttttttatttgttccactattattttaattgcactgtttgttgttttacagttgttttataaaagatagtattttggtaaaaaaaaaatcctccccacagtaaaattgtaaatttttacccaaaattcagtatttttataaaaatcccttatttaaactccttggacgaaaccctagtaggcctagtagattttaattttgtcattttattgaaactcatcttttttttcttcacaaatgccatcttttaattctaactccataaatattaattctatatatttaataattataattaattattaaataaaattgtcatttaaattatttattaactagatctttcaaagtctcttaattgataaacaaaccctaattcacaaccgaacaaattctatctcccactgggtcaaaattagcttaaacatccctaaaataccctaatccaagcttcgaaaaacaccccgagcaaaactggtttctaatcgtaaactagggtttcccctgcaggcaaactggattgtaaaaccggttaaccggtttctactgcaaaaatgggaaactctggttttccacatcaaaacccaaccaattctccaccaaacttgctcaaaccttccagaatagttccatattataaaaacattgtaaccaatcaatcaatacccataaattcatcaaaataaacaaaataccatgattgagaaacttaagttcttaaacatcaattccttcatttctaactttaacaaccatgaaaatatccaattcataactaaacaaacctaatttaaccctcgaatcaatttaaactcatctaatcatcgcatacctgaattcaaagaaaactcattaaaacctaagctaaaacttaagaaatcaccaaagaacacaagaagaaaagttacctcaacttgaaaaatccctaacctagtaaaaagactaatttgccccttagcctaaacactcaagttatttggagcctacgggtattttggtcattctaactaatttgccaaaccaataatttaaaattctaaactagtctggtatacttctaattcaattcatcttttattgttgtgacatttctgaccactccgtcaagtagtttccacggtcgtcgggcccgaagatattttatttcaaaaacgatttccacgatacccccataatctgataaaatctctgtaattaacaaattatgctttatttgttcacttactcgtgtttcactaattaactcgtaattagcttaagtaggattataaatatcccactctactacttacttaatcacatatttaataaaatatgaccaattaaacatcattatattttttcgagatattacaccctcaacaactggaagtttaaaaattctaaagttaacagctctctgttcaatagttagccaacaaaacaagtgatcatacatattctaatatttttggatgacatcattgtgactagtaacaaccctacagaagtgaacaagtttgtccaagaactgaacaaaatttttgctctaaaagaccttggataacttcacttcttccttggcatggaggtgcatcgagatgaaacaggaatgtatccaactcaagcaaaatacatcagtgacttgttgaagaaatatgacatgataaacctgaaaccatgcccaacaccaatggtttcaggaaaacccttgtcaaaaaatgatggagagttactaactaatccctctgtctacagaattttgataggagctcttcagtatttatgtcacacaaggcctgatattgcctttgatgtgaataaattgagccagtttctctaaactcccactacaagtcactagagtggagcaaaaagagtattaaggtacttgaagaggactgtccatcatgggctcactacaagaaat

SEQ ID NO: 221749 - DNA, 3781 bp, Cannabis indica
gacgttttgagtttatttacctgttggccagaccaggagcaaaaattctctatgcaattccagaatccattcacctccgaaagatttgctcgcccgaccagaattaggtcatctgcaaagaaaatgtgtgataggaccggccctcccctactaagagtaataccctgaatgactccttgattaagggcatcatgaagtaatctagaaagcacttctgctgcccaaatgaagaggtaaggagagagtgggtccccttgccgaagtccacaagaaggattaattctcccaacttgccccccattgagacatatatttaacgtagtggtggagatgcactgagagatccaacttcgaaatttctgaggggttccatagcaatccaagacgtgttcgataaatcgccagctcaacttatcataagctttgaccaaatcaatttttattgcgaagtatccctccttgcctcttttcctgttaaaggaatggatgatttcttggacaatgacattattatcgtgaatattccttccagggacgaaagcagcttgagttggacatataatagaaggaagtaagggttttatccggttcgcaataattttggagattactttgtacaccacattacacagagagatgggtctaaagtggtttgttcgagtcggattttgcacttttgggataagaacaatattcgtggcatttaaccctctatgcatattccccgaaataaaaaaatcagagaccgcatcacagaaatcagcaccaacagattcccaataatgtttaaagaataacacagacattccatcaggacccggcgctttatggctagacatggcaaaaaggactcttttaatttcatcattactagggcatttaacaatggcatccgagtcttcttgagagattttctctgggaacaagtgagcacagttgtagtcaataccaaatcagatcccgcaaagatgcccttaaaaaaatcagcaaattcatgtccaattgccactcgcccagaaatccagatattatctttgttcaagatactctctatggcatttcttctacctttaatggcagccgagagaaagaaaaacttagagcacttatctccatctttgagccaagacactctggctctttgcttccaatagaccgcttttcgttccctagattcgttcaaagcacgtcgaatatcagattcttggttccagtcccgggttccagccgggaggctctggatccaattaagcttctgttctagctcctttataaccatatccaatcttccgaactgggcacggttccaattaataagagccaccctggtagcaccaaccttcttaaagatacgagcaggggcccaatcatgacggaccgatttccatgcgtgggctacaacgaggttacttcgatcatctcgggtccaaccttcttcgaatttaaaacttctcttaaacttgggatccgatccctccgagagaagacagagaggtctgtgatccgagttactcgtttggtcagagccgagtatagctcgaggaaataaattaatccaagccccattcactaagcctttgtctagtgcagatttcacatgatgccttccaggcctatggttatcccaagtcagtttgtccccttggataggcatattaataaggcctcgactctcaatcagattagaaataattggaataaagggatcccgacttgaagagccctctctttcagagttactaagcacgaaattggtatctcccaaaataagccaaggcccgccaaaccggtcgccaattttcaagaactcggtccagaactttttcttcacgtgcaaatagggtgggccataaacacaagataggagccaaggggaagtgggggggtccgaataaacaattcccgaaatatggttacacgagcaagtataggtgttacattccattcaaaaaagtataggtgttacataatttaatactggtaattaaatgtaagggtgtcacctcgtggtgctggtgcttttatagaaatgatgttatgagacttttatagcaatgctgctaagagttttaagtatattttttctacactttccagcaaatgttacatacatgcagtcatgcaccttttccatgtttgactattgggcctatgaataatgcatgcaacccaaactagaccactcttttgagtcacttactttctcattctatgcaatttaaaaggaaaaagaaaaaaaagaagtttaataatacacaacatgtgatgtgctaagctatattatcaacaaaagaacataaatctcatgcaaattcacataacattgcttccaattatatgaacataactttttaatgttggtgagaatcttacatgacaaacagaaacgtccaaaaccaattacaacccatttatctgactcattctacaaatattatattttggtaataaagaacaaatttgcaattgggttgtacatctcaatatcactttgactttttacattagttagtgtaataattcataattaattcactatattttatcgcctagctctctcaacgaacattgttattaggtattagtggtgtttagcacattctcggtatgtcacgttatgattagctaatgatagtctctaaaaactattatattaaattatatgggacccgatacttagttagaccaatagcaatattaatacacaagaatgtactaggcaccacttgtaccctttagtatttctccaatttctaataatattggatggtcttattttgtagtctgtttacacaccttattttcatcaaaaaaataaaattacagagcatatgaaacaccataaatggaccacaagactgagcatggaatctttttacagtttaaacccttttaagattggtgtgaaacacgagtagatatgtagggcttggtatttttaataattttggattaaaaaaaaaaagattattaaatgtgaatattaatggcttgacattgaaaatacagatgcctcgttactcttatttaatactcacctgtatttaagcaacccctttgacttaaatcaaatgccagcaaggttgggatacttcactagtgaagcacagcacaatgtcaaagctttaattaattttgccaataatcttgttcaataaggttttatgattgttaatttgctaaaaatgaaaaataatgatgtttcttaaggtttaagtggatatatatgattaccaaattgcaaattgggacttcaccttatcatagccattaattatattttgagatgtttgtgaatattttttaaatttttttagtggaaaaagtacttacaattagtaaaacagtaatttctttaagagcattgctattaagtaccagtggtctttctcgacatgtcacgttgtgattggttagcgatactctttaaaaggtgttatattaaattatatgggacctaatatttagttggataaatagcgatacttgacacataggagggtggtgccctttagcatttctctttcattaaagtctttcaggcgacgactaacatgtgtcacaaggattgagcataaaatttaaaaaaactattcaaaccggcctatcaaatatcattaaaattaaaattactggaaccgaaaactaaaaaatcatcaaccattcaactccccgttaaacggtcagttttttaaccaccattaaatgatgagtcctttttccataccaaaacaactaaacaaaaccaaaactgaccgctttatatatattgtttactttt

SEQ ID NO: 221750 - DNA, 3645 bp, Cannabis indica
tgttgattataatttaaataaaaataaatttgaatataaattgattcttagctactcttgttttgaatattaattttggctaatgtaatttgctactataatagtgtatatatatagcatatgttttactctccatattatgatttttaatattttatttagttactaatactatgtaataatgcttctttgatttgagtgataaaataaaactgtatcatatgttgtgatacataagtttgtttattgatacactatgtaataatgctagttacttggtgtctctttaatctctgtggttgctttgttgttggttttgtttatagatacataagttttggtatatttatagatgtaatggacaggtatgttgaagaaggtataattttttttataatgattgttttataaattaataattttattttattatgctaatttaatttaaataatttgagtaacttagtttttgaattgtaggcaataaagtaaaggtcaaagcatcaacaagagtgaagactattgacactgttaattgatgtctacgtagaagaacatcgattttattttaagttggtaattattttagacaatttaactaattttaatacttattttgaatttggatgactgtaataatttatttttgatgtttgaattttttatgactttgcctgaactttatatttattcaatcattcaactcaattttttttaattgggaaattttaattgcaaaaaattaagggttgtaacccaacccaacccgatcaataatgggttggtttgggttgggttataattaaaacttgatatgaatgggttagaatttaataggccgatctcattgggttggcccactaaaatagcctcaacccggccaacccaacccatgcacagccctatcaggaaggctttgtcacagcgaagcttattccccatcgcaacagctggagcatcatcaaattggaaaactttttgccaagtcccgtcgagacaaaggattctgcccgtcgctacgaagcttattccccgtcgctacaaaggatactgcccgtcgcgacgggctttggtagaaaagaactttgtacatattttacctaaagtttttcatttcttgtcctctattcttatgaatacttcctttaaacatccgtggacctaaaacaaaagaatcaagcataaaatatccctaaaactagaaataaagttaaaaaactacccaaaaatgtgacccgaaacttagactaaaactagcctaacagtttgtctcctcaaacatccttcaattattgattaattgatcaatcctaggagctattcaagattggggtaatttctctttactattttggtgaaattaagatttttaaaattgagtttttatgggaattttgttaatttcgggtctgggattttgtgtttgtttatgttggttgtttagcttagaattaaggtttgattgatgttgttttgtagttgtgtgtctttgaagcctcaaacttgagtttttgaaactcaaagcttgagctttaatggttaatttgaggtttatgtataattttgtatactgagttattgagtgagattattattgatgttttaactgttttggaagctttggtgtggtttagattaggtttggggcaaagttgagtttcaaaactcaaaattttggtatccttgtgaataccagttatctgtttcaccatccggttactcggatgaggccctttttggatgtctaggtttttgtgttttctcaatatttaggttattgtcacgctatttatcgatagaaaaactctcatttagaatttaagtcctagaacagattaaattgagttatttaccagattaccgctgttatgacatagggtcccgaatcgtcgagcagttttcactcaagttgaccgacatgcttaaatttggattataagtaagaaaagtacaattgtaccacatagcatgtttaaatgttatacgataattatcgtttataagaaagagttattactctaatttgaaactgttgtttcttatataaaggttgtctcattaggcaacgatattgtaaaaggttgtctcattagacaatggtattggaaaaggttgtctcattaggcaatagtactagagtgggttgtcttattaggaagcggagaatagtggttactttataaagtaacgataacagtttgtcttattagataaatatttgatattttatgattgcttatattgtgtaatgttatttcctgtttatggaataaagtatttgttacttggctatgtttaaatgtgtatatatgattatatctctttattgttatgaatgttgtgttattgcttttcttattgagtctttgtgactcacgggtactttgtggtgcatgcatgtaagagatagaacaaatttgagtagtcatgagttcgagatcttccctaaaaaatgtacatattagtttatccgactagcagtgtcaagttatcgggacttaaattttttgatggtgcttttgagttacagagtgtattttaaagaaatatgtatgataatttttttgtaaaattttaaatgggatcctagaatctagaagcttataatgtcatgaatttaatgtttcaaattaattagtaaaattttaaattaaatcacatattttattaaattattaatttattattaaaaaactaatttataaaaccatacatgtggcgtccttatgagatagggtgttacatgaagtttagatggttttactccaacactactaaaaaaggagctttttcgactgttaaaaaacattcggtatggtattatcatcaatctctatgattggcgcttattcgactgtcgtaaaattggatggaataggcgtcaatgaaaaatcgtcgagtatatgtctatgtcccgactgtttaaaattgtcaacaataattagcattgtagccaacggtttagaccagttaataaaagaattggagaatgttctaaatcatcagcaatagtggctcaatattgctgacagttgcataatgtcatgttaaaaaaaatagatttgagctacacgagcctaaatctaccaaaattaaactagatgaacacagatctaaaacaaacaaaaacacatgaaagagatgcacagaattaaaaaaaaaatccttaaatttcaaattaacaaatttagagttggtcgggttcgatctataactctaaccaactgcgatctcaaactccaacgcaagcttggccatttgcgaacccccaacacagaacaacttcagatttgtggacaaataagaaaagaaactcaaagattctgtgaacaaagagagaacatgaaatctacaaagaaaataaaaatgaagaagaaaaagatggatctacaaaacaaaaaagaataaaaagatgaagaagagagaaggagataaggtggatagacatttacctcatgaattttttggggtcgacgatctcaaactcgtgctccatttgaggtcattggtcgttaaaaatgggtctagagatagaggtgttaacaaagacagggaaaagcaagagagagagagagagagagagagagagagagagagagagagagagagacgacgtagtacgtacgtacgtacgtacgtaacgta

SEQ ID NO: 221751 - DNA, 3303 bp, Cannabis indica
cattgagaattcccaagcaaactatagtaacttcttctccaatgatcggccaaaatttcctataaaataggcccggcattccatcattgcccggggctttgtgtggatgaatatctttcatggcttgtaacacatcatccttcgtaaaaggggtaataaggtactcattgatttcctgggaaattttatgtggcacgatgctttggaactcttttaactccacttcagaagccggctgagcagtaaacaactgttggaagtagttacaagctacccgacccatcattttgtttccatacacccatcgagcattgtgatcaagcagccccgtaattgagttctttttctttcttgagttctcttttcctgtggaaaaattttagtattacggtccccgttccttcaaccataaagcacggctcctttgtttccaaaacttttcatctttgtccaagaatacattgtaggatcgttccaagtccttccattgattccagctagtgtgatctgttttagttagatagagtggccattttatcttctatattccttgattctcatgttcatctcctttttttcgggatttattccattgattcagaacagctccacatttctttagttggtctttaagctgcctagccgtggtgcttatattaccagcccccatgtttgcgacacaattttcttcctcagcccatgcatgttcaaaatggaaacgagattgccatcgaacccccttaacttcatcccgttgtttagtatcacaagtgagtaataatgggcaatgatctgagttaattctcttgagatgcacaacttttgcagctggaaacaaatctaaccattcagaatttccacaagctctatctaatctctcaaagataaggttatcttgtctcccgttgcaccaagtgaacaaatttccttcaaattccacttcccgaagataacaaccatctagagctttcctgaaattattcatgagatatctcggctttggattgcctcccttcttctctatttgccttagaatctcattaaaatctcccccaattagccatggtcccgaatacattctgcctactctgttaagaagtgtccaagagtcgccacgtttacttggatctggatctccatagaagcctgtaaaccgccacccttggtcctcctctttccgaatgaaagaatcaatgtggaaagaggaaaacgaaaggatagtgcacgttatcttgtcggaccacatcatcacaagcccaccactctttcctttaacctccacaacaaagcagccactaaaacccaaagccacacgcaaactttcagcacgcatcttattcagtcttgattccgaaatgaaaatcaactccggacaccaacgctgaattagggacttcaaattacggaccgtccaagggttccccatcccttgaacgttccacaataaggcattcatggctttaggcgaccctggcacgcagggttcgcctcttcaacattctgagcgattgtcaaatctccatgctgagaaatgtccatcggtttgtccacttgttcactctttcttttctttgcatctttctttaccgccactttccgtctttgctctttgggaattgacttgttacccgaaccaaaggcaaaggggagactttcctttaatccgggtatgtccattgagaaaccaatcggaacatcaattagattttggctttcactcattaccatgttactgcttgctgtcctttgaagtttaccagcccccactacctcttgatcctccaccaatcttctttttccccgtccatctgatgccatttcatttgattccaccccggtttcctcctgctggggctttgccattgtattttgcaacttatttatctccttgtttccctggtttggttctttcccgtttgttatttcactcctcatctgtacctgcccttcctcttcataaaataaaggttcaaaagagttacccttgtagaggttgatactttgcctactgcccccttgagtgttctgttcttttccaattaaagtctcattgtttccacctttccccccttgaaagccatctcgaaccccgctatcagctttcaaccaagttccatacgccattgctgtttttccatcttcccctataacctccttaatatcaagaagtacaatctctttgactatggccaatccaaccacatcgaaaaacacataaatgggagatcatcatacttgaatgccaccacttctatggccattacacggtataaaaacatgggcagaccggtttgttatcgacatctacacctgaaatcgaaagaacccatccgcaccattcgagaacatcagagttctgaattgtaataaccgaaccagccatagatgccaatctgaaagtatttttctctgtgagataatcaattggaacccccaaagctctaccccaaattggaaagacatttagatcattcttccaagagtcactagagttccccatcttgcccaaaatcagaaccccattcgataaataccacgacattctcgctaaaattcgggattgagtttgttcggaattgaaagaaaaggtaaggaacatacctgttgaaaatttttcttgaatcttgatgttccattccgattccttcaatttccagattctccccagcaggttcttcaagaagcccatgctatgatccaccttcgaacacaatcttccccgaagattgaatttggcaatcatggtggataggctgtcatccacctcccattcttcttcatccgagacattaagcttatttgttttagctagcagttcctccatagtgatggcgagtacacaccagtccgatcaccagactcccttcatctccgagggaaaagaaatggcagggactcacaccctgagccctagcagagagcgcgcgaaaaattttctatcatatatactagtgtttacaactgtgtgaatgcaatattttttttttatatataattaaaataaaatacaaactatattattttttataaggagctataataattttttttttaataaaaatcacaagtctattaattaataattcgttcaaaataatagaacccacttcagaggaacagtcctccaactgaagcacacgacctgtagagaaacaagagtgtattgccaagcaatgagccaacttatttgcagatcgttttacaaaatacaaattgtgaatgcataaataccgctctgaatcgcttggacacacaccaaactatctgtttcctgttagataaattaacaattaacccaagatc

SEQ ID NO: 221752 - DNA, 4051 bp, Cannabis indica
tagcatgagaaccccactacatataaaagtctaaacccttcatttcaaaactctacatggactacaagcgacaactcaatacttggacttgggcatattttgctccagccaacctaaataaattaacaaaagataaagaccaatcaacctctatggataactatcatgcatggatataatcaattcaaaaacataagtggaatccaacaatcaatttacaagtgagagtaaaaaaaaatccttagtcaatttgttcaagtaagagaaaacccacagtcaattttcatagcaaaaatagagaaaacatctacgattaattctcacttgcacaagtaaaatacatctacggtcaattctctttctcacaagcaaaaaatacttacgatcaattctcaatcctataaagtagcaacatctacagtcaattttcaacaagtaacatctacagtcaactaacattcaattttataaagataacatcaataaaatataacctacagtcaactttttctagcactcaactaaaaaaaaagactacaaatttatcgaaatcaaatatatttttttaagaaaataactaggcccacaaacaggcccataaaaatatcactcaaacaaaataaagaaaaaaaatgtctaaatgctcataatcaaaaacaaaccctaaacagatttctccaacctatatgtatgtatattgattcataaacttttgaaaatatatgagtatatatttatatatagcattcaacacatttatatctcccaagattgagtcgaatcttatgattcattgaagcttatatctaatacatatatatacaaaaatttagacgtaattcaaaatttattggaatagagataaattttcatgagagattcttacctagtacttttttctaaccttgagtttaacaaatagaaaaacctccttcattatgtaaaagtatacacccacatttttatggtcatcttacgtctacacaaagcaaaaaggaagttttttttatatatatatagtaaataataataaaaaaaaaaagtcatgaagaaagaacttaaaaactagaaataatccaagaaaacttttattagagtcaaaaaaaggagttttttttatatatatatataaacttacattaagcgttagggatgagaagcaaattcagagagtcatccttgaataaagcggatgaagaaggaactgtagaaaccatggtaacctctcttttgtccatttactttttgtctaacattttatttgaaatgtgtactgcacaagagtagagtaccatctactgaagagataattgtccgataaattatcattccagactcttctctctcgactctcacagtatgaacaggggttcttcttccttcccagcgtgttcacaccagctctctgcacgtttccacacggtgaaacccatgcccagctccagatcgctcgatcatggtcgctccgattcttcatctactgagacacaaaacagctcgacccatctgagctacgcgagccgtcctcctcaacagatacccaaccactccagtcgcatcatcatttactctggcctcctcccaaattcgtcgagccgtacagtgttaaatgagactcttacaggtattgatttccccttacaattttccctattcaccgtcaaatcgtttcagagaaaatggttttttattgaacaatttagatatacttttggtttgcctattaaatttcaacctgaaaattgtaccttcaaagggatttggggtaatgggaaccctctcaaatctgtcgacagaaaggatttaattccttttgctattttcagttcgaatacctcatttattctggtctgcaaatgtgttctatccattgaaaattttaaatcctctgtgcaacacctcttctctttattaaatgctatagaagtgactgttactgctttgttttgtcctagtgctgtgagtgtttatctatttaaagttatgtttaagagaagcttctctttgtgcgatgtagctataaatactttcccctttattcagagtatctccaacttctggttcttgtatgttatcagtcgtttatacctctatcttgctttcattcctttctgtttaaccttccatttctggagtccctaccgattgtcttcactgtgttctgtcttagtgtctccacatattattttccaatcttattctgtttgtttaggtgtgtttttctctacccgtaatactcgtctcttgtgtaagtgctatacacttgtcagtctactttctataacctgtgttaatcctggaagtttgtcctggtattgtcttggtttcatattctcggtcgtagttatcccagccagtcctcttccatccagttcttctatttacccgtgcaacccctcggtcaattactccttaaaccatctcccttccactacctcaacaaaacacctttgttatcttaccctcattcggtctctccttacactacaaactcagatttgtttctttctgctccttgtttgttattgcactttctctgcctactccatggatgatctaaccaattcactctctgttgctctcaacctcacagaaactgagtgtaccattcaaactctccacgaccacactcccacaaacactcctgaaccagagacacaacatgttcccctcttccttgttgttaaagtccacactgtcaagtctttcaaccgaaagaatttcatagaaaaaatgacaaagaattggaatcatatctctcggagccctgtggttatcaccgagcgccctcatggccttttccttgttgagtttggttgcgatggagataggcgtcgggttttgttgcaacaaccttggacttatctcaaccaagccattcttatggatattccaatttccctcgatgtcctcaatggagatagtttgctcaaaattcccctctgggttcaagtgtttaacactccttttctcaaacgctccgaagagttggcggcccttgtctcttcctctctcggccacatgttagagctctacaagccatctcttcgtgagacatggggaccctattttaggcttaggggtcatgtttgatgtggcgcatcccctccctcgtggaataccggtccatttctcgggtatcaataaggttgtttggcttgaactgaaatacgagaacctccccgacatttgtttcttttgtggccgaatggggcatagttacaataaaggttgcatggattacatgaaagcttgcgatgaagctcctttcccttcggagctcaggtatgacatcaaaaccattttcggcaaagttaaggtttcgactaatgctttgttatgccctgaacagattaatttcgccaaccctccggttgcttctttcatgactactaatccggctagtgcggtttgtgttgcgcccccggagaacatgccacctttccccacctatggctcccaagaaatttgccctccgcaaggccaaacacaacaagtgggcttttcaaatccggcccatcaaccctctcacaaaactaccctcaatggaaccaacccgaccccacaaccaacacaccaactcccaatccaccccataacctcccacccgagaccattacaccaacatataccgccctccttaatgccacaatgagcaatactagtgtccaaaaagcctcacaaacctccacgccgaaccaagccatcacctcccaacattcaagcggctccaactccactagttcaaaatatttccatattcctttgcccgagaacatcccacttctcgacacttgcaagagacttgaaatcatgaacctcacctaccaaccgggaattgccaccccttcgggttcaaaggcctcaaggaaaagaaacaagcccgattcaaaggacaagttcaaaaggcaaactgaaatggtcaatggagagcttcgtcatcaaatcaagcgttcccgctctgacaacccacaggccactaaaatttcatccggaagcgcaggccttgcaactgagcaggcctgccagccgccatgaagcttgtcagctg

SEQ ID NO: 221753 - DNA, 3594 bp, Cannabis indica
ttgagtagtcagcttgatgcttcaggtttctgcaaaacttgtcacagtggttgattggtgtacacctttatggggtgttcttagaagtagggccttatctttctggaagccaagagcaagttgtaagtcatcttctccatgagtgggtatcgactttcagcatcaattagccttttaatgatgtagtatacagggtgttgtacaccgtcttcttctgttgtgaggacaatactcacaccatgctctgtcactactaggtacatgcctagctcttcattggttcggccaattgtttctttggctcctagaatgcatttttgccttcctttgtccactcaaattttttgttgcctctaagaattttgaagaagggtacacatttgtctgtagacttggacacaaatcttcttaatgcagcaatgcgtcctattaggctctggacttccttgatagttatgggaaacttcaagtccaaaaagggttggatcttgtctcggtttgcttctattctcctggcgttgactatgaagctaaggaattttcctgagcttacgctaaaaggtcatttaagggggttcagctacatgttgcagctgcgaaggactttgaagcactcacataggtcctccacatgcccccagcctttttggacttgacaagcatgtcatccacatacacctccatgttgtggccgatgatatttgtgaaaatcatgttcactagcctttgatacgtggcccctgctttttttcagcccaaagcgcacgactttgtagcagtataggcctaggtctagcatgaagctagtgtgctcctgatctggtggatgtatctttatttgattgtaaccttaatatgcatccatgaaactcaagatttcatggccagctgtggcatctaccagctggtcaattatggggagtgcaaagcagtcttttggacatgctttgttgaggttggtgaagtcaatgcagactctccacttcttgttgggtttaggtaacagtactaggttggatacccactgaggatagaatgcctctgttatgaagtcattggctctcagccttttcacctcatctttgaatgcttgggcatgctccttgtccagcaactgtctcttttgctgaacaagctggatgcttggatcaatgttgaatgcatgggtcatcacggaagggtctattctgaccatgtctccatgtaaccatgcgaaatggtccaggtttgctcttagaaattctatcaagattgacttgatttctagagtcaaacctttatggatcttcagtattcttgttggaaaagtggaatcaacctccacttcttccaactcttctacaggtccgaagcttcttgtaggatcccaaaagcaaggatctatgtttgtgtccccaccctggactaggcttcattgccccttatcgggcttgtcatctagagttttgacaggcatcttcacctctttggccttggatagggccatgttgtaacagtgacgagcagactgctggtctccgctcacgcatgccaccccatgcctcgtgggaaatttgaggcataggtggtagatagacgtcactaaattcaggtcgttgagggctggtcagtctatcatggcgttgaaagctgagggaacgtcgatcacgacgaactacgccattagttttctggtagttggattttctccaactgtgaggggtaatctgatatacccattaggtgtgatgccttggccaaaaattccatacatcacttggttgcaaggtgccaagtcggtgagttggaaccccatcttttcatatgtttgtttgaaaagaatgttgtaagaggcaccatcatccaccatacatcttcccacggtcatgttcctgatttgtacagtaatgatcagggggtcattgtgcgggaaactgattcgaggagcatcttcttcagtgaaggagatcgttggctatatgggcttctattgcttagatctccggtcttcgacagctaggacttcacctttaggctcgtgacgaagtgtcggagcatagcgctccctagctttgctagtttttccagcaatgttgggtccatctattatgacccctaggtgtcttgccctgggtggtggaattggatctccattttgggcaccttgtgcataggtttggtcgtcttgcacataacgatgcatgtagagattattgtgccttatcaggtactcaatttccctcttcagattttgacactcattggtgtcgtggccaaagtcgttgtcatatcggtagaactttaacatgtccctcttacccatctctcttctgataggaaaaggctttcggtatgggattgctccttgagtggccatgaagatggccgcagacttctctgttaggagggtgaagaaagtttacttctcctttttattcttctgtggcatgtgagaagtgttaaacctcccctttttgccattgttcctgccagagctgttggtgttgcacttgtttctagtgtttttaccactagaagtttaggcagaattactggtgtacgcctgtgcacttggtgggtcatgaggttgttgggtgcctcgtgactgcttgttgttgacatgccttgcctgggcctattgtatggcttcttcaagtttgataaagccatcagctctatcaaaaaaactcctttatactgttggtggagattctccggatatctttctagaaatcacttattgggagtatgccccctagtctggctgtataacgtccttcttttgtaaggcctttgactttagtagcctcagccatgaatctctgaatgtaatcctttagaggttcaccttgtctctatttgacttcgaaaaggtcttccagctgcgatggtacaagtcttgaggataagaattgtgtgtagaaatctcgtgaaaacttgtcccaggagttgaatcttcctgtagtcagtttaaagtaccattgttgggctgtctttgataatgtggttgggaatatgtggcagcgcacatcactagtaaccttctggaggtcgagttgcatctcgaagtacttaatgtgagctagtgggtcttcttgcccagtatacatcttccataccggcattttgaactttggcaaggacaaggcatttatgtatgtcgagaatggtgatccccttgaccgataaagtttaaggtctgaaggctttaggccagctatgtcctagatcatatccctgagttggtctaactgtccttgcataggggatctattgctgtggggacctgattgactggccttccttggggaggctgcagattttgaagagataggggctgactggccataccctgggagagtgtacggtgaaggttagctagacccgtagtgtactgcagaccttggtcgaccattcccaagtacgggagttagctgttgggttttgcgccctaaataaaacccatttcaatataatcagatttacttattaataaagatccaaaataacattttacgttgcatggttcacatgagttattttatgattatatatatataatgtatgaattctatttaagtccagaacatatgaatttgttcatgattatagtgt

SEQ ID NO: 221754 - DNA, 1338 bp, Cannabis indica
atcaagagtctccacgaaactattcttatcgaaaatgcctcccatccatttgccttgaccatccaaaacaccgcgaatagcagcacgagggtcacaagaattttcgggaaagtactcaacaagcctctctggagaatccaatgaaggtgtaatagggagaggaccacctacatatgatggaacatagcttaaccattttagaatagcagatactccttcaagatcatctgaaactgtcaaatgaacaaccccattagttgccataattttcggtccaccaagttgcatgtgagagctgtaaacctcccggccaagaagtgtgttcaatgcagagaaaccggttagaattatcggctgatcaagcctctgtatgcaacgcataccaagccgagcaaggtaagcacctattccaactgttctaccactcacatatgtcaaggtaaaagtctccttatatgctcttgaatatccactagcaatggctccactgccagccaaattctcaacccctaagccatcttctcttccaacaatggtatctataacccatctggtttctccactctgtagctttaactcatgtgctatcacagatgatccaactcgagcataatcatcagaggttaagtatacatacttaaaaccgcgctcggggcttaaatcatcataccaacaaactttgaaacaagttttgatttcttcagctacaccaagacgggcaccagagtttgctgctaagtatattaaaggaagtttcttagcacaagcaagatcactcactgcaaggaagaatgcatcctcttttcggccaaaagaccctgctttaaatgtcacatcatttgcaacaaccaagatgttccttccgaatggaaactctggagttgacatctccataaaccaagctaccatgccaacatcattaagcccaggcggtcgcgaaacaggaacaagaggtgtaccccaactaccattttggtgagcaaattggagctctgttacattgaggatagctttgtctgtcggttttttgatactaggaggttgagaagcccatgactgctccaatgccgtctcaaacgcctaatcaaaacatgtagatttgtaaatgtgtgtgtgtgagagagaaagagagatcatagtgttaagcatagtgcttaccagtggaaaatcatagcaatatgttgtattgcttctcctggccaaaaggcgtttcatgtcaagaactcctaaaggttgatactgtgcattcactagaaccttgtgcagaggacccatcctagaaattgaactgtacaccgctttgtgttggctattttcctccaattctcgataaacctg

SEQ ID NO: 221755 - DNA, 2820 bp, Cannabis indica
aaattttattagagggtatttttttaaacattaaagatgaaatttccaaaagaaaatcaatcaaaattattatatgtacaaaagtggtagttgggttaaagccagctaacaactctaatatgcatgaagcgcattctcatttattgatttgctatatttctaattgtattaaagttagtaggaaacttttggtttgatatattttcatataaatatatatattttttattttcctttttgtccagaatgttcttacagttaccatctctcttttattttctacattatgtttcacgtggtttattgtggaggtaaataagataaaatcttggtgtgtgaactgtggtggagtagatagacgaggtaggtccaaattaatcaaccaaggcccaaaataatagctataaatagagcatggattctcgagctcaaaccacactgcgaataaacaaaatcagtataagctacccagtgacgagtctgtctgtctctctctctctctctttctctctcttagtctccaaagctttattatacttcatcaccatgttgaacggagtccaaggtgtcgtttcgaaagtggagagtgtcgtttctaatgtgcaccgccacattgagggcgaggtctcgggcatcttcaccatgtctgacaagaaaatcattgaccttgtctatgacactcatgtccatgctgatgattccttcgatgaagactcccttttcgtcatcgtcgaaaacgttcttaagcgctccaaccaaattattgacaaaattgtccaggtatatataaatatatatatatatatagctcactcggaactatctatatgactggactagaaatgtaacagtttaatgacttatatcagggagttcacgttcatgtggaaaatattgaggagaagttcagcaaagctaacctcaatgttcccttgtgcactctcaaggccatcaacaacgaggtaaaacatgaatatatcgaataatctaaatcctctttaaggggtctattctttgagccatattataatttgtctaaaactttttgttactatacagttatgctgcaaggctccaaacgaggaaacagctcacaaaacagtagtggagattctcaagaagctgtccaactattcatgggaagcaaaggcggtgttggctcttgcagcctttgcttttgagtttggtgacttctggctcatagctcatctttacaattccgacccattggccaaacaattgggtgttctcaaaagagtgcctactctcatcaagactcctgagctagtgaaacgccgccaagcaattcttgagctcagcagcctcatcaatgtcaccatgagagtcatcgctatctttgatgagtttgagaagctctctgcttatgacatcaaagacattcccggattgtccattgccttggaccatatgccagtcgatgtttattggtcaattctaagtattgcagcttgttctaccaagctcaatattctcataagtgatcagtacgtagttcttgctcttattataatatatataatctcatgttttaattgtttttaacagaaaagtgagtaatttattttatatatatatatacttgtaggccagacagagcttttgatttggctccctacactcaaaaaatcagcttcgtcctcaaccagctcactatgcagttgaacgtatgcagaaggcaattgagtacgtaattaagttcttaataattataataaaataatcattttctataaaattaattttatataatctgtctagtaaatatctttaactcgtacagctgaggccgagacttacaggaggctttgtaagctcttccgtactccaactgaaatcatggagattttcaaggccttgattttttacagtaaggatagtgtaaggccacttattgatggttccacaaacagacaggtaattggatattctttctttctttctttcttataatcttttctattaataaatgataagaattaaagggtcacagtatataatacttcattggataatgtatatattatttaggtgaacattgatgtcctgagaaggaagaatgtgtatatgttcattactgggctagacataacagatgaagatatttctattctgaaaccggtgtatgacctgacaaagaaagaaagagtaagctacacaatcgtgtggattccaattgtggagcagtggaccgatgagctgaaaaagaagtatgagagtttgaggatgaagatgccatggtacagtttgcatctatttagtccaattgcagggcttagatttgtcaaggaacaatgggaatacaagggcaagcctatgctggtagtgactactcctcaagggaaggttgagaacctcaacgcacttcatcttattcgtgtttggggtatcaaggcctttccttttgataaaaaagctgaagaagtcgtgcacatagaaaccaatttccttcctggtgtcctaaacaacgttcatccaaatttagcgcaatcggtaaactttttccttctttatttattctttcctgtcactatgtccctaggcgctcaacaccatagtggctcgttcaatgaatggttaagtgtttcctatgttatttattaaataaaaaatatgggacttctttaataaaaaaaaaatgtgacacttatatttaattacacaaatttgacactcacttaaagtgcctttagaattttttttttcttataaatttctaattttcatcacctataaaaaattagtctcccataatgtattaaaccaatttacatatattaacttaactaactaattttctta

SEQ ID NO: 221756 - DNA, 1922 bp, Cannabis indica
aaaaaaattaattagttgtgagtcaatgaatgattataatttggttcatgaattagaatattcccaacaatctttttgggatgcacggtcatctaagacacaaacatttgggaccagactcaactgcaaaagtataccattaattaattatttaactctatttatttatttaattggctttcttagctggaatttataaataaataaacctttaatttctttttaatctttaattaacttggatgatgaacactttaatcaatgccattttggtatataatttgccataacataatgcagaaaacacatatctggttttgtggtccatataggctttatgtatgtatatgtatatatatatcatcatacaatattatagaccaacttatagctactagctagtgttggtactcttcattttggcggtttcgtattaaaaatactagtcaacaaacaccataataaattaacatatatgtaaaaaagaaaatttaatttttttattacatttatataattaattaacccaacaaatgggtctaatttttttttaatcttattacctcgtatgtattatttgtaaattggtagatgttggttgggcaataatatacatcctcatatttatggttttttaattttaaaataaaaaaagaaaagaaacatgaaatctatgtagataaaattaaggtcttaaaaagaataccacttgcgacatgcatgacatcatattggacaaaaattcattggttggttattaattaatgaattattaagtaagttgtaaatgaatgatggttctaattaagaacaagttttggttgtgaaaatccacttaaaaagacatataagaatctttgatgaagtttctccaaaagggtacttattacttaataaatataattcaataagtagtggaggaatttcgagtttcgatgttgtgtgtgacaaaattccaagcctaaggtattttttttcacttgtatcgctttcagtgcttgatcttcaggccggcccaattacttatgatttaagtccaagtcttaatgggctctgtttggggcccacttttggttcggagtttacgaaaattgtgctaagctccatttacttgtcttaaataatgaatttttttcagattacaattttggtaccaaaactgatgatttataggaagagattgattgtgaagaagagattacaacttttagtggatacaactctggaaagaaatttgtttggattccaaaaggtaaaaatggaatcaacatatattttttgaaaaaattactatttaaatttgaataaaagaatatatctcataaattaaaatagctaaacaagagttgtatccactttcattcaccaataatttatattattcatcaaatttattatttagaaacaactctttttatgaaccaagtggtgttcctttttttttttttgttttacgcatgtacatgttgtgttattattattattattattattattattattattattattattatttattgaaaaataagaaaaacttcattaagcaaaaaataaaatttggtatgttgactcacctctcaaaagttaagaagaccattacaaaataatctagcccccacttagctgtcgaatcgttaaggttcttgaaacccaaatgagtattattattggacatcagtagtgcctaacacctctagatatgtcgtcttgcgcttgactagcgatattctctaaaaattattacattaaactagatgagaccaattaaagctgattagttagttagtcattagctccaactgtcctagtcagcagagtttgtcattagttggattctgttattgattgtgttcaatgtatataaacactctattgtttcattgaatgaataagatttcttgttatcctcaattcttttc

SEQ ID NO: 221757 - DNA, 1803 bp, Cannabis indica
gccaagccaccaatactatcaaaactggttcacagagaacacgtgtttttgtatttgaccgtctccgagaatgttgtcagtgtggccttggtccagtaagaagagaaagtccaacacccagtatgatatgttagaaaacgcatgataggggtcgaaactcgatatcccctgatcgaaaagttagatttttgcctcctgatggcctcaagaaagctaagaccctacttccaggcccattccataggtacttacgaatcacccactctggcaggtcttacagacacatgaagcctcagaaagactcctcaagtgggccatggagtgaagccaattcgatatacactacgtttcgtgaatctccataaaaggtcaggccctggcagacttcatcataaagtgtagtgaagtagaagccagcaccagtacacaagcccagaagatgccaacatggaaagtgtacatcgacggggcatcgattgaaaatggatccagttccagaatatcaatgatatcaccagatgagctccggttcaggccaccctacgcttcgcatttacggcctccaacaatgaagccgaatataaagctctaatcttagggctaaggctggccaaagctgtaggggctgcgagggtagaagtcttcagtgattctcaattagtggtcaaccaagttttgggagaatagcaaacacgtggagaaaaaatggctgcttatgtagcgattgtcagggaactgctccacgagtttaaagagtacaaagtggaaagaatcccacgagagaagaaagatcagacagactgcttggctaagctagcttcggacatcaaaatagaaaggttgggggtaggacctattgagcaccttatggagccaagcatcaaaaccaaagaaacagtagctactaatgagcaagagccgagttggatggaccccatcattaaatacgtaacacaagaagaactgccttaagaaagggctgtattcaagaggctacagtatcaggctcatggatacgtaatgatggacaatgtcctttacacagagggcttagcatgccgtacttaaggtgtgtgtcggaccctgaagctaggcggatcatacaggaggtccatgaagggttctatagagagcacactggagattcgagtctttcaaagaaaatattgagacaaggatatttttggccaactataaagaaggactgtgtagacaatgtcctaaaatatgactcatgccaaaggtttgcaaacataccgagagccccgcccaatgacattactttgatgactagcccctggccctttgatgtatgggggatagatctcattggatgcttaccaacgtgaaagggtggggtaaagtatgccatagtggccatggattacttcacaaagtggacagaggtcgtgcccatgaagaccataactggcaagaaagccttagattttgctatcaaaaacattgtgtgtcgatacgacttgcatcacaagatagtctcagacaatggaaagcagtttgactgcgaggaattcacaaacttctgcaatgaacacggagtcgtcaaaagcttctccgcagttgcaaggccgcaaaaaatatggacaggcagaggccgtcaacaaaatagtaaaggtcaccctgaagaaaaagttactggcctacaaaaacaactagcctgaagaactgtcacgagtattatgggcctaccgaaccattacaagaaccacaaccagacactccccattcttaatggtgtacaaatgtgaagttatggtaccagtatatgttggaaattatttt

SEQ ID NO: 221758 - DNA, 2095 bp, Cannabis indica
gtatatattaatcactaatgtaatttattattctaaatgattagattagatgttaataagaaaataaagaaattagttttttgaaaagttaaagcgccgtgtcacatactctaacaacagcattatgtagatatataaatagatagatattataactcttaaaacctcacttatttgactattatctgactagagaggtatgatgactctaagttgtatatactctatatacaaatgtatatatgcatgtagactatagagaaaagagagagggaatttgaattccctatagtcaattgaagagttgtaatgttgagtgtataatgtgtatatgacttgtgtatatgactgagagctataaaggtatatttatagtattctcttaggggttaggttaaaattaaatggaattaaaaaaatataaaatggcttttaattaaagcccttggctgaattctactagtagaagtcaatgggtttcaaaattcccatttttgttcaaacttatctttttctcaataatacaatttgttttttctattgtaagcgtttaattattaattttttctatttaataattatattaaattttcaaataaaattaccatttaacataattattaattagactcttccaaatcttttaattaataattaaaccataggttttttctttcttcttaaaatcgcccttgtatggtaaaattcataaataaggcataatctcatttgaaatcctaattgattaaataaaaccaattaattgagtgtacaagatagtatgatctcagctagtttgggaatcgtgggcctatataatcaagctcccaataagtagttttagaatttaccaagtgaattctataacttattaattcctccttactccactatagattcagaattacactcttgattacatagaacgctctattctccaagaatagatatgctgttagtatccattatttcaatataaataattaacgatcctctatagatggtctacatcgagtagggactgaattactattttaccttcaatatattttatccttaaaatacttggctacttgtaaatggtattttgggaaactaataaaattaataaaatgagcgctccattatttatcgcgttaagccaagctctaaggaaaccatcgtttcacttctaagtatttatagaagttataaattccatatctattattagtgctgccaatcaattatattacagtgttcccaagatgtaagtattaggccaatcctactggtcaactataatgaacaagtcaaagaacacatgcaatacctttaagccagaacctaaccatcttaagatttagatcattgatctaagatcaacattgtgatatttacttagaaaagatattatagtaagttacgatatctttttcactgtgaatatcgggtccagtccgatgtatagtcaatacatctgatacaagtttactttactgatgtcttggaaaagacactctcaacttaaacaagtgcaagtaaactagatcattgattatcacgtcagtgtaaatccagtgcactgataaatcgtgagacttaataatttgaagcatacaatcccaattactttccactgtgatgacattactgttatttgtgaataatttgtgaataactatgtattaaggatttaatagaacttatatattaaacctataatcatgtattaaacttgtgaacaaagcatatgactaagtcatagtatgatttctgatctttattgaatgtaaataagattacatggaattgagttttatttaaaccataaaatctcaacacgcagagtacttaaagaagtactatcgttgaagaggatagtcgaaggtatcctttatttatctaagttattaggaatcaaggaggaagcccacgaggcaaccccattagttttatttccttctatttttcttttttgatatttcaatgtaatgtaccaagaggccacctagatgaccttcaacttcttctttggaatgaatactgcattgagattattttgttacgctttgtcacatattttcaaagtaatatctttgttccctgttaaaaa

SEQ ID NO: 221759 - DNA, 2250 bp, Cannabis indica
agcttaaacacttagccaatttttttttgtaattccatctcgtgagaaataaaaactcaaagaagacgtagctccattaccatcacgacatggggagtaaatactataaattgtgtgtgtctctctaatttttttttttttacctaaactcattattcatctcgctaatctagcgagctggtattgaccacttttcaacgtcaacattttggtgctttcattgagagccacaatttgagttccccaactacaatttgaattctttgctaagaactttgtttagaaaggaattcataagttcaagcaaataatcatccatgaacacgcaaagcaacactaccactcctaatagtcaggctactactcaacaagcaacaggcactgagattccccataaggaataaaactacgagcgagcgtctgaaatgactcgaactcgagaacgtgcatctacgggtcctttacctgatatgaagcaatcacttgttagggaaacgagctacgagcaagcgttcgaaaggactcagactcgagattgcaaacctataggtccaccacatgcaactgataagaccaaccgtaattctgctcgaagcaatttgaacaatgagggaaaccaatctcctccattgaattctcttcacaagtctgatgaatctcaatcatcctgtgaccctacaaagggaaagggacctacagtcaaacatagaggaagaacccacaatctctatcaagaaagtgaagagtatgagattcagagggtgaagatcaatgaactactccacactcagaagtacttccatgatgaacaaggtgcttgatgtaggtactttgcctgaggtcttgatggccaacaatatgaatacttcccataggtgcatgaaggattgttgaacttgagaaatcaatccaacttcctccacacaggtcactctaaggaagactattttgaaggaaatagtcggtatagtaatgtgagcagctcctcatgaagtaaatgttcgagagactactctatcgtcatacgggatagatccccatagttaccagcaaggccacacgaccagacaacaaccccaaggcctaggtcgatgaattcttttgattaacttggaagataaaatatcatgcataacaacatcaacaagaagcagccaactgatgcacacatcaccacagtgtgtagggctaaatttgacacccttaccgctctggttaagggtatcactactccaaatctaacatagtaagagttagatcgacaatagtgttctcctctctcaaatcgaatcaaggctttggaaatcccctcaaagtttaaaaatttagcgtggcatccatacgctagcaaagaagaccctctctctcacatacacaacttcaaagtatagattgacctgtaaggcattcgagacaattctcacaccctgaaagtcctttcgaacacttgcttgtagcttgtttcccaaacaaagtagttatgtaatcaacgaagtagttctgcattgtttagctaatttattgccacagtacaacaatacaggaccttcatgctcaacatttagctcccttaggatagataagagccaaaaaatctcacatgctgtgtttgcaatggttctatattctgcctctactgaagatctagaaacaatttgttgtttttacttttgcatgacatgattgatgttccaatgaagatacaaaaccttgtggtatatcttcttatatctggataagctgcccaatctgaatttgtataggcaggcaacttcacatttgtattggcagcaaaatataatccttgaccaagattgcttttgacatactcaagcactttttgtgctgcaagtaagtgagtgaaccgaggtgtttctaataattgactcagtttatcaactgagtatgagatatctagtcttgtaattactaagtaatataatttaccaacaattcttctatacagagttggatcaaccaatttctctttctcatctcgtccaagtttgaggttagcttcaattagtgtgttcattgatttgcaacctacgtatccaagctcttgtagcagctgcaacataaggtctctgagaaacaaagattcccttttctgatctagcgacttctaggcctagaaagtatttcaactgtcccaagtccttcaacttgaatctagcatttaatccgactttcacggcttcaagttcttgtaagttgttattggttataataacatcatcacatacacca

SEQ ID NO: 221760 - DNA, 2480 bp, Cannabis indica
gtcttggcgtaagtctgggtccgcgtttgggcctgggtcctagtattgatcccagtttgggtccgggtttgtgttcggttctgtgtctttatccggttttggatcaaggtccaattcctgttctagggtccttattctggttctttttcctattttggatctcggagtccgagtttgggtttggttcctggtctacaaattattccaagttcaggtcttgaaacaattgcaagatctagacaccaactacgagtcgggtccaagcccaaggtcgttggtcaagatccggatcccaatcttgggtcccggtctcatttccattgggatcctgggtcccagtctatgtccgtgtccaggtctgggaccgagaccggggttgggtctttggtctcagtcctagtcttgagtcttgattctggttctaattttgagtttgggtgcccaatctaggtctgggtcctgggtgcaggtttgagtctatcatcccgttccgggccctgggttcgagtctaggtccaagtccgtgtctcggttcgagttcgtgtcccgagtccggatcaaagtttttattcagattcgcgtcctgatctgggtctgcgtcccaatccgggtttgggtctaggtcctagtcagattctagttcccagattcaaacccagactcggactcagaccctggtctggggtacgggtctgggtctgggccagggtcttggtccgactccgggtctgggtttaagtccggatatgggtcctagatccaaacactgactacgggtcaagtccaagccctaggtctagatcaggatcacagtctcgagtcctagtctagtcctacttggggtcccaggtcctggtctgggtcctaggtcaaggtccgggtccaagttcatatcctgggtcacagtcccagttctgatgcccgtgtctcaggtctaggtctgagtcctaggtctgagtcctagtccaggacccgatcggggttcaagtattggtccgagtctagattcgggttacgatatcggtctgggtccagatcaaggttcgagtctcgttccaagttcaggtccaagtccgaagttttgatctaggtctgggttccgaggttcaggtcaaggtgccccatccaggtctgggtcataggtcctagtctgggtccatgttcttgtttgggtcctagtctcattttcaatttccattcagtgtttgggttcgggtttgggtttgagtctgggtcatggtctgagtcctggtctaagttttggtttgggtttgagtctaggtacaaatctcggtgtgggtctgtgttcgggtccaggtctaggtttgggtctcaggtgcgggtctaggtcttgttctagtacaaggtctctgtttggatctaggtcccgagttttgatctcggtctgggtttgagtcaaggtttgtattcggatacctatctatgtccaagtttgggtttgggatcgtgtcccaaatctaggtccaggtccgggttcgggtctcggtctcggtctgggtacacgatcgtgtctgggctcgagttccggtctcggtttgggtttggggctatgtctgagttcatttctaggaatgggtcttggtcctcgtcacggtcctagtcttgttcgaggatcctggtcttgcggttctttttcaaggtcaaggttccgggctcaggtttaaatgagggtccgggttttggtcctggtctgggttcgggtcctggactgagtcccagatcgggatccctgtcacttgtcccggtctggttccggttcaggtcatgggacccttttctgagtttggcttcaggaccgagactgggctacggttctaggtcccgaccccaattctgtgtcccgagtcaggttccatgtttgggtcttaattcgggttgaggttcggcatcgagtcgaggtatgggttgggatccgggttcgggcctaggtcagggttggagtccgagtcctggtccagttacggttttaggtctaggtctatgtttggttacggttcgaggtccaagtccaggtccaagtacttgtttcggtcttgttcccggctctcgatctacttgtggtttcagttctaattttgggtcacagggtacgggttcgggtccatggttgtgtctaggactgggtttgggtccgagtctgagtttggttcctgctctgggttcgggtccggggttgggttctagatccaaacaccgactacgggttcggtccaagccccgtgtccagatctagatcccgatcttggttctttatctggttccatttcgggtgccgggtaacgagctgggtcctctgttcaagtccgggtctggggtcggctcttgggtctcggtcctagttccgttgcctaggtctctatcccgattctgggtccacgtctcggttctgatcgtggtttgggtcccaatctaggtttgggtctgggtactaattatggtttgggttttggtctcattat

SEQ ID NO: 221761 - DNA, 1405 bp, Cannabis indica
tatgccataacttggcaatttttatatcactgacgcctgtatctacacgttgccaggaggaaatcctttaacagtttctatctatgccataagctggaaatattcgtatcactgacgcccatatctacatttcgccaagagtatcacatcacctaattaggtgagcttgtacctacgctcgatgctcatatgtcactggcccccgtacctacacccggtacgtcgccaggagtatcacatcacctagttaggtgagcctgtacctacgctcggtaatcatatgtcattgatacccatacctatgcatggtacatttctaggagtatcccatcacctaatcaatcttttcattatataacaatattaactgtatctcattctcaatattaatcaattcataacactattaattgtattacaatacaacgtactatgcagtacaatatacttttcttacctcaagtttttgttcaggtatgttggccaacctacttggagtatgatcgatgatccctggccctatgtcataacaatgacaaaccataagtgtttatccaaaaacactgcttaacaggttcaaaggacaacctagggtgtcctaccaaatcccatagttcaaatacactaaattaaaacttatattttggctttaaaacatacaccatttggtagagctcgtcgcaatcttcaaagcggtatatagaatgtcctaaacggacactcgagtaaaaagttatgacaaagatacgattccaaatatcactagaatttccagaaagggcaagctgtttcgacaaaaatgacagaccatttttgcgcacgaaaatatcaaatttttcactcaccaaaatacccccgaaacctatttaaatcattctaaatttcacaggacacatatagatcatatatacaataatccttacgtagcagtaactaaaatcgagcccttaaacggaaaacgccattaaagctccctaagctttaaaaagttccaaactcgatttctaactcaaaatcatcgtaaattcaacaagaaaacatcacaactagtcccatgactacccgagaacaattcttaaaggtcacaatcttcataactattctaattcacaatactcctatacgaaaccaattgttctaaacttaattaaaccttaccttaagctttctcgctctgagaatttgctatcccgctactattgaagcttagatcattaggttttggattgaaaatcgaagaaaattaatataagaggaagagggttttgtcaaagtagaaggacgagagttcgttcgtttcgttttactgttataaacttataacatagtatatatataatatactgatacgttaaaattaataataataatattaataaaaattttattattcataattatctta

SEQ ID NO: 221762 - DNA, 3474 bp, Cannabis indica
aattattattttacaatttaaattatcttttgaattccttatgtaccattaattcaatgtgaatatttaatctacaacttattatagatttggatccaacagttagcgctctctgagaaactttaacaagtgaatcaaaaaacctaatgaacacaaacaagagttcacgaatactcatgattcagacagatctaccaatgataaatattatgatatgaataattttttcataataaacgataagttaatgaaagatatacatattggtccagtcatgtataatcaaattatacacaacacttttactacatgtctatccacatatgtaatctgaatcaaaatcaaacacacttgagtatataatgtatagtaaaccatacttaacaattccatattaaagatccatttactttaatacactgtcgacttgttttattcatcttatataatcttaattctcttgtacaaccttacatgattatacaatctccatataaataaggaacttttagatatttattaattatacttctataattaatgtatccatttattgtataattgcattttatatattttgtaatatattatccatcaattatttacttttatggcataaatcccaacaaagacatcctatttgagggccccatggcacatctaggaaacttataaaaatactaaccaactatttggtgctaggatccacaccaaagtgtgccaaacctagggtttatgggtccgtgcaagggttttcatcctaaattgataaagaaatcaataagaacttgacttatttaggcataaaaaggccagacctacgccattccataatgcatggctgacctgtgccatcttttggtatgaaaagatggcacatgtctctactctcaaactaccaaaggaaacttgtccaaatataattcctcatcaccaaggagtataacacaagtgaaagaaactatttttcactcaataaccctgctagcagacttgtgccatctttgtgcacaaacaaatggcacaggtcaaccataccaaatgagaaggaggttctttgtcttttcatcatcaagacatcaaaacacagtgaggaaggccatcaagtggtgtagaaaccacctagctgacatgtgtcatgtttgtgcacaaggaattggcaaaggtcgaccacatcaaatggggaagattttccttggcaaaagtatatttttaacatcaaggtaccaaaataaagtgagaaaagtcaccaagaggtgtagaacacctatggccaacttgtgccatctttgtgatccaaaagatggcacagacctcacccaaaaattagccaagaactaatgtggccaaagtatttttttagtatcaatgttactaaactaagtgagaaacaccattaaaggattctcataatccctatcctacctatgccttcttttggcaccaaaagatggtaaaagtctcctgttagggtttctgagatgagattttgggaccctagaaccccaaaacaggattcaccatcaaaaaataagtcaaaacacattcgaggtgtctaagaacatgcatggttggcatgcgccataatgaggtggcacgactcgtaatgacatggcacatgttggatttggagttgaaaagtacttactaccattagtgaaacaagaataactctcttaatttttatccaaatgacttggttcaacttgtatttaagatacctttttgagacgcatcgaagtatgtttcatggtaattacaaaattctaaagttatcgggctcaaaattgggttacatgataggctgacacattttactcgagaattaatttattttactaagtgtgggccactaagggatgttaggagatatgtgttgcaatacttgtgactctctatttaccttagccgaggtgtgtggatacttctctcccattttgttattcgcaaagcacaatgctacataagcaagtccaagagataagggaagtaaccaattttagcgacaatcctaatgattgtgggaaatctgcctatgaataagggatattttcatagattttttttttgtttttattttttattcattattatggaaaaagatacaagattttaagtgagataccccgactactggggatcactaacaaatcctatgcctacataaagacaatgatagactaggatttgggacagctggaaaaaacctttgagtgcattcaaaaccttgggactttttccagatttggagacgacggcctagaacacatcatcccttgagactttctctcttcgccttttccttgagttcttcatactttgtcgacaccaagcctccatcatataattaccattaatgacatacatagttaccaagaataagagatcattctctattcttgcttccattagtgtattatttctaagaacattaccaccactattattatcaagtttatggtattgagtcttccatgagtcttttattcataagctttgatataaatttttaggcgaaatctatttttgtactattatccacacactcttgagaataactctggtgcgcatgttggaatcaataataaaaataaagtagatgtagccccattaccatcgcaacatggggatgaactaatataaatttctgatgtccttttttatttgttgcagttttatttagccaaattaattcatctcagtcctcttatcttttacgatcttcatagatcagttgacgaaaaactccatcaatactgtccttaaccgatttcctattcacgattgatgaaccaagaagattcttgtagtactacagaaacacatcatttggatcatcaacccaccttccctccatatctgtgactgagtattctagtgaaaatcttctatgctagcatgaagcaagattgtatttccatctccattctttaattagtcaatgtatgtttgctttttgctacgaaaatgacaaaaaagctttgtgtacttcactgtaaacatgtctggcttgaatttcttgttcaatcaactcaccacatatcaggttcttatataattccttctagaaatctaatatttctttgtaactcttttgatcatgagcctataaattaccaaattctttcatgtctgtattttcaacatcatcttgacctgtttaagcttttgaactatactttaaatatatctgtacttgagaaagattgctgccaacgtaggcataattgcgcatgaaagtctggagcttccttctaaaaccaaaaatactgaaaaggagacctccccaaattttaaaaaataactataattacttttacatatacattatttgatgattggaaaagtatataaatatatttaaacttaatatagtatttaatattttgaaacaatatgatcataataaatgtaaattgcctattattttacaaaaaacaaaaaatattagggttttttttcttcagttttaac

SEQ ID NO: 221763 - DNA, 2525 bp, Cannabis indica
aaaatccaaaaatcacatcataatcatcatcatattatatatatataactgtaccatatacgatctatacgtataggttgtaatatgtaataatacataataaatgtaataatgaataattaattaattctagatagaggacagttcgccctggaaatttggcctttgaattttttaaatattattttttaattttaattttaattttggcggcggttacactctctgaaaaataattttttaatattaaatcaaaaatgaaaatgttttttttttattcggaaccgaatcttaagtcaggtccgcgtgttttactttgtttttacgaaaatacccttgattataatttttatttacagaaatgccagtgagtggtgctttttcttttttaatgtcaatctggcataattaaattttgaagattcgaatctccaactaaaaacagctactaactactcaattctctctttttattattattattattataattgatttgagtgtgtttagggtataagaattacgtgttgagaaataaaagaattctctttaaaaaaaaaatgtgttcaaaataaaaataaaagaatattgcctcattgatttgtgtgtttgaaaattcattatatgtatatagaaagataatccaaaattttaattaaaaaataaaaactttatgataagttatctaaaagtattttttttggtacgtgatttatctaaaagtattaaattaattaaataactagaaaagttgaataattactgcatggagaatgtttacgtaatagttgaatctatttaattaataaattatctattacttttttttgaaaaaattaaagatattaagttaccttcttgagaatggtttataatattttataaattttattatattaattatataacgtttaatatttaattacactaataataatataatttaaattacattaattaataaaaatatataattaagaataaacaagtctttatctctttaagtaaaattatttggtatagggtaaactttttttcaaagtttaaagaggtcacatttcaactaactggatgagtgtggaggtaaaatatggtaattgatgtagtagcaagaaatcacatggctcaagtaatttaaattgaatgcagaaaaatttcttatgttgaacatgttgttggcgaaacaactgcatatggtttaacgcttaactcagtgttaggtgttggccacaagtttgttgttttagagagtgattcttcttttacaataaataaggttcttaacggttccagtagtagttgggccattgataattatgttgttgagtgagtgtaagagtttagcttcccaattgtcgagatattttatttatattattgtatctttcaacttagagcatgaaataactcactagtatgaatatattttttttaacaaataaatacgttcttgttgatcaatccgtataacttttcaagcatatttaaagcttcttcacatgaaaaattttctatttcttaaaggtaatttttctatttctagcttggaataattttatttgagtatacataattatttatatatataaatatagatgtgaaaagttggattttattgaatacatgcttattaatatataagttttatggagatgttgtttgtttataatattgcaacatttaaacctcatcatcattcctcaaaggacaaagggctaaagttggtgcttgattagcttgtttggcttccttaaatcataaattttgatgctaataatgtgatcctagctgtatttaattgtgcttttggagctttacaattattagccatttcaaacaaagttttgattatatttgagatcaccttctaaattaaagttcaaagagcaataagtattgatataaagtattattggtctttaagactatcttgtcttgtaaatggttagtaatattttaaaatagtcattaaattaaattatatgtgatttaatatttaattacatcaataacaatataatattagtatgaacaacctttatttgttcagtgataatttaagtttttgtttttttttatttaagcgtttatatattacaaccatgttttctaaaactcgaacccaggacctccaagatacacacacccacttatggccacttgagctaacctcaagtggttcaatttaagcttttgttttactcttaggggtggaaataaattagcaaataaaactttgcttaaatgggtttttattagaataattctaagtaatatttggcttaatacttattcttgtacacaatttgatacatgggttccacactaaagttatgtttggtaggaagaataaagaatataaagaatagagaaaaaaagtaaccatctctatattgtttaatattaaaagtagaattgaaatgatagaatgtaaattaattactaaaattacaattctatcattcctaaaagaattaattcttattttgtttaaggtcaaatatgatattgtatatatttttttt

SEQ ID NO: 221764 - DNA, 6007 bp, Cannabis indica
agaagaggaatcatttgaatccttaacagctgccttgcccttgcctctagatgcaagcaaggggcgagtaggccccgcagagctctggcctctagagctaatccgtagactagtgtccataactgtgcccccatgagccaagcactggcagagggccctctccttcttctccagacactgggctatccgcgatagaggaacatcgtcatccatctcaggaacatgtccaccaccaggacaaacctcctcagtagtaagggctccattcccactacctgataggcccttggcccccacaactccagaagcaggaggatacaggtcgtacttctgaaagttggcaacactagcaaaccttattatgttcctcttcactacggggagggacaagatgtggttcgtgttggagtgcttatatgtcggcactcactggaagtggtgatgtcaaatctcctagacatcctaggcaatgaagtacttttgggcatatccaccaacttttgacataggcacgttgttggtgtgacccaaccactggtggccaacctaattgaagtagaagtaccccgttcagttttgctttggagcagacttcaaatcaaagtaagatccaatctcatacagagtaggttaaggttagcctagctttgcatagagaccaaagattgctgagaggtattcaatactttttatggtggttagtgttggacacatcacaaagtaagcaactatatctcaaaaatatgggtgtaacggaacactacccctactggatatggtactctaaccatgccatccaactgaaggccagccaatgtgctctctaatccctcgtgggcatctcatagtggacacctctcactagtcaattggccagtatcctatcaacagtctcgataggaataatagatgcggaagagacccacctgtctccccgtgatctaacatcaagaaccttaggctctaaagactgtattaagacatggtccatgcctatcattgtggctagcctagcctgttcaatggctgcccatcaatgcatatgcaccaagagggagtttttggaggatagcacaagtcttaaaagtcctcctcctactaggcacagcctcctccacctcagactcagtgtaaaaattctcagccccttggtcgacctctggcacctctgcttggcctcctctacaatgataactttgcccatcgttgccaccctagcaacatgaggatcatacgctggtgcactatgacacgaccccttcatctagccatagtatattactatcaatccagaataactcaaaagggagcaaagggacagattgaatgttatctctcaaaagtaaagctaacgagacctatgacacaacaattgtcaactccccaaaccaatgctcgaaatcacctgcatagaagagacaaggggaggtgagcaacctgacaaagctacagacaaagtctggtcaattgtacccaacggtacattctaggtaaattacattgtacaaggctgggtatcaatgaagtaccatctcaagtatatctacatagacaaatagtgattcctatgttgtgcacttgactataatggattcattaccaagtcttacatagagttcccatggaaaccacacataagattacagttgcatatgcctacaaggccattatgaaatccttgccgaggtcaaaaaagggttgaatactagttgcccacttggaaccttggccttggccggccagggttcccaagctcaagagggtcggccaggtcgcatgacgcagcctagagctagccaggaatcttatttttaggcataggccagccaccttttgggtaccccctttgtcggttagaccacatggtgaacacccattgccaggcaggtcttgaacaagacccccatcgccggcgagggtataggtcggatctaaacatgtgtttttaagaaatcaaacatgttctttgtgttcttcatgactcaaagagactacaatcacaacgaagttcaaaatctgatctttttcgcctagaaatcacacattacacatcctaagactacaatgcagaccaaaatatccaaaagattacaatctaatgtggaaattagaaaacattcaaagcgaagaaaagcttcatgaaattatggaaaattaaactaaatcaagtaaataggaggaaaagatagcttacccactacaagaaacctttgacaaagagaatgggaagctcggattactgaaatggcacaaaaatcttgggagatggagcaatgtgggggtttggcctatagagagaaggatgagctttcaaaagttactttttctagtaagagaatgaaatgtggaaagtgaaaagagttttccatccataaggcttatataacttctgtgggaccacttctttacttgcaacgcagtgttcaactaaaaagtatgtaaaagtacaatacaattaacttgctgcaacaaataagatcaaacaatcaagagcagatatttcaaagactaaatgtgcaacaaaatttactcagttaaggctacataagtcccaactaagctagaaagtccctatccgcacagacatctgcatagagacttggggggaaatgttatctcaagttctacccacttgacgtggcatgtctatgtagctaatatcagcaccatatggtagtacagcttgccaacatgaagtccaagtcatctactctgcacttcaaccaatcaagagtcctaacactcaaacgggatgatggatgacgaaccagccacctcaaggaggctggctagccacccctggccggtcctatggccagcttctggatagcacaaggccggccagcatgcatcctgcaaatgcaaggtgggccatacattgccctggcaagactttggtgcacagcttcacacgtggacatcagtctagattacaaattggactttaacaacccacaaaaatagagggaaaatatctatttttaaggggcattttagtcatctatatggtactaatttaatatgtaaatatatgcttattttacctaattgaagggtttaagctctcctatataaagagctaaaaccaaaccctaaaatgctaagttctaagtccgatctctctctctctctcacgcccaccatttctcttttcataacttgagatttccaatctctaattcctaaattataaccttaagagagctacattagatcccacctatagtgatctgactagtattatctctcggtatcaatacaactaaaagaagaataggtcattacccgctaactaaaggggtcaaacctctataaaatcctgtgttcatttgctttaattgttcttattgagtaacatgttgcaagcatcaacattgaacgtgactccgctattggttgttccaaatttaaggtcaatagaggcaaacagcctttatagcttccttcaaaaactagctacatgtatcaagataagtcaaggcattcataagaataagattatgcacactcaagccaccatggaaaacatctacaactctcacactctcaactccaatgatctgaaaaaggctaaagtcttccaagcttctcttgataccctactttacaaggacaaaatcattatgaagctaagatcgagagttaattgacttagagtagggaacaaaaatacctaatttttccacaacaaagcctttactagaaagaaaaataacttgattcgatccattactctcggtgatgacttgatggttaagggaaccagcaacataacatctcactttgtgaatttctataaatccttgtttacctctcaaggctatgacaatgtggccacttctgagattctcaatggtatccataataggctctccctaaaccaaatgaactccctaagcaaagcctacagtgagaatgaggtcaaagaatcacttttccttctttcttgggataaagcccatggggtggatgatctcaatacctatttctaccaaaataattgtaccactcttggattaacctttgcaaagctattttggttgtcttgaacaataactctgacattttcctcatcaataacacagttattgttctgatcccaaaaaaaagaatgcttccaaacttagggacttcagagccatcagccttgttcaactctttacaaagtggtggccaaagttcttgctaatagacttaagggggtccttgatactatcatctccaacaaccaaagtgccttcctttctgatatgttgatctttgataacatcattatagccaatgaaatcgtgcatgccatcaacagcaggaagtctaaaaagttaggatgggctgctatcaagttcgacatgaagaaagcttttgacggagtggagtggagctttgttaaagctctcctccaccatgttggtttcccccacaattttacctcccttgtgcttaagtgtgtttcctcggtctcaaccagaatcctcattaatggtagtttttctgaagtgtttcatcccacaagaggaataagacaaggggaccccttgtctgcttacctgtttctcttagtggatgaagggctctgagctgtcattcgtgtcaaggaatccaacatggaattctctgccctttcaatctgtaggaatgcccctgtgatttgtcactttctctttgttgatgacaacattttcttcactcatattaatgctcaatccagctcagttattaggggcatccttcaaacctataatcgagccactagccaactggttaactttacaaaatcagccattcttttctcccctaataccaaccctgcagccaaggttaatttctacaactctctgggacttataaatgagggctttgtaagtaagtatttgggagttcctcactgtgtaggcaggggtaacaactctgccttccattatctggtccaaaatttctcatccaaaatgaatgtttggaatgctaagtttttttctagagttggaaaataaactcttatcaaggttgtggtccaagctatcccttcctatgctatgtcttcttttaggttgcctagtagcacttgtaaaagtctccaaaagctcactgctaatttttggtgggcctcaacaaataacaaaatcaaaatccactggaagaattggtcttctatgtgtgtctctaagttttatagggggctgggtttttgatctctcacaagtcacaatcaagctctcctagctaagcaggcatggagaatcagaactaacccatcctcccttcattgttgctttctcaaagctcaatcctttaacaacaatgacttccaccaagctaccaagggactttgctcttctatcactttgagaagtcttctttggggcagagatcttcttttaaaagggtttttttggaaagtagaaaatgggaagtccatcttgcttttaatacctcgttgggttccaagtttgactactcttactcccttacaagattctcttccccataaccttattgtttccttttacattgatgatacagggtcctagaacagaggaaaactccagtagctcctgcctactgaccaagtcgatatggtaatacaggtgcctatcgatcccttcaacaatgattgcctcatttggaagcatcatccctctggcctttttagtgtgaactctgcctatcatttggcaaactccttatttgcctcaagttctccctcttccattgagaaagacactacaccaaaaatgctatttaataacacttataaatgtcacaattatatatttttagtaacacttatagtttttgtaacatttgtaggaagtgtaagatatgcccatgtgaagtaaagtgaaatgttagtaaatgagtcactttagtaacatttgaaaatgccactagaataataattaataacattttcaaatgtcattaatagatttttatatgtttattttttatatttaaataatttttgtaacattttaaaattgttattaaattatattactcacatttg

SEQ ID NO: 221765 - DNA, 1133 bp, Cannabis indica
ttgttttttattttgttttaataatatatctcattatttttatttttaatattagcaaatcacatcaatttaagattttcttatatgtagttttttaattattttttttacatataataaaaatataaatttaaaaagtataaattattttatcaaatgcatatatatttttactttgagaacaaataaattaaaaaaaattatataacataaatttttcatatttattattataatgatttatattataacattatcattataataaaatcttaacaatttacaacattttaaaattagtaatttatctaacacacagttcaatttatttccatagttttgctacatctatttttcctcacattataactataatggtttattcccgtacgtaacaactactttttcccttagctgtgctaaactgacgagtaatctattttaaagaacaatcctttttgtttaccaaaaatagaatgaaaaaatagtattaatttatttaaaaataaatatacaatatatatttttttttttttttgaaaaatgagaaatgtaatatattcaaaattatagtatcttttctttgatttatttttcaaaatagtatctactaatatatcttaaactagtaaacattctgcaattcgcggcagatgtacaaagtattttaaattatatataaaaaattaattatatattttaattaataataattactcgatacaattatattaaaattttaattttactataaaaaatttgcaacataaatatttaaaatattaaatttgttgctaataaatatcagaattcgaaaaaaaaaaagtagcataattcttcaaatttctaaacttaacagttttattggtaccaagctaaagaataagaagaagacagatttgagtttaagtttgattcatttataatttaaatttttattctgatgtgtgtgttaagatttaagttcaaattttattgtgtgtgtttttaatatttaagttctagcgttaaactggggttctactatttgagtttgtgtttataagatttattttcttttattattattttcatagattttgagaacttaaatttttttatgttgttttcattgattattgagattgagagtt

SEQ ID NO: 221766 - DNA, 2783 bp, Cannabis indica
atccaaggccacaagtttaaattatggaccaaatggtaaacatgaaaatattaccaacccgcccaatgggagggaatgatcagtttaatacccgtactcaggcagaggtattagaacaaccccttactcaaaataatcagacacaaaggcctctaggcacatcaatatttgaccgattgggcaccgtgcacgacctcagaaacaatctgaatcgcaggtgaggattggacggacatgatatttctcctatcgtacaatcaaataatacaaataactatgtacccaacccagttcgaagagatcatcatatgacacaagtcggtcaacaggaaggtcaagttgatccattattggaagcacaaatagatcatcttaagagcctcattcaaggcctgaacgacccaaaactcacagatctagaacttgaccggactaaaggatcaccattctcacaagaaatcaacgctctcgacctactgccaagttcaaaatgtcaacatggaaaatgtatataggtaaagaagatcctttatctcacattaaatacattgaaatgtaaatggaattacaagcagtgagaggtgatgtacgctataaaatctttccacctactttggttaaggtcgcgcagcagtggtactttaaattagctctagggaagtttaattcgtggaactccttcatgtcaaaatttcatgcacagttctcctcttctcggtaactctcatctcacttagaagatttgttagagtaaagcaaatactaggagaacccttcagagcttacatcaatagattcatgactaaagctaaaaaagtgaaaggattaaccgaggaagggaggctggccgctatcctaggacgtattgaacctctaagtgaattatgaaaatatataaaaagaattactgtagggtcaatggcagaattcttagattgtgcagacaaatttataaaactcgaagaagtagttcgacgtgtggacacggttggagtaaagaaaaatcaacaacacaccactacagtctatacgtccatccagccagaccaaaattcacaaaatcacagcagcttaaaccaaggtggtcagagatcaaataatgacagtaggcagtgtaatggaaagaaaagcatgttcagtggcaactccaaacaacatccttgggagaatgcctcaaagttcacagcatttactatcctaacagaagatatagaaataatctttgcaaccacgtagtctgtggtgttatacaaaaaacctcctcttatgaagaaagacatgaggaaaatagatactaccaagttctatcgttttaatgtagattatggttacaacaccaatgaatgcaataatttgaagcgggaaatagagttccttattaggaaaaataatctgaacttgcacaaatatgtcaagaccaaccaagaaccaagggtcgtcaaactaaataacactcaaaactagttgatgcctccaccagtggacgaacatcttcaagttatcattggaggcctccaccttgctagagattcagacaaagctagagaaaaatatgctcgggccttacagtatgaacagacatatgcaattctatccgtagaagaaagaaatcctaagcaactccgtgttagagaatcagttataactttcaacgaagcagataccgaccacatcatttatcctcacaatgaccctctagttgttgaagttcaaattgcaaataaaatggtggctcgaaaaatggttgataacggagcttcctcatataatttgtttaaaataatatatgaaaaaatggggctttaacataaagatctggttccttgcactcagctcgtatatggattctctagccaaagtgtttcttcgctcgaatagatccgcctaccctttatagtggaacaagttccaataagcataatgatgatggctcagcacctggtgattgatgtaccttctacttttaatgtcatgttaggccgaccaagcttatatgacttaaaggctgtcaccttagtttttgacctgtgcataaaatttccaacaaagaatggagtgggttgtctaaaaggaaatcagagaactgcacgtgaatgctataaccttgctctatctaaggccaaaaaggaggacacctctggtcaaagttctaaaaagggaaatagcttttcccaataggaattcgcccaaggcagggatgaagatatggacccccgccttggggaacaaaataaaaatgttgggttcgtagaagcactagaagaagttgagattgatcccaccatgccaactaggaagctcaaaattaacaaaggtttgtttcttaaaataaaattagctttaataaaatttctaagagcaaatttcaacatttttgtccgctcgcatgaagatatggtcgagattgatccaactatcatgtctcatgccctcaacatagatccaaacttttgtcccgtccaacagaaaagaagattgctggacaaagaataagcacaagcactgaaggatgaggtggaaaggctatgcataaataaattcattattgaagctttctactcagtctaggtggctaatcctgtactagtacccaagccaagcaaaatatggcgagtgtgtattgacttcaccaacctcaacaaggcgtgtctaaaagattgttttccacttccaagaatagatcagcttgtggatgcaacagctggacatgaaattctaagctttatagacgcctatttggggtataattagataaaattcatccacttgaccagaattcatgc

SEQ ID NO: 221767 - DNA, 2160 bp, Cannabis indica
aattaatagtaataaataaaaattttggacatctatatttttattaatatttatgacactcttttttaaatgtctataataaccacctcattaaaaatctcactgagaaaactcatgagacaaaactcgatcaaagaaaaaatagtgtagtatgaaattacttcatcttattttggcatttactgatatcttttaatcgacacattctaattttgtgaaccatcttctcaaaagtaaatgttagtaatgactttgtgaataatctgcaagattattaattgatcgaattttttaaacatcgatattatcattctcttgaagattgtgtgtaaagaaaaattttagtaaaatgtgtttagatttttctcttttaaatgtactaacctttaagttgagtgatgcaggcatttcatagagaactgctggtacttctttattggatgttaatccacatggtcctcaaatatgttgtgtcaaactttccaaaataacctttagatgtttattttagaagatgataagtactggtagataaaacaattgtgatatattgaagaaaactgaggttctctactacaaaataattttgtctgtttaaaattgacatgcagtttgtggtagtggtttcaaattgattgtagcattacttgaactccatactgtggcctatttgtgataatgttaactggtgaatggacataggttggggacaaggtgaagctatatcgttgcagaatcattgtcagaacaatctttgcttcgaagatggcaaagttaatcccaacgcaagttcgaggtcccattccaaagggtagaaaagcagccatattgtccttagtagctttagcaaccccttcagaaaatctctctggtttgaaaagatgaaaatcatgtccccatagttcagggtcatgatgaagtgctagagttgatatgagtacatttgtattggcttgaagattgagatgcctcaatcttacttcctttccaatttttcttgtcaatgaaagtacaggaggatataatcttaaggactcattgataatctggctcagctgcatgaggaatgaaatgataatataaatagaacatataagaattgtgaaatgaatgtaatataataatactactgctttaagtttatcttacagttttaagtttggctatcccatctgagtttggattttgttttccaaatatattgaacacctccttccttgcttcatcttgccattcagtatggatagataggaggagtatagtccaagcaagcaaactattagtggtttcttgtcccgcaaaatagaacgtcttacactcatcaaccacatcatctactgaaattctttggctactgctgccatcattgttagcctttactagtaatccaagaaaatcattcccataatcgttttctttactcgtcactatgccttctcttttcttaatcaaatctacaatagaatggtgaattgttttctcaagcttctctgcttctatctgatctctggtcttaagaatcttactacataaaaagaataaaaaagagtataaaagctaattcttttgatgttgcctatatcaatattaataagtataacagctctgtgatagtttatcaactaagacttgtcttgaaactaaaagaaatttacctgatcccaggaaaccttactttgaacatgtttctagaagctaacaaggtcaacctagctagcatttcgaaaatgcccttgccttcattgtaactgctcccaaatgctgtcctagaaataacctctgcagtcaacaatctaaattcttcgaacacttcaatctctttgccttcatcacaattccattttcttaacattgtctcaacactcgcaatcattgctggaatcatactctgtcaagaaaaagttttattttaattacactgaagaaaatgaaaaagtctctcatatatattatgatctgttaggcattgctacttgtctcaaaaatttaattgattaggattgtggtggctgagttgtcaggtgattagtggtcctgatgaaatgtttttttagtgagttgtcctaatagtcctaaggtattacttaaaaatcagttaggggagagttagtataaatacaggggctgattaatgttgtacaaagggagtaaaacttactc

SEQ ID NO: 221768 - DNA, 1563 bp, Cannabis indica
tccctattttggtggttcaactccacctgatgggcttgtaggatcgtggcctatcgatccatccattcttagaatctacatttttgtagggcaaaaacatcactcacagtagcgtgtgtttcttttgttcaaagtgaaggaagttcgtgtgaatatgcactttctctatgatctctctcaacccgtctagtgcagagccatccccttggtcaacctggggttcgttgatgccagattggccaacccttggtccagtctcacaagcataaacttgagaccaagcccgcgtgttaggaatttcagtcattggctaaatagtgggtccaacaacaggtttctcttctagtcggacctctgtggtagtggtgttggccagttggcctagctgggccgtggtaacctgataaccacattcaggttggtcatagttgggtggtacttggacattggggtccactgccatagggtctcgtggttcagtagaacctccgcatcttgtgacagccatatagaatgaaatttaggaaaatggatgagatgcaagctttctaaataagaattttgggctctcaatgaaagcacttaaatatggattgtgaatttagccaaccaatccagagtttgactaggattagattttgcttatgactgccatgtgcggaacaataataaatgtaaaagacacaagaatttatagaggttcgacccctttgattaggtaatgacctactctcctttagttgtatttactcttgagatgatactacacaaattacaggcggaaatcttgtaatttctagctatgactttctttaggtgttttttttggtcaatcaatcatgaaattcattactccatgaacaatttacaacgtattagcatcttcattagaagacctatttttctatctgtacattgatctcgaattagaaacaaactattcagcatttttttaaaaaaacctttagttgaaaataaatgctagcagcagtcaacaattcagcattttcattgttgaaacaaaggctagcagcagccaacaccagcaaaaaaatagaaaacatgctacagacttttgaaccagtcagcttcctcttgctgaattttttttggccaattacagatcactctgttcttcacagcttctttagcggcatgaatcacctggtctgatgcaattttccctgaattccacaacaaatcgttgtgatttttccaaatgtaatacactagagcagcaacggcagcagtgtagactgcttttcgaaacctgttcatcttggctctttccagtcaccttaacagcttgttccaggctgttgtttcagctctccaaccaagccaagctttaacttgagagagacaaagaatggagaaggaacactggaaaaataaatgctctgaagtttcagattgagtgttacaaaacagacattgatcttcacaaatgatattgaatttatgcaatctttctctagttctaagcctgtcttggattgcaatccataaacaaaaaactatgtctaggtgtgtttagtctattccatacctcatggctccaat

SEQ ID NO: 221769 - DNA, 945 bp, Cannabis indica
attatacatatttatattctttcactttttcatacaccttttaacacttattgcacgtggtcatgaatatatctcgaaacataatcctgtggcctatatgtagctagccactaataattgtatacaaagcacaatcttttttcctatatacacaataattagtgtatagcttcattatcatacctatatcccggctgagacgtacataaaaatatatactctttattattattagtttttgtgtaattaattaattgattaaaactggacaaattaatataagcttgcctttaattagtttgcttaagctttctcagttggcaggctatgattagagtaacccaataagttcatcgaaagaattaattaagctaagacccagatcttagctagccagcatactaggggacatagaatagcaagtgtgatcatatgaagtgttacatatacaaataattgatatcaagttaaaataaataaaggaaaataagtatatatataaatatttaaactttgcggccaaaagatacagcaagatatatagggctatataggaaaaatgatgaatgaaactttataatatgcacgttcatgaagctcatataacaagttgcagggaactaggagacatgaaagtttgttttagcccccacctatatacaactttttgcttttttatcatgctaatcaaaatttatcatcattactagtatataatcacactcttcttttacgtgtataaataattaaaattaatatttgttaatgagattttggtagacaagatccgaatattcatttcacatacactactgcagatattattctaggttcacatgacaagaaacacgtactgacatctaatgtagtttgtgtctctctaattcacgacacccaacttgcccagagtactttccccccaccttctctctttctctctctctc

SEQ ID NO: 221770 - DNA, 2870 bp, Cannabis indica
actggatcaaaacaacgatagccttttttcccttccccataaccaagaaacacacaaagagcagagcgtgatgataactttgtacactctacactaggacgaagcacaaaataagtagaaccaaagactcttaaagaagaatagtcaagaatacaaccatatagtttctcaaaaggagacaaacatgaaatgactagacaaaatcatattaattaggtgaactacagttagaactgtctccccccaaaactgactaggaatagaagatgacaacaaaaaagatcaacgagcacttctaataatgtgcctatgatttctttcatcctcaccattttgttcgggtgtatcagtacaagaagtttgatacatagttccatttaaggtaagggaatcaagaaatttatttaaagtatattcaccaccttgatcacttctaaaacatttaataatagcaccatgttgagttttacataagctcgaaactgatcataaatactataaaagtcaaaacgatgtttcataagagaaatctaacaaaaatgagtgtgatcataaataaaaaaaaaatatagtatcgataatccccttttgtaataacaggagaaagtccccacacatcatagtgtactaaattaaagggtgcaacggaacaagttgtacttttattaaaaggtaaagcaaaaaattttgcaagtttacatccactaaaattagaaatatcatgatgttgcaaatttcctaaagatcctttagaagttaaaaattttaaacgagactctgaaacatgaccaaggcgagactgccacaaataaaaacagaagacgaaagagacaaacaaaaagaagacaaatcaacactaggagttgtatatattggtaatctcaattcatctaaaacatataatccccctcgcctatggctggtcccaatcaacttctgagactgtggatcctgcacataacatgaagtagaagaaaaagatacggaataaccaaaatcacacaattgaccaacaaatataagattcaatgaaagattagaaatataataaacattaggaagcaacaaatttgaactgacaataggaccaataccatctaatggcatgggagaaccatcagcagtcatgacatgcacaaatgatgtgggactcaaagaaataaaagttgcagaatgcagagacatatggtgtgaagcaccagagtctaatacccatgtagaaggtgacatacccgacgtgctagtgggtagttgacctaccaaattaagaacaaacatggaattaggttgagtagcaaggaactttcgaaactgtcctgacataacaacaaaattgtaagagccagggttgcagcaatactaaactgtggaggtcgaatttggttattaaactatggttggttacccttatgaagaggcttggactgatatctctgttgatgcagagcacaatttgcaagcttaggacattgagctttccaatgacctttatgtttgcaaaagttacactcatcaataccaacctttgtacgaggttcgttctcctgtagaggaaacaatgtagtaggaggaactgccaaaacagaagaattgggggttgagagaatacctttccttgactgagacttgagacaaattttatctgttaacaattaactgactaatgaatcaaccaaaggaagcagaaaatgatgtaatatagaacacgaagtccctcaaaatccctatgaatagccattaaaaattgaaccaatatttgttcctctttacgagtaatatacggtgcaaaagcacgtagctctgttgatttagtgagtgccaattgatctcaaagatctatcattatagaatagaactcttgaatgctcatacctttctattcaatagttctaatatcagtttctaattgaacctactttgaaaaattagaatgtgtgtacagtctcgcaagatggtcccaaacttcttttgttgtcttgtactttgctaattgggtactaatagattgttcgacagaattacttaaccaggtgagaatttttgaattgtcaacttcccaatttttttaatagatgttaccatcagctggtttcctctttgtttcagaaatataaccccacatcttttttcctttcatgaaagttttcatatataatacaattccaatacgaataattctttccatcgaatctcacactcaccgcttgaaggaaatcatctttattggtagtcattgtagaaaaaagaacaaattgcaaaaatatttcaaatacaaaactgatgaaaatttaaaattgtgttgcaaaaattaatacccaaaattgttatgcaaattaagaaaaaattcaataaaattaataccaaaaattagaatgtcaaactgtacggatggcgattgtacggacgagctgcctcctacaatcctccagtcaactcaccgcggagttggatccagaaaagttgtgattacgcttaagaaatacactatcataaatcttactctgatatcatgataattatttgtgaagagaagaataaccaataatacagagaaattaggatttcattcagttataaaattaaaaataaaaaaatacaactaataagaaagacttatataggcaactaacataaaagattaaaatattcctaaatactatttaacaagctcacttaaatacttttatggtcaattaatttttcaaatagttacttagctacaatataatttacttaaagtagttttgtggtgaatttttctttttacgtaattccttattataaaaaaataaataagatttttttaaggtaacttacattaaaaaataaaattagacgcaaccatccctaaattacataatttttttttt

SEQ ID NO: 221771 - DNA, 2775 bp, Cannabis indica
tatttccattatttcctctcttaattattactgatgagaaaaaataatttttttacaaaagtgtaagattttgttcaaattttggtaatctctttattattttacactcaagattgttttcttatagagagtttgtactatcatctttggttcttgcttttacttgttagaaaacaaatctaaaatacacatagattttagactatcaatatatatatttcatatatttttagaaaagaaaatcttcttcattcactactaaatgttaaacattacaatttaattaatttaaaatctaagaactttgcactatcaattaataattaataattttttaaataaaaaattttatatataaaataaatttaaataatatcataatgtttccctttccttataattatacttattttattttgagtatttttttttctatgaaaagaagggatcacgtggtgcagattctttccccactccttcggtcatttatggtaattccagggaccacgtgttagctatgagtcttatacctcagtcttccttaattgggtcatcgatagtcacctcaagggttcccattacacagatggcaccacctccagcaaagacggtgagttacgaacccttgacccaaacaagggaggatgtcagtaaaagcaattcctaccaatacaccacacaacacgtggtttattttgagtatttttataattgttgatttatttttacgaaagatttttataaataaattaaatttaatttatgaagaaaaaaattaaaaagatttaatcataagaatataaaattaatttttctaaaaataaaattaataattttggtaaaaatatctaatttaattttggtttaaggtgttgttgaagcttgaaaccactacaccttctctaaacacaaattatagaaaaagaagactcatttgagttcacggaaatgagataggattggtgtgtgtgtgtttagtcttaatctaatccattgattacggtgaaactaaaaagataattgtctaatcagtcttaattgatagacaattgaatttggagcacccaataaaagtaaaagtgaaaacttgtttagagattctaacatccctttcttatctaattcctattctccaattacattatgaaacacactaactattaattcccatttaaacaacaactacgacaagaaaccacaaagttggctctaacaacatatttagcgtgccaatcctgacactgagtggaatgaattgctttcaagtttcaaccgtcgtagatgtagccatctttattgaatttacattaatcttgtttttattaaaacgtgtttttgtccaaatacacatttaaaaaaagtaccatatattaaagcttcttctattcttttgtgaatttattttattgtcttagagctgtaaatgttgctgctgatattttgactaaatttgttctataaacaacaactaatacagtctggtggtctgagtgtctctcttgtatcaaaaccgttattattgctaaggccatctatcaatgatatcttttaactctcagttccttaaaaatctttgctctttggtagtattttctgaagctatttttttcagtaccatatatttttatacttttggctaattaataattaattgttacctttgtaaaaactctccaaatgattaatttaatattcccaaattttctttcattgtaataattatctattttttgtatagtatatatattttaatttatttaaatataatatctagaattaaaaaaaaccaaaataaaaaatatttttttgtagtatcggaaattaataaaatttataaaatattgataattttataaaataaataaacctttatatatataattcctttttttttctctttgtttctaaaagcatccaacccccggaatatatgcataatgaattggttttattttttttttatgtaaattaataattaacataaatattaatttcatataatatttattttatatattgagtataatatacttacaaaggtgtaacacaacgaaatactacttcttctgtatattcaaaaattctagagagagaaggaaaaaacattttccgatagaaaataaaaagctcgtttggtacgccatattgtattatattatgttgtattgtattagtattatttaatacaatactatgcttggtagtaacttgtatttatagattgtgtaaagttataatatattttcaatacattcgacccaacaccaactacggatcgagcccaggtctaggtctcgagtccgagttcaagttcgggtctaggactgagtctgagttcgggacccgagtcggggttctaggtctcgggttgcaggtctgggtctggatccaggtctcgagttcaggttcgcgttcgggtcctgagtttggatcagggactcggggtccgggtccgaatacggatctgggtccaggtccggggtccccgtccttgttcaggtccgagttcgggtctggttcgagtcccgagtctgtgtctaggtccgggtatgggtcctacgtccgagtccaggtttgggtctagttttaggtacgagtcccgggttcgagtttgggtccgggtttggggtccagatctaggatcggggtccgtggtctcgggttcgagtcccaggtctcgagtccaggtcgcaggtccgggtttgggtccaaggttcaggttcgagtctgggtccgagtcttccgagtcctatgagtctaatgtccaagtttggg

SEQ ID NO: 221772 - DNA, 2934 bp, Cannabis indica
ataaaaaattttgattttataaatagtattgtataagtttttttagtacattatcagagtctgtattgacaaaattagagaaaaattacagttttacaaacattaagtacttatgtcgctaaaaaggaatattgaatttatgccccttacaaacataaaactttaggcacttatgtcactataaacctaaatatatgataatgagggatgagggagaaggtgaggaataataccacgtagataccaaagtgataaaaagctttaatgaaaaaaacctacagccactttcatccaataataatagaacacgtgtcctatcattttcaatgtcaacttctcttatctttcacctacttctcttttgccgacacaaggtaagggagggccgagcttttcaatttttaggctatacattcatcaaatttatttttaaataaaatttaatttaaatatactcttttataagtgttgtatctaaattatcctcacattctcacttaaatagatttgtattatttgaaaatagatgtgtagatttgtgagaaagttggaaaaaattttaattaaaaaagaatgaagacaatcgcgaagtgataaagataaaattggtagaatgattaaaaaaaatggtaagcataataaattttgaaaaaaaagataataattaaagacatcaatttaaaatatgtatgtaatgtaatttcctataaattttttcatataaaagaggagacaatatcataaattactatcttttgtgaaaagattatacttacaagaaaattacgtgaaagtaacatgaaaacaataatattcaaataacataaaaataatatacaaataacaaaaaatcaacaacaatataacaagaatacaatataaaaatacatcaaaacaccatattttacgtaaataaaattttaaaacccataaaaatatttaaaattctttacaacatatttttataatttttttttttgtttatatatatattatatatatttttttaaattaattcttataaaaacccaattaaattttttggctcaaattaaacccctccaattagcttgagacgggcctcctttttatacatatggtttaagcattattattagatagtttaaaattaaattacactaataataatatattagtgtttgacataagtgtccttaacatttattgtcacttatatatgtcctttcattcttcattatttttaagttgaagactacgttatatgtattaaaaaatggatttgacaaaattggataagagtaggttaggtgatatgaacaattcttattaataaattttaaggtcaaattcattattttttgtttgacataaatacttttgcaaaaatgtttcacctaaaaagtttttagtataattattattattattttgttaaaagactgtatacattgtagttatttaagattacatataaatatttagataattttaaataatttacagtatcaataataagattcaaatattattataatgtataaagttttaattatatacaaacagtcttatcgtaatagtatacaccttatatgataataaccacacgatttaaaattaatggttagaaaaggtaacctactggtaggaaacttttactaagtcttactatatagtcttgtcctttgaccaaaaatagcttctcattaattaaaaaaaagtcaagaatttgtatttctttgaaactttttaccccctatttataatagattcctccctggtccaaaagactctccccgtttttctcatgctacctcttctatttatctttctcttccctcaataaattttctttaatgtgtgtctattattatttatgaaatgttattacttatcttgacgactatcctttatataatctgaatcatcatgtttgagatatctgagtcattccatttgagatatgtaaatcatccaattcgagatatgtgagttaccccatccaaaataaatgatttatccattctgagaaatgtgagtcatcccgtccgagatatatgagtcatcccgtccgagatatatgagttatccagttcgagatatttgagtcatcccatctaagatacataagccattcatttaggatgatctaaaatgtaactcttccaccgagatgttcattttatctaggatataactctatagaatatacaacaataaatggaccatttgtgcctttttggcaagactgaccctaggtataggtgggctaagttcatacctagggccacactatctagaggcctaaactaaaaaataaagagaaaattatattgtatactattttactttatttctatattttttaagatatatcaacttttatagatgatgttctcattatatctcttaagttaatgtaaattatgtgctagacttaaatagaatgtgaggatatattagacaaatcactcacaaaagtagatacattttaataaaatattggggtttttattaaaatacttgattttgagtaataatatataattttactgccatacgatttttttgttacaaaaatattatctttttataaaataattgtaaaacaacaaaacaaaacaattaaaacaacaatgaaataactaaaaatcaagcgtggaatagtaaaaatttaatacagtatacaatataaaacatatttagtatttttgaaaaaaaattcgtctcacaatattataaaaggttggaaatttcattatatagtgtaaaaattcttaaaatataatataaacgtatttttaattaatggataaaaaaatatttttcagcttaaaagtcttattagtctttttaagtattaaatatttatagctggatgtaacatacattacaagttctttgggcatttatgaaattttatcccacaacaataaatttaatgattttttttta

SEQ ID NO: 221773 - DNA, 2550 bp, Cannabis indica
caataattcaggaaaaatttttatcggttagaaaagttcagagggcatgatttggtacatgttaaaatttaagggataaaaatcataatgagtctttcagaaatactaaaaaatactcatggtacctagcacacttgtgaagtgttatatcgttattagtttaattcaatattgagttccacttattttacttttataaaaattataaaaaaacagctagtcgattataaaacgtcacctcataacggtattaataacaattatctaaattaaattatgtaaaacttataattgcactaataataatataacaggtagttttctttcattcctctttttttcctactcaattctcaatgtaatagttaagtaagttcattcaagattgaaaattaaaaaataaataaataaactatgggacatgagattgtacctctccccttttttggatttcaactataaactttgacaatttaatttaatgtcctagaaaatacaacatccacattggaattggataataataataataataatacataacagaacacaagcacaagcacacttgagttgagttcaccttaatctataccgataaccttttctattgttaggcttcctgctatccaagataccaccaagagtggccaatgcatcatgaaatttacgtatgttaaggaaccctctaatcataccaacttcaatctcagacagctttgctttctccatcactatatccacaagcttaactaaggtatcttccatagacaaagcacaaagtccatcagcaagcaaaacaaacgatgacaactcaggtatgaatcctctatctgtcatctcaatcacaaaatcaacagcttcaccaattggtcctccgccattacaaagaccccgaaacacaatcttgtacgatatagcatccgggggatcgcctttttccatcatttccctgaagaatctcatggcttctttcactctcttccttctaaacaatgcttgtattacagggttgtaagcctgtggagttagaaccatacccttcatctgaatagttctaaggagtctacttcctacctcaactctaccagctttacacaaacccccaataagtgtcccataagtgacaatgtctggttcacagccatttgaagtcatgttttgaacaatgtctgcagcttttttgatatctccattcctgcaaaaatatgtgagaagtgaattgtaagtgaacttgtcagggactaaaccttccattatcatctgatccattaactgagatgcatcttccactctcctgttctgacaaagcccatcaatgagagtgttgtatgtcactgcatctcttgaaatcccttgaatttccatgtcatcaaatatctcctcagcttctactatccttttgtttttgcaaagcccatcaatcaaagtattgtatataacaacatttctagcacaatcacttgattccatttccttaagcaagttcaaagcttccttaattttccctttagaacaatggctgtcaatcaacatattgtaagtaaactcatcaggctggcaacctttctccttcatctcctcaaacagttccattgccaggtcgtgtttcccggtcaagcagaggccttgaataagagagttgaaggtgcaagcatcaggtaaaatccctttggtagtaagagcaaaagcaagctcagttgcctctttgaccttgttctccttacacaaggcactaatcaaagtgttataagtgacagtgttggggaaacaatcccttgaaaccatttgattgagaacttccacagcctcatcaacctcacccaatttgcatagcccagatatcaaggaattgtatgtataaacatcaggatcaaaaccctcctgaagcatcacatccatgatctccagggcttgcttaacatggccagacctgcataaaccattcaccaaagtattgaaagtaaagtgatcaggttggaagcctctccacttggccatctcctgaatgaaactcagagcttcatcaatcctaccctctttgcaaaaaccattgatcaagacattgacagtgacattagtacaagaacagccagactcaagcatttggtccttgattcttaaagcagctctcatatcaccttcttcaatgtaaccctgcataatggtagtgaatgtgatctcatcaggagaaagaccataactgggcatctcctccatcatcagaatggcaggcctaatctgatgagccttacaaagagccttaatcaagacattaaaagtggaaacatctggcttaatctttctactaaccataccagaatgagcagtttcaacaagtttgagcttgtttgcctccacaagaagattcaacagagaattataaaaatgggtatctggtttgaccccaaactcatcctccatgagcgagataagacccaagatttcatcgtaaaactcgaagtgggcatagctctcgatgaaaatcaagaaggtggctttatcgagtgggcaagaggtgcggtggttgttcttcatatcgagaaggagatt

SEQ ID NO: 221774 - DNA, 2811 bp, Cannabis indica
cataaaaagcgatcataatatgtcatgtttctaatatgagatgcatgataatatggttgtgtgggatttctatgtatgacatgttactcactaatacattagtattttattaattaactattaaggaatatttatttaaaaacaataaataaataatgatgataaagtaggtaataattgggtatttttaattttacaaacctttgcaaaaaaaataagagaataaattataaaactaatatccatcactcgaaatgtacttttataatttgtaggatcgtcataagcctccaaattaattaaaataaatttaattagttaattttaaatcaaattttaatttaagacatcttttaaaccctttcaattaattaaaataattttaattaatttatttttagataagctctttatttaagacaactttattatcatttaagttttttttttaagatagtaatatttattatttaatttttgttaagactacttttgtgttaatatggttttaagtttgagtttgaatttcaaacttaaaatcagttatatatttttaattcaaaaatgaatttgaaaaaataaatatccctccaaactttattattttatcttaattaaataaaataataaaattattttattatttattattaaataattaagataattatcattttaaatttaaaattcaaatttataactatgatattaatttggaatctaaatctaaataaatattctaaaataacatttaattacttacattaaaaattaattgatgatttattgtgtatatactatgtaatatatatacattatacacattatatatacataattgagtatacatatatgtatataggtacgagtttggagtttggatcggccaccatggcctcattatggctggcagctcctaggagccaccatggcctcaacgtggctagcaactcctgggagccaccatggccacagtggccatgaccgaccaccataggttccagccgcacacaatttgcacaaggacgaacagtcgagaatcaagagacccaagacccgattgggtcattagtgtctcatcgagttcgaagaacccagctcacgtcgagctagtgagagtcgagagggaacaaccaaaagctattcaggcctagggagggtggctcagaccactagggtcctagttctaatggtggttcaaccaccatggtccatggccacatggaccgaccattgccttagacctgaaagggtctcctcccttttcaacctcacactaggaaggacaatagtccttgcatgaatctcgtgcatgttttgacgtaaactttgcatggtcggggtccctccatgagcatgagctcacatgcatgtggtcgtgatctttatggtgcatggtcggaattcaagtttaaaaatcaagctcacatgcaataaatattacattgtataatttttacgtaaaattaatttcttaaaataaaattacataaaaattcctatgccacataatgacttacattattttcaataaaaatgaaaaataataacaataaaacccacacctaattataccatataattaatgattcatcacctctcatacattcacaataatataatcatccattcacatacatatcacatatacataaatgaataaaacccacaaaacatttaatgtatacacattcatggaattgctctgatactaatcattagttttatgttactaaatcaaatacacatcaaagggattctgtattactgattatcattgtaccatatctcaatggatctccagatgttggtacattaaattaaaatataaaataataagtttagaacatatacccattgaatattatcagggtatctttgaaatttctcatatgttgtatcccttaatttagatgatgaggatgatatacaattaaattcacactagttcttccaaatcaatccatcacacacaaggaatagtgtgagttattaatataaagtgtataatattgttcttgttgatttctcaacacatgagcaaaaatagttgacagagaaaattattttctttttctcttctttgtatttcaaaaatagctattgaaaatcattcactaatttcttaaattggacttctatttatagtagtcaaaaaccctttaattaaattatatttaattattaaaataaataaatatctataactgaattcgattactgatatttatgaaggaatctctcaactacttaagagaatatttcaacaactttgaaattcaataacaacttttcaaaatcaaatatttatctgattaatttaattaaataattagttaacccaaaaagacaaacttgcataaggatagatgcctaccttggaggatgaagaacacttgaaggcttcctgaagatgaaatttcaagaatttttataaggcttgggagtggagataaaaatgggaggaatgaaaaatttgattgaaagctctcttatttataagcggcttcaatttcttaatcgtagagcaactgagaggcttttaaatttaaagctttaaaggaagaggtaaatgataagtaaaagatataaatatatctttgtccttctcttttcaagctaaatttcttatagaaataggaataggaattcaaatttaaaaggtaacatcaatttctaatgctactaagattaagaaaaaattagagatttaaaaggaaaagataaatgataagcaaaagatcaaaagtcttttctctgcttctttctctcgctaattttcaaattgcactatcaaataggattagaatt

SEQ ID NO: 221775 - DNA, 2017 bp, Cannabis indica
tttcttattttaaatgacaaaaattagtagagtaatgacaatactttgttcacaaacctttgctcctagtcctaacacttgctgaggaggtacaacaagaggacgctgttgccttactctctggatctcttcatcttgttagataattcgaccttgcatctccgcaaacctttgctcctagtcccgaggaacctatagcagattttcataaccacctctgtgcaatctaccacggcctttgccgcgtccacagaggtgaagatgattttgacctccccgaccgcctcctatctcaaccatattaccatagcttctcgtatttcgccaggcgtccatattatacgactagcctgcgaacccataattcacgtaggtcagatagcgatcaaatacaatccaactaccgcatacatggaattttgagcaatgcactattcatctaacatattactaacatgcttcttatcttgtttttctaatcaaataaattactaaacaagtaaagacttactaaactatgagtcgagcttatctctgagtataattgtatatatcttgacagtcttcggtaaacaacctggcagctctgatgccaaattatagcgccctacttgcttaggcactctacaataatttctaattattgtgcacgcttttgctaatcaaatttcttgaaaaacgtaataattaaaactttgaaattaaacttttaactttaatagatacataactttacataatttttgggatcccatttaaaagtttaaaacaatatacaaaatacatttttcacataagtgtggccaagtaaaaacaaaataaaagttcatgtcgtcccaaaattgaacgctctaggcctaacaattccgatatgtacaatcacctgcaagctctagactcgctactgctcagccttcgtctttctcttacctacacatgtaacatatctatcagttaacaaactcagtaagaaaagcataaaatataaatatattaccgacttgtgtataggctcccatacacctatctacaaggcttaacagataaatcaagaacgttcttgcctttggtaagattgatcatgatattagccactactagctctatggtcgcgctgcgaatccagcacgataattgtactgctatgatagcatcattctatatccaaaagtaccattgaccataatatcactcttaaccagaactatatactcgtactgctgaccaggtactatagtttgtacagctatgataacatcaattagtactttatggaattaaatatcagtcaaaactagcaatatactcgcactgttgacctgacactatagtttgcaccgctatgataccaattcatatattctagcaacataaacatgtatatcacgtgcacacatatacatatatacatctaaatctattcttatcttttaaattcaagtgttccggtcaacctaaatagaaatatcgctcgctaaacaaagaccttatgtcacatttacgtaaaaacgggtaaataacttgttaaaaaccttatcggggacttaaattcagaactagaaatttttctatcaaaaatagtttggtaataccctaaatattaagaaaatatgaaaaaaaaataagacttcaaaaattgcctaaaaaaatagctggtcgtttctataaaaacagtagattgtttttctgggttactgccagcaaaaacggtagaccgtttctaagataacagtttgccattttttgctgcagttttccaaaacatgtcaaatctatcccaaatctcaaaccaagatccgaaacacttaattaaggtccaacaaacatattccaagtgataacaacacttataacataaaattatgaaaaccaccattgttgacctcaaacaagctttaaaaaacttcatttcattttattccagatataaacccaagacaaccctaggttttgacataacctattcttaaaaaattgcacgttctaactaaactaaagctttcaaaactcaaaaaga

SEQ ID NO: 221776 - DNA, 5208 bp, Cannabis indica
aagtatattcaagttttcttgaacaaattataattgttattgcaagggagaattaatgactgctcgcaaattaaaagcatggtagataataaactgctcgtgcgtatagtagactattaactacttaatattaaaggaatatacgagcaatggaaaattcctaaagtactttgtatgtgatcaaaatatgattgtttaaattgtgaataaaatgcaagcaaacaactatgtattaaagttcaagcataaaagtacgaggcattaaatgaagataaaaaccaggttggccatccaacctagcaaatttgtctttacagaaaaaaaaagtaccataaggggcaaaccattatctcggccctagggccattttcttacataaaataaaaaagacaaataaaaaccaagcctaaattgtaggagacttggatggatcttcttcttctactgcctcggcctcttccttctctttcttggtcttctcacagaaagtgagaatttcctcctcatcttcctccaagaagcttgtgtccatgtccaaatttgctatcagtgctcgataaatggtacgaaggccaaccttgttgcatcgatccttggtttaagcctctttcccctcgagtacccctttgagcttcttgcattaatcagatttggcctttgttgccttatcgcccttttcgagactcttcttcatcctctcgacttctttggtgaggcaattaatttcctgttgagcgttgttccatttcttgaccacggcctcatgttgggccagtgagttttagacctccctctccaggtattttatcttttgtatgcctcgccactgggaggtaaaagaagcctggagattcacaaacaaagatgtataaaaaaataaaggggaagaagaaaagaaataaaagacgtatacagattaaggcaataaacttacaagagggtatgagataatcccctcgtaagcattccttccaaatccccatgattgattaaatcccaatcatggggaaggagagccttgagttggcgccagtaagtagctccaaactcctgggcgaactctaagctagtcttccctgcctcggcagataacatttcaatggccttgctcgaggaggcaaggtgtgggttgtgttagggggaggctcgttggtacttgcgttgaccgcaggaggagtttgattttgagtctcagtctcagggacctcgaggttaataggctgagaggctttcttctttttatgagcgatggttttcctttgccttttaaaaggctccacctcggcatctgaaggaacacctgaattggtcgctctcttcttccctttcctctgcataacatcctccaagtgcatatctgcgagacaagacgaaagtattagcattagttataaatgagtaaaagggaagttttgggcacaatattccacctaaggagtttaccatagtcactagaagacgaggtatgactagaagatggggtagaaggaccataatatccactaaaatctttacaacctgtgatcttgaatatgtgaaaggaatcaactggttctaaatcccagctcgcatttaagtgacttgccctatccatcattgtaccatatttctcggctataccatgatacgactcgttacagtttatctggatgtggaatctagggtaccagttgtcaaacctatgggttatgcgatctataaggagagggttccaaatataaaaattaaggcagctttctcggaatgtaactagagtggtacgttcagccctaagcagtgtgggtgaccaaccacagtgattacctcgggacgctccttcaccagctttttgaggggcaatgttttgaaggtactgtgctcgagccacgcgatcctaggccttttctctgtctgggacgggaacctgctgccaagaagaatacttgggatatttgtaatcacaagtaaactccttgtcagttaggaggtccacagatctcagattgaccacgtttagaaggaagtcgcatgacctaaggctataaggaagggtcaacaggagcctgcgtcggttggccatcaggagtaggggcaggtcttttagaaagagctgtcaaaaacaaaacttcagtcagatatcttagaataaaaagacttggattaatttaaccaagtctaatgagaacaatcactttcgaattatgctaaaggtggttgtaccaattggggagaggtcggttgtccaaaagaagttatccttgaaggatgttttatttggcaaatccataatgattttggactcgctggagtgagggccaagataataaaagcctcctgcggcattcttcctcactggaacgactttgacggagtaaagatactctatttccacaggagtggggcacttccaattcaggattttgtacagaaccctcaaacttgcgaggattttgtaggagacgggatttagttgaaatggggtgagcccgaggtggttttcaaagtccttgaaataatcaagaacgaggattattgccccagccctgatgtgctcaaggctctaagtgcctataccagtcgagccacttgtactggcctcaccactggccccctcagaggtcttgcctataaaacgcacaggtgggtaacaaataaattcaccagctcgtactgacctaacttggcattgtcgcccatactcgattccacaggtccttagtgaatcacctatgtagcttgagatagttcgcacactcgactcaatttactctgcctctaaggtgacgttaggttcctagggagtctttgatttacgtggcttgtgagacattatttcaaagtccaggtcacatggttcaaaagaaattatgactttgggtaaaaataaaggtttagccaaaggaatagaggatacactgggagattcaggccaactagcatctcgcaagaaacgacatttgccttctgatttcttgcaagaagcatctgtgacgactagcattgtattattgatggattttcactaagtgttccctaattctttcatcgtttatctctaatttggatgtgggtttggaaattttgggattgtaagggatggaaattttatagggaactcaatttctaaatcttttggatgatgaatatctgaaccagattgggacattgctgcaaggagacagcaatcccaattcctggaaagaattttatcaaaccaaaaggtggtgaattgaaggttctgtaaaacctatgtattgtctaaaccctaatatttacccagatacagttcagccctaaaagttactaaaaccaaatgagatgacaacaatataaacaaataagacaacaattaaacccagaattacaacataataaacatgtaagatgtcaagaagtaaagccacttactgtttaaagttgggatttgggacgatgaacagctctacgatttgcgaatccctgaacgtagtgaagatctctctgagtgcgtgaagtcaaaacttaatcagatgaaactcgtagagaaaatatcaatgacagagagggaaaacaagtttttgaagcaaatcaagtgatgaagaagcttaatttcttttagaatttaaaaaatggcaagggtagtgaaaaatggttccttttttcattatatacccacgagttaatttctattagattagagagatacttgatcctacggacagaatttgaaatagaagtggaaaggatagtcatctaatgttgatgtacctcgaaaccacaaaccgccaaaatcagaagacatgcattttttcaaaagagattatgacaaatataccctttgtaatcattaaaaagaactttttaaggggcaattgttatacccaaaatttggcaagcactttagaggaggacacatatcaaactgggaagaatacgaatcaataaatatagtgataattatatttgaaaatggaatgactcattaaatggggaattgacagagtatatttacaacttgttgagtataaggtcttacgcgacataaagatatacaaactgttgcctcatgcattaacaagaaaccatacgacattagatgtgcaaggcggggcatgaacctcattacacatgaagagacgtaggcaagatataatgactattaagacacttagtgtataatacaagtatacaaactaaatataacagccgggtaaatccaaacaactaatagcgaggcgtccatctcgctatgggaaggcacgctcatgataccttcactaatcatctccaaatatctttcaatgagattcacagctccgtcgagtcagttctcttagatagaagctaacattcaaatgatgttgactattaaagttcaccttgtcaccaagaactgtgattgtcagatggagcgttatgtcttcagcgcagaagcgacgagattaacattatcaacctcgaaaagatgtgagaaaaactcttgctcgctaccagagttattgttgctatattcccagcgagacgtcccagaatgatacgattggcaacgtatttaatacacgtttacattaacccagtaaaagcaaaccaatcatagctgtaaagactcggtttgaccaagtcaaatatttatatatatatataaaataataattaaataatatgtatatgtacgtataaaaaaaaatcaaatcttatatacacataacggtaccccttcgtccccctctctctctatatctcattttctctctcttcaaacactaaagcaagaaacccataaaccttcataaccaccacttcggcgaccaacttcccgccactgcccaaccaaccgcgccggtcagaacggaaccccaggtgtcggcgacctcacctcccaagcgacgctgcacctttcgccaccgttgactcgggatcgcaagtcaaagtttgggatttcaaactttgaacggattttccggtcacctccggcgtccgtttgacgaattgtcttcccactaaactccgctcgtcgaggagaacaacctacactaaataatttttcccggtttgctacttttttcggtgacatttttgtagctccgcccctttccggcgactttccggtgacatagtgtaccgttttgacaaacggttggcatgtgtgtgatctactcgtcgaggtggtcgttttgatatacactacccctattttcggcgacatttccggtacaccgatttttagcgccaccgattgttaatgttcac

SEQ ID NO: 221777 - DNA, 1399 bp, Cannabis indica
aatgatgttttgttgttatgtcataaagattatatcttgataatgttacaagggctcaagattttctcaaacacttttagtttgtaacctaatgaagctaaatctattatttattgtagtgggatgaaagaagataaggtgcaaagagtggtgaatgcttttggtttttccaaaagtaccttgctatttaagtatttagggattccaatttgctcaaagaagaatactgtgttggaatgtcaaagtattgtggagaaaatggttcaacaaatcagaatgtggagcactcacaatttatcatttgcaggtagggctactctcatcaattaagtgctaattgtcatccattcctattaggctcaaattttgatttgccaaaaaaagttttgaaagaagcgaaatcaacttgtagatcctttctttggaaaggtgtagcagcaggtatcaaactaggactagtagctcggactcaagtatgtacctccaaatattttggaggtttgggattttagaatgttttgaattggaatgcggtggctatggagaaatatgtttggaaaaatgctacaaaaaagataatttatggattaaatggatccatagtgtatatctccataataaggattggtggatctatgttactccacaagataatagttggtattggaagaagattgtagatgtcaaaaattattttaaagataggatggatattacctcgttgccacatgtaaatatagtattaaagagggttatcatactctttattttttaccaaatagagtttcttagagtaatgaagtgtggagtcacttgagtatgccaaaacatagatttattctttggttgatagttcttgaaaagattcgtactagaaccttgttatccatgtttaatcatagtattgataagacgtgtttgctttgtgggaataaagaagagtatgtgcaacatttactctttgagagtgtttatagtgcaaattgccttagtaaattgaaatttgacttggatggattgctcgcactcataggttggatgatcttattcatttgatttgtaaaactaaaagaataataagtcatttcaaaaagcaactttttactgctattttggcaaccttagtttatcatttagagtgtgagaaatgatgtttataaatctcaaaaagtgtgtcaaattgctcataattttaagagaattctttctggtattatatataaagttttttgtgttatgcctagaagataagaattagtttgatttgatttgtaatagagtttaggagttgagtattgggggcatacggtatacagtatatggggtttagattttgtacataatatttgaaacataaaatttattaaaattaatagattaattatgttttgtatttaaa

SEQ ID NO: 221778 - DNA, 3856 bp, Cannabis indica
attatggagattaagaaactaaatagttttttttaattttttctatgaaatgttaaataatttatcgttaaaaaattaatcaacccaatccgcactattgcagattagattggattggatttaagctactatgcgaatcgaattggatccaaaatataaaatccgcaattagtgcggattggatgttgtttaaacaaaaaagtatggaatggaccggatgaacaaccctaactattactgttattgtagtactaatatttggagtttactacttattctatactatatggtcattcataacactcccccttagtatactctataatttgtttataattaatactgtctcgttaaaaaaaccgtactaagtaaaatccaataagaaaaaaaccattataagagaaaaagagtacagttgaaaaagctctccctcacaatgacattgccagttattattcacatattttgtagatgacacattccaataccaagtctcaacttttttaaaattgtagcaggaagtgactttgtgaaaagatgtgataaattctcagtggatctaatgtattgtatacttagatagttagatcatttcttttctcaagttcttgtgtaaatgagaaaaatttaggaggaatgtgtttggctctatcacttttggtataaccttcttttatttgagcaacagatgcagtattatctttatataatatggtcagatctttatgagtcaaaagactgcaacttttttaaatatgttttctcactgatcttagccatacacattctcgattagcttcatgtagtgcgatatctcagcatgatttgaagatgtagcaataagattttgcttttgagaacaccatgatattgcaatgcctccataagtgaacacgtttctaatttgagatctagctttatgtggatttgataaataacgtgtatctgtaaacccaaccaattcttagtttgagcttttggagaaaaatagacctaaatcagtaattcttcgtaaataacgaaatatatgttctattccattccaatgcctcttagtaggtgatgaactaaacctcgataaaaatttactgtgaaagtaatattaggtcgagtacaattagcaagatacataagagctctaattgcattaagatatggtacttcattaccaagtatctcttcattgttttgacaaggacgaaacaggtcctattcaatatttagtgatctaacaaccattgggttacttaaagggttcactttatcatattaaagcatttcaagaccttttcaatgttgtttgattgatgaaatattatctcattgttggtatgttcgatttgtaagccaagataatatttgatttcccaaatctttcatttcaaattctttcttcaatattgcctcatgtaactctttatcagtccttatgctatttaaatcaacatagacaacaataattacatatcctaattttattttcttaatgaaaacacatggacaaattggattattattgtatcccttctttaataaatattcacttaagcggttgtaccacatgcccctggattgttataagccataaagagaactctgtaactttatcgaacatatctctttgggcttaaagcttagtgcttcaggcatcttaaaacttttagaaattttcatataaatatcattatcaagcgatctgtacaagtaagttgtcactacatccataagatgcattttctcaactatttttcgatcaagagtgagggatttcaacagaatttcttgtatcaaaggttagaattagctcaaggtaagtttttactcttctctcttttgtattttaagaaaaagttaggtttcaacatgcaaattcgagttctagcttttgttgggtcttgtgttgattaaaattaagttgtttatgttctattaaggttgattgagttattttacggtggttctatgagctgttgtaggtttgaaccaggtttgagcttttgaagctcaaatttggctctttgatggtagatttttgagttttttgccttgatgatgaaattttcacttagtttatgcatattatggcctaaataggtaccctggattgtttggttaagtttgaaaatgcttggagtggagttatgagaatttggatttttttctactatagaaatggcaaaccaaaatagccttccgtttttatagtgagggtctgccattttttttggtactttttctcgaaatcttatttttcagtgtttctcgttatttaggttttagtcacgctatttattgatagggaaactcttcattttgaatctaggtttcgaaaagtgatttagcgtatcacttattcattttgcgtatgttgcgaacttaggggcatgtcaaccgtcgagcaacagttccattcaaattgaccgacacacttgaatgcggaatcgagataagataagtataaggatatgcatatgttattacttgtttaacgtgcatgtttatgtatgcatgttagttgacatattaaaaatatttgtattagtgtacatagagttgcactgaataccaacacctatatgtttggtagagtactgattgacgctatcacatcggtacgactaaagtactgagtataggctgatattatgattaatagtactatcgtacgaacgttctagactcagtacgtgtgggacgcgagatagggttatgattgggtgtatgggcacttagttatgatctggtttaagttatgatatgattatattcttcttactgagtctgtcggctcacaaatattgtttacatgtgtaggtaagggcaaggctaagggtgagtagcagtgggtgcaagcagatgaagattgtacatatcaggtggttagacctggagtgttcggtcttcggggcagcaagctttattttgatagtcgctaggcgacaacttttgtagctatctgttttgtaaacagttgtaactttttaaatgcgggatctcgatttatataatgttatttatttcaattaaaggttaattaaatatgttttcaataaatatgttgattagtaacagattacacaaatagctttaaatcacgataacacgcctaatctagtagggtgttacacctatagtggttggtcgaagtagcgacgagcaagcgatatggaggtgagtgaaagaatcgtatccctttcttcgaaaattgaaaatccattcgaaaagaatggaagagaggagatcgtgttgtgagaagtggaagagaggaagaagtcgtatacttaacaaaaaaaagtgtatttgtgaattaaacttcatctcactgtataaataaataaaaaattaattataaaagtataaatgaaaaaaaatcttttattatattaatttttttaattgtttttctttcaatttatattcttaaaaaatatacctataaaacaaaaataaattatgatttaaatattttaacaaaaagaagtttacataaaattttattagaaagaaaaataaaaatattctacatgatttaaaaaaagttattaaaattaatccaaaataatgtgagaaagaatttttttttaaaaaaatattaaaggtaatttttaaaaattattttaagtttatttttttaaaatattagactgtatacgaataaaatttcccaaatattaatcatcaaccatgtcatatatttttaaagagtattactattggacactagtggtggctagcatttttttttagacatgtcgtcttacaattggataatggtactctttaaaaattatggattatttacaccacatactgcaatttctaatttttttttacttttttactatggggcagaatt

SEQ ID NO: 221779 - DNA, 1567 bp, Cannabis indica
ctctattgccttttctttatgagctactaataatgaacatctgaccaccctcacatctaaaatgggggtacttttaggcacaagtggccaagggtacaacatggtcaaatggtatcaacacatcactttcgagttgtgggttgtacgtgcctagagtggccttgcacctcatactcttgtctggtgttagatggtccatgactgcgcgcctgtgcttctggggtttagatacgtggtccctaactgccagagggtgatcctgagctgcaggtgtgtgatcctgaattatagacgcatgattttgagttttaggtacgtgttcctcagttgcacgtttagaagcccccacctgcaagccttaggtgatggtcatggtgtacctttggtcaggtcctcagaccaagctggtctgttgtcgatgctacttgtactccctacgttcaaaggtttcagaaggcatggttatatgtcttcctctgcacatcgtgtccttggagttctcactcaacttcacccttatcaatattccgtcacttcctttcctacacttgcatccctccaaagtttactcacagctcgtcactacacctcgtgcacactccccacttgcgactcgcacgacccccttactcccactcacgtctcgccacaccttcagcacacacggttgcatgcgagcccccatgtctcgcctgcccagatctcgcaccccacgtctcgcacgcctacatctcccacgcctcccccatcatgccatcatgccaccagcacacacggctcgcatacaagcccccaaatctcacacgcctccaccatcacgtctcgccatcagacatcctgcacacacggctcgcgtgcgtcacacggctcccatgcctctccccacacgacaagcgacacctatgctatctccatgggacccctcaaggtaattcttgtaacggtgcggacgcgccccgacattcagagtactattttttagggttggacctcgggcgtgcatgctgatttggtgcaccattgtgggtctttctacccctcggcaaataatctcataaattaaagatgtcaattccccctagtctacgagaattcttttaagtgttctggtagactcttgcactcagagcacttgtactactacagagcaattattgcttgtcgcatttatcgagttcatgcccactatatataaggggcctcccttgattgggttaccacttcacaccatctctttggcgtagtggcaatcctccttctttctttaaagaccacttatctttaatttgcaaattagcagataaatagggtataaatatgaaacttgcatgttagttatgaattataagtttacggagatttatttgaattcaaaatgctttttatatgtcatatatagaatttcatcattttgcatgttatgtgcccgacaacattggaatgcggtgtttggctattaggatcacattttgctatttttagtattgtgagacaatataattagacattaggagtgtttggttttatgacctttttggttacgtaaagggaaaaatggtctttttgc

SEQ ID NO: 221780 - DNA, 3907 bp, Cannabis indica
gggcacaaaacccaacactttgttcaccacattccctaagaaacttacttggggcagccagaactcacacttcttgaatctagcataaagcttatgttctcggagacgtcacaacaccatccaaagatgtctctcatgtgtctcatccggttcattaaatctgtgaataccgccagaacattagttaatccgaaggacatcatcaaaatttcatggtatccatacaaggtacgaaaggctatcttggggatatcctcctctcgaatcctcaactagtgataaccaaatcaaagatcgatcttagagtagacagtcttttccataattgatcaaacaaatcatttatctttgacaagaatacttattcctttccgttaatttatttaactcccagtagtcaatacacatccatcccataacaaatctcttgccttgagcactgagattaatagaattcaaaatccttgaaccttgcccatgaactcgaattggtctacaccctctggttcaaaagtttccatctttcttgtcaatcgatgattacattatactttgcaagctattcattcccaatataacatcaaatcctctaaatttagttcaatcaaatcaaccgacaattcctttccctccacaaccactagaagggacctaatccacctgctggaggtaaccaattctccaataggcagtaaggtacaagttcctcttagtaaaacatctttatacaaatttctaatcgctatactcaacacatatgaatgcattgcaccaggatcaatttaaaacagtcaacaaggtaccattaataaaaagctaacttgtcacggtagaaggaccaacatcgacctctgcctgggtcaaaacaaacacccaagcaggaactaaagtgttctattatggtcgttgtaactatgggtaatttcttttcagatagcccactaccccacactggaagcaagctctagcttaacacttgccctgatagcatctcttgtacctcaggtactctagataggtttgcaaattttcgtttccacctcatcaaaatcctaatgaccttggaatcccttatttggtcccgtagttgacggatcattaggccgctcttacgattgttagggttagcgcccttaccaaaactaacattagatgtttgcttccatgaatctcttctcatactatttctcttttaaatttgatcttctacgccctcagcagcaagggctagctcaactgcatgagcataagttcagacaacacctggttatttgcagctataattacatctcgagcgatgtgttctttcgatccttgaataaacttggcctctataacagcctcagtggccatttcatctaaagcaatctttgctaaccaatcaagtttggtggcatattctgtcattgcctcattaccctaggttagccgcataaatctttctgctttagcagcttgaataaattcgttgtagtattttttcatagaacaaaatttgaaaagcatccgaagtcatgttattcagatcatgaccctatgatacaatatcccaccagatgtaggcatctctacgcaacatgtaaacgacacatctaacccaatcattactcttaacccgtatgaaaataaaaatcgatattatcaaattcatccattgctctgccttgagtggatctgcaccaccctcgaacactggcagattctgcttcctgaactgcttgtgcaacaactctagccaattctagcatcctatggaactaccaaaagtgccaaaggatcataattaaaatttggagcaggctgagctcgctgctcccaaaattcttgaatttgatcaccttgctgtcggatgacctcctgcatcgcggcacacatctcctcccaggttggtggtggaggattcacaccttcaccgccaaccccaagcccaaaaagctcgcagttacccctactaggccgcctcaggtgcataatctaatacacctgcgaccctaactttccaccgtatagtacatcttaaatcaaaagcaatgctaataagtatttccatgtatacacatacacatcgacccttactatgcttttctaataactagcataattcaaataagcacataattaacaaataatctaataattagcacttactgaaccatgagtcgaatgagtcttcacagtcgatgtacatatcgatccaatctttaggatctttaaaccttggtcgctctgataccatgttgtaacaccctaactctcaggggcgctacatgtgtgtgcttttacaaacttatccctgactaatctattatcttaggaaagtgtggtttaattaaaaaccttttgattaaattagagtaaaactttcatacaaaataccactataatacggggatcccctgtttataaaattcttttacaacacattacaaaaccgctattacaaaagtaagattatacttccaaacaaaagaaaagggttgattttgcttcccggaagccaaaacaccacggttgatatgtacattgctgggagacctctgactcatggtcaaacacagatcctaacctctttacccgcaccacgaagcacccgtgagtcacaaagactcaacatgaaaagctactaaatcaaaagtgatataaagcacaagtagtcacaatgcgatataataatcgtactcataattcattacatgttcaacatgcatataaaatgtaacatctatacaaacacatatgttacacattataagaaaatgataacaatccttactcaccaacttcattatcataataaatatatattcactcattaggtaatcacacaaccaattaattgtcttataagacaatcctattctaatgcttcataaagcattcttaccactcgttatccacaagctacgtatgtcactatcgttgcccgataaattaaccaataagtaagaaatctatatacggtttcaaaggagtgattactcattttattaacggtaatgactgtatctttattcattcattaacggtaatgactgtatcttttcctcaatcataatcgagtcacaaatgataattatcgttatgcatcattacctcgatcataattgagtcacaaacgataataatcgttcctcattattacctcgatcataatcgagtcgcaaacgataataatcgtttcttaccaagatatttacagtgcataaagcttttcttacctcaaatcaatatcgggtgtgcgagccaatctaggtggaaccatgcttgacaatctcgagtcctatgtcacgataacaaaactcgattaacaacttattcaattctcgaaataaaccctaattcataactagacaaattctaactctccattgattcaaaataggataaacaattcccaaatacccaaaaccaggtcttgaaaaatacccgaagccaaaaattacgttcgagaaaaaccaagaatttccccctactagccaaccggttaaccggttctccagcaccctgaaaaaccgattaactggtttttggcaggtagggaagatgctggtttttcaccctgaaaccaaacttgagctacaccaaacctgctcaaacctttcagaacagtttaataatataaagtcaatatactcaaacacccaaaactcataaatacctcaaattaaacaaaacaccatgcttgaatcaaaattaggttcaaaattcaatttttttctcaatacatgtttaaacagtcaaagtaattatcaattcaccacaaactaaccttaaatcaggtccaaatatatgttctaagctccagtttatcccacaatcctgaaacctaaagaaaccctaacaacacttaacttaaaaccttaaaaactgaaagaaaatagattggaaacttacctcaaagcttaag

SEQ ID NO: 221781 - DNA, 2662 bp, Cannabis indica
ccatccatcaattctagccaggactttcttcactaggaattgatagttatgcaattcgtttttctttgagcgaaagagtggcaaacctaggtatttagctttagatttcatcttgctcatgcctaagaactcaacaatctcactgctccttgccctgggaactcctttagagaagtacaccgtggacttctgaaagttcaccgcttggccagaccaagaacaataggtgtggatacattgaaggaaggcctcagcttctttcaaagtcgccgaaaagtaagatatcatccgcgaacatgaggtgcgtgataggtggagccattctagagatcttgaagcctccaagtttccattgctggcaaaagtccgtaatcaaacgggatagtagatcagcagcaatgatgaagagggcaggggagagcgggtctccctgtttaagaccacaagaaggagaaatgacaccatgcttagccccattaattaacaggttgaaccgcttgatttgaatgcagcttctgatccacttgagaagtggttccttgacgccatgaaactgaagttcctcaccaacaaaatcccaatccatttatcaaatgcctcttccaaatccaatttgatgatcatgtaccccttagtaccttaccttttggacatatagtgcacaatctccttagccactgctatattttcagagatgaaccgtcctttgataaaggctgtttgggcgggggaaataataaagggcagaatcggtctcagacggagcgcgaggattttggagatacatttgtacaccacgttgcagagagcaatggggcgatagtcagagactaaggccagattttcctttttcgggatgagtactaaattggtgtcgttaatgaagaagggcagttctgaagtggtgaagaagtgagacaccatttccagaaagtctaattttagtctcccaatgagagcagaagaaggctcctgggaggccatcgggaccaggggccttgtccaaccccatagaagatagggcgttagtaatttcattcacgtccaggatggcgtataactcatcactaagaggagtcccagacacttcatgagaccattcataatgcagcaaactattacggccctgaaacttagaaaatacgtttgagaattttccaacaaaggctcgtgcaatatccttcatatcttcaagcttgtgtccatgatcatctttgatgaactggatgtagtttcgtctttgcctggtcactgtactttccataaggaacttagtggcacgatctccatcttttagccaggccacccttgatttctgcctccaaaaaacttcctcacgagccagagcctcatcgagtgctttctgagctttcgatatagactctaaatcacagttagtggacccttcaatctcagacaacttgaagcgagcgttggacatttgcacagagagtttcttaaaatggtttctgttccattttgcaagatgctcttttttaagcttaatttttcgatacatgtttaccatgggatttctgtgcttattagcagcccaagcatttttgaccacccagaatacacgcggatctctttcccacatcagctcatatttgaactgggctttgaaacaactatgacccccttcagtatctaataaaataggggtatgatccgaggtcgaagcagagagatggttaacaatagcttttggccaggcaagcctccactcgacagacgctaaagccctatcgagcctagctctttttaagcaggtacccatcgaagagcatgatcctttcctgaaccaagtatacttcaccccttgataccccaagtcaataaggccagtgcggcgaactgttcttctaagaccaaaggaatatcgtgcaaagttacttgaggtggcatagttcaggcactcactatccataagtgttccgttaagatccccaattatgatcactggcaggatgcagtcactgataaaatctccaattccattctagtaggcttctttttctccataacagggaggaccataagccctaattaggagccatggtttttggaggatctgaggtaatacatgcaatgattttgtatttatcagcgaattggattaaacacccgactccaatcctccaacacactgcgagacctcctgctgaccccaaaggagggacatacgatagattgtagaagtgcattttagacattaggtagttaaaattttcatttgagagtcttactttggaaagaaccaagacttcgggatcgaacttccggataagctccttcagttgtcgaactatcgctgcatttccgagaccatgacagttccaagctagaactctcatttggatggtggagacatttctggtcaagtctccacggcccaaattgaaaaacctgatttctgtcaagcttcgagtctccattagtctctgaaatttcctggatgatgcacgattgagatgaccttttttttacaatcgacaattacgaagtggttgtttaagtcaaattttagatcaaagaccttattctcccaattcgatctgatggcgctctgcctttttcttgcttcaatctttgattgttttttttttttttgacaaatgaattcaagttacagctgagtgatgactttgaagggcgtccc

SEQ ID NO: 221782 - DNA, 2705 bp, Cannabis indica
gagccccatgtggacttaggagaggagctcaagttggccaaaatcagagaagccgtaggccaagcaggcctaactcaaggaccatgggctgctgattgcgatgtatttgctcaatagagaagcaaattcttgagattgatggaggaccaagagtacatccttcaatctcaccaagcagaattggattgccgcaaccgagaggccaataatctaataaggcagttcaactagagaactgatgggagaggacaagatttcatcagagatccactcgaaggaagactcattgatagatcaaggagggtttatcgacaagctaacaaacttggttccttaagaattgggacagatcatcccctgccagagggaggaccgacctttccataaaggtctaacggtgagaatagccaaatctcggtgaccagtggcatggggggctgccagggatctctggcttagcaacacccccattgtacaacctatgactgactagacaccagcagacgtgcccagaggtcagtcttcaactgacaaggactgggagtgggtggaaacacccaaaatggaaattcatgaagtgaaacccatcacttcagacatctagatccaccaaactctagcaattggtgtgatctacctcctgtcaacacacaaccaacctcaatcaattgaggagtcttgggtggctaaatcctcccttctgtaggtctgggcggccatggtagcatcacgggcggccagaccctgtcctttgtaggtctagacaaccatggaggaatcacaggtgcctagaccttgcccttttcaggtctggctggccatgaaggagcagtgggcggctaggccctacccaatgcaggtctggtagaccaaggataacaactaagtgtaggcctagccggccaaagccaacacccatatctgagaatggtcatctagggtctgcagtttaacgtaggtctagctaactttcaccatacactctcccagggtatggctagccacccctgtctctttagaatctgtaaccccttcaaggagggccagtcagtcaagttcccccaataatagatccttctgtgcaagaacagttggacgaacttagggacatgattcaaggcatagctggtccaaagcctttagatcttgaacttgatcggtcaaggggatcaccattctcagcatacataaaggtcttgcccttgtctaagttcaagatgccggtatggagatgtatactgagcgagaagacctgttagcccacatcaaatacttcaagatgcaacttgatctgcagaaggtttacggtgatgttcccaaccactttgtcaaaaataactcgacaatggtacttaaaactcaccccaggaagattcaactcttgggctgagttctctcaagagctctacacacaattcttgtctttaagacttgtaccatcttagctagaagaccttgtcaaagtcaaacaaaaacaatgagaacctttgaaggattacatctagaggttcttggctgaggcaaccaaagtaaaagaccttacaaaagagggccaatatatgaccatactgggggggcatactcccattgaacaatttctagaaagatatccagaggatctctaccaacaacatgaaggaattccttgatagagttgatggctttataaagcttgaggaggccatacgacaagcctagttggggcatgtcaataataggcagccacgagacatccgacagtctcatgacctaccaggcgcataggcagataccaataaccctgtccaaacatctagtggcaaaaacactagaaacaagcgcaacaccaacaactctggaggaccaatggcgaaaaagggaagtttaacacttctcccacgccacaaaagagcaaggaggagaagtacacctgcttcaccctcctaatagagaaacctgaggccatcttcatggccactcagggaacaattctatgccgaaagccctttcctatcaaaagggagatggaaaagagggacatgtcaaagttctgtcggtatcacaacgacttcagccatgacaccaatgagtgtcaaaatttgaacagagagattgaatacctcataaggcgtaataatccctacttgcattgttatgtgcaagatgaccaaactcaagcacaaggtgcccagaaaagagatccaatgccaccgccagtggcaagacatctaggggtcatcatgggaagaccccacattacaggtgagactagtgaggctagggagcgctatgctcggaaacttcttcatgagcctaaaagtgttattctagttgtcaaagatagaagcactaagaaacaaaaacccatagagccccgatctccttcacagaagaagacgctggtcattactgtacaaatcaggaacatgactgtagaaggatgcatggtggacaacgaagcctcttccgacattcttttcaaataaacttatgaaaagatggggctccaactcaccgacctggtaccctataatcaagtgatgtatggcttctttggctagggcatcgcacctgtcgggtatattagattacccctcacagttggagaaaatccagccaccagaactcttaaggcacagtttttcatgatcgacgttccctcggccttgaacgccatgataggccgaccgaccctcaatgacctgaaggcggtaacctccatctac

SEQ ID NO: 221783 - DNA, 3351 bp, Cannabis indica
atatgaaattatttgagaattatcatttatagaccctatttatggttaggggtattttcataattttaacctgagaagggtaaaatcataattttgatgtttattgtgctaatggattatattattatatagtatgtttatattaccttactgcaggtaatttttgacaagttagcacggtatagtcacaaacgggtattttggctcgaactgggtttggagtccaaaattatgaataatgtgatattgcattaatgtgtgatatatatgatggttttggaattatgtgtgattagagctgacttttatgcccttgaatactaagtatgttgatttttggccctaagggcaagatggtcatttgaccttaacttagtaaaggtgatatatttgacttatttctgaaatttaatgaaataaactttattttttctggtttcatagactcccaccacctctctactctctcttcttctctctttgaaaatttctttgattttgaggacgaattgttgcaaattgaagtagatcttagtcttagattcttgagcttagcttggaagggtaattgaagtattggtttcatttttatatagttgtaatttttgaaattcctatcctagggtttgaatttgaatgatattcttcatggtgttcttgaaataattttatggtattaattccatggatgaaagttaaggttttattgtggtaactttgtggtaatttaaattgatgcatgaattttgatttttggtcaatttggtattgtgatttgagagctagcaatgttaaactttgagattggatttgaatttgtatttactaggcttttgatataaaaattatgtgagttttgttcttaatcttgtgtatattaagcatggtttatgtggatattttttactataggtttagaaaccactttttttgcatcaaaagtttgtatgaaaagtatggttaattgtggatgtgttttggtgcattttcggagtgaaaattctaatttttctggattctgaactaagcgccgcaacctggttcatgtgagtcacgacctttaacttttgggcatttttgctccatgtaaggggccaagagtcgtgacgtttggtgcaaggtcgcagccctctcaatcagtagaacagaaatattttgtaaattattttagtcataacttttgatttcgaattccattttgaacattctacatatcgttggaaatctcgtggagagctctattatttggtccagtatgtgagtcctaattttataaaaatattttatggaattggagattaaccctgttgtgtataaactcgagaattgtgattaggaatactagcacttggtcaggatcacctatggattgagatttctcctcatacgttagaaatcaggtaagataataaattatgaacatagagtatagcacaatgtcgcaattatatattgtatgattgttatagtgaaactgagagctagggttcttaccctaagtatgaattggcatgaatatccaataatatacaataagattaattagatgaaagcatgagtttatagggtcattaccctaagttaatatgtgtcgtgaactggggtcattacccttaatatttatattgtagattagggttattaccttaagtaattatgttgttgtgaattagggttaccaccataaatatatatatggcgaattaggattactaccctaaatatgaattttcttgagcatgctataatgtattatgtgagtgaatgattagagttgtgcaagttagggttattaccgtaaaacttcatatggttgagtatatactaaatgtattgtatgcatatttatatatcaagagttatatgtataagacataactaggttagccctgataaatatcattaggatgaaccactgtgagagcataatgtatggattatgtatatatgagtagagttacgtgggtaaggcataatcaggttagacttggcaattataaccgagacaaatcctagtaaggccttaaatgtaaaagagacgtgtgagcataatacgtgggtctatgctatatagacattagttatagtgacattataatatatggaataatgtaatataaagtgcggtgacacagtatatatgtattggcatactatgaagtgtaattgttataattattcatgatgttttattattctgtcttgttgggccttggctcatgggtgctctaatgtgtaggcactagttaggcgctgtcgctttagccatgagtttgagagttttgaagatgagttgtacatgtattaacaaagttagaccacaagggatgggtccaacaggaaattgtgtagaaattttaattttgccgcttaggttggccggtaagaatgacttgtaatattttaaaaataaattttacgggatcccagatatgtatctataaatgttttgatttgaaataagtttgtaataatgcaagttatttagttaaattaagtttaatattagtttttaaatcacttggcttatggaccccgattaacgggattagctatctgtaagcacaacacgtggtgttcctatgagtaggacgttacattgcagatgttgtttatattgttagtcaaatttttgcttctcctactataatgttgattgggctgttgttcttcgcattccacggtatcttcggggtaccatctttcagagcatactactgccttccacctcctctctagagttacgagcttactgtgatgcagatcatggtcgtgatcccacagactgaaaatctatcactgatttctatatctttttgggagattcccttattttttggaagagcaagaagtagtatgttgtttctcaatcttctacggaagctgagtatcgtgtcatgacgtctactactaaattgtttggttgagatggttacttgtagatacgagtacactcactcttgtcctacttctatgtattgtgacaatcaaagcgtcattcagattgctcacaattcaatttttcataaacacaccaagtatattgagattgattgtcattttactcgtcaccatctaaaattggacaccattactttgccgtttgttccttcatcgatgcagcttgttgacttttttactaagtctcatacaatttctcatttttgtttttctttaagcaaactctcaatgcttggagggagggtgttaaatagttatttagggttattttttgttagagatattattataatgaatgataaatcaagatcaactcaattgtaaaaataatacaaggataataaaagagattgactaaaaaaatatattacaatacatatatatacacta

SEQ ID NO: 221784 - DNA, 2954 bp, Cannabis indica
ttttttgggataaacttgcttgtttcaggaagattaatgagccgtttatcatctttggtcacttcaatgttatgtttagttttcaagacagatatggggggatatcgattcaaagtaaagaaatttaagatgctcaatcttggcttgcattgggtcaagttgaggaattcataagtttgggttctttttacacttggactaattccccaacatagatgcttgcttgaagtgggacgttgtctcagatcactgcttgtgtttaatacgtaatcaagagcataacaattgtagggtgaaaccatttcattatgggaatcattggtctttatactcggggtttgatcaaacagtcatggaaagttggaacaagcctgttgctcgtattggggttgatgggatggtgcagaaaatgttcaaattgaagcatgagttgaagatatttaacaggaacaatgttggggatgtggctatggagtacaaggttgctaaagaaaggtatcgcctaatccaagaggaagctgctactaattcgactaatttgtagcagcaacttgttgttttaaaattacagcagggatttatgatagctaaagacagatatactcagttgtgtaggcagcaaagcaagataaagtggattaattttaatgataaaaattctagctattttcatatggctatgaggaaaagaataatggagaatagaatcaccactttcatgaaaggagatacagtttttgataactttgataaagtggtaaaacactctgtgaagcacattgagaccttcatgggcagtaagagtaatgcttctggcagtattgatgtcaactgtattaaggagggaaaatgtctcaacttggaacaacaagtcaatttgattagaccttttaacaaggggggcgtcaagaaagctttgtttagtattcacccttctaaaagccctaggttagatggttttggctcgagtttctttagagacatgtggagcaagattggagatgaagtttcaaatgcagttttggggttctttactaatggttgactacctaaacactttaatgaaactgttatctccttaatcccaaaaattgccaacccgacttctgctaaagactacaggtcgattgcttgttgcaacacaatttttaaatgcatttcaaattgatatgctccagactttcagaagtgctcccaacattatttagaataatcaaggtgcgtttatgaaaaatagattgcttgctcataatatcatgatattttaagaccttctgaaagggtatacaaggaaaaatatttcagctaggtgcatcatgaagattgacctaagaaaggcttacgacactgtcgaatggcaatttgttgaggatcttttgaggcctttttgtttcccctcacggtttactatgttgatattgacttgcctggaaggaactcactatcatttattattaaatggtagaattgaaggcaacttcaaagggaaaaaaggtctctgtcaaggtgacaccatgtccccattactctttgttgtgattatagagtatcttaccagactttgtaatcagtttgttgagaagaaggggtttgcttaccacccgttgtgtaagcacttgcgcttgactaacttgtatttttcagctgacctttttattttctgtaaagggaatgcaaacacggtgaagcttatttatgaagctttcatgttttttttcaaagctacagggttatcaaccagcacagcaaaatctcaaatcctattttggggggggggtcaatgatgagaccaaattgaagattcttgacttagttcatttcgaagaaggaaacttccctctgaaatacttgggagtcaagattcatccaaccacatggaagctcttagattgtggtgtgatccttgataaaatcaacaagactatgaactgttgggctagtaggaatttatcctttgttcatcgggcacaattgattcactcggtcttacttggaattaggaatttttagatgagcatattcattattccttccaaggtcacaactgccattgataagagttgtcaggatttttttggggaaccaaacggaataagagcaagcctcaccatgcctcttgggaaaaagtttgcctccttaaaggtcttgaaggagttggattccaagaaggtaaaaaatggaacaaggctctaatggcaaaatttcttcgggcttaatctaacaaacaagattgtttgtgggtaaagtggataaactttatctatctaaaatacaatgatatatggagcttccaaaaaaattgagatacctactggtactttaagaagttgctgaatttttgcgacaacacagatgaagccaagttgaggcttgctgtgacaggtacaaagttcacagccaaaaatttttacaacctaccgttagaggggtctaaagctgaatatgctagagctatttgggacaacttattggtgcctaagcacaaatttgtttactggcaaatttttaattctcaattgttcactagagatttcttgagtagactagtttcattacataatattttgtgtccggtttgtgatgttgagttaaaaactcatgaccatattttttttagcttcatctttgccaaacaggtgcttaaggatgtgaattcttggctggagtttataattggcctatttcgatttctgatcttgttagcaggtgcaaaaaaaggctcaagacctctaaaattgggtcctgaagatggtgacagctgctactttgtaccagctttggtaaaataggaaccgatgcatattcgagttgacttgtgattacttgtatttactaaatgtaattaagagttggtagtgcttttgggtgtggctgctggttgtttttagctgctgccgtgtggttgtgtatggcttttacctttgttgtttttagcttgttcgtttttgaataaa

SEQ ID NO: 221785 - DNA, 2829 bp, Cannabis indica
aataattaaaattaataaaacatttttgaaaaaaataaaaaaataaacaattaattaaacaatacttcataactcaataataaataaaataattcttaaaacattaactaaaagaataattttctttttgaatgaaatatcaacttcattaaatcaaaagcattcaaaaaacaagatatccctcaaattgggccagatatcttgatctaaaatgcaaccaccaaagatcaatcgagactgccttgcgatagcatgagcagctcgatttgctgatcgtttaataaatcgtatcttaatattattaaaagacaataacaacaaacgacaatcttctatgactattccaaaagtagaggacatcttttggttacttcttattgcttgcacagataaaagactgtccgattcgagctccacattgtccctagattttccttttatccaacttagagcttcttttatccccaaggcttcaaccacttcagccggatagctaccagaaaattggctagttttagcctcaatgaacttgccaacatgatctcttacaactaagacgtatccatatgagttatcatttgggaagagtgccgcatctacattaatcttgagattattagtttcgggtggtgtccatagctcaaccccatcatcattatttccaaacgatagtgataatagagcacttttatcttgagctttcctccagtgttcaagagtaattgaagatgtagacataacttccttcacagttgaagtgcgcttgttccagacaatgttgtttctagctttccacaaagcccaacagagagttgcagctcggcaaatgaaatcactgtcctttgtattctgcaactgttcaaaccagtggccaaatgaagccgacatatcaatcacgacaggcaagccaaaaactgtccagcaagatcgggcaaaatggcaagtgagaagcgcatgtgatacagtttctgcagtagcttggcagaccgggcattgtgaggagatggggacatgtttcgtgacgagattgacacaagttgggagtgaacctgcaatggctcgccacagtaaattcaaaaccttgggaggtagtttcaagtgccagaatttttgccaaaaaccagagttatttggccgaacttcgactggtttttgcttctgcagcagctggtatgcactctgaacagtgtaggttccttgatgatttgctgtccatgcccaactgtcaggtcttaggttgataccaagaggaatggctaggattagatcagcttcctcaggagaaaacaggtcacggactgcctcaatatcccagcagctggtgttcgtttacagaagagagttgacagtgttgttgatgagtccaggatgtgtaaaagtgacatacttattgctggaagatggaagccaagggaagcccagaattgttgtttcttttccatctcctataacccgagaagctcctaacttaaccaaggtttttgcaccccaaatactgcgccacacaaagcttgggttattcccaagttcggatgataggaagtcggtatgtggaaaatatttggctttgtaaactctaccggcaagagaatcaggcttacataataatctccatccttgtttggcaagcatagcaagattaaaatcatggagatgcctaaatcccataccaccttcttctttgggagttgctagacgatcccatgacatccatataataccgcgtccattgcttgatttagttttccaccagaagctagccattagtttctcaatctcattacaagtaccaatcgagagaaggaacacactcatagcataggtgggcagggattgaaccacggtcttgagtaaaatttctttccctgcacgagacaaaaacttgtcgtcccagctattgatacgagatatgactttgttttttatgaatccaagcacaacatttttattgcgacctataatgtttgggaggcctaaataaaagctgccttcaagagcttctgacatatggagactagagcaaatggatgcacgggtagcaatgtcagtatttggactaaaaaatatggatgacttggaataattcaccttctgaccagaagcattttcgaaaagttgaagcatgttggtgatgctaccagcagccccttgagtggcttgactgaacaaataactgtcgtctgcgaagaacatatgggttattggaggtgcacgttgagcaaccttgcaaccttcaatgagtctattagcttcaaatttctgaattagagcagagagaccttcagcacatataatgaacaggtaggtagagagtgggtcaccttgacgaattcctctagaaggagagataggatcaagaacaactctataccgaaccgtagagacacatgccatgataagctcaatccatttactagcaaaccccatacaagccatcattgctctaagaaaactccattcaactcgatcataggctttactcatatcgagttttaaagcaatgaaacctttcttgccgcttctttttcgcttcaaatagtgcataacctaaaaagcaaccataacattatcagatatcaagcgtccaggaataaaagcgctttgggtttcagaaatgatacagtcaatcaagtctctcattctgttagctaaaactttcgaaatgatcttataaagaacattacacaacgatatcggtctaagatcgctcattataacaaagtttttctttttaggaatcaacacaatattggtatcattgagcccttctggtaatacctcggttgcaaaaaattcttttaccaagttagtgacatccgaaccaacaat

SEQ ID NO: 221786 - DNA, 2264 bp, Cannabis indica
aaaaaagtctagcatggatgaaagttcagaggccataatttagtacatatcaaagctcaagaagcatgatttggtagatatcaaaatctggggagcatggtttagtacataagcaaaattgaatgaaattagacaaaaatccttaaatccaacaatctcaatagttcagggggcattttcaacaaccttaaaagttcagggggcatgatttggtacatgttaaagttcagggggcaaaaatcctaattagcctaaaattaattccaaagtcaatcccccatttaggtggtaaccctggtagctcctctggaaagacatctaaaaactctcggacaaccgaaaagttttctgatcccattggtatttcttttgtagtatccaccacatcggctaagaaattgacacatccatctcataacaaatctcttgccttaagtgctgagattaatggatattgtcccattctatacttctattggagtattgcttatgctcttcaagggtactatattaaaaaagtaggtagccgcgaaaagtgcgtatccgcaaaagttcaattgcaatgatgagtaccacatcatcaatctaaccatgtctaacaaggcccgatttcttctctctatagcaccattctgctgaggtgttctgtgttgtaagttgggacaagatcccttcttccaacaaatattctttaaatcaagaatttaaatacttgataccataatctgattgaagtgtctttaatgatttacctaattgcttttcagccatagccttgaagtctttgaactatccaaaagttttagacttcttggccattaggtaagtatgtctgtatctagaatagttgtcaaaaagtgacaaagtattcataacctccttaagcttgaatattaataggtttgcacacatcagtgtgtataagctcaagttgttctttgactctattgccttttgtagaaaaatttctttttgccatcttgccttcaagaaaagatttgcatacagaagagttccagcttttagttctcttgaaggaccatcttttgttaacctgtttattctgtctaagctaatatggcctaaatgtagatgccatagatacggttcatcatcattagaaactttttgcctcttatttgattgaggcaatgctactctaaacaattcattatttaaaattaattgctcacttggcttgagcacataaagtctgctactatgttttgtagaacaaataggcataccttttttttttttaataataattgcattattaataaaccaatattgaaaattattcatgcaaaagagataaagaaataatgatcctggtacattcaagaataaaataaacattgttcaataacaaaaatttattattaaatttcaaacagactttgccagcacccttggcagacacttatgctccattacccacgcacatagtcacctctccattggccaactcccttggcgattcaagtatgtacatagaagaataagtattattagtgactttagaatcaataatccataaggacttatcatcttccactaatttagattcaataacaaataaatcatttttacctttcataagctcggagcgatacttgttatagtttctcttctagtgtctcattacgccacaatggaagcacttgccttttgcctttttgtccttggacttggggatgactttgttcttcttggccttgggtgacttcttgcctttgagcttgccaccattgttgtcctaattattccacttcagtttcttatcagaagaaggagagttagatttttcttcaatgatgtttgattccccttccatggacttatcctatttaaggttctcaaacacagtcaactcgttcaacaattaagtcatgttgaactctagcttgttcatcacatagtttgtgatgaaatcctcgaagcaaggagataaaacacaaggatcatagtcacttgaatcctctcatcaatgatagcctcgcacgtctctattgttagcccaagatatatttccaagagggggggggtgaattggaattttaaactagtttcataaatttaaaattctcaaagacaactaatgcaaatattcaagttcaatgcaataacaaagataataacaagtatgaacaaataattaaacttgaaatgtaaagactttaggggtagaaattgcaaactcttgatttttacaaggttcggtagaactaagctgcctacgtccttggtcttcaaagctatgg

SEQ ID NO: 221787 - DNA, 2498 bp, Cannabis indica
attttatatttttaattatataattataaaaaaataattaaattatatttttaataaaatttttcaaatattcaattataaatataaatcatatatataaacaataaatattatatattaattttaagaaattttaattattaaatgtatatatataatagtggatttattttatttttattgattaggtgaaccaattatgttatgcactataatatatgtaaaagaaaagagagttcattcatacattataaaaaaatattcaaatataatattatatatgtgatgttaaaattatagtagaaattgttaatatatattattgaattaaagttatatttttattgaaaaaaagtgaaagatggtgatattcaatgatttgatgtcgcatagggaaaatgaacaaaacaatgtagaaagaaaaaaataaaaagctatatatacatatctcttaataatttaagagtttattttgcatcttatttggtaagatgcattaagagtaaaaagtgattgtacaaaataaaaaacaaatagacttaatgagtacatatatgaaagaattagattaagtgcctcattatgtgcaaacaaatagactcttagtctgtttttatgttctggcaaagctggtcaccgattctcagagatgttgatgttttgcataaatgagcgactcaaaactctttatttttgagtgagttttccatgttagaaatgagaaatgaaaagttgtgaatttgacttctctaacttcatggatcttagttattgtgaaaaattagatagacggttgaaacagaattataatcgaataagcaaaacccaacacaccaggccatttctcaacctgggagctgggtattcattcttgagctcccggaattttgttttgatacttctaaggttattgaactttaggatgagttctcttatcccatttttgacaattcaagattcattggttgaataatattttgcatttgagtgatcaaaactagtgtagtaggttgattatcaacttggacgctacgcctagcaccaggcctgggcgttgggccctatttccaggggctctgatttgtagttttctccccaagtttgcttgaatcttcattatttttgatgatgatagaaaacgttcagaacaatttttagtgaacttggttggaaataacctaatttgacaatatgtcaacctgggcgctgggcccagtgctaggtgtcagcctgggcactgggtcccagttatgacccttcaaaagttccatttggtccccgaaaatagttgaatcttaatctttttttttgcaaatggagaagatgcacgtataagttcttagaaaacaccattgaattgtgccaaggttgacaaattgtcaacctaggcgctgggccttgcctttggcacgaggaagtggtttttcttccttaaaagtacctatttccccatttttgatgaagacgaagaagatgaaaaggttgaatcatcaatttcatacttggtaggttcctagattgacaagttatcaacctgggcattaggtgcccagacactgagtgctctaggtgctgaaaaatgaacttcctccgaatctaattctgaggcctaaattatatccgtggcatgtctaattaatgttctaatgtaaagtttgaccaatttgcactaatacggtttcgaaaacttcaatcctaattaagaatgttaacttggggtcgagtgaaaccctatgtgccgaagtttttgcaggttaatgtaattttagatctcaggacttggatttgattgcgccaagtcttcatggtaaaaaatactaaaagatagtgagttggattcaagttattgaagtccaaacatccatcttagagctctcaaagttaacttgggcacagagctagggtcccctcacaggtcgactactatgactgggcctactcaagtctgtgacgtcattcttcttgccacgtgtcaaacatttatgtacacgtcactaagaaatatttctgggttatcaataaaatataagtcctaaataatatataattggcaatctaataccacatgttataaaaaatcaaataaactcgagatacaaatttatataatatagaacacaataataatatatatgaattaggtatacatatttgattgatccatagtaatgaccgtaattttatagtgcaatactatcaactaagtttatcaccttatatctctaaattagaagcaattttatttcttggattatcaaaagagtatacaattatgatgagacaatatatatttatagagttagggagagacttagctacataatcctagttggactgggtcagctcatcaaatactttagttagctagagaagcccacagttttacttcaactagactttatacacatagatggtaagcctattaactattgatcaccaataatatgagctaagatagcatagaactatccaatcaacttaaattttaataaaactaa

SEQ ID NO: 221788 - DNA, 1329 bp, Cannabis indica
cacctgagatttccaagacaaaaaattagttcgatcaagtttgactattaaaatagaggttaaagagttataaaacgtattccagttggattgcatctggtttgttggcacagtcgaaagtggagttctagcaataggagcaggtttggaggaagtggactccgttgatgacgctagtctagggcgactgataccatgtagaacctcagaatatgaagtttaagaaagaaaagagcaaaggtaggagagagagaaaaatagagcataagcaaggagaaaaacaagaactactttatcaatgaatgaacaaacatatttatatacaacaaggacacaagcaacaaaattagttacaaagaaataaaagccagaatatagttgaaaaaacaattacaaaactaactttattaactgactgaacataccctattcaactatattaacactctgctcaagggccgcccaaaccatggtgctgcgggcaaacctgttgccaattttgttgtgaccattgccaggcacacctctgataaaatttcgcccaagcgtaggatgatggcgtgaaccaaatagacaatcttcattgactgacccgcacattgaccgtctagccactctagctaaggcagaacatgcctgtcctgccactgccgaggaagatattattgaggacattgaaatccaagaggtggaggactagggcaaggtctgtcctacaactcctttcgatgctaaaggcgatgaggaagaaggggtagctcggatgctgccatttggtggctataacgatgaaggagaaccagtgtctgaagtaggcaatgttctagaggccggccaggactacgttgttggggagtgtaccgaggctcatcctttgagaacgagaggtccactaggagatttgtggatttctccaccatccgtggcgaccatgaagaaaatgaccaatctgttcgagcgcggtctcttagagaatgtcgaatgcttccttccctcccctgaccaactagctactgaccctggagagggttattgtgcttggtcgggagctcacactaagcagggtgcaatgctgcccttacttgcgtacttcaagaagatggccaattactaccacatcagtctgactagttcactcctaagggcgtcaagtatttatctgtcttgttcgaactctacgccttataaggatggggtgagccgtccccccacaacaccaactggctattcgatctaaagtcaagccccaagcaaaacagatcaggatacttttgttggaattattttaccaggatctagatttactaccaagtatgtttcattaacatc

SEQ ID NO: 221789 - DNA, 1217 bp, Cannabis indica
agcagttgagcaaatcaaaacagaacataaaacttgaccatggagataatcaatagtttttcttgtaaaagaaataatcatatgacaaattctatccaatgcatctatacatgtaaatctcgtgtaaaaacaaaagcacattctttaatgtacaaggtcaagcaagaacacatatagaactgacaacaacacaaaacactctggtaacttgtaaccaaaacataattctgtacatttgatttaaatcattaattaccttatttgactgcagatggcgtagttatctgagcgaatataggtttccagctcctcttcatctttgtagactctgctaactagctggaagtataaaatgcatttctagtaaatacatgtagaacacatttgctatcgcccaaaaaataaaaataatttttgaaaaaaatagtacaaactcatttagctcgtttgaataagacaaaaccataaatcaaatataagattgtaaaagccacattgtcagaacacttatgagatgtttgcatgcattacgcatagatatgttgacatcaatgtaaaacgaagtattgcaacaaaagaaaataataacaacattactgtaaatatacagaattttacctgtaaaaggggaaattttatcgacattatgttaatcattgtctttgtcttctctgtatcgggtgcaaaagccaaatactctcctttactcaatagtagttctagaagttgttcaaaattaggagacgctcctttgcctacttccacaaacatatctttctgtatatacctagttcagttaagtgaagcttatcagaatttctagcagaagatgatgaatgctattaacacaaacacaagccacttttgttcagttttttgccatgtttaatctatattacgcaaaatagttcttcttttttccttttccttttaacacaaaacaaaactagtttattgtacattgtaaacaccattacaacccataggatttcgtagcgtattgccatctactccaaacaaacttttatctagaaataagaagtcttccaagttttcctaaaaataaagatcaatatacaataattccaagcacaagtaacagcgaaaggaatcactgagttcttaaccccaccaagaaaagaaatgaaaataaaataatactacaattatttattagtaattaaaaaaaaaataagtaacacaaattgatgatataa

SEQ ID NO: 221790 - DNA, 2296 bp, Cannabis indica
tataacagaatatgttactggtaataaggtctttaaatgttcgctattccaagtgttttttattaggagccattgagccagaccaatttataagctcctattcccacaaaaacttcaaaatgtaaggaccttcccagtttgggttaaatactattgctgctagatctcgcgtattagcaaacacacatcttaataccaaattgcctgcatttgaagagttctactttttgaactctttttttgaagttgtgatttgatgttgataagcatcatttttgacttgcgacttagtgcacttttcatcgagcagatccaagaacattttgagttgttcttggtttgttcctagtcatagaattcaagcctacgggccacaatattcacttccactagtaacattgcttctgagccaaatgccagtgaaaatggagtatgtcccgtagcagttttttctattgtcatatgggcccagagctcatgttgttgctcatcaaccaatcttcctttgccgcattgagcttcttttttatagtgtttattaaggttttattaacatcctcgacttgtccattgtcctgtggcctagatagtgacgagaaaatcttaataattttattattttcacagaacttagtaaatgaaactccatcaaactgaatacctttgtcagacactatttttgtgggaaacctacacctgcaaacaatgttcttaattacaaagtcaagaactttcttgcaagtgatggataccaaagggtcgattttagtccactttgtaaagaagtcaactgcaactacaacatattttgcgccacctcatcctgttggtaaagatccaatcaagtcaattccccatactaccaatgggtatggcgagattatcatttgtagtttagtaggaggtattctcagtatatgcaagaactgttgacacttatcacacattttaaaaaactcatggtgtctttattgatggttggcaaatagtaaccctgtcggattatcttcttggacagacttttccatcctgcatgatctccacaaaagcccttgtgaatttctctaatgatataattggcttctgtgggaagtacacattgcagtaaggggatggaatatcctcttctttaatgttttccatcataattgagtctcaaacgataataatcgttccatatcatcaccctgatcttaatcgagtcataaacaataataatcgttcctcaatattacctcgatcagattcgagtcacaacaaacatataacgggatcttgatcataatcgagactatcacaactataatcattaaccgtaaatggtgcataaaacttttcttacctcagtccactagttaagtgtgcggttcaatctgagtggaactacgctcgatgatcccgggtcctatgtcacgacaacaaaattcggtaaatgacttaattgaattttcgggaataaacctaactgccgtaacctgacaaactttatttcttactagttcaaactaactcaaatatccttaaaaatactctgaattaaacttcggaaaacacctcgagccaaaactagattcaaggaaaaaaacccaaggtttccccctcctagcaatcggttgaccggtttgacaggtgcctgcgaaaccggtcgactggttttctgggtagccatggggaaatctggtttttcaccccagaacccaatccaagctccaccaaacctgctaaactcttccagaacagttcaaaaacataaaaacaatgtatacaattaaacaattctcaaaaattcatcactataatccaagtcaccatgttaaaatcaaaaattgggtttttaaactaaaatttctaatttccaatcaagtagccataaaattcaacaacttagaacctaaacaatccttaaactaaatctagaaaaagctccatacttaaaccaactacacaaccctaaaatcaccaaatttctcacccaaaactcaatctaaaccttgtaaaatcaccataaactagaaaagaaacttacctcaaggtttcggacaacacttagtataaatttctagaaaaatatgaactgaaatttgagatgaacagatgacctcattggtttccttctagggccaaaaagaggagaggagagagagagcttgatagatttctttcttagtttaactattatccttctaatgaaataaaattaaaagtaaaagaattcctttattatgtcacttaacctaatataatgtgcagccataaatcaaagtccataaaagccaatattctaacttagtaaatg

SEQ ID NO: 221791 - DNA, 2291 bp, Cannabis indica
cttattaggggattgccgagcaatatgggaccatgttggatagaacgaggccatccagattggaacttagacccactaaacccctacgacatattcatggtcacaggatctagggaatttagtgaatattatatagtcctccttcttcgtcatcttatgattatggtaaattcccttaagtggggattcacttcccattttctcctttatttgattttaaacaagtgttgatacatttctttgtctcgaagatattgatttagaggaccttctccacaattcaagaaaaaaggagaagaagagaaaaagtgcctcagaaacttcctcagacatcaacatggagcctctcaaaaggcccaagaagacaactgccaataagaagcgtgccttgtagacaatcgatctcaaggcttccgagaatcaactccagacccatcctcctaccctcacatacatcaaggagcctattcgaaaagctagtcaggcgcctgaaacttttcccattgaggctggggctggtacaaggtattgcgcgtaggatgccgaaacgtgctagagccactttcgatcattttaatccaacgactgggatttggtcaatagtggcaccccaaccgagatccttgagaggagcctcgcctttgctctctcagttaggctccttgtccttttcttcattttgtcttttaattcaagaatcctcaaaaattcttatgcatttttattttttacagcaaaccttcctctccttcgttgcccaaagtcagggtctcgaaagggtgagacaattagagggaaagcttcagaggaccattgggcatgcgaggccgttgccaaagagtggaattaggctcagtcggagatcacccatctaaacaaagagggagaggaggtgaagagggcccaaaagactgaacttggggcagctcaaaggagcctaaggacaagtctgagatgtgtctaaaactccgagaagaacttaatgcagccaccgtgaagctcgagggtgctaacgcaaatgccaaggagtgatgcaatgctgttgccaagcattccatctatcgagcttggatggcgaatccagaaatggatttaagtttcttgggagagggcatggaggaagtccttgcctactacgaacaagccaagaatgcagaagaagaggccgaggcagagggagaagaagaagatccatccaagtcttctactgtgtaggcttggtttttaactatatttttttatttaagaaaatggccgtatggctgagacaatggtttgcccattgtggcatttttattgtaaagacaaatttgcatagttggatgaccaacttttcttttattttattctttttatttattgcctcagtacatttgaacttaatatattttcttatttgcgtttttattcacaacttaaacaattatattttgttcaaacttaaaatactttaagtaagtatttccattgatctcgttttccctttgcttaagtagttattaatctactatgtatgtgtgcaagtagttatattctgctatgccttatattcacgagcagtttttattagttctactttacgggagcagttataatatgttacttataacttaataggcaaacttacatactttgaataatttattttacgaactactttgtatattttttgattgtctatatgaatagttaggccttctattcatactttaggttaaatattattctttcaaggtaccttggtgcctcattcataatacatgcctacacaatgcaagtcgttaggtattcacccttgcatgtagcttaatgttatttttatgagttaaatctcatttacaactgctactttgatgttcctttctgacgataaaggttcaattttttgactttacattgtccatagataactttaatcaattatttggaaaaaaaattaaagtggagtgggtttgcaatatatcatgtatttctatataaatttcagttaatcatacacatatatatgcccttcaagtaatttttaagaaaaactttgtaattacttgaataatattgcaactttattgataatataagtttcacattacaaagagaaaatacaacactaagtttactggtaataaggtcataaatgttcaacattctagtggttctttattagcaagccgttaagtcaagctaatttataaacccgggttccaactatggcttcgataacataaggaccttcctaatttagttatacactcctacagatgcatctctcatgtttgcaaatactcgtctta

SEQ ID NO: 221792 - DNA, 1494 bp, Cannabis indica
ttttgttttgtcgtgactttctatttaattttgtcattggattaatcaaatattcatcattgcatacatgatttacacttttagagatcttttagagaagaactctctaacaatattgtgcttttacaatgaaaatatctgttttggtctgggctttggctctagttcgaggatcttgagaataaagaaattttaaaaacgtgagatggtaaaaacaggaagatggcttattttgtgtctatctataatcgagatcaatccgcacaatttgaaaattgacggcctaaatctccttctcaaaggactcaaagcgatctaacggctaaagaagtgaaaagatggcatttaatttccctcgcctcgatcaaagcactcaatttttatcattacatgcctcgggcgcatgtgcattaacgagttatcacctcaatgacccatgccagtagggtttttcatggaaaacacgctctcaacagacgcatattgtctacatactcattaacgaaactagacgtgtaaactacaagttataccctgtagagaatttttcaaccttttgaaggccaaacagaaaggatacttcgatattctcaaaagtccctatgtgtcacattatatttcaacggtccgaaaaaaggctgcaagcttctgccactcaagagtcacaaaagcttgggggtgaatgttatttgtgttttcgaatagaggaacgtgacataaaagtgagtagtatcgatttaaaggatcactaattaagtctccttaattagccagggtcgcggagaagctatacaaaaattgggaacagattgagcccaagggctgcacaaagacttgtcccgcagcatatttccattcgagacccagaagccttagcgtctctctagaacccgaagaaagtcaagttccacatgtgcccatccgacacctggaaggcactcgaagagtccaacacggacactaactgcccaaaagaagtcggacgtctaatgtgaagagagacccagatcgtcccagcaacgattattcctttttctgacacagaatcagatcttgtcccctgcgttagaccatggtagtgcgcacaccccacctctgaacacgccttttcgcctgatggtttgtctaagcgtcttcttttcaaggtaaaaccttttggtgtcacgtgtcatgtaccaacaatagtccccattgtccagctgcctttccacacgagcaaaaactttctaggtagtcagttctttacaagtattttaccccaatagtagacttattgaaaaaaatccaggcatgtcatgggcatgtccatacttgcactttagcttataaatacctcttcattttccttcaaatgggagagcgaaagatagatagccaaagctctgttgaatttcctctaagctttcttcttctaggtagagttagggtattcttgtaactattactataaaatatcatcaaagtctttcaaggtcaatatattcatcactcgtg

SEQ ID NO: 221793 - DNA, 1978 bp, Cannabis indica
atatactaaatcatactttctaatgttctaccaaatcatgaccctgaattcgaaaaaaatactcataaacataatttggtcatattaaaagttagaagcaaaaatcttaattaacgaataattaattccacagtatatttccattttataagtaaccaagttcaaataaaccaatcacaaagtgttcaaaataggcatctgctgccttatcatatcataatggtcaaccttaaataataagctataataaatatgagaccaaagacacaatgaattccatgaaaaatactttataaaattgaaccagtcaaaagaatgttgaaagaattggtactaaaatttaactataattattactattattattattataaattcttattctatataatgatatacacctcaatggctatcagctttcacagggtctgccaacaaaagctctgtattcctacaatggccaaagctggacacaccgggtgacaatatgatcactaaattaaataccagttaatatatatatatagatttttaaaaatagagagagcttattatatggttacaagtatcaacttctgtttcattttctttactcagttgctgttttcttgtgattcatagccgtaaggatttttgctagcccagttccattgatcccgacacatttcgtcgataccaaatttcgccctgcaacaaaagtttgaagctttatcaacaatgttaccaactttaacaacaagaattttttttagtaaagcagaattagcacttacttccagttcaattcagcttccgccttctttgtcgatgcataaactacttcggcgtcaccaggccgtcttccagctatcacaagaggaattttctgtacaagttgacatgaagattgtcagacaaaaatatccttacaagttacaacatatgagttttatgatacatatttagtatagcattttcgagcatgagaaagtgagacaggtttttgtgcggttttggtccagtaccacattacttattactggtacctaatagcaatgctcttatatttaaagttaaggattacgggattatttggaatctaaactaactacaaaatgaatatgagaaagggcggaagaagatgtataaccttcccagacgcgttttcaaatgctgcaaccatctccaacaccgacgttccttttccagttcctagattgtacacctcacaacctggcacaaaacaattttgaatcaaaaattgatgtacaactttctaaaactgaatcacaactcagtaattctttcactaacttatcagctgattaatagtgcaaagagccagaaaaaagaaaaaactaagaggtataaaatttccctcaaggacaaaatgtgcagatacctttcgaaaccagaaagttcataccatttttgcatcgtcgagtttctgcaatgcagcaatgtgcccatcggctaagtcaacaacgtgaatgtagtcacgtacctaaatacaaaatagcactataagaacttacatgtcttttattaagacattgaatctaaacttgtggcagaacgaaatacaattgagaatacaacttcagatatcagcaagtttgaaaccaaatagaatggcacaagcatagccaaacattcaaactacagctttagaaaatatttggaccaattcaccatacaaaagcagcagcaaacttaccccagttccatcttttgtgcagtaatcattcccataaactgtcaaggctggcctcctcccaacagcaacttgctgcacgaatggcatcaggttgtttggaattccgcgaggatcttcaccgatatatccactagggtgtgctccaacaggattgaaatatcttagcaatatgattttccattctgaatctgattggtatatgtcacgacagatttcctcaataaaaagctggaacaagaccatattacatacgattaaactaaactgttatgaatgattaat

SEQ ID NO: 221794 - DNA, 2763 bp, Cannabis indica
tataatattttattaaaattattttggaccaataaaaatatgccacgtgtacgtatgtatacacagtagcattcttagttggcacttagcacccaaacttaacatatatatcaaatttgcaaacagaattaaagataagggggtattaccaccaaaaataaagaatagcgggttaagtgtttaacaattgaaacataaggaggtttggccgcaaatttctctacaaataaatgtcattttaggctctaattcctttgtttaattgtgggaataaatagtcttaactttgtctttctcagcttcatacacacatgcatatataataattagttgccatttacactataagccttatatatttaactacgagaatcttatgtacttggttaaatggtactattatgttataggtaggagtaggagtttggtgtcggtgtgtggagtggaatgaagtggtttttattgggtcagttcgatggtgggttgatttgaaaattgaagcttggtgtttgaggttgtgtgacttgtgtcatctgtgggtttttgcatgcatgcagccaccacgtatacagtggactaaaatcatttgtcccaaattgcaaattaagatctgctgttaaaaaatagtgtctcatactatataaaaccaatctaagtttgacacgtcaattaatttttatttattaaaaaattaaatttttaattgagtcaacaaaagtaattaacatatttaatgtaaattaaattagttgatgtgtcaaatttagaatagttaagacagtacggaacactacctttaacaggagatattgattcccaaattaatgtcccaactgatcacaataagacatatcattaatgaactattaatagtagctaaaaatgatattactgtatcaagcacacaaatatataatgatgataaaattttattttgaatctcaatcaagttagaatataatgtgatcttatagatatatatatttaaaaatttattaatactttaatttaatactaataagttaatgttttatgtagtattacagtacacaagcattcatggttgaattaaaactgccaaagagatgaagaagacaaagaacacctatggagtattattttgaactgtatgaagttatagagttaaaacttataatattataaaagttagatgttgtatttaaattattaaaacatagatgttgtactattaataaaatataaattattaaaattagattgtattatgacaatttttataataaacttgatattcaataccgtacatatttatgttctctctaaattctcttataattactttaataaataataattttttcataaataattaaatattctatcaaaaataaataaatataaattgagagttttttttttttaaaaaaatattataaaatacaaagtctatagtaagacttattaactgaatgttacttttaagaagtcgtattatacaacatattttgtcaaattacaaaaaagtttatttttagtcacaacaaaaattgtgactaaaagtaaaaaaagttgtgactaattataaattatcatttttatgttgtgactaaaaggtccatggctaaaagtattagttacaaaaattacaatttgttgtgactaaatgtatttttagtcacaatatttattgtaactaaaactaaattagtgacaacttgtagctaaatactatgttttattagtcacaagtaaatttttgttgtgaccaaaagtcacattttagtcacaaaaaatttaagttgtgattaaaaaaatttcactaaaagtatcagttttttgtagtgaaagtattgcaataggataacatataataattaaatagtaatattagccaacactttttaaagtgttgctataaatacatatatttagcaacattctaggaggcaacacttataaaagtgttgccttaggatttttttattagttaagaaaagtgttactaaatgtattatttgtagtagtggttattgtgaccgcctctacctctcctcttttactggtaatatactcgtatttcagcgaaacatttcttcaagaacattaatcctactttttcttttaattaatccatattataaaaacatttgagtgtttctacactgcatcctctacttgtttcaacatctaaaagattttttaagtcaatttttttttatgttcatgtaggttatagttatttaagatatcctacaaaattttaaaaaatttagaataatttacaatatagaaagcaatgttcagtcttgttaactccgaaaattggcacttgtaatttccaaggttggctgactaatgcttgaaagatgacatggaaaaagtcactcggccatgagagtgacaaggtcactcagtcttacgaatgacaatgtcacttggccttgagactcactaatgtaactcggccttgagagtgacaatgttgttatattatttctcaataaataatatagattaaaatatttaaatgtgacatattttatattaatatgagactaatatatattatgtgttggaggttgtattatatcatatatagtataataatgcacataaaaattgtaacatataaggagttacaaatctgaaaatagattgtaactcaaggatcacatgtaattaagtgagttattacatatggaagatatggaatcaatgggataagtttcttgctgttagaaactgttacaatactcagttatatcatttaaatgagtattg

SEQ ID NO: 221795 - DNA, 3506 bp, Cannabis indica
gtaaataaaatcaaaaaaatcgtaaaaatatttaaaattctgtgaaaccgtatttttgtaatttttttagttatttttgtgtatttgtgaaattaacccaattatatttcaatccaaaacagttaaatataaatttattatattaaaaacatacgcaataagtattattataaaaacaacaaataaagtgtttttttttttggtaaggaaaaacaacacataagtttaattataagccacgtacatatgaatttttttagctaatttatatatatatatacatatatatataggatttttgttaggtgagagcaccacttttgctctcacctataagagcattttgttttggttttgattggtttaaaatgagggtgtatagaattaaaatgagctgtgaaatatgattaaaatgagactctaattgttatgctttattcaggagcaatgggaagcttgtgtatcgagtagcattgtcgacaaagtggcggctattcagggccctcttggtgtgtggggaaggagcttaactgataatttcaaggagagaattcaaagctctaaaaccagaattggtctccttaaaggccagttggatgttgattctcttactgagtataagaaggtgagacaacaacttgctgaaatttatcataaaaaagaaatcttttggaggcaaagatcgaagcaattttggcttagggagggtgaccaaaatacaagatactttcatgctgctactagctcaagaaaaaataatttcatccatgaattaaaggatgagaccggtgcttgggtccaatgggggtcaggtttgtctcaggttatgatagattatttcactgatatttttcactctatggggtcgagttgtgctgaagttcttgatgttatacaaccatccattcaataagaggacaatattactcttttacaaccagttttagaggaggaagttaggcatgctgtcttccaaatgcagacaagtcacctgggccggatggattgacgtctgctttttatcagaagtactggcatattatgggtaaagatgttgtgaagatggttcaggatttcttccaatctaagaccatgcctcggggcctaaatgctactaatctcgttctcatttcgaagaagtctccttctgttatgggtgacttgaggcctattgctctttgtaatgtatcgtataaaatcatttcgaaagtcatggctaatcggctgaaaagtttattatcgaaggtcatctcggagtttcagagtgcgtttattcctggtaggctcattactgacaatgttcttatttcgtttgagatcttacattaccttagacgtaagcaacatgggaagaatggttgtatggctctaaaactagatatgagtaaagcatatgatagaattgaatggtctttcttacaagcttattttattacggatgggttttacagaggcttgggttgatatgatcatggaatgtcttcgaactatttcatataacattgttcatggtggagaaagtttgggtcctattgtcccatctcgagaaaccgtcagggagatccgctgtcgacgtatctgtttattatttgtgtggaaggtctgtctgctcttattcggttgtaagaggagaggaagtggcttcatggttttcgggtggctaggggggctccttgtgtctcccatatgttgtttgctgatgacaactttctctattgtaaggcaatcagggaagaggctcagcgtgtccaggagtagcttaatacttttgaaagggcatcgggctagaaggtgaacctgggtaagtcttctattttcttcagttttaacaccgatgccaggactcgtgaatctattttgtctactcttcatatgagggcagcggattaccatagtttttatcttgggctgcctagtatggtgggaagaaataagagtgttaccttcgactttgtaaaagagaaggtgagaaagagaattcacaattgggatagtaagcttctgtctagagtaggtaaggaagtgcttatgaaattggttatccaatcgttactgacatgtgctatgagtgtttattttgatcccgttggaaatttgcgaagatgtggatcgacttatgggtaggttttggtggcacattaagtcttcacaaggtcaaggcattcattggaagagttgggataagctttgtctgcacaagcataaaggaggctttgggttttcgtaacctctgagattttaacttagctatgttaggcaagcaaggttggaggcttttgacgaatattagttccttagtggctccggtttttaaacccaggtatcacccccattcttcgttccttgatgttgagctaggtgctaatctaagctatgtttgacgaagtgttctagaggcaaaatttgtggttaagctgggtgcgagatggagagttggagcttgtttctctatacatgttcttaattaaccatggcttccgtgcaaggagaatccgtatgttatctctactcatgtggctcttcatgattgtagggtcaataatttattaaaagttgattctcttgaatgggatgaggaagttcttcaggatttatttgttcaaagggatgttgatttaattcatcgtattcctttgtcccctttttcggttgaggatacttggttttggatgtttaagacttatggggattattctgtcaaaagtgcttatcgcgccttgtaggtaagcaatggtaggtggaattctcaagacaattcaggtttttagagaaaattttggaacttgaaattgccacctaaggtgaagaattttctttggcggggtctcaccaattgtctccttactcttgtttctcttcggtctaaaatggttcatgtgagcggattgtgtccgttgtgtaattgggaggatgagaccatttttcatctaatggtcagctgctcttttacaaagagctgcattgacagagggctgggagtttcggttggagggggagaagctgctgtttttggcagctggtttgataacttctgcaaggttcagcctgtggattgtattgagaagcttactatgattctatggggtatttggggtgctcgtaatgacttggtttggagtaataaggctttgtcattggagagggtggtgaatgctgcaattacttaccttgattcttggaagaatgctcagctggaaaagagtgttgtatcgccaatttctagtctgaatacaactggttgtgagcaatggactaaacctcgttttggtgagataaaggttaattgcgatgctgttgtttttgatgatgataatagtctcggtttgggttgaattgctcaggatcatgaaggattgttcatagatgctttggcggttagaacttatggtctgtctgttctgtttatggctgaagctatggctttaaaggaggctttgagttaggtgaaaggaaggtgggtggagggcggtgtgcctgctgatgtggttatggagtcggattcgcta

SEQ ID NO: 221796 - DNA, 1708 bp, Cannabis indica
aaggtccatatgttattgaagctatcatgagaactggggtttacaaattagcttggcttattggcttgctaataaagaaccattggaatagtgaacatttacgaccttattaccagtgaatttaatatataaattttgtatttatctctgtaatgatttatgataattatgaataaaattacaatttgtaagatccaagccattttggacatgaagtcgcccacaactgtcaaggaagtacaaagcgtaactggacgcatttctgcactaagcagatttgtgtccaagtctacagacaaatgcatacctttcttaaacattctcagtggaaacaaaaaatttgagtggatagaggaatgtgaaaacacattccaagagttgaagaagaaattggcccaactaccagtgttgtctaatcctttacactatgaagaacgaggcatgtacctaacagtcacatagcatgctttgagtgcttttctcacaagggaggaaggcagtgtacaacaccctgtatactacatcagcaaaaggataatcgacatagaaagttgatacccactcatggagaaggtaacctacagcttgctcatggcatccataaaggtgtacaccaatcaatcgttgcagaaggttttggagaaacctaaagcatgaagctgactacttaaatagtttattgagctaggccagttcaagaccacataccaactaagaacagtcatgaagggtcaatcccttgcagacttcgtagctgagtgcaccaactcgactcttgagacccctcaagactctggagaacaaaatgagccagagaaaaagctagagcaagagcaggaacaaaatcccaaagaactaacatggaaattctatgttgatgaaagttgcactgaccaaatgtttgatgcaggcattgcccttacaacacttaggggcaacaactgtatggagcaatcaaattagggttcaatgcctcgaataatgaggctaaagtttgggcatgaagtttggactgacaacttggacatattaagggattctcaattagttgtgtatcaagtcctgggaatacacagctcgaggtgatagaatggtggcctacttgagcaaaattaaagacttgctaagttagctcaaaggcaacacaatcaagccaattccttgagaaaagaattccacagcagatgcatttgcccgtcttgcaagtagcaccattactgacaaagcaaacttagtgcccacacagtgcttataaacattgttgtcctagaagaagtcgacatgttggatgacacctatagcagcttactccaaactagagccttcccagaagacaaaaatgaattaagaaatctaagaaggaaagctataaggtacctgatcctagacgggataatgtacagacggagtttctctatccctctcctgaggtgcgtcaccaaagccgaagctgaacgacttatgatagaaatgaatgaaggcagctacgaaaagaatgttcgggggcaaagcttatcccaaaagatactttgataggggtaattttggccaaaaatgtatgaatattcgattgattatgtcagaagatgtgacaagagctagagatttttgaagataccaaaagctcctaccaatgagctcacgacgatgcagtctccttggcccttgacattgtgggggatagacctaattggtcaactctcaaagg

SEQ ID NO: 221797 - DNA, 1526 bp, Cannabis indica
taacaattcataatgtactaaatttaactttgtaggttgtggcaaggagtattgcatagttaatcaattcgcttcattcttgttgattggaagaggtacgctctcttatttattatttaatgtagttatataaatgttcaaggagtttgaaattgaatatcttaaatattcattaaaggttttgaggatacaagtgtgtttttgtgataatggaaagtcgaaaacttgtgtttgttagtgaagtagattttgggaaatttgtttgtgttgcatgctgtggagatataaagaagaagcttcttgtgtgttgtttaattgtttggcttgttgatagatgattaggtcactatataggggaaatgttatctgattttatctagaattatgtatttttattgttaaattcacaaactgtgctgtgcttgtttgtatggtttgattataaattttgatttgccaatatacatcaggtatcaaagttatttatttattttgagaaaatggtatcaaagatttaaagtagttaaaagtttgtaaaaacttattttatgaatttaaagaacttatatttattttttatgtaggtttcatatttccgattgggttggaatttttggtatatggatttggcacgaacatcatattggtgctatagatgcagtcaattcattagcgtaggaattcaggtttcggtccaagataccgtactttgtccccattgcggtggcggattcgttgaagaaatgcagaacccaaccccaactagatctcctaaccataatcggtttctggcggctgctatgtaccccgaccacgcccccaatccagagagtcgtagatatggccaaaggcttcgccgtagccaaagaagtagccgtgaccgctcgccttttaaccctgttattgtccttcgtggcactgctgagggtggtggggccggaggcgacgacagagaacaaagcaatggtactgatcgaagtaactttgagctgtattacgatgatggtgttggaacgagtcttcggcccctacctcccagcatttctgaattttttatgggttcaggatttgaccgtcttttggatcaattgtcacagttagagatcaatggggtggggagaatggatcatcctccagcatccaaagctgccattgagtccatgcccattataaagattgtggcaaaccatatatccacagaactacactgtgctgtttgtaaggaggaatttgaactcaattcagaagctcgagagatgccctgcaagcatatctaccacacagactgtatccttccatggctttcactccgtaattcttgccctgtgtgtcgccatcaactgcctactgatgtgcatgggtgtcctagaaactccccagagtctgctgatggggttggagatgaagaaactatggatttaataatatggaggcttccgggtggtggttttgctgttgggaggtttacaggtggtaggcgagccgctgagcgcgagcttcctatcgtttacactgaaatggatggt

SEQ ID NO: 221798 - DNA, 4265 bp, Cannabis indica
gcagtgtaagaccataaacaattattatatctcaaaaacgatcctaaatttatattgcataaaataaattaaattattttgtaaattttaatattaatattttagcagattttacaaaaaggagagtgtaaaatttactgatgaaataagatcgaaagggtattagaaaggaaaaacaaagtcacacgtggatcaaaggctcccccaccccgcgtaagccacgtcacagtatctcagttctttacacgtgtttgcttgtattttaattttgttaaatagcctatttctgatgctttacggctgctgcttcttgtcccaacgcgcctattaagagttgaccaatcagtcaacattttcaaaattgaaagctctcagtcccagcacactaaaaacacgctctaaaataaccctcacgtataaatattcccgagccgcaaaaacttcaattcataacaccaccaaaccaaacacaatactgatcataacaaattcttttgtttccccacacacgagccactcttctgttctaaatcacaattatctcatcatcacgggatttattcattatattattattattagttattacttttaaccaatacaaacgacaactttactaaatcaaacaaaagaaaaaagaaaaaatggtgaaacaaaacactattgagaagaatcagcccgaatcagagagaaatgatttaaggtacaagggcgtaaggaagaggaagtgggggaaatgggtctctgaaatcagactaccaaacagccgtgagaggatttggttgggatcttacgacaccgccgagaaggcggcgcgtgcattcgacgctgctcttttttgcttgcgtggcaggtcagccaagttcaacttcccggacaatccgccggagattgccggtggcaggtctctcacgccgaccgagatccaggctgaagcggcgaggtttgcgaactcggaggcttcgaacagccaccaccattcggatcgaaccgtgccggagctgatacacatggagtcaccatcgccatcagtgtcggatggaagtgggatggctcacttcgacagtgacgtggcgactgacgtgtcgtatatggatttgttctcgaatatgggttcgggtaattacgctacggattacgggttgtttccgggttttgatgatctgactggcgatttttacgcaccgccgatgccaactatcgattatgaagataattccttcgatggcgttctagttcaggattcatatctctggaatttctgaaaaaatatacataattataaaaaaaaacaaaggaaaagaaaagaaatactctagatactatctaatttttttacgggtcagtattcggatcatgttttagatttttccgaatctcattgacttgttatttcacccggagtaatttaaattcgggtttgggtggaccaattttagtacggaacatccttcaatcaatagtatcatcttccacactttcatataaattgtgtgcgtttggcttttttttaatagcaattattttttgtaatcaaaatgtaaagacattattatacattttgtaattttgtagcaagtattattattgaactctaatgtgcaattttctataaatcagtttggacccgcataaacagataaggattagattcatttaatttggatggaccacacttgtcagaaaaaataaaataaaaacacaatcccatttgcaaaatgtgtggacccttcaatgatatgatatgttatacaatttattctagaaaattaaacacgtgcaaaaataatagtactaacacaggacccattatgttattaaaaatttaaatgagtgacttttaatttattcacaggttggtcatagactgttgtgtgatttgtaaaaactaattgaatctaccaacttaatagtactcaaacatggcctttacagtcagcttagcagaccatgttatcattcacactcaccatagatagtcaagtagaagaattaaggaaaggaaggtacctcttcaatttaataaagctttgcccattttccatttattttacaatttattaataaagtttaaattcaattccattcttcttttcagacacttcaaagatagtcaaaatattcatattcaatctgcagaaaggctttaaccggcaccgcattttgtcagcataacatcgcccataaaggtacctatcaccaaccgttgtgtcaaaaagaatttttgtcagaaagtaggtgttcaaacaaatttgcaaaccgcttattaatactacaatctttattaatttacactataatatatatttattttgttaacatttaattatttgaacacaaaactaacaacaataataaaaatcggtttgtatgagttaactcgaccaaaccaatgaaactataattggtgggttaatttttttttttttttaattggatggatcataattaaatatttgcaatccatatttcaatttattgaaccttcatgacttgaataaatttcgtgtcatgtcgaacccacaaaatctcatatcgtgttggtggattgtaagctaaattattatttttagtgtcatcatgttgtgtgttcttaagtttattttaaatgattgacatgaatgtgacttgcaacacgaaagactgataaaacacaaacatgaacacgacccatataattttcatatcgtgtagtacctgcaaatctcaagtcatcttcgtgtcaaactcgcgtgtcgtgacctaaatcgccacctcttcatcacctcaaatcttctcttaaagaaatattggttgggctcggtgtttcatgtactctaaggtcatctccaatgttaaacaattctaaaatttatcatcgtgatttcacaaattaaaaaaaataaaaaaaaccaacaaaagctagccctttaatagctaagtagcaatcgaatgtaaccttaaccgttgatatttttagttccttatttaaaaaattgttgtgtttttcaaaattaataaaagtgtctataccatggagagtattgcaaaaagtgtctaatacaataatgaggtactattttctataataagtataataagtgagactcaatattaaattacatcaataataatattatacgataagggtgttaggtacaatgagttctcacgaactgaaatttgttgtttaaaattgtgtcctaacttaagtgatgtttagttaaaagtaataaaatagttcataactactagaaaaagaaaagagacgattcctccccaatacaacgaagatccttgatctcaccactgtggcttggacagccaaatcattaacaaactttaaattatcccttttgcaaaaacaacacttaaatccttgaaacagagcaagataattcaaaatatcaaagaatcggagccagcctccaatttgggagtttcttcttgtccagagcattgagggccgcaagacaatgggagacgatgacaatggagtcccaatgcatctcacagcattccacatttttatttagttatatattaaacaattgaatttccattatatattttgatagaataattattttatctaaaaaaaaatagtaatttcaatataaaataaaaaatattattaatttttttatacattttatttaatttcattgttattcctatttctatattcattccttttattattcttatatttttattctttataaccttaaattttattttggttaaaatcaaaactcagttacaaatgtcaaactataactgaaatatatagtaatatacaccaagttttttttttgtgggagaatatacaccaagtttaggacaccatttgattgattaatttgagccactcgtctgatgcatcattgtccacgtggcaggtaactcgtcacgtcaaaacatctctacctcccattccaacggcttaaaaccaatgatcagtcatcctatatttattcagagactttctttttcttctagtgtacaccgtaccgtcctctaatccaaacttaaaatgatagctaaatctcctgccaccggcattttgtttttcaccatttatttgggcctatctttaaatctccgaccaattttaagttccgtctttgtattaacattttcagtacaacaagtaagtatgtacaatatgtaatttaaacgtttaatttgatactctcattaaagttgcagtaatttgaccataaagcatgacaaaacatcaaatacgtgaagtagtaggtaattactaattaatataatatata

SEQ ID NO: 221799 - DNA, 3320 bp, Cannabis indica
agagatcttgaacggaaggagtcattatattcctctgcaatcaatataaggttttcttaaatccttacgtgtttatttcattgttttagagatattcatatttaggatgttaatcaacatacttgttagtaaatctagatcctagtaaaatattcccaacagttacttcgtaggttcttttgtcttctgagttgatcaaagtagttggtcgacctgggccttctggttgtttcctggtcatgtggccttgttggcaactgtggggatttatcccgtataatgactgagtcatctcttaaacattttcttcgtgagcagttactcatagtactatactaactattttcttcagaatagtctttctcaaagtaacatttgtggagggaattggattgattgcttaagttcaacacgtctccatgcaaccacgggaagtattcgtattgctggccattaagatctcgagcaaagtacctacaccaaccactccgtacatcatgaaaatatttccaagtgttgagtagtttgttggtcctcaccctccgaatctcatactctccactttcatggtacagctttcgggtcgctccaaggttggttgcaggtccttttccctttgtagggtgacacagtagcctagagtcattggacctgtaggagaatctcgcgaaggagatcgatttcatgcattgtttgaatttttttcgagcaggtttctggttggtcttataagcggcatgtggtgatcctgtaggtcctcagccccaagtctgagtccttttggatgctcgctcgtagtttgtttctctaacaagttaccgctccacataaactagaggacccataggtccacattgctaagtctaagtccttttagacacttgcttgtggtttgtttccctacagggagcctcagttcctattgcatgttgagtagtggtacaagtaccaagagtggtagtgttgctttgcatgtttagagacattattaacaaacattgagcccttggatgattacttgcttgaaattatgaattccttttgaaacaaaactcatagcagagaacttgaatggtaactagaaactcaagttgtggcaactagaatcacgtcaatcgaattaatgtcgagtgagttatgcccgtttcactgaaggtagttcagcaactggtgcccaagttgacattctggcatcaacctgaatgttgtatgagtgggaaaacataccaaacttatatttttttttatgcctaagtgatattttgagattagttattcatattcttagttttagtgaagtcgttcaccaactctcagatatgtcacttttttgcaaataagtagactcgaaacttctcgatttgttgctaatttatcaatattttagtttgctgaaaagatgaaatatcaaattgagaatttgacttgtcacaagtgttatctctcgtttacaacagaaaagaagttagatgctcaagaagaaattgaaattggataagtagaacccaacgcaccaggctatatgtaaacttgggcgatgagtgctcttcagagagcatcccgagactcgttttgatacttctatggaattcgaaattacgaacaaggtctcctaccctatttttgaccaagataagaagaatgatcaaagaagaactcgtgtttgaggagcagattcatacaaagtagtttgtacatcaatctgggcggaaggcctagcacccatgtcatcctgagtgttagggccctattttggccctcaactgatctcattttcttcctgagaatacttgtatcttcattatttgtgaaaatcaaaaacatttccgtgacactttaaaaaaaaatacttggaactagctcatgttgataaaacatcaacttgagaactaggactaggcactaggtcaacctgggtgctgggtcatagttttaaccaccagatgactctatttgacttcttgaaacactcagatcttaatttttggtgaaaatagagaatgtacctgaaagatttctcgagaaaaatgtttagaaatggcctaggttgacaatatgtcaacctgggcactaggccctagcactaggtcaacctaggcgttgggtgctcaggaaacacctttagtaatgtggtttgaagcgccctaggttaacaacatgccattttaggtgttgggtgcatcactaggtggcattggcactgggtgcccaggtgcctcaaatgggaagtattctgattctgattctagggcctctaacatgtttgtaagaagtcttattcctgtctaagtacaaactttgagccatttgcattaagacttactcgaaaactgaaacccttccctgagatgtcaaggtgctgggtgaaaccctaggcatccgggttaactttaggtgctcgatttgactcttttcagttctcaggcttcagacttggattcttccttactttttggatcaaaatactaagagattgtgagttggaaaaaacttggcaggatccaaacacccattctggagctcacaaagtcaacctggacgcagggttagggatctttcctagagttgactattatgaaaggtccctaaccctgggaagttacttttaaatattgttgtccacatcatcagggttagtttttgagtaaacagtgttagtcatagttatgtggatatcaaaaaatttattcttaaagcatttgaatttctgcctaaaaagcatattgagaatctgtttagtttactatgggctctctagaatgaaagaaatgcaagcctttttgggaaaagaaaagcttggatgccttataaggatgtctttaactaggttgtttcattttgcataggtacaaagaaaaacaagttcaaagaattcatagcaaagctaaggttgtcatgccagaacccaaggcaaggtagactcctccccaagaggaagcttaacattaaatgcgaatgcaaccattgcaaacataatggtaagattagggttatacataaagttttataaatcgcccaacccgaataatcttctcaaatcaaatcaaaaattgaaaaacctaacgaaaatataacccacccaatttgtatattggacagattgaaaataatactaatccgcccaataaacccaaactaacccgaccaacccgattaagagagttttaattcaaataatgtttatttgatggtagttgttgaccgagattttcggcaactattaaatataattataatattgagctgtaagaaagcgagatgaggatttttacgtggttcgggcgttaatgagccttagtccacgagtctttgttattaat

SEQ ID NO: 221800 - DNA, 1685 bp, Cannabis indica
caggttggtattcggaatatccaatgagctacagcgatcctcgctatgttagcaggttgggtagctattaagcacccaatcaataagtcgatccccattcatagtaggcaaattattccacaacctgtttctattctcccaaatagcccaaaggattttgatcgcctcttcaaactcttctttagacaattgatgtcttatctccacaagaaggtcaaacatagtcccacctttatattgacggatacaagtatagtaaggcaatagtttccacaccgcttttgccttgtcacagctccataacgcatgggggagcgattctacatactgaccacattggttgcaaaggggatcaagtgtcatgcccctatgaatcaagtttgatttagccgggagccaattgtggcaaagcttccagccaaataacttgattcggggagggagttgaagttgccaccacatcttccaccaagtgtgaatttgatccatgttcgaacatcgagttgggcatagattgagttcacgggccactctataaccacttttcaccaaataatgtccatttggagagaaaggccaaatcaaaatgtcttcctcttgagtatccacgggtgttcccaaaatccaaggaatatcttcattgtggaaataagcatgaatcttttccttattccagtcgccctcctcaattagcagcttgtgaatggttgtattaggggctaatcctgtatggcgataagtgatggtattatttgtgcgggggatccacttgtcttcccaaatcctgatgtttcttccatttccaactctccaacgagctccttctattattatttggcgaccccaagtaatgcctttccagatactcgaagctcccggggtacacttggcctgaagaaaggatgagttaggaaagtagctatgtttcatcactctggccaaaagagattggggatggtggatcaaccgccacccttgcttggccaaaagagcttgattgaactccgtcaggctttgaaaacctaatcctccttcatgtttcggcttacacagctttgcccaagttctccaatggatctttttattgtcttcggtatctccccaccagaaattagcagctaaggaatgaaggctttggattagttttttagggaggcggaagcaactcattgagtaacttgggatggcttggatcactgcttttattaggatttctttgccggcttgggagaacatcgttgatttccaactcttaagtttgttccagaccttgtctttaattatctcaaacacctctttctttcttctccctatgaaactaggcagccccaaaactttgtgtgttgggcaacaagtatgactcccaatcttctagcaggagtttgtcccatttggttggatatccggcttcccatgcttacttccgatttctcaagattgatttgttgtcccgagagtctagagtatcgatgcagaatttgcgacatagtatcacactcttcttcatttccttctaggaacacaaagctatcgttcgcgaaaaagagatgagacactttcaccccgtcctttccaaaccggatcccatgaatactaccagctctctcagccgcttggataagacaagagagaccttctgatcaaatgaggaagaggtagggagataatgaatcaccttgacgaag

SEQ ID NO: 221801 - DNA, 2110 bp, Cannabis indica
gacataatttagtaaatgttaaagttcgaggggcatgatttggtagatatcaaagtctgtgaagcatgatttaatacataaataatcgcagaattaataaaattaaatgaaattgaacaaaaattcttaattcaaacaatctcaataatttaagaaacatgacttagtatatgttattttaaatattactttcatataatttttttattgttttcgtgttattattattgttcatgtacgtacataatgtaatttttttttaatatggagttgtatatatataggttagaaaatgtacattcatatccataagtaggcacatgtgatgcacgttttgattagtttatttattttttgtttcaattttttataacatttattaaatttgtatatatgactagatagtagcaaaatactcttgtaacacatgataaacattaatgatttagttgagtataaacatatttttaagtgtcatgtttggtagtatcataaattaggtggtttcttctcttaagatttatctgcctttttttatgcatttaaaaaaagaagaagaaaaaaataaaaatagcatttagacctaatgtgttgatatgattttaatatattaggacctaactgttataaaaaaaaattccttcaaaaaaaaagaattaacttttagaacttaagtactatcaaatgtaaagaatggggacaatagttgaaaataactatcttttcaactatcaacatgaactttttttggttgatacctcaacaatcctctcctcgaactaaggactacatacttgtggcttctcctctaacaaaactaccttgtgtcgttgttatcaatttatcactaatggaactcgttgcctgaccatcaactttgtcaagaagactttcgatataggccttgaacatcaatcttcatcttgtactgctataattattagcgggacacgccacctaaccgccacaatatcaagtagattttttctataaggtaccatatagatcttcaattgtgagatcatcacattgaaagcacatcgcaaacacaacccattatcccagtgctctcgaacttttggctctgatagttgcgccctactctttcaccttattattccgccacctcatcttaacttgtacattagtatgataatgtccactttgagtaggtctatgtaacttttacctattcttcaaatgtaagatttaaattgatacccaacaatatataatataggagattatttagaaacacttgtatataactatataaattaggagtatagtactttaaacttaattatggaggagacatgcatatatggttattaaattcacatcacatgaatgcatttaaagagcatatgaaaaaacaaactctaagaataagatatatatatatatttatataaacatttaagaatattattatttatactattataataaagtgtcttttcaagagtggttaacaatttttcgtaataattataaaattatatatgtagaatgtgtgtatatatgtaatttgtagtatcttactgccattattaaaggctttcaataacatagctactcatgagaagaagaagggagggcatccctatatgtgctcaaattatcaagaattgttggttagccaacaaccacctaactattcaaggtaaaattgcttcctgcagcaagtatcttcaagattggggttgtgagctaacagagaacttcaagaaacgaatctccatcagcataaaaagctctcacccgcttgaagcaccatattgacaatgataccaatcatgaatttcactgggagcaagtaaattattttgaaattttagcacaacaagagatattttggaaacaaagagctaaatcgtattggcttcacgttggtgataaaaatagtaaatatttccatgcctatgcaagttctaggaagcaaaataaccaaacttatcagcctattgactccaatgatgtttggcaaaactgagatttagggctttctcatgttatcattgattattttttgatatatttacaaccagatgttctttttaggaatttgttaccaatggacagttatgggaccgatcattcctactcg

SEQ ID NO: 221802 - DNA, 2565 bp, Cannabis indica
aataatacaaatatatttatatatgttgcttaagcattagctaaagtgggttttggtcaacttttcgtaattaggtatttttgcatgaacatggtcatggtggtttcttaattacataattgatttgatagttcaccttgcttgactataaagcaatgtcatttcacagtttcacacacaccattcctcaatatatgctttctctttaatggtgcttttaatgtctttaaaagaaattttgtacttgtttttggggattgatttgctattataaaggattcaagatgaccttaacttcatcaattaggctaataattgtgaataaatgattagtagtagtaattgattgtagtttatcattgacaattatttatgaaaaaaatgctaaaagttatttatggtgtttttaatgtaattaagtattgatttttctatattttaatttaataatttattttaaaaaattactaataataattgacaaagactctaatatataatagtgttgagcattattaatactaatatgtgattatttatgcaaggttttacaacaattagttagagaaatattaaaagttactaatggtgtttagcactttattgttgtcatactattattagttcaattaagtatcggatcccacgtaatttaatataataattttaaaaaaaatcgttaattaatcgcagagagcctaatagtgctagacactattagtgcctaataacaaatactcaaattagttatgatctttatagtagcccactaacttggacttattacatttttggcaagtttgactagtaaaatatgaaccatcaacatgtaataaagcaaagcaaagcaagaaatgtcaactttgattgagttatttgcctataaaagttcaggctgccattttgaaacatactcaaataacatgtgcaaccatatagtatttccacccatatagtccaaaatccttatacaataaataaatttaagggtttagttagtcttctgaaaatttcccttttaagtttcaaaaatcagtgatttgtttgtctaaaatgtacataaaattttcaatgaaaaccaaaccaggtgtcattgttgaatttgcttagcgtaacaggacaatggtgtaaggaacaccggttcagcaggcataattctagctcaaaattgccttgagatctagttttatataatctcaatgtactttaacattaggcaaatatgaaatcaagaataataattaccttcacatggaaacttcattgtgaaaccatgatttttgctttctttgttagtttcagattcttggaacagggaaagctaacagcttcttgttctgtcagaaagagaaaataatgaataaaaaactatcacaatagaagtatatgcatatatcatttcccaccataaccatctttgttacatgtgatttcagaagtattcatttcaagatcattttagtgtctctaacaatggctacatagcttacatattcgaatccgatacagttcattaaatctttactgatgccttaggctaaccaactcaatgtcgaataggagtgtcccaagagtagagccttctccattggcgagacgagttggattgaagatggtggtgaacaatctctgcctgtcaaaaaactggaaaagtaattggatgaaaagctgttataggaaggtaagaaatctggaaaacattgggattggatcactgatcagtataaacaagtgtaaatgcaataacccctcatgttaattttctaagacaacttgaaaaaaaccatgttttcactgcaattctttgtagtttgtagtcatcaaaccattcctaaagctgtctttatcatggtaagacaagagagaaaataacagcaaaataggaaataggaaataggaaataaaaagaaaagcaagttcattgatgatatggtttcaatggctaaaacttgaagactaatagaaagaatgaaaggatataaaaacaagtacattaggtggtagaggttcttgtgttgtgctttgatatccttgagatggtggaatgataaccctacgaataccacctattttcattgatttcacagctgcttcaatccctgaaataacctacaaaaagattttgagatatatagagaagattgagcatttactttcataattccaacaacacaatgaattgtataccattcaaccatgactatatttgttatcttactagccttattcaatctttttttctcaagtaaacaatcacccttatcatgagtgtgagtgaatgtgtgtagtgaaatcactttgcttcaatatcagaactgagaaataaactatcaaaaatacacaagaatgacacaacaaaatctgttggtgataatttcttcagaaagcttgggattccttatacaagaaatcaacatcccactttcttattaatcgaaaagggaaagatgtacaggattatttggattacaagatcaaaccagattatagaacacgatttacttccacaattcttttaggaggcgtttggttgggaggaatgaaaatataggaatgggaatggga

SEQ ID NO: 221803 - DNA, 2190 bp, Cannabis indica
aacacaagccaatgaacgagcaaccgatcctgccactaatggaacatatggcgtcaaacttggagaatgttgatttgtgaacccttccatataaatacgaaaaacatcataacaaggcaagtatatccccacctgttatacgttgaaaaacatgtattaacaaaatgacaccagaagaatctacataacagtttgagtcagcatgttgaccgggctgaaccacaaaagggagatggctaaactgggaaaattctgctaagaaagagactcacagttggtatagccaatgctaagctagcatttgtgcctctccacaatcttgtgaaaccttcctgcaaaatttacttctatgagacctcttgtaagcacaaatttctgaccaaacttaggtggcttttggttggaaataatgaaatagaatagaatggaaatgaaacaattttcattcaattctattgtttgattgcattttaaagtactggaatgtaattcccatagaatgatctttccaacattagggtggaatgactattccattatgaaatagaatgaaagattatcccaatgcaagatgaaaaaaaaattaataatattttttattaattctttttatgcatttaaattttattcattctcatgggaattatatttaataactacaatcgaatcaacaagcttgtaatcagaaaatattagataactactataaaaagagtatcatttcagcgcaattatagtttaataaaaggtccatgcgtgtgttgttgactacaagaataacatggtttagctgcaatttacatactatctccattctgtaatccacaatgcaatgaattgaaacacatttgtccaacaaattccaatgtgtaggcctactaacctgacgtataattttatataggacatccaatgttcctttatactgcccacattccggagggcacacaggttcagcaccaacaattgaacgcacacccgatgaagaatactttgtagcaggaaacacctaacaccaaaacacaaaatcaatggaagtttattacaataattaatgtacacagcagacacatattaagaaaatggcaatgtatacataccgtggcggtttcaaaacatgtgctaccacaaaccccctgataaggaactccagcagcttgtgcttgcaaccgagtctagaggtaaaggcaacaaaatagcataagacctttttaaattttcatcaaaataacaacaatattgaatcaaatacaaaatccatcaatctttatagttttaaactcgagaaatggcttaacattgcgttttcatataataatctaataaaatcatacaaacaaggtttactcaaaataatcaaggaaaactggaaaatgggcattgcaattgagtttgagatgcatataattaacaaaaagaaaaagaaaaaacgataatagtatgcataaaccttggcaatatcaagaggattaactaagatagcggagagaacagcagcaccggcagcagagaaagccctctctccaaaacccaaattggcattcgaaagttccaccgccgccgcagaagaaggaggttgtttactaccatccttgaacatggtttcggcgcctccttcgaaatcaacccttgtggccgccgccgcggttatccaggaaggtattccctgcctcgatcccaccattattattcctttatctctctctctctagaaattgtaacaagaaagaaagaaaggcgttcagtgttcgtgaatgttcaatgaaaaataacagaaattgaggagaggcttttttggattgtcaatgttgattacgtaggtgcgtgcgtatacaaatatatgggtgtgtgtgattatgtatatatttattttgattgaatttttggtgaaattagtgggaaaagatttagagaaatgatggtgttggcagtggattcgtggcgtccaatagaggcgccaaacaattgggggccttctcttagctcgccacctgtgactcctctctctctcacacaagaattgaagaatctctattttgttggggcttcggttgattgcatgggcttacaagatttaaatgtatgatataaatagagtatgtaaaaagaaaaatttgaagaagtagagaatatgtattgaaaattaaattcgaacataataaaattaaattaggagaattattttatata

SEQ ID NO: 221804 - DNA, 3709 bp, Cannabis indica
attttcatctccgaactcaaaagtgatcctgctcagttggtacgttctctaaaaatttacaattttactttaatattattgttccggcggttggtggtgcaggtggcatgctcttggcctggaaaacagggtttacttttgtatctcaaagaatcaaatttctggtattgtgtactcagaccctgaccatcatccctggctgttatcttgagtctacggacccccgtactttcatgaaaagaaaagcttctggtccaagttgatggatctaggtcttaaatttggagggccttggttgattctcggagatgtgaattttgttctgagtaactctgagagaagcggctcgaaggggagagaccaattcttgccgtttatttcgaatttgatcaatggatttggtttgattgacctgcctgttaaaggtgatcgtcttacgtgggacagccatcgagatggtgacgctcatgtaaaatcggcccttgacaaagccttggctaatggggagtggccaagtcttttctcgaaggcgttggtgatctcttaccatacgtgcaactcagaccacaggccccttcgtatcaatactgcgaaccggggagctaatatgattgtggagaatgcttggagctcggtgtttcatagttgggcctcggcaaggatttttaagagagtgggcgctactcaccttgctctcagcaaatggaatagatgtcagtttggcaagttggacaaccgtattgctagactggaaggtcacctgaattccatccagagcctcctttctggttcaagagtgtgggccgaggaattggaaaccagaaagtctcttaatgaggccctaaggtgtagggccctttactggcaacaacgatctcggctttcctggatcaaggacggggacaaatgttcaaagttcttcactactgccatcataaaaaatagaagaaatgagattgaggccatcatgaacaaagacggggtgtggttgagtaacaggaagggacattgggaaggaattctcggatttcttgggaagtatcttcaaaggcacgatatatgggctggtggaatgcttagaccacctgatctcggaccacttctccctccaggagcaaagggatttggttaccattccaaactctgaggagataagacatactctcttttccatgggtagtcttaaggcctcgggaccggatggtatgtcagtgttgttctataagcactattggaattcggttggtactgatttctgtgaggcggtggaagattttttcatctctggctccatgcacagaggagttaatgctactaatgtgatcctcattctgaaagtagctaacccgaagaaagtctcccagtttaggcctatttctctatgtaatgtggtttacaaggtcatttttaagatcattgcaaatagaattcggtcggtgcttcctagattaatttgccctacacaggcggcttttgtccctggacgaagtatcaacgacaataatgtcttagtccaggagattatccactattttaaacgtaaaaagggtaaggaaggacttttcgccatcaaaattgatgtggtaaaagcttatgataaattgagttggagttttattgatcacgtgctcagcagcttcaaggcccccgacctctttcggaaatgggttagccaatgtattactactacgtccttcaacattcaccttaatgggggtaaggttagcagtctggtctcggagtgtggcttaaggcagggtgaccccttgtctccgtatctcttcatttgggctactgacattctctcgcagattctagagaaggctatttctggtggcgttatcaaagggatcaggttgagtagagacggcccttatcccatctcttctttgttgatgatcttatccttatgggtagagcaaatctcggggaggcgagaggtttctgaaactgcctcgagaaattttgtagttggctggccaatgtgtgaacaagctcaaaacttctattttcttcagtaataacaccagtgaggggatgaaaagggggatcttacaagagttggggctgaacttggcggatacgaacattatttacttgggcctcccgctctttagatcaaagaataaagatgcgaattttaatttcatccttgataatcttgttttgaagttacatggttggaagatgaaaatgttgtcaaaagcaggacgggccacgcttattaaatctgtggggctggctctgcctgtgtatactatgcaaactaccaagctctctaagaagcttgcttcaaaaatcgatggtatggttaggaacttttggtggggttgtgagcaaggaaaccgagggttatacctaaaggcctgggaccacctttgccttcccaaatctagagggggcctggggttttagaaatctatggaattcaaccaagctcttctggctaagtggggttgggccctccttactgaggatcaatctctttgttgcagggtgttgagagccaagtatctgaaaagcaaaccattgtttaaagcaacctataaagattcagactcttggttctggaaaaatgtggttaaatcgacagatattctcagaaaaggggcttgtaaggttataccaaatggggaagaaacaaacgtttggaaggacccctgggttgttcacgggaaagagttctacccgaaacccattacttcttgtgctgagagggtgactaaggtggcggatcttctaacgagtgatagggattgggatatccccaagctcgagtccctgtttgaccctgaaactatcaatgatatcctgaaagggggcagaccttccggtcaagggagagacaggtggattttgaccaaagaaggaagggggaaattcaccacgaagtcagcttatttgattcaagctttggaaagagcccccgcctgtgtggtggctccagcactatggaatagactttggaattctaaagttctggaaagacataaaatcctatggtggggtatccttttgaatgctttgccggtccgtggaatcttggccaagaaaatccaaattgaagatgtgacttgccctttgtgtggggaggctgaggaatcaatggaacacctgttcctatactgtaactttgcttaccatctctgaaggtcttctccctggggggtgttcccaatccatgactctggtggtcgggcttgggactgggttaaatttctttggaacctaaaagctaacggtgtggactctgataagttattcctatatgcgtcagtcgttgtggacactatttggagaacctgaaatgacaaggtacacaacttgaaaccgcataacattttaacgacaattgactctatctctcaatgttatacagattatgtggcatgcttatttcctccgatgttacctgtggctcctcctgcttggacaccgccgcttgaggactggatcaaaatcaactgtgatgctagggttggtggaaattttatgtgcattgcagccctggctagaaaccactcaggaaatgttctgtgggctgttgtttccatgctcggattcagggacccgttgataggagaagcgactgcatgttgccttgcccttgattcggctagactcagggccacaactttgtcttggtggagagtgattcgggaatggttatcaaagcgctgaagggtatacattcgttatggaatattga

SEQ ID NO: 221805 - DNA, 3218 bp, Cannabis indica
tgtattctcccctatataaatgaaatcatttcctaaggctagttaacttttgctagtcttgaattgcaatctcatagattggattctgttagattcttagcatagataagctcctacatggtatcagattgcccctgacttctgtctcatatggatcctcataatcctgaaaatcaacctcgttcctcaactcacacaaccaccaccgctgctcaagctccggtcaatcttccatggaatccgttccaaaattcctttcactcctctctcaccgtgaaattggatcgctccaatttcctcgcatgggaatctcaagttataccaactgtaattggtcacggtctcaatgacatacttcttggaggtatttctccacctgaaagattggttaatggccaaaccaaccctgaattcactacctggaagagaaaggatcagcttctccttagttggcttcgctcatcgatgtctgaatttgttcttggatctcttactcaattccaaagctcctactcttcccggcgcgcattggaacaaagatacgccaatcaatccaaatcccgaattttacagatcaagtcacaactctctacaattcagaaaggtaatctttccatttcgaactaccttgacaaggtaaagattcttgctaattctctttcagttgctggtactcctatggacgaaaatgatttaatcatgcacttgctcaatggatcaggcccttaattcgatcctattgttcatgttactagccttgttgatgatctttcctttgaatctattcaatctttatcactaactcatgagctcagattggaaagacactacactatagatgattccagcaccaagatctcaacaaatcttgttgttggtcctaccagatctgcaaatgggacactaaattgatacaatacatcaggcagaggatcaaattctcaatataataattgtgtccctcccataaactttggctgaggtgcttcccccacaccaagattgatttgtcaagtttgtcacaaacttggacacacagctgttgtgtgtcactacaggtttgataaagggtttgttaccccaaaaattggtgattctcgtgccttcctaacagagattgatgattctgaagaccatcaggcttacacatcctcaatgatccttgactatgctattgatcaagaatggtatgttgataccggtgctacaaatcatattgctctcgccatggaaaatcttgaacatgaacaaccttattttggccaagattctctcactgttggtaatggtaagaaacttacaatatctcatcttggtactcactcaattcctattgtttctcaacctctaaagcttaattcagttcttaaagttcctgacataaagaaaaaccttgttagtgtcttaaaactaaccaatgataataacgtttttgttgaatttcattcaaaatgttgctttgttaaggacaaactcacagggaatgtcctactcaaagggagagttaaaaatggtctctacatgcttccccaacaacccacttcagaacctgatctggatcttcaatgtcacatggccactactatggcatctgccttagacaatactgagtcctatgtttctagtttcgagtctaagagttgtctttccaattgtacttcaactgtttcaccagctgcacaatcttgtaatcctactggtattaataaaaatgagttgaattctgatacaccagtttgcttatacaccaaatctaatttgaattatgatgttaatatatggcactccaaattatgtcacccagcaccaaaaactttggccaaaatcttgtctaaaataaatatttcacacaaccttaaaaatatttcacacaaccttaaaactcttaaattctgtgaagcatacaaaatgggaaaaagccataaattatcctattctcagtcaaattctcgagcctctcagccacttgagttgctccacactgatctttggggcccctcccatgttacttctcttgaaggatacaagtattacatcatctttgttgatgatttcagtaggtttacctggatttttcccctaacagtcaaatcgcaacccttttctctattcctagagtttaaaaagcttgttgagaaacagtttgaactccccataaaaaactgtccaatcgaactggggaggtgagtacagggtttttgctaagtttcttactcaacatggaatctcttttcaacacccttgtccccatgaccatgagcaaaatggcagggtcgagagaaagcatcgacatatcacagaaactgggctcactttgcttgttgaatctggtcttgacttaacacactggtggctagcttttcaacatactgtatatgttataaataggcttcctacacttgttattgatgatctatcatcctatgaatgtctctttcacaagcagcctgactacaactttctcaagccttttggatgctcttgctaccctcatttacggccatatcaatctcacaaactagaaattcaattagaaaaatgtacatttgtgggatattctatgtagcccaaaggttatttgtgcagaagccaaacaaggagaacatatattgctcgaaatgtaatctttaatgagcaagaatttccaacaaaatctacatcaacacaccaacaggtaaaaccttcaccctccatactatttccaacaacttccttctttactactcctatggaaaatattttaactaactcaagtactcctattgttgatacacctactgctggtgatgttactgcaagttccacatctctccctactcaatcccagcaccctcaacctacactagctgcaaccatcaatgagccaaatgagcccaatgcaccagatgcaccccccccccccaatcctatatctcatggaccagtaccatcatcaaacaccaaccaaactaccataatcccaacccctagtcagttaccagtccctcaaccacccacaaattctcatcctctgacaacaagatccaaaaatggagtccataaaccaaaagcataccttgccaccaatcaccctttacctgaatctctaacccccactgaacccaaaacacttaagcaagccttggccgatcctaaatggtttaaagccctgcaagatgaatacatagcactcaaaaaaatggaacatggaccctggttccttatgattcatcaatgac

SEQ ID NO: 221806 - DNA, 1995 bp, Cannabis indica
attggatcgtgcgaattggattggatcagctttttcatcgaacaccccctattgcagatcatatacacgttcagttgtatggttatattaattacacattatgtatgtaaatataagttgtataatttagttaataaaagaaggttagagagggtcttgtcttttgacatagtttaaaagtttctctcttttgtgctgtcagttgttttccattgttatggcctctaggtagatcaatgagttggaggcatagtataatggaattgaaattgaaggggaagaagagattgttttgtcatatgagatactatcaaaaattagaataaatgtgaggatgaatgattgtgtcttgtgggcaaattcctaacatctcaggcaattgacttcgatgtgatgcggcatatgatgtcctctttatttcaacctgtcaaatggatgtatgttaagaaattggagtataatcattacatattcatgttctaccatgagttacacctgaaacatgtcaatgatagtagcccttggacttttaataagattcagttcgtctttgctcgcttgaaatcagtgattgatcctcatacattggtgattaaccattttgatatgtgggtgcaagttcatgggctccaattgaggtttaagtctaatcaggtgcttaaagatttaggaaactatattggttcttttgttgaaattgatcctaaaaattttctggggttatggagagattatttaagagttcgtgtgacagtagatatcgcagttcccctgaaatgttggatgaagattaaatgcactggtagcgagtggtttttggcaaattttaagtacaaatacgttccaacattttgttttgtctgtgggattataggtcagtccaaatgtttttgtccgaaggtttttaatatcctattagagtatgtctgtgacataaagatgatgtacatttgttgggctattcactatcatattgatgtcaaaatttaaagtggtgattctgtggctcgacgtctaagtgggttatatggtgaacccaacaaaattttgcgacataaaacttgggcttgaattcgagctcttaacgatgatagtcgttttcattagtgccttattggtgacttgaataatattacttctaatgaggataaaaagggcggtaattcttaccctagttggttgattgatggatttaattaaactttactggattctcatcttcatgacttacctctgtcgagttacctttacactagggaaagggggaaagggggtgcgaattggatagagattaggttggatcatgctctggtgagtgatagatggcatgctttatttaactcagtataattgtttaatttggaagtttttatctctaaccattgtccaattttaataaacccgactgtaatcagttttgtttcaaaaattcaacacttttgttttgaaaatgcttgacttcagtagcctctttgcttacaagttgttcaagacactagggagatgtgtgctaaccatgatgttatgggaaaagttaggcctgtggggataagttgaaagttaggggtcatgattcatcaagaattttaagtctaaaatggaaaatgtaagaaagaaatcaaaaggctcaagtctctttgtgaccatgtatctatcgctaagtatgctgaagcaaagaagaaattggctaaaatttacgttcaaaaagaggttttctgacgacaatgttcaaagcaactatggcttcgagaaatcaaaatagtaagttttttcacgctcaagctacttcccataaaaaatagtaaaattcaaaaagcttcataactctattggtgtttgggtcgattagaacttagaatttgacgctgtgactgattactttatgaatcttttttcatcgtgtagttctcaatggcagcctgttattgattgtatcagccccaccatttctttacaacaaaatgatgagttacttcttgggttttatgccctaaa

SEQ ID NO: 221807 - DNA, 4593 bp, Cannabis indica
attattaagtattgttctatatttatgtttagaaagaaaacaaaatataagtattttgattatataagtaattataattgatttattagataagaattaaatctattatatttcgtgtgtaatcatccatgaaacacttgatcttgaaacagagtaaaagaaaatagaggaaatgaataaaaagcctcatactaagaatgctagcttagcagtttttagtaaggaacaatttattatatagagtttgagaattaacaaaatacagcagaattctgttacaacagattagttacaatctgacacacaaagaaaatattaactaacaaagctaactaatctttattagttatcatcccccctcaaacgaaaaggtgtagaagtcactttgagtttgcttttcagatagtgaaaacgttcctttggtagaggttttgtaaagaatgtcagcaacttgatcaatgcttgggacatgtcgaactgaaatttcatttctcagaatttgttctcggacaaagtgtaagtctatctcaatatgtttgcagcgagcatggaaaatcggattggcagcaagagcagcggctccttagttatcaacctaaataactggaatatcttagagttgaaaatgaagttcagagagcagggagagtatccacttgatttcagctgctgcattagcgagagctcgaaagtcagattcagtagaagatcgggcaaccacttgttgctttttagctgaccatgaaatgagatttggaccaagaaaggctgcatatccacctgttgaccgtctatcatcaaggcaagatgcccaatctgcatcagaatagacttgtaaagaaagccgaggggcaggcttgattaataagccttcatgtaaagtgcctttcaaatatcgtagaagccgcttgcaggcatcccagcgaacactcgtaggagcatgaataaactgggataatttgttgataatgtatgcaacatccggtcgagtaagtgtgagatattgtaatgcacctaaagtactcctgtataatgttttatcatcaaatggggtcccttcatgtagagaaagcttgtgagcagtactggtgggattggaacatggtttagctccctcaagatgaactttcataagtaaatctgttatatatttgctttgagataagtagagaccttctgttgttctatgaacttcaactccaaggaaatagtgaatgaggtcgaggtctttgagctcgaaagagtgattgagatctgtaataagtttgtgaatcagagtgttgttggggcctgtaactagaatgtcatcgacatagaccataaggataatcaaattcgaaccagagccaaaaacaaagagtgaagaatcagcctttgaggcagtgaaaccccagtcaagtaaagtggtttttagtttgtcattccaagctcgtggaacttgttttaaaccataaatggctttatataggtgacaaacatggtctggttttgtagggtcttcaaagcctttcgtttgcaccatatcaacaatttcttgaagaacaccattcaagaaagcatttgtgacatccagctgctttatgtcccagttaaaagtgacaaccaaggttaacaccattcgaactgagacaagttttatgacaggactaaatgtctcagcataatctatgccaggagcttggagaaaactttttgctacaagcctcgattttaatcgatcaatgcttccatctgagttgagtttaatccgatgtacccatttattgtcaattagatgcatgtgagactgataaggcaccaatgtccatgttccatttgttttgagggctttaaattctttgttcattgcaacattccagccaggatcattaagagcaaccttgacagatgtaggttctcttggaaggagagattcaggtagtttgtgctttgtggctatataggcctttggtttgtagataccaagttgagatctagtaaccatgggatgtgtcctgtgaacagcagcaggatgagtaactggtgctgaaacaacagtagcagcatcattctcagagacaatagcagtaacagattgatttgctgcaatatgaggactgctatcagtaggagcaatggactgagatgctgcaaagaggtttctgttgttggaatttgaggatgcaacaggagcttgagcagaagtagcaggctcaggtataacagatggataggcattagtatgagcaaaagttgaatcaaaatgagtagaaaattgtgctgtaggaacaggagttgtagtttgagaatgtacctgagaagagccatgttgattgaaggcagggaagtgagactcattgaacacaacattccgagccacaaagattcgaccaacagaattttcacacaaatagccttcgtgtttaggtgaatacccaagaaaaatacattcctcagatcggtagtccatcttatggtgagtgtagggcctcaaatgagggaaacaagcacaaccaaaggttctttgaatcttgtaatcaggttgttgttggaacaagcattcataaggactgatgttgccaataattggagttggcattcgattgattgagtagacagcacattcaaaggcatgccaccaatagctcatgtcaaggccagaatgtgcaagtaaggtcaaaccagcttctgtcacatgcctatgtttcctctccacgcgtccattttgctcatgagtgtgaggacaagatagttgaaaatttattccttgatctgccaagaatctctcaaatgatctatattcacctcattcatcagcttgtactcccttaataggaagattaaattgtttctcaaccaaagtcttaatctgataaaaacttcaaaagcttttgatttcaatgttaagggaaaatccaagagaaccgactgaaatcatcaagaaatagaatataatacttgtaattgtctttcgacacaacatgagaaggcccccataaatcagtgtgaatgagttcaagaggttgagaagctcttttagaggagagggagaagggcaatttatgacttttgccaagttgacaagaattacaaaactttaagtgtttaaggctgtgtggtatattggctgttgacaaaatttgctcaaggtggcaggtgctggatgacctagtttagagtgccatagattgatatctgtgtgcatagatgtatttaagacagtaggagatgaacatgaaaaatcatttttattaatagagtcatgagtacaatcggaaactgcaggagcagtagaattacaacatgcattacatggtggttgagaattacagattgtgttacaacaggtattgaagacagaagtagcaagattgcattgaagggaatggctggacaagtttgagtgatcatctcctaacaggtacaagtcattcttgagtattcctttgaggaggacagcacccgtttgtttgtccttgacaaaacaacaagatttgtgaaactcaagaaagacattgttatctttagttagtttagaaacactaactaaatttttagtaatagatggaacatgcaacacagattgaagatgtaaaggtttggaatttaaagaagagagagtagttttaccaacatgagagataaccaatttcttaccatctccaacagcaatagattcatggccagtatagggagttgctgaatcaagattatccatgttgaagcaacatgatttgttgccccagtgtccacataccaaccggaatcatcaccaaaatcagggagagtttgggtaacatgagcttgaggagcaaagctgacattgtgttctgtcagattgatctgtggttgagaggagggctgcttcggagttacccagtttttatcaaatctgtaatgacagattgatgcagtatggccatacttcatgcacaattggcaaagtggtctgttggtaggaggagttcgaccaaagttgcgagggggtaatcttgaggagatatcagtggtgttcattctgccagaagcacaaggatgtcgatagggaccatttcttgaaccaaaggtaaggttggcagccatttttgtagatatattaatcatggaactgtgtctttccagccgagtttcatgggacataaggagggcttgaacctcttcgagagtaagattatcacttcgagatgtgattccagacacaacgggatcaaactccggtcccaagccattgagcaaatgcagaataagatcaagatcagtaattgaatggtcagcaattgctaaagaatcacaaattgatttgatcttatctacatagtcagagatactaaggttacctttttgaagattagaaagttgtcctttgagctgtagtaaccttgctttggactgactggaaaatttttgctcaagggccatccaaacaccatgggaggagttgtaattggacacagttccaagaattgcttcggtcatcgaagatcgaagccaagaaagcaataaatgatctttcttgcgccattgatggtacataggattgtgatcaccattgaggagaagctgtggaggactgttatcggtgaagaggatatcatcaaggtcatgaccaatgac

SEQ ID NO: 221808 - DNA, 5343 bp, Cannabis indica
gaggctttggatttttaaaagctcgtgtgttttatactaagcttttcaattttggcgttcccaggtgttgaccatccgagaagttttcatttcaccaactgaatgccaatctctctggcctggtacctttgcttttgtggaatggctagttgaacatcggtcatggatagaaggacggcgttgcttggaacttggcaggtatgtttatctcaagggaatgcatgcttcacattgacaatatttagatggcactataatcaatatttactttcaggacatgcttactaatctataatgagaagaatagtaaagggaaaagatttgaaggaatgggaaggaattgaaatttagtcatttcttatcaatttaactaatagtttatggcattctcccaattttgtgtatcaaataggtaagtagacaattgattgatcaggaaggagacacatttctccattgcttactccccctgctgtccactactcatcagtaaacattgccttagtgttccggtttacgggttttggttataactagccttgtctgttatctagattactttatctcctaacactatgccaaatagtttagagagaccttcattctttaatttttttttttttttttttaattttttggtagagaccttcattctcaaatatgataggaattcactaaagggtaggaaattgatacattgttatctatagaagggtttattggtatttgtaattagtggacgagccggactaagggtatggttagttacatatgtagggcttatgagtgatttagggaccatggatttagttatttgtattgagctactgttcactgggagagaaccaagctttcaaaacttggtgtttgggtctgtaacgtttttctctttaatagaaagctgcttgttttggcgtgttacatcgctggtttgtattagaataagagtatgataagcctaagacttattttgtgtatcacaaaatgattaaataaaatacttagtctcttatatacataggttgaattgtcttagtattttaattctattggtccaatcgtaaccctaggtggcctaagtctttttgctatgtttataaatagagagggagcaacctcatttagattagcttggaattagaaaagagtaaactctttgtggagagaccaatcctctcgaaagattgggaatttagagagacgagcttctcgaaagctcaatattgtaacttcgtgattgtttttcagaataaagatcatttgagaaattcattaccggtatttattttgggaaatagcagatagaatatttctactctaggattattctatcaaattggtgcggtgagttgcagacatggaacctcaaaaatagtcatggttttggaagaagatcgtgaagctttggaagttgacacctttggaattaaggaatctcttcatgagtcaatacaagagatagtacaacaacttcatcaacagatgcaagaatctctccaagaaatgttacatcaacaattcaagattttcttaaaaattcaagaaaaatcaagaactgcccaagaacccaaaaaagatgttaatggagttgctggcaacaaggaaaaggaggaaaacaagggcccagcgagccccatggcaccccaacacagtgccgcaatgctggaacaacaatcagggactacgagcatcactcctatggcaagtttctgtctgaattggagcttaaagtgggaatattttgataggagccagcaagacttgtaattcgacatgaaaattggctcaagaagttgaagatgccgagttttgatggagagaatccaaagagatggatattacataaaaagatttttctgttgtcatggatatgacaatgacgagaagattgaggctgctgtcatttcattttcaggggatgctctactatggtatgaatatgaaattaaaacacgagacataaagttgggaagagatgaaaaaattggtattgaagcatttcaaaagcacacaaatgggtccctttatgaccaatttttggcagtcaagcaagagggtttcgtctcgtggctgaaaattataaaaattctatcctgctcttagctccatttgacagcgtagggccagaagttcagttaggcacttttttttaatggattagtaccataaataacgcctgaattaagggtacaatgtccaagaaatgtgggtggagcgatggaaattgccctagaacagtcaagaatcgttcaagaattgggagaagaagtggtaaacacatccaacgcccaagatatggagggaaaaaggagcccgggagcgtctattaaggcaagagccagtaacattcactcaggacacaaccatggtgttaccaaagtgccacctacatgggaatttcatgaaattcagtttttcaacgaaagatcttttgaaagaggagaatcaggaactcgttccagacacgagaagtaattaagagaactaaaaatgccaacatttgacgaggaaaattttaatggcacggataatactgtctgtgacgaatagaacattgttctaactgagtagatggtgctgtcgctgatgaaaatcgagctggttggagcagtttgcaaggatggacaacaactaatcaatagagaagagacctcaaaggcattttcgaaggagtcgatttaagaaaaagcacttgtttgttgcaagaaagacacatttattctctgccatagcagcacctacatgatggacagctgtcgcctgaagagaagaagacgccactagtcacgctacaacatctaataagatttccaagtttaattatcttcattgacgaagaaacttgtatgagtggggtgcagaattcattaggagtcttctacaatcatgggatttttgatagagggaaaaccaatagaaaaggaaagtacgaaccgatcaccaagttcaccgacagaacatgaagtgttgatcaagtggcactttctctcagattttaaagcaacagaggaatatatctctactattaaagaacaatttccaagttttcaccttgaggacaaggtgaaggttcttgggattgataagcctaagacttattttgtgtatcacaaaatgattaaatgtaatacttagtctcttatgtacataggctgaattgtcttagtgttttaattctattggtccaatcgtaaccctaggtggcctaagtctttttaagaccaatgctatgtttataaatagagagggagcaacctcatttagattagcttggaattagataagagtagactctttgtggagagaccaatcctctcgaaatattgggaatttggaaagaccgagcctcttgaaagcttgatattataacttcatgactgtttttcaaaataaaagatcatttgagaaattcattactggggtttattttgagaaatagctgatagaatatttctactttaggattattctatcagagtattttgttatgtgcaattctttgatttgtaactgtctgtgccatccagtatccacatttataaactgaattgtatgagttaacctttctgtaccatgtcattgtttttctgtcaagcttgattcgtttacaagatttatattttgctgggtactaaacctaccatttgtgatttaagtttaacaggggatattgatttatgtattcattgtagtggcactggtgctttggcaatttttcttcgaaaattgcttcatcttgaaatcacaacttcagattatgctgatcaggaaattgaagacaatatagctcataactgcaaggaaaatgggataatacctgctcttcctcatgttaaacgtgagcttttttttccttttcaatttcttttttatgttccctgcctaattgtttgattttgcggttacctatattattgtcttcaatttcatgggtgtacaagctgtgtacttcggctgttttcggattattcggtttggtttcatttattcacatggttggtcgcaaactctctttgcgcatattaatgatgtcaaggatcatattactatagagtaccattaccttatatgatcatattagagatccatggtgtattattaccttgtggttttgcttctagattggcatttggtgaaacatattttgcataatcattaaaagggatgctgttttcacttatttgggtcattcctattatacaatatattttaggttatgatatctaaggacggtacttgcaaattgaactcttatatttctctctttaaattagtaatgcatggagaaatttattacttccagagcatgacagttgcctaagtttgtagatacatggggtgacagttttccaattgctgagccggtgtgggacctcatcatcgctagcgatatcttattgtgtaagtttctactctgccagcttctatcagttgattgattttgcagactcaataatctgaggctaataaactattaaatttgagtgatctgattttacttctctttctattgctggcttgttttagatgtaaaacagtatccaaacttgataaaaacactctcctttctcctcaactcgtacaaatccaaagacaatggagtagttcatcaaacaaagaaagaggagaatggttgttatatgcttgcaaatcttacaacttcttagtttgcataaatttcacaactaaacttaaccctttgatgtttcttattatgcctcttaggaatgtgcataggattgcctaagccggcatttctaatgagttggaggcgcagaattggaaaggaagacgagtcactcttcttcagtggctgcaaggatgctggtcttgatgtgaagcatatcggatcacgagtctattgtatcaaggttagagaaacaactacaattaacatctaaatagtagagtttcttcacattttggattaggagaggacttgaagaagtgagttaagcttttaagtataatctaagcaagcatgtgttgcaatctctttcctgttgagtgtcaaagactcaaagctgctttacaggtttatgtaagttttgtaatatcatccaatcaatagctaagaaaatgtcttgcccttttttattttgattttgaactaatcaataaatttcaatttcgattctgaaacattggttgagcatttcttgaacaacaaatggagttgtactttaccaatccaatgttgtaatttctttttatatacacagtaattgagctcaactgttggagatgctctaagggtgagtatattctatcatattttttcttaagatattgcggaacgtagtaatgatatgtgtacttaaatattataaatgataacgtggt

SEQ ID NO: 221809 - DNA, 2017 bp, Cannabis indica
aaaaaaaaaaggaaaaatagcatacatttaaatcaaagacgacacactaataacttgtttcctttttcttcttttctttcaaaaagggacaatagaaaactcgatcggtttgttattaataagtatacaatataaattattatgtttttaaatggatgagtacaatttaaacttggtaatgtagtgatttcattaatgtaattaaaatattataaatacaaaagatgggttcggtaaggtaggtgtccgttagacagttgagatatgggataggcaaggcaggtactttactaataaataattaatttattaatatcatccacctcgagagaagttattattaactgtaatgggtatgtaatcaaacttaatttatttcatccttaacaaaaaaaaaaaaacttaatttatttcatcctaaaaaaatcatttattttcattagtttatttaatttagagcatcttcaattaaagttgttcaacaaaatttaaaaaccaccccacttgaataaaccgtccaaaccaaactaaataaatcatcaaaaaacacaactacaaataacctaacgaaaaatttaaattgcgcaaaccaaatgaataaaacgacaaaaaatataactcgaataacctaataaaaaaccaagcagtcccatgaatatgttgggcaagttgaatattattcctaaacccgcccaaataaactctatttgtataattttactaaaattatttatagtataatatatataaattacatttaataataattgaactattttatatttaaaatttgtattttatagtgtttaaattgaattccaactttatagttggtaattttgattatatttgaatattgaagctgaaatttagaatttatacatgaatatatcttttttcttctaaaagtgtggtgtttgtgcatattttagcctatattcataaaaataaactttaatgatagtgtataaagtggtctaaatttaaaaaattataaaaattatgtaaaacttgacaaaaaaaaatataatattcaccaaattttaacactataataaatattacttttttatttactttttaatcatttattgatataattaataactatttatgtattattttgtttgacttaataactatttatatttctttatataattaataatatttttatataatttcaataaaatacaatgcttctattgatatttttacacatttttatattgttatagtgtaaatttttcacttagaaattcgagatcaggctcttgtaagaatgacatgtcgactcacatccctcgaagattgttgagctgtcagaagaggacctctcgagaataaacatcgcctaaaccaaactcagcgagataatgtgatcttgacagagtctagtcacattattacgcctcccataacgtaggaccaaggagaaaatgttcaagtctcgcatataccaagatgtatgcgatgtctatgaagacttctcctgcgacttagtaaaaatcgtttccttacatagcgagtaagtccaaaagacttaatatgctcaatgattcgataaggactcgcacgtcttagatcattgacacttacaaggtatccacatatgcgactcgattaggacgcagatacctaagtacgaaactcattagtctcgttttaacaagaacgcaccctaagcctgcgagcttgtgcgagcatatgcacagacaactttcactatgaaagtcacatacgttgttgtatttagtaaaatggatttaaattgtttttcatttattccatttacgtttttttaattaatgctaatactcaatgtaaaatagtttaataatcaatcagtgtaaccaaaagatacttgctttgtatataaagcagtgatccaacatgaataagacaagacagaaatccttgtaacagtggactaagcagaccgtgatctgacttaaccactatattttcttgtgttcgttacttttccatttgtttgtgtagcttcatttgaatactc

SEQ ID NO: 221810 - DNA, 1888 bp, Cannabis indica
acataaaataatttctgatctttattaattagtaaatctaattatattgaaattgattttatacaaaaccaacaaggatattgtgcagtaaaaaggttgggtgtgtggacttttggtcgcttcaagatttcaatttgaccatgttagtaaaacaaagaatggatatttattactaagccggactcgttggtttctcagattataaggctttctattattagaataataattttctcaatgctaaacttgggagaaattcgtgttttatttggcggagtctttttgagactcaggatttgattcatcaagtggctaggagggaattggtgatagtgcaagtgcttatattttcaaaaatccttagatccctatgggtaataatctaagactttctattgtttaccctggcttggttaatgagaaggtgaggaatcattttgttgttggggaatgtacttgggatagtgatatattcaaagatcttttttcaaaaagagatgcatttgctattcttggttatcctttgtgtaattttgttttggaaaatagttggtttgtgtaattgaaagtggttattacattatgaagagctctttcaaaattttacaagaggagagggatagatgggtggtgttttggaagaagttttggaagttgcatttacttccaaaggcgaaaaattttgtgtggtggaccatcaatgggtgcatcccaatgagagtctagttgaagtcgaagcatgtggaggttcgttattgtgtccagtgggccacttggcaggtgagtctatcttgcattgtttggctacttgtcagtttgctcggaattgttggtgtgtgattggtttggcctttggtcccatggttgacggttcttttggggaatggatcagatttgtttttgctcgattggatgagggagagtttggtagggtgattatgttgtgttggacgctttggtatatgcataattgacttttgtggaaggggaagaagaatgtgatggaggttgttgttagtttagctcgggtcactcttgatcaatggaggaaagctcataataaaaatctttttccatgaatggatacttggtgtcttgcggatggtgctgagctgtggactacactagatgttgagaatttcaaggtgaataatgaagtatctatatttgaagaggaaggcaagtttggggtcggtggtggatggtattttgagattaatggagggtgttgtgcttcttgaggttgctgaagctatagctcaaatggaggtgttgtcgtggatgaaacaagatttactaatggtcagtagcatcaagactggttgtctggtattagtccaagattttgtagtcctaaggtgatgttatctacgtttggaggtgttgtggaagatagcaaatatcttttgaattctttagtaatgtttcgttaaattttataaaacgatccgctaatcgagttgctcatcgaattgcaagagcttctcatttaaatgctgattgtattttttggctttaatgtcgcgagtgatgtttccatcataattgagattgagttagtctaattgaatgaaaaaaattcagtttaaaaaaatctaaaactaccacaatatgaaattaatagagttagtacaatatgaatataataataacaaaagggaaattttattctgagacatgaaaattaaggtggtctttgattggaggtaatgaatggaatggaaaggaaaggaaagtaaacaattttcattacattcttttatttggttgcatattaaagtattagaatgtcattttgtcattctaatggaatgacctttctattattttagtaaaaaatgactatttcattttaaaattgaattaaaaaccattccaatgcatgatg

SEQ ID NO: 221811 - DNA, 3069 bp, Cannabis indica
tttttttattacattttttgtaataaaattattttgattttacactaaatgaaaaaacccttattttaatttactacatgtattcgaaattttttttaccaaatagaatacttcaccacatatttttagaaataaaagttaaaaaaaaaaaattgtaattaccactcatctatatttattgttaattatgatttttttttcttttaaacattaacatgtatcaaattatttcccttgaacttttcaaaccgttaaaaattctcgtaaactattgagattattagatttaaggacttttgtctaattttactaataaaagtctgacatggataaaaattcaggagacacaatttagtacatgtcaaagttcagataatacgatttagtaaaaaatttgagagtaaaatttagtacataaacaatcattacgttagtaaaattgaataaaaatttttaaatccaacaatctcaataatttaataaatttttaacgactaaaaaaattcaaaaaaaatataattttgagatgaagaaacaaacatcctaattctttattatttgagaagactctcttgaatcatgctgcaacactcaacattactattattatttatttatgtgagcatgccataatcgttgggtttcttcattataaaagataagataagataaggtatacatattccagagattatttgtattcaaaacttaaaaactaaacctaaagcaaaaatcttataatctctttcccacaaaacattgaaagaaatagtaatggagactattgcagcttggaaattgaatgattcatcaacatcatcacttgtggttgtaatggttccattcttagctcaaagccatttgaaccaactccttcaatttgccaatgtcgtttcctcatacgacattccagtccactacattagctcaactcttcacatctctcaagtcaagtctcgagcctcaaacccaattcaccaacttaccaaaatccatttccatgattacccacttcaattttcatcatcatcattatcattatcggatgatgacgagtcctgctttacagccaagttcatcgaaaattggtttcctttattcgaagcctcaccacaccttcgccaaccggtttttgatcttctccaatcactgtctcaatccacaaaacgacttgtcgttgttcatgatgttatgatggcttcggtggttcaagatgtcgttcgtatcccaaacggagaagcctactcattcaattgcatctctgtttttgctaacttcgtatatgggtctctctcctttggacgaaacgacgtcgtcccaataaagaatatacctcctttggaatcatgttttcctgctgtgatgaaggattttttggagaaagagatgaaggtggtgagatatcaaaatggagagattttcaatagttgtaaagctattgaaggaacttttctacaaagtcttgtaaatgacattggtgtggtaaacaacaaggtttgggctgttgggcctttacaccaaatcacaataatgactaataataaggacaagtggttattggaatggttggacaaacaagagccaaatagtgtgttgtatatttcttttggaaccacacctgtttttttaaatgaagaaattaaggagattgcaattgggttagagctaagtggggttaagtttatatgggcattgagagaaggagataaatttgatgttttaggtagtaatgaagaaggtgaaggaccccaagttccagatgggtttgaggaaagaatgaagggaatgggaattgtggtgagggaatgggtgtcccaagtggagattttgaggcacaaatcaataggtgggtttatgagtcattgtggatggaattcttctatggagagtataagtatgggggtgcctttagcaacttggccattgcattcagatcaacctattaatgctctgtttattacacaagtgttgaaagtgggtgtggctgttatggaatgggagcagagagatgaggttgtgagttcatccatgattagcagagctgttaggacattaatggcttcaaatgaaggtggtgagatgagaaagagggctgagaaattgggtggtgaagttagaaagtctactgaagaaggaggtgtcactcgtatggaatgggattctttcattgctcatatcactagatagattcaaagagagcacagggatcacttggcacttcttattttcttattaggcattctctcaattttaaggaaattatgaataatttaagatgccaaaaatatgattcagataagtttctgtaacacatcttgagttaaattaagctaaatgaaatgtatccagtaaaaaatgataattgaaattcttgtgattttttttaagcatgaatgattaatttgtaactcgggtgaagtttgatttgaggtaatgaaatggaataaaaataaacaatttgtattaaaattcttttatttagttgcaatttaaagtattgaaaaaaattattcgaaatcatcattctagtgaaataactattttatattaaaataataaaaaaaagaactattatagagcatagtgaatgaaatgaaaaaatttaataattttttaatcatttttatatgcttttaaatttaattttatcacattctcattcttattcctatcatacttttattcatacaagaaaataaaataaattatttatttattttgaaatagtttatataataagttttttttttttaaaaaaaaaaccatacagaagtttgctagagctctcttacatcatctcactttcaatttcatacatattatatataaatatataaatattattagtaaaaattgttattaaatataaaccactttagagaagaaaacacagaacaataccaacttcatagaataacaaacataacttactcaaccaaccacttctaactctgctacgagtgtcttcaactatctggtaatatgtccaatgaaagaatcccactccaaacgcaatcaccacctcctcaacagattgtttcacaccttcactcatttccacaaccctct

SEQ ID NO: 221812 - DNA, 2109 bp, Cannabis indica
catcttagtaataatttccaataaatatttagaaaattattcaatttaagttgtttcaaaattaatttaaattgagactaattaaaaatctctcaaggtccagttctcgtggaaacccttcaggagtgaagaaatatcacaggaaggtccggttctcgtccttcgctcgtccgccggcatcgccgatcaacgacaacctccttctgcaagtcttgtcttctgtgacatggtgtgattgattccgggttgtgttttgatgtttttatcagttgagtctcttcttgtttgagtcttggttcggttgagtctggtttctctgggttgtcttcttgttttcagtttgcttggtttgtttggttcgtttgggttcggtcgtttttctgggttgagtctcttctttttgaggcttggttcgtctaggttgtggctggtgagtgcttgtcgtccaggaatacactggaacgggtgggttgtgacttgtgagagagtttattaccattgttaatgcgctgcttggcttacagaggactgatcttactttttggttgtttttggtttgcttggtttgcttggtgggacatagccatatatctctttcatagtgtttggaataataataagaataataaaggaaagtttggtgtttgtttgttggagtcaaagcccacgagtcagaaagaggaaagaggaaagaggaaagaggaaaaaggaaaaaggaaaaaaagaaaaaggtaaaagtttcctcatttattagatatacttattaggaagtttttatttgtttgttggtaagaaagagggaaaagtaatgaaagagaaaaaggataagttttctcatttattatatttatttattaggagaaagtttattaggtgattttttttgtgtgtgtgatttgtgtgttctgcgttccggttggttgttgattatggcttcgtcgagtgtggctatgcgtgatcttgaggaaggatgtgcaaatatcagtattgagggtgaagacgatggtgctttgggtgtcgacttccttgtgccggatgatcaagctgaccatgatcatctctgtattgttggtcggtttcttactgctcggccgattgtttttgaagccatgagacatgttatggcgtctttgtggcagcccggaaaaggagtctacgtcaaagatattgattctaatcggtatctatttcagttttatcacgagattgatttggaaagggtcgttgagggtagtccgtggaccttcaatcgtcaacaactcgtctttcgaaggttacaaaggggtgaagatcctaagaaggtggtcatcaatacccttgatatgtgggttcagatacatggcttacaaaccggtttcaaatcggcctctgttgtggaacgtttgggaggttttgtcgggacgtttattaagtcggatccaaagaattttcagcatgtttggcgtgaatacatgcgtgtgcgagtttccattgacattactgtaccattaaaacgaatgatccaggtttttgggcagaatttaaatatgagtatgttcctacttttgttttatttgtggtgttattggacattctgaaaggttctgctccaagctgtttgaaatgccgattgaagaaattgtaaaaccttatggaagtttcatgagggctcaaccccggaggaggtacaatttggttggatcgcagtggttgcgtgatggtgaagaatcggatgtggcgtttgctggtcgcagtaacagttcgacggtggcagtgggggggtggtcttcggctaggccgattactgtggttgttggtgaggatcgagggataaggcgtatggctaggagggagtccccagttaaggtctcagctcctataaataaggagcaaactatgggggtcggtagggtgggttgtgctttaaataatgctcaattaaatatgttggatgaggtggaagatggggttgatagtttaattgtgctggataccaaacgacgccgtatgctggaagcaaatgtatgccgcacccaattggatgggtctaatgtgggctgagcccaagtggataggtccaatgtggtggatgttgatagtgggatggagatgttggaaatttattttacc

SEQ ID NO: 221813 - DNA, 4627 bp, Cannabis indica
gtaaatttatctttaagtagtcagcgtagggggagtctaataaagataaaaacttacaaaatacttatctttaaagatctttactttgttaaaatgctcaatgtaagaccatccatatgggggatgaagtctagcatctcgaggttccattgaaatattaaccatgtaagtctagttgagagtttgcatcgacttcaccaacctgaacaaagaatgtccaaaagactgctttctgctaccaagaatcgaccagctcgtagatgccatgggtggccatgaagtcctgagttcatggacgcatatttaggttacaattagatcaagatgcatccactagattaggagcacactagcttcatgacgaacctaggccttcaatactacaaagtcatgccattcaggctgaaaaatgcaatggtcgcctatcaaaggctgatgaacatgatgttcacagatcttattggatgcaacatgaaggttcatgtggatgacatgcttgtcaagtccaaaaaggttgggggtcatgtggaggacctaagcaagtgcttcaaaatccttcacaactacaacatgaagctcaacccccttaaatgctctattggcctaggctcaggaaaattccttggcttcatagttaacgccagaggaatagaagaaaatctagacaagatcaaagctcttgtggacatgaagtcacccacaactgtcgaggaagtataaagcccaacaggacgcattgctgcaatgagcagattggtgtccaagtctataaataattgcatacctttcttcaacattctaagatgcaacaaaaattcaagtagatagaggaatgctaaaacacattctaggagctgaagaaacaattggcccaaccactagtgttgtctaagcacctatacatgaagagctaggcgtgtatcttgcattcataaagcatgttgtgagtgttatcctcacaagagaagaagacagtgtacaacaccctgtaaactacattagataaaggctaattgatgcagatagtagatacccactcatggagaagctaacctacaacttgctcttggcttgcagaaagctgagaccctacttccaggcacaccccataaaggtgtacatcgatcaaccattgcggcaagttttgcagaaacttgaagcttcattctgactcctcaaatgggccattgagcttggctagttcaagatcacatatcaaccaagaacaaccataaagggttaagcccttgcagacttcgtggctgagtacgccaactcaactcttgagatccctcaagactcaagagaaaatcaagggccagaaaagaagcgagagcaagagcaacaacatgaccctgaagaactaacatggaaactccatgttgacgaaagctacactgaagaatttttcggtgcatgcattgaccttacaacacctgggggtagcagctgcacaaagaaatcaaattcagctttaaagcctcaaccaatgaggttgagtacgaaaccttgatagttggcctcaagctagcacatgaagtattagataaccacttggacatattaaacgattcacaactagttgtgaatcaagtcttgggtgaatacttagctcgaggtgaagaaatggtggcctacttgagaaaaattaaagacttgataagtaagctcaaaggctacacgatcaagcaaatccccagagaacagaatgccacagtagatgcacttgcatgtctggcaagcagcaccaatgctaacaaagtaaactttgtgcccatacagttcctagaggaacctagcattgttgtccaagaagtcgacatgttggatgacactccaacatggatgacacctatcgtagcttacatccaaattagagccttaccagaagacaaaaatgaagcaagcaaaatgagaagaaaagttgctaggtacctgatcctagacgggataatgtaaagatagagcttctccatgcctctcttgaggtgtgtcaccaaagccaaagttgaaagggtgatgatagaagtgtgtgaaggattttgcagcaaccatgccgggggcaaaacttatccaaaaagatactctgacacgagtacttttcgccaacaatgattgaagactcgatggactatgtcgaaaaatatgacaagtgccagagattttcaaggataccaagagctccacccaatcagctcagatgatgtaatctgcttggccctttgcagtgtgggggatagacctaattggttagctcccaaagggaaaaggaggggtacagtttgttgtcatcgtagtagaatacttcaccaaatggatagaatctaaacccctagcgataatcacctccaagaaggtccttgactttatggtcaagaacatcatatgctggttcaaccttacctaaaagattgtgtcaaacaacaataagaaattcaacagcgagatgttccctggtttttgcaatagacatggcatcatcaaaagcttctctgtcgtggcccatcctcaagccaatggacaggtagaagatgtcaacaaaatcattaaggaaaccctaaagaaatgccttgaggaagcaaaaggcaactggcctaagttgcacccagaggtgctatggttgcataagactaccgagaagacaaccactgggcaaactccattcgctctagcttattgctatgaggcgatttttcctatagagctaaggccaccgtctcataggagaacaacctatgaccaacaaataaacaacaccctggtggcagattctcttgacaaagtattagaaataagagaacaagccaacctaaagctgcaggcctaccaacaaaaggtagcaaggcacttcaacaaatacgtcaagagaagaaaattcttcataggagaaatggtgctccaaagagttttcctgaacattaaagactcagcaacaggagtgtttggtcctaactaggaaggcccttataaagttacagagatagctagtaaggaagccttcaagcttggaagatacaatgagaacatggagctcgttctcctaccaaagtattggaatggagagcaccttcaaaaatactatcagtaaccagcttacaaaattctacttcatagtagcgattctacctactcaacattagtgtacaaaaagcgctagcacccacgaccctttttgggcgtggtctcccattattcatcaactgtggcctctactttactatgtgagcaggggtagccacttgaaatctagaagctaaatttgtttaatataggcttgtagattcaatttatgtaagttgcatagtaaattagaccaattaatgaatattaacaataattatattccgtgtattgtgcatttgaaccatggtagcctcgcaagacagatccaggtaaagtctatgaaattggtgaatagaaagtgaccaagagacttgtttctcacaaattgattttttaaaagtttttcttttagttccacatgtgtaccacggtaggctcgcaagacagaacccaggtaaagtctatgaaattggtgaatagaaagtgaccaagagacttgtctgcatgatcacttggggggcacatttgagatgagggatatttttaggctttaatggccttttgtacagtggtcccatgggtacaagatgtcactttcctactacatgctgcaggtgctagaggttgcctagcaccccgtacccttgtctaatgtcagatcatccctagttgcacgttacaagaggatggtcctgggttcatgcgcgtggtcactagctataggttgcaggaggatggtccccgggttcatgtgtgtggtccccagctacatgcggggtggtccccaggtatagggtgtaagagagtggttgcagcgtacccttggtcgagtcttcaggccttgcagtccaattttcaccgctacttgtacctccttgttctcagtcttcagtaggtgtagtggtatgctcatcccttgcacaccttgtcctttcattcctttccaatgtcgttgtgcaatcgctctctcccttatgctcgtggatctttccctaaacacactccaccatgcacatcatggctcacatgtgagccccccacctccttccactgtgttaagccccttgtctacaccccttatggctcgcgtgcaggcccccatcttctcgtaccatgccaacaatcattaccttgaagaaatatcattgttaagaaggaaatgattgtgagtcatgtaagggtatatttgcttttggagagagcaaaaattgccttcttaacaatgatatttcttcaagtgtgttgcattatttccatgcccttagtgtagaaggataatactgccagctatattcgttagagttgttttgtatattcctcttttctctatcttttattgttattagtttgttaataacttagtcactattttccttgattgtagtatatatcagtattcccttgcttgtagtatatattagtattctttcttgtaaatgtacatgcctatataaaggctctttatgaattaataattatcaattgcttccaacattcacatggtatcagtgccctttgatctttaattttttcccccttcgtgtttccattcatcactatggcc

SEQ ID NO: 221814 - DNA, 4013 bp, Cannabis indica
tttttattatataaatataatactcaataatacattaaattaaaaataaaaacccgcaaaaacagagaaatttagcttgaagcagagcagggacaaagcagagttctcttttttattttattttttttccttgattttattttatttttcttttttggggaggttatactccaatctcagacccaaaattattgatcttttttttttttaaactaaagattacatctttagcaaaatcaaaatcaaaatctcgttcatggtggcgaatctcgagctgggtttattaattttcaacccaacttcttcaagcatgtaaattcggtctcaatctcatctgggtgttctttaaaagtgaagctttatttatttttgggtatgaatctgagtaacgtgaagggatcgatgtcgacttcaacttccggtgccggagtttccgaccagtttcccgtgggtttaagagttttggttgtagatgacgatcctacttgtcttatgatcttggagaagatgcttcgaacatgtctttatgaaggtctttatttttttttagtagtttataattctcttctgggtttgtgtttgggtaaagtcttcttttttttttaaattttttattcacttattgttctaacagctcaaactttttttgtatgtaaaattttagactttttgtgagtgttgcaattttttagttacagtgcttgttcatgggaatttgaatcttggtgagaaaaaacccctagaaaagagaatgaatttgactctcttaagattaggttatactcaagctaagatttaaatcatggttttgttgaactggttctaaatgggtcaaaaaatttgtgttgatttttgtctctttgaagcttaaataaaacaaataaagtttaagcctttcatttttatgtctctctgtagatttagaatcctctggccctcttttgttttcttctgaatctttcttatgactgaaatagatttactcaaattgtttcggaatttcgcagttacaaaatgcaatcgagcagaacatgccttgaatttgctaagagagaataaaaatgggtatgatgttgttataagtgatgttcacatgccagacatggatggattcaaacttctggagcgtattggtttggagatggacttacctgtaatcagtaagtactgtttttctttctattatagtttttgtctaagatttaacaaaccctcctattaagaagccaaatactagtttgtatatctatatttgtatgtagtaaatcttgatatatataatgtctgtaatttgttcagtgatgtctgcggatgatgggaaagatgttgtgatgaagggtgtgactcatggtgcttgtgattacttgatcaagcccgttcgcattgaggctttaaagaacatttggcaacatgttgttaggaagaagaagaatgaatggagaggggaaatagaacagtctggcagcgtcgaagaaggagatcggctagctaaaccatctgaagaacccgattactcgtcctcagccaatgaagggaactggagatcttctaagaagaggaaagatgatgaggaagatggtgatgacagggatgattcctcaacgctaaagaaaccgcgggtggtttggtctgttgagctccatcaacaatttgtgggtgctgttaatcaattaggcattgatagtaagtattttccttcatgtcttactttctttctcttctttactttcaatgatctggtttgagattatggtgtttatttcatttcaagtttggtctaggaatctagaaaattggatttaaatgtacaaacattcataatgtggaagccattgttatgattccccccaatgcagtatatctctttctgcttttttgtccacattcttcgaagcaaaatatgttgggagaaattagagtctaatatttgctcaagcattgcattgaaattgtgaaattctctatcatgttactcatacttaacatgttaatgcagaggctgttccaaaaaaaattctagagctcatgaatgttcctgggctcactagagaaaatgtcgctagccatcttcaggtattagacgattgtgttcggttttaagataaaaatttagcaattatcttatgttgtctggttgctttcttaaattattgttgtggtagtgtatttaatattttctctgatctgtgacaaactcaaatttgtggaacagaaatatcgattgtaccttagaagactcagtgggcagcaccaaacaaatatgaataactctttcatgagtccccaagatccaacttttgggccaatgacatcattaaatggtatggatcttcaaactctagctgtgacgggtcaacttcctgcacaaagccttgccacacttcaagcagccggacttggtcggtcaacaccaaaatctggcatacctttgcccattgtcgaccaacggaacctgtttagcttcgaaaatccgaaattgaggtttggagaggggcagcaacaacatttaagcaatggtaaaccattgaacttgcttcatggaattcctacaaatatggagccaaaacaacttaccaacttgcaccaatcggcccaatctcttgggatgaatatgcaagtcaatccccacggatcccaaaatagccctctacttatgcagatggctcaatcccagtctagaggaccaattctaaatgaatcttccagcagtcatgcttccaggcttccatcatctgtatcgcagcctatggtaacaagtggggttctggggagaaatggaatatccgataatggcaggggagcaggatacaatcctgttatgcaaaactcttcaatgttgaatttccccatgaaccactcctccgaattgccaggcaacagtttccctcttggaaatccaccaagcatatccggtcttgcatctaaaggggcattccaagaagatgttaactcggaaattaaaggatcttcaggttttatggcaagttacgatatatttaacgatttgaatcatcataaatctaatgattgggacatacagaatgtaggattgaccttcgatgcttcgcgacagtcaaacaatttaccaggtagctttgacatggttaatcaaggattttctcctggccaaagaaatctatcagttaggaatcattccaatgttggcaagaccatattctcaatgggagaaaatgatcatgggacctcacataacatcaatcagaaccttaatcctcatcacggtgaccactcggtgagggttaaatctgaaaggattcccgagataggcaacgacaccggcttctttcccgaacaatttggtcaagatgatttaatgagtgcactccttaaacaggtcagtttccattttttatatctttatgaacttatttagtatatcgatctagacactgattattatcgaaatgttctgttttcctaacagcaagaaggcattacaccagctgaaaatcagtttgattttgatgggtattccttggataacattcctgtgtagaatacacttggcattttctggtgtatatagttgctgtgacagattgaaacttatccttcttctgcaaccatagggtggattttaaagtttgtctaattcaagaaacttggacttcttgatttttcatttagccacatatcttttctatgtgaatataccatgcttttttctgctctgctgcttaggacattgttaagatcaggcattttggtattatttccatatggatcaaccatgtgcttggattataaaaaattcactatattgcatgatatgaaaaaaaaaaaacaaagtgtcatgccaaattatgcaacaggtgtagtgcaaaattttgtgcggctttggcggtaaattttgaccggggtcgccactacatctcggctactgctgctgatgctgctactggcatagcttcttcttcccttagtttttgggtacatctccaattgtgggtagtaagtaggttttgttgatacatttgcagactattttagga

SEQ ID NO: 221815 - DNA, 3127 bp, Cannabis indica
ccccaaaccacaaaggaggcagctggaatccttaataggaaacctactattgatcactgaccttacagggagggctctggacaggaatttagatccaaaccgcctatgagaagacacagaggtctatggtcagagttagtcgtctgggaagagcaaagacagccctaggaaacaagttaagccaggtgccattaacaagacctttgtcaagagcatatttgacatggttcttaccagaacagtggttatcccacgtcatcctatccccctaaatgggcaaattaaaaaagccttgagaatcaaccagattagagatgaatgggataaactggtcccttcctgaggacccttcacgctcggactcacttagcacaaagttagtatcactcaaaatcaaccaagggccaccaaacttatccccagttttcatgaaatcggcccaaaagtttttcttggcatgaaaataaggagggccatacacacaagagagaagccaaggatgagaagggggtccgagtaaaccagacgagacatatggttacgggaactagcaatacactcaaaactaaagccatccttccaggtcaagataatgccaccagcagcaccaataggtggaacaataatattaaagtaaaagtgaagtgaattaagagtacgtaccagcggagtagcatcaacttttggttcggtgagaaagataaaatcaggagagcataacctgatcaggaacttcaactcccgaattgtagaggtttgccctaaccctctacagttctaagcaatgcctctcatggctcttgtggaggagatgagacattctcctccacaggggtacaagggtgaaccgagacactcgagtcaaaatcttcaatcaaaaaagtgccaaccatcggattcttcataatacctttaatgtgactcggtaaaaaggaaatatcatcagagagttcttcaaaggcaatcttagaagcattatcctgctccgtggagtctcacgggaaatcacgaacaacatcagggtgcattcggagcacttttggaggtcttgagcatagagaattagtagcttcatttaatttttgtttcttaaacggagtagttctttcgttaatcttagaagtaagccagacaccaatgtcaccccctaattgttgaatctcatacaaatccaagcgcccaaatttttttagatcttgcaacaaattctcttggccttgaaaaaaattagaaagggccttctcttcctcaatcctcgcatgagactcttgccctttaacatgaccaacagtagggcctttagccccataaaaaagagattgtccttgtttagtatgggctctaacactagatccattaacaattgcatctccatcttccaactccttaatcacatgatatgaatcctcatgcccaccagcctctttagaaataatattaggcccaacattagacgtaatcagttccatcttctccagagctaaagggttaggcccagaagaccctataaataaatttgtgtccttatggcccataccattacacgacacataatccacgcgagcactaaaagccaaaggcccaccaacatgtggcccattaccaacccacaccatcgacgacccaccttccacaaaaccacttttcacctgatgcattttctcattaccattaaggctattacaaatagcaataggcccactagagatgttgaccggcccaataacaccttgaactctttcaatatttaaatctaaaggtatatatatttgggcatctctctaaaataggcattaattcataatgcttttctttttccttattgtccgtagccaccatattatccaacgaaacaattgtcaattcacgatttgcaggtttgtgcttcggaatccaggcagcacgttgagaaccacgaccagctagctctcgagaggtcaccatctttcccctcctcgatttgcgagtttgcccaagtttcgaaatagggcggttcgaggtaccaccagccccacttctcgtcgccagaggcgagttaatcatggccacatgaggagcattggtggagcagtacaacctgagagcagagtgagctccagaaaaaacatcttgataggatgattcagtagatagccacggtccgtagagaggaaatagagtgccatcatagttcgcaaccgtgatcggcgaagacaaagaacatccacgcctttgtgacctaaacacctgcaattgtagcaaaaaattccatttttttcgaatttaaactattgccaacgtttgactcctgagctcaaatcaaagaagccccctgaaacaaggagcttaacaacttcaaactcaatctgcactcggaggtaaaagttccatgtcgctgatttatcctcctccaactcaacagccagaaccttacccgcaagtccacccaagggtaagccattagacaccgagaagtaatcgtgcgggaggttatggatttgcatccacaccttgcaacgatcaaaggaaacaaggccggctgtgcaaggagtccacgcctgaagaaagagagagtatccacgaatgcactagggtccattcacgagagcccaactacgatcattagcactttcgaacccaatttaaaacagttggtgtgtaagggaacatctgataaagctaccacatacaccactttgttccaactttttgccacaaactcagaaactgtggcaacatccacagtcataggggcaatcacccttctatataagcacaaagaaagtgttttaagagaagcatcacaaggggataaggtgacagaggcttcaatgcaagtaaagcacttgcctttaatagaggagttggtggcaataactgagtccataacaactgacaacaagagacaaaacaaacccaaacaatcccacaaacacagacacgacaatacaggagacaaggagaatcccaactaacaacacacacacacacaaaccagtaaacaaaaccagccataaacaaaacaacaaagacaccaaacaaacagttaagacaaggggaatcgaagattcacacacagagaacaagatggaagacacgaatcagggtagagaaacaaaacgagaatgaatgatagaaagaaaacaat

SEQ ID NO: 221816 - DNA, 1798 bp, Cannabis indica
gtttttcccagcactagacagaagccttactttccagcccagccttgaaccctctttaacaccttatcaatgatatgcttcgtgtcctctgttcgcttggtagatcggaagaggggaagtcccagataagttgcgcttctactcatctttttcatgccaaggaactgagcaatggtttgagcctttctactagctacccctcttgaaaagaccaccgaagacttcgaaaaattgattgattgtccggagcagctgcaatagtagttcaagcagtctaagaaagctcttgcctcgcgaattgaagcttccccgaatagaatgatatcatctgcaaacattagatgagtaatcgattctccatttcttgacaatttgaatcctttgaggagaccttgcttctccttatctatcagaagacgggatagagattcagcggccattatataaagtgcaggggacaaggggtcaccttgccttagacccctttccgggttgagagtccccactgtcgagccattcaagagaagcttaatttcagccactgagatgcacaggttgatccaatccgtaaaaggcctagtgaacccgatttggtgcagcacattgttgatgaagttccaatcaagtttgttattaatgtatatatgcacatatgtttattgagaaaaattgtcttagttccccttcaaaaactaaataaacaaaatagaataaaaaaacccgcacatttcgtagtggtcgcagtcgcagtcgcagtcgcacgcattgactttttttttgaaaacaagcgtaggttatattaaaatagataaaatctagacctcatggtcgttacataaaatgttttccggaatagaattgatcgggatcgatccgtaaacctggtgggtaaaagcccacttagcgacaaattgacttaatgttagtccatcaaaactttgccaaattgttatagtacataactggttaataagctatgtatagttatgtagactactactaattgattctctccggccaatcaagttgattttagagcaacctcctatttaattctaatatcttgaatattcgataacatttgtacataagttctttaatttctcaaacaattatctttttgttttttttttttaataatagagaagggaggatttagaattagacctctagtagaagtatatatggtattagaagcgtcaaacacaaaagaataacaaatatatataggtgacatagagggtgtaatatatacaaaagggaatatattaattgaatatagataatttataacaaatatgagaaaaattatttatccactcctcgcttgtaattttatttttagatttttaattaaaaagcatattcacttaatctttcaaataattaattgtaaaaaaattatattgtataaatcatgaaaagatagtacctacaaatatttttaaacaatattttatataaaaaaatattaaagtaattatttttttactgaattaaaaaaattagttttgtttgaatttaaagggaaacaatattcaggattttatcaaaaaaaaaaaaaggggggaaaacaatattctatttcatatttttgctttgaataatgaaattattattattattattttgaaatgaatgaaattattattcatatattagataaagttgaactagttaaattaaatcagttttgtaattaatcagcagttaattacgtggtgatctggtgtgctctatattcataatttttagtagcagtgtccgaaaagtactgtacaccaatgtataattaatt

SEQ ID NO: 221817 - DNA, 3543 bp, Cannabis indica
ttttttacgtggttcaggtgtatattaaccttagtccacgagccagtctattagcctttaaggatgtatttgatgtgtttacaatatatatgcaagaaaccctaactttatattctcagtttctattgaagaagaagcgaatgtaatattggcagagttttggctatgtaggttgtcatatcccttcgtatagaaatagaaaggtatatataggttgtgtggcgggtatggtcatgcccatgacctgtctacggtttcctgctcaaagcccattaataaggtaaattatatgcaaaagacagttgactattgggtccctatgaaataattttgcctgtgcgtgctgcagctggacaattagagaccatttgtgccatgtgggtacgtgtcacctaaagctttaacctttaaaagtaaaggccacgtctcgcccaaaactttcacctttaaaatagaggtctgcaatattcgtatatcaaaaacgtggtggaggtatgcgcactaccatgcttagacacaggggacaagatttgatcctgtaaaataaaatataattgtcactttgtaacctagcttgtatcaaaggtagacgttcgcgacactctacggcggtcgacatccgtattaggcccttcgagtacccgtctaggtattagctgggtaggattccatatttggacccttccaggtctaggggaggcaacacaccttctctgtctgggaagctaagacagggccaagcgggcttccatgtgtcttcccagtcttgacttattcttggctccatgaagcttctctgcgaaaatactgtagtgagggattttaaatagggaaattatgaggctaattccttcctttaatttccacgtgtcacatgctcagagacacgaataatatttaccccttgagctttcgggactctctgagatctgggagcttgtagtactcttccatttcttagagatatgttcttgacacgtggtgattgcaagatcgcggatgtgtcccgtgagctgtcattgagtaaggggtcattaactgcatgtaccattaatgtggcaagcatgcgacctctttaatgtagttattgatgaaataagcgtgctgggggcgcattccttaagagaagttgcaatgatggcaagacaatttaaatgacctctcttttaatgcgtacgttactcgaggcgtgtaatgaagaatgataaattcaagcggtgaaatttaaaggctgttttttcaacgtcccatccatcggattgaagtgtgcttttttggaagaagaaatcggggttgtccatctcaaatcgcaaggatcctacctgaggtataaatggatttacccaactcatttcttttttgtcatcacctcagactttcaaactatccatttttgaattttcaagccaaaactttctattttccaaaaaagattccagtttaatatccaaaaaagattccatctcttctctgtaaattttagtttaataatgtaatatcaaaattcacatatttctctattttgatgagtgagcttgggtttaaggagtaaactccaacctcatcgagatgacgacattttgaatctcgcatgatgagccacaaagctcgaagggctgcaacttcaagtcgtgagctcaaaaggacataacacatagtttttcaagtgtgcatgaagccatgcatggccatgcacacatgaaacaatggaggagaaactcgagagggttcaggtttggacaacaagcaccatgaggaccgattggtcctgagaccgatctcgtggtggtcgactggcactggtcaatgtcgtgaaggaggaggaggacccgaacttaagtccgatttatgagcatcaaccacgaaagggacccattggtttcgtggctacctgaagcacgattgaccgaccccactgagccttgggtcgatgacgatgattgtgtggggaagaccatggtggtcttgggttgttggtctccatctctggagacatcgggtcttacgacccgctttgcttaaaaaatggagcctgactccgtatcatctccaccaccgtcgctcatagcacctgcgacctcctcctccgtccctcctggtcaacgaccacccagtcaccatgccaccaccatcacagcctcaatggccggtaccaccctaaaccatatatataggtatacgtatatatattatcattatattttatttacttaataatttgattatttaatttaaaaaataaaataagataaaaatatgagatatttttggtatgtgcattatcattttaattttaatcagttaaaataatttcttttttaaaaataataattattattatttttggggtatatataattatttttaaataaaatgatgtattaattttttaaaaaatatattttatcatataaatagatatattatttaaaataataatatttttgaaaagtgattattaatatattttgaaaatatattaaaataatatatatttttttaaattttgttattaacctataatccttttaattaattatttacttttaaataaataagataattttttatacacatattatctatttataaattaactatttttctaaaagtatgttattaggttactataatttattctcaaactaatactaaaatattattttaaactaacctaaataatgcacaataatcctatcttatagttggtaaactaaaattattttaaaacttaactatatatgttatatattgtatataataatcaattatttaggaaatattttaaaatatttctatttaaataatttctaactatttaattatttaatcacaattaataaagacaatataaaatatttaaattaatttaataaaattcattaataattagaaaatatgcttctaattacattgtggtagattatgttaaaacatattttaccaggatcaaaatttactaatatttatgtttaattataatctgtaatctaacatcccaaatacgaatttcctaaaataataaaataaacacatataaagttatagaaaaccttatgttggcagcaacggaatataatggttccttccattcagaacccttatttctttctatctcagagtattatcaagaactgaacttggatctcctctccttcaatttagttcaacacaatctttctcactatgctaggaattgctttgacatgtgtgggtatactctcaaaatactataggcttcgaatgattcaatagagaagaaggagaattttgaaaataatagctctttttatttttataaggtagcttttagggttaggtttagaattaaaatagaatcaaaaaagataatggctttattaaaccccttggccaaaccctatagtgggcctatttagttttaattttaccattttatttaaactcatctttcttttcacaaatgccatattttaattttaactctataaatgtcaaatctatctatttaataattataatttattatcaaataaaatttatatttaacttatttattaatta

SEQ ID NO: 221818 - DNA, 1145 bp, Cannabis indica
gactctaaaaacaacaatgccatgatgatcaataataataattacacaattgatttcagttcttcagtgatttatgattatgatcataataattataatgaggagatgaagcctgttataaataataataataatcacattcatcatatcaagatgaataacaataataataaaaatattaatcatcatcatcaagatcaagatactcaagatcaacatcatgagttgcatgtaacttcttatgatgatcataatatggattccttgatctcatcaagcctattttcatcataccaagatgatcaacatgaattcaacgatcagattttcacacgtgctgactgggatgagcttagatctattgttggatttacagattttattttgtaaatttattagtaatttgttactacttttatattattagttactagtaataattaagtgtgtggtgtgaggactagtgtagcgtagtgtactgattttttgccacccccttaattaattaattaattttcttattcttacacattttgtttattttattttatagctactttttaggtaatttgtgttattgattttcataaagtaaaccatttttctcccattgaataatattatgagatgtttaaatattttcattgtattgtgactccaagtttcccatctttaatggtcaaaattcaaaaacattttaagaaataatggtaacttataaaaatgcattcatcagaattcagaagggctaattttgttacaatttacaaatctgaagctgttacattacatgtttgaagtatcatattctaaaaagtaaagtcaatcttaaatataattacaaaatacaggggtccaactccaatctgtagcacacttcacagcttcgcagctcaatcttgttttctcttacatggcctttttccgggatgcagtgcagccaaagccgacaagtaaagaaaccgtgcaatctcatttagaagtcgatggctgcattgacagcattgtacttagcctccttcaatgtgcatataccaaagccatcttctcttctccatcacatactatgcttgccaatcatgattcacctagtaactgattaagaccatggttaagagaattgaaaccacttgcccttttgttca

SEQ ID NO: 221819 - DNA, 2479 bp, Cannabis indica
ggtgatctcaatggcacgttgtggatcatgagaccttcattattcaaacagaggaaatgctacgaagtatcttttgaccttcggagaatggtttcaagaacggtggtaattgatttagtggcccatggagggaagttcacttggttccaaaaaacatcagaaatcgggagtgggtgtacacttaaacgagctagattggatcgagccctggcttctgtgaactggaggatgcttcaccccaatgctattgttcgagttcttagtgccgccacatcagaccatcggcctattctcctcgacacggaaggtggggcgaacgttagaaaatcgcagttcaaatatgaactaatgtggggcagagatccaaaatgcttctgggtagtaaaaaatgcttggaaagatcaacttcaccataatcctatggtgaatttttatcgaaagttgaagaaaacgaaagatcatctaacaaaatggaatagagtccattttaaaagtattgggcaacaagttaaggaggccaggacaaagctcgaaatggtggagaaagcaagtaatgttcaatcggaagagcttggacaggccagagataatctaaatgaggcgctggccagggaggagatcttctggagacaaaaatcaagagtttcgtggcttaagcagggagataggtgtaccatattcttcatggctaccacggtggttagaagaagaaggaatttcattcaagagatcaagactgttgacgggacttgggagagagaccagcaaaaaattgcacaatgatttattgaaaagttccaaagtatttttgtggacaaaagaaagtcttctttacctcttgagttcggccaggaaagtccagtgatttccagggaggagaatgctaaattgagtaccattccgtcatttgaagaaattgaggcttgtatgaagtctatggggcaagagaaggccccggggccagacgggatgtcaactgggttctatcgtcaacactggataacagtgaaggacgatctctttagtatgatctctcatttcttcaacatgttcgaactccctcagtttatcaataacacaaattcggttcttattccaaaaaaagagtgtccttctggggttaatgactatagaccaatagcgttatgcaatgtcgcttacaagtgcatatcaaaggtgctagctatccggctaaaaagtctcttgccacgtattatttcgcctgctcaatcggcttttgcaaggaaggttgattgctgaaaacacggcagcggctaaggaaattgtccattctatggaaaagaagaaagggaagaagggctacatgatgatcaagctggacatggagaggcgtatgataagatgagttggggttttattttggaggttttaaacctgggtttcaatggcagctttgttaaatgggtgaagaaatgtatcgaggttgagaaaatggggctgttgctgaatggttctttacaaggatttatctccccctcatgtgggctgcgacaaggagatccattgtccccaactttatttataatggcagccgatgtcctatcgagaatgcttatgtcaaaaaatactgctggtgagattgcaggctttaagatttcaagaaatggccccgctattacccatttaatgtttgctgatgacattatgttgtttggtaaagccactcgaaaagaagcagcaagttttgttcgaagcgttgaagattattgtgaatggtcgggccaatcggttaacctttcgaaatctactgtccatttcactaaaggtgtcccgcttcctttggccaaggagatctcagatatgcttggaatgaaaaaaatgagcaaagattctatctatttggggctacctctttttagatcaaggaaaaggaccaaggatgtccaattcttagttgataaggtgatgcaacgggtcaacagttggaaatcaaggttactttccaaagcgggaagggcgtgtctaatccaattagtaggttcatcaattgctacttatgtggcggcttcagatgttattccaaagtctattgctcggaaagtggataaggaattgagggacttttggtggggagatacaagctcgaaaaagacgatccatacgatctcttggaactctctctgtcatccaaaactaagaggaggtcttgggtttagaaaggtagaaaccattaaccaagcctttttgttgaaatggggttggaagctctaacggataatcaaagtttctggggacgtattgtgcaagcaaagtatctcaaacacagacaatttctggatattgagagtgtaagtggtgactccggtctgtggaaagctattgttaaagctcgctctcttctgtcagaaggtttatgcaggaagattggtaatggtaaagaaacttcaatatggtttgacccttgggtccctcgttcgactaagcgtctgactcctctattggatgcaacacatggtgt

SEQ ID NO: 221820 - DNA, 2992 bp, Cannabis indica
gtaaaagtgtaaaatattttaaccaaaaattaaaatttatagtaataatttttaaaaaaaaaaatatatacatggaatagggctgaacatttgggtcaaatttggtttgaatctaaccaaaccctcggacctgttccgtaaaactttttagtgaaaaaacttgtatataatgggcagatcaaattgtacctgttcataatgagtaacaggttcaggttactattttatgtatgtttggatttgggtctaacccaaacccgcccatgaacccgatcaaacacacacatatatattcaaatttcaaatatacctgataccctaaaactacaatcaaaacacaaaaattaaaactaaaagattaaaaatcatgcttgaagttagcctccctctccattctctctcacgacccaccggagtcacacaaacccctcctctttttcctagtcgagtcgtcgtgaacctttacccctcccccttctgcaaacaagttgcgcgaggctctgaaagtgcagcactgctggcgccagtgctaaagacaaatctagacctccctctccaatctttatagcacacaagccaaagaaaacagacctcctttactcctcctgccctgccatggggttctctctctcgaaaactacaattatttatttatttaattgcgcaatccgttgctaatcaacggacttattgaaaatcgtgaataattaaaattttacttaattactattgagttgaaaacaaatatcttcaatatagtcgggatcccatgtttaaatatttacaattgtgacacaaaatacttgatagaaaagttgttgcctagagacaatacaaaatacaactagctttctcaaagatcgtacgctccaagtctaattgtcccaacatgtacaattttcatccgcttgctctcacggctgctcagccttagccttacccttacatacacatgcaaacaataactgtgagtcaacagactcagtaagaaaagcataatcataatcataaatataacccggattacaattaggcgctcatacaccaacctgtaattctatccacgcaccctaagtggtattgagtctggaacgttcatacgacaatactatcaaccatataatatcaacctatactcggtactctagtaatactttagtcgtaccgatgtgataacgtcgatcagtatctgagccaaacatacatctatcggtatccaatacaactctacgtatattgataccactatcgatgtaatctaccaggcttaataaacatgtacgctaaacatgtaaatacatatacatgtcattaaggtgtgccggtcaacccgagtggaacagctgctcaacgatttacaagctcctaaatcacaatattcgtaaattgatgagtgacacgctaaatcactttccggtgacttaaaatcaaaactaaaagttttcctatcgatggataacatggcaataccctaaatattgtaaaaacgagaaaaattagggtgccctaaaatgccccaaccggtacaccagttcccaattggaagatcggttattagggggtctgcctggggatgaactggaatcccggttcctataggtcatactgaaccggtcgactggttcagttcaggaatccccaaaaataacaccaacaccacaaaacgaccccaaactgcacaaaaacttccaaagtacctaaacaactcataataagcctaatcgaagcaataaaactaagaaacaaccactgaaataaatagcaccatgtgagagcaaagtttgagctctaaagttcaaactttactcaaacacaacaacaaacacccaaatagtttcaaaccatattaaacaacatcaaaataacctttaaaaacaaatcaaacaccatttaacatcacagaatcctaatttctaaaatcatgcctagaaacttagcttgaacttaggaaaaacaaagagaaaggagctatgatctttaccttaggttgaatcaccaaaatcttgttagacaaccctgaattgagctacagaaatactcaaaatgttgctggtttctcaagggttcgagagagggggggttgaagagagagaaagtggcttcttttataattttctaattttttttaataaaaggataaatcctaatatttatctaacacccattaattaatttcaaattgactaacttatttaaaaaatcactaaaggacaaataacttgaatggtaaaagtctaatttgcccttgcctaagccaaaaggcatccttaccacttaggggtattttagtcaaactcagtaccttgaataatctcgatattcccaatgtctatctatattgccccgctattactaaaattctaaactatacgaaaaatatgactttattggccaaaagtcgcgttctactattaccgggcataaaatataaaaaaatatgaaatttcatatatagcacaaataatacccctagaattcaaatatatccccataaattcataaatcataattaaaagtcataaatcataattaaaagtctaatttccgaattaaaccctaattatctgctaatttttatatcaaaattaagcggtcttttcagtaacatagccactcatgatctagcggacccatggcccataaacccgatcaaactcactcatttcatggtaggtacgagtgctttttttagcactaaacttgtgaacccaaaacctataactcacacaatgttcaaccttacatgggagcttcttaggtggggcacattgtaaggacgttttctatttttcatactttaagaaattatattctattttttaaaatgatattgtatattatagttacaatagataatctgtcaatttttgagtaattctgactactttaaaataacacaaataatttaaaaaaaaaaataaataagccccataaagtttatgtattttatgtttactttaaaataatagaaatatttttaaaattaacaaat

SEQ ID NO: 221821 - DNA, 3413 bp, Cannabis indica
caaagagtccattatttcactttgtttgattcgtaagtttactggtgtctaaggagcatttattcctctgcctacttgtacagtattctacatggaggttgagggaatgcatagtgtgggacaggacggggacaacaacgaagtattgaatgcaactactgtggagaataaccaacaagatacgcaggtagttgaagagaatataacattaaatgatactccatgttcagaggcaaatgaggcggcagcaaaggaacaaagaaatgaagaagtggaagatcttcgacaaaacttcctagagtccatgactttggacttggagccagattttgaaattaatgcagaaatagcaagaaccggaatactagcaagtttctttgaggggaaaggagtctcacgaactcggctgaagggaatactggagcaaaagtggaaactaaatggccactggagattcaaaacgctacagccaggtgtatggaggatattttttgacaaggaggaggactgcgtgtccattttggaaaatagaccatggttgattaatggtaagctcttaataattcacgaatggccggaacaaggagactggatgaatgtggatctaagcaaggcgattttttgggttaaggctacgggtctacctacgccatatctcaatgctatgaatacgcccaagattgcagcaaaagcaggagcatacaggggttgtgacatagtagatcaaaaagctttagcaagaaggggttttttgaagttccaggtggagctgtctacaaaacaccaattatctccggggttcttcttagacatctatagggggcgaaaagaatggatacagttccaatactttcggttgcccaaattctgttacaaatgtggtttcataggtcacgataagaatgcctgcttcagggaaaccgcctacgcctatccgccggagggtgatgcagttcaagcttatgggccgtggataagagcggagtcagcggtcatcagctgtttcaacacaaggaaccaactgaattttttcagggaggatgccaggacccttcgaccgccgatgaataaagttacatctccgatcaaggggcacaacgggcaaggcagaggaaaaggacaggccatggaggacatcccaagacagttgcaaagagccaatgagaatggcaaactcaaaaggaaggtcatcagagtgcaggagaaaacgccaggggctgtttatgggaaaaatttgaaagtggtggataataacccaaagagaccagcaggcattaagattcatgatctgggtaaaggaagagatatacctgagaatctaaagggggaaagaagaacaagatcagtctcgcctcgagcaatgggacaacactccaaaggaaacttaatcgcaaaagaaacagatcttgatattttgaagaagtactcttcgagaccaccaccaacagaaagggatgaaagggttatagcaacaataatgggccacatgggccctacttacgagcagatgatagataaacaacacaaggatctttgtaagtcaagaaatccacataagcatccagagcccacacatttcccttggcccgtttacgcagaagaaattgggcttgctgaagaactaatgggcccggctccaatagacaaatttgagcctacacccacactcttccatgacccaatagatgtatccaacttaatacacgaatgcccacaacagaggaaaagaaaggcaggcctaacactggtcccttatgttcaaagaacagaagaaaatacgatggaattttcccaggaaattccaaagatgcctgagtttgctccagggccgatagagactcctttcaaaatgggctctggggcttcaacatcatcaacccctagaagtgttaccaaaagaaggagaggagcagggtcgaaatcaactccaagaacaagatcaaagaatcattcgaagaaggagaggagtctgaatgaggagactacaaagagtcttgaataaactctgaatttgattgaagtacaagtacaaagtgaagaaaacatagtgatgggcgaggaggcggcccttatcaagcccccaacatccaaatgaggctcctttcgtggaattgtcggggccttgcaagggacccgacaaaccaagccttaagagcttgggtgaggagacacaatccggagtgtgttttcctaatggagactaaggtggataaaggaaagatggatcggatagctagaagtttgggctttgatgaggcggtggtaattccagcaattggtttggctgggggcttttgtttcttttggaaaagtgaagtgcaggccacggttctggatcaggataacaacatttttgatgtagaaattcatgatactcagcgtaatattaaatggagatgctttgcaacctacggacctccctatgacaaagataaaaagtttttttgggaaggtttgactcaaaaagtgagaaattgtagtgacccctgggtaatcatgggagatctcaactgcttacttagcaatgaagaaaagatgggaggcaagaaagtttcctcaagagatacttattggctggaggaatttcttcagaatactggcggtgtcgacttacgtttcaaaggttgccaatatacctggcagaacaaaaggtttaatggtgggcttattcgtgaaagattggatagatgtgtgggttcggttgactggactattgaatttccagctgcgggagtgttgaattttccgattaccatattagaccatgctccaattatgcttgacaccttcatgtttaagcgtaagggattcattccctttcggttttatgattcctggtctaaagaagaaacttgtcgtgaagaaatatgcaaggtatggaggcaggatcaccacaacagtacgaaaagtttgttgagaaatttcagcaacattcgtagagctctgcaactttggcaaaaaggacaagtgggtgatttagataaaaggatcaggaagttggaagaaaggatcaagtggattcaacatcagcaaatttctgaggagttgagtaaggaagagttccatattcaaggccagctttacgagatttggcaaaagaaggaatcgatgtggtggcaaaaatctcgtgagctctggctaaagttaggagacaggagcacaaggttctttcatgcggctgcagcaattagaaggagaaggaaccaagtgtggcaccttcaatgcaaagatgggaagatgaaagacactcacagcgagatatcaggtattattaatgagtattttaatgagcttttcaattcggatcatccccaaattcctttggccttggaagatttgtttgacaagaaggtggatgaagaaacaaaccaggacctatctaggattccttcttatgaagaaattagagagac

SEQ ID NO: 221822 - DNA, 2716 bp, Cannabis indica
ctctctctctctctctctctctctctctctctctctctctctctctctctctctctcttttcaatcttgaaaaatacttcttaaatcacctcattttgcaaatgataagtatggtagtatttatagataaagggatatatggatcccaaaatcggtggttgctatagctaaattattaagtcagttatgacttaacaaacgtaacaaactcctcgtaaaaatatctccttcaactcaagttaaagcttttctgtatgagagacacgcgcttccggacaaaggacaaaagcgaactctgaagggacttctcgaataggatcggagcgacagttggagactattcggaattcccttccaggtagctagccattcggaattccttttcggaggaagagaagctttcattcccttagaactccttctggatggactagatagaattatgggaactcctttccggatgacatttatcttttcacgagacaactcggacaagttagacttctaagaacacccttccatatgacaactaactttctataaaataaataacttttgaagatctttttatttggagaaaaatataccacatgaaacaatttgaatatgaaatttaagttgatcactaaaagaattaattaatatttttgcagtcgcatcatattcaatgctctgtaaaaatttacaaatttaataaataaacgttcgtataagttagcttattacttttacggtcacacaaaagtgcttttaaaaatattaaaaataagcaggcatgacaaatatgactacaagcttcaaaggtgtatacgggtaaatttgatgtgccaacaaaaagtttctaatttgtaatttcttagccttcattttgagctggtgatttgaaattttcacaagccaagggtagtatatatacttaaagttatctaattcttacaagaattaattaacagaaaaaaaaaaatacatatgtttgtaacattaaaaattaaatgttagacatttatgggtcaaaattaaaaaactaagtattttagttaaaacctatgcataatcttaagtattattatataatcaatatcggtaattaattattaaatcaaatgttattagttgtcccaaacaatgatatttgtttaacttaaattagaataacaacatagtatatgagcattaataattatattcacaaaagaaattaatagagacttctctgcacataatacacgtatcttttttttaattgaaaggttggtatcgacaatggtgtttgtttaactaattcattagaatacataattaatacttcttctatatattattatcaaattaatgattttttaaactgcaatattttattgtgtacaaataggtaacaaagtaaacatgaagaatgcattgaagtgaagtgagcaaaagaagaaaaatacaattgaaatggctacaagacgtgtgaacttccttcgaagctcggataactatgtcttggcagcagtggaaactaacggacacacgtatctaaagtttttgccaagtgcaaatgggcaaaacacgcaatttgatatcatcgacgctgggcagaatcgtgtgcgcatacaatgcgttgggacagataagttctggaagcttgaccgcacagacaactggattcaggccgaagttgtgggaatccccacaaccgactcgctcttcgtttcagctgttgagggattgagctacactggctaccaaaatgtggcaaacggcatgtactgcaagacttttaccaaacgccctgtccaggactgtatcaatgcatcagccgccgccttgactgaggctgtcaagctcattcttgtcgacgtttgatgtaaatgttgtgtcctctagtgtgtcctgttttacataataatgaatctatataatgtctgtttgattccatgcaactacacctattattatatgtataattaagctcatgatgatgatgagactaatcggggcttaattattattatgagttgttcctccatgctgtactcctttgtgtccatcgtgtgattatataacataattaagttttattttgttttattagtttttagttgcatggtgttgcatggcttgacgctagcgcctagggcacaccaagcccaaagattttgcattacaacctcgaaattacattttttttttaaacaacacccaaaaatttgggagttttcaattctatacataaaatcaattttattttttataatacagggtgttgcatcaacaaatataccaaattcaaaataattcataacaaaaataggaaaatcttgaagttataattggctgtgttttcagttttcaattttttaaaattgtgttttcaaacgtgagaatagaaaacagttgtttgttattttagaaatttaatggtgtttgacacaagttttttaaaactattttttgattttttcttactaaaataattaatattctacaccataccatgacatgaacccatcctacctcggaccccacctgaaccaggaccccggcctcggacccagacatcgagcactagacctggacccagacaccgaacaccgaacctagacccggacccagacccggacatgcaccagaccttgggcctgaaccctgaccccggacgcggaccggcccagaccagaccccagacctgtaccccaatgcccgacccaagacctagacccggacctggacc

SEQ ID NO: 221823 - DNA, 8712 bp, Cannabis indica
gacaaaagtccttaaatttaacaatctcaatagttcgggcggaatttctaacggcaaaaaaagttcaggggggcacgatttagtacatgtcaaagttcgggggggaaaattactaattagccttattattataatttaaaagcttattatctattttagtttaatttattgtaaatttatgtttattttataatgtgtttaacatcaaaataagttttttattaaaaaaataaataagttttaaataaaattagataaataataaataatttacacaataaacatactattttttattattattatagtgtaaatattattatttattttaatattattaattataaatatatgtttattttaataaaatatttaatgaaaataatagacaataatatatgtgtttttttatttaaaaaaaaaaagaaaaatacagacaaataattatatatagttatgaatatgtaccatattcaggagtggacccacatagagacgaggtgggaaagtcgcattccctgaaaaaaacaatcggaaaaaaaaaatatatatgcattttagcttagttattacatatatttctaaataaaagtgatattaatgaacataatacaagctttggtataatggaaaagctattttatagatatagcggatgtcatgagttctaattcaaataaaatcatattaattttagtatttaaattttactttttaacctctaccaataagatttgtatttagtgtcttaattattcaactcaatatttttattgttacttcttttatttattttatactacatttaatactaaaatataaatttgcatcaatttttaacatgttatacaatgtaaaaaaggacattttataattttgtatactttataataattaattataaaatatgcgcaaaaaaacttattaatattttctcatacaatttttatacgcttagaaacttttttcaattttttttataaaatatatatatggaaataattattgactacaatatcttgcttttattagattccacaattttaactatattaatataatcatatatttagtatatgatatatatatatatgatatatgaaccagagggccggtttggagtgggctgtgtagttcaagatcatcatgaaacaatggtagaagctttcaagaagagaaaggttgggtatgtccaacccgaaattgctgagatcatagtcatcaaagaagcgttgagttggattgtgactcatccttgagacaatgtagtgttagaaacggatagtttggtgtgtgtccaagcagtccaaagtaaagtttttatgtcctcacagtttgatcttgttgttcaagatgttacgaatttctttttggttttatcttttattgagttatgttttgttaaacgatctgcaaataaattggctcattgcttggccagagacttttgtttctctacaggttgtgtgcttcagttggaggattgttcctctgaagtgcgttctattattttgaatgagtttaattaataaatctcctaattaactcaaaaaaaaaaatataatcatatattttagttgttctttaatatcatacttttattcgataccaactatattacataatcatattaatatatttattctttactattatgttaataagatttttttaacaaaacttttagtatgtttatttttataaaaacttattttaatttttaatttagtttgtaaacttatttattttgtatttttttaatgaatatgtgatattataaaaattgtataaaataaaatacattaatacatagtataattataaacattgattaaaataatataataaacacacatctgaataataaataaataaatgttataaataaatgttataattataaacacacatttttataatttatatatatattaatgtttataattttgatattatatttctatagaaaattaattaaattatatttattcaaaatagaatgaataataaatttttatttcttaataaaaaattattttgtttataaatattaaaactatttaatatttatttatttaatttcacaaaattgtttattttgtgtttttataaatattttttattattaaaattttcaaaattattattaaaataagcataaatcattattattattatgatatcacatatgaatcacaataaaatatttagtatacgtcttattgttttttttttctaaactataaataaacacccttttaaaatttatatatttataattttaatattatatttcaataaaaaattatatatataatataataaagttatataaattataaagtacatattcgtataaatttccctattcaaaagtgggttgcccctcttgtcgttgacacgatattctttcggtgtaggatatgataagcctttgtgacacaaattgacatgtttatgcttagtatattattgagatttttatagtaaatatattattgatttatcataaacaacaaaataaaatagaaagaaagtttctaaaaaaaaatagggtaacttattgacactataattaatttgatattaaaaattgtcaattgtgttaatattttgtgataaattatttatttcattaattttattcatttatctaaattgtacatactttgacgtagtctattaacgagtcaaatatattaatacgaaaaaaaattaatcaacacgtattgtataatggatctaatcgttacacgaacatgatggattgatacataaacacgacaggtcaagttagaattaaaatcttgacacaaacatagatagtcgagttggttttaaccaactagatacgtcaatatgctatgacacgatagctgtacatacatgattttagagtaggtcgtattaatgtattgggcaaaaatgagcgatgaaaacacaagatgagctctttgacacgacataaaacactcgagcttgagagacaagacaacgacacgacataaaaaaatataagttctagctagacaacatgatatagattggcacgagtaacatgaaaagtaaaggtttgaacacgacataacacgaaaggtaaaaacttgagcactacaagataaaaacagggcttgagcaagacacgataaggtcaaagtagccctaaaatataacattttaaaaagtcgtaagatttgattgtcggaccagccccacacgctacaattctgactacaagtagaggtggattagaatagtgtaacagaacgaacattatgagcattggtaaaatgatatattgtctttggttgagtgattgagttgagcagtgggttttgctacatattttcttgaaaagtcttgtagattcaagagtaaaagaaatttgtaacataacctaaactgaaatgcctttgaaatctttctcagaccagcctactatagtgtaagttgccgtagtaaagtgtgactcggtttaatgcatacgtaacagtttttcttcttggtttttatcaacaacaacaaactcagaacactatactaaacacagattatacctcatatcactagtgcggtctgctggttaacaatgtcatgagttggccatacactacatacattaatcaaatccaccttagatataaaagctacaccatcagaagtcttcgtggggggcacaccatcaatccctcccttgcagtgcagcacctgcaacaacacactagtactctcgcgtaacaagtttctcaaggacgtccaacttctgcaacagcgccgttcattccttgcattgcagcactgttgagaagcttcattccctcttcactcatctgctgaacttcagatggagaaagaatcctaatgcagcggacacagccaacaaattccctgcaaaaaccacggccacaaaacaatcaaacatttttaaaaccttacgtttatcaaatgaacataactcttaaaagacgaggacatactcccaagggtcatcgccaacaagcagaacgtcgttttcataatccacataaactagtttccatcttgaacctcttggatcattaagtagcccttcaagtccaaacatgcattcaattgcagagcaaagctcgtcatagttcttaaaactcgagacatcaatagacctcccaacagatcccgttttctggacctgtcaaagaaaaattaaactcaaatcattaggcaacataaaagaaactgaaagactgaagtgttataaaaaaaaagtcagattaaactacgtataaaccttggtatatgttcgcactggtggaactacttgttgccaagaattgttattctgcaaaagactgcactcatcaagatcaacattgcttgatgatgtaccaccagagttgtcttgacgggagaatgcctgagagtcacctaggcttgccgtggttatctgagactgaacatcttggcttgtgctgaagttgcctactaaacaatctgaggggttatgaaagtcaacattcttaaatgtagagaactcatcaagaattgcacttgaagcagaagggtcaaccgctaaacttccaccattactaccatcaatatttggacaaccgtagataccactttggttattgctctcatctgacaagtctttcaaattgcttgagtgagttagagaattaaaattgcatggttcttgatgaggaaatgaagtgagatgctctgcttgtactttcaggttattattatcccacatatcttgccccattgaaggtagaggaagattatgtgtttcaggaaaagctgaagagtcttgaaaaccaaaaacaggtaatgacccaggtgacctaagaatcccagaagagtaagggtgacaggaagagtaatacatacattcatcagggtctagggatggaagtgagacattcgtgttattcatgtcagatgggtttaggtcattttgttgggagagatagatcaatgaatccagctgtggctgcatgccccactgattagcctgcagttggactgggctctggttctggttgaactgagtcagctggttaaccatgctctgtgaactaatcggcccattagccaatttctcgtcgctgctatgaacagtggatgatgaagtcaactggcttaactgatctgtagatagctcagtttctaactttgtcttttcagtgtccataactcccccaactttctggttatcatgtttgactgcagtattgaagtttttctgaagatttccatttgatgatgaattcatgtttgaaacaccagattggtccagggttgattgaggagggttcatttcattttgttgaagagatgaactttctgaacaaataacctgatctttttgattgagagttgtctgcatgagcttcacatctcgaataggatctgccatggccattgctgattcttgttgtaaagaagacaaagttcctgggtagttaactagttgcggtttaagtagcatcttgatcagttgttccgaatatagattcgaaatcccatacggaatatgatcaccatttccattttcaggaccccgaatataaggtctttttatcatatttccccagtcagtttctgctaaaacaaccaaagaaattatcatgaaaaagtgagaaaaaaatctaaaaccctcaggatgctaaaagtaaaacaagcaaaacgaactttacccaaaaatccagaatgaaatggtcgcttaaggccagaagtcagagaaggaaaaataaagagactctctggagtctcaatatcccaagcgctaaccctgttctgtttatcacagcaccctggctcatcccactctacctgttgatcaaaaataaataaatgaggttcaacactcaaatctatcaaagtagacacaaaacacactacaacatttttaataggaagacaaccaaaccaaaaactcaaggattccttggactttcaacgaaaaaaaaaaatcacctgaagatttctccatttagagccaggccacctcagtggatccagctcactaattccaactatagttcccatgtatctgcagtgaccataaaaaaagacattgttaatatagacagatagaaaacattactcgtgcaagccaagtctgaaagttacctgcgcttccctgactcctctgtttcaaacatcataccaaacctcatgccaactgaaagctgtgtagcataaacagctttcctgaatcttgacaagggaatcacaaactcggcaggacaagccctacaattatgccaagtacagcacagttagacagatcgaaatactgaaatattaaacagaagagatagaaaaaccacatatgatggaaaggaaacctggggttgtaaaatatggtaaaagggctgcggttagaggcagcatgagcagcagcggcaaggacaccaatgtgcatgctatcagcagataaaacagaagatggcagcgtcgactgctgacgatttgctctcctaaccccgaccattaattgtgatttttcatcccttatgtttgacaataagaaaagtgcaacaaaattaagattaagaaagatagataactctgatataaatacatagacaggcatatagtgatttttttaatgttattattgttaaatagatgaatagaattacctgataaacaaaacagagtcccctgctctaagcctctttgcaccaacgaataaactccatcctgttgtgagaaggtgtcgctttggctggcctaaataaaggaaacgtaatgtgttactcacaagaagagagagagagagagagagagaatttatttcctaataaactcacctctgtatatgtggcgaaatgtccaggtattctcatgcaagtctcgcactacaagttcttgatttggtggttgcattgtgtaatcctggaatggaatgtatgtttagttgtttacatcatcaaaattagtacgtgtgagtatgtgacctcacttaagagactcaccaatggagggaagagtttctcagctgcccttcgcggaactgagaatccaccatgggtacttgtatcacttgcggtcaaagttttgcagaaaaactcacttggatgtttactgggcttcagtccaaaatctggtacagggaacacatccttttcctaatgtagagttttaaaccaaagttaaaacttaaatggatgtaaacaaatgaatatacatagatacaactatatttcgaaagaaaaattggtatttatttccattaatagtagtggtacaagaaaagagcttacagagttcactggttgaagactcatttgagcatagatctcatctgtttctctgtcagcctgttaaaaaatattaaagaaaacaaaatataatataagctcgtacttatataagcaaacaaattacgtttacaatagtactaaaaacatttacatgtagagtgacattctggacttggcatagcaactgagaagggagatttgggtagtttggaatttgtgatgttgccaatcttttagtcgaaactgctacctgttcatgcatatcaagttcaacatttttatttttttacaacaacaaactaaggcattaattaaaactcgcaatagaatgtgtatggctgatcaaaaattacacatgtagtacaaaaaattttatgtactacatttcttgaaagaaaataaataaagacaaagttttagttggaaatgagtaagagaagaaaaaggtggtcaaaagtatttcaaaacaagcaaatcttacctgctcgctatgtccttgagggaagtaatagacaaggcttcctacttggggcaaagaaacaagcgggccagcgcaggcgtgccataactctgagcttatggacttccgagaccctgaaaacgaaaccaataaaactaagaaatccttaacaaaaacttgcatgaataataatagtaaagatctgaagaagaagaagacaaatttttaattaatagagcagagaatgcaaggaaggtacataccattttgatcctgcatttccttcaacaacttcatctcctcgagtagatttgtggatgttccagctaccaaaactccgtttttgattttttcctccacagaactcatcttgattatttgttcctctgtattattaaacgaaaaatgtggtgactaaacttcttcattccatacaagagagaaaacccagaaacttagctccaaaacgacatcccccgccaaaaaaaatagccctcgtatttggtttaaaagaatccaaatcaaagaactcgggtgaccaatatttgttgagaggaatgtgaaattacgactgacccatgtctccaaattccatattctccgagaaaactaaaacagagaatctaatcagagagagacactaaagcataagagaaaagcgagccccactttctctcctctcagggccaaaatccaaccagactgaaggaacaaaacctgcaaaaagggtctgtaaagatctttttttctctaagggtggggctttggttcatgctcatcaactaaaaaccaaaccccatcactttgtatcaaagcacgcgaaccaaagcataagccccccccctctctctcctctcatgcacaatctttttttttttgtctggagatcctctcatgcacaatcgagtacttgtttttatcctccaaaagaaaccgacctttcgatgaaccaactcatcataccgattccttgggtgctttctctctctctctctctct

SEQ ID NO: 221824 - DNA, 2983 bp, Cannabis indica
tgatgatcaaataaatccagtgggctaaatttcttcgtcaattatctttagttaaaattttgggaagagtaaaaatttagatatgatttgactataccatccaatagttgagatgatgatcaaataaatccagtgagtcatatatattttacttaaaattttgagaagagtaaaaacttagatatgatttgactataccctccaatggttgagataatgattaaataaatccagtggcccaattttatttgtcaagtatctttacttgagattttggaaagagtaaaaaactttgatatgatttgactataccattcaatggttgagattgtggtcaaattaatctattgacctagattattcgtgaggtatcttatcttcaaattttgaaaagagtaaaagcttaaatttaatttgactgtaccatccaatggttgagatgatgatcaaataaattcagtgatccaaatttatttgttaagtatcttatcttcaactattggaaggagtaattggatatgatttaactataccatccaatggttgagatcatggcgatttgaattcattggcccatataaaattgctagattacttacttttaagatttagaaaacaaagataagattatacacactataaaatataaacctcataatttgaaaaaaaaaagtaatacaaattagcttctgtaaaagatgaattctaatgttagtagttcatcttatttatcatcttcttcatcatcttcagataatgattattatgatgaattagaaaagcaagtggtatgtcaaattaccaataataacaatttttatcactgaaaatcaaaataatcaaggatcacattgaggctcagttcttggtcttatcaactgtgatcggaaaaatgttgatcgcaatctcttaggtgactattttgtagagaatcctcgatttctagagttgatgtttcggtgatgattttgaatgggttgttctatattcattctcattttcgatgcaattacaatgcatgacagctactttatctagcaaagagatggtattggtaaactcagattattgagtttgcaaaaagtaacagctgtattttaaatgttggcatatggtgtactaactaatgctactgatgagtacattaaaataggcaaatctacagttttagaaagtttgaaacgattttctcgtgctgttgtggaggcgtttggaagtcgctatctttgatcacctaacgctaatgacattgcaaggctactccacattggtgaacaataaggtttttccaagaatgtttggtagtttagattgtatgcactggaagtggaaaagttgcccaacagcttggggaggacaatatgcgggtcgtagtagatcaccaactattattcttgaagttgtagctgactatgatctttggatatggcatgtatattttggtctaccgggatctaataatgatattaatgtgttggaggcatcccatccttttgctaatcttgttgaaggtattgctccgcctgctaattatgtcattagaggaaaatcgtacaatatgggccactatctagctgatggtatttatttaaaatggtctactcttgttcaaagtattcatgagccacggggtccaaaaaattatttgcaatgaaacaagaagaacgtgcttttggagtattgcaatcgagatttacgattgtggcaagaccaacacacttatggaataaaaaaatattacatgacgtaatgatttcgtgtattatcatgaataatatgatagtagaggatgaatgtgatgttaatgcaactattgaaaaacgagttgaagtgcttagtctagaagatgtgacggtgggtgatgacaatgttcagttccaataatttctcgctcaacatagaaatttaaggataaagaagcttatattgaatttcgaaatgcattaattgaacacctatgagacgactatactaattctcaaaattagtataatttacttatattgaacttcaaaatgcattaattgaacacctatgagacgactatactaattctcaaatgagtataatttagttaatatttttaatgtgtattatttttagagttaattaaatgtagtttgttttgtaagagtgaaaatgtaatagaatatttattgtaaatgaaacctctattacaactagcgctgcaacaaaaaatcgtatagaaactcctattacaactagcgttgcaaccactttagaaacctaaaccgtaaatttaaaaagaaaaatttaaaaaaaaaaatagtatatggagtaattcccctataaataattagttataacaaattattattatacaataaataatttattaattaattaagttttgaaatgcattaattaaacccttcaaaataaaatttaattagtatttttaaggtgttttaatttttagagtaaattaaatactattttttaagattaaaaaaaataatgtaatgttattacaaattaagaaatttaatattttactaatataatttattggatttaataaatatttagtattaaaatatttttaatatattaataaaataataaaaaatataaaatttaatataatttttagtgttgtaattaaaattaaaacaaagttaataataatgaatcgcctcattcctctctcttgttttatcggctgtccaccatctcttccatttaagaattcatgcacacacagtctaaattggagagttttttggcaagcctgaggcaattgtatagacaataaacttgaggacaagatattggagaatactattgtattgatcttcttgattgatgccaaagtttttctcattcccacatcaacgtcttcttctgtgaggggttcaagagtagtcgtctgaaagtagtttggttcggctcaacgacgtccttcgtttcagatttttgttttcatttattaatttataattattagtttaattctaattaa

SEQ ID NO: 221825 - DNA, 952 bp, Cannabis indica
tgaaattttatgattttcatattttgtgcctagtaacagtggaatgcgatgaattggtcaatagagtcacttagatttgattgtctatcatagaattagcagggctagatatttagacatttagaatgtcgggattattggagttatagttttggactattttactcctacaaaatgaggttgcttcctaatgaagctaaggatataattgtcttttggtttatttattattggagaatagataatcctactactaattatccttaagtttaactagattaagtttaagctgaataaaacaaaactaagttattttatccaaactcatctcacacactcttctccctttctctctcttggggttcggctacaagagaacacaaggagacccagcctttttctttgaattcaaaccaagtaagaggaattcagcttaggtttttatggttttatggttgtgaaggttaaagggcctataagtcatcgagcaacagttccactcaggttgaccgacacacctgaatttgaaatcaaagtaagattagtataatgatatgcatatgtgattacgtgtttagtatacatgtttatgattttctgttagattacattagaatagcggtatcagtatacatagagttatactggataacaaagaatgtatgtttggcatagtactgattgacgatatcacatcggtacgactagagtacagagtataggctgatattgtggtcaatagtgctgtcgtatgaacgttcttgactcagtaccatgtgggacacggggagggattatgattgggtgtatgggcgcctaatcgttatccggtttatatctatattatgattatggttttcttactgagtctatcgactcacaattattacgtgtatgtgcaggtaagaattagaaccgaaccagtgtgggtctaaagctaaggatgaagatt

SEQ ID NO: 221826 - DNA, 4907 bp, Cannabis indica
aattataaaattcataattaacgtaattaatcaaaataataatttcacaaataactattttgcccttaagaatttgttttctatagaaaataattctcacttgaaattcactcatcaaataaaacttttctatgtgcagtgttgtatagaggtgacttggggactatggacctatattttgaagctctaataaatacttaattattatcgatctcatcaataaaataattcaatttattaattctattattactccactataaatatgaaattacaatctttgataatatagaattatatttacaaaattcttacttatagtccattgatataatcaatataaataattttccctccaattattacttcgtaattagagttggtcaaaattactattttacccttctcaccatctctttactcgttaagtaccattaattcaatgtgaatagttaatctatgacttattatagattttgatctaactattaacactcctaaaattaacactataagggaattaatttcaatccgttaggaaagcttggattccactattgtataacatgttcccagccactgatgttattaagctctcaaaacagaagttgtaagaattatcttctctgagaaattttaacaagtgaattaaagaactcaatgaacacaaaaagaagttcatgtatactcagattcaatctgatctactaatgatcactgttgtgatatgaacaactctttcatggtaaacgacacgttaatgaaagatgtttattatatatcggcccagtcatgaaaaattgaattatacacagtaccgttactacacgtctatccacatatatgatctgaattaaaatcacacacacactagaagtatagtgtatagtaaaccatagttagcagttctacattaaagattcccaatactttaatacactaccgacttgttttattcatattgtataatcttaattttcttgtacgtccttacaagattatacattctccatatgaataagaaatttttaaatatataataattatactattatatttattgtattatttatcttataattgtatttcatatattctctaatatattatccattaattacttgtttttagggcacaaatcccaataataactaatataggattaagggatatgcctaatttgctgtttgggtaagtggaaaattgttaggatttatgctctgaaaaacctataaagacatttctgattattaataaacagttaaacattttgatatatgcatgaatgttaaattattaatagttattattaaataatttagataaatatctaagaattccttattcatatatgaggctgtgacttttagatgtacaaagaactaagatcacttagctacgaataaaatataattctataatactaagagtgcaattccatatttaaagtggagtaatcatgaaattaataaataagattaatatttagttgacgagactcaataaataatctagtttattggagcttataattatggtccatggttcccgaatcgctaccttaatacactatcaagagaagggataaagagttatataatgttgttcgaagaaaatctattttgaattgtcaaaatagtaattatttatttttgtaataaataactaattttttcaaattaattaagaaaaaatttatcaagacaagaattgttgagacaaaagttgtcaggacaaaagataccatccttgtcttaattgagacaaggtaggtgcctaccctatagtagggtgtcgctattggttttgtcttttggagttaattaattaagtagttaattcaattaaataaatatttgaatttaaaaagtgattaaagatatttcaagttggttgagatattccctcaaagttagttgagatattctctcaagtggttgagagattccatctgctgaaatatcagtaaccgaatcaggttatagatatttatttaaataatcgaatatgatttaattaatgggggaattaactactatatatagaatcctgatttgagaaatcagaagatgatttgagaaattcagaagatgatttttcactactatttttgaaataccaaggagaaaagaaaaaccatttttctctctcaaatagttcttgctcatgtgttgagaatttataaagaacaaattatacactttatcttaatagcccacactatttcttgtgtgtggtagattgatttgaaagactatggtgtgagttttaattaaaccaaaatgattcaacttacgagaagtttcgaggataccctgaaagttatcaaggagatatatattcctttcttgttatttatgttttagatttaaatgtttatatatctggagatctattgggactatggtacaatgataatcagatgtacgaattctgtcattgcgtacctgatttagtaccataaaaccaacaagattttcctctgatggtggtgtacacatgcaagcttttaaagcctacttatagactaaaataaatttttcacagttggtatttcattatatctttttttttttttaaggtttgaaaagaacattatggaattaattacataccaaaaggttagtaggaataatatttttttatatatatagacaatatgtcatttgcaaatgatgataaatatttcatatataaggtgaaataattcatagctcaaattattattttaagctaaagaatataaaataatatataattttaattaatttgagagtagccacaacatctttgtttaattaaaattacgtattattcatctcatataattacttttatctttaagctagtttgataaattcaacatctctaaaatgatctggaatgagaataaattaagaacatccataaacttttatttttagaagcctaatgtatgtctaagagtctgaataagactttgcattgcatttgtttcagaattgttaagtagaactagaataactaaagttaagaccactttattttcatacaaagtgatgagatatctttaagatactaaatattatattcatacatattttattaagatgaattataacattctggaaatataattaccaattaaattccaacgtacttcactggctatgttgattcatgtaaattaacatttgattacatccttaagataaccagtaagttgtattgtggagaaccttaattgttatttctattatagaatagtcagactcatttattattttgaggatacatctcatatggtgtattatagagtttcatacaaggcctatggttcagaattatatttcaagccattaaaaaaaatttgtgataaatttagctacattatttatggctaagaattataagagtattggtcgaagctagcatattgacattaagaatttagccatatagaagcgtgataagtgttcattaagcacgcaatattgaattgtgtgatcgtatatcactaaaggcatgtcacaacacaaattcaaggattgtaaagtaaatatgggaccagttacccatatactgtttttggttgtacaactaaaagtataaaattattcaataaaactctataaatgctaactaagtggcagaatattaaattattttatatattaagtataaaaataattaaagattttatccgtgtatataatataatgaatatttttttattcattaaatttggtcataagtaattagtcaatattctataaatggtcagattacgatttactaaatatttaattttttgatttaattttctaaattaattgtcaaaatattctgacaattaattgtgggagagaccttgataaaatgtctcacctatataaatatagggtctcagttccctcactacttattctgtgaaacacaataaatttatataaagagagtagagagagtttagaaactcaattacccacactaattagattctttatcttttgcagatccaaagcttgtgtaggattgaagctcaataaatcaataacaggaggtatttcgattctttgtttataatgcatatatgttcaattaattccgcactttgtacacaatttatatatgcttcatattttatttataaatatctaccatagtcttttttttttttatttaaacgtttatatattacattgcataacctgggactcgaacccaagacctccaacacacacgcactcttctatggccacttgagctaccctcaagtggttaaaagagaagaatacgaacaatattagtctactatattagtctctcatattttaatctcccatattttaagggctatactctaacactacccatgtcttttaattatttgaacaaataaaatggcattaaaagctaagataattgaggcaacataagcataatctcggttggattttgtggtgaggtaggaattgaattgaggaaaaaaagcccaaagtcaacataaaagcacgtgtagaagaagagtcaactgtccacatttatgtgctgacgaacacacgtacatacacacataaactagcttcgtccattgaaacaggccgaaagacacgtgttgcctggtgatatgtgggctgtggcctggttgagtaacatgacaagccggtgatcttaacgcttttctcgccttgaaataagatcactcacacgtgtatgtactgcgatcactcctttcctctcctccttggaccaatcaattaaatataattactttgtttaattatatgaatttgtcacgtacggtagcatatgaacttcaccccccttaaaatctaagctacatttttctattccaagaaaaagctctttacttttttggtaagaataagatctaatgtaaatatgaattaatataatgtgacact

SEQ ID NO: 221827 - DNA, 1639 bp, Cannabis indica
gatcctcagaacacctttttactattgctataatgtccatttttagtgttttaatttagtcaagtttttattatcctcacagtttttaataattaattaatatattagtattaaactaatagttttataaaatcacacatgtgatgttcctatgaattagggcattacaccagaggtatcaaatgcagtttttttttttccatatttaactctttcaaagattaaaggtgcgcgatcaaaggtccactggctcccctctataacgcgttcaatatccaccatatgttagaattgaaaaatataaactaagctctttaacataaacacccctacccagttgctaaagacaaaccatcttgttttgcatttcttgaaaattaatactgcatttaaggaacattccaacaaggcaccatttgtcatctatctctgataaatcctgatcctcatcatcatacaccagtcttcccattggaatatcatctatcataatatttctgtcgccttattccatactgagagagctcgacaacccaccagaacgaacaacaagcacattcacacacgaacaagaaacaggcacaactcaaatcatgtcaaaagacaagacttatataatgttaaactctatataaaaaaattaaattaattatatacatttttttggcattctaattatatcaataaacattaatcaaaatagatatatttatggtacaaattcatatttttatggtacaaaattataagtttatgatatgtataatggcatgtttttttgaattatttaatgtaattttgcactccttttatgtaaagataaataaattctttgtgtattaaaattgcagttaaattctcaaaacattaactttgatatagataagtccttaactttgaaaaatagcggtaatagttcccaagctcaagattcttgtaagttcttcagtcttcattttaagagatccattagttgctctaaaaatgtcacatgttgatattaaattgcagtgaaagttcttaaaaaattcactttgatgcaaataagttttcaatctttaaaaattgtagtaatagcctcaagctcaagattttcgtttgtccgtaggtacccaatttaattgctctttttgtttctccaaaaaatacatgtgttgatattttattggtccaaatcataatttcaatttaaaataaatacaaatgaataattaatttctaaaactaattaattaactttacttttttttttttatctttactattgttttttctttatttcttcttcttcttctcgttcactcccagcccaacatacccagacttgatctgctctactaaaactcttcaatttccattagctagaggggccaccttaaaaaaaaattgtctatgtaaactttgaaccagaaaagtcgagttcaaagaatcggccaccaaaacccaccacccaccaccacccgtatctcttttttttctatcgcatactccatccttatctctaaatttcataaaaatatagagaaaaaaaaacaaaaaaacttcatctttctcaaatatctaatccttatcctgatcacatctcttcttttttcttttgcttaattagttttcttagatagtgggatggacgaggaat

SEQ ID NO: 221828 - DNA, 3523 bp, Cannabis indica
aaaaaaaaagcaatatttagttataaacttgacctctatgatgagctgatgcatggattgacctttagttggattattcaaacattcatattatgttaggaaaccgttgaattggatctcaatctcatattcttagtagtagtagtaagtagtagtgcataacacgaaccaaaggaaaacaaactcaaattaaagcataaatatatatatattaattaaatataattaagacaagctagctagacgaataattacataagaggatatattgcactctacgctaattcaaatctatgattaatatgttcctccactcaggatcaataataatgtatacaaaatactaaagacatattgatttgctcatcataatagcaaatacacataatcataccatatattcatctcatcagttagccaactccatattgaccaaaattcatcagcctcatttaattgcataccccctgaatatcacaacatcataattcatgtcacataagtagtatatattatatgatacaaacaaatcataataacgaacagagaaattttgtttttgttgaaattcatacctcggcgggtgaagagacgataccttccctgctagaattaaaatggccattcagattcctgcgggtttacataataagtattcataaaattacttaatgtttgtgttaagcaatggatcgatgatcgaaaatttaccttggtctctcagattttgcaatatgtttagacataatagacgcctgcaattaaaaaaattagcaaaaaatcagtgattacacacatgacataactcgtttaaaaataaaaagcttgttggaaattcgagtcatctaaatatcgatgactagtgatttccaaaacacagacgtgaatgatcaaaacagaaactcacaaaggtaaaataacaaactggtagagtttgtcttactacaaaaaagtagaataagaatgcattagaaccaaattaaattcaaacctgctcctgaattatgctccttgcctcgacaagttgagcttcgagctcaagctctcgttcagttgcttcagaagtaacttctgctcctttttgtgcatcttgcaattgaaccatgcgctcctacaaataattaacaatggccaacgcatcataaactgcaattcatcaaccagaggatgcaaaaagagaacatgaagaaatagagagtgaaatacctttatggaagccatcttagttcgaaggctttcttctattttatctctagccatgtgaaacggcagatcaaagacatcctgaaaaggttattttatgttatatataaaccactgataaataataacattacatgatttaaaataaccattttaccataccgtccttccaccaaatggagaccgagcaggatcagcatccgctccttcatttactgctgcagacaccttagacaacccatttggagcatttataaaatctcgcatatccacctgaaagtcaatgattatgatataactcagcccagaaagaaaaagaaaaaaactgattctatgaaaagcaataaaaaacattgttgacatgaaaaatatcatggggcctcaggttttattagagccaaaggatttagccaaggagagcattaatattctagctacatgtaacatttggagtcttcacaagttaccaaagagacacaacaggtaaaaacgaaagcatgagcatcccacaatcaatggaaacaaattgctgtaattgcaccaattacaagtgataacaggatcagccaaaggggactgaatttcataacaattgcatccaacacatgtttacccccattgctttcccaatcaacaaagactggaagccaactattataaacatgttacctaacctcatccatagaaaatgtttggaacaaattctatttctagacactatgctaatgaacaaactacaagtgaatgttttgcataaaactaaattagcttaacagtaatattaaaagtatcaacttgacttgggtcaaactaaccaaacaaattgtaagaataaggaaacatccaacattacctgcattgatcgtaataatgcctttaaatcaccattctcttgcatcaactcttgattttttgtctcgtaagcatccacctaacagttgtatgcccacccattaaaaacagccacagcagaaaactaaagaattcaatcaagatggggctatcgttatcagaaatatttcatattgcatacaatttttttataaaaatcattgtcggccttcttcccattccatgttccacgttgcctgccttctttctgtgtaaaatcaacaaaaccaccaaaatccaatggtgagtaaaatcaaaatatgaaactagtgctgaaactagtgctgaattatttgatatacctgaagcaaattcattatctccatgcctgacctagattccttctttttctcatttaatacttggtttagcctctcctgcagtaaaaagtaaaaactcgtaaatttccactttaaataaaattatttttttaaaaaaaaaaaacaagaaaaatggataacaagtaattcagtttataagagcaagtcaaagatacaatacctgcaacttcatgtactctttttcttttttctttgtctcatgtatttgttgagtccttacttgcttcagcaacattaacaaacaacattattgtaccattaagaggttgtctcacattgtcataaaatggctaccaaaatacaacaatgagctaagctaactattaaatatccaaacatactaacctgattaccaatcaccattctttgaaactcatctctttcttgctgcaacttctcaatttgggccttaaaggtggcagtggatttagcttcctgatacacatttcaaaaacataaataacacaacaaaaacagcaaaatttccttctttaaaatagtcaaaggcactaactgttctagtaattgttgctatctccctatctttaacttgtatctgcccttcaagtctctcaactttagcttctaatcttgtaatgtcagacaacaatctgtaaaaggaaatgcaacaatgatattatgatcccaaacaatgaatgcaaaaccgaaaatctaaagagattgtgtcaatttacgttcaattagatccatatttatagtaaaactatccattcaacacagaaaaaatatcgaaaattataccgttgtctctgttcattagcggattccctgaattcaacatcacgttgcctctgctgaattaaagcatacatacaattgcaagtacgagcaactgaaacctacaaaacacaaccaaaataaatattcctaattcaaaaccctccaaacaattcaaaatcaactccgagaagatcaagaacttacaggatcatttgcaaagagatcaagcgaagccggaaacccaaacgtaacaagagtctgattcaaatacttgatgcaatgctccaagtttccaacatcagcaaatgtaaactctctgaacacaatttaaaattcaacacaaaaat

SEQ ID NO: 221829 - DNA, 2210 bp, Cannabis indica
aaagcttcattttgtctagtcgcagccttatccagcttttagcggtatggtagtactcataagttgtaataattagattatttttacttcttttaagactagtttatattataattgcattttgagacaattatctagttttgtatgggaacaaatcttacttggctcaaatattttctaagtataaaattgtgtgtatttatattgtgttttgatgcaattttgtttgaaattaatgcatttcaaactttgaaggtttgacaaattcttaaaacaacaaacttcattaaccgattgaagcattattagaatcacttggtgttctaatcgaaatcaaaaaatttataaaataaccaagaagatatgcaagaattttaaaatatgtgagaaaattaagaaagaaatgtgcgataaacagtagcactcttaacaaagatttatgtccatcaaacttttacataccaaactgtgttctccaaacttctatcaattttaagcgtttattaagaaaattaaacaaaattggacgaaaatctttaaatctaataatatcaacaatttaggtttttaatatcatctcaccaaatctattacagcagcaaagtgttgcagaaagtttgtagttgggttggtatcaacattcagaatatagcaaagttacaagaggtaaaccaaggatctttttcagtacgattgcaacaacgatttattacaattggtatgctagatacaatgtgctttggaattaaaaattgaaattgactaagtttaagagcatacgagtactacttaaagtaaaattttaaatgctcgacattccaagccctgccatagaccgagtcactaaggtcgaataagagatatgtagatgtgcttattacctcaaaaatttggtaaggaccttcttaattgtcgccaaaaaaatcatgagtgggactgcgggtattaggcatcactttgcggataactaggtcacctactcgcagtcttctctccccgactttagagttttaatatcgagcagtacattgctaatatgcaatatttttgagttgtgctcgatcgtgtttctcttcaatcaggtcgaggcataaccatttcccatgtttttattatcttctatgttgaaaaaatcatgacgaatatatctagcatcgacttcgactaggattatggtctcacacccataagatagtagaaaggggattctcatgtggtagatcagggagtggtactattggcccataaaacctgtgataaatcgtctagccatattcctttgcactctttgagttttcctttgattgtgggcttaatgattttgttaaccgcttcagtttggtcatttgtttaaggatatgcgatagtagagaaagccttttgaattcatagaccatctcataaagagcgcattttcttatagtcaaattgtttaccattatcagaaatcaatttataaggaattccaaacctacaaataatggctcgatataaaaattcatggagtttgacaacgatgattgtggtgaggggttcaacttcgacccattttgtgaagtaatcgactgcaatgatgatatacttcaatcctccctcacccttcggtaactcaccaattaagtcaatcctccaaactacaaatagtcatggagtggtaatcgagtttaaaatactgtggggactatgcacataggtcgttatgtgttgacacttgttgcatcattttgcaaaattaattgtgtcggcacgaatcgtgggctagtaataaccttgtcacataagtttcagcgcgagtgaatgtaagggtcaaacctagacataggtgggctaagcctgtgcttagggcccacattttctgggggcccaaaataaaaaacaaaaggtctcattaaacttttattttaagtaaaattaagtatattgtaaataacaaatattcataatttggttagttagggtgtataacacactacacaatggtatgagttcgaatttcgtgatatttttcaataattttttttatgtatatttctaaaagtgagggccttaaaatttaaatagtcttaggcccatatattcccaggaccaaccttggtgaatgtccaccagtatggttgccacatatacctccatgcacctctcaaaggatgtagtcgcactcatcgccattgacacattatagaagtagttggttaaaacttctacaatag

SEQ ID NO: 221830 - DNA, 3875 bp, Cannabis indica
tagtaatagtaataataataatatattattagtaataataaactaaacaatatgctataatatatttacccatatttttattattaacatacctacaataatattcacaaataataaaatattaaattatatctaataatttaattatttatctagcattataaatacccttaaaataaaataataataaaataaaaataataaattttattgtcactaaaaaaaattcatactccactaaattcataaatattcaaaatagtaaattatcctcattgacaaataaaataaaagatattacagaaaccctattttgatgcactttgcttatcctattttgaaactttaaatatacacatccctctaacaattaccaccaacaacaacctccacaaccaccatttaattgctatctccaagaataatctttaccccaaacaaaaaactcacctcacccccttgatttttcatactatatgttcttttttctatttaatttcaattaaatctataataagataatgaaaaaataataaatactaagtacaccagataaacagataattaaaaaaaacccaactctatataattgattctgaaattaattgcactaaacaaaattagagattaaaatcaaattgaggaaaacaaaaaccccatctgccactaaagagatatttaaaacacctgtgataacttaatatgaaagtttcactacaaaaatttcaaaaaataaacagtacacaatccacctcaaaccaattggggttacttaataaactaaagctcggacaccatcaaacgaataaaaaaactcatttggacaccagcaaaaaaaagttgaacagagtaattaattaccaaatggagagtgaatcgagagccattattcaaaaattaggctagcaagaagaacatgaaactatataaatgcatataatagatgaaaatgaatatcatatatgcaaatatgtaataactaaaaatgcatcaaatccaaatattacacataacaactttaagggtgagaagagtatttttattttaatatctgagaaactcaccactggctccggcgtccctggtgcctacggcttcaacaatgtctataaagatagtcaactaccagaatgtgaaaaaaaaaaagtttattacaacataccaaaatatctgtgctggaatattaacgacgcaaagagaggaaggatttcaattatcacaaggttattagcctaagagtgagatattgcaagtgaaattgaaaaataagaaaaaatataaacaaacatattatatatgtatcagagagagatattagatagatataaagatagatttagcgagataaaaattaccagagatgaggagggagcgaatgagaaagagaaaaggagagaccatctgcgactggccagagtttggtttggtgaggtggagctgagagatgggagagcgagagccgagaaagggtgctttcctgcgactgagccgagagagaagaacgaagagagggaggaggacgaacgctaggactaggttgagcgtttgggaacatgaggcaaatatttttggttttggtcgagatgcgcgaagaggattaaagattagggtcgggcttagggtttatgtgagtgcttcacgctgttggaatttatgtaatcttcggtcttggttgagaaccgacactaagaggctattaaacttttacttttagtgtcggttactaaactgagactaaaactaaagaggtcgtttatttttagtttttttaaatcttgttttatggtttagtgtcggttgactaactgacactattaaattttataaatgtcagttgtaaaccgacacttgaaactgggaatactttatagtgtcagttttttgaattaaccgatctttaaattgacacttaaatatattttgtaaaaatacagctatacaagaaacaaaacacgcttatataaaaaaaaggagacatatttgggaattttttctttattttactgacaagcttcctcccaagaacacttagtgttagcttagtcttctacagtccaatcagccaccacatttagtcatgtctctctgaacacgtcctgcttgacgcccattgtaaatgatcatttaatactttaggaacacagccatttagactctagctagccaagagggatgtactgagattcaatgtggcattcctccatctctacctataaataaggagaaaagtcagtgtaaaaagaatggaaactactaaggggttgtaacacttcaaactaatccctaaaaaataccattgtaacaaccaaactttaaacatcaatataagtgactcgtagagtaaggctcattaacgccctaaccacgtaaaaaatccttctctcaataccttaattaacaaatatttagtgaaatttatgtagttgtcaaaaaactcaataaatattttggtgttttcattgagagctgcaggaggctttcatccgttgatttcttttccacaatggtattgaccagaaataaccaaagacctccttcatcacccgatcttcaagcacgctctaaggaagatgtagcatccttggtcgaaaggaaagaagataacaccaacgacctggattataggagagagagcaatgtagaagactatgaggaggatgaatacactaaactcatctctttacgactacaagccgcggaacacgacgtacagttggctgaatagagggaggccaataaaagaatgtaagaagtcgtggttgctatgaagaaagcaatggctacagcaggcctcaatgtggactctgctgccataccacgccacttgacaatgagggagaatgtcgttctcaatcgcaagaaaacctgaaacaaaaagagcggataccaaatccaatatagtatctttctgaagaacctcccctctcaaaggtcaatcctactatagtacctagggggaccaaataaattatgaccattgaaaggtgtgttttttcctcccgcaagggaaaagttggcaaggaaataggctctcccaaaggaagcctagaccccaggattgtagggaatgccaaagtgtatttttttctccaaagaagtaatgaacgacataatgctaaaaggtaaggaagatgagcgcctctgatttatttaagggaaataattaatgccaatcagggagatctcaaaaatcaaataaacatccaaagaagcgaataaatgccctagcaggacgtcctaaacaaggctatattagctgaactggccttcgttaagaaggatttattaaaagtgttctagagacaaagaggtgatgattctgactccaacaatgatgaccgagaatcgtgagctaagaatgagttagaagtagagcttctcaataggattgtgacagtgttacgtgtcagttcttgacctcaaatttggccaaccgatagtggagtcctatttatgactgatatcaatatgtgtacacaataagaacaattaaataaaagggacacaatattttatagaggtttagcccccttagttagtgggtaatgacctactccccttttggttgtacatatattaaagataatcaatacaagaaaattaccttatctcgacggttaagaacccgggagatagacctatctaggcggttatcgatcgtcgaggatctgaccatcgacatcgagatgttgacctatctcagagttagagaaccgccgagataaggtaccctatctcggcggttcaaaatataactgccgagataggtgtgccacatgctctcatatttctgtaatgtagacgctagaaccgcaaagataggataacaatctcggcagtttcttctgaaccgccgagattgttattctatatca

SEQ ID NO: 221831 - DNA, 1423 bp, Cannabis indica
aaaactcaatatttttgtaagttggaaaaaaaagtctgagttatcatgcttttgggctaaccactcttggaccatattaactgggcttgtagtgttggttgtacaggccttatagtttctcttaagcaaatccatgtaggggtggccagcattattgaagactcattgagttggccatatttaattaaaagattttactctcaaagcccaaaggacttccgagctggcaatgttttgaagcaattagaagggaaatatatattattttttggaatggattagaagggagatattgatttcgaatttctctaaatttgcatttgttatgaaattaaggtaagactactttggagctattctctataaattataaagaaaaaattataatttttaagttaaaagccttaaattgagaaaataaaattttaatataatattttgaagaataaaaataaagaagggagtgttgcaatataaatttcacatatacacataacagcaatctttagtgacagtgatatatatagtccacaattacaaatcctttactaaattgcgccattttgattttcaaaatgtcaattaattagatttccaaacaattatatcatgaaaaagcaagccaacaaagtttttgatagtgaataaatttatctatattaaaatataaatgcaagaaaaaaacattgtttaaagatgtagtttcccaacgtccaaatgcaacataaaaagtagacactggatagcgaggggaacattttatattcgacttcatttaacaacatacataaatttaatttaatgtatgctaattaatgaaaaaaaaaatgaaagccaaaatttaaaaaataaaaataaaataatgggagaaatgtagggaaaaactcagtcccttagatgttcataagatctgcgatcatttccgcaaaatcattacaggtctgttaagactcatcacagttaatcgtacaagactcccttatcttccaataatattattatatttagctaccaacttcatggttcttctcatacaaaaagagacaaaaacctaaatcaaagagcaagtagcacgtattgctattgcttcaagggaacgagttcgatgggaatttgatttgaaaatcatccgcaacgaccagatagtgaagcctaatatgaaataaataaaaaggatctgggaactttgacagaaaataaaggaagaaactagagcagtagagttgaaagaaaccctaatagctgcggctattgagacaccttgggttgagattattgatgctagggtataacgtatatatagggaaattagtattatagatccgttgagttaacaacatattatattcatctttaggtttaggtttgggctttcaagagttagaggccttgttaaactttgggcttttgttaaataatgtaa

SEQ ID NO: 221832 - DNA, 1098 bp, Cannabis indica
acaaaaaaaaaaaaaaaaaataaataacgtattgctattatgtcttgccaatgattagctagctaaaattattatctaaaattttattaattataccaataataatataacatgagtgatattatttagatgtaggtacgtaccttacgatgtacaccagatttttggtagtgttccttgagaacccaaaggggagatggtggggtgagattttgaggactctgagcaattggaaccactactgcattattattattattattattacgatcactactactcgattccctcgttactactgctgctgcttctattctgtccatttcttcttccttaattttcagaatatatattattttggtgcctcaacaaattgtgtacaacgcacttaaatagagatcgtaaaggtacgtactattttacatatattatataacaacttttcatatataatattgtctaaaattaaactctaaagttctattgatcgatatatattatataataaaaatttctaatggtaaaacatgcttattactatacttattactaaaagtacagttaattagactatatatactttggatatttaacttttgagtaaaaaagttgttaaaatcccagcaatataatatttgcaagagatcgatgagaaaaacctacttcattaacaaacaatattagacagatatattaattgggattaaattagtttattttgtattttattgattcattattgcagcttgtcgatcatgatagatttattttttcatatattatacgtattggtcggctgtgacgatgtcattaattgattttcagtactaaagaggagtggatcgaatacttaattactagggatcgatatgactcctgatatattgtcactagacgaattatgggttccatctagatacgcatgtggaacaattaatagagtcgattttaatatatagtctacgattcaaactattttattgtctaatatttttgttaatttttttttttttttttttttaaattttgttgtggttggtattttttaaagtcgaaaatatgttctaaatcactatgttctgcaactggacttgggac

SEQ ID NO: 221833 - DNA, 1864 bp, Cannabis indica
tacttttacatttaatctatgtgggacaatgttctccaatactgtgtaagtgtttgatcttgttgttttttgtttttgtccgcggactgagaatattgtggttgatgctttagcgggttgggcgagatgctctaaatcatgttctcaaggtttgctaagggacattgccccctctgtggcaatgagtttgttctagtttgtttggtttctttcaataaaatgacttatttaacaaaaaaaaagaaagaaaagaaagaaaagatgaaacaagtacgctctaaacaacaattcctctctacccattataaaattagcaaaagttacaactggctcaattcgagtcaagagattgtgaattggagtggccaagtgtgggggcgttttaacgttccttaacattgcttcatagtgtgtcttgttgttaaggatcatttccaaactagagaaggttgctacgagaattatttcttgagataatttttgcctagggttttggtgaacatggggaagacataaatcagtatcacctattttttgaatgccactatagccagtgttgcttggaaagtattaaaagttggttgtcctggtttgctaatggaagtcgattaaaagggctgctgagagggatctcttgagcttgacattcaacttctaagaagcaaattttagtcatggtgatagcctcgttggtgtaccatctatggaggaatctaaatggggtcttatggtaaggtttttctaccataagattccattctgattccaaagaaatgaagaattttttaggatgtgtttagaaagctattgtgtaattgaatttgtatataattggagataattacacaatttgacatgtttaaccatgtaattatactgtaactaactgtgtaattcgaggtaattgaaaggttctaattacactcactaatttttatggccctcatgagaatttaggtggcgtttggttgggagaaatgaaaatataggaataggaatgagaatgagaattagaataggaatgaaataaaataaaatttaaaatgcataaaaaattgataaaaaaaaatattatattttttcaaatcttgtattggaacggtatttccttccatttcaaaatggaatagccattctaccaaaatgatggaaaggtcattccatcggaatggtattccaatgattttaaatggccaaacaaatgaatggaaccaaaattatttcctttccattttattcaatttgattacctccaaccaaacgtcacctaaattctcatgggggccataaaaattaatgtaattactaaaaactttttattttaaaattagttactaaaaaatattgctttcttatataattattaaacatttttgtcaaataaaaaaataaaaataaatatgtaattactacatcatatctaaccacctattatattttaaaatataatataattattaccttaataactacccaattatttacaaatacactcttattttgtctaataaaaaaaaggcaagaataaacatgatttagattggaagacaaaactttagtttaatatttgtatagaatataaaactcaggccaagttgggtgctgattaggttgtaattaaaaagggaggttgaagatatatcttgttgactcgaaagacagtaaaaaatttctatatataaaaagtccattgattaatttgcatgcataatgaaatttattagttcggccagctatataaagaaatattatgcatatattaatatgaaagaagataagcacgcttgccacgtcatgggcacatctactttctaattataataatcttatataattatgatataatttaagcacgttatttttt

SEQ ID NO: 221834 - DNA, 1764 bp, Cannabis indica
agcgaggaagcccgaactccaataccgaagttatcgcagggattgaagctcaaagatcaatggctggaggtatatcgatctttcattgtatatataatatcgatatgtttatagtttttccgcattacatatcgtttttatatatgctatatttcatatactatattatagtctaacacaagcaagaggccatcgttgggtgcatttagaagattattaagtttgtttacggttaactcaaatgctagccctttgagggttaccttaacaatatatggagtacaatgagtttcaatgcaagcataaaaagctctaactagcctaggatagatagtggtttgaatttctaacaaggttttccatcccatatgtttaaaaagagaattgaaattgacatactcaagagctttgagatcaccttgcttatcatttagaacatccctttgtgagaagtcttcattgaaccttcttgtatatttaccgtgggagaagaggtcattccttgtcttggacctttgttccctttgttgcactaatgatgaagcatccatggtgaagatgaagaatgagaatagaaaagttaggtttagagagtgggattttgagagaagaggatggaagacttctatttagggttagaatatctgaattggggttagaaaacatttaggtagggtttatagggagaaatacgagtttgaaaggattaaaaagaccttgggatagctacatactgcgaaccagttaatcggttcgtcaagtatgcaggaatctgttaaatgtttattgtagtaggtagtttttccaaaaaaggcttcaaaacatgtttcatccaaccatttgatcccaaatcttttctaacaccttaatatgacaaaacaaaaatgctcaaataagaaaatcctaaaaatgttgaaaattaatgatttacagtaagcttttcaaaaatttccaagaaagctaaaaccttaccaaaaatgagttttatataacgaaattgaaaaattccttttctagtagtttattgatgtgaaatgtgaggtgtaaaaaacttacgaaatcgaaaaatattgaaaaatgagaaagtttggcaaaaaaacactcttttaggcctaaaaacctataaaatcaacaagtagcgtaccgaaaatttgttcaaagcgtatttcagttaaagaaaacctatatgcacactaaatacacttaatttgacatgttcaaacatatagacacacatgctagtcagatatgaaaaaaattcacaagttcacttgtttgaaaataagtctaaagtttaacaaaaatccacataataacatataattttgagtttttagcaagtatagttcatataggtcaagtattaagaaatcttctcatctatgcacataaataatataaatatcatatttggaacgagtatgtataaataagtgagtgaagaggtatgtaatttccatagctaacaaatcttatatttgatttaaattggtcatgtctagctctcttctaatgaaactaaatacctcatcactaagaggcttggtgactatatccgctagttagaattcggtgctcacaaagtctagcataatatcacctctttggatatggtctctaaggaaatggtaccttatgtcaatatgcttggctttagaatgcaaaattgggttctttgagaggttaatggcactagtgttgtcacactttatgggtgtatactcaaaatcaacatcaaaatccttaagagtttgtttcatccaa

SEQ ID NO: 221835 - DNA, 6401 bp, Cannabis indica
gttaatgcctaaaagttctttaggtaataacatattctaataggagaaaaaatgataccaacagtgtaagcatattagagtctcacattggttacaaatgtattcttgatccatttaataaggtgagggcaatccttgagtaacaatccaattttgttagggtgagatatacatcctaagtttcctaatatattatcagagcgggttcaattttataaagggtgccccaatatcaatttgtttacaattgtttggcatagtccatattgttcgttaaaggtcatattaaaatctcacattgactggaaatatatactctatccacttaataaggtgaggaatatcctccgttaatacaagccaatttttttatgatgagttatacctaataacttttctaatatcgcttcatattcttcatcaagtattttctatcagagatactaaatttttcaatttttaagctaaaaaaacataaaagtaaccataattattgtaataaatcctcatcgtgtagcaaaagcaaagtattgttatcggtatttccaaacaagcaacacgtgttcgtttggtgtccccaaatcaatttgcgggcccattttcaaggcccaaacacatagcggttttgcccaataacgaagtcgaaaggcatatggtatggattttgttaagtcttgattgagggctacgtcgaactgacaaatctggagaactaacatagatgaattatcaagtttacaaaaagacacaaatggatactccacgggtatcctggaaggatagtctaaagtttgtcacggaagccaatattctagggtgtcgcaaaaactaaccttttgggattcgtccaacgtggcatgtctctaatgctgaagcccatagaataaggggtctgtcactcaaatcacaattgggaaaagcgtgtagcacaaaaagtaaccaacctttttgtccaatgcccactcctccgactcgcaatgtacatgatcaacaccgtatggccacctacccacattagataataattgttgtacgcacgacatttatccctccattagacccagcctaccaaacccaaagtcaatattgttatctcaaattttgtctacctgatgtggcatgtccacgtaagccaaagatagagtacaggaagggtacaaccctgccaatttcagaacaagacctccatgcaagataaagaaaaattgtcaagcagcaactgaatggagtgaagtgagccctcaaggagttttactaacacccctgatcgaccaagagaagcctacaggctagttagggtgagcctatatatagggcaatcgggatctgtgcacaagttggcttgctaataagtgacttccaaaccaaggaagcttccattcgaccaagggtggtttctacaaggaaatgatgtacaaagctgtctttcacacccaaaggttggcctcctcttggtagagctatagtgacctgccaggtcctgcaggccttgacctgccagatcttgtagaccttgacctgccagatcctataggccttaggcggccagacctcacctgcaggtctatgggcagccaggactaacctcgtaggactctatgtatagcccaaaatatggacagcaagtcattgggctgcgaatttggccctaaaagcccaacaaaatggttgaataatatctagattcaagggcactttagtcttttgtaattatctaacaacctatgcaaatatgtagggatttaaactgtaatctagggtttaggcctcctatataaaggccttaaccatagccttgaaacctaagtcactaagcctccaaatctctctaagtcagaaaccctagcctctctttttctttctctctctctgctacacgcccctaggggctctctcctctcttcatctctcacacgcctctaagtcaatttcactcttacatttgagatctacctactaattcattttttatatccttatagagagctatatcagatcccacctgtaacgatctgaatagtattatccctagttatcaatacaaccaaaagaggattacatgctaactaaggggaccaaaccctctataacaaatatgtgtgtttatacttttctattctatttttgtaacacgtgggaagcatcaaatccatacgaccctactatcgattgatcatggtttaaggtcgatagtttggtgctttcattgagagcatggttatcgtatctgatcaaatgccatggttaatacaagaagaacactagtcacaccatttgcatctacgtgtctccctcaagaccttgaccttccagatcctgtaggccttgggtggcaaagacctccttgtaggtctatgggcggacaggattaacatggcaggactctatgtacatcctaaaacgtggacaaaaagtcatgggctgcaaattgggccttaaaaggccaacaaaatgactgaataatatctagattcaagggcactttagtcttttataattatctattaacctatgcaaatatctagggatttaaattgtaatctagggtttaggcctcctatataaaggccttaaccatagcctagaaacctaagtcgctaagcctccaagtcactctaagttagaaaccctagcctctctttctctttctcttcttctctctactacacgccccaagggctctctcctctcttcatctctcacacgcctctaaggcaatttcactttcacattagagatctgcctactgattcatgttttgtatccttatagagagctatatcagctcccacctataacaatctgaatagtattatccctaggtatcaatacaaccaaaaggggagtaggtcattacctgcaaactaagggggcaaacctttataacaaatctgtgtgtttattacttttctattctatttgtgtaagatgtagcaagcatcagatccatacgagaccgctgtcgattgatcactttttgaggtcaacaaatattatgttgtattttaccccattagtgaaattatttcaaggtatcaaaccctatcgggtttgggttttacccagaaacccaattttagcctataaatatgctttatcccttcatgcaaagggttacgaactttggctagaaactttgtagaaaattggcaagaacaattgtgtaaaatactccatagccaaagagcttatatgatattgactcgtgactaaggctcgttgacgccctaaccatgtaaacatatttgtcttatttactcctaaatcatctctttttagcttagtcttttattaattcagtttccaaaaatattggtatatattttggtgctttcattgagagttgaagaaagtattctccatcattatcatctagggcaaaggttgtaactcaaaacaccttggtcagaccccatgctcgtcaagactgagaacataaagttgttgatgatatgaactgacccccaccagcggacgctcaagcagacatcatgagggaaggtgaagcattagaggtggaaagtcatttgccttggaaaggccctcaactataagaggacaacaggaaaggccttgattagaataaaaaagagggttacaacaagactatgaagaggagtgctatgaggaagacctcgaggtggtgaggctaagacaagcggtcttagatcaggaaaggaaattgaaaaagaggaaaaagctacacaccacattcaagaaactctcatacaactaaaaaaacctggtagctaagggaagcctcgatggtaaaaacctacgagggggaaataattatcctgaggttggaccctctaatcctgtgaacaacaaaggtaaagccaaaatggttgaaccccaaaaaaagaaccatccactgaggccacgcataatgctccacaaaaaaacacaaatgtgaccaacccactccaacaaaaagagaagaccgctggagcccgagggtaagattgtctagtcgatctgcagagcagagttgaccaaaatgaaaggccctgtacttaggtaccagagcctaaagtttaaggaaggaaaaaccaccctaataattttattaactagagtgtcgatgtagaagacttggatcttaaagatagcatgtcaatggtagacctaaggagcacttgaatgttaaaagggaaaattcaaagtgtgtgaaggccaagcgtcgcggaggggacctcaaaaatagtatcaatgattgagcttgtggatgtgaagtcctagacgacaacatcggaaagttggaggatcaaatcgtcaccttaaccaaaatcacagactgattggtctgcaaggaaattggcaccatgtcctatttggacgatgaaaacccgaagccaaagaatttaagaagtgcctcaaccagacaattttcgcatgcccaacatggaattgtatgaaggtcgcacagaccccagggataacctaaccaactaaaacaaattcatgatggtggcttaggtcagggaaagatgcaatttcttcccactcactttaaccaagtattttgaagacttgtaatcaccacatacttaagatatgagattagtaagataattagcattaattaaatatattttatgatatatgtgaataatggattatgtgagccctatttttaagaatgggcattagaattataatttctcaattctagatattttattaaactctaggtgtaatatgtatgacatatgtgtaaaataatatttttataatttttgctcggtaacaatgcaaatgtgacggtttggccaatagagtcacatgggtaagatttagaaccttttaattagtggggtaagtatatttgatattttaatatcgagattaggcaggattgtggtatttgatcatttcacccctaagccttaagataagttaagcttgaagtaaaggggaaaatggttatttttcctaaaggattagtgttggcatttagtggatttggtagacgtcttgttatattctaaatatgttaaataaaataaagaagaattagaataggttacttagaaacataagacaaagttcacctcttcaagctttttcctccaattttagccgtacgagaaccatcaagaactagagatttttctcattaattttagtagtttttcagccagaattaaaggaatattggaagctatgatccaaggtaaacttagaaccctttttcctttggtttttttgaagaattttgttggtttaagcataaaaattgttagaaatggttctgtccgagctagggttagttgtggattagtttctaggttattgttgagttttatgaagcttctttgagttaaatatgttggttgtatgaggagttgagcaagtttgagtttaagaactcaaacttggctcaacaatgatgatttttgtttttgtgagctataactatttttatcacttaggatatgtttatggaggtgtatttaggtgctcaggagcttggtttgaggcttggggttctgttgggcttgaaatgaggttttgtggaaaactacagcaaaaaatggcagaccaccattttgttggcagtggcctagaaaaatagtctgccatttttatagaaatggactaccattttcaagcagtttttttgaagtcttattctttttgtatttcctcgacatttagagtatttctatgctatttatcgatatggaaatttttagttttgagttgaagtcccagagaaggttttatcaagttatttacccattttatgtaaatatgacattgggcctctatttagcaagcaaaatttccattcaggttgaccggcacacttgaattcgaaaacatggtaagattagtataaaatgtatatacatatatgtttgtgcatgtgatatacatgtttatgatcctagaatgaatgaattggtatcataatagcatcgcaaactatagtgttgggtcaataatgtgagtatagtactagttttgactaatacttaattccataaagcattaattgatgatgtcatagcaatacaaactatggtactgggttgacaatacaagtatagtactggttaagagtgatattatgatcaatggtactttttgatatagactgatactatcataatggtacaactatcgtggagggtttgcaacgtgactatagtgttggtagtggctgatgttatgatcaattgttccaaaggcaagaatgttcttaattaatttgttaagccttgtagataggtgtatggcttcctagatgtaagtcggaaagcatttatatgttttatgtttttttactgagtttgtcaactcacagatatagtttcatgtgtaggtaagaagaggcggggctgagctacagtgattccagagcttgagaatgattgtacatatcaagatggata

SEQ ID NO: 221836 - DNA, 1842 bp, Cannabis indica
actagaaacaaagagtgaaaactaaccgaaatatgacccgaatcttagactaattttagcctaacatctataaatatagaacatggtctgatgttattattttttgtttgtacaaaaatatatataaaaaaaaccggtagcatcgagccactatcgaaacaccatcggtatagatgagaatagagagtatggatagtgaacttagaaaaaaagatagcagaaaagattatgtgctaattttttaattttaataagtttgtactcaaaaaatttaatataccttaaatatatgtatataaatttaaatttctctttaaaaaaaaatctcaaactattatgttctcacttttcgtgttcgtgggtctactgtacctatgttaatacatgttgaagttgatatatattgttttaagtgaaaaagaagtgtatgatgatgatgatgatgatgatgatgatgtatattatgaagttgattttgcagtttgcggaaaggaagttttctaagaaaagggaaatgaaactttaattggcttttggcttttggcttttggctttgttttctattattgttattctcttccttgaatagaaaaagtgacatagttttctatagacgtattgtttgagcatattctctcacgggttgggagcctttaatcattttgcaattgaagcctcgtgagtaacatggatgatatgggctaatcacgggttcatccttattctttactaatatatttatatattttttaacaagaagaaattacactcaatattaaattttaaataaatatttgataaaatataatgtatttttgtttgtatgtacacatttacaatagacactattagacagtatataaattaattttttttttttgattaaacatatatatgtatgtatctttattttgtaaagaacattgctatacacatttgatgtagttatttgttttttcttattattttgatggttaaaaacattttcttgaaattactcatcaagtaagatttttaacattatagatttgaattgtaaatgaaggaagccctagataaaaattatgaagaaaagtgtgtgcttacaatttacagttatctaatagtaccgagaagaatgaccgtcatttaataaataaaaattactttaaggataatatgctgatcttctctaagaactcacatctacgaaaaaatttggcacctcgatgacaactctttgccacttgaagttgtagtatgttgtatgagactttcatctcacaacggctcctaaatgatgaaagaaaagattcacacttgaaatatctgaaaactataaaattcttatatcattagttcttatatacttaatagtagtcatgtgtgaataaggatacaaaatatgttatcataataattagatcaaatatttaaagaagaagaaaaattagtagagttatcctacttagtacattaggacaaatgataatttgaaatggaatgttttttggggttatattttcatgtgatttcttgtttattttatgattatagttcaaagaagaaagagtgaagctcactttccatgattcgcttcttataaggtatgatggaatatgtggtcattttacatatcctttacaatatttctttgttattcgaatttaacaaagcaaataatacaaattaggaatcaggacaatatatggccttaagattatttaaatttcaaggccctcactattagaaatatatgaaaaaaaaaaattaaaatagaatgtcataaaactcaaacccacatcactatgtaatgtgttatacacttcaactaaccaatctataaatatttttttatttaca

SEQ ID NO: 221837 - DNA, 2684 bp, Cannabis indica
aagtcaaacctcttggctttccgataacttaggcatttgcttaattgggggttcatttttcaagtcttcatcaggaagaattgaaaagccaccaaagtcattcattgatttaggagttttgtcctgttttattgatctccttgtcctcacaaaatccatgggcttcccaaacatgttattgatatcatccatggcctccttcaagttgattgtggggtcaaccaagccatggtgacaggcattttccacctctggttcatccaaaatagcagaaccaacaaaccgacaaacaactgtatcctctctaaaccttggtcgatgtgagtcttctacatccatatcatcagaaccttctgattggtgatcctttggagttggaaacacaaatacgtttgcacatgaagcagatccattatcttctctagaattgcaaaaattattccgatccaaattatcttccacgcgattttcatcatcatcatcatcaataaaaatactgaaaggttcctgatgaagattgaaattttcgtttctactactgttttcttccctttggtctgctaatttgactccattatccaagctttcatcaataaatatagggaattcattgtttcgattgacatcattattcggtagtcttttgtgtgatctaccaactggagcagtctccagaggttcactaaacatactgtttatggcattcattgcttctttcatatttattgtaggctcaaccaacccatgatgacaaacatcttctgcttcagattttccaacaattgcagtacctacaaacttcgccacaattgtatcatcaccacaaaacatattggatttacccaactctttttcagcaggtgcttgctgcttatttctaggtccatggagatccttactatcagcatcagttaatgtcttcagagaacttccctctgttattttctttgttctaccatcattctcatgaggcatttgattctttacttcagtctcattgccactgagaggggcacccctcccagacaagtactcttttgtagatttttccttgcgctgccagacatttccagacattcagattacagatgtagtaagatgacaggttactctctctaacaaaagaacacaaaccaaactcgcaacatgtaacactaaagaactaccttggttattttattgttgtgtctcttcaggcgacaaaggaattgctcataagatttttgcaactcatcaacgggctctgcaaggctgtcatcaattgagagtttagactttcgatgaaaattacagcttcgtaagctttataaagaagtccatatcgctcaaagtctaaacgccatttaactattagtttttgttaatggggaagagactattcatcaaagacaactcagatacataatctcgtggaaggaaatgtgaacgttctaaaattccaatcacttccattaaagaaaagcagtattagataaatgtaacatctttctttgggtttaaaagttaacgtaatttaattcttaactaatagcatttgtaaaacatgagtagagttgaccaatgctctccatgaacatacttgaacagcaaagttatgagacaactgaaaaaccaacttgatgttatagcaaagaacaaatataagaagcggacatggaatcaatggaacttagatagctcactcagaaaaatcagtaaagcataaaggtaacacaaaataatgacgcccttggtgcctgcctgagataaacaaaccaacaaaatgctttaagaagtagaaaacttacttctgaactcctacatggtacatcttctcagcctccttaaaattcttgctcttctcatagtaaagagcatatgcctggtagaacagagagtgctttgtcccaatatgcttcgactccatggcccccaaaagcgttcttggatcatccacaaaatccatctggtcgacgggttacaaataaagccatgaaaaaaaaaaactactattcaatcttcattttcccctatgcagtgtgaaattaaagaaacgctctccagaactaacccaaatgaaataccgtgcatgagtataaacataatacaactattttccccaaatttcatttccataaaattccatctgttttctcatcatccaaataacatctaagaaattaaacgaaataagatcgacccagaaatcaaaatcatcaaaatgaaaggagggttgggatatttaagttaccaactgcaaccagacgcgaaggtaacgtatgtcgttccggtaacggcgatcggactcgaaggtctgagtgcatttctgaagaaaacgaggaagtttctcgtttagaagttcagatggaagtaaatccttcaactttcggatccctctgcaagaattgagcaaagaagattaagcatatataccgagaggaagagagagatagagtagcagaaaaatggagtaagtttgagcaggaccgaatccaaggaagaagagggtctttgccagtgtaggtctttatgtctgagacaacggaagcgaataggtctttattgtccgccattgatgttcaacaatcaagctcagtggtggtgacgacgatacagtggcgacactgaagcagatggtatttgaattgaattgcgctccattgcctttccaatttctttagttatttattattattttttggaat

SEQ ID NO: 221838 - DNA, 1937 bp, Cannabis indica
gttttggagtggtggctttagaacttatgatgggaaaacacccacgagaactgttggaatatttatcattagctcggtcgcatacactatcagataatatgttattaaaagatgtattagatcaacgactgttacttcctactgggagattatctatggttgtggtgttaacggtgagcttggcactatcatgtactagaagtagaccagattcacgacccaccatgcattttgtggcacaagaattatcgacaagaagtcgtgcttccatgatctctgagccaatgaggactattacgattgagaagctcgctgcacttcaatatcagcagcagtagaaagaataatttcttatattacagttaaagctagtattcatgtaacataataggtaattaactcattccatgcgttgatagttttactaccttaaactgcaatatttctgattcaaaaatattataataaaagaatggaggttgtttttctgttatgggttttgttgttgttttccaagtttatgtcatatagagttgatttctgttaatgacagtagctgtgaagttaattttgatttttcttttacttaattgcatttattagttttcaatttttgttctaatttttgcttcaaatttgaactgaatttgattgatttggtctgctatacttaaaagagaaggatatggtactgttttacaaggccactttgtgttgttgcagtaaagagagggaatgtagctagtgtactattatatggttcgaaagaggaaggaggtgtggaacttgattgggatgtaaggttgagaattgtggaaggactagctgctgctgcaatctcatacttgcacctcgattgctctcgaccaatcctacaccgccatgtgtccttgaacaatgtgttgctcaatcagaattttgttccaaaactctctcactttggcatggctaggctgtggagcccttactcatcatcaaactgtagatgacgaagattcttaggtgtaagtgtgagcattgaaacacttagtgagaactcaatagagaatttcgtctcgtctgtattgtacctattcttgctcaaaaataaagaaggattacggtagtattccagaactagagtagagtcatagatcacatccaactattagacttgaaccggtatatatattggtattgatttccctgtttgcccttattttttatctgattgttgttctcaattgttaatcttgttattactaatagtttgattgttttaagtttagttgttttgattctgcacgtttagtcacaatattcccacacaaataaatagttagattttgataagataattagagtgatgttctgaaagttgttttttgcccagaaaatattgtgaagatgagaattgagacaaaaatcaaatttaagaaacagagaacatgaaaagccataaaaactgtaaacaaatccaattaaaaatttgacagggaaaacacaggaaaaaaaaatttaattatatcctactccatatatatttacttttaatatttgtgtattaatttatagtattttgcgtttgtttgtgattgtaaaaattatcgattattagaggcggctttggatttattttaatgtgattgctttgtgttaatgtaattccccagtatttattattagtattgtgtttgttttgtgattgtaaataattgttaatcagggacgtgtttagaagtgttgattttcttggttgaaatgaattaatcacaatttgggtcaaacccaattaaataatgtgtgtaagatttgaatttattataaaaatgtcagaaaaagagagtttggattatgacttttgagaatcaagaacgtgacactagtttacaacacaagttattataatatatatgtgtataagagaatgaagggaaaaaagaaaaggaaagaaagaa

SEQ ID NO: 221839 - DNA, 2397 bp, Cannabis indica
ttttaaaatagtacaaaatcaaactgttcagtaaaatagaatacctgatatccaattatgtgttatgattatgttggtcatatattttcacctgctagaaagtatgagctttaggttagttatatattaaatatattgacaaaaattgagcttgatcaaggtattattattttgtaacattttaaaaaaatatagggagtttgatttatcacttaacaaattagaatctgatggataaattttataaaacataacatccaaaatgtatttatcatttctagataaattaaatcatgttattataatattaatgcatgcaaacaaaagaaattcattatagtattcatgagagtcttcattattacttacatggaatacaaagaacattagaattttatactttgtgaatcgtcactttcgtcatcccaaaacaaagcaaatgattgaagtgttattcaatgaatttaatttaataatattatatgaaagtggagatctaaagtactgtacgattactctatatatatcttggaaatcaagctcccacttaatggatcccacacttaaattcttgaacaaaaatcttcatattagggcatgcatgtatcatatgaatacatgtatatataattaaaattattaaatatataactattatttagaaggatgggtgggtataaataaggctccacataacagacgattgtcacagacgaacacacaataacaaaataattatagtttcatataataatttacacacacaaaagaaaaactcaatggagatcaacccattcaaagttggagagacttatcacggcgcaggttaacgatactcatgccacttatgtcgattcatcctttgatgccaattctttcttcattatcgttgccaacattctcaggcaatcaactgaaattgttcaaaaatctcttcaggtaaatttttatcattaatatctttatcatataaattgatatatacaggtaattactaaaacatattaaatttcttaaacgtcattatttatatatccaatagatataatatgtaaaacaactttaccatgtatatttagtactcctcactaaatgagttaatttgttacaataaaaaatagaacaacaataccattacatcagaattttgatatataactcatgatatatatttaatttgtgtactaaatttgttggagagaataataaatgtactcatcttacattattattacagggtgataagataacaccaaaattggaagggagtttccacaaagaaaacttcaaaattcccatgtgcctcattaagagtattggttgcgaggtattgtttattactaatttattaatatataagtttaacagttcaaaatttatagtaacacttaatatataaaactaggaaacaaaaggtattacacggttagattttgtttaaaatataatttcttttaataatagaaattaaaaatttctcacaaaaaaatagagatctaataaaaaaaaattaatcaataaatctatataaaagattatcttataatttcataaccgttattatatacggcatgtcactttagttttcaatatatttaaagttaatatcatcactgtatcttacttatagtgattattatcattctcaataagtttgttatgtataaaataaattaatcaaataataaattaaatactcacttttatacaaatattataaatagaaattgaagaattcttttaatatatatatagatctaataaaaagataattgagcaatctatataaaactcattctatgattttataattgatgtcttcacatatgtctgtagtaccactaaatttaaagtcgatattatcacgtaactataatacctaagtgaatctataattttttttaagaaaaaaaaacactcacacttaaagattagtataataattctgaaagtacttttaatattaaataatgttgaatctacaaattaaataataaaataattaattaataatacagtacatatatttgacattttatataatacatatataatttaggatgattctacaatgcacctccttaaaatagatgtattgatgcaccctctacttgtttcggcatccagaaaaaatttttagtctaatttttttcatattcatgtacgttatagctatttgagatatcctacaaaattttaagaaattcaaaataatttacaatatagaaaacaatgtcaaatagtctattttacacgcgtataaaataaaatagtcacgcgtgcaacacactacttgaacgcaattttcggcgtgtaactttttaattcttaaaatttactggaatgtcttaaatagtataatttacatgaccatgagaaaaaaatttagataaaaaa

SEQ ID NO: 221840 - DNA, 1273 bp, Cannabis indica
acgaccaaaaaattcagggagcacgatttagtacatgtcaaagttcgggcaaaaaattactaattagcctgattattattgatttatttgggaatatgttcactgagattctaaaattgatctacacctttttgatcgaagtttatataatataatattattgacagatacaattattttttatgcacatgaaaaagctattagatggagtaaagttgtatatttgtatatagttcatcattgacgacaaagctccaaaattatgagtaagctctgacaagacaagccttttcatgtcattatatacaatacaactcatatattattaaattaatgatggctctattaaattagtgacaagttattttcttgcactactctcactataataccatcatatgcattattatattggctggtgaaactgctacttcagctcaaaagtactttaattatgggcatcatatatatatatatatatatatatcatatgatgatatatatcatgcttggtgtgtcttcaataatgtttacagtgttaagaagacatagctaaataatgtcctaaagtacccatcactatattcattttttttttctcagaatgaaatttaattaattatcatactttaaaaagagttttcattataactacttaaaggagttttcaaacaattatgatggtttttggtaatattttgtattttttttttaatttttaatcacaaaaataaaaataagaattttatttttaaaaaataaaaatacgttcggtaaatatttttattttttaattttaaaaatatttgttttttgtttttaattaagtttggtctggattcgggtcatcgactgagtcggggtctgggatcagcgtttggggctagaattcgggtcagagtttagggtcggggtgggggtcgaggttggggctagggttgggtacaggtgcgggtccagggccagggctaggtttggtccaaggcttgatcaatccaggttctgagtctagtttcggtgccgagtatgagttcgaggtcaaggtgggggtctaaattattgatgaaagaaaatacaaatggattacaattacaaaaaatatgtttaaaaattatttgaaagtgtttttttttttttcaaaattttcaaaattttaattctcattttttaaattaaaaagtgaaaacagttttatagagatatttttaagagtatttttacttttctaattaaaaaataaaaaaaaattgattaaaaaaaatgatacataaca

SEQ ID NO: 221841 - DNA, 1044 bp, Cannabis indica
gtatgaggcaagtctactgggcatagttatcttccaacagctggttctccttcttcatgccctcaatttgaagcttggcctctattagttccgcgataaaggtctcattggcattacacaggttgcgattatcaaccttggcatgctcaagctctgtgaccagcgtaccaacctctccatcagtcctttatgctagcaaagctacctgttgtagtaagcagggataagaaagctagatcttgtggcagaagtcgaaatggagaggttcagaaccttgccccaattgcttgttgcttagtggcatgggctagggcaaaaacatcgacactacagcatgttgcccaagtctccaagggcaactcggaggcattactagacacccagtctaggagttttgctataaagggtgcagtgtcactccccatcttatggaccaaattcttctccaaagcctctacatttattataggcccagttgggggtaggtatgaagaccttctgagatttcagccctcctcatggcagaaagcacgttagcccgcttgcgtaagaatcgcatctttgcttctaagcgttcctccaaagccttctttatctcctctctctctacatagtgtggggatcgagaggaataacttttgtggggaacacaaaccccacagagggaattttcagaagagcagatggatagcatgggcgtggccaacctagctttagctatgagtcgtgtcgctggggttggcccctggtaccaggagcagtttcctgcctttttcttttcctgtaaatatttttgtctcccacaaacatcgaagaaacggctccctccatgggagaccaaaaagtacctattgggaatattttaccaggatctagatttactaacatcctaaatatgaatatctctaaaacaatgaaattaaatacataagagtttaagaaaacctttcattgattgcagcagaatataaggactccttccgctcagatctctaacccttgttcctttttgtcacagagtattatcaagatctgagcttggat

SEQ ID NO: 221842 - DNA, 1604 bp, Cannabis indica
tcttgattttcttccattgttataaaatctctaacaacatcaccaaccaaacccaactcatatattatagactctccaatttcttgattgaagtactttttctttacataatgggatttttttttctcttttccatttttcaaaagcttgttcattttgataatatgcatacatatttattgggttcaagcttaggaataggaaaaaaactaaggtggaaaagttgtagtggggacaatagaattaacactttcaatgcttccttggaaaacaaggccttaaaaaagaaatataacaaaactcaaaaaaagaaaaagtaatgaaagctagtttattcaattttcaatgaaatgactcaaaacaaatccaagatcaagacaatttctttcttttgttgtattgtaaaataacttatagtttcacatcagaatctattttgggggaatatggatatctcaataaaaaatattaaaaaaaaaaaaaaaataagtttaataaatggtgtggaatctggtcatatcatcctactaattattccaataataattcacaataaaagagataaaattcctgatacaaaactcatctactacaatccattttagttccaaaagtaaaacactttatttggcatcatattcttactactgccaaattgatactaataagtaataagtataaagaattaggtaaaaccatcttatattttaattttctacatttaattttttgatttttttgttgcaataatcctttaaattttatcattaaatattaattagattgttattgtgtacacttgtatacacgttacatattttcattaaatttaaagttttactttcatgtgtacacatgtgttcacagtgacaattctaattaatatttaatagaaaaatcaaaggattaagtgtataaaaattaaagaaggttaattacaactttttagccaaactccacgcatgaaattacatgtcagaatatttttttaaaattttttataacggtattcgttataattataatatcatttttgtaaatttttgaatagtttacggcaccgcaaataaaattcttgatatttagtttactacgcgtgttcaaaaaatttcaaacgtatttttagcagtgtaagcgaaattttttaaaaatttacaaagatgacgttgtaagcctaacaaataccatcatgaaaaaaaaaatttgaaaaaaagtatttctacgtatatttttgagtacaaaaattgactaagaaattgtgataagaattcacgctaaacaaaaaatttagtagttaattatccaagaaaaaatcaaccctttttgtgattacaaggaaatattatctggttagcattaacaaggaagtttttattattatgtgttgtgtattcaacttaggaccttcattaatggcaatttaatataaatataagtacacagaagagatgagttgagttgactgtacgtttttcttttttaacttttgactacacaccaaaagcattgtaaattttgttcctttttcttctcatatcttatttattacccattgatgaaactttgtctctgccaaaggaaaatgctttatggtttgtccaact

SEQ ID NO: 221843 - DNA, 2761 bp, Cannabis indica
tatgttctggacctaatagaatttaaaatcatgaaataaatcatgtgaaccatgcaacataaaaatgatttctaatctttattaattagtaaatctcagaatataaaaaatgagtttaattagggcacaaaacccaacattgcacacaggggttttgaagatattatggaccggaaaggaaagaaaaggggaaccgacccagaggttcctacaaatgccgaggtggtgccctctaaaaggcaaaggaaaaccacttcccataaaaagaagacattgtccgagcccattgacctcgaggtctctgatactgagacccaagaataggttcctcctctagttgatcccaacaccaacgcacctcctcttgagacagctcatgcctctgcctcctcgagccaggccattcaaactttgttggccgcagcgggggaggctggatctgaatttgcccaggcgtttgggattgcatgttggtgcaaactcaaggctctcctttcgccttattgggatctaatcaatcttgggagtctagaagagacgcttttgaggaacttggactataccctcatggtaagttggccgtagtattattatttattatttttttgtgttcctcacattcatttgctttcaattctccaggctttttttctctcttttacttccaatcgatgactcttggagcgactcagatatttggagggcgaggtccaaaaatcactagcccaatgcgggctgtgattaagcaacgggacgacgcccagtaggaaatcacccgtctcaaataggaggtcgaggagtcgaaggaagatcttgaaaaagtcgagaaggtcttcaagacccaggcttatgaatttgagaagacgctcgctgagaaggaggccgaacacccagggaaggaagctgaaaccacagaacgatgtaataaggttggcctccgtaccgtataccgaacctggatggaaaatcccaacatggacacaatcttcctagaggaagaggaagagaaaactctggcttactgcgagaaggccaggaaggaggaggaagaggccgaggaagaggaagaagaagaagatctatccaagtctcccaccatgtaggcttggtttttatttatctcctttttttcttttgaaaatggccttttgcccgagataatggttttccccttgtggaattttttgtaaagacaaatttgtgaagttggatggccaactttgctttctaatgccttatacttttaagtttgaacttcaatatgtagttgtttgctagcgttgcattcaaaatttaagcaatcatattttgatcatgcataaagtttcttagggttttccattgctcgtatttctctgtaacgttaagtagttaataacctactttacgtgcgaggagcttatcatccgccatgcactcgatttgcgagcagtcattgattctgcctcacaatcattagtagtgatcttatttcaagaaaacttaaatatacttttaatgaccttgtcactttgtatatatttttattgcttacatgagtagttagatcttctacccacgtgttaggtttaagtactttttaagacactttgatgtctcgtttaattctttcctttagtgcgaaccgttagtattaaactttatacgcgagttatgagttatatctcatttataacatttgattttcctttcttgtcaaataggttttaaataaaaaattatagttgtttgatccctttctcgccaaaaatgtttgatcaggaagttataacgattcgacccctctctcgtcaaaaaggtttagtcagggagttataatagttcgacccctctttcatcaaaaaggtttggtcgaggacctttaaaaagtttttttatttttgaagtgatgggttggcattatattatgtaaatccagataaatttcggttgatcatacatatatgcccctcaagtaattttaaagggttatgctttataaacttgttgaaataaatgattactttattcacaactgaatttcaaaatattacattagcgatgcaatttacaatcattaatctcataagaacttccccaatttaattgttattttaattaatcatccagaagcatttggttttgataaaataggttctgatattcaaggtcaatcccctaacatattcccacaattgtttcaatatccatggtcaatccctgtcatatccccaggttccaggtgaattaatcctggttttagttgtttgtcttaactgctactggttgacgaccagctttcctttgcagtagcgccagccattacgagccgatatttgcttactttgcaatacttttacgtaatttctttaccaaactaactgccccttgtctccctgcaacatgtttcctctcgagataaccgaggtatcccttccttctacagaggaaggttatgatccctggtcgattgagttactggtggatcgagctgatcatgggcattgtcctgccccttcacatattgttaaaagtgtcctcgtgctatgagaccttctatctcatctttcaactgacaacattctttcgtggtatgcccagtatctccatggtattcacatcgtctggttgggtcccttttacatctcacgtaggggttttcatcaaaccgcccaaaccgctcaaaccgcccgcaccgcaccacaccgcaaaaaaatgtggtttgaaattctttgcggtgcggtcgcggtttgaatttttcctaaaccgcgcggtgcggtgc

SEQ ID NO: 221844 - DNA, 2083 bp, Cannabis indica
tttatggaccggatgctactgatatgtacaaggcccaaccctctcttatttgcaacccaccagacttatcaatgatgataattcatctattgggaaccaagaaaaggaagcctcacacatggtatcacccctatcccgctgttaccaatttccagttaccagcttgtcctgtttcggaggaaagaaagatggggagagtcacacacaagcagaacctgtggaaacgaagaagttcaatatgggtgctcatgataagttcgggtagtcgtaccaggaaaagctcaagaagaagtgcttggaagtcttaattcgggggctacgacttcaaacataggatcgtgggtcaagactcgacgaggaagacgaaatgcagagaatcagtatggagagattaatggcgatggaactcaactggctcaattttcgggtaatttggaggtggtgttacaagagggtatcgttagtgaaactcattcggttcaaaattttggcaagggcgaggaggcggcctcaagcatgcccccaccatcatcatgaggtgtctatcttggaattttcgtgggattcgtaggcccacgacggagagaacccttcggggtttaatccatgatacggatgcggaagctgtctttcttgctgaaacaaaggttggtcttgatgatatgtatgcttttatgaatcggttgttgggttttttaaatgtgattggtattccttctgtgggaattgggggtggcttttgtcttgcttggagacaggcgggtttgattgaggttcagcatatttttgaaacggggttccatgttatcattccggagatgcacggtctaccgaagtggcctttgttctgtatctatggaactccctatgtggagaaaaaggaggagttctggaagtggctaacggacacggttgcagaatgcggggagccatgggtggtgataggtgatcttaatgtcattttggatgaatccgagaagagggggggtaggaaaaacttgccccgtgaggggactttcttgcgtaatttcttggatgatacggggggtgttgatctgggctttcaaggggtttggtgcacttggcaaaatgcgagaaaagggatcaagaatgttcggaagcgccttgataggggcttagctgattcctcatggtgcactaattttcctaatgctaaagttataaatcttcctatccttggatcggatcactctccaattcttttgatggatagaggcgagcagagaaaactgaattatcctttccgcttccttgaagtgtggacgtcgagttcggaatgcgagaaggttgtggaatctacttggaattttgaagtcaggggtaggaagaatgaaagattacctctgaaattggcgaatacaaagcgtgaacttaaaaaatggaatcaaaactcttttggcttttgtgatcaaaggattaggagacttaaacgagaacttggggagatccaaaacaaagtgccttctagagagaatttggagaaggaagctacggttcagttaagtattctggagatggaagccaacatggaacgaatttggcgtcaaaagtctagagagctctggatcaagaatggtgacgggaataccaagtttttccacgcatctactgtcattagaagaagacgaaatgctattgaaagtgtggaagagaatgggatatggctttatcaacgggaggagattgggagctattttaaggaaaattttatgaaagtgtttgaatctcagaatcctgtcattggtgatgattttaataccctcttcactgaaggtgttacggcggaggaaaatggatggtttctcgggcatcttctatcgtaaatattggcgtattgttggggctgaagtctgtaagatggtgcaaggtttttttgaagaccaatcggtttgtcctaactttaatcatacctttttgtgtttgattcctaagattactaatgcctctcgatttgatcattttcggcctattagcttatgttacttctgctataaaatcatctctcggattcttacggacagattgaaaaaagttattgatagattagtctcccctttccagt

SEQ ID NO: 221845 - DNA, 1840 bp, Cannabis indica
ataataatttgatctaaaggtgtcatgacaaaactatttatattttttatatttgttcgtattaggaattgttttcaagttttttacattaattttttttttaaaaaaattaagctcaggatcttatttttaccattttgaaaaatactgaatctattttgtcatttcacaaaatagatgatccaatctataatttttgcaaaacacaggatccaaaatagtatttaccaaaaaaaatgaaataaagaatgattgattgattaatatattaattaaaaatggattagtgtcacataacacgtgatttataccaaagtcaatgttaaaatgtaaagcgaaaccaacgtgttttagtcgtgtcccttctttttctcctctcaagtctcccattaattaaccatttttttttatctctaagataatctcaatactcaatagacgagtaatcattactcattattatttgtgaaattttatgattttgaacacttgttggctgagattgtaagaaaacactaacgaatgtacgagtatgaaaaaatttattaaaacttattttgaaaagaagaatattttcagtttttgaattaattagaggtcattttaataaaatttaacgtgaaactaatctttatattcacgtcttagtagtacaaattcattgtgattagtgagaaaaaatattccaagataggttcgggccacattttacaaaggggtactactatcagaaatgtaaaatttttactatttcgataaaaatgattgttagtgctcgagaactatgttttctctcaatatgtccatttaaaaagtgatggacaacagtcttggttttctccctgtgaaatttcacgattttttgaaaatgtgtattgtgagcttttaagtgaacactaagagtgtaagattaagaaaaaaaacttgttaaaattgaccctcaaaagaagaatatttctagtttttgaattaaaggactattttaacaagatttaacgtgaatcaatcttcatattcacgtcttattagtacaaatttattgcgactagtgggaaaaatattttaagatgggtcagggccacatttcacaaaggggtaccactatcagaaatgtgagatttttactatttcgataaaaatgattgttaatgcttgatcattcatgatgaaattttagataattctatataagagtaaactcctcaatttgtatcgtttatgctctttaggttgaactcctttatactgtcttgttcgaccaaaaaagtacattgtcttgttttttcttgtactctagtgttctcgagatagttgctattgatctcgttagtctactagtgacaattattattttgacttatccttagtcacgtaaagaaagatttcaattcataactatgactagtattttttaaggcaatataaataacacatttaattcttcaatatccgagctgcttcattttccaactcttgtacacgtgttgtgacacatgttgtgaccatattaatacttgaaatatgacataacaaaactctttatctcctaaaaggcgttccccaccgtgacaaacattgacaatttctttgcatctccaaagcctattgctccttttaatgcaacttcttcaatttctacaaacacatttcatcatatttcaaatggaaatacacaaaattccactacttcagatgctatctctaccaaatatcgcagagagatccacaagccaactcacttgctagactatcactgtgatatgaccattgttctgttatattattttataatataataaagtatagattaaaaatgtgataaatatatgtgaataatata

SEQ ID NO: 221846 - DNA, 3339 bp, Cannabis indica
tattgctgcagatgatctgaatcgaaacaattgtgtaagttcccctagaaatctcattgacaatctcaatttgattgaagttcaagttgaaagctcccaaaattttcttacgggcgaggaggcggcccttaccatgccccccaaagccccatgatttgcctttcgtggaattgtcggggcctcgcgagagacccgacaccccgagccatctcggtttgggctaggaggtttaaggtggactgtatttttttgatggagacaaaagctagtaaaagttatatggagaatttatcttgaaaactggggttctcaaatatagtaagtgtaggtgcggttggtatggcagggggctcctgtttgatgtggaacaacaatttgaatttggtagtaaactattgtgctgaaggcttcttcgatactactgtatgggatttccaaaatcagattcattggaaattttatgcggtatatggtactccttattcgaatgtaaaagaagtcttttggaaaagtatggaaatggaattcttgaattgccattatccatggatgttgattggggacttgaattgcatttatagtcaagaggaaaaggtgggaggctgtacagtctcggatgtggatactaaatggctaaaaagctttatggatactacaggtggaattgatctccaattcacaggtaataagtatacttggcagaacaaccgtttttcgggtggactaatcagagaaaggcttgatagagctttatgctctccggaatggctactggaatatcctactgctggtattagaaatttacctattgctatttcagatcacgctcccatcatttttgactcccatctgtttgctgttcaggggttcatcccgtttcgtttctttgaagcatggtcttgggaaaattcttgcaagaggaaattgtcaaagcctggtcctctcgtggagattgtgccactgtggcgttcattcggaatatcaataattctaagaaggccttactaacctggaaaaaaacctataaaggagtccatgaaggagaaattaaagatttggaaagaagactagaatggatccagcaacaacctcggccagattcagaaacgaagaagtgagtatccaatcgcaattgacaaccgcttggacaaagctcgaaagtatgtggagacaaagatcgagggagacttggttagcattgggagatcgtaacaccagatattttcatgctgctacggtaataaggaaaagaaggaacaatatttgggctttgaaagataaaaatggcaaagtatggaaggacagaagacatataacaaatgttataaatgcatatttcctggaacttttcacttcgtcggatccgtgtatagatgaggagtttgatgagctctttgtaaagaagattgatgataacactaatgcaacttttgctaagactcctacggagattgagatcaaggaggctgtgtttgaacttcatcccttaaaggccccgggaccagacggtttttcaggatgtttcttcagaaaatactgggatgtagttggatcaaatttggttgagacggtcaaggaattcttcatcagcggcattctaaatccgaaactcaacaacactttcatttgtctcattccaaaagtggattttcctttgagtatggatcagtttagaccaataagtctctgcaacttctcatacaaggttattgcgaagatcttatctaatagactgaggcctctcatgaacgatttggtatcccctctccaatcggccttcattccgggcaggtggattggagaatcttctattcttacccaggagattatccataagattcgtcataaacaggggattggaggtcttatggcggtgaagctggatatgcacaaggcatacgataaaatggaatggtgtttcctagagagagtcttgggtgcaaatggctttgatactaaatgcagacagctcctgatggcttgtgtcaccagcgtatcttattctgttcttttgaatggaagccccatgaaaaagataactccgcagagaggattacgtcaaggagatcccatctctcctttttctttttctcctatgccaggaaaccctctcaaaaactcataggaagagcggaaggtagaggtgtaattcacggcatcaaaattgcacactcagcccccccgtctcccacttgatgtttgctgatgacactatcctttttgcccgagcaaatgaaaatgaagcaaaggcactccttgagtgcttatcaacttatgagaaatggccggggcaatcatgtagcaaggctaagtcgagtgttctcttctcaaaaaatttgtgcagcagaagacaaggcagtatattgggagttatgaacaatgttcaagtgaatggaggggagcgacacctgggaaaccctttcatcttcaaaaggaggaaaaaagaggactatttgcgactcaaagaaagcttattgaagagattagaagggtggaagatgaaacttctttcgtatgccgggcgactaactctaatcaaatcggtgacatcggcaatgccaatatatgctatgtccacttcaaagcttccactgtccacttgccgggacttagactcgttgatgaggaaattttggtggctagggaacatggaaaagaatagatttatggcgttcaaagcttgggacaaaatttgtcatccaaagtgttcgggtggtttgggtctaagaaaatgtgaagaaatgaataaggccctcttgtccaagcttgcttggagccttgcaactgctgaagacaaaccgtgggtctcttgtctactccaaaaatactgtagatatgagaatttctggtgtgttaaacaaaaaggcagtgactcctatcaatggaaatgtatattggattctagagcagtgatcctcaaaggttctgtatctgtagcagcttcgggttccaccattaatttttggaaccaaccttggattccttggttggaataccctgattttgtgtccttgatgaataaaattagaggcagaggatacaccatccagactatcgaatatgtgtctcaaggtaatgaatggaatgctgaactgatacttcaaatatttggtgatgagttaggaaatcgtattgttaagattcctcgaatcccagcaccttttaaggatcaggtcttttggaagcaaaactcagggggaaaggttttcagtgaaagccgcttatcttaccgataataaggaaaggtttgcttcagaggaccagatatggaaatggatatgggagccaggtatcaatccaaaaatatctatcttcctctggagaattctaagtgaggca

SEQ ID NO: 221847 - DNA, 3012 bp, Cannabis indica
tagaatttgggataagttgaataggttccatctcaaaatcaattgataatgagaagagtggctcattcctcttatatattctattatctttccacacattaacgatgtgtaatatacgtttatattatgaagttattaatatatttatgtgagtgggatacgtaagattaaatttccttttattaattgtttaataattatgcatgttcgtgattaatttgtttttttttttttttgttattattaaaactagtgagtgaaatatgtgtaaaagagataagctggtggaggtgtaaatttaaaatctcaaaccttagtgtgctataattttttgttcacgctcaaaaatcattgacgaggttgatcatcaagtacgaacaaaagttagaaaatatttactaaaaatagtgtttagtgtagtactattacaaaacggagagaatatgaatcaatcaagtgaatttgtattgaatgaattagagttacaaaggagtgagtcttacgtagctcaagctcaggatacaagcaattgatgaaaaccagctataaagtaattacaacagatcaacacttgccaatgtaactaactcaactctcatctaactgtttaaactaacaactaactaattcaccacactccctctcaagatggaaaactaacactcatcaaatctatcttgtctttaaaattattgaattgagtaggaaataagagaaccttagtaaaaatattagctacccgatccattgatgaggcatgactggttttgatcacaccttgctgaactttttctcgaaccaaatgacaatctatcttgatatgtttagttctttcatgaaagatataatttgttgctatgtgttgagcagctttgttattgcaatacagcaaggtaggacctttgtgttcaatgttgagctctttaagagctgataatagccatacaaattcacatgttgcatttgccatggccctattgttagacattttatatcactactacaaaaagagctttttgctttgattttcaagtgataaaaagaatttgcttcgattggtgtaaccgacgccatagtcacagacgcaaatagtgatatatttttttgcttctgttatgaaccgacgctaataggttttttgtccaattgtccaaaccactgtaccaccaccaccaccacactacaataaattgtccaattcacatatacacagatttaaacaaccatttaaatctaaaatatacatattcaagctagtgcaccaccattaccgcaccaccaccacgcaatgccaccaccgcaaccatataatgttgagctataatgtttaggttgttttgtacaaagtaattttagctattgttgacgcagtttgtcgtcaactgatataagaagatcttaaaaataaagaggaatgtgataaattaatttaactaaataaaatcgcaataaataaaatggacactagagatttatagtagttcaccctcgatgtcacgatggtaatggggctatgtctacttttatttttattaattcgatccgacacactagagttatattctcaagagtgtgtggacaataatacaataaattttttggtaaaatctcaattgagacccgtgaacacaagactcatgggagactcaatattcataaatttgaccaaagttggtggttgtaaggttctaggaaaattaaaccaataatagtgagaaaattaagagaatggtataggttcttgataactgtgtagagcgatggtgtttgggtcaaggagacttggtgtcgacaaagtatggaagactcaagtaaaaggtgaaggaaaggatatggtgttctttgcagttgtcaagtaagttaaaaagaaggtcctctttacttcagcctcttactttcattatataggcaataagatttgttagtgatcccccacatgtcggggtgtctcactaacaaatcctgtatatcatcttgaataataaataaaaaattacaaatatataaatatctacataattccccttgtttgtaggataaaatcccacaaacattgtgaaaatgattattttcggctaaagatgcaccaatttgaaatggagtgacaacggatgtcacctctcggcttagaatttatgatattaatgagaagtgttgaaaacatgtattttgggatgccattactcgcacataatgccacaagggttgtagcattgttctccaacatcccacacttaactacatttctcaattctctagtataatatacaagtttgcattgtgagccaattttgaactcgataacatcagtgttatatgcgtttttgtaagcatgcgacatggattttaatcaagaaaagttaagaagtcatcaactgccctatctccgcgaatgaagttttgggaagacaaagacaccaacttcgcggcaagagtttccgtgaagggaagttccctgactgctggccatgcgaagagcatccgtgaaataaagtctccatccattctaggagctaaattaagttatcaactcccacgaggagcatggattgttcagagggccctaggcattctgaaacacggtgaaccgggttatgctctttacctgcgaaagtttcacccatatgtgtcagactatggacctagggactagctaggcttttgtaggtacggtgttaatggttgtctcccatgacacactatacagagctgtgtgtccttatgtacctgacccaaatgatccaatggctagggataagggaaatttaaaagggagtagccctaagatgacacgcatctagggcccagctcgtacggtctgacacccttaaatgccatatgggaaatacgccacctaccaatctgacggtgggaattttccccaacgatgatccgtccaaggcatcccatgcaaaagagccggcctataaataccccaaacaaagcacaagagaggaggaccttcattggggagagaagaccgattcttcatgatcaaaagcaaacgcattt

SEQ ID NO: 221848 - DNA, 3447 bp, Cannabis indica
aggtaaattaaaactattttcacatagcactttaatgtgggaaactactttttcattacaaatactattttaatatcaaattgacatatcaaaactccaaggacataatatgaagcagtaaatatatcacccaccacgcggtagtttacttgcttactctttatttcttttctctctcaatgctcgtgcagagaagattggctgatgccgtattcttctataaaaaatagctcttctaaatgcatctaggacagctaactaagactaggagccttagaaagtaaactatcaagcataaaggaaaaactgaaagcagtttagcacatcccgataaatagccttctttatatttatgcacggattgtattattactgcctataactacgagagttttatgaattgtaacaagataacattattattgttgaaaacatttgagctttatcctgaatgttgaaatgaatgcttcttatttgagctttatcaaaacgcaaatttcttttggactgataattctatgcactcctatagaaaaaatcaaaagtgtaaaatattgaagtttgtagtgacctgtcttctgttcttcctgttactactatgttgaggactttctttactgattgtgtgataaattgacttaacacattgttcttgctgttattttgttgatattatcttatgtaaatatatgcttgtaatgtcagaaaactatgtggattggtccagtgaaatttcacaacagcagctgtataagtggagcatctaaactagctcaaattcttactcaacttagtcaaaatgaatgtgatgtaactgttgttgggaatattgcatgtgaagcactaatgaaggaaccaaatcctgtctctgtttgcaatatgatatacaaagcttcagttgtatgggaatatctaaaaggaagaaagcttccaggggttcttgccttagatagggtatggtttgtcttcttgatctgtttcgtgaataatatctacaactcatgtaaaccaaaccatgactgtgagttattgtatgaccgaaactttttcgaaatttgtgtcttatatctaaggttaagggtagcattgcctatggctagggacataaggttaatatacttatatcattttatgtaatgtataaaagttcgtaaaggtccactttcaaagtattggtcgttaactcgttattttcaaatctcaacacaatttcttggtgcaggcatatccatttgataccgattggaattctgtgtatgttgatccatctaagcctttggtagttgatattggaagtggtacggttaccctagcccaccctcatttttttttcgtactcctacctattgcttaattttcttattgcttagtgagtgtaattgaaggttaattagaaaagaaatgaagagtaggcattcctctcaaagttagcaagtatagatgaaaatgatttcacccgagtaggactataaaagaatgagatggattttcaatatttctgaatgaaatattcctagttacattttgctttattaggttgtaattgctattctttttttcctccattaactttcagatagtgaatgacaggcaatggaatttttcttctgggaatggccaatcaaaggaaagatttgaactttcttgggttagagatcaacgaaaaggttattttcctttcaaattttcaccctggatcagtgaatcctatgttcttagtcttcactgtataacaattgcttttgcactcttctttcagctcgtcagacgttgtttggattccattcatagacttacgatgaaaaatgggtatgtacttaactttagaacctgtaggagttatggcattactgttgatttgttggtctaacacgttcaaccatttagcttttagaagatggttaaaactaaacgaattatcaaccattaagctttacaaattcacgttctttttcctattaaagaatcaattctcatcagttgttttgaatgtgtacagattttgacttgtattcatcttaatttctcttgaccagtgaatctaatcagtgttttctttctcaaccatgttgatgaaagctgaatcttttatctggcctttgtgtgttgccattgtctacatcaggtacttcattgcgacgaatgcaacatcgactttccgttctattgtttctagctatcctggagagttgtttcttgtgtcagtacaggttgagaataagcttattagctattgtcattataaaaattcacttctagaaaaggctcaaatggagttccaactgttgaattgtaaaattatagatagtaaagttattgctatttcatcataataagcaaatataggatacagtgaatgcatcccagtcaattgcttcaaactcaaacaaagtcaattttagtttctcgtagtgtcattattactcttgcactaccatgatggtttttttttttccaataaaattgatagtatagtcaaataatgttcaaaatagtaatttcttacaagtgattatctaaaatcttatttttaccaaatagttaattgtgaaattttaagttgaggttggaaatacatattcatctatcatttaacatttttgacatacaattatgaattatgataaaaagttgaggagagcatatgtactccccgagcatgatctggctcctgtcaatgaatatgaaatatgatatggatctgtaactcaagtaggacctcctttctttctcaatgtagtgcccaaatcctgatttcaacaatccagaacatagatggagaatggtacagaggtcattggtagaagctatagtggaactccttgtaccaaatgggaaggtaatattacttttggaatccacattggcaaaaaaaaaaaattattcatgtgacacctaaagaaactcaattttaggacctcattttccatggtttttagtgttgaaatttcacaatcgaatccatgttaaatatatggtattgatttgttctttatgtttctcatttctttcacctttatttggggataaatttttgtattttccaggtctttttgcaatctgacatagaagctgtttcactgagaatgaaagaagagtttctgaaatatggcaaaggtaaactagttgtgcatgaaggaggcaatgccataacaagtgaagggtggctcaaggagaatccatttggaattcggtcagattgggaacgacatgtcttagatcgcggtgatcctatgtacagattaatgctatctaaattaaccaatgttgaaatgtgaagctattctgagggtatgatgtgtgaaaaccatcatcaccatatgtgtagtgattgtctgattgatcatcttgaatagttcatttgtatggctaggtggttagccagttttgaatcacctccctttgttttgaagcactctttttctgagctatatagtaaaaacataa

SEQ ID NO: 221849 - DNA, 1326 bp, Cannabis indica
  modified_base (39)..(39): a, c, t, g, unknown or other
tcaaactaaaagtaatgagaaaggctactttaatgctanctttttttttttttccattgcttaaaaaattctaaacagaaactacccaaaatttagtagggttattttttaacatacatgtatacttgaattaaacatataatatattattctaacaaccacacacatgttcattcgagaataaaaactagaaatatgtgactataattggttaagtggacccacataacagatagccatgccagccatttggtaggactcacacaactgtggaacgcaccacttattgaggaccaaacatatatcctttcccttttacaccaagttgtaagtttactttacattattacgaaagaacctctcaaagtgattccctaaatctctttcaaataatatacaatgacataaatattggtcttaaaagtgagtcaattcccttaaatgcttctcatttctttataaaggcattgatatttttttttttgaacaaaaaggcattgataattttgacaaacttctcatttcttttatcatctttattatcttaacatgatatagcaataaatgtagatatatgactagagtgagtgatagtgatatattttcgctagcttaaaagtaatttaggggattgaatgaatcaattggaatccgactctggtcaattacatgttcaaacccacaagtcgtttacttgggaaagtcctattttaagattaaagttaactatggttaggaaaaatgaaaatataggaatgaaattggggatgagaataaaaattaaagtagagtagaataaaatttgaaatatatatgtatatacatttataaaaaagaaaaaaataaaaattattaatttttttttcatcatgcatttgaattattttttcttctatttcaaaaaaaaatggtaattttaccaaaatagtaaaaaagccattctattaaaattacataatttttgaaaatacaattaaacaaaaaatttaaataaaaattaatttatttccattttattatctccaacccaatgcaacttaaaatcttgcaatcgatcaaccaatcttagaggaggactaatatagtagtcactcataagtcataattcacactattttattttattttattttatttgataatagtataagatatttgtgaacatactcttacatgaattatataaattaataatttaaaataataccttcagaacaaattagaagacttttcaaataaaattacttttaactattttgtttttaaaaaaagatttttttttgtttattttgataatcaaaaaattttatttttagtcacaacaaa

SEQ ID NO: 221850 - DNA, 1904 bp, Cannabis indica
ctcttaattaggtcataggtatgaagctcgaaggctcctatgagagattaatttgaatccttgaccaaataagaaagaaaatcagtaaaaaaacattcctattactacaccaaacaacacgtaattacctaattactatttgatgtatgcatatatatttttatgttgttactatttattatatttaacttttaaaaactcttataaactatctgactagcatttttttttaaataaaatatatttattatatttattatatttttatgttgtcacagtagcatttaatgccaactagtattaaaatatatatcattttataattattattcacacactttttcttatattaatactattaaatatcttgtttaataatattgatgctcctatattagtatatttatcaatctattagtgttatattatgatacatattgatttgagttttcaagagtcacaaattgaacttatgttgttggtgcaagttggcattggctgaattttgaggtgtgaatgtattcttttgaagctttgaaggatggtgtaataagtgctttaatggatctaataaaagaggaaagagtcttggtgaaatattgatatggatttaagagaggaagagacttggaagtaattatattttcatctggaacatagaaaagctcataaaagaagtctaacttattgaaagttgattttctacaagtaagaaagggtataagtgcaagagggacagaaagaggagcagtgagtgagcttgatgattcgtcgaagctagtcatagtggaaagtagagactcgtgacattagttgatatccaaaataacttgtatgacatataatttatacattattatatacttaatagtattatacattattatatacttaatagtatcatacagaattttatacaaattagtttctagtttctaatcatttagattaactacaagttggtatcctaataattttattaaccacataccaatagaagaatgtgttcctcttgtgtatgagggttttttctccaggcctctgtgaaataaactagggcatgtcctttgatatccctttccgtcccaactaagcttccaccatcaatacttaccttcaccacctgttgactttttgcccaccctacttgattgttcctctgcccctagatccaccatatcagagcatttaattaacctccactctctccttcagtggtttacgacattatgttttttttttctttctcttcatttattgcttctcccccaggcaacgctcaaatttcccccacatttattgaagctccaagtttttgcatggccaccccacactctacctccccattttcccattccttaatcgtcatccatggctcccctagggggaaaatcatgattactcctactcagctcctctgcaacctaaagagaagaagacgaaggcggaaacgatcaacatcttcctattttccaagtaaacctttcagttccaggcatcaactactcttcccctcactcaactactatttattattgttttgtttccacccatgatcatcaccttgtctccacatttttggtatcctatccttagaaaacccatttatggtatatctacaccctcccgaaaatgtctacctggaataatgattccctaaacctcctcactcttagtctcttatagaagaagaaagccttattcacgacttcgatcatatctccatagggtctagctctaactctgaaaactactgtcttattgtcaagatattttcttcaaaatctctgaaacccaactggattgagaaagcaatgaagggagcctagaccttccgtttcctaataaacttcactaattaccactctggcctcttccttgccacctttggctgcgaaggagat

SEQ ID NO: 221851 - DNA, 3975 bp, Cannabis indica
tggaaggcattgagcatagcaaattccacattcaacttgttggtcattcttctgggaaactggggaacttggcagttgagtctccaaaaggcatgttagattctcaacaaaagagctatccttcttcctgtgcaattaaacagagttcacttactttaacattcaaaagctatggaactgttgtattatcaaaattaattgtaaatgttttggtccctttcttaaaacatataataagttctacaacattatgataggttctaatctgatcgtaacagttgcagtgacagtagagtaacaaaagagaggaaatgagacagagatgagaggagctgaatgattctttgtattgattaggtaaatctcaggtacaagtgtgaaggtagtttggccaagatacaaagtctctaggttcctatagccgaatacaccctctacaatctcataggattgttatttatactccaagtgatccagctgaaatataacaaactatcctaatacaaaaaactaattaatacttaggctttctgttttgcctggtatatgttatagttgttggggggcctattatagtactccaaattacagtaatcatatactgagaagagccaacctttaagatgaaggttgtcatcatattgccttacactgaacgaatcatcatcattatctgagttaatcaaacaagttcatgaacaagaggatgtttcttcttaagttccaaatggagctattgtcaagtaataagactacacttatttgtgtcatgcacatattgaagtcaaaactcagatccatattcaaggaaattgcatagtcataccactgttttctatttctttgccaattcattctcatcatgtcgacatgttgacctgaacctacaaaacgaatcctaacccaacttaaaatattcatactatacatacaaaatgaaaagtttgtggaaataatgattccagttactaatttgctctgaaatctcactctggtaaagatctaggatccatgacattaatagacaagataatgaagcaatcattccctgaaaatgtttcaaacaatatttgttattttcaattgatgagaaatgccaactattaacacttgagctataaaccagataagtcacctatattgattgaacgagaggacattgccaaggatgacatcttatggtcaacccatagtgctttatcaatatcctccaaagtagaccaaaattcctggagcttctccaagtgcttaacaaaaataattaaaatccatcaacagactaatacagatcatccttatagccagaagcatgtaataacacaacttatgaaactatatcaaaaattacaagcctgcaacttatacctcctgaaactgctgcaccacatttttcaaccttgagtgtgttgaccattctaaatcgaaaatataaggcacatcctgagaaagaatcctttttaattcaacaccagaagaaaaatttaatttttaaagagacatcatcaaacttaaaaaagtcatactgctgaaatggagggtgggcatttggggtaggttgtgtccaattgtatttcaaggaaatgtactctgcccttcttatctctggttgtagaaagcacagagtccaaagatgtgagtaagacagtacaccaatgtaataagttagaaattggcagctaaaacaagggacaaatgagaatagtaaacaaggaaaatacatttacaaacaacaccacttttgttagaaacaaatggtcttgaaggtactatgggttttagacttctagataagtaaaaattgtcataaccgtgttgtttcttagaagtttagatcatgaccggtaatataattgtgataacttgatcattaatcatatgttttcaacagatcaataagaatcatcttaaaattttatatcatatttatggagaatacatagtttttctcccacactcttagttgggaagatatggagaaaatgaagttgggatccttttatcccaatatggaggacactactaggtgaatggaacaaaaaagagtaaacatcttacaaaatgcgaaggctaagaaatgttaggtcaccacccaatctccctagatgttcccatccaatctcttctatctgcatatatatcatcaagtgagaaaacaagttactaagacactctatgccagaaagataattaaggaagtgcttttgatacagtgataattgaaagttcagtgtattaagaaattgagtaggaaagataaagactggttggaagctttacataaagctttgtaactttggttgtaacagttttgtgaagcaatatacagactctaatttaccaaaaaaatagttcatagtgtaataaagatatacgtagagaacatgaaagcaagagttgtttgacatatacacatataccaaacttaatgacttccaaaaccaaagaatttacaattgcacacgctctcctaatgagatgactttatttatgcatcgaaaaatagaaaacaattaatgaacatatgcagtttgtaatatgaaatacaaaaccaatgaccaataaaacataatccataaaacatttatctctttcaatgaagattaagcacaaaatattgaagaattttaagtagactgcagaaagatgcaatgaattgatgcttagttgaacaaatatatcatcacagattcacagccaatgggagtcaatgagagaaagtagaagtgtttagaatgaataaagctcaatgtaaaggattagattagagcaaatctgtaattctattccagccccatgctgtacaaatatggttacacaatctaatctctagactaacaaactataacattagtaagtataacagcagaacttaaaaactttacacaaagaagcagttatgtacatgtgtaatcaagtaggttgggtaggcatatccataagaatataaataaattttacatgaatacaagttttcaagaaaactgatgcatatataatttaaagggtcaccatgacaatgaatattcaacaaacctccgagtacactaagcgatgaaatctagttgatgtgcacaactcttcacttctagtctgctcaccacattcctgtgcaatcattaatgttgttcaatacgtacatacatcatagtatcacacgataaaccaagacacacacacaagggaagacatgaatatatatatatatatacacatttgttaaaatgttcagagaatctcctagtcagcccacatcttcttgcttaggtaaaatcattacctttggttaaacataagactacaattttgaagatgaattcaactaaacttaacagaagcacctcagtaactattattttttttattattattattttcccttgaaaagcttaaaacagttagtagtaacctgccattttttcaaaccttccagagtttttaaagtaaggaaatatattatatctctgctattacaagaaatgttaaattttctctgtgcacgtatcattactcaaaatttatgtaaatatatattacatagaaaaaaatcccctataccccacgtctacaaaagagaaataagatcactacaaagcagtatttactattttgcaagaaaaacgtattatttgattcgagtagttctcgtgtgggaatttgtcaaacaggtggtgagcatgatgataaatcgagcaaaagcagaataacaaaaactgaataatcaatatggggaagcaaattagcaaagaggagaaaataccattgggattggatacagtaaatgaaatgactgtcaccagtttgtactctagtgtctccttgctgcctttcagtaatattttcttcttccattcaattgatttttttttttttggagataaccattcaattgatttttaaatcaaatgattttgtttttttttttttttgttttttgttttttttctttttgtcctaaggattataaaaaaaaattag

SEQ ID NO: 221852 - DNA, 1093 bp, Cannabis indica
aacacaatatttttgaaaaatttcagctccatagtaaaaaaataaaaaagttgaaaattctaatatgtagtgtaaaatccccttgataattagagaactgtagtaagtagtagatttgtcctttcaaaaagatgaagaaaaaatagcagatttgtatatattaaaagaaaagaaggtagtagattaatatataataaaagagaaaggggtagtagtctaggggtgttcataaaatagcggatccaatccaatctgcacgatttaatccaattcaatttacaaagtgcggatatctgcatttgtgcggattgaattggatgaacacccctaatggaaatggtttgaaaagattccaaactatgaatccacttaattagtactaggcaagtgaaggatccaatttcactttgtgagatgttcctttccgaacgccttttggtttcggccctcctacgattttggaatggattgtgatgtattaaatttgaaaattaagggctcgtttggtacgtcgtataagggtcgtattgtattaaataataaataacactatatttgaattaagtaatttattgtattaattattacgaccaaattttttaatacaatgtatgttgtattatttaatacataataaatgatccgtattagcttgtattataatatttacaaaggatttggggtcaacaccaatcttcaacccggactcgggaccccggacctggaccccagacctccagtctcgaaccggaacccagacccgatcctggactctaacccaagactcagacctagacccagtaccggggacccgggcccgtagttggtgttgggattgagtatattaaaaatatattataactttacaccatcaattaatacaagtcaataccaaacattgtattgtattaaataatactaatactaatacaatcaatacaatacaatacattacaaaacagcgtaccaaacgagccctaagtgattaaatgtttactttcaaaaaaaaattaaagcaaaataagttaaataataataaatttgttaataaaaataacatctaatacatataattttattaattaaattaaag

SEQ ID NO: 221853 - DNA, 2672 bp, Cannabis indica
ctaaaagtaaaaatttttgtaacgactctctattttgttttagaaccttttgttttgcaaaaactatcactttagtatgctcaatgcatttaaaattttaatattctccaaaataccctattttaataattagtctgattattgtttaatttatatcatattatgtttatttaataatagaaagcataaatttaaaaataagaatttatcattccaagatatttacagtgcccccaattcattatcaagccactatttgctctttacagtttaccctaggatgactaccttattaaaattatttttgtaacatagaccactattgagacctgaaacagagaacactaaaattgaatatactatggtgccgtttggtaacacttttattttttaatttttaatcacaaatgaaagtaaaatttttgtttttgaaaattttatttttgacaaacaaaaatgcgttctataaccacttttgtttttcaattttaaaaacagaaaacaaaagtgtgttctgtaaagttcattttcatttttattttttgatttaatttaagtcgggtatataggttcgggttaatattcgggttcgggtcagaagccgggtttagcgccagggccatggggaggtgatttgggtccggatttggtcagagtccaaaatattgataaagaaaaaaaaaacatgtttaaaaaaaatattgaaagtgatttttttttttgtttttaaaatattgatttctaattaaaaaattcgaaagtgaaaacagttttatagaacgcgttttggaaaaatattttcacttttccaattttaaaaagaaaaaactgattaaaaaattgttaccaaacaccacctatataatagttacgtagtaattataatttccatttatgaaaaaagcatacataaaaggtagcttggtttaagaacaagtacataagagagaaaaaaccaaaagccacacacacatgcatacatgcatatgtttaacattcttattcattactacttatagtaccatcgattgacattattatatcgatatatatagatatatatttaggtgtcaatcgatatatacatatatacatacatgatttacatataattactcatgagctctacaaactcccactggtggccagattcgaatgggagtcaacacacattcacatccagattcagatgagcaatctccatgcgaagatatctttgggatcccaggtaccgttggatcgcagaattcgccacattttttagtcgcctttataaatacatccacatggttattattgtccgaatccgatgagtaaagatgaagaagattatcattgttattcatgaaggctcgcggcccaactgcataactagtagtgaataacaatgataaaacacatatcatcatcatcgtaataactgatgatgatgatgatattgacttcttattattcttactaattgtatactccattattttttatttggtaggatattttctatcacactttcactttactatttatagcacttgaaattataataagtaagacacaagttatattatattattactagttattagggttacacaaaatacaataaatacatgtagtataaagtgtaactactttcattattattttcttaatatgtgtgcactcaaatataattttgtgattgaggtgtcattttttatttatcaatttaacacttacacaaaatacataataagttacctttaatgatattttttagtcaaaacttaaattttttgtgatgaaatgtgaattttggttaaaataaaaagttatttgtgactaaaacatagtatttaaatacaagttcttactaatttagttgtagtcacaataaatattgtgactacaaataaattttaatcacaacaaacttgtgactaataccttacgacacaggtacttttagtcacaaaataagaataataatgatttataattagtcacaacttttttacttatagttacttgctgtgactaaaggtaaaaaattttgtaatgacttactaattaaaaaaaaagagcacttatattaatttaagtaaacaaacattataatttaaatacaatttcttcgtgattatttcatcaataattactgtctaataatatcatagatttgtaaagtgaataaatggagacatatttttgtaaagagcattgctattaggcaccaatggcgcttaacactttctcgacatgtcgcgttgcgattggctagcgatattccttaaaagttattatattaaattatatgggacccgatacttagttgacccaataccgattttgacatatagaagggtgttaggcaccactagtgccctttaacatttctcttttgtaaaatctggtttcctaagatacaattttttagaggtaaaacatactaaaattataattgaaatgggtttttttttttttgtaaagataattgaaatgaagtgttgaagtacataatatataaatacttaaactacttagtgttggaatttgcaaatatattaatgaccacctaggaaatatatatgaaataaatatgtatgtgactcagaggtatatgttaagaattaaaacattcatatttatcatgtacatatcctcactatatcgattttatatatatatatata

SEQ ID NO: 221854 - DNA, 3933 bp, Cannabis indica
atatagatattattatatacttataataaaaaaaatatatttatatataaatatttaagttaatttaatttttctttatccattttttgttgaatttttttcaatttttttttcagcctatgaaacaaactcaatccatataatataaatataaaaaaacttaaaagctcaaaattttctaatactatcctatttatgggtaatatctattaagagttaagagtacacccatatatacataggggtgtttataaaatatccaattcaatttgcatgatctaatctaatctacaaagagcgtattagattggattagaaaattcaaaatctgcacttgtgtggatcgaatgttgattgacatgtaaaagtgaccgaatcaatccaatctacatatattttatgtatatattttttaaaattatatatacaattaatattttaatgtaaaaaaatagtaatttaaaaatctaatacatatgatacaaatatattttaaaacttaagagatgaaatgtatatttcatttttttaaagggaaccgatacaggttaaaataacaaaggtaacaaagttacgcaaacaacggaggatttttttttcatctataaaagttcattgtctatcctaaaggcatgcaaagatactccagaaaaattagacaataaaaccttaatatcaaagaagaaaaccttaaaactgagagttgtgactttcaaaccaatagaacacctacaaaataaagaaaaaaaattaatatataacaaatatttgataagaatataaaattttatataaatattgtcacatagaattctctattataaggctagaacttatctattctcatttccattactgaaagtgactataatacatttgatgtgttattattagaccgaattgaccttacaaaatcaaactagcaaaatattggctttaaaaaactaaaactaatcatactagccttacaaaatcaaactagccatactgacattataaaactaaaactagccacattggtcgtacaaacaaaactagctaaattggccctacaaaataataaaaaaaaacagccatttataaaactagacatattggcttacaatccgaaatgtcacattagctataaaaactaattaaatttgttcttccttagaatttgttattttatttattttagtatgttgttgtagacatcaaacaacaataatttattttattttgttgttagttatgtaagaaaatatatatttttaataaatattatataattcaatattaaaaagtaaccaatctaaaataaacaatccaacactcgcacttttgtggattggattggattggattgaatttgagatatgccgtagattggattggatccaaaatataaaatctgcacttagtgcggatcgaatgcattatgagcaaaatagtacgaattagattggatgaacactcatgtgtatataaatatatagatatgtatgtataaacatatatatactaggttgatattatgtgcaagatatgcttagtttttctttttttcattaagtaattgttaggctatttttagcctaagtttcggggcgattttagagttattttttttttttgttaatgttatcttttagaatagttttatgcttgatttcccttgtttcaggtcctcgaggtattagagttcaaagtctatcaattggtcaaaacatgaggcaatctggagaaaaatctattgaagctggaaatttgcttcagtagtcgcgaccacaaaaatccatagtcgtgacgaattatgtggtcgcgactatgaagctaggcaaaatgcttgatttttgagttttgcttatggtcgcaatcaggctttatgtagtcgcgactatgggcttaaacacaggaggttttggcaattttggaatttcgccattcagagatatcagtcctaattcctatttaaggatcttgtattttagaagcaaaatactcataaattgaaccctaaaactaaaggaggtagcaaaggaagcaattgtggcgatccagagcaagatcaccaactagttctttctttttccttatttatttctttatgttaaattttgtttcacttattattatggatttgcttatgaactaaattcccaatttagggatatgatgaatgttagatgatgtttcttcaatttagttaatgtgattattagtttttcttccctatattgtgtgatttgctcttatttattttaattacatattttagactgtccatcttaaatgtgatttatgatcttaatataaaatcagagaagtgaatattaggaatgctctaataggacaaaacataagtttgatgtaaaccgatagtatttacatagcttacatgatttttagattctgaatttaatgcaagttatatgttaatttacttcaaagatgcaagataatatatgatttaagatcttaatgatctgagaagagttatggttaatttgataatctgtgatcaccaaaaggaagagaattaataattaacattaacaattgggaaactaaactaacaggattcatattcataaacattcatccataattatttacactttttattgttattttcctgcttttaaattttcagttttattcaattcttttttgtcaattttactaaatagaaacacaaatctaatttagtagtactcaataacaattccctatggatcgactctagtgtgagtttaaaactgcaatagattatgtatacttgcatagtgaataaaaataaagtaccaagtttttgggttgttgccagggaatcgattaaatattgatattacaataattagattaaattctactttggtaaattctttttacttattgctaatctgtttcttttaaatttttcttactctatttcaagcattgggggtgcatgcgacgtcaaggacaaagtgtaatactacctgttgatcctaaaattgagaagacttgtagaagaaacaaaaggtagaaagaagtgcagcgagggttgaagcagaactagtcatggatgacaacgttaatggcggtaacaatagaggcaacaacaataataatggaggtgccgtagaagactatgcaaacggtcgtaatccacccaatcgtagtttgagggtctatgttcttccaacattgacgagggttcagtcagtataagaccacctgccgtagaggccaacaattttgagataaagccaaccatactccaaatggtacaatcttcagtccagtttggcggactaccctttgaagatccaaatctgcatctgtctaactttgtggagttatgtcaaacattcaaggtgaacagagttagtgatgatgctatccgcctgagactgtttccattctcactgagggagcgagctaagagttggttggtgtccttgccacccaaatccattgctacatggactgacttggcaatgaagttcttatcgaagttctttcctccagctaaggctgtcaagttgcgaggaaagattaataatttttgtaaactggacaacgaatctctctacgaggcttgggagagattcaaagatctcataaaaacatatcctcatcatgggatcgaaaagtggatgttggtccataatttttacaatgggttgattggtaatacccgaacaattatagacgctgcaactggtgggacatttatgagaaaaagtgcaaatgaggcttatgatttacttgatgaaatggctatgaataaccaacaatggctaactgagagaagccaatcaaagaaagttacaggtatacacgaagtagatgccatcaccaagttaacagcccaagtggaggcccttacaaagttcatgactgctcaggcgaaataagctcaagttacatgtgagctatgtgggggccctcacacatatgacacat

SEQ ID NO: 221855 - DNA, 5838 bp, Cannabis indica
caggttttttgagacttcttcttcttttcttctataaattttcaatccttagtcttcttcacaaacaaaattcagccattagtgattgagtgtatgcccacacataacaagtgagtcctcaatcatagatgtaagactgtgaagaatccaaataactgaaggagattcgggctcagatcttggtgatactctgcgacagaaaggatacaaggattagaaatctgagcgcaaggagtcatttaattttgatgcagccaatgtaaggtttctcataccttttatgtgtttattttcattgttttagaaattcatatttaggttgttcaaaacatacttgttagtaaatctagatcccggtaaaagatattccaacatataggacgtacctctgaaagttagccacactcgccaacctgagtatgttcctcttctccacagggagggaaaggatgtgattttcccaatccctcatcttcaatatagggatggagcacttgtaaaacggcactcactggaagcggtagtgtcggatctcattgatgtcccaagtaatgaagtagttctgggcatactcaccaactttggacataggtgtactgttggtgtcgcccaaccactgatggccggctggatgaagtagaaggatcaagtccggttttttgtcggggtagatttcatatcaaagtagtatccaatctcatgcagattgtgatgagaccagcctagctttgcatgtaaactaaacatcgtcgagaggtattttatagtttttggggggatttatgttggaaacatcccgaagtaagcaacaatgtctcaaaagtaggggtgtagtggcaacaccgccccctgttatatatgacactccgaccatgcaatccaactaacagcaagccagtgtgctctctgatatctagtgggtatctcacagtggacacccctcactagaccacaggctaatatcttgtcaaaagtctcgactgggataacagatgcaggagggacccacctgtctccctatgatctagcatcctgaacgtgaggctcagaaactgaatgaagacatggtccaaacccatcactgaaggatgaccaagcctgtttaatggctccccgttgacatcatattcaaatagaggggagttggggaggacatcacaagttctgtaactccttctcctaacaggcgcgacctcctccacctcagactcggagtcaaaactctcgacctcctggtcaacctcaggtacctctacctgaccaacctctagatctacatcatcatgaagctgtgtggcctcctctaaaactcttactctgcccatcgttgccactctggcaacatgagggtcatatggaggcactctacgacatgtttgtttcattctgagcatgactatcagtccagcatcacacaaaagaagcaaggggacagactaaatgctatctctcaaaagcaaagctgatgggacctatgaaacaggggatgtcacctccccagatcaacactcaaaatcacctacatagaagagacaaagggaggtgagcaacctgacaaagctacagacaaagttctagtcaactgtacccaaaggtacattccaggtaaatcacattgtataaggctgagtattagcgaggtaccgtctcaagtacatttacttagataaatagtgagtcctaagttatgcacttgactataatagaatcactacaaaatcttatatagagttcccaagggaaaccacgcataagattacagttgtatatgcctctaatgccatcacgagaccctatccaaggtcaacaaaggacaaaatactagccactcgcttggttggccagtgtatagggtatccacccttggccggccagaccctatggtgaccatccatggccggccaggtcttgaacaagacctccttggctggccagagtgtacaaaggatccgagcatgtgttttttcaagaactcaaacacgttcttcgtgttattcatgactcaaagagccaagaatcacaacaaaggtcagaatcagatctttttcgtctagaaattacagattacacatcctaagactaccatgcggatcaaaataccaaaaagattacaatgtaacgtgggaatctaaagacattcaaaacaaagaaatagattcatgcattcatggacaaatcaactaaatcaagtaaatagcaagaatagaaagtttacccacacaagaaattgttgatgaagaaaataggaagcttgaatcatcgaaatgacacgaaaatcccaagagatggagaaatatgggttcggcctctagagagaaggaggagcttttcaaagtttatttttctagtgagagaatgaaaagtgaaaagtgaagagaagtttccctccaaaagacttatatcgtttctgtggcaccactcctccacgcagtactcaactaaaaagcatgtaaaagtacaatgcaactaattactacaacaaatgagattagatagtcaagagcaagtatttcaaagctaaaattgcagcaacatttacttagttaaagcgacatcagttccaacttagctggtaagttcctatccggatatacgtctgcacagggacttgggggcaattgttatcctgatttttgcccaactgacgtggcatgtctacgtggccaatatcaacgacacgtggcagtacaactcacctacaataaggtcaagccatctactcagcaccctagccaacggggggtcccagcactcaaacatgatgatgagtgatagccagcaacctcaagggggctagtcgaccacccctagccagccctatggccggctaacttctagacaacacatggtcagccagcctacatcctgcgagtgcatggctgccaagaactggacttggcaggactttggtgcacaacattacacgtggacagcaagctagattaggaattaggccttaacagcccacgaaagtatatggaaaatacctatttttaaggggcattttagtcttttgtattttactaatttaatatgtaaatacctatttattctatctctaagaagggtttaagctctcctatataaagagccttaactcaaccctaaaaccctaagtcataattaagtggaaaaccctaagccttaagctctaagtctaatatcacttcatatctctttcacacacgtccattgcttctctcaacacttaagatttgccatctttgatttctactttgtaaccttcagagagctatatcagattccacctttattgatctgaatagtattatctctcggtatcaatacaactaaaagaggagtaggtcattatcccctaactaagggggtcgaacctctataaaaatctgtatgttcttatactttttagttctaattatataatacgcagctagcattagtgttaatatgactccgctatcagttggccaaatctgagatcaacaaaagctattgaaggaaaagactcaaagatatggattcaagcaatggaagagatatgggatctctaaagaaaaaattggatttggaaacttgtccccaatcccaagaacaagagcataatgtcatgtaaatggttgtttaggctaaaaaaggaaagaaatgaggaagaacttgtcaagtacaaagccacattagtagaaaaaggtttcacacagaaggtctggatttcacatagattttctctccagtaatcaaatataaaacaataagaatcattttatctctggccacacactttaacatgaaaatagacaaaatagatgtaactacagctttcctacatggagaattagaataagatatctatatatatgaacttaaggggttcgaagctaaaagaaaggaggaacatgtctataaactgattaagtctctatgcggactttaacagtcatcaagatcgtggaacaaatgctttgatgcttttatgatcaagcaagggtttttcagaagctactatgatccatgtgtgtttttaagggaacccaagtatatgaagtcatatatctacttctatatgtagatgatatgttattcatcagtaagaaaatatgatagataaatgagatgaaaagcctacttaaaactgagtttgagttgaaagatttttgtactgctacaaagatccttggagttacaataagaagaaagaaatggaaagccatttctaaattaggatgactatatctataagatcatttaaaagttttcaattaatggatcaaaaccaacaacccaacccatcacatctcagtacactctgtccaaatagcaatgccctcaaatagagaaaaaacaagcagagatgagcaagctgccatactctcatgcagtgggttcaataatgtatgcaattgtcaacacaatccatacctatcctatgcaataagtacttcaagtaaatatatgtctaatttagggaaggttcattggcttgcaatgaaatgggtatttaggtaatatattgggtctactagggtgggtttagtccactacagcaacaagaatctacgtcagtctatttttcaaatatgggcaattgtataagctaaaaggtacaattgcagtgagtagtgacaatttccactaccaagttggagtatattaccactatagaggcaataaaagaaactatatggcttaaaggactaatagaagaagtaaagctacttaaagaggtctttgttttcatattggagatattatccatccctatatatattcatgatctttctcatttctagtaaatgttagagtttagttgcacacccaacactctggtgtaataatattggagttgctatcctagcctcaaattgaatatttcatatccaaacgaagcacatcaaaattcatttgataaagatctcaataatcaacatgacatgtgatatgtgtcttccgaacataaatgacattcttaccaaatcactatccatatctaaatttggacttcgaaacaagttaacacttaatcaattcagtgtaacttgacaaggatgttagtacttttgacagatggttagttttatgttcattaataactttattagatgtattaaaacttgatcatttagctaagtcaaactcagtttcacaattctacttttcttgtctatttttatttgagcattgttatttggcatcttaaggtgctcaacaccacactgatgtagcatcatatagttggttagcagtttctcatatcatttattaaattaaaatgtgtgggatctaatattaaaatacattaataaaggtatgtcatgtcttatagtacttagcaccttaaggtaccccttagcatttttctttttatttctctctaaattcctttcaagctcaacttcgaagagtcaatatattttcaacaaatttaattaccaaatatagcatttctttaattactaaagttctatcatagcattaaaacttgatagaatcctacctaaaatatacggcttcttaaaaattcctcttaaaatataacagttacataaatatgtccattctgttaggtatcgtttcttactattaaaaattagtatttttaccccctgaactttgactaaaacaaaattttacatcttttattaaaaaattaaaattataatattatattaattctaaaaaaattattaaaatattaagtttacttaaaaaaacataagttatttctaaaaaaaaaaataattttcaaactttatttttttattaaacacgtatcttaaaaattaaacaaaaattaattgaaaatccaataaataaattaaacaaactaagattttttggaaagaaaataaattaattata

SEQ ID NO: 221856 - DNA, 3102 bp, Cannabis indica
aaaaaaaaatcttgaaccatcctcaacatatgatgaccaactatctactaatgtttttggaaaagaattaggagtcatgccattcggtcccaggctcttgtctgggtgcatttggaacagagcatgcttcacttcttcttccaacacaggcttgataaactctgaattatgagcagtcaaaatagtacttggaacacactaaaccacctcctgccaattagcattagaagccaaaaacaaattagaaaaataattcaccaccaactcctacagaccattgtccagttggaagttattttactaggatctagatttactaatatatatatataatctaacaccctaaatatgaacttcttaatacgataaaataaacacataagagattaagaaatccttatattgatggcagctgaataatatggctcattccattcagatctctaacccttgttcctttccgtcgcaggtaataacaagatctgagcctggatcttcttcaggtgttggattcttcacaatcttctacactatgattgagtacttgacttgatatgattgggcatgtactctatcactataggcttcgaatttagagaagagaagaagaagagaactcaaaaattagagagaggagcctctcttttcaattttctgacataatagactaatgattagttatcaggttatgagtctgtcatgttctatttataggctttcatctagggctagctttaaattatatggattaagaaaaagataaataatggctaaataatttcttaagtggttggctactcatgtggaccccactagttacaattttgccattttatttcataattcatcttttcatatttcaactttaaacctttttaaatgggggaaagaagactgtggacttatcttaaagaaaataaagatgagacttcatacttgggctactaaacatctatcgtctgtaaggagagttcagcttattctaactgttttgctgggtctccggaactattggatgagtatattccttttgcctcagagtgttataaaagaagttgaaagattgtgtcatgggtttctttggggaattgaaggtaatagatgcaaaatccatatcccttcttgggaaaaagtttgcttgccaaaaaaatttgggggccttggttttctagatgggcctacctggaacagagtcataatagccaagtatatctaggctatttctgaaaaacatgatgtgctttgggttcactggattcattcaacttatctgaggaaaagggacttttgggatactcctatgaagttcgactcaagctggtattggagaaagctctgtacgttgagacaaagtttctccaaaagtcaaattcttgctaccggttgtaaaggtaaatttaaagcttcttcactttacaatattatcattattcatcaaaatgttttgtgttggggtaatgtgtggaatagagttaacttgcccaaacatagatttatgttatggcaagccttaaactctcatcttctcactagggatctcctcacccagtttaacattcccttggagacgcttttttgtgcagtttgttggctctctaatgagagtcatacccacttgttatttgagtgtagcttatttagaaaagttaccgatgaggtcttcttgtggctgggtttttcagcttggtctagaaactatgggagttggactacctggctagctagcaagaagtctggtattattgctactgttattacagctacactggctgcttgtatttaccacatttggtctaactgaaacaaatgcatatttaaaggctgctcaaaacttgttggcactatagtcaaaaaagataaaacaggttattctgtattgattatagtatgtaaataataggaagttagctctagatgaaagaaactttcttgtaagattaaaatgtaacctttagtttccttttgggcagctttcggctgtgccttttattgtattattttggctttttgctagtgattaatgaagtctcttcttcttgataaaaaaaattatcaaatctttttatttaataattaaaattaattatcaaataaaattatcatttattttatttattagttggaccttacaaaatttcttaattaacaaataaactcaaaaacctttttccttctcaattaaaccctttcttagtgaaaattcataaataagacatagtctaattttagaattataattgattaattaaaaccaattaactgagtctacaggcagtattatctcaattagtgtggggaccatgggcctatataatcaagcttccaataagtagatctagaatttaccaagtaagttctctaacttattaattcctcctgactccactatagatttggaattgcactcttaattatatagaatgctctatatgttctaagatatagatacattattaattatccattgttataattgaaatagtcaaagatcctctatagatgatctacatcgaatagggacaaatttatcgctctacccttcaatatattttatccttttaaaacttacctaattgtaaatgatatttcaataaactaaaataattactgaaatgagacctcaatcatttatcgcgttaagccaagctcaaaggaaattatcatttcacttctagaagttatagaagctatagattccatatctatgattagcgctcccactcaggtgtactactatgttcctaagatgtgagtattaggtcgatccaattggtcagctctaacgaacaactcaaagaacataaataatacatttaagctagaacctaaccatctcaggattaagatctattgacctgagatcaactaagtgatattgacttagataaatataacagtaagtttataatatcttatctaatgtcaatattggtcttgttcgatgtatactccatacatatgatcctagcatatttttctaatgtcttggaaaggacataacacttatccatggtgtaagtaaactttatcacagattatcatgtcagtgtaatccagtgtactgacaaatcatgagactttaactttgaaacatataatcat

SEQ ID NO: 221857 - DNA, 1839 bp, Cannabis indica
atctccatccctatttataaaaatttttaatctctattctcgcttatttatcatcgagatggggtggagaatttcctaaataggggagggacgcggatggggcaaagaatcctctaatgggggctgagacggggcgagaaatcttaattaaaatataaaatttataattaaaatttaaatatatacaaatattaaactacataaaaattaaaatactacacattaattattattcaataaactaattattatccaaaacacaatgtatataatttataaaaagatactaatatactaaaaatacaaacataaattataaaatactaaataggtctccgttagggcggagagtgcgatccccgtcccccgtccctgtcgcgtttaacatttgtagacaaaaacctgtccccaccccatttctcatttagacggagaattcacgcctcattaacggcatgttcttgctaggtctcattccatggaaaaaatatgcatcctatgtgctaggcatctataattatagcatgtatctatataaaaataaaaaatataatttcagaagaaatcaaaaagtacaataagaacagaagtaattcctccaacactcacaaaaaaaaacctataaatatatataaaacattttccatatatacaatattaaatatgaacaattgatcaaagtatatatacgaataattattaatttaataatcaattttagggctataaaagtaagacctgtggtgtctcttcacttccacactactctctctttctctttttctttttcttataatatgaagtcatcatcatcattatcatcatcaatagtaataattcttgtgatcatgagtatggttgttgggtgccttggtcgaataatggatgtagccatttttatgaataataatccaagtccaaataggtgttacacacctggtgaatattgtgctgccattgagttcaaagactgttgtgaaggacttcattgtgaaggaggtgccttcagtggtacatgtgttccttattctcattgcatttcggaaatcggggcggcttgcgaatcggggggaatgggaactccatgttgctacccaaacacttgccgttctgatggagttttgactatcaacggatattgtactgctcgcactttgtccttggaataataatatatctatatctatatctatatatgtcaaaataaaataagagaaaacctacttacatgataggttagatttcaactatatgtatgttccttgtgtgtgtttattgtttttaagtttagagtattgctattagacactgtgacgatagagatgtacgtttttaagttttgtgtgcattgctgttaggcactataatgtctagcaccgttataatgtgtatgtcttattttatatcccaaaatttagatattatatttggtgtgttagatttgtcatagataattttatattaatgaactagaaaaaaaatagaacatgtgttaatatttcatatgaaaaataatatgtccctttttttttatatatatacatagtggtaaaaatttaaaatataattaaaacttttttctaaataaaatatcaaaccgtagtatcttaaaaaatgaattaagtatttgtttaaaaaataagttatatatatattttgatgaataagcattctttcattacttcaacatactaatttacaacttaagagcaccccaagctgggacctgatacaatctccttttactatatgctacacagtattcctgaacagaaattacaacgaaaagaaaaataacaagaccaaccatactgaatctttagtactttcttaggccta

SEQ ID NO: 221858 - DNA, 1688 bp, Cannabis indica
acaccaactaaaagtaattgaccaaggtgactgaataaaatgttaaaagatgaaaaagtgaatagcacacttatgggtaggatgtctactacataagccacaaaaggaaaccaaacagctaatgaaataaaaactgaaccaaagtacacagccttctgccatacaattatctactgaagaatcccaaaggatatgccacatgaaccttccttaaacaagcttcatcatgaactttattctaaggaaatagcagggttctactctatattatgagttaaatggtcacattagatgtcacaagagtgcaaccaaacgaaatgtcaattgtactatcaaaagtcagataaacatttaacttgctcttccttataataggggcttgagaactctttataaagggggattcttcttgattattgttattctagaaaattcactctcaataagataattgggaactaggccaaacttagaccaatcatctttaaaattcactatcggtacaggctaagattaatgattattttattttatttttgagaaagagacaaaggccacttttttgtaactcctgccaaattttattcgggagcgtcacttatggcggagaaaaaccgtggttactggctaagttttagcgtttggccataaacataaataagactcaaaagataacaaaagaaatacaaacaagtcaaaattacaaactatctatgatttcttaatgtaaaataagatcccagtctttagtcaactcttgaaaagatatcccctcaaacactttcgacttaaacaaccatgtagccacccaggatttgatcttttcccatacatctgaatgtctagggcatacaccattgaatcccaaactttctcagcaatcaagcctacaggctgttcctaaaagaacacttcaggaacaaatgggaagaagtttatcgccattctttcggcagcatacacaccaacccaaagatagtaactggtagggctttctttgtaatacctaatggactttaaccttatccatcactagtaatcaactgaaaacttataccttggaaggtacacaacttttctacactgttttgctccatttttcttcaccagttacaaggttagaaactaaacaactaaaagcaaacctacaattgaaagttccaattgtgtgttgtttccaaactctagaatcttgaagaaatccataaattggacttagcaatggagagaatctgcaaaatgaactagtgctagcagtggtatagcctcgaaggagctagcctccacgtaagtatgagtcttcttgcacgagcactagctcctcatgtgtgagcacaagttctttcaatgagagcttgagctactcttacccgaacatgagttccttaagtacaagtgtcaacttaacaagctccaaaagtgaaagtttcatcttaatgaattcccaatgcttgaacttcatcttaatgtgattctcattcgcgagcactagttctcaaaattaaaaaagtttttttttttcaaacatgctcttcataggctagcacaagctcctaaagtgtaagtattgtctcaaaaagctccaagagtgggagctagagttcattgagttcctaaaacacaaatttcatcttaatctattcctcatatgtgagcacgagttctcgaaagagcaaaatctttctcaa

SEQ ID NO: 221859 - DNA, 4099 bp, Cannabis indica
ttatttttttagtttgttttattttaaattatttttaattaaaattaaaatttagaccaataatactttaacacgtgtcattcttgccagtacttaacggggctgtcaaactgggtattgacggacttgaaaaaaacatgaccttgagaactattgccgctatttttcgaagttgggactaatctacatcaaagtcaacttttggaaaatttttgctgcaaatttcctatattttatttagttttattttccttgttactacatgtggaattgtggacccataacaacacacctttctttttttggacttttttttttaaaataaattcaaatttgaaaattcaaaaagatgccattaatgttggtcacctactagctacgtcttttaactccgttaactctacacatattgcattttatgtcatgtcctagatttttagcaaaaaaataaaataaaataatacataattggcttaaaataatactaattttaatccttttcatctaaaattatttaaagcctctccaatgatagtattctttaagagcagcttcaatgctttatatattcacgttgctcatcggccttttgtcattctaagaacaacaatcaaaattgcttaaccactaaaaagattgtgcgagctgttataattgctattttcaaacaaagtaagtgagttatttttctataaaaaaggtgtattaatataaggcttgttcggtaacctttatgttttttatttttttaaatttcacttaacaaaattttgtaatttgttcacagtttttgattaattaatcaaaaaattgattatataattgttacctaacaataccataatatttaaaatattgaaagtaatttaataatatattaaataataaagtgtgggtccattctcgtaatttttaaaattgtttagcattgaagtaattttaagagtaaagtggtcaaaaatgatatggatgaaagaaaaaataaaatataatattttaagataatgtagaaattgttggctatttacactccaatgtatagtatccttgacaaatgctataattatgatctcacatattattatttaatatatatcctattttttagctacaataactttttagctttaatttttttattaaaaaaatgaatagcatcaatgctacaacataacatctatgcaaattttttaaaatgacatcattttctctttaatagtatagtatcttaatattttaccatatactatgtccacctcaccaagcatcctctaaaattttatcattggagatgctcttagaatttataatcccgaactataacttatgcattattgtgttgccttaactttttagccccttaaaaattattcttgaactattcaaagtgttgtaaattagtcactctgttaagtttatcacatataacaaataaaaatgatgacatgactacttagtcagttgccgcgtcaatatcatgtcaataccacgcttgtaattaatttgagaaaaataatttaaactttttttggtttagttttgtgaaattttcttgatcattatttttttaaataatcattaattaatttttagtttaatgattttctaaaaatatataattttttttaagttaaaatatacatgtggcgttaatgtgacaattaggtaagtagtcatgtcattatttttttttttcacgtgtgacaaaatttgacaaaatgaccaatttacaatactgcgaatagttcaaggactatgtaacgagctgaaaaattcaaggagcacaatataatgcatatgtcatagtcataattcaagaggaaaaaatcttaaataacttctcattattatatccctttaggctatgtttggtaggaaggatggaaagtagaattgaatgaatgaatatgaaggacagagaattactaacaaaaaaaaaaaaaaactatctttagtaacaattttgtaggggtgaaaatcggtcggttatggtcggtttttaaaattttacaaaaaccgtaaccgaccgtttagaaattataaccgtataaaaccgaccgtacggtttttggcggttttcggtttggcggttttaggcggtttttggcggttttgggcggttttaggcggtttttggcggtttttggcggtttcgacggttttttggttaaactatttttttatttcaagaaccgaaaccgaccgccgtgtcaaaaaaaccgaaaccgaaaccgaccgccaaattcggtgatgacgtggaaccgaaaattcggttacggtctggtcggtttgatggtcggtttcggtttttcggtttttatgaacacccctacaattttgtagtcacaatataattttttttgtgactaaatgtggcttttaatcacaacaaaaagttacttgtgactaaaatatagtatttagatacaaattgttactaatttaattttagttacaacaagtattgtgacaaaaaactcatttaatcataacaaattgtgatttctgtaactaatatttttagtcacgaactttttagtcgcaacatatgaattattatttataattagtcacaactttttcatttttagtcataagttttgttgtgactaaaaatgagaattttttgtagtgaatatgaaggatggagaagaaagtaggtctcctcctctatattgtttaatattaaaagtggaattgaaatgatagaatgtaaattaattactaaaattacaatattatcatttctaatataattatttattatttatttaaggataaatatgatattaaatatatatttattgttttttttcttaaacccccattttaagtaaggattgaaaattttaaagttttggagaaaaaaaatctccctctacctttcctttcctcgttctttttgtccaacaattgatttctacatattccttcatctttttccttattaaaaaaaaaaaaaattaatgtactaatcgaaaacaaggtttaaattatttgttacacgcgtacctcttttattttatatgcgtgtaaaataaaattatttaaatataacattttatattataaattattctgagttttttaaaattttataaaatgtcttaacttaattttaagtaagcaaacaagcaagcacaaatcggccacttatgaaggttagcagggattataggtctaagaaaaaagttatacataattatttttaatttgtctctgtaattaatcttcttataatttatttatctcccaatatttagtttctccattgtacaaattataaatgtgaaatggtttgttattttatttgaacattaattagttcatgatgataatattgaaataaaacactaacttacctaatatgtgagtcttacataatataataatatattttttttaaaatataaattttaatttttttaaaagatataattttaattttgatccttgtcaattctctaaaaagtttgtttttatacaattttagtttaaaatagagttcaaattaatattaaatttttcattacacattttttacgaaaactaaaaactcccaaaagaaaagtctactatgaaacttataaactcacaatctttagctttcatttaaataaatatatatatgataactaagtaaacaagaaacgtatattttaaataaaaattaataatatttaaataggtggcatgtgaccaattatttggataatgcttggtccaaataacaatcatcaaaaataaaataaaaaacctattaagaacaaaatctaatggtgacatttagatatattcatatttattaacttaaatataaatcaaatgtccactaaaaaatatcactttatataaaatattcaatataattataataaaagtaagatagtcacgagattattcttattaattcattttctttgaaggaatgtcttgaatttgatgcatacttaatctttggttcaattatatttactttaaaaaatttaattacgagagataaatatatatatctatctattctatataaagtgtgcctatataactgaaattcttggtttataagaaattcatgtgtgactttattatttttatttaa

SEQ ID NO: 221860 - DNA, 2056 bp, Cannabis indica
aatgttgttatttcatttaattttaatatgtaaaataatcttgactaatcagttatgtaatcaaaagataattgtgttctttataaatggacgatccatcacataacgaacttgattacaattttttgaacagcaaactaggcagattcaactcttgttgaacaactataattttggtatcactattatttacattgctttctaattattttattattattatcactatattttgttttagtactcgttattttaagtgaatactctttgttattcttgtgagtgttcttactttgcttgattactcacaaattttaattttgtctatttttctcttataacacttttcgaatttatccctacatattttcgtttttgttcacaaaagttatacattctttttcatttttctctaaaaattataattttttttttcattaatactcgtttttgaaaactatttgtatatataaatatttaattttagtcccaaagttgaactaaagaaataatttttatttttggtctgtattcataaataaaataggggtgttttagtaattgtaagaataagatgctaaaaaaaaggaataattttttttttgatgagaaagaaaatgaataaaattgtgtgtccaatattaaaatttcagaatgtggacatgggacctgtgagtcagtgaccacctaaggagaaaggtcctaccacaaccactattaatgtttttattgattgggggacagaaattaaaacacctatttcggacgtaatttattgcaaaagaagtcattcttcctacgaaaaatttcacttcactttataataattcatcttataatatactctctacccaccaaaacaattctcataatgtatattttcctgttatttaacggaaattattaatttaataattttttttttaatttttccattaaaattaacatcatcaaatcaattaattaattattttaatttaaaaaataattttaaatatttaaatttaatttaaaagtatcaacaaaattaaattatttttttatataaatcttaatttaaatttattaattatattatttaaaatatctaaacttatttattaattgctaattagatatatttttttataaataaatttaaaattaaattaaattttatataattaaaagatataattacattgtatttaattttattttttattatcttttaaattaataattaagcaatagcaactctaatataactataaacaactttcccaattcccttcataatattcttctcggatctttttttccctatctcctcatgctgtcatatcttaccaaaccaaatgagagtgcaaaattttaatgaacatttccttgaatacaaaatgcctaagaaatacctcccacccaattacttttttttcttttcctgtttaatatattttattttgcgacgataaaaatacaagtagctcagtggacaagtatcatgaataaattgacaaaattttcatgtttttttgtggttctgatttgtgattgggatttctttcagtgacaatttgtgatttgtaatagatgtttaataaaaggcaaagtaggggttgaagtactagtagtgggtgttaaatgccgcaaaagctgcttctcattagctcattcttctagtcactctttacatacaaaattacaaaataaaaataaataaattttacaactttctctgggaatggaatgggagttatgggatggattggctttgacaaaaaggcttatcgggcaaactatactttctttctggggggagcaagtaaattgtaatgcagaccttatcggcacttacagtggttccttgtgaaaagaatcagtattctaaatttgtaattagtaacagaaatgtgtagtagaacaaccatccacaaccatcctgcaactcaaaaatatatatatatatttatgtatatacatatgacaaaagcgatcagcagagttgtaaacaccaattgaaacaattagttgtgttacacaaagctaagtttctttggagtggaaaaagaaaaag

SEQ ID NO: 221861 - DNA, 3262 bp, Cannabis indica
aacagtatacccccttatcagtttcgaagctaatacactcttggtctgtgacctgcattttcatatagttatatcttaaatatgcatccatgaaggacaatattttgaaatatgaggtggcatccaccatctgttaaatcctaggcaatgggaagcaatctttcagacaagctttgttcaaatatgtgaagtcgatacatatcttccatgttccatttggcttgggtaccaggacaggattattcaatcactcttgataatatacgtctcgaataaagatgtttgagagcattttatccacctccttctctagagcgtctgactttaccgaatctagtggatgtctcttttgtttcaccgaaggcatgtttgggttgacgttgagaacatgagtaatgacatgtgggcttattccagtcatgtctccatgacaccatgcaaatacatccgttgattctttaatggtggtgataatttttcttccctcgtctggatttcaaccatttcctaagctcgataaccttggttgggtcttgatcacaaatttcaacttcctgaatgtcctccacaatgtagttttggagctaatgcgaggatccaactcatcttgaccttgtgaggatgtcgtcacagtccaaagtcaactaaagctgaataacccaaaatagcattataagctagacaatctaccaccatgaagctgcaatatttgaacgtgctttgtggggtgtctagacatagggtaacggggagtctcacttttcccataagaacaagggtagtcccgttaaaccctgtaagttgtgaacatccatggaaaggtctcgattagagagtccaatggccatcaaagcttttttatatagaaggttcactggacttccaattatctactaggattcgggccacaattttgtttgcaataggagtttcaatgaccaaagggtcatgatgtgggaaacttactagtttggagtcttcctctatgaaagtgatgggttgggttgatccaccagtcttggtcttttggtcaggagctgacttacctcccatagctctccgtcattatttaaggccttagcataatgttttaactcatttcttgtggtccctcctatatgagggcctcttgagatcatagctacacttccatttggccttggaggttgcccaggtgcatgttgattggggacaccccctggaggtacttgtgtgtctgacacttgcaccttggaggttgcccaggtgcatgttgattggggacaccccttagaggtacttgtgtgtctggtacgccctcaggcactggggctccaacttgctaggaatcaggtgtagtaatctatctttaatccattcatacaagtggcctaatctaattaggctctcaattttgtctttcagatttttacactcattggtggtgtgacaaatgttgttgtggtacttacaccttttcttatggtttctcctagagctaactcgatacagaggaggaggccgttgataatgagtattttacctggtagaaaagtatactcgttcttgggtatctatgacgtctgtatattgtgtatactcgggggtgtaacctcttctttgcctcttatcctccattcgagtgctcccttttgaggatcttttactccaggaggttttgggggcacatgccaaatgtgtagcctgtggggaaaattgagcagggtattgtgcattcgcttcgggagttggattactccctcgtaccccaaaactagattgagctagaggaagagcaaggttttgagtataccgtggtcttgcaaaaaattgtactctgcttgcctgtggtgtaactaggagggaagctcccaaaaactgtgttcctggcatataccctggtccgccagtcgaataatatcctctaaaggttgttatttgcgcttcttctaagttgatgtacttttgaaccctcttctaaaagtcctgaaggctagtggccccttcttgctggagttcattctagaaaggaggtccgtattccaacttggagtagagaaaattgttgtccatcatctaatttgtttagtcttggaggcttcttctttgaatctttttatcaattagggtcttgatcagcagttgtttaatgtttgtcaaggcacttacttcgaggttaattttcctagctgccacaaactgttttcgaaagctgacttgtaacttattccaacaatctaaggatcatggttctagtgtcttgaatcactcctcagtggatccgcctaatgttaacagaaaatataaccacttctcatcattgctggccctcatgattgtcattacccagttgaatcgagacaggtgatcactggggtctgtgttgcctgtgtacatcgtcatttcgggaattttaaaatttttggggagctctatctcaagaatgcttctagcacacaactctcagtcttcacaattcaacgtcgaatcatttcccttttaccttcaagacactttagctatgtcttttcgaaggataacgagttcagcaaggattccctcattcaaagcgtcctctgtaactagtattgtttgtttctttttctccaagtgattcctaaggtcatcgtgcctgtcgttaagcttttgtcttaaattaacagggggtttacgatttttccttccactttccctgggcgcttgatgcatgaatacactttttcggtcttcctagtcccgagggccagtgctctctctaggagcctgccccttctacggacctttcccctttggaaaatcaaagcgaacctttcatggatcctgagcctttttgttcttttctgggaaagatgtgggatttttctttggataaccttatgagggatactagataaggcttggttcccaacttttatgtctttgggtacttagtgaagattcttctcttgtttgcttggtctatgacgcatagcttttgggtgcacgtcaatgactgttgtctccatatccttctacatggcgaccattatctcttgcatcttcctattttgctctttttatgttgttagttcggcttcgtgattagtagctttttgccttagggccactaacacggtgtagctgccatcatcataggcatcaaactcttcttggttttcctcttactccatgtcattcattttgtcttgttcttctacctccacgtctactcgtgaggctacttcttcttccccttgtcctctgggaccctagggggacgaggctaacgtgtatagtttctagt

SEQ ID NO: 221862 - DNA, 3921 bp, Cannabis indica
taggtgtaatcttggtctaaaaacttggtttaagagctgctaatgcctaatttgccacattatgactgtttggcatttacggttgcgaaggacctcgggtccaaatttattatcgtggagagcgactcgatgatagtcatcaatgcacttaatgggaatgaatctcactggattattgaaaactatgtctcattttgtaatagttcttctccttcgtttattggttgtagtttcacaaatattagtagatcttgtaactttataacccataataatgtaataaattagacttttactcattagaggtttgattttattccgctatcaactattcctacaaacttattttgtaatcacccaaaactctaattttaccaatttcttataagtacactttccttaaaaaaaaaaaaaaaaactgcttatgtactctactcttttattaatagtacaaatgtcatagagatacatatgtcagatatagatagaatcagaatgcttgtgtttcacttttaatcccattttattaaccaaataaaaataaaaatggtagtaatacatacataatatggatggtcacgttgtcaccaaaaaaaaaaacaatacacaatggatagcacattactaaaagaaatccaatttactttgatagaaaaaaaaaaaagaaggaatctaattacaacacttattttagatatatttgcacaagttttaagaaatctgatttattgtttacattttcctgtcttaggagacaaaaaagtgtttgctttatgaaattatatacacaattcaatgtactagtaaatgagaccaaacgacaggaaaagcttcagattagaatacattttcagattataaagcactgataaaatttatgatttgttaaaaacaaaacgacaattaaaacaacgtcgttattttttaatgacttgttacagctttgactttgtaaaagaaatttttgagtaattaacaaggatagagaaagacgagggaaaaaaccaaacaaagcatctagtttcagagtcaacaaataacaaccaggaacaaaacaaacactttcctttgcaagtactaaattaccctctttatactcttttgtattcatctatttggttaattttgtattgttctggagttttgatgctataaattcttagattcggaagaaatcaacaattcattgatcttttttcttttttctcttcttcttcttattattatatatattttcctagtggaagaaccaatggagaaaaggtctttctttctctgaaatctgccgatttttttggtaaagattagccctttgagttgaagtttttcaatttaactccagttttcaaaattttaatctgggtattgggtgaaacaagctgaggagtgttgagaagggcacatggataattaaagatgagaaagggtgtaaagcttgttctgattgttagcagtaaaaaagggttggcttgattcaagtttgtagatgagaaagggggttttttgagcggccccctctatttattcattcattcaaatattgggtttgaagcttttgagctttctggcttggatttggtcttgatggagttttagttgactttatatgtggttctcttggtgaaattttagagggtggtattgtgaatttgtttctttattagtatgtttaaacatattctcagtaagcttcccctaaagtcttctaaggctaagcacggtgagaaacgagaacatggtggaaccaataatactatttttgatattgtttcttctgctaccagttcaagcattgatttagacactaataagtctagaaccaatggagaaaatcatggtaacaaaaatagtaaagttgggaattcgaaggtgtcttcttcttcttcttgtggatcactaccttcattgagggatgttccaagttcagagaagcagatctattgataaagaagttgaatttgtgttgtgttgtgtatgatttcactgacccacaaagcatctcagagagaaagagatcaaacatcatacattgttggagctagtggattacttgacttgttcaaatcttgagttttgtgatgaaactgttatgaatgatagtattaaaatggtatccacaaatttatttagaacatttcctccacaacttcacgagaacagagttacagaaggctttgatttggaagaggaggagcttcccatggaaccagcatggtctcacttgcaaattgtgtatgagtttcttgtaaggtttattggatcatctgatattgatgcaaaacaagtcaagaaatatgttaatcaatcttttattctccatttgttggagcttttcgactctcaagattctagagaaagggagtatctgaagaccattcttcaccgaatttatggcaagtttatgttgcatcgtccattcatcagaaaatccatcaacaacattttttacaccttcatttttgagacagagaagcataatggtattactgaacttttagaagttttgggcagtattataaatggttttgccttaccattaaaaaaagaacacaagttgtttcttgttcatgcccttattcctttgcacaagccaaaatgtatgatattttacaaccaacaattatcttactgcatcacacaatttgtggaaaaggattacaagcttgctgatacagtcataatgggcttattgaagtattggccaatcaccaatagctccaaggaagtgatgttcttatgtggtgtggaggagttttagagctaactcggttgcccgaattccagcgttgtatgatcccgttgtttcgccagattgctcgttgcttaaagagttctcacattcaggtagatggctattttgatgtttgaatcttattttcttttcaactgataatgattaagatgcaatttcattgttacatgattcttttgttgtgaatctttattgattgagacagatttggttaagatatttttctcagattgctatctttgatctatgatttttctcacattgtgctaattgttattgtttttcaggttgctgagaaagcattgtcattgtgcaatagcaatcacattgagagcttgatcaaacaaaaccacaaagtcattctaccaataatcatcccggccttggaaaataatgctaaaaaacattggaaccatggtattcacaactcaaccttaaatgcgcgaaagactttccaagatcttgatcccaagttgttcaaagagtgcttactcaagtttcaggaagacaagtcaaaggaggatgagattaaagcaaggcgcgaagccacttggaaacgtttagaagagctcgccgtgaagaacttgtcaagcaatgaagtaggtgaagctcctcatgctgcagccttagtttagctgtagcaagtggacagtttaaatgaactgcaatgtatatttcagctgagataagattggtaaaagaaaactggtgagtggttgaaatggttgaatgttttattcatttatctatatattctcatctacttgaaaagattaaacaaatcatatatattttacttggaagagtttagtcaactatacctgctcataatatgcaaggaagcacattgttttgtttatccttgttttgttcagacttaaaataaagcacatcttttttgactaaaaaatggtactaagattgcattattaagcacaaagactttttattataaattcttttgcagtttctctgtaagaggaatactttgaagagatattttgggcatccttaaagaaaaactcaatgcagttttataagaatatgctagggtcacattatatctatctatctatatatattttggtgaggtaaaactcatatggagctttttatcttttatgcaacaaataggatcattaaaaaaataatgagtttttttcattttt

SEQ ID NO: 221863 - DNA, 2111 bp, Cannabis indica
agaattcgagaggaggacattctaaagactacttttcgcactaggtatgggcactatgaatttttggttatgtcttctggactaaccaatgctcctgcaacttttatggatttaatgaatagggtattcaaggatttcctcaatatatgtcttatagtgtttatcgatgacatccttgtgtactcccaatcagaagcagagtatgaacaacaactccatatggttttccagcgattacgagaacataagtagtatgccaagtttaaaaagtgtaaatttttgctatcccgtgtgtcttttctcagacacattgtaaggacggaatcaaggttgatcctaggaagatttaatccgtcggggattggccaagactgaatatagtcacaaaagttagaatttttctaggtttagctcgttattatcgtcggtttgttgagggatattctaagatctcaatgcctttaatagaacttactaaaatgaatcaacagtttctatggactaataagtgtgaagcaagttttcaagagttaaaatagcgtttgattacagctccggtattagggtaccatcggataaagacaagtttgtgttttactgtgatgcatccagacatggtctaggatgtgttttgatgcaagccaattgggtaatcgcttatgcctattgtcagttgaaggaatatgaacagcgatacccaactcatgatttagaacttgccgcagtagttttcaccttgaagatctggcaaaattatctctatagagaaaaatgtgagatttacaccaatcacaagagcctcaaatatttctttactcagaaagatttgaatatgaggcagagacgatggttggagctagttaaggattatgattgtgaaatcctttatcatcccgggaaggccaatatggtggcatatgccctaatcaagaagggttttgaacaagtatctagcatggttatgatttcacctcagctagtatatgacatggtcaggttaagtattgagttgattgtaggcaaacttaataatttgatgttacaattagatttttttgatagaatcagattcgcccagctggttaatcccgaattggtaaagatttgagataaaaatttctccagtcaagctagagacattacagtgtcagataacaagatgttgttattcaaaacaagaatttgtgttccagacagtgtggaacttaagaatgagattctcaaggaagctcatactaccccctattcattgcatcctagcactaccaaaatgtaccaggttttagaacccttctatttgtggtgggggatgaagaaggatgtggtagaatttgtatcccagtgcttgacttattagcagattaaggctaagaaccagagacctagagggttgttgcagcgtttgactcttcccaagtggaaatgggaggatgtcgctatggattttatggttggattacctagaaccataggattgttcgattcaatatgggttgttgtggattgatttactaagttcgcacattttctaccagttaaaacaacctttacagtggatcaatatgcagacctatatgttaaggaaatagtgagattacatgggcctccaaagtccattatatcaaatagagattcaaagtttacctcaaaatttttgtaaagtcttcagcgagccatgggtaccaagcagaagttcagtacaacttttcatcctcaggctgacagaaagtctaaaaggacaattaagaaacatgtgaatatgttgcgagcctgtgtgatgaattttgaaggctcctggagcaagttcttaccactgatagaattttcatacaacaacagctatcagaatactacagggatggccccctatgagatgttgtatggcaggaagtgcagatctccaattcactggatgaaactagagaaaggaaatatttaggtctagaatcggtacaacaaaccaatgaagatatagagaagatcaaggccagaatgcttgcctctcagagtaggcaaaagaattatgcagatccaaaatgcaaaaatatatgatttcaggtaggatatcatgtattcctacgagtgtctccgatgaaggggattaaacgttt

SEQ ID NO: 221864 - DNA, 3498 bp, Cannabis indica
tccttttttatttttaccctctttttctaaaaactatacatgttttgccctgtcacttcaagatactttccatgcgactcccttatgtcaaggtattttgggtacagtatatataaaaaagaggtatgtttcaattaaacataatttagaggtagatttggttaattgataaataaaagaggtatttttcaataaactccaaaaaaatttacaaaaccaaaccaaaccaaataaattgataaaaaatggaacataaataacctaaccaaaaattcaaattgtcaaataaatatattaaggaggttgaatattattctaatccgttcaaataactcaaataaattgattgacatatttttattaaaattgactatgatatatgacataaattatatttaatagttaaactatttcacatttaaagtttgtactttatagtatttaattagaaatttaaacttttataattgataatttttttaacatgttataattgataattttgattgaatttgaacattaaaattgacatatagaatacattaatagatattgttgacggtaaaaactcgtgaacaaataaaaaggatttaaaatggagtctggagaccttgattgaaaaatgcttgaaataaaaaaaaaatctcacaaccttgaatctttagaagtattaatctttcattcccaaaaaaaaaaagaatccccttacaatgaattcaagggttctatatatatattcagtcctttgacactatacaattttactaaatcctccatccataggatgtggagtcactatcacacctgacagcgttgtctcctaggtggtctgatgtacctgacatctaaagttacactaaaaatgtccctttcattgtgtacctcgaatgaaatgaactttgtccacattatctatgctccttgtgccgtcgttttctcatctgatacttccttgcttagactgttggtgtctggaggctgggcgcagggcgcggacatgagggttcgtaggcacgagggtgcatgggcgcgcgagcgcagaggtgaggtcgtggggcgcgcgggtgcatggaggccaagtcgcggggcgcacgacgtgcgggcgcgaggtacgcggcgcgggggcacaaggcgcagggcgcacgggctcaagccgcgaggtgtgcaggcgcggcacggggcgcacgcgcgggtgcgacgcagggagcacgggcgaggcgagaggcgggaagcgcgggcgaggcgcgatgcgggaagcgcgggcggcggggagctccccttggcgaactttttgggcataacactaatgactttaaaaatattaaacttattgggtcaacatatatatatatattaaagaatattgtttaatattttaatgtttacttgattaatttgtcttatatttaaaattttaatattaatttagactacaaaacttttaatctttaaatatatactatactttcatattttttttttcaaatctaattatttaagcactaaaaactaataataataaaaaatatataataataaagatttgaccggttaacctgactaaaatgacaaaattattcggtggattattttttttttttgattggacgggatacgattagatctttttaactcgacatttatattagattggtaaatatattataatctgaccaaactaactaatgtacgcccctaattatttatagaaattttaagttatatatatgtatgaatattagaagaacaataaaaatcatatcaagtaattttaaacatatttttatgtataacttggaaaaaatagaaatttgcggcaaaagtccttaaaaagttcaatttgatacagataagtctctaacctctaaaaatagcggtaatagtccttaaggtcatcatttttatttgttcgttagtcctaattttaactgaaccatttattttcttaaaattttacacatgtcgaaatattattggtccaaattattattttaattttaaataataaataaattatttaaaaataatttcatttttctttttctttatatttcttttcttcttcatcttcttcgttttcttcttttttagaaacaaccaactagtaagttagtaagttgcttttatgagcccaaatatctctattcttccttactagaagtccctaaaacacaaaactttgccttgctcagaaattttcagagagcggagacgaaagtaagcagtgaagaaaacaacaatggaggcgcccaagaccataccccacgagatcagaggacttcaaaacgatgcttttcgctttggccttaatggcatcaagagcgacatcgttggatctcatcccatcgagtcgacttgccaatctgtaatctctctttctaactaatgcacttacaatatggtttttccttttttgattaagtggtttcatacctactgcctcagctctgactagggcaattgttctggaattttgaactagtgttatatttttcgtcgatatggctgttgctttccacatatcgtatattatactgaaaaaatttaagggttttgcaagaaaatagcttggagaagaagaaagaaataaataaataacaaagggttagtggttagaattagggttacggttgtggttagaattaaggttagggttgtggttagaattagggatagggtttaaaattaaaataataatttggaccaataatatttcgacacgtggcaattttaagaaaataaacggcttagttaaaattaggactaactgacaaataaaaagtatgaccttgaggactattaccgctattttttaaggttggagacttatctgtatcaaactgaactttttgaggacttttgtcgcaaattttcctttttttttttcaagttataagaaaataggtttaaaattagttgatatgatttttattgttcaactaatattcatatatatatatatatatacaacttaaaatttctataaataattaggggtgtacaatagtcgatttggtcagattataatatatttctagtagatttgcttcgtatataaaataaatcaaacaataatcggtaaatattcacttttatacataagtgaattattattctgctataaattaattaacagtgaattattagttataacgtacaattatacaatttttttaaatttttaatagttaataatttttttgacaaaattaatgagctctaattaaataaagtagaataaaaatattaattaataaattatctctaaataaataaaataaaataaaaaaaataagagaactaagtagaatttaaattaaaaaaaaaaattaaagatgcaataaataaaataatttgaagtaaatttaaactatcaagtcaatattttatacttcaactgctgaaattttcttagtaaaattaataatttgataatagaaaattttataatataccccttagaaaggatctaacaatgcattgttggaaattatttta

SEQ ID NO: 221865 - DNA, 1461 bp, Cannabis indica
aatgtttaagcttggtcaagttgacactttttgtcaacatatcagcagggttgtcttgtcatcagtgctgattttcttggcttgaacctctcctttagctacgatttctctaataaactgaaactttatgtctatatgtttagatctttcatgtagcataagatttttaatcaagtggaaagcactttgattatcacagtatatagttatgttgttagattttaagccaagttctgctgtcaaatctttcaaccagagtgcttttttgaaggctataacaactgtcatgtactctgcttctattgttaaaagagcaactactttttgcaggtttgatttccagctgactgctccaccaaaaatagtgaacaccagtccagttagagatctccttgtgtctatgttggcagcatagtcactgttaacatatcctgcaacttcttcaacagcttctatttgcttgttgtagattattcctaggtttagtgtgcctttaatatacctgagtatccatttaacaactgtctaatgagcatttcctgggttagccataaatctgctcactgagccaggtttgatctggtgcagactatggcatacatcaagctcccaacaatgctggtgtatggcacttgctccatgagccttttttcagcattagtttggggattttgagattgagagagcttgaagtgaggagctaggggtgtagatactgcatttgagttgtccatcccaaaattttcaagtgtttgtttaagtagtcagtttgtgataacttgatcattcctttctggctttgatcccccaagatgagtgagattagtttctttacttgaaactaaggctgttgttccaaccacaaatttaccagtgataaaataaaagccatttcaactcacctttgataacaaccattgctcccttaaaaacattcattttgttgccctcaatcttcacagtacaaccattggaagctagaactccaattaacagcaagtttcttcttagatcaggtaaaaatctcacatttgtaattgtttaagaaacaccatcatgcatcctgatgacaatagatctaatcccttacaccttacaagccttgttgtttcccaacagaactgatccccctgaaatttcttcaaagttactgaaaagatctttttttagacacatgtggaaggagcatccaaaatccaatatccaatctccattgaacacactatttctaacaaccagcatatcaccagattcatatccatttgacactaaaccagcttctccaacatcagattttccttctttatttatttcattcttgagaagataacactctgatttgtaatgcccttcctttttacaataattgcagaattttcctggtttgaacttggattttcctctgtgatgattgcagttctttgttagaaattattttaccagaatcttagatctactcac

SEQ ID NO: 221866 - DNA, 2253 bp, Cannabis indica
accgaattccatctctggttataggagatatatctcctcttgaatgcctacttcacaaagctccagactatgagtttcttaagccttttggctgtgcatgctttccatatttacgcccttacaatacacataaaatgagcttcagatctgacaaatgtatcttccttggctactctcttcatcacaaaggatacatttgtgaaaataaagatggccggatctatgttactagaaatattgatttcaatgaagaggattttcctggatcactcactgcaatcaaatcccaggtatcatctcctcctattattcctatacccactgctactttctctacaccactattgcatactaatgctacaactcttttgcctgaggtaccatctatccaagatcctacaggttataccactgctcctgcaccagcagtacctcctgcttcagcagccattcctacaccagaagctgctactgatcaacatctgcctattgcaactgcctcttccacatatactggacataccacgactccatacacacatactcaccctccaaataatcctataccaccaccaatttcctctgatcaggcttcccacacctcccacccaatgcaaaccagatcgaaatctggcattcacaaaccgaaagcctacactgctacttcttaccctttacctgagtcccttttacccaaagaacccacctcccttaaacaggctcttgctgatcccaaatggcatgcatctatgcaaaccaaaaacacagctcttctcaagaacaacacatggaagcttgttccctatcatccttctatgacacttataggaaataaacgggttcataagataaagctcaaggctgatggttcactagacaaatacaaatctcagttagttgcaaaatgctattctcaaacacctggcattgactttaaagagacatttagtcccgtagttaaaccagccacagtgcggattttactcacccttgcagtgtcattcaattggccgatcactcagctagatgtatctaatgcctttttacatggcacacttgaagaagttgtttacatgcctcaaccaccaggctttgttgatccaaagtatcctcactatgtctgtcaactaaacaaggccttgtatggccttaaacaagctccccgagcttggaaccaaaagctcaaaactactctctacagccacggttttcaactgtcaaaggcagacaattctttgtttatcaaaggctctggtgtcaatcttattgtactcttggtatatgtggatgatattttgattacgggaccaaacaaaaatgctatttctgctatcattgctgctctaaatcaagaatttgatatcaaagatctcggccctctacactattttttgggagttgaagttcacagaaatgcatcgggcatatatctctcacaatcaaaatacatagctgatctacttacaagactcaaaatggagggtgctaaaccttgtcctagtcccacaagttcctcatatgttctgtccctcactaatggagagccgtttaatgatcataccttgtacagaagtaccttaggggcgttacaatacttgactttgacaagaccggacactgcattcattgtgaataaattgagccaatttattcatgcccctaccatgattcattgggaggcatgtaagaggttattccgttacctcaaaggcaccattcatgagggacttcacatcaaaccagctctgcgattatgtttgcaagcatattccgatgctgattgggcgagttgtcctgatgaccgtcgctctactggaggctatgctgtatatttagggggcaatctcatttcctgatctgcaaagaagcagccagttgttgcacggtccagcacagagagcgagtttcgtgctcttgcaaacaccgctgctgaactcaaatggctgaactctgttttacatgagcttcaagtgaatcttccagcatccccaataatctgggttgacaaccaaggggctgcctcgttggctgccaaccctgtcttccatgctagatcaaaacacattgaaattgatcttcactttgtgagagatcaaattctagcaagggaagttgaagttagatacgttccttccatcgatcaaaccgcggatattctaaccaaagctctcaccaaagatcgatttttgtatctcaaagccaagctcaatgtgtgttccactccttttctcttgaggggggatgataaataac

SEQ ID NO: 221867 - DNA, 1627 bp, Cannabis indica
aagtgatatttaaattcatttttattatgttgatatacatttatttatcccgaaaaattgttagggaaaaattgttaaggagatgattgagatatcttcgccctggttgcgtctcctgaagtaccgacccttcccctatataaggggtcacccatgagttgggaaggggatccaaaaattcaacactaaaaaaaaactctgctatttttattccttgcattcaagagcttgttcttgatttcgcaacttcaattaataaaatacaaggggaataggttattcccaacatctggggccggacctctttaaattttagtgttctttatgtgcaattattacgattttagtttaatttattattaattacgactccgcgttagttgactaaaaatctagtcaacagtaaatcgaaagaaacataaacaacatatgaaataaagagagatgaaattttagcacaattcgaaagcctgaagaaagtaatagcaaactctaaaagaccaaaatctcatttaagagattaaacccaaaatcttattttagagattgaaccaatgaaaaacctaaagtcagataaatacaagagaatcataaaaaatcttcttctctaagaatctacttcatgctattctcatttttcatttttaaatctctgagaatgaaggacgaaatagataaaaatgtaaaagagtgagagagagagagaggggagagagagggagagagagagggaggagagaggggagggagaagggagggagagagaggaagagaactttactagaatcagtgaagccatggaaaatcactgaaggcatttggagcaagctacagagtaaggaaaacaagcaagagagaaggcacaaggcggagagaagaaaaatgttttaaaaattttaaaaatcaaccaaaatatgtttttaaaatttaatcaattttgattttaaattaaaaaattagaaaatatattttacttaccgaacacactttcaaaacctattttcgtatttttgattaaaaataaaaactattttttaaaatggttaccaaacaaggccttaaagaactgttttctggtctaccaacccttcgaaggattacttccggtcacattccaccaccgacttcaatttatctcaagtcaagtcgagtttcaagtcattcccattttcatgaccatcactcctcacaaactcaccatttcacatcattcccaatatttttagtaccattacgacacaccgtttcagattattcccaatatctctctacactctaatctccctttctctctctaaatatatgatttgaatgtgattatcctccatcaaagttttataaacaaaattgtagcaagtctttcattgcctaaagttggagcatcttcacctctctttgtcgaagctcaagctctctttcattctctcatgtggtgctcagcagttaagttgcttatcactcgcaatgaaataaactgtccccaactaacattgaaggttaaacataaattgaaggatcgttcagctctttcgagtcttgtcttaagatcctaaactcctttacttcttttcctaatgcatctcttcatcatgttacgaggatcaaaatgtgcttgcccataataaag

SEQ ID NO: 221868 - DNA, 2528 bp, Cannabis indica
tccgagagaactggagtgacaagggagagacctggatgatcagtcgtgctgatgtagaagggagatctaatatcttcataagctggtctgtcgactggagtggatcgacgcagagcaggaacagattggtttgtttgtggagggttatcagcggaagtggttgatggtggaggagccattggtgcttcaactctggaaggatcgtcaaacgttgttgcagaactggtggcccgagtacgcaccatgatcggagaagaaagatcttgattcttgaagctcgaagtggactgcttgaagctttagtttatttcatctgataccatgttagaacagaggatttcagagagaaaagaagagtttattgatttgcatcttatgaatttacaagagtaagattacacttatttataggcaaaggaattggcttagaagccaaccgatccttgtaacagaaaaacagaaaaaaccagtaaaaataacaaacttatactaactaactcttaacaactatcccaaaaaaattttgagttatgattctagccacagtagtaatccagggccacactttctgggggtccaaaataaaaaatgaaaagcctcattaggcttttatttaaataaaactaagtatatcataaacaataaatatttccagctcaattgattcgggtatatggcacattataaaatagtatgggtttaagtctcatgacgctcttttttcaatatttttaaatggccttaggcccatttctagggtcgactttgtagcaaccatcatagcattagaactaacagcaacatcacagtttatcttcagccaatcaaccaaaggaggggtccaacccaactattttggtttcttctacgaacaaggtcgaagcatactctacaatggtagacaaaatatcattttaaaattttgtattttaatattcccagtttaattatttaattaaatgcggaataatgaaactagtagacaaaaggttttctctctgtctcgctccttgcagctccctgagctggtgcaatggcaagaacaaggtccaaggcgcaggggaatctgaactcgacggggaagaagaagaaaaagaaaggaccagattcatctgctagtgcaaagaaattgaagtctatggatgagattttaggggttgaaccgatcgatttttctgaaagcgaggaggaaggggcgtctctgaatgggcacgatcttgagaggtctgacctatttccagcccctctatcgccaaagtaatctttacgagaaatccagcagcaggaagagattcgcacggagtttgcattctttatgcaagcaaatcaacaatgctcagctgaaatcaagaaaggtaatatgcctcaacctcctgtaattaggtctgaatctgtgaggaaaaatctagctagctcttttgttagtaaagaacaggggacaaaggtgaaaatacaaatggaggacattgaagatgagatatcttattgatcctcctccattgtatgctatgttttaggggcaaacccaccattatctgtgttggatggttttgctagacgtatgtggacagggaaggttgacaaggtgggaatgttggcacatggaatctttttgattagatttgaatctattgagtgcagagagaaagtgctagcaggaggttacatcttcttcaataggaggcctgtcattatgaaggcctgggacccgaacgtgaattttaaaaaagaagatgtttccttagtcccgatttggatacaagtagaggaattggagctgaaatattggggggaaaaatcattattcaagataattagacaagtgggaaatccggtgatggtggattcggttactaaagagagagacaagttatcttttccaagggtacttgttgaagtatcaatgaatcaagagttcccagatattgtagaatttgaagatgaatatggtaataatgttgaagttgtaatcaagtatgaatggaaacctctcaagtgtactcattgtttcgggttgggacattccactgatgagtgtaaaaagagatcgggttcgaggaaggagtggatcatcaaagccacaggggacaagagagataatggggtactgcaagcagagaaacaacaggggaaaaaaccagctgagacacatgcagaggggtttaaactagctggaaaaatgtggaaagctaaggagaaaccagctggggtaccaacggaactgggcaacacatttcaagtcctagctaaagcatcgacaagttattgtgatttggttgaatctgaaattcctggacagagaacaaatttagataagcagatagaagatgtaagagataagattggaggagggggaggtcctcctctacccaatggataagatcttaagttggaacgtctgagggatcaataaccaacaaaagcaatcactagttaagcaatttattgctctacaaagaattgggttagttggtctcctcgagacgagagtcaaggctactaaattaggagccttgtacttgagagtt

SEQ ID NO: 221869 - DNA, 1464 bp, Cannabis indica
cttcctttttttttttcttttaagtctgatattgtttataaaacaccgtactcgctttattgggtattcgcacatatataaatattgtgtgtatatatctatatatatatatataaaggtgtgtattttaatatgtagttctctaatgcagcaaggattgctatattctcattatgtttttgctttttacaggcttttgatcgacagtgaataagcatatcgacataatttctatttcttgcttcatcaacgagtatgataagccttaatgtttgcttggtggccagtttacagaggagggtattgtgttgactttgacatgattatagggcagttttccgaacctctttgccgactattgcttgcttacattgttcgtgcacagtatttgtactatttagaatttcaaaataaacagcaattccgtaatggatgctctgcattggattttttaaactttttatttggaattccctttcattgggttttttttttaattctatccgtaaaattaatttaatttacaaaattacctttgctaattttatttacaaatataccgatttcaacatcagcaatactaaattcaaagtaattctaccaaagcttgtgggagggaagtacttattaaatctattcttcaagctatttcaatttatatgataagtgttttgaagtttacggcaaaaacttgtataaaattaaagtctattgtaagacaattttggtggggttagtttggagatcaaaggaagattctttgggtgaaatggtaagcagtatgtcagcctaagacgatgggtgggcttgattttcaagattttcaactttttaatcaagctcttttggctaagcaagtttggaggttatttttatatttatatattcattgtctgtctgaattttgaaacataattatttctcaaactgctctatccttgagggaaaaagttagtttatttcatctttggtcgagtttgatttggggattgaaattgcttaagtgcgggcttcagagatctattggagatggaacacaagttaggactttcaaggacccatgtttctcgcgttcgaggtcttttcagccaattacgaggatgattaatgatgactgtcgggtgagtgaatttatttttccatctggaacttgggatgtagggaagcttcaacaagttttttgccaatagatgtggacataattctgtttatttcattagcaaggtgtgaggcagaagatggttggtgctgacactaggatagagatggggtttataatgtcaagagtggttactcattgacctggtcgctccaagttgaggagggagttgcagatttatctaagttaactcgttggtggaatggagtatggaatctcaatttgccaccaaaggtgaaagtgtttgtttggcgtatgttccatttggctttactagtagccacacaacttatctcttggaaagt

SEQ ID NO: 221870 - DNA, 1943 bp, Cannabis indica
aacaatctgtttaaccactacaatccataagtcattttatcccttaacccaacccacccccccccaaaaaaaaaaaaaaactaacctctctagggaacctacagcttagcaggatttctctgaattaaacaactgcattgataacagttcattctatccaaacaacataggaatcaaaccttcaatagcctaaaaacatggctggacaaaactgagtaatctagtaatctagtataaacaaatgcacatcgatgtaaatgaaagaaccttacttcctcgaaagtctctcctttggctctcagtagtaccagaaaagcactaatcaaagtctcatcggcaccattcagcaaaaaatccagtgacgattcagcctctgactctgataaatccacacgatttatcaatgattcaatcaactgccaaaacccatcaaagtattgattcaaacccatttaagtgatcacccaaatatcattgtccacattataaaaactaattttttttcaaaaaataaaatcatttcgtacctcattgaaggatgatttgggtggggttgaattttcaagaacaatgggcagagcactaaccaacgaactagctccatcattcaagcttcttcggcttccatggaaatgcaatgatgtggcgaataaacggcttctagactggttctggtgctcaagcttagtggagccagccgatgaagatagaccaagtagatactggtgtgtgcacagtgccatgattgtaaaagttcccaccccaaaaaaaacatagagaaaaaataaaataaaagattattccaactttgaacaaacaactggaacagtgtatggatttgatttatagaacaaaggtttaggacccaaaatagtgaagtgtaggtgtttgggtgggacgagaaatctcctaatcaatttttatccattattggcatcatcattcttaaatttcttttattattttatttttagccaaaatctacatttgggacatgagtgagtggattccggatcacattttcgtatcttcccggtgtaggtttcaacggtcccctcattcaacagccaaagcataggacttttcttcttttttttttatacttctcattcaacagtcaggtgcctctattagccaatacagtactgtactctttttaggggtatgtcatatatgcactttgtaatttattattattattattattattattattagtagtagggtgaatagtagcataagttccaaagttaagtgtcataatcctaatatttatttttagcggcataaatacccaatgtttgtaaaactataatttttctttaatttcgttagtacaaactctattattttcttaaatatgccacatataaggtccagattctaaatcattgggtctagacagaaatccaaatgttctattaataaatttaaaatagagtcacaaaattggaagaaaattacagttttataaacattgagtaattatgttgctaaaaataaacattaaatttataccgcttacaaacttaatactttggacacttatcctgttatttacccttattattattatttttgaaagagatgcactttggaattggatgattgcaatttgaaaaagagttcagcttcagcataagttaggaagagtggtagagtagtctacttttcggcatcggtaacgtccacactttaattcaaataaataaaaaattaaattttattattattattattattatttgtttaacatataatattagactaaaataaattgtgacatgttacatatcaatatgggaatagtatatatttattgtaggttataaatatatataaaatatgatataattaaacatacatttttgtaatatatgttaggttacaattttgaaaatagaactgcaacctatgtatatcttggtaatatgtaattaaga

SEQ ID NO: 221871 - DNA, 1687 bp, Cannabis indica
taggagttggagaacctctgttcagatgagattgagatcttaagagagagatagagagagaaaatattgagatcgtagagagaggtgcagagaaaagagagagattgagttgggttttgtaagaagaaacttatctagataaagaagattcttaaatgaaagtgtgagagttgaaacactttgtgagaactcaaaaatactcatttgttctttactaattttaaaaaatactacttttttttgtaataagaattcaaaaataattattttggcagtcctatatatataatatgatcattgtactatattattttttttttcataagtaaacgacaacacatgggtccaatttacagaaacagaaagtcacgaggaactataggttatatatatggatcacattttctcgtgtataatttaaaaatagtacataactcatagattatttataattaataattatgtgtatatatattgtttaaacaaagttatatattatatattgttaagtacactatgctaggtttaacatatattttgtattaatcaaacaatttttaaattttagggaatttattaatcattcaataacagatacaaaataagttattaatccaaaacaaagcttatacacaaaaagaatagttttccaatataattatatatatgtattgtgtaatattccgaattttggttgtatatataattaacatttagtattattttaccaaacaaaaaatcaaacactagaataagtactatatatacaagaagacagaaattgggattaattgaattagtagtagtatatacttatgtttaatatatatggacaaaaatttacctaagtcccaccacaccatgaaagactctctttcccaataaatatagatttccccaattagggttaccccatgataatggggtatatatacttattttttagttacataccaatgattcgattccatgatctttttcatacgcacctcaacattttttattgggagatattagtggcggacttagaatttatattgaggaaatacgtactttttttttaagtgaggggacagacccggttctggaataagatgagttacgcccgtgcctaagactcactcaaacccagaacctaaaatttttataaagtatatttttttgcattaaaaaaatagtatttttgaaaaaaattgtaaaagaacgctcaataatattcaaattttacattaaataaaacacacactaaacaaatttctggagctcatattgtccggggaaggtcaagtactgtgatgattctaagactgtgtaagtatgagattatagtactacttataaatgtgcatcttattttttagtaactcatcacgaaagaattttatagttaaacgtgcttgacctgaggtaatttcaggatgggtgacctctgagaatattcatgtgcgagtggaaacactatcgtgttggtttgtaaggtcaatcatcattccgtggatgtaaggatccaataaaaatttaaaacgggaatgttagagacttgaacccgtaatcttggtaggataaaagaatgtaaatttagtagtgattatattgcaaataaaaaaaaaaaaaaaaaaattatgataagtaaatccctacaaaataaaaatcatgagttggttactatgatatgatatggtactat

SEQ ID NO: 221872 - DNA, 2652 bp, Cannabis indica
gttataattaaaattataagaggttttgctataagtattttaataatttaagtataaaaaatttaattgctaaatgataattatttagtaaaaaattacaaaaaattaattaataattataattaatttaattttgaaatacaattaatcttaattaaaattttataatgaaataaagtatcaagttactataaggttacaaactatttattatttatttttattaaatttataaatatatcacaaccactcaattgtaatttaatggctaaaaataaatgtaatcatcatggttataaatttgatgtaacaattgaaatcttctccaaataaaaatgtaaaaagttaattatattaatgagtgacaaaaaattaaaaaaaatgatatttattatcgtgtaaaatttagtgttatattttatattaaatttaatacaatttttaatataggctaaatttaaaccgcattgtacactattattaaaattaattttataaatatgagctaaaaaaatatacacactatttataacattcaaatggagatggtctgtcttttaatgttgttgttaatttattatttattagtggatcacatattactttagatattggttgaagattaaacgaccataattttggccacacatgaacctcctcaacagtcacatgggaaattttgttgcaccaaactcacttattattttattatccatccatataaccaccataccatcacctcataattagtaatcattaatgaagttgtttgccaagaactatattgaacctttaaagcaatgtattgaggaactgccacaaaatctttcaaatcatattctgacctgtttaacacaatttttagaaaatttaaaacttttttatgaaaaactctagtgtttgataaatagtcgaaaatataatttatgcaaaaaaactacaattagcacaccacaacttttaacttatttttacaaaagttactatttcaataatttcgcaatatatttattaatttctctaaatatatttacttatatatatttataagataattatagaaaataagcagtaattactttgttgctttggtagtttaattatatcaataaatatgatttatattgttgactttaaatttagccaaccaataatagagtcatatttataactgatatcaccacgtgtacgcaataagaacaagtaaataagaatgataaaatatttgtatagaagttcggccccttgaattagcgggtagtgacctactccccttttagttatattgatattagagataataacactcagatcacaagtgttgtagattctggagtggctcttttaagattacaatggtgagaataagtagcaaatctcaagtagaagagatgagggagacttaatctcttctacactgttaaaggggtgtagaagagtgttaagaccaatcaaacagttgacagttagttggttagaactgtttgttagtttgttagtttgctggttgttatttttctgttttggctttgagttagttgttcggttagagttctgttatgactcttgtatataaggttgtacattgatttgctcaatgagataattctttctttctccatttctttctctgttcctttctctgttctttcttctccttcctctttctttctgcaacattgttccttgtgtttcatggtgttacaactcaatggatcggaggtttaacatggtatcagagcaattccctccgctcaatgcaaatatggctactctaggagctgctggtggaaacttaaacacctctggtgttaatggagttcaagctactcaacctcgatctcaagagcctgtttacttcaaccatagcatttcaattcgtttgaatgatcacaattttcttttgtggaagcaacaggtccttgctgcgatcaaaggtaatcggttactgaagtttatcaaagatccacctccagctgaatttttcactccagaagatcgaatacaaggcagagtcaatcaagattacaccagctgggaagttcaagaccaacttttagtctcatggctactgtcatcgatggcagaaggtcttctaacacgaatggtagggtgcgattcatcacaacagatctggtcgactctcgagaagcattttactctgcaagtatcctcaaaaattctggagttcagaactaaattgcagaatctaaagaaaggaaatctcagcctcaatgactatctcttaaaggtgaagcagactgttgatcttcttgcctctgtaggagaagttctgagcgatcgtgatcatgtggcagcgattttcaaggggcttcctagtgaatatgatacatttgtcatatccactaatactcgaactgagcaatacacagtcgaagaaattgaggctcttcttcttgcctcagaatcaagaatcgaaaagtcgggaaaggaaatcgatctcagtgcgaatcttgtttcgaatgatcaagatcttgctatggatcctctgatcgaagctaatcttgcctggagaagattttgacagcagtatggaagaggaaacgcacaatcaaatatcaacacaggtctgttcaatccagtaccaggtagaaatttcaatcgagctgagaactttggtggcaaaggtaa

SEQ ID NO: 221873 - DNA, 2598 bp, Cannabis indica
ttttattttatttttttaattgacactcttcttatattatatgttttttatgaaccagaaaattgtattaaccacaaaaactttttttacatcctaacgacattttaaaaataggcctgtgtgtaagaaaatgagagagagaagaagatgaaagatagaaaagagaggctcacgaaatatgtaacgccttgacccatagagacgtcatgtttttacaaacttatttctaactaatttattaattgaagaaatgtatggtttgattaaaaacttttttattaaattaaaataaaacactcgtacaaaatacctgaacatctcgagatacaactttcgcatctacgaatttaatccccaaatcgcctttcaatgttgatgttcctccacaacattttaactagtagaatagtcttgttctgcaacactttcacatttgaattcaggatatgaaccggttgttcttcatatgacagatctgtctaaagttcaatatcctcatagctcagaatatgactcgtataagatacatacttccaaagcatcgagatgtagaacccattgtgaactctagatacagcaggggggtaaggttagtcgataggctacctcaccaaccctttccaaaacctcaaatggattgacaaatttgggactcgactttcccttctttccaaatctttggattcccctcatcggggacatagaaaacaaaatccccaacctggaattcaatttctctatgctgtgaaccagcgtagctcttttgtctaccctgtgaggcaagcatacgagcttgaattccttaatggcctcactcgttctttgaactgcatcaggtccaagatacctccgttcacccactttatcccaaagaatgggtgaacgacacttttttcaataaagtatttcaaacggggccataccaatagtactctaataactattgttgtatgaaaactcaatcagaggaaggtacttgttccaaaaaccttcaaagtgtaatacacacgcccgtagcataaccttaagtatttgaataatcctctcagactgaccatcagtctaaggatgaaaactaaactgatctttaattttggtacccattgctcattgcaactctcccaaaacttggatgtaaactttagatctcgatttaacatgatcaacttggagcaccgtgaagcctagctatctacttgacatatagattagtgtagtaatctaccgtatacatagtctgcactggtaaaagtgagctatctttttatatcgatccacatttacccagatgaaatcataaagccctactgttcttaatgatccaaccacaaagtccaccattatctcttcccattacactcaggaatctttagaggttaagtaatgtagtgaatatggcgtggtatgaaactcacctttttgtctaataccatcatcatctggtacacaaaccctgtctccaaatcgtactaattcatctaatgaaattgagaagctctatgctgactcgactttaaacttttctttatactcttgtaattctggatcactcttttgggctgtcttgattctttctaacaaatcagactgcaacgcaatattggctagttttttttttccaactatgaactcaatccccgctctagtcatatcctcaactaactttgatgagatcttcttcaattcatggactttccttggaccctttcaacttagaacatatgctaccacatttacttttccatgatggtaaaggatctcatagtcaaaatctttaacaagttccaaccatcatcgctgccaattccatatcataggataccgctgttcataatccttcaatttcctagacgcataggcaataactttctcgaactacatcaaaatgaaacctaaccaattcttttgagttaattccgttaaggatgtagagatcttgacaaatccttcaacaaacaacctgtagtatcttgctaatcctaggaaacttttaacttcagttacaaacttgggtcgaggttaatctcgaactgtttcaatctttaccgaattcaccaaaatatcatctttagtcaccacgtgtcctaagaagcttgcttggggcagcccaaaactcgcatttttttgaatttgacataaagcttataccctcgaagacatcacaaccccaaccgaagatgtttctcatgtgttttctgaatttggcataaagcttacttggggcagccaaaaattcttaatttaacggtattttttgattttctaggttattttaacataatatatgtaacaaaatattttttattaattttataatattattatatatatatatttaaaaattaaaattatgtagatattttataaaaggaaatttaaattgaaatttaaaatacttaaaatattatagatatttttaaccatattaatttttagtatatatgctatttatatattgtgttaatatagcttattactttaagttgtaatacttctctttatctctatattttctattttattatgtgtatattttgtttagtgttgtaacattattgaatccatgtttttgtttttttgtattatttatcataaagt

SEQ ID NO: 221874 - DNA, 1400 bp, Cannabis indica
atagcggatattgctatctaatgaattactttatttacaaaaaaaaaaaggaagaccaaatttaactatttcactaaacacgtactctaataaacatacaatttgtaaaataattaaaattaagcaaaaattacaatggcctaaaataacatacacacttatctatttttatttttttatttttttaaaaaaagatagtatttatttattttaataagatagtattatttgagttaggaaattagcaaatgagaacaaaagagtagagtggagtgaggcccacaacacaagatggaagaggtcaaagggggttgggttaggtccaagtttgacaactcaaattgtgatattggaagaacttattagtgaaaaaggtgtaaccactaaaagtggtattgacatgtactaatcacgtcagcccactcataaagttgttatctttgggtttggaaagaagtcatacattagatggagacaaacactaaacaaaacacaacaaaaaagaaatggttcaataattataactttttcctcaacaattactcacacgagaccgcaattatcgctaagaaaaaaattgtgttcaaagttgatgtcgtttttttccttttttttttttttttaaaggtgagtgagatatgattctattgcatgaagaagtttgaacataataccaatagtatatgcttcttgatagttccacaatcatagcccatgctaaggcttgactttactattcattcgatctgtccatgaccaaattccttttctttttctgtcaaattgatctttcaatggttttaagacgttatagttttattgtctaaatttttaggtgcagttttgtcttaagtggctcacaattagaattttttaactcatggtttggcaaaacatgctttcggttagacgatgaactattctaaatcgaggagcttccagcgccaattgtagtttgttgcattgttaaaaaaaaaataatcctcaatgcaaaattataaaaaaagacaactactatcctcaaatggaattcatctatcatagtaaatgtccaaagactcctaaataaatatatgcaatgggttgtttatatcggatgtcccttgaaggtggtctcaagttattttgtttaatttttcgagataacttggtcttatataagttgctttacttgtagtgactcatattttgactttgtatatctttggctagacaattagtttgttgactagaaatttttcgcatcgacgattgtcacagtgtaattcatattactctctaaaaatatatatatctttatatattaaaagtgtctatctaacggcaattcttggtttaacgattcttgatttaacgattttttttttatttagccttacacgattaacttaacagactgt

SEQ ID NO: 221875 - DNA, 1921 bp, Cannabis indica
aagaagaaggagctttttttggtgctggatcaaaaggaagctttttggaagcagagggctaagcaattttggttgaaggaaggtgatcagaacactaaatatttccatagagctgctagtaattggaggagtttcaaccaaatttcaaaactcaaagattctagtggtaattggaaggattgggaaaatggccttgcggatgtagttgtggattatttctcttctttgttcagtgcttcaaatttgggtagtgacatggtgattcagtgtattcaaaggaaggttaccactcaaattaatgaagagcttcatcaaccaattgttgccgaggaagtaaggaaagctatattcagtatgcacccggataagagtcctggcccagacagtatgacacctgctttctatcagaagtgttgggatattattcagcttgatattgtcgatgtggttcagaagtttttcactacaggggagtttgattctgcttgtggagatgctaatgttgtgttgattccgaaaaagaagcttcctgaaagtatggttgatttaagacctattgctttatgtaatgttctgtataagatcattactaaagtaatggctaataggatgaagccttatatggatcatattgtatcggaatctcaaagcgcttttattccagggagacttattactgacaatattctggtttcatttgaagtgcttcattacttgaagaggaaaagaaagggcaaggatggatatatggctttaaaactggatcttagcaaagcctatgaccgcattgagtggagctttttggattcggtgcttagaaagattggtttctcggatacttggatttctttggtgatgaagtgtgttagttcggcaagatacagtgtgattcgtggtgggagaactatggggccgattactccatcacgaggtatccgtcaaggtgatcctttgtcaccttatatttttattctgtgtgcagaaggtttatcaactttgattaaaagatatgaggatatgggcctcattcacgggtgtaaagtggcgaatggtgcaccgaaagtgtctcatatgctattcgctgacgacaattatttgtattgtaaagccactctacaagaagccaatcagattcgagaacttcttcatcaatttgaatgtgcttcaggacagaaagttaacttggggaaatcatcaattttttatagtactaatactgtgaatcatgtgagggaggatattaactctttgctacaaatgccacaagcagatgaaaggagtatgtacctgggcctcccaagtactatgggaaggaataagtcggctgtgttgggtttcttgaaggatagagttaggaaaaagcttcaaggttgggattcaaaagttctttctcgtgctggtaaagaggtgttaattaaatcggtagcacaagctctccctagctatgctatgaatgtgtttttgcttcctttggagattagcaaagatattgaaagtaccatggcgagattttggtggaagatttcgtcgaaggaaaacaaaggtataccttggatgtcatgggatcgtatgtgtaatagcaaaaacaataggggccttggttttcgaaacctccatgattttaatttggtactcttgggaaaacaaggttggcgcttcctaacaagaactgagtccctggtttctcgtatttttaaggctagatactttcctaatggaacatacctctcggttcctataggcaacaatccaagttttgtgtggcgaagcgtttgggaagctcaatctcttgttcgtgcaggagttcgttggagtgttgggaatggttcttctattaatgtgttgaatgaaccatggctgcctgatcatcagcaaccactagtgatttattctcatctagcccttcaacatgctaaagtgt

SEQ ID NO: 221876 - DNA, 5687 bp, Cannabis indica
ttgtgatcaatcccctcctaggagggagttccttcggaaactcttctggcatggtgtcgggaaactcctccaataatcgagtcacttcatcgggtacttctacccactgatctagttttatctctatcaaggtagccacatatgcctggttgcgtttcttcttaatagagttcccgaatcgggtcgctgattccaacacaatgcccatctctttattctgacttgaggagattgcttcaacaaagcatgggcagtcctccaaacaaatcataacccctctcaaatgggatgcaaccattgccttggctgcactcagaaattctactctaagaatcacatcaaaatcatctaacgggaccaccatgagtttggactgagactcccacgccccaacctttaacatcaccgtagcagatctttgaatcattttttcttttgagtttactgccttcaaccgagttgaactcttgatcacttccagaacaagtctggttgcttccttctgtgcaacgaaattattcgttgcccctgaatccaccatggccgtcacttctctcccattgacaaacgccttcacatatatcaaacctttgaacagatttgatttcttcgtagtgatagaattgagaagttgtaaaggattcattctagaagtagtttcttgctcgctgccacttcttccatcttgtatgattagggcattcaacttctctcgactaggacattccctcgcaatgtgaggaccattgcagatgaaacaccccacacctttcatggcatttgtttgtgatcctttctagttattcccaccagcaccatctttcttcttgtcatcgtaattttgcccacccttggacgtggaaggcttttgattatttttctttccccccatggatttctttgaattatcaccttgtgacggattcaaattatacttgtaatccacaaatttctcggcagccacaatcgccaatggtaaatcagttaccgcttgcctcctcaattcagcctgtgcacacggcttcaatcctgacaagaagttgaacatcttgtcctcctcggacatgttctttatatccagtaacaaagaactatattctttcgcatacgctcgcaccgaaccagtgtgcttaagtttctttagggactcaggagcgatccatgccgtgttgcctcgaaggaactgatctttcaactccttcttcaacacgtcccaagtctcaatattgggccttcccaaacgtgtatcttcttccatccgggtgcgccaccataattttccatcaccctgaagatacatgcttgtaatggtcactctatccacatctgaaattcttactgccttgaagtactgctcgacatcccaaaggaaatcctccaattccttcaaattcctactgccattgaaggctttcggtttggggactttgatttttgaggactgggctgaatatgactcggttccttgtgacagatttgctatttcccttttaattactgctacatccgcatcgagagcaatgaatctctcctacacagaaaaagacaagtccgacagtttgtccaacacccccttcatcttctcatcaaattccttctgcatatccatcatggccgtgtcacaaccggaaacttgattgtatgattccttcaacaaatcttgagccagcgccttaagggactccagttgtttagaatgctgttcaccaatatcaaacaaactgacaccatcatcttcattgggagaaccaacaaactcttcgagtctttcaacccgagtacatagttcattaaaagtacttatgatgatggacaatgtgaagtagttatgatgaagagttcgacccgagtacattttcctatctaattctgtgaaggagagattcatggctctcgatgtggatgtagcagtaattaaaagggcgatagtttgtccaacacccgctgcatcttctcatcgaattccctctgcatatccatcatggccctgccataacccgcaacttgatctgattattccttcaacaaatctcgagccagcgcctcaagggactccagttgttcagaatgttgttcaccaagaacaaataaactggcaccatcatcttcgttgggagaatcaaccaactcttcgagtctttcaactcgagtacatagttcagcattcgtcaccatgattttttcaatttacccaagacaatttccgctctgataccagttgtcacaaggctaatttctcacactcaaattttccgtgcgattgacctagattcaccccaatctagtcagccaacccaacaacccgttagtatgcacacacactcacggtttagttttgccaagtgtcactcaacaacacactcttgctcgctaccgcttcttctatcttgaccgattagggcatttaacttctctcgactaggacattccctggccatgtgaggaccattgcagatgaaataccccacacgtttcttggcgttcatttgtgatcctttctagttattcccaccagcactatctttcttcttgccatcgtaatttttcccacccttgggcgaggaaggcttctgattatttttctttccccctgttgatttcttcgaattatcatccagtgacagattcaaattatacttgtaatccaccaatttctcagcagccacaatcgccgagggtaaatcagttaccgcttgcctcctcaatttcgcctctacccacggctgcaatcccgacaagaagttaaacatcttgtcctcctcggacatatattctttcacatactcttgcaccgaaccagtgtgcttgagtttttttagggactcacgagcgatccatgtcgtgttgcatggaaggaaatgatctttcaactcctttttcaacacctcccaagtctcaatattgggccttctcgaacgtgtatcttcttccatctagttgcgccaccataatttggtatcacccttaagatacatgcttgtaatggtcactctatctgcatttggaattctagctcccttgaagtactgctcgacatcccaaaggaaattctcgaatttctagtgccattgaaggctttcggttcagtgactttgatttttgaggaaagggctaaagatgactcagttccttgtgagtgattcgttatcgcccttttagttactgctacatctgcatcgagaggcatgaatctctccttcacgatagtttttccaacacccccttcatcttctcatcgaaatccctctgcatatccatcatggccctgcaacaacccacaacttgatttgatgattccttcaacaaatctcgagctagagcctcaagggactccaattgttcacaatgttgttcaccatcatcttcggatgcgttcatgtttgaatggcttcttatgtcccaaaggaggctgcaagcaccatgttcctctgtcaagcccccatgtacgtgcgtgtggacagtatgcaacacatagtgtttaaatttcctaatttttccaatttttcatgattttgtcattttatttcatggatataaattttaattttttggtagactttttgtgtagatttttatttttgaaatttcaaagctaattattatattaaaattaattattgttaatttgattaattttagacattagaagactttgaatttgaaaattgatattttctacaagttgctattacaattacttttaaaattttaattatttattaatttttaattataaaattaaatatttatattttatttaattaataaattatatgaaataccttatttgacattaaaatatgaatattatttgaaaataatatagatattttttaaaatctaaccattaatttatcagtattttaaaatttagttatttaaattcaattatattatgagattagaaaaatagtatttatttatcattttatcttgttagatatttcttttttttaaaataacattaattttgaatagttagttgaattttttctttgaaaacatatttagaattgttacaaccctaattttcaacattttagggtttactttttaaaatttaaattaaaattaaatcttatacccaaatatcctaacttgttacatgtttatttatttattgaattgtttatttaaaaactttttttaataaacctattatttattcactttaaatggctatgattatcttgttgatcaatccaatgatccaaattaatcatagttaattgtcaatagatcaaataaataaattataacagataattcggtaatcttcttttattcatgtcataaacttagtaacatgtaggacccatctaagtttgtgtatatatatatatatatgtatatgagcctatatgtttatttttgggcttagatgcatataggagcccatttaattttttgaaaagtcaaatggactaggttgctaacataaaaagatcactttgataattttatttagactcaattagcatgggacttatttaattaataataattatttatttaaaggttaaattcctatttttggccttgtgtgagagttatggaactatagtagtgggtatcacatagcgaatccagctctccctcacacaaccccaactgtgaaggctcatttgtcttattaaaataattgtataagactagttatattagtttaatttaattcaaatttattagcaacatacttaattttaaaatatgtgaaataaagtttttattagattattttaaaattaatttaagaaaaataaacttaaaaattaatttagaaaaataaacttagtttaatggaataaattcaagatagtaaatttctagaaaatctatatgtattttttagatattaattaaataagaaaattaataattaacttgatttactgttgataattaattaatttgattttattagaaaaatatatttaagttaaaaattgattttttgattaattttaaaccaatttaaattaattttttttaatataaattaattattaagttgatttattgaagatatttaattaacaaattttattttaatatatttaatgaaataagaaaattatttttatgttaagaatttaattatttttgaacttaaatatgaatatttacagatatttattttattttattttaattattatttcgaaatatatatttttttatagattagaattttaaaattttatttgaaaattaaattaaaattaaaaattaatttttaagtaattttagatcaacttatattaagtagttttcagtaataattaattaaaataaatagtaaataaaaaaatacattttttaaaaaaataataaaatttaatataagaaattcgatctccatttttggttctacatggttattatttttaatgagattcatccgtagttgatgttcattcattagacaatttaacatcgtacaactttaaaagatcaatatgttagaaatttattggggtcacaattgtatatatgaaatgtgtgttgggtcatcaaataaataagtcaaatttatgtggtctattttagaataaattttatgacttaagggcatgattatcatgattttaatatgtggataccataaggacaatttctattttgatgaggggccaaataaaaatagtcaataaatattaccagcaggtttgtctgttggtaatata

SEQ ID NO: 221877 - DNA, 3346 bp, Cannabis indica
ctcttgaagttaaagcttgaactaccatcttcgaattcggagaatgtgcacctctcaccagcctaactcaactgccgaggacagagcaaggagaattgctctaaattcagcttccaaagctaattgcaactgaagtttctgtgatttaacaaactagctaccagaggaggtgtcaatgctaatttctgcaatgtcagcttccccccgcacccacgaagcatctgtgaagagaacatgacaggcatgcttgtcacacggccccaagatcatagcattttccaagctctccatggcagggttagtctcaaagtatccttccctgttggaggtaatcatgttctgaagttccaaaaatcctttttcaatttctgccaaggcaaaggaagggttgacaagagtgttattaatgtagaaagcattcctctgttgccaaattttaagaaaaaaagcaaccaatataattaagcatctcatttctactaacaccagtcgaaatagaaatcagattttccagcaaacttatcaaggtatctcttgggatatcatcaatcctcattggaaatcttcctccaaaccagatggatttagagaaactacatctgcaaaacagatgaaatgcactttcctcttcaacttcacaaaggctacagactttatcgtgcataaaatacaatatattcttgctaggaatagcgtcattcaaaattctccaaagcagcactgaaattctaggttgaattcccacatcccaaatccacttccaaatgtctttagctggggcaaacctccaagaatgcttcacaccataggctgctttaactgagaacaaccctctcggattattcttccaatatacttgatctaggaatggggaaggtatccttggaatgttgaggatacgatttcccaagttagagccaaaaatctacaaaatcaactccacattccaaccattgcctgtcgaaacgtctgccagagactgaattgtatatcctctattcctcatgctattaatcaattccacaaactcttgatactccaaccaaggaatccatggctgaagccaaaaattaatggactctcccaaagcagcaactgaaatcgagcctttaaaaatcgtttctctcgttccagaatacatttccattggaatgaatcgttactttatgattcacacaccagaaattctcatacttgcaatattttttcagcaaacaagagacccaaggtctctcttctttagttgcaagactccaagccaactttgacaataaggctttattcatatattcacatcttcttaaccccaactctcctgaagcttttggttgaaaaatctaatcccaagccttaagagccagatatatattcctgtctacattccctaaccaccagtactttctcatcaatgaatctagttcccgacaactagcgatagggatcttggtagtggacatagcatagattggcatcgacgaggtcactgacttgattaaggttagtcgcccgacataagagaggagttgcatcttccacccttctaatttcttcaacatactttccttaagcctcatgtaatcatcttttttccttcttttgaaaataaatggattacccaagtgcctctctactccacgaacttgatcaatgttaaggatacccaggatattgtctttccttccgctactcaaatttttcgagaagagcacactggacttggatttgctacacgattgacccgaccatttttcataagttaagaggcattcaatcaacttctgggcatcattcacattggcacaagtgaagaggataatatcatctgcaaacataaggtgggacaccaggggagctgattgagcaatcttgataccatggataagacctcgttcttccgccttaacaataagcttcgataaaacttcttggcaaaggagaaataagaacggagaaagcggatctccttaacgcaaacctctctgagggatgaactttttgagggggcaaccattcaaaagaaccgcataagatacacttgttacacacgccatcaagagcttttgacttctatcattaaatccattagcacaaaggactttatccaagaaaactccattccattttgttgtaggccttgtgcatatcgagctttaaggccataaggccccgtggcccccttttgtgatgaatcttatggatgatttcttgtatgagtatggatgatttagctatccatcttccaggaataaaggcagattggaaaggagaaactagatcgttcatgagcagtcttaacctattagataagatctttgcaattactttgtaagagaagttgcaaaggcttatcgatcaaaattgatccacactaagaggaatttccactgtagggatgaggcaaataacggtattattgagcttaggatcaataattccacttgagaagaattttttgactgtagcgcataaactcgagcccactatatcctaatatttgcgaaagaaacaacccaaaaaaccgtcaggccccagggctttaagaggatgcaaacagaaaattacatccttaatttctgcatctcaaggaattctggagaaattattattcgagaaggagtcgattcttttgacaaacagttcttcaaaatcttcttcaatgcaaggccgagatacatttggcatttgcaaacgtaaaagcacaagacacattgtaataaaacacaatgatttttagtgcacatttattgaactaagattcacaccattttctttgagccaaaaataataataaaaaaagatgaacactattttcaatcatttgtaaaattaaaaatatctatattacaccattctaatgttgaattggtaggttctttatcttttttgatacttaagagagctattagttgataaaaaaagaattattagttcaatttttctttttatgattgcgtactgtataaccagttaagaacacatatatgtttttagaaaattttgaatatttaaagtgctggaactactcttccaactattaaaccatccacgaaaccttctctttcgacttcttatgcaactccagttagatacttttgtacttccagacacatctgtccacccttgaaatgacttaatccttatttttctttatttttgctttgattttgggggataactaataagggtccccttttttacttgcagagataattttatagtgctttgttacaggggccttttgatgtataaatattttgctttcatacctctggaggtataaactgtcggaatatgttttaccaggatctagatttactaccatgtatgttatttaatatcctaaata

SEQ ID NO: 221878 - DNA, 1069 bp, Cannabis indica
aaattaaaagtcacccataaatttttcaaaaaccaagaattttagttatataggcacactttatatagaatatatatatgcagtttttagtggaggttcatgaaattgaattgtataattttaaattatatttagtatatattaaagattagattaaatttaatacaaaatatagcatgagttaaattttatactacaataaatattattattttttatttggtcatcttactaaaattatactattctaatgaaattctactaattttttacttacaccttaagaaatattagaaaataattattgtaatggataatttttattaaaaattatttcgatcttgtaaaattaatattgcatatttaattaaaaaatggacgcataatctcttccacctatatgaacatttattgttttttggaaaatttacaacttttattcaaagaaccaaatcaattgttacagaagaatacaaaaactgagaataggtgtctgtttaaatattctcaatgaggccactcgtaacagaagtagctagcacatgggcaacgccattcgcaaactacaaaatagcattacaagaaccaccaccactagtagctaacaaattacaaatttaaaaaataattgactgatagacaaaattaccactttgtttattaatccagttgacaaccactgttgaataaaaatcaacccatgacagttgaaacccaaacctaatggccaattccaagtcaagtcagacagcaacgagctcagccacaggaaccggaaaataaccaacagctccatctacccaagcaacccacacagtcctcgaaccatcttgaacaacaccacccagcccgacaaagcctctacctgtgaccactgcagcatctgtagccagagcaaaacctgaaactggtgtcaaccacctagtagagctcttcaagattggcacagctgtcacttgaaagaaacctttaactctatgatcttgaaactccgacaatgcagaaagtgcaagctctgacaacactacaacacgtgagagagaaccgccaaaaggcactgaattcttgt

SEQ ID NO: 221879 - DNA, 1956 bp, Cannabis indica
aaaaaaataaaaatattaacaagcactcctaaattattttgaattaaattttcaatattctcataccaaaacaccttaggagtaatgagtaacctataattttttaaccaaattatcttgatgttttcatactaaaccccctatagaaattagaaatatcgagtgacctgtacttttttatatatataaatatatacatataatcaaatcatagttatttgaagagatctactattttaaaaaacaccttcaatatataatacacacttgacaaagctaaaaaagtattaaagaattttagaatgtaccttttaaaaagggtctatatcgatgcacctttatttattttagtatttgaaagaaattttagttattttttttttcatagttgtctacgtgttgtattatttaagatattttggactcatttggtaagctgtataagggtcgtattgtattaaataataaataacactatgtttggataaatcaatatattgtattaattattacgaccgaattttttaattcaatgtatgttgtattatttaatacataataaatggtctgtattagcttgtattataatatttacaaaggatttatgtacatcaatctccgacccggacccagaaccagacccggaccctgaaccagacacgagacccgaacccgaacacagaatccggacccgtagttaattagtgttgggatcgagtgtattgaaaatatattataactttacacaatcaattaatacaagtcaataccaaacattgtattgtattaaataatactatacaatccaacacaatacaatacactacgacgtaccaaacgagccctttaatacattgaaaatatgatttaaaggtctatttcacacacttataaaataaaagagtcttgcgtgtaacagtctgtttgaactatattttcggtctgttaatttttttaaatatcttaaaattttacataatgtcgtaaataactacaacgtaggcgatcatgaaaaaaattccaataaaaaactatctcagatactaaaacaaaagaaaagtataataacgagaaccactttcaaaagtatattgtaaaagtatcccaagaaatatatatacataacatacttgacaaagctaaaagttgttgttagtcctaataaacaaagagacaaatagaaagagaaagaccattttcttttccttatgaaaagccatattttttctatttttttttcctcttcgtactttaacgtattttatattattgtaacattgttggctttgaaatgtgtgtaatgggtatggtaataagatcataataagaggcttatatattgttattgtttaaattattctaaactactagaataattattaaccattttaaggtgttcatgcccattgtgttgtaagtgattagttgtctttcatatttaatcaaatagaaatgttatgttatgttactttttgtgatgtttataacattttaaagtatgcatggtaaatacactaatacaaactcttaatattatttaaaataataaataaatgtggagatattaattatcactaattgtgaagcaaatatctttctcaaattattactattattatagatagactattacacctaaatatgtttaatttgtgtatttaattaaaataaaatattttttagggtaaatattattttggattttgtacccatcagatcttttattttgttaaatgataaaatagaacctgtattttttaaaatagtcaaataggaccctgaactaattttttgtcaaaaaaaaatttaataataatccaatctaaggtgttatgacaaaactgtttatattttttatatttgttcgtgttaggaattgtcttcaagttgtttatattcaaaaaaaaattgtcaaaaattaagctcagaattctatccattttgtcatttaacaaa

SEQ ID NO: 221880 - DNA, 2316 bp, Cannabis indica
atttctaaaaaattcttttaacagaagtaaactttagtagcattcacttgttacatttgcgttacattaattttagtgtaatatggctttcattgcagggtccaagagcaacttggtatgtgcacgagctatattacaatgcaatcagagtactttgcaatgcaaatatctccgagcatttcaaccccaaaaaagatgcatcattccccgaaatcaacctcaaatcaggagaaatcagaggcctcacgggaggcctcccactctccgagcgtaaactccttggattcttcgcaggtgggtgccatggccgaataagaccggcgttgctgcaacattggaaagacaaagacgaagaattgcaagtgtacgagtctctgcctgaaggaatttcttacgaggagaagttgaagaagagcaggtactgcatatgccccagcggccacgaggtggccagtccaagaatagtggaggcaatctatgccgagtgcgtccctgtgctgatctctcagcgctacgtgttgcctttcagtgatgttttggattgggagacgttctctgttcaagtttctgtgagtgaaataccagagctgaagaacatcttgttgggaatatcagagggaagatatttgagactgctagagggagtgaagatggtacaaagacattttgtggtgaatgatcctccaaagagatatgacatgtatcacatgattcttcattctatttggcttaggagattgaatgttaagataaataataccatagttaatgattgatcacaattatagtacatttttttagaactttttgttattaaaactaacagatgtaagcattaattgacttcaataatcaaacaacaatcataaataatgtttatgagtacacaacaaagataaagtatttatttagagcattaatagttaagaaaaatataactcccatattgtttatcccatcatattgaacaaggtttgagtgcaatatgcaagagaggaaaaaagagacaattgtggagcaaccgacttagtgtctaactatccattaacccaatctatgcatccttaatatatatatttttatacatatatatatatatttatacaaaacacccatataaccttaaaagggttatgtattttactgggctaataagggttaattaatggtggactataactttttttttttgaaagaacaacagttcatttaacaaaccgaagacaaaatgaggatcacaggaggatcaccctccccataatacacaccagcatcctaaatagaaactctaactttcctagccaaatcatcggcaacaagattctgacttcttctaatgaaataaaaactacattgttcaactaaattaattaagtctaacacttccaaagataaattaaaaaagttccaatccggagggagagtctttgaagagaaggcctgaattaaagtcctgcaatcagacaaaattacaatcttcctccacgaattttggatagccatcgacaaagccattcgtattgcaagggtctctgctgccattgcattcacacagtggccagtatccaccttgaagcaccaagatttatccacaagattaagaacaactaccgccaaacccgcatagccgtccttccaagaggcatcaacaaagagtataaactctgaactctcgttgagtctctgctcattagccaacaacccagtcttctcaataggagaactcagcttattgcaatttgtaagtccaagctcatgtcccttagctcctggagaactaggtgcacttgaggctttcctcctttaaatctgaccctgtttctccacttccaaatcaactgaaacacgcaaccagcatagctaacaatctcacttctcgaaaaaccagagagagaactgatcaatacctccaggaattgcatcagattagtgcacgacaacaattcaaccaccactggaaatgggccattgaaccaaattggtttggcaaacgcacactcttcgaacaaatgtatgcagtcctcattctcattgtcacagaaacaacaaccgaattttgaaaaggctgcaagtctattaccagttggtaaggcctcactaatactcatccacaacataactgaaatccggggatacaaccctgtctcccatatccatttccaaatgagtggactataactcaataggccaattatagttatataggtgctctcatgtgcctttaaaataattaatatttattaaccatcccattgtggatgttgacaaatattagacacatggttattgtaaagtccttttttggcaagttaggtg

SEQ ID NO: 221881 - DNA, 3458 bp, Cannabis indica
aaaaatatgaatataagcacaacacgacatgcatagcaaattcaaaagcacgaatatattagtatgaaagcaagacatgtaagcacaaaatagtgtcgagatcttaatgaaagaactaatattaagaaacggtacaaatctcccgaaattgcgttttggaagggttgagagtgttacattaagggcttattagtaatttattagtaatatgaaatacctataaatatgtatttgcctagaagttaattgatgtagaatgagaagtataaccttggttcattttgagagatttgtcatgttttgaaaagagttgttacttaacaatgtacgatatgatataatctagaagtgtaagtaaaatataaaaattgagattttagtgagctatatattttgaataataatagattaaaatccaggatattgcatggattttaaggtgagggacttgatgttacgtgggactagaatttggaatgaaaacttgttttgtgcttctttcattgtatcaattgcagagaaaattctagcaattcaaactctccgggacctctaaacgttaaggtagcggcaggaataaaaatataagaataaaaataagaattaataagaataaattagaataaaatttaaattgtataaaaaattagataaaaatattaaacttttccgcatcatgcattggaaggtgttttattctatttcaaaatagaatagtcattctaccaaaatggttgaaaggtcatttcattggaatgatattttattactttaatatgcaatcaaacaaattaatgaatgaagattgttttattttcattacattctatttcatcacctcaaaccaaacgacatctaagtgttctggagaggctctcttctttatattcatatagtatatttgaaagccacttaattacaaatgcgatattatatgtttaatctagtgggttgggaatgttatattattttatataatataatatttagattaaataattttgttataaataatatagtgtgacaaattattaattttatcaaattgtaacatgcattatagaattacaaatgtgttgatattgatcataaaaaatgagtcaacaattcttgagaaatgatgattataaattgtgtaactctcctctcaacattatcacttttaaattagtaaaagatgttactaattgtttgtaaatgtgaataaataatagctattgaaagtatagttgttggggacttgatttattcatatttataaagtgtataaatggtttaaaattaaatagtaatgatttggaatactttagagaaaaattaaccaaaactgaaaaaaaaaaaaaataagtaactagtgaccagctacatttttattttcaagaatacaattgtatgtgtttctgaatgtttgtgagcttttctaacatttaaagattttatggtggtcattcatgttaatatggaattagaagttaaaaatctataaatagagatcatattgttcatttgtgatactctaattagttgaaatcacttttgttgtggttagaacattatgagcatatattcattttaaatactaggttgaacatacaaggtttaataaattcttaagaacatttttagagtttctttaagtgtatgacttttaagataaaagtcatgagggttggctcaagggtggggcaataggggcccacgcccaatgccttccacccaaatccaaaaattcctttaacaaaaaaggcctcaattctattttttaaaaatatcatattttgtatttttaattattatttattaaaaaatataattattttctaaaagaaatatatactttattttttaaaatactacatttaatattttattaagataaaaggccaaataatatttttaaaatgttatattttagatttttaccactacacgtaaaaaaataacataaaaaaatgatataaaaaatgctcaattagattttttgacccaatgtcctcaattggcttgagatgggcctgatgatcattaaccttatttaagcctttgagagatatattcttctcttttttatattcactgtattattatttgttgacttagcttttagcccacgattaaagtgattgagaataaattgaataacagaatgtaaatattataaagtaaagaaaatactaattttttagaggttcgaccccttatagtttgtaatagtctactctccttttattgtattgacttgcaagaggatgaataagaatgccttcatctctctttaaagcttttacaatgatcgatgagtgatttaatcttagatcgggatttttctcttgagtgttctctctctaaatatatttcatattcttgaatggtgagatggaaccactatttataggaattaattacatgaaattaatttttctaaatcaataataaataaagtgagaaattagtttatttccataattacaataagcaaagtgggaagcttagactggttatctttattctttgaagtttcaaatctgtcccatgaatgtagggattatgccgtgacttgcaaactgaaagatatgcaagacatatctctaaaattgctaactcacattccatgatcggtacatgcaaacgacctgtgtgataaaaactagtcggatgactatacatttgttccgacatcttatcttctatttgtgacttgaagtatcataatattatccgtcaaggaaatatgcttcacgttcaaccaaataaataatataattgtacagaaatttggatagtattattatttttattgcaagaccataataagattataattaataaatgtacacaacacaacatacataataaatttagtatttaccaaaatatagaatcatatatataatcatttcgtacaaaaatttatcaacttacttgtactagactccatatatgaaattaatataatttttgtgtatgaaattaattgttagttattatatttttttatggtgaattgttgaagaagtaaaaaattaagagagtagttacatacttttatttctatggagtcctttgcttctcttgtctatgtagtgtttgtacggattaaaacgacaacttaaagtctttgtacgtttgcgttttatggtcctctaaaggactgaagttgatgtgagtgaaaccccaattaaaagctatatataattaatataatgtactaggaagtaggaattaaatatatgtatttgctcaaactagctatcaattcattgattcaatatttaattcaacactatatatatatactattttatgaacatggctaggtcacatgtgtttcatttcatactttatttggtaaaatatatataataataattaataataataagtaggttaattaagattttttcctcacgaattttgacatgtaccaaattatgacacctaaactttttttgccgtta

SEQ ID NO: 221882 - DNA, 2300 bp, Cannabis indica
ttttcttcatatctgttttataatattctatattattttataacaaaatggtaaatgaacatagtttttccccctaactataccttaatggtgcgtttgattcggggtaatggaatggaataaaaaataattaaatttcattttattcttttgtttagtacgttttatgctatatttgattgaagataatgagatagaatagaaaatttattcttttctattcttattttttattgtattttaaagtacttgaatattattccaataaaatgtcttttctacttgtttattaatattttcaaaaccaaatttaaataagattgagctaaggaaattttactttagaaatgaacaagatgagattttgtacgtagttggggtgttaatgaaccttagtccacgagtcaatattattaaactcttggctatgaagtattttactactttttcttgtaaaattattgctagccaaaatttgtaacccctttcatgaagggaaactgtcatatttataggcactttaccttatggattaggctgacctagacccatgaagatttttagactgaaaaaacccattaatggagtaaattacactttaatattgatatttgggccagttaggtgaggcccaagttgcatataatagtcgtttatacgaggatacactgttgatagtgagatttgtacgtgtgccatcagtttagagaaggagaatgtcagtgcagagggcatttcacaaaaatgtttatttatttatttttttttcgcgagcctctctgtggtttgacacaggggacaagctatctaatttctcaggattatgtcaattgtatgccacgtgggtcggtttctatgagcttggtcattttggaagcccgttcatatcctgttcctgaaagtctcccttgggcacccttgattcatatttgttttctcttttaaaagatggcagatccttctggcttcaggccttcggattcacacttggagaacattcctgacgggtccggcttcgggtctccaaattcatcctccaaataggagggtcacctaaatgagtcattaggacccgttgaatgagcctcatctccttggttggcttttgtagtggcccactttataactatccaaaaatgtggataatatttaagccttcgagactcgagagtcgcgaaggcttgctgctccatgcgggttgaaaatcattcttgggaccacgaactgggataaactcttaatattttgatgtaagatgatgcaaagatgtcccaacctttgatattctattaatgtggtccacatgtcgactgactactgatgtgtgtgaataacaagattttttagagtacgtactgtctctagtttaggattattggctgattatgttattgtgttcctcgaggcgcatgccatcattaagatgagtccctacaattttagtgaaaccattaaatgacttcctttcacattcttggaccgttagatctaggagatttgtgttttcttagactcaatccaagcccttagatccgaagcaaacaaattgtctcttttcttataaatactcaacatgttttctaataaacacttttggccatttttgagttgcttgagttttttagagaaaaaagccctctttcgaacccccccaaaaaattaacggtgaatgtttgatcctagctctaagttagtcactatttattccgattccgattgaagctattttcgaacggtaccccctttattcccattgttcctttgtcaaacttccaagaggatgtcgacgtacttacgaggaagcttcaagatttttagttgagattatcttcggctatccaacatctaccacccacattgccaatcaccacaagtaagtaacattcttttgtgaaattttggtttcttcttatgtaattcaatttcttggctactgtagtttcgatgttcatactctgaataagggttttatttttgtattggtcgttgatcggaactatgtattctgccgtctagggtggttgatttactttttttttgttttctagcaaactagagacattaggaaggtactcgcagttttagaacctttccatgctttgaaaactttgaacactagggatttttgggttttgtcatttccacatgactgtcgattccagtggtcctggcagcattccctggggatgatgttgtgttttgcgcattttgttcggattccttctgatcccaaacaatgttctgtttgttttcatttctttcaaagtgttctaattctattatttaagaacaaatcattc

SEQ ID NO: 221883 - DNA, 3763 bp, Cannabis indica
ctctctctctctcaaccttacactatcacaattttcactcaagcaataatagtctgatttgctctctgattacaaagattgatagttatttatagatttgtattgttgcctaaattaacttcgagaatagcgtgtcacatttacactgccttaaatgttctagctcatcaccaccaacaataatcaacgtcagctttgagaacatgctttcagtacaaacaatccaaaagctttaatatggacaagctatccggatgcgtacaagcgttcctacccggaagaacaacagtatactatccgaaagtgcatttctagactaatgacaagctatccgaagagacagttcatacgcggtacaagcttgcctagaaacatctttcgaattttacaaagtcttccgcacaagactttttggattcacacaccaagtttctcgtatctactcttcggattcctgacttcccttccagatgataaaatttgtaaccattatcaacaaatttccactttagtttcaagcttaagtcgcttgacaaatctttgttataaatactattgttccccttagccccttcaggctcagctgactccaatcagctttaggcagtgtcactctacactaccttggttatcatgtcagaagaattgtctttatttagagtccctcaccaatcataaggcaacacgcatagttggccctaaaatttaatgggctagctatgggaaaaaattatttttgagctcttatctagaaaaaattatattttttttgtaaaaaaaaaaattataatttaaataagggattttttttcttgggtccctgcacttggtgggccctagacacgggcctagtccccacctagttcgtcgaagcccaggtcacgcctgacaacacgtctaaaaagtgttagacactactcgtgcctaataataatgcccataaatattagtatagagtattatcattggacactggtagcaccacctaaagattgcaattggttagcgatatacactaaaaattatttagttgatttatatgagatccgatacttaattgtaatacttaaaaagtgttaaataccacttgtgttttttagcattaattattattattataattattttggataagtagctagctacgtaatacgtatccttttttggacattaattttattcaggatgtgtctcgaattttagatgttaaataaacattttgcttagatttttataatgtacttaattagaatttgcatgttatgattcattgtttgattattaattgactaattgataaatacaggtaccaagaaaataaatagagattaaaaacttcacgtttaaataaatgtagcttacttacacgtaatttcctttaagagcattgcaattgggcagagcattgatgatgctcttttttttattacaaaagtaataattaattcaaaaccttaatatatttaaaaatataaaataataataatattaaataaaattaaataaaaacaacataatactaatttataaaactaaaaaaaaaataacatataaaaaaataaatattaaataaaataataatttaattgtcaactttaatcacttgaagatgttagccacaaaaaatatcaaaatattaacgtatgaatttgaattattttgagaatctgacatgcttgatatagttagtgggtgaactatttttttgcataatccttatttgctcattgacaatagtcatgaatgttaagattaactatagaattttaataagttttttttttaagtgtaatgtttaattgatttaattattttaagattttaaattcttactagtaagtttatgatataattatatcatatattagttatttggggctattactataaataatataaaatgtacgagagttaagtaaaatatatttatttagtgagatatttagtgttaattaaattttttacactaaattgatgtaaattctacaccaaactagtgtaactattattataaattatggttaggatagacgataaattaattttattggatagaaaacccctccaccaatatgtaactccattttttatattaacttttcaaagtttatccttgaaccaaattaagagttttttttaatttttttatttttacattttaaagtagttttttttaaaatttttttacagaaattcacatagtgattaatgaaacaatctaattcgcaaccaatatctattagaacaacttggaataacctataaatcgtaaatttttttaaaaaaaaattagtatataaaataattcctaaaaaattaatatagagattttatcaacaaaaaaaaaaagataaaaataaaaataaaaatatagatagtggatatatttatgtattttttttaaagtgaaaaaaagatagaaaatggaaaatgtaattaaatagaactcatatactttaatacatagaagtgtcccagtactactatccttgtagcttaaattaacttcacgccatgaaattagtaaattcatcaaattaactataattttaatttcttccaaaagatgataattaacatgcatctattaattaattcggtggaatctcatactaaaatgtacacatatatactatactaatcctactgtacttttagtcataacaatatacatttttatgattaaatgtaatttttagtcatagtaaaaagttatttgtgattaaaacatagtatttagttacaaattgtcattagtttagttttagtcacaacaaatattattattaaaaatacatttagttgcaacaaattataatttttgtgactaatacttttagtcacgaattttttagtcacaatacaataataataataatttataattaaccataactttttttttattacaaattttattgtaactaaaagtaagattttttacagtgtaatttaaacattatctaattaaatctcctctcaacaaaatattaattgataatattatatatagaactagttaacaatttgcagttcgttagactaatattaattgataagattctattttgactttaaatactccatggagagatgaatataaattatttatcatatattttacagtacaccagttattacgagataacctaaaaacaaatcatcctaaataaattctagctcccctaaaaataatgtaccgttctatttttatttgtttaattttttataaatgtgtatataataattatttaagctacaaaaaatttaacacgttaaaaataaaatttaaattatttattacacgcataatttttttgttttatacacgtgtgaaataaaaatttttaaataaaatattttcctgaataccaaaaaagatacaagcaaatcaatacaccattatatatattatatatttatatcccagccaattatagaaatattcatatattcaaacttatataaagattttcaaattcaaagccgcccatttgtggagttggagcataagattttgggatcggactgttctcattgtattgcacccattgtaatgatatacatataaatcatgaatcacatgcatgcttggctatggccctctttttttccactacagatttctcttcaaatttttcaaccaagccaagttttttctaaaaaaaaaaaccccactaatatttacatacatgtaatttaaataattttatttttaatatatttatatgttttagtttaatataataattttataaatatg

SEQ ID NO: 221884 - DNA, 2712 bp, Cannabis indica
aaaagtgcggattggatcggatgaacacccctattggaaatgatattagttctacaccagaagttacaattcttgacatactaactaatcatgagaaattcacaaacaataaatcagtctcaatattcaatttcctatttaatatcaaaatctaatcattgctgcttcaatgcaacagatttcccaaattgaaatggaaagtgcagattaaagatgatcggagattaaactgtttaacttgatctctcattacagaatctcagtcgtcctctctttcgggtggaagcccacatggcaaaagcattttctgcatagaaaataagaaagaagggtcagtaagattttcattacaatccataaattgagaagaatcaccatgcagttatgataagttatatacatttaatttttgctttagatcacaatataaagttccaagttccaaatatcaccaatggattaccaaagcataagcaccagaaccagaaggaaggaaggaagtgtgttgatatctctttatggagttcagttaattaaaggttgagcagatataagctgatgttgtcacttgacaaaagttaaagagaaggagacataattttaagtccactagtaggtatattaaatattgccatgactcaaaaacacacacacacacacacatagggttagaatgaaatgaacatgattattcattaaaacatagcaatagcaatggtatggaattccttatagaagtggcaacatcacaattaacaaatgagataggttcttttgttgtgtgagttcaatttagctaaattgctttcttgtaacctaacaagagaggaacaaagatagctctggttttgtcaaggctctttatgctaaaaaatattgttgctagttcggtagtggttgagtgaaattttggcatttaaagcttaatagctggtaactgatttgggactcgaggagggagtctttcactcggattgttctgtgcttgttcagtcggttagggagaggagaccacctgagtggtctaatgcttgcacttttcttaatgttaacaattttcacctctgttggactcctagagcctcaaacatcgcagctcattctttggctcagtgggggcttaagttttcttctagtggctttcttaacttctggaaggtgaatccccatgtgatcaccactatttagctaagtaacggataaaaacaagagaaagagaaagagaagaacctgcataaagttgtagcgttcccttccaatggattcattttcagcaatagcaaagtaggacagaagtgggtaatgtccaacataggatgcatagctatcacgttgaatgttcacagcccattcactacaaaatcccattgaaaaatcaatcatctcatctcatttcatctcataatgatacaaaaatggccacaaaagaaatgaaaagaacacttacaatctgttcaagtcagcatggccagtaccaacatatttagcttgtagatgttcaagctgggaattgatattgaacctatcactggcctatacacacacacacacacaatggttatgatcaatacacaccatagtaatcaagactaagctcgatcgaacacttacaactaatttccacagattctttacaaagaaaaagagaattttgaagcaaaataaaactcaaactgtatagctaattctcggtttgagtggaaagtcaacagatttgaactgttaactccacatctaatctaatcaaatctagctaatctaatcaaatctagggtttatattacagttgaaaatgaattttgggataaaatttaagatttaagaattgaagaagaaaaagaaatacctgcatatttgatggagaaaactttagtagttgagtttgaataatgagatgaagttgttttcgtttgtagctgaagaacaactaaactagttcacttcagatgcaaatccatacgacaagacaaccgtggataaattgtctgctgggcctcggcttgggtatgggcctggcccgttataataaaaaggaaaatttacaccaaaactgcttataaaattcttcaaaacactttctttaagtgttacggtagacaaaaggtgtacataaatagattcaatttaatgataaccgacagatttaattataattgactgctaaacattagaagataaattcaaattaaactaatataaatatatgaaatacattcaacgaatagaaccaatctaatccaacatccaataaatattacattgatttgatgactgaaattaattagatcaaatcagatgataaaatttaacatctaatatataatttgatcggatctgaatatgcttaaaaatattaaatatgatctaattaacactcttaatacacatgccacaatgtacacacataaatcgattttttagtagtgcatatctaccgtgacacttaacaaaaccttttaagcaaaaggagtaaatggctaacaaaaataaaatttggaggattttattatgaaaagattaatttatatagttaagtattactaatcataaaatttaagttttcacactaatatttttaataaaaaaagaaacaatgaaacaaaatatatttttaagagtgaatatattatagagaaaaatgactttgcacacgtggaaaaacattaaaacatggaacttgaactgtggtagtgatgatcacttagaataaat

SEQ ID NO: 221885 - DNA, 1211 bp, Cannabis indica
ttctggaaatcttagttcaaataaatctgagttattttactatagtggaagttggccttcttgtaattcagagcaaatggacacctcgacctcctgcattttcttgtctactcttttaccctaatttctaatttactgaaatggtgatgtagactagaagtatacacattaattattggtatgatattacaaagattactttaagactgtcctggcgatcacatggataacttctccaagaatttattgaatgatcagtcagagtcgtcttaagattatgagatgctgaattaataattttcagaagatagccattattttctatgagcttgtgtccatatgcaagtataaaatagtgcaatataactttgccagctacaacatggaagatgacaaggaaaacaaaagagaaaaaaaacctcaatataggagacgtcttgattctgcaaacctatgcataacaaaatagaagcctgggcagctgataatgaaacaggaagtttctcacagaaatacaggtgagtgagctttggaactagatccaaaatctgtaaaacagagaacagtttgtaatcataaattacgttagtttaaaatagtcaatttcattcgtaaaataaaaaataggtgtgtgtgcaacactacttgaaccctatttttgacactgtaaactttgtgggatttcttgaaaagtacaggatgactactatcactataagttgtgcctgtcatattaaaaaaaattgatataattttgcagatgtcaaaatcataaaaggctctatgtaagaatatatataaaaatatatatataaataacacatcgattttttgaaataagaaatgtagaaaactttctcagccctgctccttaacacaatttctagtgaatcctgaatccaaagtgagatgactgatacaaatgattgtgattatagagtggcatagatttttcttttcacttttaaacatgccaaataaataacaaattcaaatgccacttttgaagctagtcgacaaagacaaaattgaattattctattgcttgagcaaaaaccaactgaaacaaagccaagagaattgatagcaaatatggtttgatattaataattttgttataacaagattatcctcttaacgcccatgtttgcattcaggaccaccagatagaacttagtacctcttgacacaggtgttttacagtcctacca

SEQ ID NO: 221886 - DNA, 1822 bp, Cannabis indica
ttaaaatataaattttatataaaataaaaattattaaaatgtagtttatttagaaatgcgtggagtgtaaataaaatttcgaattgaaatcaagcaaaattgaaaatcactataccatctttgcccgtgatcattaataatttaataatggctcttaaataagtaataagtaattttttttgttatccaacaaaagaaaaagtaataagcgaaattttggatttttttttcttttccgtattcctttttttgtgaattttttaaaattctttattgcatggtctgctttggctatcattttctttccataagacaaaatatgccccacaacttttaatattcaaactcagcaaaataaaaaaaaaattatattcaaaatattaatgataagcaatcccagcaatatattctttataattaattggataggagaatacaaaatccaaactttgattagcttattataaatggagaatacaaaatccaaactttaatttgcttaaaaaacaacttggaaaagtaaagctagaaagaaatctcatagtcgaatcttaaacctgcatcatatttattcttctatttaatatatagtctgtatctttttctttttccatttttccacctctctctatctttttatgggctcgtttggtacgccgtattaggtcgtattgtattgtattgtattatattgaaattatattttatgcaatatttttacataaaactatatgtggtattaacttttatggacacctaaatatacaatattttagtataaattaaagtttaacataatattatataaaaatatgatatataatccaattcaatataatacaatacaatacaatacgatctaatacggcgttccaaacgagccctaaatgagttatctttctcaccccttctttccttccttttcatctattttcatttctactttcatagtttcattttcaatgcctcacaagtcttgttattccttttcaaacactttatttctttctcatataatatgacatttagttaaaaggaataaaagtatacagcaaaaatgggattaaatttaaaaggcataaaaaaattgatagcattaaaacaattttttttctattttaaaatggaatagtcaatccaatagaatgctggaaaaatcatttcattggaatgacattccatactttaaaatgctaccaaaaaataaaaattatttcttttctattccattctatttcactacttccaacccaacgttacctaaagtctatttcttttatcccttttattattttattttttatatcacacttactcctgaaccaaaattgtttacactggcctcaagtctcaaaataaataaattattatttattacgaaattaatttgtaaacagaaaaagaaaaagaataattctacaatatactatttaaaaagggtgcactgatatatatttatctgtttcggcacctagagaaattttttagtctatttttttcattatcgtatatattgttgttatttgacattttgcaaaattttaataaatctaaaaaaaattaaacgccaaaaatagaattcaaatagtctattgcttacgtgattcttttataatatacacatgtgaaatagattatttgaatattattttttatattataaattattctaaatttattaaaatttggccgatgatgtcttaaataaactatagcgtacacgactaagaaaaaaaaatctgaataccgaaacaaataagaattgcatcagtgttgttctttttatgagggtgcattgtaaatcacaaaaataaaaccttaa

SEQ ID NO: 221887 - DNA, 2470 bp, Cannabis indica
cacttagctaatagctgagagctctagcttatattagaaaggaaaaaattaaaccatgaaaacacagaaacgtcgttacacattaattatatatatcatcaagaaatgaaatcaatcttgatgccatcaatcttaactttgcccaaaccactcttgggaaccaaagtaactatgaccttatcatcatcatcagctccgatatcctccaaaagctcagatatccccaaattcagctccgtcttgatgttatgaccaccttcagggttatgtggcaccgtagcgaaactcccagcaaattcagacttctcaggaccgctaatagcttcgtcatcctcgtcgttaatgtaaacgtcaaacttgacggcaacgttattagcaaagtcaatcccttgaatcaccaacacttcttcttcatcctctttctcgaacttgctcctcgatttctttggtctcgccaccaccgtcttcaccgtcttgtccaacgttatcgggaactggctaagcgggattatattaacgtcatcagcacgtgcaataccgtgctttttcaacagtttaacgatctttgacttagtagctctaggctttgacttaagccacggaatatgaacatcttcataaacgtaacctaattttctactgtcaagtgagtctccgaccctaacgcgaaccaattgagcattctcgtcgtagaagacgaaggtggagttgagatagtctgggtcggatatatccactcttttgggtcccgggagagatttccagatgttccacattcggtcaacgttagcatggtgactgtaaaagacgggatctcgtccagcagagtagaagtgtcccatgtcttctccattagaccgtctgttatccccggtccatatatgaacaggactatgtggaacgttctcgacggtacctgctccaggatttgggggagtaccagtccgataagggttgccgaaaaatagcgttggatttttggctccagagaccatggatcggtacatgacttttagattggttttagtttgctctgctttggttgtgggtatgtcgtggccaacttcattttctgtgtagtcaaggtcgactaaggctagaggcaagtgagtttggtttcggttctcatcgtaaagcgaagaggtagggtcgacgaatatggatggtatcttgtagccagaagggtcatcccaattccagaatggtaaagcgaaagtgggatcgttgattaagctcccccaagatttactcataaaagtacaagtaccaacggtggaaaggaaagaaaagccaggagttgtgaacttgaatgtactcgctaggaaagttgacttgatcgtaagcgccattacagtaagcacaatgaactttggcttgttgaatgaaacttctcggatcgtcctgagggagtgctttcatgagctctacggctttcttgtacttggctatctcttcatggtccagccactgagccgcggggcgaatacgtaattttctactaggccgagatggtctgaagtcaataatcttatcggagaatggggcgcaacacttgacgtcagctggatccaagggtggatgtaggggcggatctttcaggttgtggcattttgataagtcaggtgctacaactggggttgcggaggccaatggatttgaggcaaggccagctaccccggtacacgtcctccaagacctatcagcatgtctctcctatcaaatttgctactactgccctcggatggagtagtactggctttgcatgaaataattctacgtacaaagctagcttgattaatattgttggtgggaaatgggccggttcgaatagttggtgcacatattgaagtactggttattaccagcgggtgtgttagggagagtgaagccatgatcttaattagtgcttaattagttttggtgcaagaatttaagaggtatgcgcagcacaacgtttttatagcaaatagcttcattattagttagggtttagtgctttattttttaaattatgtaggtgattcacgtgggtctaaacaaaataaataggtagttagtaaaatgtgtgtactttataatataaatttcaaaattagttatatataaaatcaatgtagtgaattttttatgataattgtatattgtaattaaagtattttttttttttttcaattttggtttcaaaatattatttaatttattttgaatatttaatggcaattacataaagagaatgaattcagaaatatatattcgaataatatgactatacatggtcaaaaatagatttattgtatttcttaattagtggcttcagattttacactacaaaaaattttacttttagtctacgataaaattttgacaacttaaaagtaaaaaagttgtgactaatcataaattatcatttctactttgtaactaaaaagtctgtgactaaaagtattaatcacaaaaattacaatttgtt

SEQ ID NO: 221888 - DNA, 2340 bp, Cannabis indica
ttcgttttttctttttttcattttgctctttactatttaccattttagtgtttttagtttttagttgatcttcttttttaaaaaatgaataaaccgaagtgaatagtgtttgttgttgtgtattttttgaaatttttgattttgtttttttgttggtttcttttcagtttaataagccgacattatgtgttattttgaaaatgggtttctgtgttttgaccattatgagaaaagctatggtaggacctcatgattttctgtgtttctgggtttctatgtttatgggtttctatgtttctgggtttctgtgttatagtgtgtgtggaatgttggacctcatgttcatccttatgtggaacttagccctcggaatcccagactacttgtttgtgattatggaagaatgtgtttgtagaattgtgagcagaatttgatggatgcctatgatcgtgttaagcagtcgactctaccctcttggaatcgaaggcaccttctttgcccttcttatgtgcattgatagccttggctccttaacctcaaaatggggtggtggaatggtgcttcatctgtttcatgtcactagaaatgactttacaaacttatggttggttgttctcattaggaatgttttgaggttttcgactttgtctttgatatttttggtccccaagtctagtcaatctgaggctatcatcccttcggatcttttgaccaataattttgcatccattaacattaatgatgaggagggaaaagataagaacctagagctactgcctatgatcaatgttgaaaaagctcaagtttattaggtagcttttctgagaaaggtgtataaaacatgcttagaaacatgtccaaaattagtttctagagattgatttgtgttatttgtgcgttctgtgattttaaaaattgtcattggaaaacctgtttctatatcaagattacaatttttatatcaggtgttgtttgggtttatcggatacctaatttggaatcagctaaaaaccagtttctggagttcgatttatattctagattcgctttatttgtgcattatgtgatatttggtgtgtaggtggttttaagtttgttgttgcaaaatgctttaatcttttattgggtttctttttggctggattattagtttatttatttagttaattactattgaggaacttgttgttatgtttttttttgtttttgttttttatttgttcttttgtttcgatattgtttgaatctggttttcatgttaaattttaggtttgattttgttgtttgtgtctaatgtttatttggtatttttttttttcatcagatggagagtgaatctgactcaaaagtgcgatctgttggtgaaaaggttgagccggctacgaaggctaaaggccgaccaaaaaaatcttctaataaagttaaagtatgttttagtttgtattgaaaccggtgtttagtatttatgtttgttgtttttttttttttgatttttatgaaattgcttttattttatttttttattaggttcgttctgtcgaagaagaaaatactattgaagtaaaaacaaggaagtctcctcgtaaatccaaagtatgttatatgtgttttttgaatatgtttttttttttctctttattcatgattttctttatttattttattgggatgaaactggtttttacttgttttgtttaaggatggtaatgtcggggaagatattcccttgaaagctccaacgagaagatctccccgaaaacttaacgtatgtattatattttgctgaatccggttttgcatgtattttatgttccattgtggtttgttatttaaattgtgtttatattttctaagtatttgttcctcgaatattggtttttatcatatatatgtttgttattggattcactatgttatataaaactggttttatatgtttgttaatttttcaggatgataatcaagaagttaaatgtgatgttactgatcatgtttctcacaaacaccgtagtaaaaaagtcagtaagaaggctactaatgtccttcaagaagcgagtgattatgattttcagactcagaaggttgtggcagaaggtgtttcaagcaagaaaaggaaagctgttagtaatcttgacgctaatgcgttaaagaaaattaaaactaaggatgtggtggaggactctaatttggtatgtcttctttttttcttatatttcttggttgtttttgtttatgttaatagttttgttttattcattttcatttaactgttttgtgttttatgtttatttaggataatttttgtgaacctaatgttgctgatgatcagaagcttgttaa

SEQ ID NO: 221889 - DNA, 2441 bp, Cannabis indica
tcattgctttaaggattgaagtaatgagttttatttgtagtcaaatgcacatagaagtgatgaacaattacaaactgttttagatttctcctgacatttgcttatcatgtgattttgttatgaaattagtgagtattgaaaagattaattcaaccacctaaatcttaattctcttgaaaaaaaattaggtttgttttttttgcttcatttgttattggaaatgatcaacttatttattcttatatgttttaatccaattccactctctaaacatgaactagctgtaaacttttgtgcatattaagtggatgggaaattgggattgttccttgtgttatttcaggacttgactagaactgagtagatatagtgtagtaattgttttttataagtgggttgcgcctagccaatgcaatagtgcaacgcataggcgacgctcgagagtcccattagcaagctaatgtggtggactctcacccttaaaaaattaatttaatatcgtgtggaccattggcccacatatcagatatttcactgataagaacagatacagtgtagtagtaattaagttggttgattccttttctttttctttttaggttccattatggggtcaaaaggccagcaacagggcagatggagctgttttatgggactatcatgtcatctgtgtacaggttggatcataatttacctttgttagatagttgggaaagtcatgtaactttgtcatgataaatctcatttgaaattttcgcattgttaattgtttacttaaaagatctgtgaatttcatttgtcttagtagagtaaaagaggaggtgattctgctccctcagtgtgggatttagactcaaatcttccatttccttctcctctagcaacctatgtttcagaaactgttcggccatcattttcgctcttttcggaatatcaaaggtattttatttgttgaaaaaggggtttcatcactttcacttgtaagattgatttaaaagtacattttgattcgaaactagagaaagcttttgtcaagacattgcttgtcccatttgcatcagatttttccggattgtgcatgctccaatatttcttggtgactttgcatcagatagaagacatatgaaagattctgctggaaactggtctgctgatccccctacttatgatcccattgttgcccaaggtaaatcccataacagctaaaagttgttctttttcatgtttcacataagcaaagctttatttctaatcacatgccaattgattgtatattataatgtgcaactccttagcacttgattaatgttaatgcaaatagttgcagtcactttagctagactgtaaactaaatcttaatatttgctgattatgatgtgataaaaaatgaaaaatgaagcatataatcttcttgatttgctatgtatgtacatatattttcatcattcaacttggagagaatcattcttctaccacccaattgttcctttcttcaatcagaaattagaaggcaccttttcttattatggattcggatggaatgctcaattgaattgttaactaaaaccgatttcaacaaccatactaaattagtgttcttctttcttaggttagcttttctgatttagatggcttttgattcaaattatattggcttgttgtgcagatggaactgtgaacaatttaaatgaatacatggaaatccacctttccgacgcgttgaaaactgttgaagctgattcggtgggtgctgttttcactgagaaacttggagtggttattggtgagaatcagttggaggaattcttttctcatatttcatgatcttatcatctcacaactcttgcatcaactggacttgcatagagctttattcttttcttttgtaagataatatgtttcgagttcgattctgcagcatcaaatttggattgtttgttggcttgaactaccattttctgtaaaatgtcttgagaatttaaaacaatacatatgaaatgaaatgaattgtttgttactactcaccactatgttaagttatactactaattaaaatgaaatgtctcttggtatatataattatgtctacaccttatgtgattattgaaatataaaaatagataatcgtcccacataaattttatttctgactttgccttggtcttatattgccactgcggttattatggtgtctaatggcaatactctacaacttagtataattttttctcttgatccccaaaaatcaattgcctcgtaaaaaattcttaactaaaaattgtgagagagaaataataggtacaaacaaagtgttattggtgtaagacctaagaccagtgttggttctagtatctaaaaaaatgagctatccaaatattgacttttggaaatgtctcaacaacaaataaaaatataaaatttgatgagttaaaaatttctta

SEQ ID NO: 221890 - DNA, 2182 bp, Cannabis indica
caatgttaacaatcgataaactaatggatatatcaaatgttttttttgtttgaaccatcttttgtgcaagctcaccaattcctttcaactctttgaaatttttacttatgcgcatatcaacaatgtaagattccgattgatcatcgagttccatcaactctattccagaaaaatctttaggataaaactcagccaaattaaccaatttttgcttgtcaaaagtagagaacaattcacatggagataaacacgccacacacaagagcaactcagtattgaccttattaaaacgatcattgagctcttgaagttgctgatcaatgacggagtaaaacaaatcaacttgaaaataatgcaagtttgtcatttcatgagctttgcgacgtgatttacctcgagctttaaagatcccgtccattttaggaacttccacttcatatatctcaaaaaacaaagaaatctgaactaaaaaagaatcccatccactatctctcatcatctgcaatcgtgttttacatacttttactagtgtcatggcatttacaatatcttgatcatttctttgtagtgcctttgacaactcattggtaattcccaaaatagttttcatcaaatgtaagttaaaaacaaattcaaatgattgcatgaaacccaataaattctctgcttcacctttttgatcagaattggatccatcatcaacaatgatttcaagaagttcaattatagaagaaaatattttcatcacacttatcaacgtaccgtaatgtgagccccatcgtgtatctccagcacatttaagagaaataggttgatttaagccccgcccatgtaaagtctcatcattttggagtgagttgagaatcaaggtagcttgcttatcttgaaggatatcacaacgtttggcagatgctcccacaacattcacaacaatagcaaccaaggtgaagaaagatgcaattttactatgcttttttgctactgctacaagggctaattaaagttgatgggcaaaacaatgaatgtaaaaagcacttgaactgtccttcaatattagagttttgaggccactgaactctccttgcatattactagcctcgtcatatccttgtcctcgtagtctagacaaactcaatccatgtctagaaaatactttgtcaatcatttctttaagtgaaagactcgtagtactagtaacatgttccaccccaattaaacgttcaatcactagaccatttttatcaacatagcgtagtacaacagccatttgctccttcattgacacatcgcgagattcgtcaataagaacagaaaaatatttatctccaatatctttcataatgacattaactgtttcagaagcagcaactctagcaatatctttttgaatgtcagaagatgtcaatttcaaatttctaggggcattcttcaatgtaacagctttgatatcatcattgtgatcagctagaaaatgcaaaagttctaaatagttacctcgattatttgaatcctcagattcatcatgtccacgaaatgcaagcccttgtcgtagtaaatatttaacacaatcaattgatgacttcaaacaagttcgatattccatttgaacttctctggagtgtttagatagtattgtttcaatatgcttattttggttcattaaagcttcacaactcctctgagcttcattatggctactattagggcctccgacatgttttcccactcttgacctttctttccaatatgaaaaccccatttttacaaaacactcaccacctgattcataaattatttaattcaaaaagatagcaatacaagcaaaatagagcatccttttctatgctatattccaaccaagtaggaaaatcggcataccaggattgatgaaattttcttctttgatttgcgatcattttatctggaaattcaattatgggttgataaggacctctttgtagatatgctctccgaatttggtctctaacattaggatcatattctaaaattggagttcgtagcccaggatctgaaggaagctctgcaagattaatctccaccttttttaattttgaactttcaatatttgaatctgtagaagatggtgaatctctttttctaccatagtacctctccataaatatttgtgcctattcatgattaatttataaaatattaatta

SEQ ID NO: 221891 - DNA, 1946 bp, Cannabis indica
ttgatttttttgttaaaataaaatttaataataagctgattataaaaaaattaagactaaagtacagaactaaaataactaaaaaatcaatcaccaaacagttagcaatgacaagattaatgaaatacaaataataatcggagaaaaacaggaataaacagagttatctaaaatcaacaactactaaagaagtaaaacgataaaatcaacatcaatatgtatatatattagttcaagttcgatagatcgatgtgatctatagttctactccagttctggaatatcacaaaatcttcttcattgattgaacaagaacagtacaataccgtcgagaaagattctctgttagatttctcaaagtatttgaactctcacactcttacccaagaatcttctttatctacagaatagattcttcatacaaaactcaaacccaatctctttcttttctctgaatctctctctctcaacctctcaatctctttctctcttaaacttaaagtctcctcttgaaaactcgtcaatctagtgtgcttcaaatgataagtgttagtgttatttataggctcaggatgaagatcctaagtcggtggttccacatgctaagttgttaagttagttacgacttaacaaactctttgtaacaaaatctccacgtcagcacaagacaaggtgcttctggattggacatacacttcctagacaacagactaaagcgaatgctgaaggggattccgtggtggaaagggcccattggagtcgactatccaaaacacccttcttggatgaacaactagccatccggaacacccttctagaggaaggctagctttcctgaagacttcattcaggtagacatgatagttatctgggaacgcccttccaactatcattccacgagactccttctagatggcaagttacctatcccagaacatgcttctcggagacaactaactttccattattgggacagtcttatggagatcttttcatttggacgaattataccacaaattctacctaattacttcaaattaaaatattgacggtgatggagaaagattgtagtcatcatggttggtgttccagttatctcaatatactaacttctgagattgatcaagtttaacaatgcttgaactagtttactgttaagatcttagtcccaacattagcatgataaacctgattcttggaaagatggatggatgactagctatccaagtacacaatcatttcaccttttaattgcttcaatttaaacaaaattctgtgaagccataatactttcttgaatgcttccttggtggccatgaattcttcttctgtggttgaaagggcaaccacagactatatttgggcattccagcatatacagtttcggtttgtcgagaaaatataagaagtggttaattttctagtatctctatttgaagcatagtcagcatccacaaacccttgtaactctaattctccttttactttctcataggtcataccataatctcaagtgccctttagtaccttaataactatttgaggaccttctaatgttaaatgtctggattagacatgaactaacttaggatgctaagagcactatgtccagtctagtgctcaccatcacatacattaaacatcctaaaactactgcatagggtacatccttcatttcttatttctcttttaaactgttcaaacactgttccttttgacaaaacaaaatgttcgcctaacagaacaaatgtactctttgcatcttccatgttgaacttttaaatatctttcttgatgtaagcagactgtttcaagttaatgtccccttccttctagttccttgaaacttcaatatcaagtatcttatgaactggtccaagcttagcactaaataggcaatcagttgtggtaaccttcaacttcggctcctttgcaatcttgttctt

SEQ ID NO: 221892 - DNA, 2740 bp, Cannabis indica
ataaaaagtagaatcatcacacccaattaagtatgatctaacgatgatatttgtcttgtatttattctcatttaaatattaattacttttttatataaaaataaaactaataatgacacttagtaataactaatagctaacatgtgttaaaagagaaatgataaaaagtattagtggtgtatagcacttttttatgtgttattatcgctattggtctaattaaatattgtgtcccatataatttaatgtaataatttttagcgagtatccctagccaaatgcaaggcgatatatctaggtactattagtacccaataacaataatctagtatatattatgtgacttctagtaactcactattcatatatattcaagttttgtgggaaagctaaacatttgagtgtattaacaaatacccaatattttaagagctttcactgactttttttagattcatggatgatagttagaaattctatatgttaacaaaacgttgtaagaaaattattatatagagtgtaattaaattggtatattaattattacagaatttctaggtattgaagtaatacatcaaatagtactaaattaataataataaaacccattagattgtgtagtaattattgaaggttaacttgaaacaaccacaaactttatatgcaatattaaacaaaacgtttagtttcaatgataattcaacataatcatagaatttcaaaaaaaaaatatatatatttaaagacaataaaaataattattagtcaccaataatcataatttatattattagtatacacattaaatcatattaatgacaaggtaaggtgaagagattctaacttcatcacaagtgagtttgcaaacaatatcatgccttgcttattcttacaataattaaaaaaataccaaacaataacttatataccaaaatcatagcaattcaaaggaggagcaaccaatttaatatgagaataacatgtaacttaacaattaaaagttgagagaaaaatatatatacatgactaattagaagttgggataaaaatgataaacttcaccatccttctcttgctttataccttctcacacaatggatgcagccaataaaagaaacatggaattaataacatagatcccaattaatattcataaagctactatcttctaccacaggaaaagattttcctttttttgataaaaagatgaatattaatttctacctaaagtatttaatattgaactaaataacataaaatatggatcaattcatatacctttcatgctcctctctttttattcttgctatcgaataattatttaccaaactaaacaatgggcgaatgatcttatcaagacaattgatagtgatgatgcaaggttttcataaaattgatcgtaattggaggaattttgacaacacctaataaagataagagtataattatttaatgcaaataacgcgagtactcaacctaaaacggtgagtattcaaagaatagacacttagacgtactggaaaatataaataacacaaggaaagtatagtggttcagtcagatcacggtctgcttagtccactgttgcaaggatttctgtcttgtttatttcatattggatcactcatttatatacaaagcaagtgttatttgattatacagaacttgattaatcatcaatccgtttttacattgaatatcaacattaaatcaataaaaacgtaaatataataaatgaagaacagtttcgacccagttcactaactacagcaacgtatgtgaccctagtggtgcgagttgtctgttcatattctcacataagctcgcaggcttaagatgcgtacaagactaatcgagtcttatgtgtttaagatatcggcatcctagttgagttgcgtattcagatatcctgcaaaatgtcaataacttaggacatgcgagtccttatcggattatcaagtgcggtaggtcatccggaccagctcggtgagtaaagaatcaatctttactaccttgcatgaaaacctttatggacatcgcatatatcttggtatatgcgaatcttaaacccggccttcggtcctacattgtgcgaggcgtaataatgcgactagactctgtcaggatcacatcatcttgctgagtctggttcaggcgaggtttatactcaagaggtctccttctaacagctcaacactcctcgaggagagtgagtccacgtgtcatctttatgggagcctggtctcgagtttctaggtgaaaaattcacactataacacatgccctagtttcgcgattgacagctatgtcatgagggaaactataagcgagaggcaggtgagagattgtcatgagatggtgacttttggttttattgagattttcaaaaagacggttgtaattattacttttaatgcatttgaggtgccacgtcatcaaaactcttcggagtctgtgcagacgtgattattagtaactgttggattgtgagaccttagacattcctttgccacgtgtcttcatcccaatacgtgaaggcccaacctaaacccactaattattatattgttgaaacttaagactttttattcatatttattttcaagacttatagtatttttgacaagtgttgttcaagcttttttgtatttgtgatagtttaattatttagtgatagtccaaactgcataaaccgcactgcaccattttttgcgattttttagtttcgcagtgcaggtgc

SEQ ID NO: 221893 - DNA, 2648 bp, Cannabis indica
ttccttctttttgtccgtagtgcccccttatggattggcaatctggattggtggctaggtcatatcgggttgggcctacttttatatttttgggtttgggtatatttattctaatggccctttcaatgtgggccttttggtagtcctttattttgttgggccactatatttattcccccccaaacaaatatgtagatccttccagtgctactaagacacttatagcctttgtgactatcagtgtatcctagattaacacatttaatggagtgatattagaacttgtgtgtttgatatggtctgaggcaggggtaacatgctgtgccaaaggtttttggaaacttataatctgacttctttgactgaatcatcacaaaaggtgaaacattgttaagaataggagttggcaacctattaatgagataaacaactgtttgaaaagcatcccaccaatatttttgggacatgcttgcttgagcaagaagagttagacccattttgacaatgtgtctatgcttcctttcagctacaccgttttgagctgaagtgtgaggacaagggtgagtaaaataaattcaattttgaataacaagattggtaaatgctttatattcacctccctagtccgtgtgtagtctctttattgtcctttcaaatttgttctccactaaggctttaaattgagtaaaggcttgtagagcattacctttagtttctagaggatcaatccatgtgaacctactgtaatcatctatgaagtgaatgtagaatctgaaatttgtgtttgacattatgggggttggacccgaaatgtcagtgtggatgagatcaaggggagattcagacatatcattgttggttttaaagggtaaggagtgagatttaccaaattaacaagcttcgcagaaatgctctttttcattcttggaatttcttacatttagttgacttaacgcaagacttaacacacgattggatggatggctaaatctcctatgccatttgtccttcaaggaaataaaactattcttaatagactgagttacattcgacttagacatggaggctaaactaaaaaagaactttgagttggacttgttgttggagttgcttttggaaggagtttgctcaaactgataaagcccatctctaagcttcccttgaagtaccttcctcattgtttccttgtccatcatagtgcaataattagaagaaaatttaacacaaacattattatcaaatgttaatttcgaaatactaattaaattttttgttatttcaggcactatgagaacatctttcaacagcaggggtttctcattattagtctcaagtaatcaagaaccaatatgagttacgattagcttattaccattaccaaccacaagactatccttaccattgtatttcatcttttggtttatgttgctgccttctgctgctatgtgattgttcgcaccactatctgtgtactaagagccatcatcaaccattttaggagtgacaataaaggtgctggatcttggggaggtttttggttgttgacactagttggagcatatcccataaaggcttcatcgaacttgttgtagaagtagatcgcaacatgaccatacttaccacagatttgacatgtaggttttagaccattgttggttctgcctcctctgtctctattgtttccaaattggcctccaccttgattattacctcctctattgtttatgttttgtcctccaccaaagctaggaccagcaccatttcctttattagccaaattagcagtgggattaggggctgttgtagcaacatttccgttcaatttgttggcacctgaaaacgtgctgagcctttcgactttgttgtcgaaacaacgtaggatgtcttgtaactcctgccatgttgtggatgttcttgcttcaacctgaagaactattggaaaatagtccagatctagtccagacagcacattagaaacaagttggctttcaggataggggtcacctacaagagttagaacatcagcccattgtctcttttgtctaaggtattcaacaatgctttgtgaaccctttcgatgagttcgaatcttggttctatactcatccatcttttcttttgaatgagcaccaaaaagagcctcaagtgcatgcaaaagagttgtagaggactccacacccatgacttcagtggctatctcgtctgtcatggagccgaatagccaccccatcagaagttggtcgtgaacaatccgttgttcataatccgcgtttacctccacaccaaagctaggttgaccatcaagagaagggatggagataaactcaaccggttttgcttttgtacctataaaaaaatcatcaagcatgtgtcctcgaacaatggatgtaaccattgtcttccacagtgagaaattcttcctatccaatttgagagcgaatggttgattaagagtgctcccaaactgtggtatgacaacatttgaagtgaccgcgtcaaatacccgctatgataccaaattaaaaaaaaagaattgttaatgagtgaaactttgctcaatgagctagaggctgtagggctccttttatatagaggataaaattggttatagatcgagaaatctaaaaattgtacacctcaataacaaa

SEQ ID NO: 221894 - DNA, 2836 bp, Cannabis indica
tagtaataatattaatattaggtacgtacacattgattgtatgtatttatcattgtaatctttccacattaacaggtggccacgtccacgccacgtggcaataatttaaccgcgttgatgatcattcatgataatattcacgtattatatgtttatagatggactgtgagatatgcttttatatattttgaaaggcagtttggtgaaaaaccagtgatgaatgttttaacaaaatcgccggtcaatcattcatgaatatttattattaatgtccagaatgacccatttatatatggaaatactagaagataccatccaacattacaaaatttcatcgttaatatatttacttttttgaaaaggatcattaataatcaattatcatgttttacgtacatttttttaatttaataattatttaaaaaattactaactattattaatgaggtgtcattacttaacgtacgataacataacactgcttagtgtgcattagtcgatctatttataatatattttgacctttatgtagatatatgatgagttgcaaatatatatagttgtaacctatttaactaatcaaaaagaagtcacaagaaatcccaaaaaaaaaaaaaaaagccagaataatctctgcattcaaatctaaaaaggactggagatcatgggattaaactcttaagagaggtaaacttatctttattttatttgagaagtttttgagctaaaactttctctatatttagcttgatgaatagtgattttttaaagttttttaatattatttgacttttctaatcatatcatacacacattatattatgtatttatacaatattttatttacatatagggtttatattatttataattttatattttgtaaaaattattgattatactttttattttgttaaatgataaaatagattttttttattttttaaaattgtatagataagactcttaacttaatttttaataatttttttaatataattaacttaaaagataatttttaacttacaaattcaataaacctaactagttttttttataagatctcaagatagagttattattaaattttattttaatagaaaatttatttattataaaatttcatattattttaaaaaatatataatttagtttattatttattaaaatgtacaaaataatatttatttaatattatatatgtaaaataaataaaataatattttagtaatatattttaattgaggtagtaaaaagagtggtgtattgctcttccactttattcatgtctaccagtaccagtcatataatgagagaaagaaaagtgtatttattagagtttttgtaaatgagtatcttataatttatattaaataataaaaattgcatagatataattgaacggtgaggatggaatggatatgttcccgaaagtggatcctaatcatcgttcttatcttcagcttctttctggtgtcgctttataaaaagatctttgggggagagcgagcggggcccacattactcgtgtaatcactacttttgacctttgactgagaggcacgtgcgcggcatcttctcgctcaaaaatattggctcgatgatttcggtgacgcacgtgcacttcctctgtctccactctccgacatctacatctattaaacataatgatgtcttaaatgttaatttttaataaagaataattgattttcattttaaattgggtacttgattataataatggattactatacttgcacgttaatggtatgagttagatactttgttttatggtgtagaaaagctggcttttaacccattgttcataattaatcactaaatcaggttggatccttctagcgaaaaagagaaagaaaaaaaaaatcaggttggatcctactaattaataaaacaatacaaatgtgtagaatgtatataattagctagaaaactaaaacaaatcccacttgattgtaaattgaattaaaaaaattctatccaattaaaatgagtgtgctcaaataataaaacagaattgaaaaacaattaatttttggagctgaggagatgggacggtgggaacgattttctagttaaagggtttcttttttatttattattattttttaaatgaatagtgtttggttgaaaaataattctttttaaaactggttttattgactctttaggcttggagcatattcaattaactttcatgttctctttctttctattttgtattatttatttatatttttttaagtaaagttttagctttaatttaatggttgttagaaaagattagagaataaaagaatggccagtgcatgagcaattagtaagagtgtgaaagaagaaaagaattgtaggttatttcctccaatataaaatgaaaagaaggtgggtaataagattaagaaataatagataaattttaagtactattttataataaaattatcttattacagatttttgaaagtagtgtgattcatttccttttccaattatgttcaacaatgggcagattcgactgttttgccaattagaaggggcttttttttttgttgcctacttctaagtactagctatgtcctaccaaacagttaaactatcaagaaatatcattccctctccaaatctacttaaaatatatatttttggtgaaaaaaaatttattaagtattaatttgatttatttttatccaatgtagtttcaatgaaattcactgaactttactagctagttatttccaaaaaaaaaaaaaaaaactaaaacttaatcactagtttattactatctgctacacttgtgttgtaacttaaacctttttgt

SEQ ID NO: 221895 - DNA, 3901 bp, Cannabis indica
tttaatttttgcatgatttacggttaaaatgtaagagattattgataggtttgttgagatttagggttaaacctctgtgatttgtgagtttgggttagatttagggtaggatcggtcatatctgtattttggagaagaatatggtttttcaagccaggtccgatgccatccgatgctattccaatgtaggtccgatggtctataagagattgctaagtttcaacgttgaagacatcaggcccgatgcgggcctgatgggtggcccgatatgtgtctgattgtattcatttttgaatggcccaattgttgtatgtccaatacgggtccgatgcgtggtttgatatgtgtctgatagttgttcaacttttatgtttttttgtatggtccgattggaccgatatatggtttgatgcccccccccccgatatattacaaaatttatgatattattgtaggttcgatacggatccgataggtggttcgatatgtgtccgatagtttgttcaactttcatgattttttgaatggctcgattggaccaatatatggtccaatgggccatcgatagtggatcgatagttagtctgattgtttatgcatttcttcatttttggtatgtccgatatgggtccgatggaggtccgatttatgtccgatgctttgctacaaaattgctaactttcaatttcttgtttttttacagagacctccacagctaataattccactctcagagcattacataggtcgtgtcacttggcgcggcagaagttattacaacttgaagattaaggccaaatttgagaaatttagattatgggatagggtgaaggaattctctttcaaatagttcttcgagagagaaccattataatttttggggtatttatccatcaattaatgttgcacaagatccaatctgacaaactagatgaggtacacttttacttggcaaagaagagatgcagattcggtagggtggagttttgtttggtgaccgggttaaacttgttgcccatacctactaaagaagaaattaaagagaaagaaagtttagaccggttgaatatggagtatttcaacggtaatccttccatcagctttggccaactgtgtagagtttttgagaactgcacagaagttgatgatgtttacaagttggggatggccttgtttgttatgggcgtcctcactggtaaggaggagaagactgtcgttcctccttttttcataagaatggttgacaaccttctattctcttacgagtacccgtggggaaagattttgtacaacaagttgatggaaacttgtagtgaagactgcatagatgtgaagaataagattcttaagaagattgaaaagggagttagtcagaaggaggccaaatactcatcttacggctatattgtagtgttgcagtattgagcatacgaggccatcctggagctgggcaatgagtatgcagtgaagatgttgcattgcttttcgagaatggtcaattgggagagtaagccgaaaatgacactccgtaaggacgaagtgatacgattatttgctagaaatgtaagtttcttacgctttacatttattttatgttaatttccatctattaatatatttgttttaattttcagttgacattatactctatgttatgccccaagtgaatgagacttagtttgtgagttgcatcactggtggtgaggcgcctttatttattgacttggaggaactagtgttgggtgacgatgggtaaccaacacaagatgttttgcgaagctagtcccagaagcttgcctcgacattaaaagaacgagcggatgcagcccgaatctttagagactctacaccacctgcaccgtctccaccacctgcaccatcttcactaccagatgagtctaatgttgccctatctacatctattcccaacacttcagagcctcgagaatcagtatcctctgccatgatggcaaggttggcaattttggagagggaacaactagctttgaagtaaggtcaggctgctcttttgaaaggacagaacgagattatgggtccttcgaagactataatgagactcgtgtaagatcctagaaggccgacaccagatacacagccatagccacatccacaatcataagaagagcctaagtcaccgaaaatgaaatcattctcccaaattatatagaccatatgatgatgatatgttttgtacacctgacaacacgaagatcaccagcactggggatactcaggattctgagatacaggtcttggagacagctctagaactagtggagaaccagagatagagaaagtggcctaggtagttcgttgagtacactaaaatgaagaagaagtccacagcatcaaagacacatgtgtcccacttcaagtcgttgatcaaaagctactctcgactttttatagttgggttctcaaccagtttgggaacaagtactcgagggagtgttacttcagtagacacgattcggcttggttcctccaactacatactccgaagacatggcttggagacgatgtaagtttttaagacttttttacgtctttggtttttaaagactttgtctaaatttttttatttaacctctggcatattttattttcatgttttagcatttaggtgcgatatttcatttgatgaggaggcaccaaaacttttattcagaggtgtacccaaatagatgtgtcgtcatgcctcacattttcccatcaggagttaatggtcggtggaaagctgcgggtaatgaccactctaactttcagtgggatgacggcatattggatttgattcgaggggatgatgtccaatacttggagagttggaagaataacgagagaatatatatggccctcttcttcgacagtgcaaaacattgggtgactttagaggcagacattgatcgttggatgttgaccatatttgactcgagccttggattgattccccagcatgaattgaagagtcacttaacattatgggaagagttattcccaaatttattgttgtaatctggcatattcaagaatcatgaaatgatcgtcatgcctcaattgacagtctcagagagtcaggtcaaaaatttcagtttagaagtcatcgacgagaagattgtacaacaaacaaaatcaaggtaacttaattacaattgattttttaataattaacttgaatttgatttgcatacttatatttaattattttttattgtctcatacatcggtgattgcaggatgtatgtaatagagcatatcgagcataaaaggctagagctaccgtttgataatgtaaataatgacaatatgaagaaatttagagagcggtggtgtgtagatttgttttaccaaaatttagcatgaacttctatgtttttttttcttatatatatttatctacatatatgtatttattgagataacaatgtaactagtttcttttattgtatgattatgttcataaaaatttaacttaaattttacgacttcttttattttaaacatatgttttaacttaggtctctgatgggacgatgggtctgatagcacccgatagtgtctgatgctggcatcaaacaacatcggacaacaccagaacccatcgggcctatcagtgcatcactatttgttttgctaaatatatacatcatacaagcatcgggcctccatcggacctgcatcagactagtggtttttttataatgggaattttacagttagtaaaataacctgttcatgccacaaattataataattatcagaaaataaaataccacaaattttaatgtttaaaaaagtccaacatgaattcaataataatacataatagtacaacacatcacaatatgactaaattaaaaattcattttaaacctcggtaggt

SEQ ID NO: 221896 - DNA, 7344 bp, Cannabis indica
acatcctgacacaagaacttttgattttggtccaatttctttgcttatggtctttgtgtgatataacaggtggcactatcgtactatttgatcgtaagatgcttaggaactttaggaaagatggtcataactggaagaagaaaaaggatgggaagactgttaaggaagctcacgaacacttaaaagtgagttttacttcctcaatatgttatctttatcctattactcattcgtgttatatggagtagtgaacggactgggttgatgatgctcttttttccaatatttacagaattgttttcctgggcctattattgtgacatgtttgctgttattatgtggatgcttaaaaatgcattaaatctctggatggataaatctttctactgatgattggccttccaaatgcatgaattgttacaattgtttgtatataatgactatacgggcttatctatgttcatatatgattggtatttcttgctagtcattcaaaactttgttgctaactacccagtctaagttgacttccggttaatgggggttttggatgattataaaattgatttgttaaaaaaagtttttgtgagctgttctatgtaccattttttgtatcttattattaggcatgcattcgattactttatagctattcctgtttaatttttggaaagtgataccctcagctggaagggtgagagtagaagatgtggagtttagaacataggaatttggactgaggttggtaggaatttggactgaggttggaagttcagagaggttacaagttggggcagctttgtcaggttctggtggtagaaaatcttgtttcaatttgtacagagagatatgtatgtatgtatgtatgtatgtatatatatatatattgtatctctaaaatgtttatcttcggtaccacctatttgatctctggatatttaactgagcaggggccttttgattactaatttttcaattggttgacattagtcttgctttcatggactgaatcgtcttgaaataacattccctcattagaaaactatgattatacattcattttccttctttcatttttttgcaactgtacaggttggtaatgaagaaaagatacatgtgtactatgcacatggccaggattccccaacctttgttcggaggtgttattggctacttaataagtaagtgaatttttgtgcttcatctattagtctactgtctcgtgtaaacaaactctatcagttcagtaccatgtaaaattcattgttaattttattccaggagtctagagcacattgtccttgttcattatcgagaaacacaagaggttagtattctttttagcctatcagtagttgattcaaagtataattgagtaaatatctatttattcttcttttgatttttatatggcagtattatgttacttcaataattcaataactttcactggaacttgttttaaattaatagagagaagtccagtataatgaaactagtaatactaatttaatatacaaaaaaactgtacactcttggtgcaaggttcttaaggcttggaagaaaataattttttctttggctaattgtcttgagaatggaaatcttagccttacatgggaatggatgtactcatagctggcagaataagctattcgaaacacccaatttagactcattttgtcatttttgctctgtgctctaaactatgtgcctaaccttacttttggctctgatttcattatgatacagtcgcagggatctccaatcactcctttgcatacacctgtatattcacattctagttcttcgcctgatccacatgctcgaattttatcagatgaacttgattctggtactaaaaatgcacattatgacgctggagaagaacatttaggtgcactctctacttaactatacagtgtttctgtcttggctggttattttgaagtcttatagaaacaaatcttgttcataatataaccctgcattataatgtgattttgatcaatttgaagtagtcctcctataatgtaaagtcattttttttggttccccttaaataagtgattctgcagtgcttctcaccctttgcttttctgtggatcaacagagtctgggaacacttcaactgacaaaatttatgagcagagcctacatgatattaatacacttgaatgggatgaacttcttgatccaaatgatccgattaactcagcattgggaggtaactgaccaagaccatttattagtagaggttgtgataaggaatgtattgactcttttttccttttgtccttttttttgtgggggttgggattattttttaatgtagcacatacagtttcatgcttcaaccagcagaatcaaggtgttggaaatggcttctcgagtggtgtaagttctatcatttgaggttctttattcctaggctcaattttcttgtccccttctatataagtagtttatctaccgctgttcgtttgagttgtgtagagattataagaaatggctagctgtttcaattacacaacatcaacttgtttggttggtgaagcaatgatagttttcatgtcgtatttttatgatgtgcctaccaaattaaaatcattcgaaacatcaattctagtggctaatattgattcgccattgatcacatgttttcttctctagctagcaagctactagaccattgcaaatgttttttcgcttcagcatttgcattatgaaactcttgtggaggttaagttcttttttgtaatggatcaatcttctgggttgcctattcagggagctatgcactcttcttttgatcattcgaccaatccgaatgctatgagtggcaacatgcctggtgatctccaaaacagtgcttatgttcagaacatgggagcccaaatgaattcagatttccagaaaagggattctgttggagtggttactggggagtcaaaccttttggttaacaatggattgcagagccaggacagttttgggaggtggatagacggcattttgattgagtctccaggctctgtaattgatccattgcttgaaacatcaattttgtcagctcaagattcatttgtttctccagcaactggtcataatcttcaatcttctgttcaagagcacatgtttaatataactgatgtgtcacctgaatgggcttattcaaatgaaaagacaaaggtattgttatgtatgcatatatacaaagtttggagaatgttttgcagcttttttgcattttccatgataagtaacgattcatttcctatatttttctcagtgaaaatattcatgatatttttgcctccattttaattttcttgcagattctagtcactggcttctttcaagaacagtatcaacagtttgcgaagtacaacctactttgtgtctgtggtgatgtatgtgttcctgccgaatttattcaaattggggtgtatcgctgtttggttccaccacattcccctggattcgtaaacctttttctgagtgtagatggccacaaacccatcagccaaattgtaaatttggaatatcgtgcccctgtaattagtgagccagttactactttggatgtgaagaacaactgggataaatttcgactgcagatgcgacttgcacatttacttttctcctcatctaagtgcctcaacattctatctagtaaagtatcacctattacactgaaggaggcaaagaagtttgtggaaaaaattcccaactttcctaaagcctgggataagttcatcaattcaactggagatgggaaaactctgtttccacaagcacaggataaactattcaatctcattttaagggacaggctgaaagattggctagttgaaaaagtcattgaggggtctaagcccactgaatttgatgttcacggtcaaagcataatccatctatgtgccattcttggatattcatgggccatccatttgttttcaatggcaggtttgtcactggattttcgcgataagcatggttggacagctctacattgggcagcttataatggaaagtatgatatttcttcatttttgtagttttcttttcaattaaagaggaagcaaggggggaggacagggtgggggagtatttttataatgttttccttcttattttctttataaaattaataatgtaataatcaggagttcaattttcttgctcttctttagctctttaaattttacagggctttgatctctctcgcgaggttgcttatcacgtctgtctgattttcatttgttttattaaaattgcttgaatcgctagatcatttcttaacccgtaaatatttcattgacagtgacaaaatggtggccgttcttctaaccttaggagcaaagccaaacttggtaacggatcccacttcagcgaaccctgatggatgtacagctggtgatcttgcattgttgatgggtcatgaaggcttagctggttatctttcagaaaaggctttggtagaacaatttaaggatatgaccatagctggaaatgctagcggcacccttgatactaatgcaaatgacactgtataccctgagactctcagtgaagagcaggtgtatttgaaggatactttggctgcttatcgcaacgctgctgatgcagcagcacgtatacaggttgccttcagggagcattcattgaaagttcgaactaaagcagttgagggttcctctccggaggaagaagcacgcagtataattgcagcaatgaagattcagcatgccttccgcaattttgaaacccggaaaaagattcaagctgctgctcgcatacaatatagatttcgttcttggaagattcgtagagattttcttaacctgcgccgccaaactataaaaatccaggtgaccattggttgaaaattgtgtttctgaactattaataagatccatgaggctgaatgaacaaagtacttttgagagccaagaaaacctaatgatttttctatttctccaatgcaggctgctttccggggatttcaagtacgaaggcagtacagaaaaattctctggtctgttggagtccttgaaaagcttgttctgaggtggcgtttgaagagaaagggctttcgaggactccaggttcccccagtcgaagaacagggcagggaaagcgacaccgaagaagatttctataaagctagccagaaacaagctggcgaacgcgtcgggagatcaatggtgcaggtgaagaatatgtttgcttcaacgaaagcacaagaagaatatcacaggatgaaagttgcacataatcaagtcaaggttagtgatctttaacatgatattctcagcataataacacttcaaagtctgcatatcattgatcattttataatgttctgttttctacagctcgaatatgaagaccttttcgatcctgattccgacataaccagttgaaggaagacaaaaacagccacaggtttcacttattagcttcagacaaaatgtgaatgaatgaatataggcatgtatcaaagttgacctacgtctgcagttgtgtagcctgtacatattgtaaatgcttagaattatgttatatcagatctgccctttagtccctttttaaactatattttaacgttttaaggggtcgtttcagtgtccaacttttaatgtctttttttggtttttgattttcttgttaatgggttcactgactttaggctaatattttgctaatggtatgaactatgaaggttgacagaccacaagcttgcctttttagcatctcctggctacttgattgtcaatatgcaaaacctgttgttttccagctaataaacaaacagagagcaaattcgacttgtttggttcttctacatcttcggaattaagactcctcagcatagcattagatgagatattatgtgctgaacgtatcattaaaatatatttttttaaaaaaattactataatgctctttaaatgaaaattaagacttcaaataaaccaattgaaagttcagtcgggataataagaagctcttgccaagaaatgagacacctagactactacgaatggcttgcactacaacaagataatctatttcgagaactacattatgccactcacattttttaattcaactcaatgcttcttttaactcccaacacctcaaccacatccgggtgtaaatacaaatagtgcacttggaaatagattcaaggaaagtaccataatgattccgagccacataactaaggatatggcaattaaggtttttaaaaactacagcattcacattaatcttgattatatttttacctggtttagtccaatactctaccccatcattaagagtcatgaaaatcatccaagggtccatgttattactttgagcattcaaccattgatcaagaacgagcttaaaagatactgcaacaccctccaccgtattcactttccttctccaaacaagatcattacgagaattacaaaaagactaacagagcatagcaaccgccatagtatcatcacaagagtcaaaaaagctttgcaatcaccccaagaaactgttttcagcaacagtccacaccctcatcccaagcccaaatccaacagctatgagcaaaagaacaacaaactaaagaatgaagaatagtctcaatcccagaatgacaacttcccacacttcttttgtaatgaataatgtcaatattacttaacaagcattgtcaaattaaaatcaccaagcttatgaaaacccaacctccattagatttatccacacacatcctctcccaactcatctaagaaatcttcatgccttgagtgagaattagagtatttccatcatccatcctaattcctcatgcatgcctttacgtaacaaaaacactcctattgcataattaggcaaagcttgaaccacaaaattctataaaagttccttaccatctcttgacaataacttttatacgctttcgaatctttttagtcaaaaattaagaatagcattcttattacgactcatagcactaggcagcccaagcccaagataagtaaaaagctcaccactctcaacaatgcccatcagtgaacaaatttgagtattgtctaaccacctcgtattagtactaaacaaaaagtatgattatttaaagtaaatacttaacgggttgtgttgagtttagggattgtatatgctagataatataatattggagaaaattttggtcaaaacaaatacacaagtttttcagtattttatttttcttaaatcaacaaagtacaaaatccaagaggtgaatttttaggtggaagttgaagttggtgtcggtgtgtaataaataaaatgagatttgtgtgcata

SEQ ID NO: 221897 - DNA, 6467 bp, Cannabis indica
aaaccgcgaccgcaccgcgaagaatttcaaaccgcattttttttgcggtgcgggcggtttgagcggtttgggcggtttgatgaacacccctacaaattggtgcttcagcaatatgtcttcggtgtagttctactgcaataggtagtgcattatggaaggctttccaaacaaatatgcgaagcttagaagggatgtttaacttccaaaaaactgtccacctattttcaagggatttgctactggttgtatctcgttgttcaacttgtatgtagcaaattggtaccctgatttgaccgtgtaaagctcggaggtagtattgttccatatcatgacatcaggtgtgggaaagacacttagagggatggtgagtattctactgatgtcagcttggcaaaagttggatgatagagccgttaaatcccatattctattatgatcaatgagattagaaacttgtagatcaggatttgaacttataaagcagtagggattgaatcgtgtgtggccagagagccatagatccttcttacaattgatagaatcacctgcacctactcgccatcgaattcatttcactaaaagttcatttccccagactatactcttccatgttaaagatggacaagttcccgatttagctctaagaaaatgaccatttaggaagtatccatggtgcaagatacggttgagaagagagttaggaaattccaacaacctccaagcttgtttgcccaggagtgcttggttaaaatggatgaagttgcgaaatcctagaccaccatgtattttggctttacaaagggagttccagtttttccaatggattgaattcccaaatgatgtagaaccccacgagaaattagccatcatacttttcaatttgattgcacaatgcagtaggcaatttgaaacaactcattgcatatgtaggaatggcttgtaccacaactttcaaaagaacttccttcccccccccccccccaaccgagaataattgttccttccaactactaagagtttccatattttatatgtgataccactaaagagtttcatcttgtctcgtccagcaaaagatggtaatccaagatattcctcatggcaaagttgaatcggcatgttgagtaattgttgaaaaaaagcttgatcccaatgtcttgtattagttaagaaagagagcacacatttatcaggattgattaattgacctaatgccttgctatagatgtataggactctcttaattgatattgtagattgacgaatcgcacgacagaaaagcactatcatcagcaaatagaaggtgtgacaccgatgaatgtacgacaaacactttcgcccataatctagcaaagcttgctttgggcctagatgaagctgcaatttgaattggtaatgacccttacaatcttgagtctctcctctttccttaagggcatattttctctcaaaaaaaatggtatggtatgctgtaaaaatttgatgtaaaatagtgtgaaaatgatattttagtgatgtaaagtagagaaggtgattgtttaaaaaaaaaagtagagaaggtgatggaagtgctctctcataaagttttacttttatattttttctgtaaaataccataattaaatttatttgtgaagaaatggtatttttggaaagtgtaacaaagcccagacccaaaataaagatgaagagggaaatgggttgacaccctcggccgtactcctcagcttgcttcactttcagttgccttgttctccttcactcatggagctttctgcagccacaactgctggtcttctcagctctccaaccccatctctgccactccattcatccacacctagggtttcttacaggcctctctcacttttcactttcggaaaacactcgaattggagcaagctcacatatatggattctcaattgaccccttgtgcttctcgaaacgacgacaatggttctactttcaccacttcccacgttgattctggtaatgttactgacattaatcatttgttctttaacttacaaattgtgtttctttctttaattttgatattggttttcaattcttcaaggctcggaggctcgaactggggaagtcaaaagggtgactaaggagaccaatgtttccgtaaaaataaacttggacggttctgggattgctgatagtaatactggcattcccttccttgatcatatgttagatgtaactaattttttttccctataatacattttttttagctattgattttgtcttatttttatgtgttaaatttgattctttccatttggttaactttgacaaagaggtttatctttgctggtttatgcctcttcttgcctaatctcgatgattttgatgagattttgctctgtcattagaatagttcactgttacccaagtttccttaaactaagctgcttaatatttgtattgtgtaattgaaatttaatttagttttctactgtggataatatgatacgcactgaggatttgatcacattttagtatattttgaattttggttcctaaaagtttgtctgtatttgtttgcttagcaactttcttcgcatgggctatttgatgtgcatgttaaagcagctggtgacatccacattgatgaccatcatacaaatgaagatgttgctctagctattggaacggtattaaaacatcaattttgatatggaaatgagatatttttgtgcttcaatcatagagtttgaatgggttagtatgctctttttacaggcattgctgaaggcacttggtgataggaaaggaatttatcggtttggtgacttctcggctcctctagatgaagcactgatacatgtctcgctggtatggtctatgtcattttgttaataatctttaagctaatagggtatttagaatggtgaaattgaattacaaattctttagattgtaaaggcagagtttattgggggtgtcaattttatgctcgtgattatgccttttcacgagacatggcattacattgctatttcatcttcttttctttttaaagcccaaacaagtgaatcccataatgttcacttttacctttgggtaatatgaaacccatgtaaatatgtgggttttagatatatattataaattagtgaggattctcttgtccagccaaacatttctaactgtcacttctatcaatttatagcaagattctcatgcgcaatattatacaatagttatggacaatcacattatccagtttaactttgacattaatcagaaagtatttaactcctaatctcaaatgaatttttaaagtagaaactagaaatattgtttgaactgagtattttgtttattgtttaggatttatctggtcgaccatatttgggttacgatttgcaaatccctacccagagagttggaacatacgacactcaggtaacctcgtctacatatgcatggtggtttcatattcctccatctgtttccttcagctatagcaatgttgaaatttcccccagtatctgtcttcttcttctttttttaaatagacatttgaattttgttttctacaaatttaaaatagctggtggagcattttttccagtcattggtgaatacttctggtatgacacttcacattcggcaggtaattatttgacatttgtaagcattatattttacacgcataagttttgccccttcattttatctccactaactgttttgcttttggctgcgtactagcttgctggaaaaaactctcatcatataattgaggcaacatttaaagcatttgccagggctcttcggcaagcaacagagtacgacccctgtcgcctgggaaccgtaccaaggtttgatgtcactgtttcttaccaaaatagtttaattatggttaaatgtttgtaattttcaatcaagttgcaacctattattggtgtctgggaaggctgaaaaagaattcctacttgtacaacttttttgaaaggccaaaataagaatgctgtgatacctgtaggctgtgaatccagttatttctctgaatagataagttggtggaaattagagaaccgcccaaaggtttataagaaagagtaatgctagacacataaaacttgtacacactttttactgtttaatttgatatcacttttaattgtgctgtcacaaagatgggttcaccttgcaatttcggtggattaatgataacaatgtgtacttttcatcttatgcagttccaaaggtgttctatcacgttcttgatacctacacattcaatcataggctatgccaaagctcaatggcaaaagtgcataccctttgtcatcatcttataaaaggaatgattctatttgatatgttggcaagggagtctcggcagcctggcggaagcttctgattaattttccatgaataagaacgtaagatggctgctcaaataattaggatagtacttcccaaagatattttctattgctatcattttcttgagcctgtatcttgttctcattgttgtattgtataactttgtggcagcttaattattggtgttgagatttttatcattgtatcagtttgttttggatgtaataatgagaaatttccagcgttgaattagtgaataatgtatgctgtatacattctgatcctcactctagtgcgttttctttcaccaggaaaaataaatatcttatttcttagcttcacaacaagatttagttcaacacagaagtttgattaggaatgtttgagcttggataattttagtaatactgatacatacactttagtaatcttaatcacttcagctatatatttggctataaagactcttctgctgtatctagatcattcaatatttcagatttaacatcctctggcatggcagctgaggggcctgccttcgagtaaaagctcgccaacgatctgattgctttctcaagaacaacataagattcctgccaatgagccagtcttttagtgacataaaatcgaaaaaagctcaaatgggactgcaagaggattgtaataggtttaagaaaaacaacacctcttgagccacagcttgttgtcccctccaattgctcaaatactctctaatagattccttggccgcatcagcagtatgtctaaacttggcattgtctttaggatcttccttcagagactcccggagatttttgaccacttctcttgctgatttcaggtagcccttaggcaactcttttccagacttagttttctcatttggatcaaacagtgatttgatggcccctataacccctgcattatcttcctcttcttgctcagttgacttgtcttcagcccatgccattgatggaaccgagccacaattgaagtttataatggccaagactaaagcaacaccacacactagagctcttcggctattcagtgaaacttcttgtgatggtattacaacatgacatgatttatctgacatgttggcaaaagaactgtcaagaaacaagatgttctaatgagggaaatctttgagtaggaaaatcatcaacatgtgaataagaattattgtggtatttaaagcaaacagtgacatcagaccctgttgcttgccgaatagccctggcaaatgctttgaaggttgcctcaataatatgatgagagttttttccagcaagctggtacacagccaaaagcaaaatatttagtgtaaataatgcttacaaatgtcaaatgcaaatgaaaagaataaaaaattagggggaaaaaatttagttacatctaacattagcataagatcaaggaagtttattttgaccgaaacattggtctccttagtcaccattttgacttccccagttcgagtttctgagccttaaagaataaaaaaaccaatatcaaaattaaataaagaaacaaaatttgtaagctgaagagcaaatgattaatgtcagtaacattaccggaatcaatgtgggaagtgattaaagtagaaccattgtcatcgtttcgagaggcacgaggggttaattgagaatccatatatgtgagcttgctccaattcgagtgttttccgaaagtgaaaaatgagagaggcctgtaagaaaccctaggggtggatgaatggagtggcagagatggagttggagagctgagaagaggagcagttgtggccacataaaggtccatgagtgaaggagaagaaggcaactgaaagtgaagcaagttcaggaatacggccgagggtgaagtgaactctttccctctcaagtttattttggggtctgggctttttctaacaaaaataccacttcttcacaaataaatgtaattctggtattttccaaaaatagcagttaactcgtaccttttttgtgtttttcatataaatatatatactaggtaatttagttatattttgactgagtttaacgtgtttattttggttacgtaattacgcaataattgtgtaattagagttagttttttttttttt

SEQ ID NO: 221898 - DNA, 1608 bp, Cannabis indica
tactatattcataaatcaatataatataccttttttaattaatatatataattaatagttagtatgtattgaaaaaaaatagtggatatatctttaaaattaattttttacagatgttactcgatagaaaaatagtgtgttgacatcgcttttagcaatcgatggtgaatcttttattaatgtgattatgaaaaaaataataattaataattaagcaataagaatacaaatttttttatagagactcggcctcgtgatagtggtaataacttactccaatttttgttatattacatagagtattgctaagatgacaatgagttggccaagtgagtttcttaacaatctcgtgaaaacttaaaaatattttagcagcataagagctctctaaaaagtaaaatttcgaatcctcaaataatgaaatgacttcattatttatagagaaaatatatgaaatatgttactcaaaataagtgggaaagaaatgggaaacaaagtattaattccctcaaatctatcaaatgacctcaatcaatcacacaaatatagggatttaattatgctacaattgtagagatatttaaagaaaatatcttagataatctataattgttgcatccttctgcgcgagggataatgctttgctgaatatatgtgttttgctcggaacattatgagatttagaacctatctagatatttcatcttgaagacttaaacaaacaatttgagcttgattccttctagaagaaacatcaagaaagtataagcacgtttcggcctttataagttttccacgtgtcaccctattcaatgccacatcaccctatgcaaagattagaataatatttgcccctaagtctgcgtgagaatagtttgtcgtatgtagacttcttctatctgtaggttgctcgaatgggtgacacgtatctgatcccacgtgtcatcccagatttgttgtgatctgtctgtagttggcatatcttttcttatcttttcagtatcttgcatttaatgctctatctaggaaatagaacattgggtatcatgagacggttatggggaatatatcctctgatgattgtactctttaatgagttattttattttcttttttgagagaaaaccaaatttgaattccaaattatcaaactgccactcaagcacgttataaaaggggagaacaactaactttgctattttttttttacaaattttcaaactttaaaaaccagagcaaaatttttctgaagctttctagccatcgatttttcattcaagccatctttgcaagaaattttaggagctcaataataatgattaagtcttatctttttgctcttcttttcaattttttatctattttttgcttgaaaatgcttctctgaaatactgggttttgtattcttattcttcgttagtagaaattagggctttgagatcttcgtataaatggatgcattgggttcttgatcattgattttcagtggaatttataccaattttattgcaaaatttcccataattattttctcggtctttaaatctagcttttttgtaacaccctaatctatagggatgccacgtgtgtgattttataaactagttt

SEQ ID NO: 221899 - DNA, 4702 bp, Cannabis indica
agccatttaccaaaatttgtgaactaaatttgtaatgaagctcatgaatggattataaaaggaaacattgtttatgcatcttacccttttaaggccaattatgagctatatacctcaataggagtctttttaaggaatcaaggtatgtagttttaatctgaccggaaatttatctcattctttttaaattgatggaaattgtaggtttgtaagcatgaatattcttatgcccctgtctactccattgatgctccagcaaggcttcctccccaggagtttgtaattgggcttgcagcaaaactttttcatttgttacaaattttgcagcactttgtgtatttgctcgtagtttggctcattgcaattccatttgttacacattggatttgggaatttgctttcttcaagggttttagtgaatttcaaattctttttacaagtcgtcttactgttgctgcgatctttgctgattgcatgcatggctttcttctttcacttggaatggcatatatatttcttgggatttcttttattaggattagttttctgcaagaaccaatgggagctccacgtttggctaataggatgttagccggaaatgagattggtgaaaatgctggtagaaggcaagggaccttggctgttctccagttcattaaaagaattgtagcatttctttctcactggtggaaggtgttgatttctcgaattgtgatttacctgggcgtcattgaaattgttcccccaaatgagtttgagaacatgcagtttccttttgatgagaatgcatttgccgtaagcatttcctctttcctgaaactaccatttaatgttattcatttcaatatcagtattttatcatatcctattgttcttattttctttctccttatgaatgaaccagcagttcctataaaatatatatatgtgttctaattgtatctcttcttctgcactagttttttcttcccaatgtcattttgtgattttaaatgtgccacttaattttggtaatatatgtaatggatcactggagtatgatcttaataggatggtctgaataaagttgtaagttcaaatctcaaatatttatgccatcttgaaagagatgagtctaatctaatcattatcttgtatgttttcatctttcagttttggtttcttttagtactactattaaggtggtcaaagttatctatatgctgaagttgtgtgaattgatatatttcatggtctataatatattaaggaacaaacgtaattgaatgaaatcatttccatcttactactagaatattgctgatccatggtccacccctatggttattcatttagatcagtatgggttaatattttttttttctttatttttgtaggttgttgctagcaatatggcctttgttgttgttctcgtttttttacccttttgtttagggcggacaaccactttcttgcaatattggtttttcactcataatactggagaaacgctgtcatcagttgtgtcaatgatagaggtagctcttctgtcagtaagtactacaacaaaggatgcactaaatgctatcacatattttgtattataccatcgtggagctagcataccaagccaagttttaaaaggggacgagattcttaatacagagataatagagatgaacaaagcctccattggtgtcaatggcctagtttcagctggcctccttaacgaaaaactggatggaacaccaattttatctgatgatgctactctcttaactggatacatagttatactatcatttgttttgctctaccttgggactgtttctatgatgcgttatgctagaggcgagcctttgaccttgcagaggttatctggaattgcttcaaagataaatgctgttcggttccttattagaagattctttacactatttaggcaggttatgacgatggttagtagaaatttccttgctattgttaaggtttctgctgtattcggagtgaattttggtatttttcctgtgatttgtgggtggtggttagatgtttgtactttgaagatttttggacagacaatcactggaagggttgctttctttgtaaacaatcctattctgatgtcattggcctactggactgttggaattttctacctcatatatgttttcattcatgtgaaccttatgaaagaggtatgatttctgctgtgtatttacttcatctaagtgacatggctggcataattacatatttatctgtgacaggtattgcgagatggagttttcttcttttttccagacattgctgatccagaaaactactttagtagaatgattgaatgcccggtgttcaagcatgctcgtgggtttctgttgcttgtcggtgttcatggtagtttgattgtgatgctggtgtttttacctatcaagctagtcattttatatgcaccttctgtgttcccccttaatcttttgtaagcgactttgtttcttctcctgttgcatatgtctcttgctttgttttctcctgttgcatattcctcttgctttgtttcttctcctgtttcatattcctcttgctctataactattagtgatctacacttgagtgcagtagttcagaagcaaaatctgttgctgctttttctctgcgaaggtgtctttttcatttcggtgtcccatgtaccatacgcttttactatccatcagcaacatttaaagtccttgtacaaaagtggctaaatgtcacttgctcactactcagcttaagtgatcttttacttcctagacatgagaatggtgatgggaatgttgagcccttgaggcagcaaagagcacataaatgtatcaatggttgccctaaattgaaggtcagagtgcgggattacgtacttcaggtccaggatccgaggtttctgatgataacaaggggaagagggccaggaagctgactctcggtaactattaatctctactttgatatgtctctgatacagttatacattgagttttaatttttatacttcaacttctctggtatgtcttaattctgataaatagtagcaacacatcttccatctttcttgctgctgctgatttgttttaattattgtgtactttcagatttcctcgtgcaaaaccattctcaattagttttattttagtatgttctgccatagattgcacagattgaagaatttttatttaatttctttctttcttaatgtatctaattataaaatgattttccttttttctcaaggcatgtaagggtctatctgacgaactattttaacgttctaaactattttgctggcttatacatgttagttggtctgatgaataagaggttcaagacagattattttttattactataatcatgaaaagctgttttttttttcctgctacagatttgtgctacgcatcataatattgttggcgttggcatggatgacgacacttgtttttaattccttaatgatggctttgccagttttacttggccgaacactctttaaagcagcttctcacctacttttatcttatggatttaagtatgatggtaatattgctctcctatgatgtctaccttgtctcatgctttttaaaaaggaatataaatgaatatatggtttattctgtagtatttttgttcttcttttattattggaagctgcacgatgcgggctgttatagtctgtgccaagtatgcagtagggcatgtccaaacaagaggtgtgggggcacttttcagccaaatgaggcattcttgtatgagtgccttcaaattctgtgctgttgtgtcgtctgtggtaggcaatcttattcttcctttcccgttttccatttttttttgcttcaaaatgtttaagcttgttttcattctgtttctgatttatcttttcagatgtttgtcattcctgttgtgattggtcttcttctcgacctcgtggtggctgttcccactccatcacctttctatgaaggcacacttttcaccttatttcaatgctgggtactaggatggctcttcctgataactttatttgggctggtaagtgttaaatcctcctgttacatagccacagttatataattagattgtgatacgtgcaaataaaggaaagcttttgcgtgcaaaagttccaataaagttgcataaatgattgtggacatagtaaatacttatatcacatggaaaatagattttccataaggatctcgattagtttctgataagggtatgtttaggtgattccaagttgttaggatgagagccctttgaaaatttataaatctatgttgtataaaatgtaatttattctacaaaatgcaaacgaccaaggtgaaaaactgaatctaacacttgatttgctaagggtgctgcaaatttaactggtcttcaatgtacaacttttagtattaattttttcctttttgatgtatattttctgcatggaaattctgttaaacttttttatggaaattcacttgacctctatcaagccaaggctttgtattagcaatactattatgttgccgaaaaggcgtcacagtagtatgaatccaaaactcagtcagcttacgttaatcatcttccacatagtagtatcttgggaggctattttctaacaaaagcacattcattaacaaataaactctgttttgttgaactcaatgtcttgtgtgcaccacaggtaatggccgatagtgtg

SEQ ID NO: 221900 - DNA, 1497 bp, Cannabis indica
tttggtacttcattgagagctacaactcaagaaagttactatcaagatggttgagacacgttcttctagcgttgacagaggagctccaacatctgaacaaacaactgggggcacatgagttattgggactggaactaggactactcatgcacctcatgtgccaggttcaagcctcaaaatcagctccaaagctcatcctcaaaggccaccacacgctcatgagactggcacaagcagatcccacctagagagccacacgtggagttggaagaacctgattaggaggccaattcttgggttgagcaactcacttaaaccgtggttgatctacaacaacaactgcgagactctctctacaagaaacacaaacaatttcaacattggttcatggataactggcaaaacatctaaagccaacgagtcgagcaggaacaacgaagagctaacccgtcttaatgaatcagagaaactttgtaacgtccccgcttcaagtctattgggccttctcccacggactaatgactctcatacacgggtatgacactctggctacttcctaaattgatgaagttacactaacacgagtgtttctaaaattaccctaggttaagcacgcttaaccatgaagttatttcatgatgggctaccaaaaaataagatgcatcttgttgatataggtagtatcaatcaatccattttatccctcttcaactgtgtagtctcataccttcacaatcttaaaatcatcacacttgatctttcccaggcgatgtgagattgcacaacttactcagtatttcctcttacagatcacatgattactgactgtcacatttaccattgttgtgacatagggtcaagatcttcaggtgtctctccactcgagttagctgagcacatgcatgagtttggattaaaggtaagaaaagtacaattgtactacatagcatgtcatgttagaatacaattattatcgtttataagatacgcttattatcgtttataagacacagtcattaccgttatgttagaaaaagtcattgttataaattgaaccgttattagatttcttacttgtcggttatctcattaggtaacgacagcaatatatggatagtgtgataggtatcaaggttgttttataagacaatgtcaattatattagaatgtcagagtagggattaaggatgtcttattaaacaaagatgaaattgattactttataaagtaacaggtatgacttgtctagtaatgaatggttagatttttgtcaacatctgattgtgattatctgagtttatgtggattatatttttgtacttatttgtgatattatgttattatttttcttgctgagtctttgtgactcatgagtgctatgtggtgcatgtaaatgatagaaaatatttggcagccatgagtcatggatcttctccagaatgcaaatagatgttcaaacataaggaaggggcctgactaggtgaaccaattaggttc

SEQ ID NO: 221901 - DNA, 1127 bp, Cannabis indica
tgttttcaaatctcaaaccaatcgagcccaatatatcatgctcttgggctaaactatttgtatttatgtattatgttgtatagaatttgtttagtcatgtttaaatttatattttttgtatcatatcaatttattatataatgaaactttataatttgttaaataattcaacaaataagattataatttaatagaatcatcactcctattaaaaattagatcttggaaaaacataacttatatttagatttatatttatatttagctttattgttttttgaatgggctttagctatattgaagaccattaaacccaaatatatatgatttatatttctcaagaaaaaacatatgattagatgttttcgtaaaaaaggaaagagattttatatataatgagagtaatttcttgagaaaacttactatactaacacaagagtataaaaattaatattttaaagggattttttttttcatctgtggaaatatattcttcaactatagaaattaatttgacttagttaaaactttttccatatatataaaaacattaaattgtatgaagccacaatacaaatactatagtatgtaaggtcaagtgtaatatcctattttgggaagtataatacataatcaatttttatttttatttctattttaaagttgcaatatgacaaatcagaaaatcatataaatatttatatctatatatataaatttaaatctccctccaaattccaaaaccaccattggtgtaatcttcaagttttctcatttgaaaatcaaacactctctctcctcactattatatattgtgagctgtcttattaaatatattaagtactgtctttggactattatataccttatatgaaattgatattattcttacaaagaatcatgcatttccatataagttaaaatatatgggcccatattataaagtttcaaaatatttaattcattcatgttaaatctctaaaacatacaaatttaaatatattttttgaaaatccctccaaaaccaacaacattggagtcaacatgataataatgtgatatttattgtgcaatgaaatatggtaatttcatgtgcaatcttggattcaatttattattatttaatt

SEQ ID NO: 221902 - DNA, 2002 bp, Cannabis indica
ttaataaaaaatgtcactaatttgttattatttaattataaaataataatgaaacatagcaatagtaacattttaaaaaaaatgtcacaaattatcatatagtgacattttatttactggcatttgtttctaaaatgtcataaaacattagttttagtgacattttgatcatgatttaatacatttaatttagtaacattataaaatgtcattaaaatctattttgtgacattttattggtgagattatttataatatcgattaagaaattaatttttttcattaaaaaaatgaaaaattaatttaacaaactccctccttctactccactgctacccccactaactagctgcgcctcactcaacagcccaacctctctttttctctttcaactcaaattataccgcctactggaatttgtgatgtcgacacaaaaattgcgatggagaaagaaggcgagatcaacttcggagttggccgtattgcctcctcccatctttcggttagcatttgtctttcagatcaaggtaatgattttcttacaggcataatcagagagaggcgccatataatttttctgaaatttcatttcgtttatccattggttcataaatcaacaagagaaatgatgtgtttagttaattataaacattttatatatgtaaacatcgatttcaccttaacattattatttacctgttattgaagataggtttttatatattttagatttagtggaaacttatctagatgcggaacttggttattttttttactatatgtatatactaggtggctagaattttaatgtttaaaattcgtgtagtttctttgccatattgtatatttatctatttcttgactctcagattatttctcagctttttccttggttctactgatgcgtagggcgtattacagggagacattgatgaccagtaacatagaaaacgatcatgagagctatatatatatatggcatatatgagtacagtaaagggcgttacactttatcacctccttcaagctcgaattacatataatttatatatatatatatatatcttaattatatatttatacctttctctttcttatacttgcactaattatgcagaaacaaaaattatttttccttaaagacattgaattccataattatggtcacggtaagcaatatctaatatactagtatttctaattctatattatagtactttttttagcctgtgtatcattaatatgttcatatagtttgtacttacattgtgactgttttataatgtttattctttaataaatgaggtcattaatatgtttgtttatctgtgtgtagtttatatgctctgtttaattttcttaatcaaattgtggatgaatgattataggattacttgcattgtatgtagagcttagtattacttgcagatgactgtgatttgctcttcttagctaatatacaatttacgaattgactctatactatgtttcaatacttgattattatccaaatgaataatttgacaatgggagagagtgatttatttacagatgttattatcccaaactcttttggtgacagaaaaagaagccaaccatcttcttcatcaacaacaaattgaaaacaatgattgtgagcgatgttgcatctttgtcatcagcaagttggactcctagcctttatgtacaagttgcaagttcatgaagatggtgtttgtattggatccaaaagttgtattttttttcttctagattattattgttcttcaaaattagactaatgtaaacatttcctttttcatttcattggtgttatacgaataatttgtacaaaaataatgccattaatggtttatgtttgtttgtgtactgtgtcgatcaaagaagttattctagtattggtggtcttttaactgattctattggctatactactgtctagcttttgtgtctgttgtcctgaaaaatgaataccgattccaacttggaagaccaatatgca

SEQ ID NO: 221903 - DNA, 1215 bp, Cannabis indica
tgacacccgggtgatcactcatgcacatgggtttcggtggactttcgcgttgtacatgagatattgatttacagaagcatccaaatcttattttgggggcaatataagactaatgctcagagtataattgttatttgaaggacagaacactgaaccctaggccaatgtcaacttgggcgcccagtgtgcttgcacactagtgcctgctgatgcatgggggctaactcaatacacaaacgatattttctcctgcttccaagtctcatatcttatttttagagcaaaacaagaagaattcttgagatgaaatcacaatcagatcgatagaaccaccaacggggtagtcaacctgggcacccaatgactggggtgttatcaccttgtgtgcccagcttttcatctagggcctagatggctttgtttgattcccaaaatcatgtgtatcttccccgtggacaaaaataagggaaatgcccagagaacttctctggaaaaaggtgccagaatgccctaggttgagatacatcaacctgcgtccattgtggcctcaaggcatgcactggcacctaggtgggggcgacatcttcgaaattagtttcgttgatgctcaatcttcttttttggtgaaaactgctccatagattttaatttcgtcaaattctcatgggcgttacccagtgaaataaaatcggtgcccatgttggaatgttaaccttggcgcccatagttgtagatgggctcatttgggatattttcgatgaaatatcatgtccttgcatcattcctttgatggatttgaggaacccgggtccaagtatgtctccaaaaacctaaaccctagccatgttatgcctagattgactatatgtcaaccttagcacccattagggcttcctggtgcacggctgtcatttcatgtaaactcatctccaaagtctgaaacttggctggggcatgtctctcatgtatctcaggacaatggctaagtagattgcccataaaaagttgataggaaccaaaattgatgtcgaacggcgtaccgaatgttaacttgggcgcccaacattgatgttgaacccatgttgtaacgtcccgatttcccgagacgtcacactcgctagtccgtttaaaactatttataataaaaacaataaactaatttattgaaaataattaaagcatgagatctcattattttaaaacaaaaacacttga

SEQ ID NO: 221904 - DNA, 3984 bp, Cannabis indica
atgtgtagagtatacatgatatgtttatatggtacactaatattattatttaaaatattttcaaatttattataaaattaaataaaattaataaaaataaaaataaatatactaaaaaaataaaaatattataaatttggaaataattttatatttttcaaataataattttaggtgtatcaatataaatgtgatatatttacaaaagtgtacacataaatagtctattatacattttaaaataatttttatattttttaaataaataatattagatgtaataatataaatatgacatatatatatatatatataaaaaatatacacataaaccttctatattaatagttaactgtaaaaaatacatgaaatcttaaattttgaacttagaagattaaatataaataaaaatttaactgtcaccaataaaaatggtactctctactatatctaatgttattaaattatatcaactgattgtagtatgccacgtctaaacattgctgagtgctgtaaggtatcccataataatattctaaaatttatgaatcctgccttattatatgtatgaatacataatacatgtttaaatgacaatagtaaccatgtaaaattcaaaacctaatcttaaaggttggcaaggttgattttcataatgataaatacaataccaatttgtgattgtgatatgctttgccaaactgcacttaaaaaattatgtactataacaagaaatttaagagatgattgatttagaatttgaaaataatttcattttcagattttttttaaataaacggggcccattaaaagacttgtaggtattattctattttgaaaaatgctaaaaactctatcttctgatcatattctcctttagaaaataaaaaataatcacacataaaagtttaaaaattattcaaaactaattatagtgatgcacatggattggagaattgccaaggacttacataaaaattaaaatatattattttattatttaatatactaattattatctaaaatacaacaaaaaaaaatactaatatattaaaaaaatacacaaataaaataaaaagatatattaaagattattaaaaaataaatgaaatattaaataggtcacactgaagacggagagtactatctctatttctgtcccgcttaacattcggaaacaaaaagaaatcttcatttccccgtctcgttttccatttaaaagttttgtttaataaattttaagttaatttttatttatgggcaggtgctaccagaatgtatgcgttacttcaaacaaatcagacgtcttaattatatgagcgtttttcaatgtgttgtaatcactaatcagaatcacccatcaacggacaaatttataacaatctcatcttcatctaaaagtcacttaataagtcacttaataatctttgtaacagttttctttttttttttccaaaataaaaaagaaatatttttgtaacagttgccaaattattataaaatatatatacgatgatttatagtagaatcagtgacgacttaatttttaatttgtagcggcttatttatcataaaaaatatttatacttacattataatcattattactatatttatttaattttgtggggatttttctactattttaatctataattatcaaatttaaaaaaaaaaataacatttaattttttaaaaaataatatttttattagtgggggccatattaatgaatgattctgtccctgagtagaatgacctgaattcttagtaatcagggttggtttatgttattaatttttttaattactcattaaagtttatcagaaaagatatttttacaatttttattttgagaagctaataacgtggatgactgaatgttgattccctttgagtgttaattttaaaagtaaaaaagttatacacaaatttaaatttgatataaattttacttttactagtgaattaatggtattaaatgataaataagtaattagaaaggtaaagtagtaatttgacaaaaactaattatgaatcgacacaaagaggactaatcactagaattgattatatcaatacaattgaacttagtaaatataattctataattactaagactttaattttatatttttagtgaagtaatcatgaaattaataaataaaattattaggttgatgaaattcaatgaataatctaatttattggaagttagtatacaggtctatggtgatcgaatcgccacctcgcaacattattaatggtgtggataaagctaaaataataatattcgaaaaaatctattttgaataagtaaaatggtaattatttattttgtaataaatttattatttaaataaattagagagacaaagtattgttaggacaaaaacatcaccattgtctgattaagacaatggtgacgttagtcgctgtgtaagaacacagtgataataggtgcctatagtaatagatgggtctggatttatttttagattaattaattaattcaaaagataaatatttttttaactttaaagttaaaagttattacaaatattttatatggtcgagatattccctcaaaataattgagagattctctctaagtggttgaggtattctctcaagtaattaaaattatctcaattggttattggatattaatttaaagtaaatacttaaattaaaataaatatctataacagaattggttatagatatttattcaaatatttaaatattattattttaagacaatagtggcattagtcactgtgtaaaaacacagtgataagtgcctatagtaatactaggttgatgttacatgcaatgcaacgtataaaaaatctcactacaaatcagcaattcatttattaacttaattttttcttagaataatattattaattacaattttttaaaaacaaaaaggttttgtggttagaaattaaaggtttaaatatatattttatatatagatgtaatttttatgattaagtatatataataaaattaattttttatataaatatctatataatttttttaaatatatatataattatataaaattaataaaaaaatattctgttaagtaatttagatattttgttaaagttaacgtagaaattagaaaacctaaaaataccgttaaatcaagaattctgttacattaaccatatttttacctagccatatttatttttggattaattaattaatctaaaagataaatatttatttaaatttaaagttaagaagttgttacaaatattttatatggttaagatattctcttaaaatggttgagagattctctttaagttgttaagatattctcttaagtggttagtaaaaatttcttaaatcgattattagatattattttaaagtaaatatttaaatttaaataaatatatacaatacaatcgattataagtatttatttaaatatttaaatattattattttaatatttaaattaataaatattttattaatgaaatatttattattatttcattagtttacattaatatatcttaaatatatatatatataatttaaaaaacttaaaaagataatataaataataaatagtaaaattattccaccaaaagaaaccaaccatagcttacagatcatgacaaattgatttcagaatttcaaagatactaatatatttatgtattagtatagtagtaacttttttttaataaatttttaagttgtatatatgataataaattaataatttgcttctgctgcttggaaaactcatggcagtcctcttctacattgggccgaattgccatttcctcttctagtgcatatcttttggcatttacaatattcaaattgaatttgattgtcagagtctaatccataaactcaacaactctctagttttcaactcttttttggatttacttctttatgatattagagatgggaaatttgattttctatacttagaaa

SEQ ID NO: 221905 - DNA, 3275 bp, Cannabis indica
accttatgactgcccaccaacttgtctgtttgccacaaggacaggccacaccagctcatgcttacaatgcaccaacatcgaattatggtatccaacactttagtcaagcacgtactgcttcagcaggccttttcgtggcgagatcctcaaaaacttcgggttccttacctgtttaaacaatttctcatgttcgatcctttgcggcgggatggaatcccactattaataccccgcacgcaataacctactccctcatatctcccaccaacttgtccacccaatgagccccacaccgatacccatcaattcaccccgatttgaagtcaatgcaccattagagaccaataccccgcaaattcctaaatcccctccatcactctatcttgatgtcacaaatactgagcaactccatgtccctttgccaaacttgtccacaccacctactatgctagtcccctctgtcacggatggatccaattggcacaatgtaccgttctctcgagccttctccactatacttgcagatttaacggcctctcaaccactgcaattctcccttggagcatcttttgtaccaaccctcagtgctcccctcagtcgcaaaattaagcccaagcgcccctcggtcatcaatgaagtcgagttcaggaagcttcttaagcgcaatcataatctcgcaaaatccttggatgaaaggaaccccgatgaggtgggtgttgctcagcgcacccgccaagagccatgagtattataagttagaatgcttatggattgggaagtaaatgagcattccgccgactctccattttagttaagtagtgtaaaccaaccattttgtatattatggagactaaactcccaattggtgctattaataaatttagatctaagctttactttgcaaatggtcttgaagtctctcagatcagccttagtggcgacctccttttgtgatggactcaggatgttgatgtaactctactttcctagaatataagtcattttcattgttatattcggtttcctaatcattgtccatttactttcactggcttctatggggtcccacaccacaataaccgctctagcacgtggcaacttctccatcgccttggtgatactatttataataacccatggcttttaatgggggattttaatgattttctttcacctgctaacaaattttgggcgcaattaataaacgaccttcgctctttttcaggaatttcttagatacatacacatttaaccccattcatggtcacgacagcccctacacctggactaataaacactcacatctcacccacatccaagaacgattggactggggcttctcgaacctcatgtggaactcttccttccccaatgcccacctcctccatggagacttctttacatctgatccccgaactttcatccttacccttcaccaggatgaggattacttccaagttcctaaacaacgattccattttgataacagatggcttgctgagaacggctttgatgattgcattgcgctctcactctctcatagtggcaaaaattgcttgggcctcccttccttgacaattaaaaaagttcaatctcaacttcagactgctcaaagccaccccaaccttccaattcccatattcttctctgtcgccaactctaaggggaccttgataggcttctctataaagaagaagaatactggcagcagtgctctcgaatcacctggctcaaacttggtgacaaaaataatcgctactttcatcaatttgcttcctctcgtcgagccaaaaacacaattcgctcactcacatgcattgatggctcaattgtcaccgatactcagagtactttgacaacaattgaacaacactttactcaactctttaccagccaaaaccctactgttgagcaaatggattatgttctttctgggatctctgacaaacttactgatgcgaagtatttatgcctggaagcacctttcacagctgatgaggtccaacaagtagttttccaactggctgacgataaatcccccggaccaaatggcttcaatggaactttcttccaaaaaaactggcatttgctcagaactaacgttgttcaagcagctcttagtttcttgaacatcaatgctgatttatcccatatcaataataccatcattattcttattcccaaaaagcacaaaatatttaccgagattttaaaaaaaccaattataaacaattagaactgaagaaataaataattaaaagagaaagagtaagaatgacacaaatagtttttacgtggttggggcgttaataagccttagtccacgagtcaatattattatgcaactttaagctaaaaaatcctttgcgaatacaatgagcataggttctcaggtttgcttgagcaaatattgcaagataattcaatccttaatctgaaggattcattggatatttatagtattcagagaattacacttagtttccatttttcctctattggagagtttacattgaattacataacttggactgtcttgtgaagtccaacccacgaaggagatgatatgctgactaggcagattagatatgactgaattggtcaaaaccgtgtcctataattgtggacagctaatcgtgaattaattgcttaatcttttttatgaagtttctccttttagtttgatacaaacttctgtcgagattcgggaagtattttttttttcttatttatgcataggaataaaaagagaaactagacaggccttctagaaacacgttgtttgactcttctggtatcacggtactggagcttcttctggatatgagctattactagcggaagatcatttgatcacgtacctgaggtacgttcttggaaggtcctatataacttgggcttggcccaaatcatcttctttcagacctactggtgggcttttgatgctgacctaaattctaggtgtcctttactggaaacacggataacaagaacaattaggttttagttttatttaattaattagttgtttaataaaatatatatatataaaaaatctataattgtttttttttttttaatttttctaactttaatttttttaattttaaaatgaattttttctataatttttttataattatattaattgtattaatatctattttatataaaatgtggctatataacagaattcttggtttatgagaaattattgggtggcttttttttttaaaataaaaaaacaacaaattattagatgttgacacgtaaag

SEQ ID NO: 221906 - DNA, 2046 bp, Cannabis indica
aaagagggagacaatccgaggactttggtgttgaacaaacttgatctgtgggtacaagtttttgatctgcagcatggttacaggtctgatctggtgctaaaagggattgggaattatattgggacatatgttgaatcggatgttaataacttctcaggggttatgagagagtacttgaagactcgggtaacaaacgctattactaaacctctcaaacggaggatgaagatcattcggagtgctgatgattggttttgggcaaatttcaagtatgaacatgtaccaaccttcagcttcgtttgtggtattattggccattcggagcgattctgtgagcaggcgattgatactccatatgacaagcttgtaaaaccgtatggaatatggatgaaagctactcctcagaagaaggcgcatatgattggaactcaatggctcaggtctggaaaaaataataatatggaggcgaattctgttgaaagtcagtcggccggagactatggtgctggtgctattccggtggggggaggggtgaatcatcaaggcattaatcatgccaatattatgggagaaaatcatggggttgaccgtgggaaacatgtagctggtagtaataatggtgagggagtaatcaatggaatagatatgagaaaagaaaaagggttatatatggaaagtatggaggagggtcaatgttatatggaaggcaatgaatctgtggctattactgatccaaaacgtagaagggtctttgttggacaaatggaaagtgttattgggcccagtagggactcaattgttgatgaccaaatgttgggtaatgggccaaatacaaataaagaggaagcttatggggaagttatgggtatcaagaatgatatgtcaaaaaacttaagtggggcgggttctggtgtttaggcccgccgagagttatgaccacgttaagttggaattgccgggggcttgggaaccaacagactttacaattccttaaggatttggttatccaaaagagacccaaagttgtttttctatgtgaaacattatgtggtaaagaaggggtggagcgggctagattacagttgggctttgatggctctattgtggttgaggcccaaggtcatagtgggggtattgcacttttgtggaaacataaagaggaggttcaacttatagactactctagtaaacatattaatgttaaaatatgcattactaggcagcctatatggagattagtagggatgtatggtgaagctaatagaagtctgaggcataatacatggagacttataagacaacatgctgaagatactcgatggccatgagtcataattggggatttaaataatgtcttaagtcaagaagataagcatggtggaagaccatatccaactagtctcatacaaggtttcaatcaagttgtgcaagattgtgacttagttgatatggattttattggccatccctttacttgggaaaaatgccgtgggacttcaagatgggtggaggttcgattagatagagcacttgtgtctaagaattggttagatgaatttaattgttcaaagctctataatctgaatttttcttcttctgatcattgtccaattttgttggagccaacggtagagaaaatgcacactgggccgaagcaattcaagtttgaaaatgcatggctccgcgagccactttgtcagcaggtggtaaaagatgtttaggagagggaatcgggtcatgatattcagactaaaattaagaggtgtggagaggagttgcttcaatggagtaaggagtacactggagacttcaaaacaaggatcaaaaaggcaaaaataagtctgaaataattcaagggcaagagagataattactcggttagtaaatatgaagaagccgagaaggacttgtttgagattttaacgcaacgggaggtcttttggaagcaacggtcaaagcaactttggcttaaggagggggatcagaatagcaaaattcaatccaaaagttacaagatgcaaatggagtctggtatgattgggatag

SEQ ID NO: 221907 - DNA, 1842 bp, Cannabis indica
gagtattctgtgttcgtatttttctcgatgggttctcaacatgttctcgatgggttcttgacaccattgtctcaaggttagggatgatctttctcgactggttctcaacacgaatgtcccaaggtcagggaagacctttctcgacgggctatcgatacattctcaaaaggttcttgagatactttctataaatcttcaagtattcaagtcacaattataaccctattttatgagacaaattcacattgacaagaaaatcagatgaaccctacttagtttccatttttgctttatttgtttaagaaaagtacttaagtttcctattttaattattattagttttagggaacctaattgatgtaatcattgcctataaatagtaaagtcatttcattacagtatttctagagagcacttaaattgcaaaaactattataagtgcttttgagagagattaagacattcttagttcttttctcacaatttatatgttctatttgtttaattattattattatcattatttattatttctaatctctttaattgactcattgttattagctaaaaacgaggtcaacacttctgtttccctttctatcttattcttctattacattttatgtttaatgattaatcaattaaacttttttttttttgattaattagtatattttgcttcatattaattagtacattttatgtttaatgatttatcaattaaactttttttttgattaattagtatatttttgcttcatattgaactaaattaaaatcttttaagtgggtagataatattacttaatttttatttatcattaagtcaaagttgctttgaaggtcatcaaatcgatagctgattatgtactttcattaatgtttgctttatttttctataattttcttgaagttcataattatattaattctagcaattgagtaattcttaaagtttcattttctttatcttttgacatatacatatatgtgttgtttatactaacaaatctgttaagtaataaaaaatgtttgttatagttgtcatgaaccgagaacattatacaattaattgtaataataaaacttaactaacactattgtttaacaagtgataatttgttgtatacaaataaaaaaataatattacaatataccaacatatgatattatgtattaaatttattgttcttactcaactatttccatttttgcatcttataatattctattttgcactagtaattagactatttttattgtgttataacctatcaagattttgtcaacaacccatcgataatcaatcaatattcaaccgataataaataaaaaaacacaaaattataatttttttacaatgcttcaactatcgagaacatgtcgatagcacagactttaacttgtgtcaagaaccaaaagctaaatcttaatcgataacctatcgataatttgtcaatatataattaatcgatatttaaacgataatcaataaaaaaacaaaagtatatattttttggcaatgcttcaattatcgataacttgttgataacatatcgataactcattgataatagttaaacttaatgattgtcattgttttggtcgaaaacagtcaagatttctttttgggggcctttctttttccagttcctaatcctttttcttttacgtgatctttctctatatatctcgtacctcttttttgattgcatgtgttatctatcatctacatattgttttgttgacacgtgttctcgttcttttattcctttttgcccctgccacgtgtttgtattctaataaaaactcccttgttacacgtgtctatgcctttagtgg

SEQ ID NO: 221908 - DNA, 2672 bp, Cannabis indica
acttggaccaattagggattgccatgtggcaatttatttaaccaggtacctacagaagtttcaaaattataacttaagtttaagtacctacagagttccagaaattaatataacttaagtattcttatcgtaaaaaattaaacttaagtatttatttacaactagaagttaaatttaggtatttatgcagcaaattacaaatatttttttacaaaacttgattttcttataatgaaaaattaccttattatcttcaaaggaactttgtttgttttctgtaattaagtggttttgtttcaaaaaaaaaatatttttttataccaactataagtctataactataatgtttcataaaaaaaacctctaactattaatgtatttgtttttcacttgcgtataatttgtagaatctatatgtttcttccttaaaaaaagtattttgatgtgttttgctcaatatgttaaagtcattattatatgggtttttattaaaccatatacaattaagaatatttctctagagatcctagccatttgaacttgggtgcaatttaaaataattattaattaatgtgtgggactttgagttcccttcaaattaaataaataaataaatgtattattcactatgtttttggtattttaaattgaaaaacaaaacatctaaccaagaaatagtgagttatatttgtatcccataataataaataaaattaatatttaaaaaaattaagtttaaaataatttttaaaaatttattttaaaattttttgtcttacatattattttgtattaatttgagtacttattttaattgtattttcataaatttttatttattttttctaataaaatttcataatattttttttatattatttttttattataatatttaaaatataatttatttttgtttgatagttataaattaagagaaaaaattaaaaaatatatatataattaaaaatttatattttatgtaaaataaaaattattaaaataaaatacttttataaattttttagtgcaaatataactcttcatattactacactgattattccggatcataacagtgatcctcctggttttcgaacgatcatcgtttagcataattacttattaatatgtttttcttttctagcaaagttataaagttgcgacaaaccaactatttgttattatttatttttgaaagaactgtgacaaaccaatctatataatttccaacagttgcacagtaacctctacttcttgtccactaagtttgtttttttttttaattattaaatttacttatttttgaaaagaaaccggttgttaaaaattgtttcatgttatttttattcttttttaacaaatttttaggctatgcttagaagtggatttcggggagcaaataaaaaggtaggaaaaaatatataaagaaaaaaaatttgatattgaatttggtatgaaaagaaaaattatatacaaaaatacttaattcaatcaaatttttcatattaaacttgaaaagttaatttctttttctattctacacagttttttttcttaaaaatttcatacaattttcttttcttatgaaaatcttaatttctaaatataaccttaaataaaaggttgttcgttgttacctaattttacacgttgcagaaaattcatacgaaggaaaagaaaatgaccatagttttttaatttgtacttttcttaaaaactggttctttacaaaaaaaaaaaaaaaaaaaaaaaaaaaaactaaaggtttttttttaaattattttatataaaaaaagggttttgttaatttaactctgtttaaacacgtttaaattttaaacattctttaaatattattattattttttaaacaggcccgccagctgtcgtcatcatctcgtccaaattggcgtcacccataatttgcttattacacatagcacgtccatgttttattttattaccatattttatttcacttttcattttttacgtggtcaaactttgattcatgattttgttttttttattctttatcacgatttagatttttctcttcctttataatattttgaaagttaactgttaataatagaattaaagttattagttattattatagtgactttacaagattttttactttgctaacagatgagtttttctttttttcgtacttttattctgattataaataatatatttaataatttataaaatatattagttgctaattattcttttagtatatgtagctttcatctgaatattttcaagtaaaacattgaactttactcatccgggtattttgacctgtatgtactaatttctctttaatcagcatttggtcaattttgtggaaaaaaaaaatactttgattcatcatttctactttgtgactcccttattttaagaacaaatgaatattaacaaaaaactgagtttccacaccgttcaaaactccaaggcaactgatttagtttcagtcaaagctagctaataatttcaagtccggagattagaaaacaataccagtaatgccagccacatgaatttattacatatactaggtgaatgtacgcgccgagccacgtattgctagtttcatttaagattttggtctttttaagattttgaatgtatttcattttcaaagattacaaattttt

SEQ ID NO: 221909 - DNA, 4898 bp, Cannabis indica
ttttttgttgttttggtacttgggatctcattagtgtcatcaagtttgttgttgatgatcacaataggatatagatcctggtttgtgggtacattaatggatggagttatggggttgatcacattagtgacttttgtagtcaccaggacaagatgttgatcctgtactgtggtgacattaggagaatgagccttgttggtgatcacagcagtgggctgtgtttgagttatttgtttctggtttggtaacacagattgagaaaaaaaattatgtatctcctgagatgatgtggtgttagtgaatgggaagattcgttcatggaatacaacatcacgggaggaataaatttgcttggattcaatgtctaagagagtgtaagctctcattcccatagggtagccaataaagatggatgcccgactccttggagaaaatttatggcgtttggaatctaaggtggaaccatatgccaagcaaccaaatgatctaaggtgatcatattgggggggttaattgtgaagtatttcaaaggatgtattgcctttgagaagtttagagggagtgcaattgagaagataagtagcagtggaaactagataagaccaatagaccaatggtaaatgggattgaaaactcaaagcacgagctttatgtgttgatgttttctttcaaccacagaatttcgttgtggtttttcaacacaagagtgataatgaactatgccttttgaggcataaaaagaagtaagatttaattccttgtcattgtcggatctgacagcctttatggattttgaaaattgagtgcataccatattaaaaaaatctggtatgatattttgaacatctgattttgcttttaacatgtaagtccatgtaaatcgagaatggtcaaaaaatacctataaccttctatgcttatgatttgaaatggtccccatatatccatgtggattaaatcaaaagtagccattgcaaagttgttgttagaaacaaaagggagtctcttttgttttgctaaatgacatacatgacaatgattattagaattgggagtaaaagaatggtcaatctttttattgaaaaaattcgaaatatacaatgagggatgaccaaggcgattgtgccattgatttacatttgatgtatataaatcgaaacaagattgactagaagttgcagcaagcgaattatcttgagatatgaggtacaatttgtcatatctcttagctatcctaatcaccacattccaagaaggatcctgtataatacatgaattagctttaaaaataacagtgtagggtgtattggaaactaagtcattgataaatagaagatttattttgaagttagggacatatagcacattatgcagatatagagaattgttgatgcaaactgtaccaattttggaaacatttaccatcccaccagtaggtaatataacatgcttgggaaagaatgtgttagtaaaagatgtaaagcaagagatatttgaacacatatggtgagtagcaccactatcaagaatctaatcaaaagaaagttgtgataagatgttaccagccatattcgaagcagcaggggcaggttcaacatgaggattggtctgacttagctattgactgaggagtgagattagttgttgacactgtgatgaaagatcagctagtatagaggggcctgtggtgtgatctgtagaggtattggaggaggtttgattggcttgagccttgcccttatcagccttctttttgtctccataactaggtgggaaaccatggatgaagaaacacttatccactagatggcctggcttgccgcaatgagaacaagaaggacggggttttttggttcttggaggattagtaggaaggggacgaaccgaagaggcaagaggtgggttgttcgaagatccgagggtgcgttgacgttcttcttgaacgatcatagcaaagatttgagatagattcggtataggttcatttaacaagatctgggtgcaaaccgaagcatacgattcgtttaaactagtgagaaattgcatgacttggttttgattatagtaatcaagaaattgcttcattgcaccacaagaatatgtagtgtttggctgaaattctttcagctcatctcatagggatttgagttttgtgaagtaagaggtgacagaatgatcaccttgctggagacgagtaagctgggtttggagctggaaaatacggggtccattgccctcattaaacctttttgctaagtcttgacacatatcggtggcatggtcaaaatacagaatgctctgagcgatttcagaggaaaccaaattgaccaacaaggacatcaccatattattacaacgcaaccaagatgggagaagagagttaccagttttaggccgtggaattgaaccatcgacgaaagcaattttgttctttgtagcaagttccattgtgataccacgcttccaagattgataattgatgccagttagaacgatggatacgagaacctgaccggggtgatcaccggagctgaggaagaaagggctggaaacgtcgttgttggtgttgcgatcatgagatctacgagtgggtactggtacctcttcagttcttagagattgatcatcaagatcatcaatgttgttatcggtgttgttctgagatctgggcctggaattggtccgacgagaagcaacaacaggaacagttgcaggagcgaaagtgacatctggattttccgatgaaggatgatcggttgtaggtggtggaataccattttgagatcttattgacggtctagccatggagaatggcagagtcacgtctaataccatatgagaaaagaagaaaacaaaggagaaaatagcacagcaaaaactctgtaaaaagaaaattttattgattgaattgaagatttgatacaagagaagccttatataggcagtgagataggacccagctcacaatatcaaccaacttaactaacctctaactgtattgtaactaacagaataacataaatactaaactaataaatctaagtctaatagtagtctaagtgattatctgaagccttcacctaatagacattgcttgactcagtgagctcaataatattcatctttcaactattaggttttagcggtttgatctttatatcattattgtttttgtctaaataacattagatgttgaatcttatttggggcttagaccctggaaattagattcaaaatattaagcttcacaaataataaacttgaacattcatggactaagctggaatgttttattaaggagttgtcaattaatgatactaaagttggctttaaaaatatgaataatttatacgaataatttctttagtaaaatttatgatattttgaaattattcttttcccaaaaaaaaaaaaaatagaaaagaaattttgaaaatgatgtcgataggcggtgaggagaaaaactgatcaaatattattttttaaaaaaacaaaataaaataaaataaaacagatataatcctattttgattaggaattagtaaaaacctaatttgactagaactaataatcccctatatatacctaagtttaattataatcgtgttaattagagaaaacaaaaaaaataaacttgattatttttatttgagtgtacgtattgaagtagattcgttaaatatggaaacaaaaaagtcatcgttcatggaaagcttgattatttttatttttatttctattcttcttcttcattttcttttttcttttcttctttaattcataattcattcacggtatcttcatctataaatattagtaaaagagaattaagtttaagagagtgaagtgatgagtgagatatattatgcataacatatatacctcaaaacaacaagaaaatcaaagtaataattctagttttctctacaaattaagcataagaaaattaagatactgactttataaaccagaagttgggtttggaaaccatgcccactattaggaacgaaaatggatggagaaggcggtgggttccaatcgatcatcaaaattctaactatgcctactttgcttatgctaatttgtacagaaaactagattccaactaatactaaataaaattgaattaattcaataacttgattatgcaaaattataacactaccatttttggttacttatcggtggatcaattattaatcttgttattttaagatttttttgttattattatttttgaccaaatgaccactttatttttattttttttttcgaaaaatgtatgatcaattcattgaaagagagtaatttatgaaaattaatgttttcttttaatatagggaattccatcaaaccaactaaaacaaactacaatagaagagagaagtcactcccaacaagatcttatcattcatgtgggaaagacaagaaaattttaaggtaacaaaaattctctaaaatttatcttgggacaatatttaaaataaacacaataaagcatgtcttatagtattaaactgtaattagttaggattagttatatgctttgtatttagtctgacaattctgttaatacaagttggtaatatgttattaactaactaattggttagttagtcttgaccaacttgattcttgtaaactagtgctataaaagcactttactctgtaatcattaattaattaatctgagaaatacaatctctctttctctctcggtttctctcatggtatcaaaagacacatctcaaacttcatccatggctagaccagctaccagatcgcaagatggcatccttccatcaaattctgagcatcaccagtcagagaccttgcctgaagacatctccgcttcgattcctcctccttccgctacccctcgtcgatcaaccaggcct

SEQ ID NO: 221910 - DNA, 1606 bp, Cannabis indica
tctttaaaaaatattatattaaattatatgggacccgatacttagttggattaatagcgatattgacacataagacggtgctagacaccattaatgtcctttaacatttctcttcttttaagtattaatggtgattaatactttttaaatgcatcgattagtgactaattatcgatacttcttaagatttattatattataatcaaactatatgagatctgatacttaattggtctaatagcgatatttatacgtaaaaaagtactaaatactactcataccttttagtatctctcgttttctttaaggggttattgacatctcgtgattataaataattttttttttatcctttcatcctatataaatagattagttctatttatgtttcataattaagaaaaattggatgagtacttaattatacattattctcaaataataataatgtgtttaaacaaatttgcttaataagaatggtaaaaaattcaaaaaatgaagtgaattataacaatgtaccctatatagctttacataaggttcgacttgattaattaagtaagttaagcttgtgtttagaattcatctaacttaatagttaattttttttttacttattttgaaaaatactattttttttaattaagggcttaattttatttttttcttgtaacctattaaattttatgattggccctaatctccaaacgaaacaggtttgtttcttctaaaataatatgaatattgctattaggtaccagtggtgcttagtactttctttgaaatatcgcgttgcgattggctagcgatactctctaaaagctattatattaaattatatgagacccgatacttagttgaaccaataacgatattgacacgtaggagaatgctaggcaccaataacgctctttaacatttctcaaataatataatatataaattacattacctagataatattatttttaaatttagaggaccacaaaaggaactataaatatccaaaaacctatgaatatatataactcaaattaaacttcatatgtggaaattataacattggattctttttggatggactcaaaatttagaaaaatgagaaaaataaaataaaaatagtttcaagttttaggatgaatttatgaagcctcttcactataaaagttaccacctatatacttgacattcgtattaattattctaccacctatatttatttttatatatatatatatatatattcacgagacaagagaaaaataagataggtcaatttcttggcctgcctaagatttgacccttattacatttttttttaaaataattataaaaattattaattccaaccataaataaattcatatataacaaaatagactacactatactacagaaaattgaagccacgaaattcgagatcatttttgaattatttttttaaagaaggaaaaaaagaatagaaaatagggatgactagtattggatttttataatgttagaaaaaaaaattatagtgaaccgatatatttgtatttatttatttattttatggttatgtatgttatattatagttatttaatttttttttgtaaaattttaaaa

SEQ ID NO: 221911 - DNA, 1874 bp, Cannabis indica
tccttaaccttgaccaagtatgcggaatattggtcgaaacaactagctccgggatcaattgatagctgtaaggacttaaagctggctttctgcaaacaagttattgctatacgtgacaaagacatggaagttggttctcttaccaatgttaaacagtaacataatgaaagcttgaaggcttttatttaaaggatgatggagatagatgccaagaccaaggttagcgatgacatgaacctaatggccctccaatttggatttgttgttgggtctttgctatgggaagagatacaaagaaagagagccaaaactttgagtgattttatggcaaaggcccaaggcatcatcaaccttgaggacgcctacatacatgcttttggagtccctttggctccaactccttccacgaccgctcttaacttcacacctcaagttctggctctagccctgactctcccaggagctcaattttccccaattatttacagacctactacttctagtctagcccctacgcagacccattattccgggtacatgggcagcacagaacggatgtagtacaactcttggacaagtgaaaactgaggtcccaaagtctactataagccattcctagaacaaaagagggggtaaaagccacaatggcagtgattcttcaaagaagcttaggaaggagtatgacccaaagtacaccgagtatacatgtaaaatgtcgaaaaatataataatatttagttggacatattttattaaatatgtaattatatgggtattagagtaggattataatcttacttaagctaattaagagttaattagtgaaatattgagtaaataaataaataaagcgtaatttattaattacagagatttcatcaaattgtgtgggaattttatataccatttttaaaataaaatattttcaggttcgacgaccgtagaaactcgacggattggtcagaaatatcatgacgataaatgatgagttttattggaattgtaccggattagtttagaatgttgagttgtcagtttaatcgagatagttagtttgaccaaaatacacctaagttaataaataacttaagtatttgaatgggggtaggatagtctttgaccaagatttattctaattttgtcttttgtggtttctagtaagtttttaggctgaattaaggtttagttaatagatttataatgttaggttagattataagttgaggattaatattcaaagagagaaaaaaatcaatcacaaaatcccttttctctttctttccccttcgagccctagaaactagctaaagcaaaggagttttcttcatcaaatccacaattttctagctgaattagctaaccctaggtgatgttcaagctttgaggtaagttcttcctccttttctcattgaattcttaggttttaggttaggttttgttgagtttttatatagttttgggtctgtggtgttaattgggttctgagattgtttctaagtttaaattaaaattgtttgtgtatgtattgggtgattcttaggcttttaagtgtaaggtttttattagtactatttttaggttaattttagtgtgtttttaattaaattttactcttgtttggtgcaatttatgctttttggtatcttttattttacaagtttaaaataaaagaaaaatggaaaatattgaagaaatacgaaaaaaatagtcaaataaattaattctcggggcaatagctcttagaaattaatttgagaaaaaaaatcctaaagttatggtgcgattggagcttttgaggcaaagaaaatatgaaatttggaggagcgcctcaacattaaaaccgattccagagcatgaaaggcttaaaatttgtc

SEQ ID NO: 221912 - DNA, 2041 bp, Cannabis indica
gtatgatcaaagttagaaaagagtctaggattagaaggattcatcaacattacttaataatcaagttattataatggatcaagatgatacagcaaagtaaatgatcattgaaagataatgactgaaactggattctagttgataaagaaaggaaaagaggaaatacatttaggaatgacaaagatgtatttattctttccggtaacccaccatgaccttactttgaagttaagagtacttaacttagactaatctcaagatgggggacctccctagaaatatttcttgggaagcgtgtgagtatgaacaaagtacgctagaaagatttgtattagaatgcaaagccagcagtcattccaggaattaattaagagtaaagaactaatgtgtaaagatcaaagaggcgttgaaaccaggatgtattagtaactggaaatgaggaataatatgatgagatacatgttcgaatgattaggttgtcagtaagcaaattagtacagtaacgattagtgaaatttgtatcagcattgtgagatttttgaatgaaaatgtaaaggtaaaaaccatggactgtgtagtgggattttcaaatactacggtaagttatgatctgatccaagtaatagtggttaaataaactgattcaacacactgtttgacaatgcagaagacatatacagtaaatcaacatgaagaagacagtttgacttcatagagtttcaaacttgacaattctgattgtgatcctaagatttgataaaatttatcaagaataaaatgggtataaattgaattttagtataacttttcatcctcaaatgaacaaatgagaggattttgcataatggaaaataagtcgtggatatgtgtgatagatggcagagattaaagaataatttgattggacactctagagaatatggtacgagggaaaatatcgatcacctattcactgaaatgaagctggtgagaaaagattacattggaccaaaagggtccagggaacttatgaggccattgggagaatttgagctcgtgtgctcacccgtgaaaataaaaaaagcttgctggtttgaagcacagagataatggaattctaggtaaagactttatgatgctccgaagggagttcaaaaattttgaaaaaaaagagagattagtcaggacaatgatagagcatgttggggaagtgcgtgtcaaacttgacacattatttgagtatagaatataacacgaatttgatatgagaggatccacctatccttatgctagataagaaggaataaaggtacggaaccagataaatttgttggttaaaacaatgtgatgtaacaacaaggttaagaaggccacttttgagttagagtccaggtgcgggagctgtgttacgaattaaccagaataaatttcaaggacgagatttctataaggaggggataattgtaatatcctaaaaatataactatgattaattagggaatgttttataaaatatggagtaatatgtgtgttaagggtataatgggtaatattatgatcttactaatctaattatatgtggaaattagggaatttattcataagtgattcaataagcgtaatttattaattatgaaaattttattagaatatgtgggtaatagacatgctatttatgaaataaaaatatttttaagttcggaaaccatggagacccgattggtggcccaacgatattagtatgtgatattgatgatactaggaagtttagttaattttgagagtgtcgaggtattttggggtaattggttatgaccaaattacccctagggttaaagtttgtttggtttgtaagtaaggggcgattttggtcttatgccaaggttagttaaggatttcttatgttatctatcttccaatagataagttagaaagtaatagaatacctaggataagttaaatcgatgtgtagatagaggttagacttagtcaaactaagaaattcaaaaaaaataatcaaacttccctctctcttgctttctctcttggttcgaccttgaag

SEQ ID NO: 221913 - DNA, 1934 bp, Cannabis indica
taaaaaaattaacaaatgtgaaatgttgttgcaaaatttcataagggccgcaaggataaatgtacattgtagacctaatatatatgtaccaaagttccatattggtaggtaatatacactcaatcaacttaataaggcaaacacaattaattcctctaataaaccggttttattagtgagttaggtctaataattttactagtatggagcacaaattcacttaatttgctacttcaaattaaaaaggcaaaagtaaaaacaagaaaagagatgtcaaaacaaatcttttttttctttggttacttttatgttttatttgaaggtttttttagtttcctttgtataaaaatagaggttatatcgctgtaaattactctaatatatagagagaatgtcttgtcttatgacatgtttttgaaagtttattcgtacatttgttattctggctattagtttttctgattggtttgatcgatcaaatggcgtcaagtagtaagcagggtgatgatttggtggataggtatgaacagattcaattagaggaggaagaagagggtgttctcataacaggtgagaatgaagaagaagagcaagcttttgatgatagatggtgtttagtgggaaagttcctcactggaagaactattgattttgatgcaatgagacacatgatggcgtctctttggcaaccgggaagaggtgtgtacatcaaggaattggataccaatcgatatctttttcagttctaccatgaaatcgatatccaggctgttattgacggaagtccatggacatttaatcgtattcaattggttttccataggttgaagaggggggaagaccctcgattgattcgtctgcataaattggatatgtggatccaattgcatgatttgaagtatggattcatgtctgattgggttgtgaaacatgttggcaattatattggcacgtacgtgaagtctgacccgaagaattttgtcggaatatggcgggattatctcagagttcgagtcactattgacatagagaaacctttgaagaggcgcaagaaactgattaagccaaatggggattggatttggactacattcaaatatgaacatgctcctatgttttgtttcatatgtggccttattggtcactctgaaaaattttgtccaaagagatttgaagaacactatgatgattcgattcgtatgtatggagagtggatgaaagcgcctactcgtaagaagaactatttgataggtgcccagtggctgcgtacagggcgtgaggaggaggaaggagttgctgatggtggtgatcggagccggagcaggcgggtggaggggataataaatgattctgctgacatcgggattgagagagaaaattatggaggagatcatgggatgcgattggatacagttcagagaaatcggcagagtgagcaatttgtggaagttaatgctaaggggagtaatgaccaagattctcatgaggaggcaagggtaatcagtcaatctgaaaaggaaactatgttaattttggaaacaaaaaggagacgtacagagaatgttgagcagaggatatcacgcatggttgatgatactatgttagataatgttgatgaagtcaactatagccaaaaaaacgaagagcaggtgggccttggtgttcaggcccaccaatcatcatgagtgtattatcctggaattgccatgggcttgggaacccgtgggccatacaattcattaaggatttaattatccaaaagaaacccaatttagttttcctatgtgagactttgtcaaagaaggacacagtagaaaagcttcgtattgcaattaattttgctggtgctttttcggttgatgctcaagggaagagtggtggagtggcgttgctttggagagttgaaggggatgttagcttgcttgggtttggtc

SEQ ID NO: 221914 - DNA, 1388 bp, Cannabis indica
caacctactcttgatatgccttctcctcccccactgcttcccactaccactaaaccacatataacaaaccaacatcatatgaaaactaaatttaaaggtggaatccacaaaccaaaagcctacacaactacttatcaccctcttcctgaatcacttctacctactgaactaaaatctcttaagtaggcacttgctgaccccaaatggaatgcatcaatgagcatggcaaatgaagctttactcaaaaataacacatgaactttggttccatgtcacccaagcatgcatatagttggtaacaaatgtgttcacaaggtgaaactcaaagctgatggtatcattgataggtgcaaatcaagggttgtagccaaaggatatcatcaaacatcagggatcaattactctgaaacatttagctctattgtgaaaccaacaactgttcgaattattctcactttagttgtttcttacagctagcaagttacacaacttgatgtctcaaaggcctttctcaatgaaaatctttaatgtagtaaccacctgggtttgaggatctaacaaagccaaatcatgtgtgtaaactacacaaagcaatctatgggctgaagcaagcaccaagagctcagaatgataaactcaaaaacgccctaatcagtaaaggctttaaggtacctcaatttgataactccctgtttgtctatggagatggtccaaatttagtcattctacttgtttatgtagatgacatacttgtggcaggtcctaacaaaagcctaatctcccaacgaatctctgttctcaacaaagaattttctctcaaagatttggagctcttcattatttccttggggttgaaataataagaaactcaactggtatgtacttatcacaacctaagtacattttagacttgtcaaggttcgtatggaaggagtaaagcctagtccaagtcctacaagctctgctcatgttttgtctttaaccaatggtgaatccttctcagatccaaccctatacagaagtacattgggagccttgtaatacctaacacttaatagacctgatgttgcctttattgtcaataaactaagttagtttattcatgcaccaacaattgtgcattgggaggcttgcaaatggctgtttaaatacttgaaaaagacaattcatgaggaattacacatcaaactgtgcctcagactttgaattcaggggtaatttgatgtttattgggctagctgccctgatgataggagagcaactggggggcatgccatattccttggaggaaatctcatttcctggtctgtcaaaaagcagcatgttgttgctcgaagcagcacagaaagtgagtttcgttctttggccaatacaacagctgaaataaa

SEQ ID NO: 221915 - DNA, 1661 bp, Cannabis indica
aattaatttaaaaataatttttaaataataatattagttgtactaatataaacatgtacacatgtacaaaattgtacacataaagtggcagttaactatatgacacattaaatttgttaatattttagtattttggagctagggtttttactattaaaatttgagctaagtataagcaaaacgaaagttgaatgggttaaccactaaaaactcttttaagaaataagtttaaaaatgaagatctctatttaaaaaaaaaatgagtttaaaaataataaccatttcttttttaattttagagaatggaagagtttttaagaattgttgagagtcctaaaatctttacttgtattagttatagattttgtaaagtcatttagtggatatttctttaaggctaattaagattttttttctccgaactttgacatgtaccaaattatgtcccctgaacttttttggccgttaaaaatttcccctgaactattaagatttttagatttaaggacttttgtctaatttcattcaattttactattttagtgattatttatatactaaatgatgctcccagactttgatatctaccaaatcatgtctctcgaactttgacatatactaagtcatggtccctgaactttcatccatgttaaactttttttttactaaaattagacaaaagttcacaaattcaacaatctcaatagttaagagagaatttttaacgaccttaatagttcaggaaacaagatttagtacatgtcaaaattcgagggaaaaaaaaatactaattaacctttctttaattttgtttctttcatcaattttccgttgtccgttaatttattatttcttataacaaatgccacatattgaagttcattaggtttttttttttttttttctttaaagataaagttcatggttacgcatcaatacataatcaagttataataaccacgtcattgtttaaatatattcaaagaatgcgtatctatctaatatgaataaagcgaaacgcaatgtgaactgtccttttatattatatattttacttttaattgacaaagtccaaatatataaattcaaataagtaataaacctaactttgtgtggatcataatgtaacacataacaccaattaaagagattaaaaataataagtacggagagaaaatagcacaattatataacgacatagaattattatggaagggataagaccaggggagcgaattagcaattattatatataaaatataaattgatattttatttataaaaatatctctataaagtgtggacaacatttatactttttatataattttaatttttaaaataccacttacactattatttacacaatcagacaatggttttagtgtggttgctgcgtagttgcgcagtagttgcatcaaatgaaagtttcaatcagacgataattgcagggtggttgctgggtgattggtcgaatattgcatcagacgaaagtttcaatcagacaaaagtttctggatagttgctgggtggttagtcgaaatttgcatcagacgaaataactgttagcaaaatgtttatgcaactgttgtgaaacattaaaaatcggaactgtaaagtcctttttttggcaagttagttgacaaaataatttttccatt

SEQ ID NO: 221916 - DNA, 9087 bp, Cannabis indica
tttaaaatcttgtgttctttattttttactaatttttgctctgtcttaattacacttctaatcacttattaattgactcactgtcattggctaaaagcaaggtcaacactttgccacgtgtcttcatcccaataaatgagggatattagtatttaaactttctgatacgaaatgatcctttattcatttccctctcattttcattttcctcttctttctcccttctgaattttgaattctcaaaaaaatagtttgcatttttctgagttttcgaaggattttgaagctgttgatatccacaaaatcatttgaagagagattgtacttcaaggttagctgactagaacttctataactatttttctttctctgagaatttatgcgtattctttgcttttaggggtagaaaatgcatgagataataggatttgttatttgtcttttgacaaaatacctatttttttgggaaatatatacctgaaacttgagtaatcacgagtttaaggaagaacactttgagtgcttgcatacttctccctgagtacttcgagtactcgtgagtttttgacgagtatcttgaatgttggcgtatatttctgaatattcgaatacccagaaataactctatcagaccaataccaagcctttaaaccctctcttttgctagaatttaatgattctgagggttttttagcttttaatgtgtgcttttgttatggaaactatctgagtctttaaaatggtgggtgtgtcacagtaacttaatgctcatgcaaccttcgcatgttccttgggtcactgtgaaacacctagccatttgagacatgcggttagttttcatttttcttgctttgtaattgcttattgggactaactaggttctttgaaatggtaggtgtgtcccattaactcaatgttcatgcatggaatgcatgacccttgggatattgagatacccccagccgttttttgaggtacacagttagttttaactttgcgacttactttttgcaaggattgagtatattctcgaaatggtgggtgtgttttagtaccttaattctcatgtagcgatatgaccattatgttactgagatacacccaacaatttcttgagatttctggtcagttctcttattttttttctatttctgaactttgtgcgggtgagggcactttgttagtttcgcactttcaccacactgaaaagatcttctatctttcaaatgagtgacttgtcggatagctagatgcttgattctagaggagggacctttgctgatgagcttgaaagaagcaacaacttcatatccacctcgatatctgaggataaagccccaactacaaggatctgccagggctagctatctactaatgagatagataggatggttcaagaacttgttgagccagtgacgatcaaattacgtgatagtgagtccacggggtcagcccagaactatctcattcactcgagacatacccctgacaccgaggttgaagaaatgggagaggacttcgaggtacctaatcataattctaaggaagagagggaggatgaaggaaacaagacggattcagtcgataatacccaactaaacgaacaattttcatgcaaggatctggtctcgcaagttacgaaattagacctgcacggctgaatttaattcgcatatggagcttaagaccttcggcatcccagtgacctcaccttcccttcaaaaatcctgcgatcatccctacacgagatgtagtggtctcaattcctatcctgtgatgtggggtgacacttccttttcacccttttgtgaaggccatccttagacattatgatgtccctcccttctaactaactctaaatagttatcgcataatactaggattttctgtgatgtacatggagtatgttcaaggggaaccaatgatagaggacttcagctatttttatgacatgaagagcgtcagccatgataatggtttttattgctttagtaaatgggctaactctaaaattaacggggtagaaggtacggtttccaatatgagagattggaaatccaaatgcttctatgagtttaaagtgccaggagttagaactgacttcaatcgacgacctagtacgtcgcatatcctgacacttagcatatatttttattactttgtatcgttgctaatgtttgcttttatttattccagatagaccggctcgacctgtactggaccctgcccttagggagatcgctgaagttttaggtggcttgcttgttcaagatcgcgattggtgactgctgtgcacaactgtaaaattatgagaacacaaactcatccctaagaatgccagtcttcagcgagaacaagtatataaggagccttctgagaaacaaaaggaaagaatagttaagtgtctatcgaaacaaacatcgagaccaacatcaggtaatgcgttttccatatacacttcttttatgttgagaatgagttcttctcttatgatcttcatgtagagatcactttcccgaagcaagctccaactttcaaccgaaagcctaaggttggtactatgacaacttctccagtcattttgcagaagaggaaaagcgacaatgttcctacgtaggtggctgactcgtcaaagaagcaggacaaaactgcccaagacaaggggaaaaaagttgtcatcgatcctgctgtcagggcccgtgttttatagctcttaaagaaaaatttgtgatgatgagttcgtctctaaggttgagggggttcttgccgaggacttgatgccacgctctatagaattggcatcgcaatttatgaccatgttctcacgggcttttgtcgcaggttccaaagagctttatcttctgaggaagcagaactcgcttctacaagacagcgtaaagaaactgaagctggaagtgaccatgaaggacaaagatatcaaagatcgtggaaagctaaggagtaagcagaggaaaaagtcaaagtcttggaatcacgagttgatgaactcggttgtcaccttgagaatgaaaaggagatctagaggaagcaatatgatcaggttgtctctgattacatttacactaccttgtccaagctgcctgacttcgacttcccatttctcgtagaggaggcagttaaaatagtcgatacatttcatgctatgtcgcctactgagacccagggacttaagggaaatctttaccctgagaatgctaaaaatgtgaatgcaaaggaagtcgtagatggtgctgctagcaaggtcgcggatgatcccaacactccagccccttagtttttccttaatttcttttgtattgttgaacttcctttcttttttagaggtacatggatactcgcgttttgtactttaaacaacttatttaacttatgttatcgaacatcatatcatttcgaggatatttcttttgcatacttatttagcggtacacgtgtactcacattgttaagttgcatttataattaatacttattttatttttgtaaaagttttcgtggatctattcatagcttggtgtgatgatttaaagtattcaaacttgcgaataatgcagataaaagttctaaaactttgaaaatttcattaattaatcaatagtatagtattaatggttatacccctatacttagtacagtttatgaaataaattgactaagtataaatacatatgattactattgatagtaatactttaaactttcaccattctaagctcttttgatggctgtaccgtcgaaattagataatcgataagtcgcattgccaattttttagagattacgcgtattaggcataaatttgcgcatcactaaatctcctactcgcaggttcctttccttaagctttgagttgaaatagcgagttgttcgctgttgataggctgcatttttcaaatgagcctgatcgcatttttcctctagaaaaattgagttgtagcaactaattttctgtattgctgtctatattgaagacgtctcttctcaaagatcctgttccaacttcgactggtacgatggctcacacccataagaaagcgagaagggggtttcaccgctcgttgagcgaggagttgtattatatgaccataaaacttgtcgaagttcctctagccacatacctttcttttcttcgagcttaccttttatggtatgcttgatgattttgttgtctgcttcagtttgtccattactttaaggatatgcgactactgaaaaaaaaaattcgaatcccaagtcatcacacagttaatgcatctccttacaataaaatttcttaccattgtcagaaattagtttataagggatgccaaacctggagatgatagcactatagacaaactcgcgtaactttgaggtcgttatggttgcaagaggattagctttggccgactttgtgaagtagtccacagctattacgacatattttggtcctcttttttcttttggcgattcaccaattaaatctatgccccaaaccgcaaatgaccaaggactagtgatagagtttaattggctaggtggcctatttacataggtcgctattcattggtacttgtcacatttcttggcgaagctagttgtgtctgcttgcaatgtcggccagtaatatccttgcctcataatttttaaagcaagggaattacctccggcgtggttgccgcatatcccaccatgcacttcgtggagtatatagtcgcattcatttccatcgatgcacttaagcaacagttgactaaaacttctacgatatagcttatcgtcataaatgacatatcgggcggctcgatatcacagttttttagcttcggtcttatcatctggaagcactcttgttgttaagtagttaacgattggggtcatttaggtgaccttcttgatcgtatcgacctccatcatctcctctcgatgaatagtcggataggttaagacatcaacaggaattacatagagtaattctacttctcttgtcgaggacaatgtgccaaagcatctgcatgagaattgtaagcacaaggtattatactaaaaattatctttttaaatttatttaataattcacaagtgtaggaaaggtatttggccaaacgccctcctctggccagatattctccattgacttggcaaactacaatttacgagtcgttgaatgcttcgaggtattcaactttcatttcaagagcaagctttaaccctgtaattaaggcttcatattttccttcattattcaatgtaggaaattcaaacctcaaggcagcgtgcaccttgaatttgttggggcttataagaattattccaccacctaatccctctctattggatgccccgtcaacatacaaagtccaaccttcgcccggtggtacatcgaggtctactcgctcttctgtaactagtgtcacctcatcacttggaaacaagagaataaaatcaacaagggcttgtcccttgattgccgatcttggcttgtatctaatgtcaaattgactaaaatctactgaccatttgagtaaccttcctgacgtttctggttttgctaacacttgttgtaaaggatagtttattaatacctcaatgttgtgtgcttgaaaataaggtcgtaacttccgggaagcaaccacaagtgcaaatgctaaatgttccatttatggataacgagttttagcatccaaaagatgcttctcacgtagtatactggatgttgtttaccttggtcttcgtggattggtactgaagtaattgcgtattcggacattgctaggtaaattgacgaaatttctccaggcattggcttggacagtattggggcttgccccaagtgcatttttagggcttggaaagcctcctcacatttatcaatctactaaaacttttaattaccttttagatctgaaagaattctttacatttgtcagaagaacgtgatataaagtgatttaatgcagtaactttacctgtgaggctttggacctcttttggtttggtgggagatcgcatctccaccaatgcttttatttttactagattggctttgattcctcgctagtttaccataaagtcgaggaattttcctgagcctactccaaagatgcattttaaggggttaagtcgcatattaaagtgtcttaggattctgaacatggcttccaggtgagcgacgtggtcttttgtatgttgagattttacgagcatattatcaacatacacctccattgtctctcctattagatctgtgaacatcatgttaacgaacctttgatatatagctcctgcatttatcaaaccgaaaggcattagcttataacagtacaaacctcgatatgtgatgaaagaagtatgcttctggtctggttcatacatcaaaatttgattgtatcccgagtatgcatccataaactaaggagttcatgacctgcggtagcatcaataagttggtcaatgcttggtaaagggaagctgtccttaggacatgctttatttaaatctatgaaatcaacacatgtgcaccatgagccgtttggctttggtacaagagtggggtttaataaccagtatgggtagaatgactcctttatgaagccacacgctaagaggcgatctacttcttccttgagcgcttggtacctcgtgaggtccattttgtagtgcttctgtcggatacctcgcacttctgggtcgatgttcaatcgatgacacatgacctcaggcgatatcccgaccatatctgaatgtttccacatgaaaacatccagattctgtttgagaaaggtgtcaagcttttcacgctgttgaaatgttagtttagaaccaattttcaaaactttactatgatcgaaagaatcgattgggacctcaattatctcttctacagcctgtgcaatatttgtataatcgaggattctcggatccaagtcagctttttcaacatgcggtatttcttcgattctgaagatctcctgtcgaggaggaggtgattcaagtaaatatataacatttaccgatttcttcttttttgcaagtttcagtgctatgttataacattcccttgaatctgactggactcctcgcacggatcccacacccgcaggggcagggtatgaaagatgatagattgaggtcactatcttcatctcttttaaaattggacgacctatcactgcgttgtatgcagaatattgggcaatcactgcaaaatcaaccattgacttgagagtaataggcaacttaatcattcccttcaatgtgattgtatctccagtgaacccataaatactcgaggttactagtcgcaagtccttctcctgtaaccccatttgcttgaaagcttggaaataaaggagattgactaaacttacattgtccactaggacttgatggacattatctcctccaatattcacgactattacgagtgcgttagtgtggagatggtgtacccacctagcatcactctccataaaggttatgtcatcacattccttctaaaaaaactttccaggtcgctcactaagattatttacactggtgagcggtttctctcttgcctccttggcatatcgctcttgtgaattcttggaatctccaccaatatttggtcctccgataatagttaagatagtacagggagttcataaccactcgcattgtttgtgtcgtcattctcattcgcctggggatggttttctccgttcttcttgtacttaccaaattctcctcgtctaatcagttcctcgacgacgtcctgtaggaaccagcatttcagagtcgtatggccaatgtccttatgatatttgcaaaaaaattttggatctcacttgtcacgatttcctctaattagcgaaggctttctgaagactatgtttttctcttcgatcgcatagatatgatcgcaagggactgccagtttagtataattgacaaaacgcgggcctccttttctttttggagacgttccttcttggaaggggacttggcaagctttaaacttcgttgtctctgcgactacatattctgggacttcgacctctggaattctttcctctggggcttcgagagcacgatcgtggtacagatgactcgtgcatttccttcaccttttttagctcagccaaagagttttcaattcttttgtgtggctcagccatggcaaagaattccacaaatgattttggccttcgagcttgcaactccttccaaaagtcagttcttggcaagacacctgtaattaacatacataccaataaagacttgggggccttctcaactttggttacttctgcgttaaaatgtttaaaataatcttgtaaggactcaccgacttcctgtttaatattagccagagttgtataaggcgatttgtacgtcatcgtggcttggaagtgcgtcaagaataggtctacaaaagtctcccaagtcgatatggacactttgggtaactggttgaaccaatcatgagcattatcctccaaggtttccacaaggatgcgacaatttgctagttgtggtgcttggtctacttccataattgtatttaacttatccaaataatatatgggatttgtagtacctttgtatttcagcgattcagataatctgaatcccttaggaagtcgagcttgtcgcacttatttagtgaaaggcaaggtcccatggagtttataaatgggctttctctactgctcgattatcttcaacgctcatagcagaatactttgatcaacacttcctggaaaaatagggttttttgtgtcatcgttggtacgacagtaattgtggctatgttagccgagatcactacctcagtagtcgcagttggtgcgttgggcgggttgacaacattagttggattgtttctattgttcgtgccttgatcgcccacctagggatcacggggctcattgtgatttcggggcgtttgagatcgtgccctaaaaacttcattgaggtgatcgcaaagatcgcccctataaacatggtacctcccccctcgtcgtctctctacagacccagacctggtataaacactaggagaacaactatgagaggaagaggaatgggattcaacatcattta

SEQ ID NO: 221917 - DNA, 2320 bp, Cannabis indica
aagtttttatgccatatatatcaaaacatatcttcattttcccatatttttgtaaatagccctaatatttataaagaaatactaagaggcactttaaggtgtcaaacatcacaagtcgtaatattttattattgatacattaaaataaacattttaatttaataaataatatgggaatctgctaactaattttagggcaccaaatcagtatggttttgggcatctttaaatgccaaataacaatactattcttatgactagattttaggaataaaaatcttctgtcaccaaagttctgtctcccctctgtttcaaattccatactaacttttggtattatttcactgcgaatatttgcatgatttatttgaactattttgaatagtggtttcaacatctttgtcatcatcttgtaatacttcatcaaagcttgaaatataattttcatcattattttgtaactctaattttcgacgcgagagaaaatcttcatctaacatattactctccatatctatcatcaataattaaaagtgaaacatttaccaaataaaattcaaaataccttattaaacttgaacataaataatatctatctatttttttattattatttttatgtaagattatattcatctaaaaaagatagtgtgaatggaaaaaaattgagaaattgtaaatttctatcttaattgtttatatataatcatataaaaagataataccagttgaaataatttttttgaactttacagtacaataaaaatgaatttaaacaaaaaaaataatataacgaaatattaaaacttatcttaataacacaatatttaggctaatcagtccatattcaattcaatcatgttataaaaatgtttatgatcttattttatctaatcgtaccaatcacatccaacaagtattatccatcttttaaataataaataataatagtaatgatcaaattttatgtagactaaaatgatgagtaagaataaaacaaaatatgcttaccagtcctttcaaagatgcgttcagagattgctttttcaaattgttgtgtacacctttcttcacttcagacttttttaggattcagacttttttaggtttttcaattgactacggaatatcaatgtgagcaaatgagcaaatgacaatatatattaatattttattctattaaaagaaacagaacggaaataaaaagaaacggaactgttaattatttgagaaatagaaagtatcacgtgaattttaaaaaaattgaacaaatgtcattagctcattattacgacagaggagagacataatattagtgacaaaagattttcattcagattttagtaatcaatgtaacttcctatatggttgcttactatttataggtgatccaaagaaacatatataatttgatttgaaaattttgtaaaaatttttataaaccaaataacacgaataaagtagaattctctctagaagtctttagccgctgcttaattttttttttttttttgcctaatcagggctcaccaaccatttcttggcctaacggcgtggctttgatcaggtctagttgattcacacactatattttgatttcctttgattttagccctataatattgttttgccatcagttgatctcctgacatctccaattcctgactgcatcgagaattttgatgaaaagtattttattgaactaattgcccctaatcccataagcgcgagtcgacctatcaacatgttataaactgaaggcaaatccacaactagaaatttctgtatcttggtcattatatatatttaaaaataaaaattatatagatattttatataaaaaattttaatttaaatttaaaatacttaaaatattatagatatttttaatcatatttttaaatttatttgtttaaatttggattaaaataaaaagaaaaattatataaatattttatataaagaaatttaaaatttgaaatattataaatattttaaattacattataatattacaatatataataatatacttagtaaataatgtaatattttaatttaaagtatataaacaaagatcaagtgtattggggttttgtgatcaagtgtattaaattatttaaatttaagaatataataaattataatatatacattatgagattacttaattaaaaaaaaaataaaaagtacgcatatatataattgtatttaagtgacataccaatgcaacaatagtaaaaaaaaatgggaaatttgattttctatacttacatatacttaatattttttttttaaaacacataacatttaatatttg

SEQ ID NO: 221918 - DNA, 1018 bp, Cannabis indica
aatcacgtaatacgcctatgttagttaaggtgttacatgggagatcttcgtcctatcaccctttgtaatattgtatataagatcgtggcaaaaatccttacaaatagaatgaaacctctcattggtcatgttacctctgacacccagagtgcttttattctgggtcgtctaatctcagacaatattatggtggccttcaatattatgcactatttgaaacgcaagatgaagggcaagaaatgctttatggctctcaaaccagatatgagcaaggcttatgatcatgttgagtagagttacttccatgttgttatgtctcgtattggttttgctacaaaatggaattatctggtcatgcaatgtgttacttcggttcgatattcaattattcacggtggacagttataggaccgatcattcctactcgtggtatccgctagggtgatcatttgtctacttatcttttcatcatctgtgtagagggcttctcttctcttattcaaaagactaaagttaaccgtgccttacatgggtattgtgttgttcatgggcccccctctattactcatatgctcttcgccgatgacaactatctcttttgtcaaggcactactggggctgcttctagtgtggttaatttgcttcgggtgtctgaaggtgcttcaggtcaaagataattattgccaagtcaaatgtcttttccagtcctaatactgagaactcccttcgccaaagcatatgttttaactcttaatatggtggaagcaagtgaaggaagcctctatttgggattacctaatattattggctaaaacaaaaatggtgtgcttggtttccttaagaataaagtcaggaacagaatcgacagttgggataacaagtttctgtcccatgcaggcaaagaaattctattaaagactatcatccaatctctgcctacttatgccatgagtgtctttcttcttcttattggaacttgtcatgagatcgaggaagctatggctcgtttctggtggaa

SEQ ID NO: 221919 - DNA, 1773 bp, Cannabis indica
tgatctgagggctggagttgagtctaggtgtaaatagagttaaaaaatagtaacgtaccctgagattcatctaatgtaccctgagatctatctaatataccacagaatacattccgttaaagtacatcacgggacaaaatcgtgttcctatatatatatatagcctttggatacaaaaaatatatttttgacatatccaatggctcaaatatatttgaagtgttaaatctctcgtaattagattaaggttagaacattattatttgggtactagtagttctgtcactttctaaacatatcacttacgttttgcgattgactaattatacttctaaaaaattattatattaaaatatataagaacccattcttagggaaagcaataataatcaagttagtgccttttaacatttgtcaccagttttacataatttgacatcaaaaaaaccccttatcataatggagaaatctctcttcccaagtttgtgacaatagagaaattctggaacattattaattcgtaagttgacttgtatacaaaaccaaaccaaaccaaaccaaaccaacgtgtcgctttccttattcagtatctcgtactccacactacatttcaattttagcccattacctacaaatcatctgcttagaagtctcgtacaatacagtctgtttcttcttcatctctctctgtcacactcaaagctagtaacaagggaaggaccaagtttaagaatcaagcagaaacccagaaaaaatgtgcagccaagacggtgattgcagacctttgggctttctattgggtcttccctttgcttttctctctctcatcttgtccatcgtcggaatcatcatctggatcgtcgggtataattctttctaccctaaaagctatcttctttttgatttaatctaaattgaagaaagatgttttctttttgttctttctgtttttggtgctaaagaatttgggcatctgggtgtcttagattaataggttgttctgttgaatttgatgggttttttctaaatctgattggagtttatgaaaatttatggaatggaaatttctgggcaggttggtgttatcgtgcatatgcccctgttgtttctgtgtgactgtaatagtggagttggctttggagcttgtgaaggccccaattcatgtcatggagtggttcacttctcaaatcccttgttaatattcataatcttaatctgtttctcttatatacacttaattcattttttttttcttttcattaactatgcttgtcatctttatgtaaccttaccttgaaaaagtaccatttgggtgtatgtgattcttccttataagttataccttaacaaagtttggtgatatcatttatatgagttcactgtaaatttgtatgcttcccgggttctgttaacgtgttattattcatactaatacacattagttcatatgattttttgttgcaacttgcaaagacattgaatttcaaagcatgaacttgacagagacacagttatgattgagatggtgaggaattttggctttagaaattagtggtctttagatttctccaagtggatggttaattgacgaaaaggccaaaagaataaagatgaagagaatactactttggatgagtgcttgatgacattgaaaaccttttgttttcctatggaaaagtaggatttaggaaaagaaaataaaagtcttaatacaatggtaatattagtacgtatatttatacttttctacactttcttatgtctatattttca

SEQ ID NO: 221920 - DNA, 2485 bp, Cannabis indica
ttttttaacaaaaaagtataaaaatattactataagctaggttccactattattatcatgttttcttaattttatatactggactattcacggtagaaattgggtaaaatatctatcaaaataatttatagcctttaatttaatctaatagctcaaattaactcttaaaaagtacaccataattaatatacttttttaattagtattaattataaatttaactaacgaactcctaacccaactccaaacttaatttttttttcactttttattttatatcgatttaaaattttgttctaattatatttttaaaaattcaaatttactcagaaaaatattttaattaaatttattttttaaacaacaaatatacttatagagaaaattataacatattcaacttataataattttaaaataatcactgtttatcgagattttcggaaacatattaatatgaattgaagaaattgcaagatactaataataaataaattgattttttacgtggttcaggcgttaatgatcttagtctactagtcaattgtattagcctttgttggcatgtatttaagtattacaagtgtttacaatgacatttttgtattcgtcttgtttctttcacagaagaaagctctctagaaattttgggaagttatatataataataaataaataaatataataatatatatgtatataaaaaaataaacagaccacctctcgtactcttcatcactcattctctctttctctctcctcaaaccacagaaaaaccaaaaaaccccatcaccgaccacaatctggccccacgcatcgaaccaatcaaaaccgcaggtgctagcgacctcaacccccaagcggtaccactcctttcgctaccattagcttgggatcacaagtcaaagtttggcggttcaaactttgaacaaattttccagccacctcctgtgttcgtttgatgagccatctttaccactagactcatctcgtcaacgagaacaaacctacactaaaccattttgcctaactcactacctttttttgtgacatttttttgtagcttcctcccttttaggcaactttctgacaatattgtgtactattttgataaatagttaggatgggtgtgatctacttgtcgaaacggtcgttttgatatacactacccttatttttggcaacgtttctggtacactaatttttaccaccaccggtagttaatgcgcactgcttaggtgaggtctcggaactccaaactttaagtataggcatattatatatcgttggactcaattttgaatgtagaatgtaaagatgataattgtttggccatttgatggtataggtgaaagtaatatctaagattggactaaacaattggagctcgggacttcaaacttaagatcatctgttggacaaagtttaatgacttacgagaggtagggactcaatatgatttttatatgtgctgaatatcattagacatattcaaatttttatgatttgcaaattgttttaaactacaaaacttaatttgcatatttttctaaactgttctggggcatgaagtgccaaatatatttttatacaaatatctatgcagattatgatttttatgtttattcaaaatacagccgctatactgtcgaattttttgtaattaaaaaggaatttgttatttttattatttacctgcttttgttatactgatgagagccatgttgatcatgctcggtacatattgttgtttcacgacctagtctccgtgtcatcataagcaggtcaggtgtacactcacctgtaggtgaaaggcctagaatctgtatagggagtaaattgaatctgagccccagtgttatggtagttattaggtgcgactacttagtttaggatgtcgttttctatgattggtattgggagctaggggtctagtggaaggtgtgatatacatttgacgcttgattttgtgattctttgtggcctctctactttgtgtatacatttcgataatggtgatgagatattttatttttaaaaacctaaccatacaggaatttttattaaaccaagggtccttcgatattagttgtttcctactgggctttataagctcacccccttttctcccattccaagaactcagcttgatgctattggatgaggatggtacagttaaagatgaaagtcattataattagtttagtcttattttacttattaaacatccaatgaaactaattttgcatttaagctgaaatagatggtctaaatgacttaaattagctaagtgccaattagaattgaggaatgatggatgctagatattattttagtagtttattaacttattaaatctatctattcggtgactacataactgtggggatattattcttcttttctattgatgagtggtcctgactttattactaatatcttctttttaatataggagttactccattatttttaaattagtatt

SEQ ID NO: 221921 - DNA, 1422 bp, Cannabis indica
tcttcctcgtcaatcaggacgacctggtcctcaggaacgtcagcaaaagatctcttgggggtcaccactatgtcgcgtgactcgggtaggccagactcaggattgtaagtacaggcaagggcatctaggaggtcttccattggcttcgctgcttaaggaataaacataggagtcagaacattgccaaaaaaccatgcatgcaagaatgacataataaaactaatcctaccttggcgatttaattctgccctaacaaaggtatatattaaaaggctggtgtcgtcgtcccctagaaagttatccgatgggaggaaccaactggaggacagataagcggagtgatctaagaggatgggtacgggaggactaaaacccacccgagactggcccaaaaaatgactaaggttggaaaaataaaaacttttggcgttataaccccatcgtgaatgggacattcgaaatttatgcaaccgatcatcaaattctactggcctacaactagagtaatcttgagcagaaggaacgttatgaatagtcaatggagacttacaagttctggaagtgttggcatcaagagcctcagcattaggaaccaggaaaaggaatttaggccaggagggcgcctgctctttccccgcttccactcggaggatcctccctgaagcagcttgggcattgatgtaggccaactcttgttccttcctgaatagatatttcttgtatttgtcttccctggaggtgatgatgtcctcttgaagcgccttctcggtctcggggttgcggacattagggcaaagaactttggataagttgaaatcttcttctgtctggcctttagaaatcaacttattagccctcctgcagttagcagtcgtgaccaagtcccctacattcaacccatccttatcataattggcgaaaaactttcgcatgttgaaggaagagttgggtaggggcggtacggtacggtgcatagaaggggccctaacccactcagtgaacaactgcagacactccacgactttgaagccggaggagaagaagaatcggtgatggtactccttcacgttcttctagaagttgtaaggcaccgaaccctcattagcagaatgggcttggagcttgaaaaatccatttttaagtttgtccccctttatggggacagatagaagttcgtaaaaataaaaaatttcggccagactatgcagggcccagttcctagaaaagtaaaaaatatacaggcctaaaagtaggcggtaagctctaggaataagttggtacagcgcaaggccaacaaaaactaaaaaatttatgaagtagtcttgaagcggtagaatggctccagacatcaaatgggtttgactccatgccccaaaactgtcgtagttgtggttgggcgttcttcgtccctcgggaggcgat

SEQ ID NO: 221922 - DNA, 2748 bp, Cannabis indica
gtaaaatatttccaacactaagttttgaaaaacgacatcagggtgagtgtaaaggaaaaatgtgtttccgatgtggtataatgggaaattacaagagggattgtccatgattgtaggttgaaggaacatgcttcctatgtgtcttggtgggacattttaagaaagattgcccgtaattgaaaaaggaagaatcaagagaagaggcaaaaccgttccagcttaggtgtttgccattactcaagtggatgctacaccagtccttctatggtattaggttgcttcctatcaatgacttctatgatactttattgttttgactttggggttacatatttatatgaggcatcgagagtaattaataaattttgtgggccttatgaatttatagagttaggtttttggaaccctactacctagcagaaagttgattatctccaaaagttggattaggtctatgccagttaggattgaaaatggggaattaagtgttgacttagtggagttagattatgacaatcagtagtccctgaaccgtaagtggagagactgggagctttgcaatcccacatcgcttggagatggtcaagtgtgatgatgctaagtctgtgtagttatgggaatgcagagtagaaaagggcttaaatggattgattggtactacctatatcaataaggcacatcttgtttgccagtagcccatcacgaaagaactccatggttaagtgtgctttgcctggggtaattttactatgggtgacatcctggatatttttcccaggaaatgtgcaagtgaggacaaagcacattagaaatactcatgttggtttttagggtcaatcgtcattccaggaagcagtcagagtgacatactcgtgtataagagccatcatttcatgggtgtaagggcctaatggaggcttgaagcaaggacattacaaatattaactgggtttgatattatacttaggatggacctccagtcaaagtattcaattaacattagttataaagagatgattagaactttcagccatagggtggagatccatttatttatgacaatccattcatggttctcaaattctgatcatcttagttttaaagactaaggattcactatagaatatatgtgtagaatttgttagttaattaactttagtagacctgaaacatttgggcctaaggatgtgagggcagtaagagaatttcttgatgttctttccttaggagttaccgcgattactgccacaacgagaaatagatttcatcattgaatttgtacctagggcagagcctgtttcaaaggcactatatagaatggtgactggctcgagctgaattaaagagctaaagatacaacttcagaggatgctggacctagggtttacccaaccgagcatattgccttggggagctccaatgttgttcgtaaaaaaatggatctcttttaatttgctttgattactgggaattgaataagctaataggaaaacaacaagtatcgattgtctataattaatgacttgttcgatcaacttaagggtaagataatgttctttaagattgacttgcgatcgggttatcatcaacttagaattcaggcggaagacattttgaagactgcagttcgaactagatatggtcattatgaatttttagtgatgtcatttggattaacaaatgctccaatgacctttatggatctcataaatagagtgttcaagaattttctcgataactgcattatactgtttattgatgacatccttgtatactctcagacggaagtggagcatgagcaacatctttggatgattttacaacaacttagagatcataaattgtatgtcaagtttaaaaagtgtgaaatgagcttttagaagttgaagcaacatttggtcacaacaccagtgttagctttaccatcagactaagaaaagtttgttgtttattgtgatccatctagactaggtctgggttgtgttctgatgcaagctaacagattcatagcatatgcttcttgatagttgaaggaatataagcagcgttatctgacacatgatctgaaattagttgtggctatgtttgccttgaaaatatggcgacattatttgtactgggagaagtgtgagatttatacaagtcacaagagtctcaaatattttttacttaaaaagatttgaatatgaaacagagacggttgttagaattagtcaaggattatgattgtgagattttatattatcctgcgaaagtcaatgtagtggcagatgctttgaccagaaaaggtctcgggcatgttttagtaccataatgatatcaactcagttggcttcagacatggttaaagttggaattgagtttgtagttaggaaactacataacctgacacttcaatcagacttgttggaaagaatcagaagagtgcaactggaagactccaagttatttaaaatttgacaagaagttttaacgggtttgcttaaggacttttaaatcttgaataatggaatacaatgctcgggcttgtgttccaagcagtaatgagctcagaaaagaaatatttgatgaggctcataatacgccttatttgttgcatccggaccaaaatgtaccaagatttgaaacccaattattggtggtgcgaaatgaatagggacatagttgaatacgtgtcaaagtgcctaacttatcagcggatgaaaacaaacataaaaatcgacagagttattgttggtaaattatttt

SEQ ID NO: 221923 - DNA, 1865 bp, Cannabis indica
accatttttcaaggccatgatcgcaccttggagtccgacaggactttgatctttttaacacccatttcgcacgccattcgtaaagccaaagaaatagccagcagctccccttcgagaaccccagaaaccacatggaagcgagaagcaacccaggagtccccaacatctgaatcatttactttgacagccgcaacaccagcagcctcattcaagatagaggcatccgtaaagaaacactgcaagtcatcatcattctgtaaatccagatccacatcaatgaactcagaccgagccaaaagattcaaaggcaccagccgcatctccatctccctaactcggaaactaatgtcagttatcaatttcgccaaagaaaagaaacacccttggaatatgatcttgtttctccacttccaaatcaactcacaaagacaggctgagaataagagcaacctttcatcatttacttgggaccaccagataccaaaatgagaaatgtcttcccaatgcaaatcatcaacccgaattccccaggcactttggaaccacacagcacgagcaacactacagaagcagaacaaatgaagaacagactctgtctcctcttgacagaatgggcagcacttatctaccaaacccaagcgttgtttggaaggtaaaatatcagaccaaactttccaaagaaccagctttaaacgaggatggatcttggactgccataatctctcccagaccttgagaggactcttaaatctgctatattgacttacccaatagccacttttcactgtgtaatgcccagatttggaccccttccagaaggtgatatctccactactcatcaaaggcctgatacccagaatagccgaagccacatcttcatcaaagctagctttaataagatcttcattccacactctagtaccttctaagaacagatccgataccttcacaaaagcatgtctccgagaataatggaaaccattccgaacctcttccatagattttccaggaacccaaggacgctcccaaagatcagactccccattaccaattaaaaccccagcccccgcaatacaaacatgtcttgcctcaagaattcccctccaagctctcgaatcccctgaccttttctccacttgccaagcatctaatccttgacaatacctagacttaaggagtcttacccaaggtttgtccacaccattaagcaccatccatcccagtttagctaacaaagctagattaatctcgctgaaccttcttaacccaaggcccccgcatcgtttgggttgacaaatctcattccaactcttatacgcacgataacgctatttttccgagtttcctatccaccagaacttggccaccgttctatcaagatcctcacaaaccgactttggaaccagagccgttgacatgaaataacccggaatactttgaaggaccgaactaaccaaaatagttcgacccgcttgagaaagattcttagccttccacccctcaagacgagtaacaatcttctctttcaaaaacttaaagtcacttcgcttatttgctgaaaagaagaaaggattacccaagtatttctcttgtgaaccgaggccattcatgcccagctaaagtttttatctcatctttataccttagaggggtattagaagaaaaaaccactccacttttttctttgtttaccttctgtccagaccaatgttcataagtgttaatacattgtagaattgcctctgcatttgaaccattagccttgcaaaagaatatagcatcatccgcataaaaaagatgggtaataggcattgcttcacgagacaccttgacaccagacagctctcctcttgttcagctctaca

SEQ ID NO: 221924 - DNA, 2155 bp, Cannabis indica
aacaaatattcagtaactctcaccagcccccagcaataattttagatctcattgattaagataagatatgtaaaacaatacctgaaaaaatgtcactcaatggcgctggcacaggtgcaacggggagatcaacgtttattgggtaagcatcaccaggaactataatttataagaaaaatacagtcagaaatccgctgccaaaacaaagaatttcatcactattataagtctcatccagaatgacagggcaaacaaaccttttgcatgtttcatgatatgaaacacataacattacactgcatgataatactactcataacaacataatgatcaatcatgcgctcattcatttgagcactttttaatcaactgataaaacgaacttctcacagcttaacatacgcatcgtagttagtactaaaaaccaaagcctaaatgcaaagggttcgagtttgcttatcatagagagtgatttatgagtaattaatgatttaattcgtagaagaagaagccttaaataggggatgaagattcacagtttctttccatagaaccattatggtcgctaccaggctattcatagtcctttctttctgcaatcttaagaattattgtttacaacaagaacaaaggaataacataaacctaagaagatgacctcaactgaacttacaaacattgctaaagtgaaaacaatttaaagcacattttttctcaagtgcacacctaaaataaacttgttgcgaattagataaagtgtaatgagattaccatctaatgctatcactataaatttgtttcaaacgaaatcttaatggaattgccaccgatcaaccaatatataaaatgcatcagatcccaaatataaattaacaactacattcatgccaattcaaaagtaaaaaaaaataataaacaaaactcaaaatccacaactcacatcaaaaccaaatcttgtcattcaaatttaaaagtactaacaaagaagtaaaaaaaaaaaaacaaaaaaaaactgacctgaatccagaggaatgtaaaaaagagaaccagcagtgacattattaggattaacaatcccattaactttctcaatattatccatactaacaccgaatcgactcgccaacgattcaatggtatctccactttccatgacatagctcatcaaatagttccacagcccactcgaacacccacagaacagagtcaacgaaacaacagcaccgtacttggccggcctagtcgtattgggcactatagccaagccattgtaagcctccataaccatgtcgtgcaccaacccattactggatttgaccgtaaaagtggtattagtcacatacttcttgatagtagaagcgcaagaacagttctttttaatgaacacatatccccggccaccggctccttcaacagtcacgtcgccgggcaaaacgtcgaacatgctctggatcacggaaagggtttgattctccatcggtttaaaggccaagaaagaggtacatagcctagttgtgtccgtacagttcattggtgtggggtacgaaaacaaaggacgagcttggagcaatagaagcagaagaatgcatgtaagaatcccaaatggagctaaacccagattcatggttccagcaaaaactagagtgaagccccttaaaaacaccaaatgggtgctctgaaatcgaagactttattagtgaactgagttaactcaaaacgatgagattttttgtgggtattccatggaactagctgaatagcttgatgaaatcaaaaagttacaaaatttggaagaatgggtagaagctgatgagaaaagagggattaaagcattgaagatacagagagagagagagagattgtaaaaaagagatttaatagacaaaaaaagaagaataaaagaataaggagataaacaaaggaggattcgtctgagtattattatgcatcacaataataatatacaatacatgcatttggaatttaggatttgggattttcttaaaaattctttttcttaatttgtgttattgttgtattactgagtttcactaaatgctgacttttctggttaaaactgaattgaacactctgcagtgaaaaaaaaaaaagagagaaaaggagaaagcgacttgggagagagagagagagagag

SEQ ID NO: 221925 - DNA, 2655 bp, Cannabis indica
catttcagatacttgagaaggtcggacaggtagcatatcggctagccttaccaccagcattatcggctgttcatgacgtatttcacatttccatgttaaggaaatacgtgtcagacccgactcatgtcttgagttatgaagcccttggcccctgagtatggcataaggcagggtgacccgctagccccttacctctttatctgggctaccgatatctactcgcgtattctcgagaatgcctttgaggttgaatccattagaggtatcactttgagtagggatggccctaggctctcccatctattctttacggatgaccttatccttgtgggcagagcgattattgcaaaagcaaaaggattttggcaatgcctagcaaaattttgtgattggtctagccaacgtataaacaagcttaaaacctccatcttcttcagcaataacacaagtgagggtatgaaaagaggcattctccaagagcttgggctcaacattgccattagcaacattaaatacttaggattcctcttatttaggtccaatcaaaaggatgctaattttaacatcattattgagaacttggtttcgaagctccacgggtggaagttgaaaactctatctaaggttgtacgtgcgactttgatcaaatcggtaggacttgctatgccagtctacactatgcaaattaccaagctttctaagaaactcgcatccaaatttgattgtatggatagagattgtcggtggggttgtgaacagggcaactaaggtatctatttgaaagcttgggatcgtctttgcctacctaagtcttagggtggcctaggctttcagaagactttggaaatgaaacaggctttattggctaggtggggttgggccctcatcaatgaggatcaatcgttatgctgcaaagttttaagaactaagtatctgagaggcaagtcatttttggattgttcctataaaaacttaaattcttggttctggaagaatgttgtgaaaactaaggaaatccttaagaaaggtgcgtgtaagctgatatctaatggggaagagacgaacatttagattgatccttggactattcatagtcaggattttcacccaaagccaacttccactgggctaggggaagtaacaaaagttgcaaaactactgttagataacttggactaggatattccaaagcttcgaatgcttttcaacccgacaacaatcagggatatcattaaaggtggtagactctgtggtcagggtagtgacaggtgggtgtggacaaaagagcctaatgatttatttacttctaagtcagcttatcttatccaagctctcgagcgagccaccgcctgcattattgcccccaccctgtggaacaaactctagaatgctaaaattctagagtgtcatatggtactttggtggtgtatactttttgatgctcttcctatccgtggcctccttgctaagagaattcaggttgatgagatttcttgtcctctttgtggggaaggtgagaagttgatggagcatctcttcctctattgtaatttttctttccacctttggaggtcatccccttggggggttatgcctatcattgaatctggtgctcatgtttgggattgggtaaaatttctttagaatttgaggtcgaaaggggtggatacagacaaattatttttctatgcttcgattgtggtggaaacgatttggaaagctcgcaatgacaaggtacacaataattctctcggtaacattcaacactgtattgattctatctctacttgttacgtagattatgggtcatttttatttgctctgacgatggctgttgtgtctcctgtttggtcccctcctccagatgattgggtcaaaatcatttgtgacgttaaagtgggcagttgttccatgtgcgtggtgactttagctagggatcacacatggatcgttatgtggatgattaccaacatgcttaatttctctaacccacttgttggagaagttgcggcatgtcagttagctttagagaccgcgattatgatgaaatacctttttgttatgattgagagtgactcaaaaatagttatcaatgccctgaaaggaaattgttccaattgagtattgataattatatccaacaatgtaaaagactctctaatcttttatttagatgtaatttttgtttatttccagactgtataattttgcagcccataatttagctaggtgggctttcgttaaaatattactggtatggttgagatatcttctatatcaggaaatatcttatgtaatgaccgtgagatctaacttttttatttacctataaacgatattttttctaaaaaaagaagagattttttttaaagatataactaaaactaagaaatggataatctagtccttttatattaggttatatatatgtaaatatagttccccttattaaggttataaattacctctgtctcccatttttatgataaattacattaaatataattgtataaattatttttgtggagcaaaattttgattagagaagaatgaagaatattatgaagtgataggagtaaaattagtagaatgattaaaaaaaaaaggtaaatataaaaaattttaaaagaggaggtaaaaattaaagacattaat

SEQ ID NO: 221926 - DNA, 1854 bp, Cannabis indica
attttatattagagatatgatgaagatgaaatttgtacttcttatttgaatttggtcaacaaacattttacgctttcattaagatcggttcctctacaaatatatatatttcaaaattactgcatttactttaaacaaatgcccaatttttttttctatggttcaaacaatgtccgagctgattctttttgtcatttcgaatgtgttttgcagaataattatttcttttaattattttgcataataatcttcttttagtatttttttttaaaaaaaatatattatctttcacacagataatgtgtttgaacacaataatattaaatgatctattttcacctattaaagttcttattttttttgaagataatcttaaaaagtgactacttaatagttatatttttattgtaactattatacaaggtcggtcttgggcataggttggccaagtacgcacttaagacccactcactttaggggcctaaatcaaaaaattaccttttaaaaatatacatattttttttaataatttttaaaaatactatttatctttatagtaagggctcaaataaattttttttgtcctatagcccatttcaactcaggatcggccctgctattatggttatattttttttgacctataatggtaggttactaataggtaaaaataaatttaaaaattaaattaaatattttatggtatagttcctccaaatgaaaaggtctccgcaaacgtcatttttgaaaaagttgtttgcttgtggttgttagccccgaaaagtgtcttgtggaatgatagtcgagtccagatgggagttcccagaagactatcatgtccactccgggttcagtcttcaagataactagtcctccgctagaaaggagttccacctggtgagttgtcactcctagaatggtagatcggaatagtcaactccagcagactatatcctatctgaaagcgtgatcaacaagtatcctatccaaatagtgtaatgatttttgaaattataaattacatgtaaaatcatagttaaaatataataactaagggtcataacttgatttttataattctatgtaatttaacccataaaataaaacaaaagttagaatatatatatttaattattaagtgggacaacttaaaaaaatcagtatattttaaagaagggacacttggctccacctcctcccgagagtttagggcatgttagaaaaactaaatgcaatattaatgtttaatcttattaaaaaaaattgtgctaaatttacataaaaggttgtctttttgtcagaggcattaatgcgatattatattttgtgacaaatttaacacaatttttagcataaattaaatttaatacactttttataccactattagagtatttttttttcttaaatgtgctaaaatataataacacattacttttttagcactttattggagatgtttatttttaaatccattgaagatgtgctaaaaatatttaaatattcaattacaaacttttttataaacctataattaattatttttatatcaactaccaagtcataatctcataatagagtatgtatggcaattggaaatgctatgagtttaattaaaatttattaaaaaaaaattgtgtgtttgtcccacattgttcatgtgtgagtaatttatgagatttatattacactcaaagctacccagctataatctcattataagattttagtaattggatcaatgctggagtttgattaaaaattttaaaaaatcgtactaaaaattcttttatattatctaaaacgtaatttaggaaacagaaaaaacacacacaaattatgcatctttttttt

SEQ ID NO: 221927 - DNA, 2578 bp, Cannabis indica
aaaacgggtttcgacacggcacacgaacacgaacacgatacgaattttacgggttagggttgagaaaattagatgcgggtcaaaaacgggtcgacacgaaataaaaacaggtcaaacacgacacgacccgcttaacacaaatgtgacacgtttgacacgattttttaaaatataataaaataaaaaattaataataataatataattatataaaaatatatatttagtgatttaatgttaagttaaaaaattttaaatttaattttctttaaaatggaattaaaaatattttaattttttttaatttttattatctataacaaattatatataaatgtatataaattttctaatggagcttaaatctattatttttctctacaatttcagcttcaataatagcaaaacgggtcatagtgggtcaacacgaacgcgacacgatctcttacgggtcgagttagggttgatataattagacatgagtcaaaaaatgggtcgacacgcttgacacgaaatataaaagcgggtcacataacatatgacacgaacacgacacgatgacacgttttgccacccctacacctaggctaggtaaagtgatggctatgcaccgtcacatcagccgcacatgggacaaatcttgtctcaccaaacttctaccacggaggctaggtagcacctagagaccaaggagagatgtaccctttccctcctttgaaccttctttttccccataaatacttggaactgtaatggaaaagggaattttcaaactcacgcactaaagtgagcccttatactgtaacttgaatattctctgataaaaaaatcccaccataaataaaattgactcatggactacaattcattaatactggaaccatgtaaaaatctttcctccatttttcttaatcatcttagctaatacgtaattagtggttgccgaaaatctcggtcaatattttggtgctttcattgagagttgtaggaagctttcataaaacaaaatcaaatcaaacaaactagtatatgaatggtggtaacaagaaataattagtggcctccacaaccgcctgatgatccagcacgtctagaagagggggtagcctcccgagtggatgatgaaggaggcgatactgacaatcctgaatattcattagaaggaaaaacctacgaagagggtgaacaagacgagtatgcagaattcgtttcactcagaaaacatgccacaaagcacaatgtcaagttggcagaggaaaaagaaatgaataggaaaatgcaagaggcgttaactgccatgaaacaagctttggctcaggcaagcttccgtgtcaatctagcccctgttccaccaacactcgacgattacgaagaaggcccctcacaacctcgaggaaataaaaaacaaaaggaaaaagtgcctagtcccatccgatacccttccgaagatcctcccgtcacaaaagatagccctacgccagtacctagggggagcagaacccatcgtggccctcgcaaggttcgtttggatcttccgcaagggaatgtgtttcctcgtaggaaacacagatcccaggagagaaggggacgtcaaagtacatttgtacatcaaggacaaaaaggaaggggcgggaaaagcaagcgagacctgacgatggatttaagagagaagatcaaagaaaaacaaaggaccttagggcacgtattaactctcgaaagaatgactcggtgaatgctaaagaaattttgaatgaaggcatcctggcagaactggccatccttagaagaaacattactaaaaagtcctaaagatagaaaggagacgattctgaatctggttgtgaggatagagagccatgtgctaggaacatcctagaggttaagctccctaagaacttcaaaatgccaaagatgactcagtacacaggggacacggatcccaacaaccatttgtcacgatttaacagggtaatgatggtgctgagattgagtaatgatgcaaagtgcatgtgcttcccgttaacattgggaggatctacagaagaatggttcaagaagaactaggtttcgtgagctactagaacaagttccaaactaactttcagagacagtttgtagctgcagaaaaataaacctcgaagttagcgctctgactaacatcaagtaactgtccacggaaactttgaagacctttataaagagatttaaaaaagaagcgtccaaaattaagaaagtaattgacgaacaacagttggcattagagtggaaactcttttttggaatgggcttcaacaagaaggtgcaaccagcccgtaagattttcaaaagagggctcaaaaatacattaatcttgaagaagcacagatcacgacatttggtggatattttcaatcttgaggaccaaattacacctacgaagtacagtatcccttagggatacccacgggatcttcgacacctgctccaagcgtacaatttcaagtccccccaacttattcacaaaatctaattgaaacaccagcttattctaaataaggaatgcctacaacaataaatgtggctcctagagcctttgtac

SEQ ID NO: 221928 - DNA, 2400 bp, Cannabis indica
agttgtcgtactgtttttcttgagatttgcatggcccataatattggccataacggaatatagagacacgcttaagcaatatgcttttgcccttttgaaagcaaaaacaaagtgaacacaagtaaatccctcctttagaaacataggtagatttgtaagattttgatttggatctagctttagattaacgagtatggtctcttaattagagacacgtataagcaattatgttattgcccttttaaataaatattatttatatatataacaaataaaatgaaataaaagtgatgaacataaaaatccttgacaaaaactaggttttttatttcttggcttgtataggtatagatttgtgggacttgaatttggatagaattaattttagaccaaggagcatggtctcttcactagaggcatgatatagaaaggttagattagatttgttgggcgtctaaggtgttaaaagtggacaaaaaaggatggaaaaaattaagaaaaatccattaaatgtcatccatggttgtgtgaatatgaaacaaattgtgattcttgattaatatttggaggtttgtcattgtcttgtgtatcaagtgggggtccatattggaccataaaaaatggttaattagtcaatacatatatacacttatttgtatgaaactttatatatatatatatatatatatatttcacttgtcttcttcacctcctccaaattaatattaatatttatggacccataatcaatgtagttataataagttagtcaatatatagcttagctatatattcttctttcattggtgttaaagtctaggaagagaaattaaggtgtccacatatatttgtcatgaaataagatttaaaaaaaaaaatgtacactagaaaagctgtgtactttttgatgatgcttttgaaaataagaagaagactaatatgaaatataatttgactactatatgttacggaaaagatatgataagaaacaaatgttttaaagctatacatattacaattagatttttgaaaattaattataaaataaataaacttaagaaaaaaagtcaaattagagaataagaattcaaatttttacgtagttcgagtgttaataaattctagtccacaagtcaatagtattgaactagaaaagtttcaaagtattttatacaagtatttatgccatagttaaagaacactgattctcaattcttctcccaagaattcgatttccaaccctttgcatgaaaggatcatgctgtacttataggagagaaccatgtacgagcatacccgaactcaataagatttctaggaatcaattaggccatctaactgggtaaattacaatagtcattgagtttgggtcacttgagtgaggcccaattcacgaggtgagacttgttcgtacaagtggggactatttgaggatgtcaggtgtcgtgcgaagctgcatacgtatcgagaatatcaaaagatagcataggataaaaaggtggccttcttttagtagtgcacgcactctgtcagtctgatgtaggggaaaaactctgacaatgtagggccccgtgtctagagggttccgagaaaggggatgtccaggtgctatatctaggcgactcttcgattacccatgtttggatcagctcatgaaggtatccgaacttgtcttcgcagattcttcgcttctgggccaaatggtcttctccggaccaagggagttcgaccttagtaggtttgcgagttacgcttatgtacgaattggaatcacagcttgacttaatcattggggccaggtttgggccgacctagctagtattaggctttggaattatacaagtcacaattccagaacccaaataacatttaccccgaagccttcagattcatttatggatgcagagttgggaactcaaaagctcctttgaaattccaaagcaataagttgccaaagcttggggccctttcatctgtttggaactgaaaacatgtgtcgagagctccttagtccatgcacaccaagcgactcagaaagtcacgtggaattcggggatgtgggttgatggctagtttatgttagcgagattttttaggcacgtttaaccattagttggcctcgactccgcataaggcattaaatgtaataattcttttgtattcccaagctattagatatgtgttgtactttccggactcaaatttggattgcaggattaaggtgcacgtgaatcatcacctctgatatataaatataagagaaatcaaccgttcaccaattttttaccttgagtttttgagttcaaatttccctgagaaggaaaattatttgagagaagaaaatttctcaaaatctaattatggtgaatgtccgagtacattgacgatgcattttgtatt

SEQ ID NO: 221929 - DNA, 983 bp, Cannabis indica
ataataataataataatattgcatgctcacacacactacacaaaattcataaaatattaatatacaaacttttggtaacacgtactgctttacgcccacaaggcaaccatcttatatacctcttctctttctctctctactctttccattatatatagcctcctcaccccttcctcatttttcatataattcactttaactctaaattaattccatctctctctttctacatatatttctccctttctcatctcttcagattcatatatattatacataatggatagaaataatcagatgcgcaggcagattgccgcaatgaggcaatctctctttgatcaggtaaattgcgcgccttattttttttttttttttcacacttatgtacatatgatcatatttatacatattttatacatattttatacatctatatttatatatctggtattctctcttctctctatgtctatacatgtatacaggaatggaatggaattagttcatggatataaaggatataatattcatcattagttatcaatatatatataagcaagaaattaattaatgcataactacgtgctctaataggaatgcatgcatatgcatgccatgattattatatttctttactccccatttattatataatttttttaatatatatataatgatttaatcaggggtttctagatgaacaattcatccaattggaggagttgcaagatgatgctaatcctaactttgtagaggaagttgctacattatactaccgagattcatctagactcatctataacctcgaccaggcactgtcagtactactacttaattccttaattaattataattaactattatatataaatatattcatcattaataatctaattaaaagatttatgtttgatatcatcatttattaattatggatacagagagaaaagtcctctggatttcaataagttagacaactatat

SEQ ID NO: 221930 - DNA, 2492 bp, Cannabis indica
taatttctaatttaaactaagcgatccttacatataatagttagcttctttcaaacattctgcgacttcaagaggcacattctccaagcaccattattggagatgttctaaggtgtctaacactatgttgatacggtgtgttgtgattaatttgtagtcttcttacaaacattcggtcacatcaacatatactttctccaagcactaccattagatgttctaaggtactctatattgatgtggcacgttgtaaataatttataaattttatatcatttattaaattaaaatatatgagagacgaaattatattgtaacaataagagtgttacttgtgatagtacatagtctcatttcaatatatttatatattacaactacttatgttatggcccactctttaatttttttagagtttttgacagtaaaattttctaagttatcattttacttgcatttaactctctaagttcaaatttagtggtaaaattgtctaaactattgaccctttagcaaattcaaggtgtcatcaatttactacaattagtacactactgatgtgtacactctaatacacatcacgtttatattggtacacctaatattgtatttaaaaattacaaataaattatttcaaaattaaaaaataatttaaagttaagattttaataatatatatttaaatatattttacctttttcttcattatttcttattcttattcttctttgcccctaatcctcaattcagccacccaccaccaccactaccacccactactattgtaatcacaccaccaagttacacttcttagatccatttggttctctctctcttgaattctcaaaatccaaaaaaaaaaaaagaatccaccatattgatctcatcatctttattttacaaaagtcacacatatacaaagattagaaaattcaaaaaaaattggtaaatactattttggaaactatattttgtaaaagttaccaattgaatcctctattttattaaatgataaaatggaccctgtattttccaaaacgataaaaataagaccctaagcttaatttttgacaatatttttttaatatgaccaacctgaaaacaattcctaacacgaacatatacagtaaaatataaatagttttatcataatacttttagatcggattattattaaattttattttgacaaaaaatcaatccgggtcctatttgtaccattttggaaaatacagggtccattttgtcatttaacaaaataaaaggtccaattagtaacttttacaaaacataggatccaaaatagcatttaccctaaaaaaataatgaatagatttgatattttaatttcatcagcttatctagatgtgagatttggattcgtgggagccattaatggcagtgtgagtgtaacgccctacttgtttaggcgtgctaccgtaagttctaaattactgtgttaacatttgctaatcaatgagtttggtgaaaaacatgtttactaaaactttattattaaatacaagctttactaaatataatttacaaaagtttataaacttcgggatcccaattcatttacaaataaagtagttcaattttcgtttggcgaatactacaactgagcccatgctgtcttgaagaatcgagctctccaagtctaaccgccttgacatgtacaatcttcataaagcttcaaactcatttctggttcaatctcgaccataacctacacatgcaaataaatatgtgagtcgacatactctgtaagaaaagtatgaaacatataaacacataattcgacttgtaactaggcgctcatactcctacttacaaggctttagaagaatcaagaacattcttaacagaagtatgacctctgtaccacatgcactaagtactcctcccatactagtgttggtatagggttgaaccgtacctcgagtaaaattaattatgtcaaaactatttaattaataattaaattaattatcaaataaaattgtcattttattttcttattaatttagacttaataaagtctcataattaacaaataaaccctaaaaccttttttcttcataattaagcccttggttagtgaaaattcatatactaagacatagtctaaattttagaattataattgattaattaaaaccaattaactgagtcttacaagcagtattgtctcaactagtgtaaggacatgggcctatataaccaagcttccaataagtagatttagaatttaccaagtaaattctcaaacttattaatttctccttgcaccactatagatttggaattgcagtcttaattatatagaacgctcgatatgttccactatatagataagttatgaaaattatatatccatcgttctaatctcaataatcaaacatcctctatagattatttatatcaagtagggataaatttatcgtttcacccctcaatgtattttttccttaaaaacacttaagcttcct

SEQ ID NO: 221931 - DNA, 2000 bp, Cannabis indica
agacaaggaccctataggtcattcaaggcaatgtaggcctactcaccatagtaagaccgacacgatggaaacatcccgtgatcctatgaagggatatcacccagagagtctcatgctagggggcaccgcgcctacgccccctttttaagatcaaagcaaacgaaaggtgtcattccccaatcatgttgggaagtcgcacagtgaggggatgagaggagtaatactcgcaggccccatgcaagccgctaggaaaacccaagttccactcactagctctcgagaaaggatgaacaaaagaataaaggagctagaagcagagatgaaagatctatgtcaacagatgctaccacactagagggaaacttggaggatgctgggttcgatgaagaatcccctttctcaagggaaattcaaattgatccgcttccacccaatttcaaggagccttgcatgactccatatgatggtacaactgatccacaataccatctaggagcttttaacgagctaatgaagatgaaaaatgtgtcatgcaagacaaggtgccaatgctttgtggtcacacttaagggagctgcatataagttgttgaaaaaggcttggaccatgaacaattacatcctggaaggaattttcaaaggaatccctacaacaacatcaagtagcaagtggttatgttatgcatgtaacaaacaagtatcaccaatgtgaagtaaggggaacaagaaagcttacgaagctacatccaatgcttcaatgtcaaagtcaacaaagtggggaagatgtctgaagatgaactcaagttcgccatagccgctagagtacaccctggaagtggactatgtgtgaatatgctgaaaagggaattggttggcataaaagacttctatgtcagggttcgtttggtacgccgtattacaccgtattgtattgtatagtattatattgaattgtatttcatgcaatacttttatataaaactatatgtggtattgacttttatgagcacctaaatatataatattttagtatatattaaaaaataaaatagtattatataaaaagatgatgtataatctaatttaatattatattatataatacaatacgacctaatacaacgtaccaaacgagccttgagagagcagagaagtacatccgtgtggaggaaggaaacagtcttgtaaacaaataccaacgagtgttcttcgggaagcttgtcaaatccctacagggtctattaggcgatgcccctaacacttgtaagttggtgcattcaagtgaagcctctgctttacaacctgtaaaaattagatatccaagatgttccttgtaatatcccggaaacctattatgaatcattatcgtttattatatattatggattaattaggtagtaatgagtaggattatgattttgctaacttaatttagattataaattttttctgtaagtggataaataagcgtaatttgttaattacagaaatttttaaaatatgtggatataatatgccttatttgtgaaataaatattcaagttcccgaccctggagactcgattggaggtcaaaaatgtcacagcaattttagttagaaatattgatgggattattgagattaagttaattttagagataccggggtattttggggtactcagagttgatcaaatacctcaatattagaattttcttagtggctaagaaataataaggtaaatattaataataaagtttttattaatattatattatataattaataatattattattaataaaacgtattcttatcagtttatatgtatattatatgtttaaaacataaattgaagaatgaagaatgacgaaaccctctcctttggtgcaacaaaaccctcttctcccttaatttattttctcaattttcaatctaaaaccttgtaattcaagctccggtagtggcgggatagtaaatcatcgaagaggaaaatcttaaggtaatggttgcttttgttt

SEQ ID NO: 221932 - DNA, 3229 bp, Cannabis indica
tcttataattgagacattagcaaccatcttttcaccacaagtttggtattctccaaatacttggttaacaaccaattgggagttgatatacatctcaaccttcttggctcctaccgctttggccagcctcagtcctgctagcaaggcttcatactccgcctcattattagaggccagaaatattaacctcaaggcagcatggagtctcagtccgtcaggggatatcatcgctacatcgactctggatccattctcatttgatgcccattaacataaaatttccatgcaggggtatccaggtctggctcattagcattggcttctgtttcattgcactcaataatgaaatctgttagaacctagcctttgatcgtgatgcggggtatgtactttatgtcaaactaactaagtttcattgcccacttgaggagtcttctagaggcttctggcatctgtaggacctaccggagcaggtggtttgtgaaaactttgatataatgtgcttggaaatatggcctcaattttctttacgtaattaggaggcagaaggctaattttttgatcaaagtatataaaatttatgcacttatcatgtgttcactgacgtagtacaccgagtcctaaatcttttcctcttctcggaccaatgatgcgctaactgcattcttgaagattgcaagatataagtacaaatcttccctgtgaatgggtttggacaacactagtggtttggccatgtgctcttttaatttcttgaatgcttcctcacactcttctgtccactgaaacttttggcatttcttcaggatattgaagaatagaatgcacttagcagtggaacaggagatgaagcgactcagggcagttaccttcccagtcaggctttgcatgtcttatgtctttttggggaaggcatatttattttttggatttacctctattcctcgcagacttactataaatcctagaaacttccttgatttgatgtcaaaagtgcacttcttgggactaagcttcatcccatactttttgatcactttaaaacattctttgagatctttcgtaggatccacgattgtcttagatttaaccagcatgtcgtccacacagacttccatattttgtccaagaagctttttgaacattcagttgaccatacgttgatacgtagctcctgcattctttaacctaagtgcatgactagataacagtatacccccttatcagttctgaagctaaaacactcttggtctgtgacatgcattttcatatagttatatcttaaatatgcatccatgaaggacaacattttgaaatatgaggtggcatccaccatctgttaaatcctagacaatgggaagcaatctttcagacaagctttgttcaaatctgtgaagtcgatacatatcttccatgttccatttggcttgggtaccaggacaggattactcaatcactcttgataatatacgtctcaaataaatatgtttgagagcattttatccacctccttctctagagcgtctgactttcccgaatctagtggatgtctctttgtttcaccgaaggcatgttggttgacgttgagaacatgagtaatgacatgtgggcttattccagtcatgtctccatgacaccatgcaaatacatccgctaattcttaatggtggtgataatttttcttcgctcatctggatttcaaccctttcctaagcagataaccttggttgggtcttgatcacaaatttcaacttcatgaatgtcctccacaatgcagttttggagctaatgcgaggatccaaatcatcttgaccttgtgaggaagtcgtcacagtcccctagatcatagaaaaggacaagtgcactgccacattataacactgtcttgcttctccttgatttccacaggctgttcctatcctagttgaggcataggtgcctgatggaggttactgctccaaagtaaactaaagctgaataacccaaaatagcattataagttagacaatctaccaccatgaagctgcaatatttgaacgtgctttgtggggtgtctagacatagggtaacgaggagtctcacttttcccataagaacaagggtagtcccgttaaaccctgtaagttgtgaacactcatggagaggtctcgattagtgagtccaatggccatcaaagtttttttaaatagaaggttcactggacttccaattaactactaagattagggccacaattttatttgcaataggagtttcaatgaacaaagggtcatgatgtgagaaacttactagtttggcgtcttcctctatgaaagtgatgggttgatccatgagtctttgtcttttggtcaggagctgactaacctcccatatctctccgtcattatctaaggccttggcataatgttttaactcgtttcttgtggtccctcctatatgagggcctcttgagatcatagctaccggtccatttggctttggaggttgcccaggtgcatgttgattggggacatcccctggaggtacttgtgtgtctgacacttgcaccttggaggttccccaggtgcatgttgattggggacaccccttagcggtaccttgtgtgtctggtacgccctcaggcactggggctccaacttgcctaggaatcaggtgtactaatctatctttaatccattcatacaagttgcctaatctaattaaactctcaatttcgtcttttagattttttacactcaatggtggtgtgacaaatgttgttgtggtactcacacctttccttatggtttctcctagagctaactcgatatagaggaggatgcctttgataatgagtattttacctggtagaaaagtatactcgttcttgggtatctatgacgtatgtatattgtgtatactaggggtgtaacctcttctttgcctcttatcctccattcgagtgctcccttttgaggatcttttactccaggaggttttgggggcacctgccacacgtgtagcctgtggggaaaattgagcagggtattgtgcattcgctttgggagttggattactccctggtaccccaaaactagattgagctagaggaagagcaatgttttgagtataccgtggtcttgcaaaaaattgtactctactttcctgtggtgtaactgggagggaagctcccaaaaactgtgttcctggcatataccctagtccgtcagtcgaataatatcctctaaag

SEQ ID NO: 221933 - DNA, 4385 bp, Cannabis indica
aatccaaatatactataagaaaaaatgttatcaagtattattaacactattttataaatatataggtgtgtatcaaatataaaagagctaatactattttggattatgtattttgcaaaaattaccgattggattatctattttgttaaatgacaaagtagattatgtaaaatgatataaataggactttgagctcggtttttaataattttttattttaatataactaatttgaaaaaaattattgacacgaacaaatgcagaaaatgtaactatttttgttataatccatctacatcaagttattattaagttttattttaataaaaaaaaatcaatttaaggtattatttagtactatttcaaaaaatacacggtctaatttgtcatttaataaaataaatggtccacttaataatttttgcataatataaagtttaaaatagtatttactcaatataatcttagtaattagctaccaagcttttaacctaattttggtaattgggtaatttagaataatttaaaaactatattttttgtattataattaatcaaaatttacaagatcctattataaagactatcgaaagtatataaagtgtacatcaacacatctaattttatataaaatttcccaactatatatattacacatattttatatgtctaattttatattattgagttaaatggggtgatagagtatatttgaattaaactttattaataagattagttactactactatatccaaaatgtggagggattgttggtgttggattggagcgatgaaacgtgacgtgtctgtctttctctttaatcaaaaataaataaatacaaaaaatggaaggaaagaacgggacccgccaaaatgcggcgatttcctcatctctctctcgggaagctcaatcctaattactattattattattattattatccattttccacctcacaagataacgatgacgtcatttcaaaatttcaacaagctttttctattctgactctctagtaattatttctcaaaaaaggaaaaactctccacaataaaataaaataaccagaataaataaataaataactacataacaattttcttcgttaccaatacaaacattaattgcatatctttctttctttattcatggctgtacactgcatttgtctatcatagtatagtagttcttaattaacaatgacatacattgtgatttttaaggagaaaaagaaaaggcaataataccatgaatattgaaaaaaaataaatattaaaaatactattttatcatttttaatacaattatctatatattttttaaaaggttaaaacgacatttgatatgactttttttgttttttttttttgcttttctgaattactgcatttttgtacaaatagaaaattgtgtatttggaaagagacttgtttaacaaaagatatcatcaatccctctataactctcttccctccctccttctctcccctctaccaaacatggtgtaaaagtaggacaatgatgtattcatttttttaaggaatgatatgtattaaaatttaatacattcaatgtatagagaaaaaataaaataaataaagaaattgccaatttattgtaagctttattctatttcatatgaccaaagttcatttgtatattttattgagaggccgttttggtaccataaaggatgtaatttacactaatgtcatcagatagagaccattttccagtcaatgggttgaaaacaaaccagccatctctttgacctgaaaaaaaaaattatatcaaccaatcaacatagcttttagagtgttggacactaccacgtagagtaattttctataataattattaaattaaaatatatggtacgcgaaagatagtgaattggtatgacacctcatgttgtttttttgggcactaaaaacataattctcaaatttaataggttgtaaatgctaaacatgtgttggcttaccgaaactgatgaacgctgtagaagcagggtcaattcttcaggagttacaaagcttgaccattggtgtgtacctatgggaagctgtgaaagaaaactggtattattaactacatgggtctttttttctctctttcaaaatagcctcgaggtgaggcaaggattataatttaattccatgtctccaaaagtaagaaattttcactttttagcatggcaaaccaaagtttcctggaacattgcgaagagaaaaaacatgtataatgatgtacaaggaaataagttctaatgaagctcatcttgcatgggaaatgagattctcgatagctaagaaacaatatataatgagctgcagtagaacacgagtaataatacccaatgaagaagatactctgctgcaacgatggttgtagcatatgccctcatagttcggttaatagttgacatcaccatagctccatctggaacagttaatgctgctagagacttggtgaattcagcagggtttgctacgtgctcaattacctaaagtaaaatgtgcacaccatagaacaaattggatgtgagcttaagaccgcgcgaagaaactaaaaaaatggtataaaacccaaaattctagaatcccagttagccatttcacaagcagactgagattttggtgaacattagggacagaagatttggtatgagacacacctctaatgaaatcacagcatcaaaacttttctgttcttcaaccatcttttctgtccacaatattagtaacataacataagcatgaaaaaaaaaaaaacaagcacaacccgtatacaacgagaagacaaaatttacagccagttgattactagctcaatgaaatacgtcactgaaatggcaccacaaaagtaaataaataacaaaaacatcattaccatgaaaatgttgtacatgtctgaaagaattagccatcaattaaaatttacaaaaacatttagcaatgaaaaataacatgttagcatagtgatgcatcaaagcctcttcccttgtagacatagtttagacggattaaaaacaaagttcataacataccggctgttgtgcagcaataattgattgttgaagtcactggatccaaaccctgttttcattaagtaatgtcttattaaaatactaatcctggcaaagtatagaaaacattgtaattaactggaaagataactgaaagcctcttttcccactgtacgctgtcttcttcaactccacaacaatagatccttgaaggaataagacaaaggtttaaaacaaaactcgtcacatacttacaccatgaaggcgtgcaattttgatattcttatccccagcatcaactccagttacagaagctcccattcgagctagaggctgagatatgaaagaaattaacaaattagaactggcaatatttcaagcaccaaagaaaaatacccattccaatttagcactgtttgtacataaaatcaaggattggaatgattgcatgatgagcacatttgccacaaaaaaaaaggcaaaaagtaaactaaaagacaatctaattaacaataatgtattgtatgaaatataaacgaaaagaacagtacctcagaaagaattccaccaccacaaccaatatcagcaaatttcagtccttcaaaaggcctagcagagtttgaatccctcctgaaacaagaatgtttgcataaattataaaattaatattaagctcacgatcgtaatggtaaagctattgaaagtaatgtacctgaaatgtcgacaaagagtggagcggatgaaggcgagtctagtaggattgatcgcatgcaatggtttgaacgggccttcagaatcccacctaattacaccataataaatcagataaacacaagactttatatatattttaaccctaaacagattatcagttataaggaatgggtaataaattttaaagtgatgagtgagaagataagctaatcagaccaggtttcagcaatggaagcgaacttggcgagttcagactgatccaccgacgaactagtcgaagaattggcgccggactgagaaagtcgaggcagtggagtagaaggttggggtaaagacgggacatcggagtagagtctagctccggcactgcgaatgaggattagcggtgcttctccgcagctcaggtaccgacgagcaagggtgtggtggccattcgtggctgtggacagagatcggagtttgatcaggaggttggaagccatggccgtcgtttgaacaagaaaatgagaaagaatagcccatctacaaaaatggtcaaagtttgaccccataatagatttgggcttaaattctgatcaaggcctaatcatcaggcccaataaagtaaaacaagtttggttttaaaaggtaaaaataacaa

SEQ ID NO: 221934 - DNA, 1699 bp, Cannabis indica
ctctctctctcttctctctctctctctctctcgtctcacatgcccacacctattcacgtgtgtgtgagatcaaaactataactcaattacatagtcttatgagttgagtacacattgtaattgaggaagcaagaaacgagatgaagttgctgaaaactggctcgggacacaaaccaagcacaagtactgcaacaacaagcaccatctcgacaaaagttgataatccaagtggttcgaacacaaaaagaaaagattactcgagagaatcatctaaaaataagaagaaacaaaaagagcatgataaatatgtgccaatttacactgtttacaccgagcttaatgaaactcgagaaaatatctttctcgcaaatgagcacatggttgcattgcgaaaacctgagccgatgagacatgcaagacacaaacacgacccaacaagattttatcgatttcataaagacatagggtatacagctgaagagtgtcggcaactaaagaatgagatagagagcctaatttcttgtggatattttagaaaatatgtgaagcgacaaggaaatgaacaaaactaacctgttcagcctaacaacccagaaaaccaaagattacaacctccccttgttgagggcaatgatatattggttatctcgggagggccgcatcttgctggagagagtactaatgcccagaagagatatgtcaatgaagtcaagaatgagcaatcggtgtttgctccagaaccactaaagaaagccaaaatagaagagcctccaattgtatttttagagggagataccgaacatgtgaggtatccacatgtcgatactcttatctacagttcaactcgccaacaagaggataaaaagagtcttgatggataatggaagatcggtaaatatcctttacaaagatacgttgaagaaaatggaacaacaaaatgcaaagttaaaaccttgcatggtgagcttatgcagatttattgagatagtgtcgccagtcaaggcatcattggactcccattaattataggcgagccaccattatctacaacattaatgcaagacttcttagttgttgatcgaccattagtttataatatattgatgggtggccctgtattgattggactaggggcagtcagttaaaacacctatctttaaaattccaaacatcaattaggagtaggtgtagtgcgaggtgaccagccgttggctcgcgaatgctatcgtgtagtgcttcaaaataaaagagccaaccatcaattaatggtggtcataatagaagaaggagagaacaaagaagatgatctagatcctagaatccaagacgagaaaaacctgttaaagccaattgaagaactggaagaagttattttagatccaaacaattctactaaatgtgtatttattgggaaaaatttggatgaaaaactaaaatagcagttaacaaactttttgaaggcaaaccatgatcaattttctcggagccatttagatatgatagatcgatgctaaagtgatttgccatcatttgaatatcgaccctaattacctagtgaaaagacaaaaaatacgacccttagattctgagagataaggggcgcttaaggaagaagtagacaagttattaactaatgatttcaaatgcgaggccttctacccctcgtggatttcaaacctattcttgtctcgaagccaaa

SEQ ID NO: 221935 - DNA, 3243 bp, Cannabis indica
cgtgaagttcaatctcaactcaagtttgttcaatccttccctcagcccactaatgatcaattagatcagggaaggaatcttgaaaaggaattaaacagtttgttacagaaagaggaagattactggcaacaacgatccctgtcacatggctccagctcggtgataaaaatactcgatacttccatcgtatggcttccatgaggcgtcaaactaacaaaattctttctcttcaacgctcagatggttccacggctaatgatacaacctccattttgaacaccattgagcagtattttactcacctgtttcaaagccaatccctagaggatgagatcatcgattctgttctctcaggcattacagaatgtcttactgaggaagaaattgaacttctccaggccacctttttctgctaataaaatcaagaaagctacattccaacttgctcatgataaagcaccgggtctagatgggttcagtggttgtttctttcaaaagaattggaacttgttgggtaaagatatcattactgctgctctcagctttctgaatggggatgcagacttagcgaccatcaacaagacgctcattgttcttattcctaaacggcctaatcctgagtaaataacggattatcgtcctattagcctttgctccatgttctataaaatcatatctagggttctggtcaaccgtcttaaaccaattcttagtcgcataatttcccccacccaaagtgccttccttccacaccgtttaatctctgataacattatcattggtcaagaggttatgcattccctttcccaccataaatcatgtcgattgggatggatggccttgaagcttgatatggccaaagcctttgatcgcatcgaatgggtttttgttcgtagagtaatggagaaattttcttttcctcagcgtttcattaacctggtcatggcctgtgaatctactgcaactttttccttctccattaacaagcaggttcttggacaagttaagccttcccggggaatttgccaaggggatccactttccccatacttatttcttttatgctctgaaggtctttcatctctcattcaccacaaaactcaacagcgccaaccacctagactttcacttggaattaaaatttccagaagagccccgactatttcccatcttttcattgctgatgatagtcttctctttagctctgcttctcctaaagctgcgaccgtcatcaagcatattcttcatgattatagtcttgcctctggacaattggtcaactttacgaaatcggctttgttcttttcaccgaataccacccctgaaatccaaaacacagttgctactattcttggcattcctgttcgagataacatggaaaaatatttgggccttccccaaacatttggaagaactaaaaaggatgccttcaattacattaaggatcgtgtttggtctaatctaaataaatggaattccaagtttctttcaaaagggggtaaagaagtccttttaaaatctgttgtccaagccattccttcatatgctatggcttgctttaggcttcctacctcctttcattctaagcttgagtctctgatggctcggttttggtggggaggaacagagcataaccggaaaattcattggaaagcttggtctttcctttgcttttcaaaattccatggaggtcttggattttgatctgaaagctttcaatcaggcgatgttggctaaacaagcttggcggcttcttcagtatcctcactctcttgttgcagccctccttaaatttgttactttccacaatccagtttccttaattctggcaagggccatagaccttccctggtttggtctagtatcaattggggcaaagaacttctccagtcaggtcttcgaagatcaattggggatggtaccaccatctccatctttaacgatgcctggattccaggatatggcaaacttccttatcttacatatcactcagatgccaatatgacagtgtcagatcttttaacacctaacaaggaatggaaccatgcccttatccaagccacctttcctacagatgtttctgaagctatcatgaccatcgctctcaccaacatttccgtacctgatgcatactcttagtctcttacccctcatggcacatacactgtcaactcaggttaccacctagcccacaatcagattcatcaaaacgacccaacaccctcggataccaaaccctcacatacatggtggaaacagttatggacactccctctgccttccaaactgaaacactttctttggtgtgcttgtcatgatatcctccctaccaatcacaacctgttcatacggaaaaccatccattcttcacattgcatccgatgtcactatcatgatgagaccctagagctagcacgcccttctcagatgccctgctctcccggaggtatgggaattaactagttttcatgattttattactaaaaatttttcactaacttgtttggatttattacaccttgttgccactgtgtttactgctgaaaattatcacttctttgtatgtttgttgtggaaaatttggaactgcaggaatagttggctacatgctggtttctcttcttctccagcacaggttctgcgtgaggttacacactacattgagcaatgccaaagctgcaacaaaaaggtttccactactagacaacttcaagaagattcgttgctgtccactggaagtgttctttctgctcctactttcacccatcagctttcagtggatgctgctcaagattcacaactcaacaaaatgggttttggtatgtccattcaaacaaatacaggggaggttcttttaaacttggcaatgccatggtgtggaattaatacacctttgttaatggaagcacaagcccttcactttgctctttcttggtgtcatgctcacgctctttatccggatagtattgtttcagattgcaaggttttggtggattatatttgtaataatgatactcacaatctgcatcttaacacttttgttacagaaattaagagcttgctatcttattaatttccctaaagcttttattagctacatcccaagaggggcaaatgaaactgcccattgtttagctaggaaagttttaggcctagattaggaagctttgtggaagagttgctctttacaattgcaattgtatcctctacttttctgatttcatctaatggatacagattttt

SEQ ID NO: 221936 - DNA, 1155 bp, Cannabis indica
atcattgagggttctctacttaattgagattcttaattttgcaagagctttctagtttaaaagagtattgagtaatgaagtaaaagaaaattgggctgtagatcaactaattgagaacaatgaagggaaaggggatctacaggtttctggtcattgttcctttgaatgattgggtagaatagtcccgattctcaacgaggcataaaaaatggtcacaaatgctggtttctctacattcttaagggaaggtggccaccaacacttgttttgaccttctgaagagtaggggtcccaccaacacttggagtcactcgggctcctgaagaaacttaaccacacctttgactcgtagagccttttcaaccatttttacatatgatgttacctcattcgtagtaatcaccaggtcgtgtctaattttcacatttagacctacaagatatttctccttcttgttgcagttcgtaggcacaacacccgaagctaacttggccaaacgatgaaattttgtcgtgtattcagttacttgcataccctcactctgcaccaattcggtaaattctttctgcttagcagtgcagactgcctccttataatacttggcgttgaataaatctcgaaactcttcccaggtcataacggtgacgtctcgggtgatggacactaattcttaccacacaagcgcatcttcctagaactaaaaagtagcacaggtcacccaatcatttctaacgacccccatgaaattaaaaattctttctatcactttgagccactactcagccttcattacatccggacctcccaagaacactggaggtgcttgcttgcgaaacctctcgtataacgactccatatgattgccaataacaagttgttctgctgggactgcaggaactaaagcggcctgagcttgcggtggaggcactgcaggaggaccctactgccttaatatcaaaatttcttcatcttgctagcgaatacgatcttgcatatccacgaatctctgctcccaatcaagaggagcttgaggtgggttcacatgtcgaccaccctgaaaccttccacagcctctgccacgaccacagggattttggggaatttgatttccctgaccacctccggtctcgaccctattaccctgactccttgtat

SEQ ID NO: 221937 - DNA, 2071 bp, Cannabis indica
atgaaatgggttcacttgagaaaaataaaacatcgattagagtacctaaacctagagaccaaaggatcataggctgcaaatggattttcaaacacaaagaagggatacatggtgaagaagtgaggtacaaagcaagattggttgctaaggggttgaatcagagagggggtattgactacaatgatatcttctctcctgtggtgaaacagacttctattagaatcgtgatggcaaaggtagcaatgtttgatcttgaaatggatcaaatggatgtaaagactgcatttttgcatgggaaacttgaagagaagatctacatggaagaacctgagggattcaaaagaaaggggattgaacaagtgtgtttgcttcaaaagtgactatatggcctcaagcaggcaccaagacaatggaacttaaggttccataaattcatgttgcgaacaggttactcaaggagtgagtatgacccctgtgtataccacaatggcacacccatctggttactactctatgtggatgatattctaatcattggaaaggacagaggccattaacatgctaaaggatcaactaagctctgaatttgaaatgaagaaccttggtgaagctaaaagaatactggggatagacattaagagacaaagaccaggctctgtcataagaagagtacattcagaagataataaacaagttttgcatgagtgaggccaagacaatcactacccctcttgcctcacacttcaaactagcttcttttattgggagcttaatgtattgtacggtctacactaggccagatttggcctatgaattaagcatggtgagcagatttatttctgatccaaggaaggtacattgggatgcagtgaagtggattttaaggtacctcaaagggacagcaagagtacgattgttgtacaagaacaatgcaatgtttgacactgaaattgtagggtttgttgattcagattatgctgggagtatagacactagaaggtctattacagggtatgccttcacagtctttggtggatgcataagttggaaatcaaatttgcaaaaggtggtagctctatctaccacagagacaaaatatatggttgcaactgaagccattaaggaggaaatctggttaaagggtttctcagaggaacttggattcaaagcaaaagatatcacagtgcattgtgataatcaaaagtgacatacacttaatgaagaatccaatgtaccatgaaaggtctaaacacataaatatcaagctacactttatcagagaagtcattacaaggaaagaaatacaagtcaagaagattggaactaaagagaatcctgcagacatgttaactcagtatgttccacaagctaagttcagactttgtttgaacttactatgcattctcacttgctaagaatgtcaagaccagaatagctacaaccaattttgatggtattatttttgatatatggccaaggtggataattgttgaagtgttggccaaatatcaaagtccctaaactacccctactgtgcataacagaattaaccaattgtcaattatgacagttggtaaacgagccttacacactagctccaacattactatttaaggctcaattgcattaaacattggcggctgatcttaaaaaaaaaaatagattgagagagagagagagagagttgtttatgaactaattttgcttagagagagacagatgagttgcccttgagttttgtaatggagtgatacattgtttgtcatcactaccactagtttgttcagttgcagaaatcaagcttctcacgttatgtaattgaactgttgtaatctctcattgaagatcagttaataaagattctctaaggccattattgtagtttttttctggccggagatgtaggcaaggtgattcactattacattgttcgaacctcgttcgttttggtgttctttataattgtttaacgttcttgttgctggtttaagattgctgtcatattagtgttatatattgaattagtttcattcatcattgtcttgtttattttgttcttgccgaagtgttg

SEQ ID NO: 221938 - DNA, 3182 bp, Cannabis indica
gttaataataataaagttattaatagctgcacttaaatattcaataaagttttttgatataatactaaatttaattaatatttttttgtaggtaattctttttattaatattagtatattacactaatctaaggaatttaatagagaaatgtttctataataaaaatagtttggtcttgaatattttttgttttcctaaattaatctggtagatacatttgattcagaaaaatatgtgagtaacttgtcttctttttttttttttaattagagtctctcaattgatatgtttccacaaattaaatttaatttgtgtttcttctattatctatgtgttagtaaaagttaaaatatttttgccatagaaaaactagattttgtattttaacttgcttttatttagcaaagatcttacattattactataaatatataataaatttgatatttttacctacatataataataccttatataataagaacattaataaacataaatatagattatttagtcatatctttaataaaaattaaaattactattagttaaaaataatttatgttttctatcaatcttactagtgccaaatatatcatttatgctaaatttagagaatttaatactacaaaaaaaaaagtattttagagaatttaattgaaatcacatgacaaaccccaattcttttttcctaaaaaaaaatatatatatatttttaaatactaataaaagaaaagaaaagaaacagctatagaaggagtgaatgagtgagaatcatgtgacgagccaagccagtccatactccatgtctgtgtctattaatcaaaatcaaaagccataaactttgtgtaaatcgcaagaaatcccctttttgtttcagtttttgcgtctgagactgagacactgtctatttcttggtttggtttccatggcttctactgcttcaaggttcatcaaatgtgtaacagtaggagatggagccgtagggaagacctgcatgcttatttgctacacaagtaacaaattccccactgtatgttctttcttcttcacaaagatccatctgggtctctctgttttgacttcttttttttttgctttattgtattttattttactggtacgcatctgggtttttgcagctttttcgtgttttccaagattttactatttttttttctctctttctctccacccaaatgggttcctttcatgagtttttgggttatatcatttgttccctgcagtaccttaaatcaccttagcttcatctgattttgtttaaactatagtgtttcttttgcttcttcttcttttaataaagcataaacagggaaactcgttttaattgccaattgctgttcttatattcatgttgttgacttgttcaattcaatcccatatcgttgacttaatctgtttttgtaggattatatacccactgtgtttgataacttcagtgctaatgtagtagttgaagccaccactgtaaacttaggcctctgggatacagctggtacagtatgcttaccttctatgactaaatattctagtaatcttatatgaattaaaagctataactaactatgccttaaaagtttccatattatcatgtttggcttatgataagttggaaaacgttttgctgttttgattttatgtccccttttttgtttgtttcacaggacaagaggattacaatcggttaaggccattgagctataggggagcagatgtctttgtcttagctttctcattagttagtcgtgctagctatgagaatgtactgaagaaggtgagtttttacttgtgaaaatcatgtttttagtatgttttattttatgttttgctctttgtaaatatgcttattgatggtgtttaaaatcattctctttgttagtggatccctgaacttcagcacttctcacctggagtccctgtggtacttgtcggaacgaaattaggtgagcaaagaagcttcaaccaataagttttcatggcagtgccaaaaccaatctttttcctatgaatttgttttctcaaataataggtttgatgctaaaacttgcaaccagttccttgagtaggttaatgcatactagtttcgaaactttttgaatctgtttagaagaatgaactctggtttgaatgcctcaaatccaaactgtcaccatttcctttctaaaatgaacctattatatataatctgaatgttaaggttgaaaagaagaaaatgaaaaacaaaaaggtttgggaaaggtcaagcacaccatcaagcaaatcctttactttagtgcatgttcttcttactatgttaaaagcccaaatcctgtcagtgcaggatatccaaaccagaaattgtctccactagtttgtcctcacaagtttgaaattgtctcctattagttatttgctctcatgcttaaaaattgacccaataagatatggttagtcttaggtttgatatgggaacacagtactctcattttctctttctttcatgaaacagatctccgagaggataagcactatttgtcagaccatccaggattggtgcctgtgactactgcacaagtgtgatttctattctcagaagtttgttattttctctagcatagttggatttgctcactttatttacaaaactggttttctcattgtttttttcctagggtgaggagctgcggaaacagataggggccgcatattacatagaatgtagctcaaaaactcagcaggtatgtgtgtgttgcttttagtcgtaaaaaaattacttgttcccatggttgcaaactaaccctttttaatattattgcatcacatacgttgaattaattttgcaaagttttatagaagttgattacagaaatgatagaatttcctttaaatagcacagcaattggttccattcagtgcatgaatttccaagttcattttaaatcagtaggaatttcatcacaatgtgggagaatagacacttttattgtgaaagcaattcggaacaacttaatccgtggaatattttgagataataaacatttatttacactatcatatacaaattgaaccaaaataggaaataaaccaatcagtaatcaacgataaagaataacattctttccatttaagaaataaacttatagccttcccccctctctctctctctctctctctctctcct

SEQ ID NO: 221939 - DNA, 1255 bp, Cannabis indica
ctatttcgataaaaattattagtgcttgaaaactatattttctcaccacatgtccaattgaaaagtgatagacaactgtcttggcttcctccttgtggaatttcacaatttttcgtgatgtgtacggtgagattttaggataacactaacgagtgtaagagtaaggatttctttttaaaaaatttaccctaaaaagaagaatatttttaatttttcaattagagggctattttaacaaaatttaatgcaaaacttgtctgcttattcacgtcttagcagtacaaatttattgtacccagcgagaaaaaatattatgagatgcaatctggccacatttcacaaaggggtaccactatcagaaaactgaaattttcactattttgataaaaagaattatttgtgcttgaaaactatatttctttccacgtgtccgatagaaaagtgatagacaacgatcttggcttccttgtgaaattttacaattttttgagatgtgtagggtaagattttaagagaacactaacaggtgtaagagtaaggaaaaaacttgttaaaatttactcttaaaagaagaacgttttctatttttgaattagggagctattttaactaaatttaacacgaaatctatccacttatctacgtcttagtagtacgaattcattgtgcttagcagagaaaaatattacgatcagatgggtccgggccacatttcacaaaggagtaattgtatcaaaaaagtaagattgtaactatttcagtaaaaaattattactagcgttagaaaaatctacgtttcctctccacatttataatagaaaagtgattggataacgatcttggcttctccctatgtaatttaaagatttttcaagatatgtacgatgagattttaagagaaatcttatgagtgtaggagtaaggagataacttgttaaaatttacttctaaatggaacattttcaattttgatttaggggggtattttaaaataatttaactcgaaacctatctacatattcacctcttaatagtacgaattcattttgtccaacgaagaaaaatattttgaggtgagtccgagtcacatttcaagaaggggtaccactaattaggaaagtgatattttcactatttcgataaaaataaacgttttctctccatgtgtgtctgatagaaaaagttattgacagcagtcctggcttcctccctgtaaaattttataatttttcgagatgtgttgggtgagatttta

SEQ ID NO: 221940 - DNA, 1872 bp, Cannabis indica
ctcctgcgtggtaaggaaaaaattgtggataagtctatgccatttcaataccctcaccctcctgccattactgttgttgatcatgctcctgttaacctcaatcttcctactaagaatttcttggataacattatctctttcccttcatttctggctgctactggtaattttgggtctaactttttaagtccttatacttcatctactgtcatgattcctactcctgttaatcctaatagtgctcatgctttccatgctggtcataacccatttggatgccactctatgaggccctcagcattcacctcctactccacatattctttggtgattgctaccactgcttgtcctaatgttatggcatctgctgctacgggtatttcgactaatcctgctactgaggctgtctctgctagcccagttgatgttgttgagactcaggctgaagctggccaacttgattctttggttcgtgggaaagggctggcctcggcttcgggagtcaaatgcccatctttcactcctcagcaagtggttattggtggatctgcaaggtctcaatcgaagagagctcgagctggggatagggaggaggaatcttcatctgcttctacggacatggatcaggcaggtgatgctttgcacacccgcccagaaaaatgagtcttatgtgttggaatgcacgtggtttggggagtacacgtgcattccgaaggctctccctgcttgtgaaaactcactgtcctgatgttctttttttgattgaaacccgtctggttgctggttcggttgataggtttaaggttggtctagggtttgaccatgggtttgaggtccctaggaaatagttttttttggggggggggggggggggacttttgcttttgtggaaggataatctttttgttaatattattaacttctcttgtatatagattataatataagttttaatgataatgaactgtttcatttcacttgtttttatggttcccctatttcttctcaaagaccttttacttgggcccttcttgataaacttttttataatgcccctaatcttccttggttaattatgggtgattttaatagttttctttcttatgatgataaagtaggaagtaattattatgatagtaaggatatggacaacttctctaattttattcataagtttcatctttcccctttgccttttgagggtaacaagtttacttggcataatcatttggttaaggaacatattgattgggttgttagctcggcttcttggagtgatcatttccctaatgcttctttgcaccatctttcttttttggggtcggatcatcgtgctttaaagcttattcttaatgataatggagctaattctcaccctagaaatggaaaaagatttcactttgaaaatgtttggcttgagaatcctgatttttttctctgttgtaaagactgcttgggatagcggtcttcccaatcagaatgttttgtctccttttcattcctttttgtccactcaggacttgtgtaattctgcacttaaatcttggaataaagtgtccaatatttccattaagtctcgtatttctgatcttcaaaaggaaattgcatgcctccaggatatttccattgttgatcatgaaagccaatttcggattaagtgccttcaatctgaacttgatcttctcctttataaagaagagatttattggaaacaaagggctcgaactcagtggcttaaggctggtgatagaaatccaaagttttttcactgttttgcttctcaacgaaagaggaataatactatcaaatttctcaaagatgatcatgagaatatagtctctgctcatatggatatgggaaatttagtagttt

SEQ ID NO: 221941 - DNA, 2342 bp, Cannabis indica
ctagtccatgttattctagtaggggtgtttctggaaaattgtgtatacaatcttgactatatatatataaaagaataacatgactacatatgccaaaattcttgttaccatagtccataacacatgaattaattaatttcgtactatattatatatatatttatatatataaatatagaggtgcagctcgaagtttcaagtagatgactggtagtgtgtggtgacaaattaccattcaattttcaatatatatagacagtctaagtttacttttcctctttttgacaagtgattaatgtcaatgattaacaatataattactcattagactaataacacatgatcatacacaataaagtttcctccaaacatataaatcatcatctctatttatatataaatattatatatataaatatgcatgctataataaatagtatagtatatatgaaaacgagatatcactataaaaaaaacagttacctttaataattttttaatctcaacataaatttgttatgaataaatgtaatttttattttaattaataaaaaattacttgtaactaaaacgtaatttttagatacaagttgtaacgttttcgcttcaagcctccattgagcccttacacccagagaataatgactcttatacacgagtacgtcagtactctgtctgcttcatagactgatgactgaccctacaaatcaagacgagtatttccagcgtgctttgtcctcactcgcgcacttcctggaaatacttctcaggaggtcacccatcctgaaattactccaagtcaagcacgcttaactaaaacatgaattgatagatttttaaaatagcttcaaaacataagttaaatcacgtcaattgaatcaatattgagagagttatgaccatcttactgaaggccagcacccaacacccaagttgacatccaacgctcaggttgacatccagctggcgtcaacctgaacactgggtaagtggaaaaacatttgagacttgcatttttgatgtctaagtggtatgtttgacatcacctagtcagattctttgctctggtgatgttattcactagttcttataaatgtttctttttggtgaaatcgagtagactcgaaactccccgattttgttgatatttcatcatgttggaagggtgaaatatcaaagtgtgaatttgacttgtcacaagtcgtagctctcgtttactatgaagaaataatctgatggtcgaaacggaatcagagtctgataagaaataatttgacttgggcgttgggtgctttccggggctcgttttgatacttctaaggcattcgagattgtgaacgaggtctcctaccccattttttttttaccaaaataagaagaatgctcggagtagaatttgcatttgaggagcaaaaacacgtaaaccaggttgcacgtcaacctgtgcgcaaggccctgtgcccatgtcaacctaggcgcgatgagaccgaattttagctcccaaaggatctcgcttgctccctgaaatcacttgtatctttgttatttctaaaaacaaaaaatatgcctggaaaaattttcaaaaaaaatgactgaaaatatcccaagttgacaaaatgtcaacttgggcactgggtccagctttttgccactggttggttccgtttgattcccacaaatacttgtatctcagttatttgtcaaaacagagaatatgactggaatacttataaaaaaaactgattagaagtagccaaagttgacaaattgttaacctgggtgctgggccccaattctggctcccagatgaccctgtccgttccccgtaagcacccaatcttaatcattgatgaaaacggaggatatgaccagaagacttcttctgaattgcttatggaaattgcccaggttgacaaagtgtcaacctgggtgctgggtccctattttggcctccaagttgacccactttttccccaaagtacttgattcttcattttagatggagatgaataaaatcctcgagatacttctttaatactatgattggaagcaccctaggttggtaatatgtcaacttgggcgctagctgcactaggtgcttgttggaaatattttaccaggatctagatttactaacaagtatgtttcattaacatcctaatatgaattctaaaacaatgaaataaagacataagggtttaaggaaaccttacattgggtgcagcggaatataatgattccttccgttcagatctctagcccttgattcctttatgtagcagaacataatcaagatctgaacctggatctctttctctccttcctatgatgctgattctcct

SEQ ID NO: 221942 - DNA, 2106 bp, Cannabis indica
aagatcatcactatctatgaattaaggtacgactttccgccactttgaattttttactcttttgaatcaacaaaggtattatttagatctatagaattgaaattttgttgtttgcatatttaatgagtgatatagaaactaacagtagttagtgcattgagaatacaatagtaaaaaaaaaaaaaaaaaaaaggttaaaaatatgtttgataaattataaattttataaagtggtataaattattaatattctattgtaactgtaattataatactataatctaaaccattataataagtaacatatgaaagtttatgttttttatatttttatttattatttttacttaaagtttaaaattatatgtatttgataaaaataatttaaagattttataaattatatttttatcacttgtaaaaaaaactcaagtatataaaaaattgttgattgatgtgatttgttaatataaagaaactatatatataatatattttaaaacaaatattaaaaaattaaaattttaaattatttataatttatttattgtaaatatttttttttgtaatatattataaatagctaattatatttttatacaaataaatttattgtagattcttttaatcaatacaactttttttaataaattgagtttaacttggtgtagcttttttataaatttttcaataaattattttttaattgtttatcaaacagctttacaacacaatttttttttaaaaaaaaaacaagtttaacgttttaaaatttgtgcaaaacaaatcccaaaaaattcctagttttggatttgtttctccttctgaagtacatcacatttttttttaaaaaaaatatatagttacatatgtaagaaaaatgatgacaatcatctttatttttgttatctttatttttgtttggtgtgcaatcaaaattttatatattgattaaaaataaaaatgattatagatatataagaatcaacactactctattagtatgagacattttaagaatatctcaaaaataaatatgtaaggaattaaactcaaagcagataatattatactatttaagtcaagctaaagagacgattcaataagatagaaaaacaagaccaacaactccttagtgaaaatgaatgtcaatatttgatgtcacaaaattagagaagggtacatattaataatctttgatttgtcgataaggtaaggattagattcatatgatataagcaatttaatacaagtgacatgagaagagagagtgctttttggtatacaagtgacatatgagacctttttcatgaattgttctaattatttgatttatcgtgaatccctttatcgtgctaattgggacatttttagtcccatacattttggttcaaagtcaacaggttcccaatttactcaccctctttatatatatatagctatgatttctaatacccattattgtcttattgactatttgatgaaagatatatgataatcgatcgatcgatatctgactttagcatatttttctcgacaataatgtgatcgtcaaaatcaatttggtatatacgtaccgactacggatgggtccgaattgagtcatacaaatataataattcaataacaatcaacacaaatatacataatctttatctaaaaaaatccaaagaaatagatcatataacatattctattattgttattgtttatagttactattgttatttgggatattttattttttatatgttttattttttttatttatacagaaatatacaagtaattaacaaaacaacttaaatttacatggcaatctaggccaaaacaacaaaatcttaaaaataaaaaaaataaaaaaaaatgttaaaaagatcaaatatggagtgattccctttattgtttttagtcttttttaattaaaaataattatttgaatatgtttatatgcactctttttttctttttccttgataatttttttttacacattttctaatatattttagagtaagttttgttaggggaaataaaaaaaacaacaatcaaaatgagaaatataaggactgtataatggactaaaagtaaatactcataatatat

SEQ ID NO: 221943 - DNA, 1892 bp, Cannabis indica
aggtggaaaatacctcgacttcagccctccataagttggcatgttctgtaggagacattagtacggccatctctggattccagcagcctagtgcactaggatccccagtaacataaagaagttgaccagcttttagatcagtttctatggtcaaaacaaccttgcatgttccctttaaagtagcagttaacatgtctgagaaattaagaaattagatatagcatcgccaatttagaccatgaaatatgctagataatgaagcaaacattgaattcctacaaaaaatgaaaatgttttggtacctttgtccattgacattacagggcatcttcgaaaagaatctcgactccctatacagagagcaaatctgaaaacattaactacaggagtattgtggtagatgtacctgctatggggatagaaacatacacgcataagtaaagagacgggtggaaaatgctgtagctaagatataatcaaaatatgttgattctttttccatttaagcctgagagaagcacttattttcacaattgtgtactaaatatatagaagtaaatgatgtagaatatgacatacaacaagggaacattagttaaattacccaaccacaaagcacttgtatctgaagttagtcacttcttcagataatatacatagcataacaattttgtacaataaatcgttggagcactcccatcacaataaatcgttggagctaagaccacaattcactaatactggaaatttgggtaagtcaaaatctatcaagaacaatgtttgagagagaaaaagaaaaataacatccttcattttaaaatctacttcttcttttaagcttttgattgttcatcctgatttgggtttaagtcaaaatactcaatacatgtatgaatttcatatacatgagctaaggcccacactgttaataagtttcccaataagaacgataagtgataaaccatctttaccgaaatgaaaaaacaatacaatgaaaaagcacccaaaattaaacattgaccaataaaacacaatgtcacagcaattcaaacatagcaaaataccacacgaaacaaattaacccaattctatcatgtgtgtagctatttgtattgtataaaaacccaattcagttcatactattttaagctcagtagaaataagaaaactgataccatgttcatatttaagtgcgcaaagagtatttatgtatacttacggagacaaaaacctcaaagagctgagaaaccaagcagaagaagaataagtagtagttcgatggttgagtagatggctatggtggcgaaaaagacaatgaggttcgaggatatccatgggcatggtcgaaaacgacttcagtggtgtatggagagtgaagcatgaagagttggatgggtgggagcgtaaattgagagtagcagaactgaaatttttgacatcaaagaagaagaagaagaagaagggtcggcctttgtgttagtgttagccttatagccttagcgtgggttcagattgttgtcggaaagatagaatagagagaatggaaaaagttgagggaagaagacgacacacaaacatgaaagatagaatactggattacatttcagctttaggatttggcgcttcgtcttggcacgtgactttttcttgcacgtgatacgagggcttttcgtggcagcacggtttcgacgagccacacaaatacgaacacgacacgaattttatgaattaaaagatgaaatatatcaagtgaagatgatttcgttatttggtattgttatttctgaatgtaaggtgttaattcaagagttgaaaaatgtctcaactgatctgctaccttatttggtagctgaatttgctggctaataaaagtttctttgccttcaaaaaaa

SEQ ID NO: 221944 - DNA, 1471 bp, Cannabis indica
tcatgcataacaatcatgttatgggtcctatcatccctacccgtgggatccgacaaggtgacccactctcaacatattttttcattatttgttttgagggcttatcatcaattatcaagaagtttgaatcaaattaactcctccaagggtgccgtgtggcaaatggggctccatctatatcgcacatgttgtttgccgatgatagttacttattctgtcaagcctcttcaggagcagctttaaatatatgcaccttgcttcacttttttgagatggcgtctggccaaaaagtgaatgtgaccaagtcctccatttttttcagtcccaacactgattctttgctaaagaatgaaatcttttcaactcttggaatgcctaaagctgatgagcatagcctttacctgggacttccaaacatcattggtaggaacaagactacaattcttggttttctaaaaaaataaagtcgtcaattggatcaacagttggaatggacgatttccgtctcgtgttggtaaagaaatcctccttaaaacagttattcaatctcttcccacgtatgctatgagtgtctttctcattcctcataaaatttacactgaaattgagacactaatggcaaacttctggtggaagaccacttctagcaaaggaaatgggattatatggatggtctgggaaaggatggcagttcataaagattatgggggcattggttttcgatgattacatgattttaacctggaaatgcttgcaaaacaaggctggcgacttctcgcctcaccaaattcgcttgttagccaaatttataaagctaagtatttcccttggtctgatttcctgactacagatcttggaaataatcctagttttgtatggcgaattatttggcaagcaagagatctggttaaacttggtgcaaggcgtatcattggttcggggtccacaacaagtattctttctcatccatggctacctgataactcaaatccatatgtcaccactactcatcctgggcttcatcacaagatggttaactctctttttgatcttgataatatatcctaggatcatgagattgtccatgacatgttcaactcccgcgatgcatctctgattcttgggttacccttatgtttttcagctggtgaagattgttggccttggataggagagagcaccgtccatttctctgtcaaaagcgcatacaacctgctacagcaatcagtacaacatcagcctagtgttgataattctaggttttggcgctatggcagcttaagatcccctcgaaagtcaaaaattttgcttggagggttgtttaaaactctcttcccacctgtttacagcttgtcactaagcatgtaaacatttcctcggtttgcgctgtttgcaagagtgaacccgaatcaatccctcatgctctcatcagctgcgtttttgctcaatcatgctggcaatatgcacatcc

SEQ ID NO: 221945 - DNA, 3107 bp, Cannabis indica
atattttaaggtccaaaaataattttttaattttttcataaataggatttattatttattttaccaataaataataattgactaattctcattaatctcttatttcacaatgattgaaagaaatataattttttctaaaataatatatttctctctttaatattatatatgaataatattatatttaactaattaatatagttttatccaataaaacaaaacatctaaatactattaattatacagttcataatttccataattaatcaaaataataatttcacaaattactattttacccttaagaatttatttgtcatagaaattgttatcctattttttacacattgacgtggcaataaggatagatgatacatgccttacctttcccatacttgggcgaggtaaagtatccctagcagtccataaatgactacttaacatgtgtaacactcaaatatctgagtaggatggttgaaaagatattcgaccaagatgtagacatgtttataccgagcgaaacatgaaagatggaaattctcgagatcaatctcgttatttttagaacgtaaagactatccctgtaattacgggattgagttagagaataaagacgacacattttagtttcctatttcttgcattgtaattaaagaatttatttagtttcctattttactcattataggcaaaagggaaatcattcctctagtattaagtccttataaatagtggcctaatctcactatgaaggagatcgagaaaattgctacaaaaatacattcaagagagaaaagagcgatctaagagagaaagttgctcagagatcaattgtaagagcttccaagaggaagaacacttcattccttctctcaagtcaatacaaatacaaaggaagtaggttattactataattacggggtcgaacctcttcaaaatatagtgttcactttattttactatttttgctttcttttacttatcttatttaatcgctttatttttgactcacaatcgttggctagaagcaaggtcaacattttggtgctttcattgagagaaaaaacacaagcctttgtctaaattttgacaggtatataggatggttgtacaaactcgaagggaaggccttgttgatcaaggcgacccaatggtgacagatcccaacatgcaaactcctagaaacacgagaaaaccaccagggacaaaccccaagtaggttaatacacaacctcctattgtaggccatggagtgacttcccctctggctgggatcacaccaggcgtacaggagattggaaaccccagtacagcaactgattaaaccactcccaacaccgagatcccgtccaatactaatactcaaaggctagctagagacgacactgactcccaaatctgcgagatgcactgggctcatgcaaggcataataacactctgcatcatgatcagaaggaccttcgagcaaccataaaccttgcattggacgaacaaagatgtcaattcatagaatggagggaccgtgagatggaaattatgagggcacggtagaccaccattgatgattgtactaggcaggccaccatgctgataagaagggcctactaggttaccaatcaacaacaaacaactgcatccagtactcccttgaacggatcagaacggtatgcaactgggcataccacacaaactcacaatggccagccgtccaatccaaggccacaggtccaaattgtgggctaaacggtaaacggccaaaaattgccagaccatcccttgggaggaattacacattctaacaacttcaccactacagaagtctcaagacaacctatcaaccaaataagtcagacaccgaggccaccttgtacttcagtgtttgataggttgggcaccgtaatttccatctacaaaaggtaggggataagaaagttagagttggtcagcctgacgaatgaaaaacagattgtacataccgaccacattcgattgaaaattaaaagcaaaggtttcaaccaaaaatagaattttcaatcccagaagttcaaaactttgaattggattctaattttcactaaaatcttatggactagtggaaatgaacattgtaagattaatttcgaagcgtagtcagataatcagatgttatagttaaacataaatgagatttccaagtcctaaacctaggtattctatgataacctagaatagttcaagaacaggcgagattcatagcaaaaaattcaaaaattatacatgcatttcattgcaaatgtgtaaaagaaagaaatgaagaatttactcactgatttgaagctttcttgctctcctcgtatggtatcgtcaaaggttttcctatgatcttcttgaagaattttggaggaaatttggctagaaatcctttgctctggtgtttaagaattaaaacagctaaaagaattactaggagtccttgatcctatttatatataagcaatccgaaaaaggaattaatcattttaaaattcgaattttttgagtttctccccaaaagtatacattacgcactcattgcaggaagtgtaaccgtcaagcacactcaagtatcgaaccttgattcgaggtacaaccatcaattagcattaaatggacagatattgcagagacccctagtcagagtcacattagatcaccatccgacatcaaggacatgcgtcacccatccgaacaagactctaggctgagtgaagtccacgtccgaccaggaaggtcccgcgcagacttgggggcaaatgttatcctattttttgcaccttgatgtgacaataaggatcgttgacatgtgccccacctttttgatacatgggcgtggtaaagtatccctagcagcccataaatgactacttaacatatataagactcagacgtccgagaaggatggctgagaagatgttcgaccaagatgcatacatgtttatgctaagcgaagcatgaaagatggcaattctagagatcaatctcgttgtttctagaatgcgaagacaatccctataattaccggattgggtcagaaaataaaggcaacacattttagtttcctatttcttgcattgtaattatagaatta

SEQ ID NO: 221946 - DNA, 2450 bp, Cannabis indica
aaaaaatcaacaacaaattaacagaagtacaacataaaaaaactgtattttctgtaaataaaatcaaaaaaatcgtaaaaatatttaaaattccataaaaccgtatttttgtaatttttttgttgtttttgtgtatttgtgaaataatccctagcttctattgatttgtaattgactttatggacgttagtttgggcctttcctaacataattttagtagagtaaatagatttgaaaaataaaccctaagcagctatcttcttctccgacgcctccctcctctaatctcacgcagctctctctctctcctccctcctttctctcattcagaagaagataatgatgatcatgaaagcgataatgatcattatgacttctttgacattttgagttggaatgaggaatatgtttctatatatgtttagaacatttactattttcataagtaatcaaacctttttatgaatataaattatcatttgaagacctcattagtacttttcaggaattttatgactttgttatggattatgtgttatttgttatgaattttatgatattttatgaagtttttcttcttatagttgaggtgcacgcctcacgggactaaaggaaaatgcctcactacccgattacactttttaaaaccttgacacctagtgatttaagagatcttttggttcaaagatgcaagtctaaatactaatataataacaaattacagtaacatgtgatcttgaacctttggtccttggtaaaaatagcactgctggcctccgatgttccgtgtgcaccaactatggaacgtacgcaactcgcatttatgccatcccatatacgtattgcaccatctttagaagcagtaacatacatgccgcctgtagctgaatacctgacctgatgactaacaggatattgaataatctaaacagtggatgacacattttcaatatgaaatttgaattgattatacctgatttattgctccgccaacaccaatctctggtacattagcagagaggtaacactggaaagtgttaatgtcgtacaaatgaggaatgggatgatcagttcctgtgattttaatttttttttaaatcaccacaagtaatttctcacacaaataagagtaacacacaaatttacctgccaaaagaaaatccccagagggatggaaagaaacagaacgcacattgtgtgtatcctggaaatcagaaaaaacattagtgaaaaggaatgacatacataacatagtcacaactctatagttgaattcaaaggaaacgctcctacatctgatgacaaaacatgcaaacctgaatcactctaaatgccctctttgcggtcatcttggaaatatcaaagaacctaacacaccagaacaagtattttaaaataactggaagttaaatcttgttcaatattagcaggcaatcgagaccagtcatcaagtaaattatgaccactaggagaacagtatcatgtgtaaacctttaaaggttttcgattttcccatggatgctgaacatatcgatgaattaaaacaataagaaggcaacaggaattgaaatttatttaactaaaatatcattggataagatgaaactagagggcttactttattgtatgatctttcgatgcagaaataagaatattgctttctggatggaaatccaagtcgtttattggctgaactttataagagatgaaataagtaaacgcattagagtaggtcacacttttcagattctataaagtacattcataaggacttgaaccactgaacagaagaaaaaaaaacacggcacgctaaaggaatggagaggcaatcgtaggttcacctgagtgtgatcataaaatgtccttattacgggtcgcacaggaccatctcttgcatctggcaacatcatttgcttgattttagaaacctaaatcagaaattggctgcaaatgaattagaaagagttaccgcaaagaaaaacaagaagtaaaactaaaaaatcatcacctcaaaaagctttattgaagtatcagaacttccggttgcaatatacttcccatcaggactaaacctagcacatctggcaacattctaagaaattaacatgtcaataaaaagcaaaggttctattcaataaaacagtttcttatattaaatttatactcactttgtgctctgaaagatgcctcgtctcatgcttggggaaactctttgaagagccttttgtatcttgcacagcactagttgacaaaagactgcagaattagcctccatttttgtataatataggcatgcttttttgaaataatgtcatagtttttaaaaaccacagtgaatatagctccagatcacacccaaccagcacacaatacattgagtgatgtttggtattcccttaactagtaatcctgatggccacatattttaaggctgggatacagacaaatat

SEQ ID NO: 221947 - DNA, 3747 bp, Cannabis indica
cttgtacttttaaacagatgatcgaccagggagtcttaaatccagactttaatatcttttgttagacatgtagctaactgggcaacttttaatctcgaacatatgctttttatgtctaatcagaagtatgccatttgcacttacttttcttttcaatttgtttcttaacaaggctttaaattttgcttaagtttagcagtgcttgtttgatgttgtacggtgtaggtgcccccaagtgatcgagcaaacttatggtctcttgatcacttgaaattcacaaaatactatagacctttccctgtgtattttcttagagggacctatttgtacgcatgttaaactaaaaaataaagattaactttaagaagttcacccgttagcaagttgtttgacacaattttgaactgaaaaaatgtttttattcattaattggtcttacatatgtgttgttcttgtgcaacgtacatttttttgattataaaagcttacaattataaagtcttcttttattcatcattttggctacccctgtgcggcatgccgggtaggggccaccactgaagagtggtggaaacttagctcttttatcctaattcttgtacggtgagttatacaagaaccactaatgaagagtgttgtttttgcaagttggttattgatagtactttttgagatgttcatcattcgagtatcttggtaggataactagttccatgtgtttattgttcctgccaagcttgtacgcacatttgcttgttatctctgtaactttgtacagaccttcccagtttggtccaaacactcctgttgcagggtctttggtattcaagaatactcttcgaagcactaagtctcctacaaagaattttctttccttgacttgtttattgaaatacctggaaactttttgttggtaggcatgcagctttaagttggcttggtctgttttttcatctatttggtcaagggattctgctagcattgtgtggtctacatctttgtcataggctatcctctaatgggatggtggttccaattcaatgggtaacattgcttcatagccataggttaatgcaaagggtgtctgcccagtggccgtcttctcgatggtcctgtgtgaccaaagtacatatgggagtaagtcagacccattgccttttgcctcttctagatgccttttcatagtgtcctttgagggtcttatttaaggcttcaacttgcccattcatttgagggtgcgcaactgcggagaagctttttaataatgacttgtttgttgcagaagtcagtgaacatgtcactatcaaattgtttcccattgtctgatacaatcttctatgggagtccaaactgacatatgatgttcttgacagcaaagtcaaggactttcttggaagttattgtcgtcattggtttagcttctgtccatttagtgaaatagtcatctacgaccacatcccattgtactcctccttttcccttagggagttgactgattaggtctatcccccacacagtaaagggccaaggagactgtattagaatgagctcatttggtgaagctctcaggatctttgagtatctttggcacttgtcacattttttgacagtccattgaatcctcgatcatagtaggccaaaaagacccttgcctgagtatctttttggaaaggctttgccccccgacatgatttccacagaagccttcattccttttttatttatagtcgttgagcttctatcttggtgacacatctgagaagtggcattgagaaaccacgtctgtacataaccctattttggattagatactgagtagctttcctccttatttttcttgcttcatttttgtttttttggcaagattcctatctagaggtataccgttatgggtgtcatccatgttggggtgtctttcaacatgtctatttcttctgaaatagtgatgcttagttcttttaagaacttaatggacaccaagtttgccatgtctatcaaggtgttagtggctagtcgagtgagtgcatcaactgttgcattcttttctttgcagacttaccttatagtatagcctttgagctgacttaataagtcttgaaacttgctcaaataggctatcatttttataccttgggttgtatattcacctaggacatgattaacgaccaactgggagttgctgtataatccacgtaatcttcccgcactttgtgtgctaacttgaggctagaaattagagcttcatattcagcctcttttttggagcctttgaaactgaactttatttcccccatgtttaatgatggcaatgccggcaccatataggtggttagtacagcatctgtcaacatgcaacttccaggctaaattttcttgctcttgcttctcctcttactcttgcttattttatctttgtaggagacttcatgtccaaaagggcttggatcttctcagggttttcttcgattcccctgacattcataataattccaaggaacatgcatgagcctactccaaagaacatttgagggggttaaacttcatgttgtactctcaaaggatctcgaagcattcatttaaatcctctatgtgcccccaccccttttggacttgaccaacatgtcgtctacatagacttccatgttacggccaataagatctttgaacatcttatttacaagtctctaataagtggcccctatatttttcagcccaaaaggcatgactttgtagtagtacaggcccatgtccattaggaaacttgtatgttctttgtctggtggatacattatgatttgattgtaacctgaataagcatccatgaagcttatgatctcattaccagctgtaacatctaccagcttgtcgatccttggaagtgggaaacagtcctttggacacaccttattcaagtcggtaaaatatatgtatactctccacttgtcgcttggtttggacaccaagacagtattggatacctagagcgagaagaaagcttcaatgaggaagttgtcgtcactcagccttttgactttgtctttcatagcttgtgcttgctctttatctagtaacctccttttttgtgtataggtcaaaagtttggatctatgttcagggcatgagaaattatcgatggatctattcccaccatgtcttcatgtgaccaagcaaagacatcgaggtttggctttagaaattttatcaattatgattttatttctggcgctaaacccttccttatttttgatcttctggttggaagagtggggtcaatttctacttcttctaactcctctactagtccaaagctttctgtaggatccccaaagtaaggatctaatttttcctctccaccttgggctcaagttccttgccctttgtcaggctcttagttagagctctttccaaacatcttttctttcttggctttggacaaagccaagttgtagcaatgtcgggtaaattgtttatctccctttaggcacccctaccccatgcctttttgggaaatttaggcataaggtgataaattgacataactccattgtcaatcatttacctagaaactgtcatgtttcttatttgtgcagttatgaacagggggtcatgatgagggaacctgacctagccaacatctccctctatgaaggagatggcaggctctccaagcttaagctacttggaatctctttcctccatagcaaggatgtcagttttttgcaaatgacagaggatccaagcatagca

SEQ ID NO: 221948 - DNA, 1582 bp, Cannabis indica
taaatagacaaataaatttataaaaatagtgatattatattttttaaaattcaaataatgaataagaaaacaagaaaaattgaaacattaaaaaaaattactacaaatattacaatgacatatgataacctgtaagtttataccttcatacatatacacatattcattcagtttttttttttatctgattacttttaataaataaataaaacattattttcaacttttggacaaacaaaatttaaagaaaaacacttgtatagacactactacaaaataatcttttatggactattttttccacaagttttataaaaagggaagctaaagggtgtagaaatacctgtctattgaaaatcgacatttagaggtggttattttctaaaaaccataggtatagaattagactacatcatttagagtcggttgggggtttgggagtgctgaatggttgtttattaaccatatttcatcgattattaggaaataatcgacgacataggcacacaaaataactgacacgtgtgccctatgctgtcgattatttcctaataactgaaaggatagggttacacaaaaatcctatcagctctgtcttcttcatcttcttcttcctcacaaaaccaactagcagcagagaacgaacacccaaaaccctcattaccttcgcaaaacacctctcctatagcccatatgccctattttcgcaccatttgagcctattttttaaaatcttctatttttaatacctaaacatagacacgaaaaaagttttgattttttttcttcttttcactataaaccgaacccatacaaagaaagcggtggttataactccaaccaaaaattttagtggagaaaacgttgaatatcaacgtctattaaggtataaatatgatttctattcattttagtaatgtacattgctttatttttcgtttttgtaaatttttttagaattttttcatattattaacattattgttgtgtatgtgcatagtggcctgactttttgcaaaattggtcatcgaattttgcttataaggtaaaaatttaaaccttaatatatatatatagtatatatatgtattttgtattttattgaatatgtgtatatatattttgtagtgtgtgtatatattgtgtattttatttatataaatattataattgtattgtatatattctaagtaatatatatgtattgtgaatgagaatgagataagagagatttaattagtttccaaataaaatttttaaaaatttattagtgtgagatataatttattatatatgtatgtatatgtgtaaattttttaaaaataaatgtatataatttagtaactagttattttttttttataactaataagtaattaaataattaaaattctaattttgttgtattttattatattgtaggttgtaagctaattttcaaggtttggaataatttggtattgatcagattttaacttgctataggtacatacattcactaactttttgttattaattaattattaatgcatgcttagtggagtttgaataacttaaatattcatccgtagtgaagtaggtt

SEQ ID NO: 221949 - DNA, 3065 bp, Cannabis indica
ccgacacaatggttgtgtcgctatgatagcaccaattaatactttcttgggtgagtaccattcttaaccagtacgatgattgtactgccgaaccgacacaatggttgtgccgctataacatcaccaaaatcatatacaatcataacataatatgtatatatcacacatacatgcatttacatatataatatgttctatactattcttacctcgtttccgaattcaagtaagttggccaacctcaacggaaaatctcgtgctggatgggtgccctaagccacattcacataactgggtaaataacacgctaaaaaccctaacctgggtaactcaaactcctattaagggttaagctattggtaactactaaaacaataccccaaaaatcaaggaaataaccaaccaaggcactggaaataacacgaattgacaacacgaaaaaagttcgagaaaccggtttcatagggcctgggaaaccagttaaccaatttcaaccaagtaacccaaaataatttgaaatcatgcccaaatcatgtccaaaccaaaccaaacttttcagaacacttgtaaaaccattctaggacaatttccaattgaaagcagcaagaaaaacacactaaaactcattatgccattgttgagccaaagaactcaaacttgctcaaccaaagaattaagcttcaaaaccagtaaattcatacctaaaacatccttaccaaacatcataaaccaaatacatatcaaccctaacttccacagcaacaaatcaccattttatagactaaaactcagtataaaacttgtaaattcaagagttaaaaggtttctagggttaccttcacttgcaacaccttgaatccttgctgaatgcaagcaaacaataacaatctaaggctaggttcttctggtcttgtgggagccgagcaaagagagagagataagcttctcttgatttttcttgttttttccttaattttctattttcccaaaactaataactcaagactttgctgaataattcaaaatggctagttgccatgctatggagaagccacctaatccccttaaatcaaattcccaaaataccctttaagcttataacttgagtaaaactctagggataaaatggtcaaaaactataaccccgcttaaattcggtattctatttatctctaatatttatctcactaagaagaaggttctaaacttacccatatgactcgaaatggccatccatcgcatttttcgtcgtcgtcgagcaaaaatcataaaattgtataattcatatttaatataaataatactcctaaagtttaataaaatttccgaatttgagaaattataactctagtgcccacttttaataacgtgacccacaattaaataaattcataaataattataaaaataatatcaataattaacgctaattgcctttactaatccatattctaaaatgcggtcattacaaaataagagactttacgcagggtcgaccttgagttaatttggaccctagaaaaaataatttttttggaccttttttataacatattttaaaaattattaaaaacatgcatgtatatttatataaaaaaaaaaataacttagggccgcctccgactttatgtaaagtcatcacttagggccgcctcgtagtatttaagtgactatcttgaacaatattgtcaataaaactatttaatttttttttaaaattattatcattataaaaaaaactataaagtataattttctcaaatatcaaagaggttcttagcaactaaaacgaaaacggtgtccctactataaaatattgagaaacttacaaaaatactgtcacacagaaattctttcaaaaaaaaattctaccccacaatataaaaataaaaaaaaattaaaatttgagtatatagtttcttcctaacaaattggagttggagaattaaccatagaaaccatattgaccgatcgacccgacccgacccgacccgaccaccaacttatatgtaatttattcattctgttctctgcctccatttcgtggaactgtgaagctcttcaccagatcaaactgaccaaccaccgtctctctctctccggcgccggactggtctcacctcgaccgcacacggtaactgaaatttcctaattttttattttcaaagtatattttgatatagcttttctgattttgatttcttgaagcttaatacactcactcactccttcactgggtattttgttttgttaatttgtgaaaattatatatttgaatcaatatgtttctgctctgtgttttatgtttgctgaagaatacttcttgttttgtttcattgtatttgagatatgttttgggaaagcagtaattcataattcaattttaatgacatatgtaagagatgttgaaattgttgtttcctgataaaatttaacacttgtttgatggtgatgatggtgatgatgatgatgataatgttattggaaatggatttgatgatgtagaagaggaaatagaaattagaaaccaatgtgttgatattgaggatatagaaaccaactttcttagcaaaaaacccttagttttaacccttcatagttccctgaacctaactagataacacctcttttgttacattagattttttcatagctatgtcaataagtctcactcattcacagtatcattctttagtggctggtttgtctttttccctcttcttttggtctatggaacatatttgctttatgggattccattctattttttttatcttttggttagtaccctttgaatggtatttcttgtttattcttgtaattctcaagctttttgctttgtatatgataaatggtaatagaaaaaaatcctaacttaataatttacattgaaaaaattgatttctgaaatacccattgatttttgatcttcttattctaattaacttcattgtgaacccaatcccaacctaataatatttaaaaaaatgatttctgaaatacccattgattttgatctcgtcttctttatttgcattgccatttatagttgaaatagagataag

SEQ ID NO: 221950 - DNA, 4644 bp, Cannabis indica
gaagaatataatttgactttgtttagagaaaaataaaaacttagtttagaaagaattttgaaaattacattaatgcttacttaccttaactaaaataaataataaattttacaactataaacaatctcatattttacactttattataagagcgtgttacattgtgtttatcaaaatttgataataaactaatacaatttatattattttcttttaaataaaataaaagttaattagtttgctaaatcagtcaacagacaagattataacttagtatgaatatcattcttactaaagattcgatcatgaaaaaaaataaagagttctaacaaaattatgagcaatcttgttaggagatagttttaacaaaaaacataaaaacattgcttaaattatgaaataattagctacaattatcaataactaaatcaaaaaatgaaaccatggaagagacattgcttcgaactgctttgacacaacatcccatccctgatagcttagccactacccagcttaaagcctctttaattccaatggcttcaataacttccaaaactactctactctaccatattgcaacccaatcagagcctccaccaaatattcattagcatcccgagccactagcccaaatgatccataagcattttggacaccaaagagtgccacatccacaataattttgatcacatttagatacgacttaaccaaagaatctgctccatcactcctaatctcaataggcaaagaagtcgaaaagtgttttccttctccacacgcttcttcttttaattccaaactaacgcatttctagcattccataaaacttaacataccaattgccttttcacacaccttttctttactaagatttcaaagaatataatcaaatcaagtggagaatccatcaaaaacagtcaaacacacaccaagttgaaccattttccaacgacggactagaaacaagtaagtaagaccatctttaatggatgatgtatattttgagttaactttggtccaaaatataccataaaactatatttggctcagttttttgtatttgtgttttaatatgcaaggtacaaattagttataaaagtcaatactaacattgatgctcattgaaaatatacaaaataattaattttatttatattattttaatatcttataaatataaaaatatttttcattgatgaatagtattaatgagtgataaagaggtaattaaaaaatagaagtatttattgtgggttgaaatttggctcatgctattttttgtgccaaatttgacacaatttttagctcgagccaaattttacacacattaaattttaacaaaatattctaaaaaaatgtcaatacaccacatttatagctctccaatataaatgctctaaccaaatgatgaaaattagtttcatcacctcaatgatgcactggacaatcacaagcaatcaaaacttgtgtctgatgcaaattacgaacgaactttagggggaactttaaggttccacaattttcgtcaggaatcctgagtttgatgcactacgcactgtatagaacaaaaatataattttgattaaaccaaatattgtagacacaaaataggtttaatcaatctgctatctataaaaatattgtaactaggcggcataatacaccaatcaatatcaaattgagtgagcaatttagcccacaattcttctacaaaatcacattccaagaagagatgaaagatattctctcgatgcacatttctcatttgtaacattatgtagcatagaaacgattatcacctcatatatatattttttttgaatggaaatatggcaattttatttaagtagaatcagccattacaatgtttaataactccaaagaagagttatgatgattaaaaatgtgaactggcgagtaacaagcactacgcgcaaggaagtgtgcagccttgttaacagaacgcttaacaaactttaaagaaatattacccaactcagccatgagttgtttacagtccaaaaaatttagggcataaaaactaacaatttgcatattactgttgatgccttgtactgccaccaaacagtttgtttcaatcgacacactatgccaagatttgccttttaaccagctaagggcttccttaataccacaagccttagcagtctcaagagagacatggccaatgctgcacttggagacagcttctagaattcttccttcacagtctctagctatgaaaccaaccccaaaagaattaattgatgcaaatatagctttatcaacattaacattaactgtgttagtgacgggtttagtccaatgctcaatatccaatccttgatcattttgaagaagaataggttccattcgattcttctgagcacacaaccattgattaaggtaagatcttgcttcaagaactacactaactgttgttctaactcttcctttccagaggacatcattccttgcattccatatttgccaagccaccattaggatttctgcagaaaaattggcagtactgccttgtgtaatgtgtattgtcatcaaaccagtctttaaacacgcttgaagctgctggtttgagattaatgacagatctagccagcatgagagagcaaaaggacagaggacaaaaacatggaggattgattcttctgcattattacaaacaggacaagaattattgacatatacatgctttgtttggagctgggttcgagtaggcaagcatcctgatatagctctccaaccaaaatgcaagaccttcggtggtacctttagtttccaataattcttctaaaaatctccatgcagttgaacttcatcttcattttgctgcataaacctatatgcactctatcctgagtaatgtcctgaggtttcaaaaatccaactccaatgatcagctgtatttgcattaggaaaaggatccccaatataagagcacgatccctgttatggaacagattagcaacaatatcatcatcccatctggactagtttatctgcattaagctagcaacacggttcccagccaaggctgggtgagaagaactaatatagggctgatgtatgttaggtaaccaaggatcagtggtaatatgtgtgctcaagccattaccaattcgaattctcgcaccagcattaatgagattctttgtttcaaatatgtttttccaaatgaatgagggattatttccaagagaggcctagagaaatgatccatcagggaaatatctagatttgtaaactttgcaaacatgggaagaatcctcagttaatagtctccatgcttgtttccctagtaaagctaagttgtactctttgaaatctctaaagcccaatccaccaactgtttatgcttgcacaatttttctccacctgatccaactaactccatgcttttcttttgaaaattgccacaaaaaaagtactcattattctctcaaggctttgacaagtttccaatggtagcaagaaaacagacataacatagcttggaagtgcttgtgctactgttttaaggagagtctctttcctgctttggagagaaacaaaccttcccaatgtttcactctattttgcaacttgtcctttagaaagcccaaaatttctttcttgttccttcccacaatataaggaagcctcaaggtaaaaacttgtcccatctgcttcacgaatatgcattaactaacagatacgacttctcgtgtcatgggtggaattgctagctaaaaaaagattgatgatttattaaaattaacaatctgaccctgaagcatcttcaaaagtcttcaacaaacggatcactttagaggcttctctttcattagctatgtagtataggtagttatcgtctgcgaaaagcatgtgcgagataatgggagcaccgttagcaactccacatcccttgagctgaccactactttaaaagtgcttaattaatgatgagaagccttcagcacagatcaagaacaaatacgatgaaagaggatctccttgacggatgcctattgtaagagttatagggcccatctctcttccactattaagaattggggaagcggacagaagagacacaagttagaaccaactatatccaatggtcattgaatcccattttgcacatcatatccctgagaaattgccactcaacgcagtcataggctttactaaagtcaaggcttagagccataaagccttctttaccccttcttttccttttcaagtagtgcatcacctcatatgttgttatactatgagatagtgaaaaggcttattagtaatttaaaattagtgtgtaaagtctataaatatgtaattagagagtcattaatagatatggaatgagaagtagaacttcgattcaattaggagattgacactgtcttgaatagtgcattttaaaaaatttatcatgtctcaaaaaagacccattattattatatatgtaacattatagaagaaaaaaaattgaacaaatagattataatgcatgttgtgaacaataataatcatgcagaatatattagctgttagttaatctatgtgacctatactcgaccttaggtataggcaggctaggcctatgcataaggccataaggcccacctaacccaatggccaaaaaaa

SEQ ID NO: 221951 - DNA, 2909 bp, Cannabis indica
ttgtaagtaaaaaagtaggtataagcgtgtatgagtaattttgtaataaattgtgtaaaatggatttttcatgtaaaaatttcttatatataatggttaaaataaatttgttatgattatatgtagttaaaagatttttttccatgatgtattaattgtttctattttatttttataatatttaatttaattattatttttttaaaaaaaaattatatagattctagtccagcaaaattggacatcaaataagcatcccaatttcaagtccatcaatattggactagaaatgtttttttagtccaatattattggacatgaaaaatatactttttatgtcccttgatactatgtccaacacaaaaaggactaggaagacttatctagtccaactttaatggacataaaatgactttttgtagtagtagtgacgttatttctcagcatataactatggaaagcaagctgtaaaaaagagaagaatgcatcttcttactatgtctctcaacttaagctcaacaaaggataggaaaaattatgaaagaagcaagcacagctgagcgctaagggatcttaggaagccaagtgagagggagtcaaagcttaaagtggccacttatattagagttgacgttatctattttggaacatttattcttgaattacagtgtaatgtttagattattttaaacaatactttcttgattcctaatttcaaaagtaatttagtttcgcttccacttttagttcaataataattttctttttgttttgccttgattttgaataattaaaaattattttcactttggtggtcttttcaaattatcattgaattccttagccttctctttcaattttgtgaataatgtgtgtaagagctcttacattaaggttacatccctattattatggcacaaaagattggctctcatttctgaagcaaagtttgaaggattaattaaagctaaaattcttcctcctcttgatgcttctggttgggatacttgtgctgattgcacttgtagaaaattgacaaaaagaagaaagaagactgctatctgtattcaatctttgttataaattattcacactgatattattggatcttaatccactacgttgtgctaacataagtattttatcaacttcatagataactttttttctcgatatggcttcgcctacttgatcaaagaaaatttgatgctaaaaaattttcaatacgttcttgagaaataattggaaagagtcatcaaatttgttcattcagatcgtggagaagaatattatggtcgttatatagactttggacaacacacgagtccttttgcagaatatttacaagaaaatggtatagttgctcaatacactatacctggttcaccagagcaaaatgacattgttgaaaggaaaaatctcactctaatgaacatgataggaagcatgatgagtagatcaaagctatcatagttctaatggggtgaagcactcatgactgctacttatattttgaatcgtgttctaagtaaatctgttcccaaaactccttttgagttgtggactaggagaagcctagtttgaatcatcttcgcgtacggggtctccagctgaagtaagaatttatgatcttaatttgaaaaagttagatctaaaaatagttcgctgttatttcattggttatccaatgcactcaaaaggctatatatcgcttctactatcctactcgtggttcgcaaattgttgagtattagactgttaatttttttggaattcgatgttgctgaaaatattccttcaacatatcttgaaatgggggagtcatctaagggaaattttaattcttatgtctctttcaagagatgataataatagcagtcttattcttactctagttaataacactcctattgctgatgaatatattgctcctgatgtcaaagatgacaagggtcttataattgatgaacgacctattattgatgagggacctattatcgaagaaatttcagttgtggaagatgtcattcaaaataatgatagaggttattctagaagcacctcctcaaagaaaatctcaaggacaaaagaagtcaacaaggtgtgataataattttgtttacctttgagaatgagaatatgataatggtcattttgtggaacctatcacttatagtgaagcacttaatagtccacattcttcaaaatagataaaagctatggatgatgaaattaagttcatggacaaaaataaatgtttgggagttagttctattacctaatggttttaaaccaataggttgcaagtggatttttaagaactaaaaagatgaaatgggacagattgaaagatataaagcacgtttaatggcaaaaggctttaccaaaagagaaggtaatcacataccataacttcttgcttgttttcactaaagattcattcaaaattattatggatttagttgtgcactttgatttagatttacatcaaatggttgttaaaactgtttttttgaatggagaattgagtgagcaagtctatatgtctcaacctaaaagatccaaggaaaatagaaataaaaatttggtttgaaaattgaaacgatccatttttattcttaaacatgcatcttgctagttgttcttgaagtttgataaaggttgtgacatcatttggtttcatcaagaacaaatttgatcactgtatttacataaagatctagtgggagttgtcatattcttcttattctttatgtggacgacattttacttgccagaagtgatttgtcattactaaatgagaccaaaatttttatgtctaccatttttgatatgaaggatcttggagagatatctttattttggggattgacatccatcgtaaaaggaactaaaaagttcttagttta

SEQ ID NO: 221952 - DNA, 1568 bp, Cannabis indica
acaaaaccttgaagctacacaaaaccttgcccatggagctgcacaaaaccttagagttgcacaaaacattctccagaaacttgaagctacagcaaaagttgcccagaaccttgctcagaacctcttagctgcagaccttgcttacacactccaagaacaaaaccatgtccaagatgcaaatcatctccccaatgcccagggagaccaacccaacctttataatttacaccaagctcaaatacgccatgcccataaggtcaaagatgcccataaccttgccgagaacattgaagctactgggaatcttgccgacggcctcgtgaacctctattcccatacacttgccaaaaatagagagaatctcaataatcagttgggtgacctaaaccgccttcaaatagacatgggaaatgcccaaaaccttgaacgatacatcacaaatgaccggaacctcctaacccaaaaccttgcacagaacatggaaaataaccaaaacctatcacagcaaaaaccccaagcccaaacccttgcacaaaacatcacagatgcccagagatttgcccaaaattttgcccagaacttccaagccaacaaccttaatcataacattgaagcttcccaaacgattgtcaataatcttacaaatgcccgtaaccttctccaaaacctccaagctcaagacttagaagctgcccaaagccttgcccaaagccttgcccaaagccttgcccaaaacattgaagatgcccagaggcttcaccaggacgtcaacgatgccttgaactatgctacgaatctcagagccagatatctcgcagatgcaggtatccttgtccaaatgattcaaggtgcccatcacattgagcccactactgttcaacgtagctcggtgcttgttacaagtctccaagtccacaaccttatccagaacctccaagcccagaatttttctcgtaaagtcaatgttgtccagaaccttgatagacagctcagagaaactcaagcttcccagaacgctgctgaaggcattgaactttgcaagaaccttgctcgggaccttgttcagacccttgaagctgctgacgaattcgttcctcagaaccccgaagttgtcgttcctcagattcccgaacctgtcgttcctcagaaccgtagaaatgcaggtaatcttcctaccgagcatggtgtagttcgccaaactgaacctgtccatatgtatttacatttgctctcatctcaacagaaagaagactggaaccaaaacacagtaccttggcaattctaaattgtatgtacaaacacatagtaggtttacaggagaagcgcatgaagatggcaaaggtagataaggcattggagggagctgctcgacgaggcctacttgatgtttttgaaactataaataatgcaaatccttcaattctacgccacccaattgcatttggtgttttcaatgtggcagttcgatatcgtcatcgtaatatattttctcttttacaaagaattcctagtagaaatgcgattacaaatacactcagtatgactaaaactggagaaaagtatagcat

SEQ ID NO: 221953 - DNA, 1796 bp, Cannabis indica
aaatgtaaaaaaaaaacattctttgaacgtaaaaatgtaaatattttacaaaaaataatatcttatgtaattattcctaaaatatattccaacaatatcagcccacatgggcgcctacagttggcttcttcatacacgccaaccccatgctcccagtagagtgatatatcaatatcacatacaaaatagttttaatagggatcaattatcatcaataataaacatacacatattttaatagtatcaaattattattattattactattattgttgtttgttttctgtttgtagcccttaacttattttattttgcattttcatccttttgagactataatttagagctcatttttattgttttggtgtgtaattttcagtgtagaaaaatcatagcaaaattttttaactttttttctcatcttttctctttaaaaatttatgagattggttagcataatgacataatctttcttagaaggttatagatgattccatatgcaaactcatctttttttgaagtctttctctcttttattattgattacatgacctttatttgctttcttttaatatttattaccaaaacaaaattctcaaactcatttggttacttatttgttactttttatcaacgtttatttttatactaacgcttttgtccataatcacctcctagtggaattgattgcccgatttatattacaactaccggtagtagaagtcacatttgggggttaaacaacacccctaatgaaaaatattaatagttgctaattaagagtttttgtgtttagagcactaaaaacagactaaaaataatgtatttatataagctaacaaagttctctagaagatactaaaaagattgagatttaaccctaaaaaaagatagaaaacgtgcttcggagccgcagccccccacactagagtcgcgactccaccacctaacaatcctttttttcatgcgagcttttacccttttttttcaacattccctccaagagtgcagctccctatagtggagtcgcagctcttgggccattcctactattttgtctcttttggggccatggtttcagatttcggggccatgatttcagatttcggagccatggtcccataactcgttagtttttccaatttttatctttctgctccattcttgtttatgaacattgtcaaactcaccaagatgaaaaataactccatttgcgcccacttttctacaagtttatggtgcgtttggcaacactttttttaattagttttttgttttgaaaattagaaaagtaaaaataatttctaaaatcatgttctataaatctgttttcattttttaattttttaattgagaattaaaattttaaaaactttgaaaacaaaaaaaaaatcactacttttttattttttttaaacaatttattttcttaatcaatattttgatttctgactctaacctagactttggaacacggacggaccctagccccaactccgaactcgaacccgacccccgatcacagcttcgaacgtgaaccaaacataaataaaatcaaataaaaataaaaataaaatttacataacacacttttgttttcagtttttaaaattaaaaaataaaaatagttatatagaacgtagttttgtttttcaaaatcaaaatttaaaaataaaaattttacttttatttttgtaattaaaaattttaaaaacaaaagcattaccaaatgttatcttagcttatttctcaatttttaaaatttttattacattttcttaaaacaaaaaaaaaaa

SEQ ID NO: 221954 - DNA, 4152 bp, Cannabis indica
gtggccagcccagtcaactgatccatacagtcctctctatctttggctggatcactcattacactgcttattcccatttctgagaagaagaaaattagaagcaatgctactgtggcagtgaaacttgggaagctaaatttttgtgccattttgggtaagaacagactaaaacagaagaatgagcgtttgactttgggtgtgttttctgtggtgttcaatttggcttatagccttaaattatatataagcttctgctgtaccttttttttcagtttgtttcggaaattatataattatacccacgattgtgagaaaaagggtccacactgatcagcactatggaaggaaatcgtagtttgatgaagaaagtttcacaatcaaatgatgagagagaggaaaatagtggtgggatgagattcgtgagctgagcagtatactaatataaaaagaaaattgaattgtttttttttttataagaaagaaaagaatgtgaaagtaattgttcataagtaagaaaatgattgtggaatgttatgtatatggaaggaaaaagctagtatggccaagtgttctttctcttttctttcttttggatgaaaagtatgggcaggtgttctttttcttttttggatgaaaagtatggctaagtgttggtaatatgaagagttgagaaagagagtaaataagtggatcactaagcgcactacttcaccaaacccaccgagccgacaagaacaaaaccattgacaaaatgatttccgtttgggatggtcatcaaatggtgacatgacatcatgctaacatatttatgtccaagctaagtatacagttttcatttgcaatttaattcaaatccactgttcaataaggtttattaacaatttcatcctaaaactatttttgcatagaagttttatttatcttcatttcttattcatgtattagtgaacttctttatttgtagtagttatcatgtagtttgtttattgttgagaaagaggaattgaatattgaaacaggaaagaatgaaattcagttagaacaaacaaggaagaggcaagtcttttatagcttggacctcagtacatatcagacctaagaaaataggacttaacttttaacagataaaacagaataaaccgactcctatcctgacatttgtaacaacaactaactgaattaacagaataaacataaaatgactaaagacccataaacaccaataaacactgaagatggagagtgtatgtcgtatactgacatcttggagatatgtgaagtgagaattggtgacgacaggggtttggtgaatgcatcagctagttgaagtgtagtggaaatggggatgagtctgatggagcagttggtgatcttatctccgatgaaatggcaatccagctcaatgtgtttcgttcgttcgtggaaggttggattgtttgcaatgtgtatagcagagttgttgtcacagtagatgaatgcagggtgtggttgaggtatgtggaagtcatttaagaggtactgcagccaagtgacttcacttgtggtggcagccaatgctcgatattcagctttagttgaacttttcaagatagttggttgtttcttcgtgcgccaagagatgaggcaatctcctaggaatatgtagaacccggttgttgatcgtcttgttatggggcaagatgcccaatctaagtcggagaatccacggagatgcagcgaagaactcctggaatagaggagcccttgtccagggttccctttgatgtatctgaggaggtgatgaacgacttgtagatgagtagtacgaggatttgccatgaattggctgagtgtgtttacgacatatgtaatatctggtctagacaaggtgaggtagagaagcgttccaacaagttgtctataatgagatgtgttgtccaaagtttctccttcttcgttgttaagcttttgtttagggtccatgggtgtcttgctgggcttgttgcctatgaaactagaatcttcaagtaattggagagtgtatttttttggcatataaattacccttcctttgcagggaaatctcaaaaccgaggaaatacttgaggtctccaagagctttgaatttgaatttttgatgtagtgatgtctggagctggtgtagattggtaacattaggacctgtaatgataatatcgtcaacgtacacaagaagagctatgaaattatcatcggatcctttagtgaacaaggtgtaatcagcttgagatttcttgaatccttcttggagaagagcatcggacaatttcttgtactattgtctggaggattgttttagtctatagatagatttgtgtaatttgcacacgagattttttcctgcattaagagaagaaggcagggcaagaccttgtggaagagacatgtaaacttcttcgttaagatctccatttagaaaggcgttattaacatcgagctgtaaaatgtgcccgttcttaatggtagatatagcaagaagtaatttcagtgtaaccatcttggcaaccggggaaaaagtatcaaagaaatctagcccttcttgttgcgtgtaaccttgtgcagcaagacgagcctttagtcattctatgctgccatcactattgtatttaattttgtaaatccatcaatatcctatagctcttttgttggttggaagaggaacgatggaccaggttttgttatctaaaagggcctttaatttgcattgcatggctttcaaccaagctaaggtttgtatggcttcaaaatacgttcctggttctttgatggaagaaactgcgaaaatgaacgctttgtgagattcagataagttagagtaggaaatgaatttattaatgttatgtggagtggaagaataatcctggatgagtgaatagcactcaaaatccttagatagctcggtggttttgattgtctactcgatcttcttggaggatcctgggttgtctattgtgttggagcttctggtggaacagcaggggtagaatctccctgtgttttattgacattggtacttgtttcatttatctgaatagagggatttggtgcattactaggacctgtaggatactcacagacaggggtgttagttatcatagaatgagggagcacaatatgagtaaaaggatccatgttagcatcctcattattaagtttctgaaatgggaaaatgttttcatgaaacactacattttgagatacaaacatgtgtctattgttgatctcatatagtttatactctttgataccttaagggtatcccatgagaacacaagttcgagctcttggggagaatttgcttctctgatttgacaaagtggatgcaaaaaccaaacacctgaatgagcgaagatgttgataatcaggcaacttatcaaaaaaaaattcgtagggtgttttgttatctaataaaggagtaggaattctatttattagatatgctgctgccaatacacattcattctagaactttatgggaactcttgactgaaaataaagagatcgagcgacattgagtaagtgttgatgcttcctttcagcaatggcattttgctcatgtgtttcgacacaagagaactcatgcacaatgctgtgtttagaaaacagttccttaaacaccagttctggtgcattatcagaacgaaaaaccttaaaaatctacttgaattgagtctgtatgtcaggaattgaggtacaatgaagctaacatcaaacttatgctgcattaaaaaaaaaatccatgtgaatctagaaaaattatcaactaaagtcaagaaatatatgtggttcgtgtgtgacacaatatgatatggtccccaaacatcaccatgaacaataatcaaagatttattagaaacagtattgctatttggaaaaggaagttgtctttgtttagaaattggacaaacataacaaggtgtacttttgtgtaaatcagaattttacaattcaaagtatcttaagtaaattcaaacgttcattggataaatttccaagacgtgagtggcaaatctcagccgagacagagaagacatgacttggatttggcgtagtatcaagaatgtacagatctttgacagtactacctcttccaatcgtcctctggctgacattgtcctgcattgtaaatccatt

SEQ ID NO: 221955 - DNA, 3174 bp, Cannabis indica
caccaattgttctacatcattgctctttttcttcttcctaaactcatactttttattatgatttttattataatgtctaattcagagtggtttcttttagtgaaggattatttcaaaacccaagacatgaatctttaatttttatgatgaatattaatttcttagtttccattataacgaattgtttctattttctatattcaataccatgattattgttttaatcttatttagattattactaaattaagttttactttaatctattatcatcttaggattactatagtgtttgtgataaattgtagtttttaatattgtcaaaggtattatatgcttcattaatttattgcctaaattagtctatatccattgattttaaagctttaccctagttaaataaattgggaggacaagagcaatcaagctcagacagtgtcgacaaaatttcaaacatcaaggcgacaaagatgatggttaataatcaaacattactaaatactctaatcaaaacagaccctaaaaagagtgggtcactccctaagagattcggagccatgcaagtagctcatgtatggtttcgagtgagccaacatcgctccctgtggtaaaattagattaccactcatagtcaaaactaccccgtgacaaacatcactatgactactttcatagtgatcggcaccaagtctctttggaaggtcaacaccgaacgacctttgagccatctcacatatctaccatatgtttgtccagttctcgataacagctagtatcgaccatttccttggcaattaaagagtagtatgtgaatgttacaacacatcgacaatatttgccaagaagacttccttgattgtgctaacaaccaagggatgaggaagacctcttttgttgtcaagacagccaaggggatgaagaaggcttagacgatgaaaacctataaggttaaagaccaaggaaaaaatagagaccgcacctacaatcactctaaggtgaacttgagatggagaagacatcgcccccatcttgggtatattaattcgagagttggtcacatcattaattgaccaaagaacagctagtgactgcatcaacaaatcattgacaatcgccaagaagacctcttctactctgaagctgaggagatgatgaaggcctcctgcactgtaaatccagggagatgatgaaggcctccaacactgtaaagctaaggagttgacaaatgcctcatttgctatcaaatcgatcggagatgaacaagagaagacaaaaggctgcatctgatggaatgctaaaggacttcaaggctacaacttaagagaagacaaagattacatctatgtttacataaacacacagtgtgacaagagattcaatgctaagacaataggcaaagatcaaagtaaatgttaatattccaatggcggcatgatttcacagttgctcaaatcaatagaaatcactcaagaaatcatctaaattttaagttaaaaatgaaaagataaatgataaaaaagatgatcatctttttttttttgatcatcttttctcttctctttttttacttaaaattttgaaccctactatttaacaagaaatgcgaattcaaactcctactcttagtgggaacgcttgaataacataagcgattgtccaagattgtcaaaactgatgtccacctggtagtttcaagagaatcaggcttagttcaccttattaagtcaacctcacacttacttgggggaaaatgtttacaccaaaagtaatcttgatgacgtggacatcaatgtttgacacatagcaagaaagatgacatctcaaagttaagtagtcccgagtcatagcaagttggcttgggaggggtccttagccctgtgcccacgttaacttcgagagctctggaatggaagtttggacttcaataacttgaattcaactcactatctttcagtgttctatagcatgaagacatgaagaagtcaaatctaggccccgagagttaaaattacatgaacctgcaccccaaaagccaacctgggcacctagggtttcacccagtgtccaggttgacattcccaactaaggtttcagtttttgggaccgtcttagtgtaaatgggtcaaaatttcattgggacataaactagacataccacagacatatttgaggtattagaatcaaattcgaagcaagtttattttttagtacccagagaacccagtgcccaggtggacaatttgtcaatttgcacaccttccaagtatcaaatcaatgatctgacttttacatcatcttcgacttcatcaaaaacggggatataggtacttttagggaagaaacaacacttcttgggtgccaaagacaaggcccagcgcccaagtattttgatggtggtttccgagaactcttttgagcatattttccgtttttagaaaatattaagattcaaatatttctcatgaccaaacagaacttctgaagggccaaaagggggacccaatgcctaggttgacatattatcaacctgggctattccaaacaagttctcaaaaaagtgtttcaggtattttttttttctaccattagaaataataaagattcaagcaaacttgaggagaaaaccacaaccctgagaccttagacacagggcccagctcccaagttgacctagtgttgggcccagcgcccaagttgacaatcaacttggtgcactggtttggatcactcaaatgtcaaatctgatccgaccattgaatccaaaatggtcaaaaccaaggtaagagacctcgtcctcaagttcaagaaccttagaagtatcaaaacgacattctgagagcttggaattggtgtaccaagcgccctggttaacaaatggcctgatgcgctatctgcttatttgattctgattccaatttgactgtctgtctagtttttcacaatgactaagatttatgaattcagataagtaaaattcacaacttctcatttctcatttcaaacatgagaaactcactcaaaaataaagaattttgagactctcatttctgcagaacaataacatctttgagaattggtgaacaactttgccaaaacacataacagactaagtgatgtcaaaatatcacttaggcaccataaattatacccacaaatgtttttccacttacccag

SEQ ID NO: 221956 - DNA, 1161 bp, Cannabis indica
atctcaaatatttttatttatatcttagtaaagtttatatttttcacttttattcttacatatatttatttgtattctcacagaatttattatttttttaataaaaattatatttgtcattaatgcttcaattttttttcttctcactaaaatattaggctggctctgccactaattatatatagtatacattctgccagtttttgattttttttttaagtaatttacagtattgaaataagtttcaaataatcaattgtgcaagggcttattttttgctataactgtgaaactggttattttgaactctgtttttaatactaaattattttaatttttttaaaagttgatagaatttctattataattataatttacactatcatatgaataaaaatgaattaagatataattgtttcaatgatttgtagagagtaaatctgcatggagaacagatgaagaatttggaagggaaatgcttgctggtgttcaccctgtcctcattgccagccttaaagtaatctaattttaatagtttgataaataattaaagaattttttatcaaaaaatatatatataattttttgttgtatatgaatacataatttagtctaattttaattacaggaattcccacccaccagcaagctagacaagaaattgtatggtgatcacactagcaaaattacaaaagaacacattcaaaattacttggaggggcttgatgtagatacggtattattattttgacgaaattatattatatatttattttattttatttgtttaaatttttacttttatttttatattctttaacttttatagatgatgtcactattatactctttaggttaatgtaaattatgtgctaaatttaagtggagggtgaaatatattaaggaacccacatcataaaagttggtatattttaataaaatttaatatgagggtatttttaattattaaatacaaaaaaagaagtattcctcaacttatccctattattttagtatttttagagtctttatttagaaaaaaatatggtatttttcaaaattcaataaaaaaatgtgtattttaaaagggaaacaaattttttcggacccctggactaggtggactctaggcacaagcctaacccgcctatgcccagagtt

SEQ ID NO: 221957 - DNA, 1225 bp, Cannabis indica
aaaatattaccaacatctaactcgatacatgtacatgatggaacagaagaattcatgtactatcactaacttgtatttagaggattagcggttcaagtactattttatattactcagtgcatgtagaagggaatttactttctgtcatcttgattcatatggtaagggaaatagaaatactaaaatgcattaatttaatggtgtctaatactttttacgaattaagatttcctattaaaaagtagtgtctcatactgtgttaaattaatcaaagtttgacacattaattaattttttatttataaaaaaattaaacttctaataaagtcaacaaaaataattaacatatttaatataaattaaattaattgatctgtcaagccttaataaatttaactgaggcactaatttttagtatgagatcttgattcctaccagcaataaatctatacgtgttactgaagggcagtgaggaggatagttagaaacaatgactaagctatgtgagggtgccaatttgaaatttccaacatctgtatttgtcttttacgtagctccaaaaacattaatttggccccccaaactagctcatcagaagttttttgtcgagctcaataaaaacattaaattaaaaaaattactcttggaaacttgctaataagaagattttggtcgacctcaataatttacgtcggctacaggataattactaattttattaaactataagataagaatactctaaccttttgcgtaaaggacttgaaaccaaagactaaactagttaaccatcgatgtgactatgattacaataaggggtgagaaagaacacgtacgatttatttaagattagaattgtcttcttatatactttcttttacttgttttacgtaacaaataatgtgcatctatgtattatttcgctgtcatcgcatatgtggtgctaacaaagatataaacactattcataacgtgggctaataatgtagatattagtgttatgtaaaaatttgacagctactcctcatatgttactaactaattagtttatttacatatatattctgaaaatacaaactaattagttttgatcatgcgacaaaaaactaatagatagtcgtgattgtgattgtgattgtgattaatttattgtaacataaaagaaaatgttgcgtaacccactataatttaatgtcaagtctacgtggttttaagtgatttattt

SEQ ID NO: 221958 - DNA, 4067 bp, Cannabis indica
aaatagagttttatttagggtataaaacccaacaaaagcatctgtctaggtcttccatatgcccatagcctttttggacttgaccagcatgttgtccacatacacctccatgttgcagccaatgtgatctttgaacattttcttcacaagcctctagtatatggccccagcatttttcagcatgaagggcatgactttgtagtagtacaaacctaagcctgtcatgaagcttgtattcttccgatctagaggatgtatcttaatttggttgtaacctgaatacgcgtccatgaaacttagaatttcatggccagctgtggcatccactagctggtcaattcttaggagaaggaagcagtcctttggacatgctttgttcaggtttgtgaagtcaatgcacactctccaattattctttattttgggcaccaaaacagggttggatacccaaagtggatagaatgcttcagttatgaagtcatgggctcgtagcctctcgacttcatctttaagcacttaggcacattctttgtccatcaactcatcttctattgtacaggtcagaagtttggatcgatattgagggcatgagtcatcacggtggggtcgattctgaccatgtatccatgtgaccatgcaaagaggtccaagtttgcccttagaaattttatcagtactgattttatttccaacgctgaactttttcgaatcttgagtcttctatcaggagaagtgggatcaacatccactttctcgaccaggattaacctccactttctcgagctcttctaaaggtccaaagctgttcgcaagattcttaaagcgaggatctatgtctgtgtcccaactttgggctagacttcattgccctttattgggctattcttttgagctctttgcaagcatcttctctttcttggctttggacagggccaagttgtaacaatggggggcagacaattggtgtcccctcaaccatcctaccctatgacttgttgggaacattaggtagaggtggtagatggatgtgatcgccttcaagtcgtataaggctggttgacctatcatggcattaaacgctgagggaacgttgattatgacaaactatgccatcatagttcttgtagttggactttcttcaatagtgaggggaaatttgatgtacctcgtgggtgcaattccttgtccaaagaagccacacatcacttggctacagggtgccaaatcatttagttggcaccccatctttttatatgttgatttgaaaagaatattggaggaggctccattgtccaccatgcatcttgccacaatcatatttccaatttgtgcaataatgaccagagggtcgttgtgtgggaagctaacttgagcaacatctccttctgtgaaagagatagtgtgctcttcaagctttagttgcttggagcccctttctttgacagacaggatgtctcttttgggctcgtgatagagtgtcggagcgtagcgctccctagccttgctggtcttgcctagaatatggggtccgtcaataatgacccctaagtgacccaccactggaggtggcatagggtctccattttaggcaccttgtacctaagtctggtcattttacacacaatgacgcagatggagattattcttcctaataaggaatttgatctccctcttcacatttttacactctattggtgtcacggcagaagtcgttatgaaaccgacagaactttaacatgtgcctcttgctcaactctcttttgatgggagggggcttcttttatgggatagtttcttgagtggccatgaagatggtctcaggtttctccatcaggagggtgaggcaggtaaacttctcctccttttctggttttgtggcgtgggaaagtattttacttccctttttgccactgtttcttccagagttattattattgcacatgcccctaatgttcttgccactagaggtttgggtagagttgctagtgtcttcttacgcgccaggaaagttgtggggctataggttgccctgtggctgcctattattgacttgccctgtctgagcttgtcgagcagcttcctctagcttgataaagtcgtcagctctatcaaggaactccttcatgttgttggtcgagatcctccagatatctttccaaaagtcacttaacagaaggatgccccccaatatggtcgtataaaccttctcctgtaaggcatttgaccttagtggcctcagctataaacctttgtatataattctttaaaggttctccttgtcattttttgacttcgacaaagtcttctagctgggatggtataagccttaaggatatttgtagaattctcaggaaaactcattctatgaattgaatcttcttagggcaagcttgaaataccataagagctgtttccgacaaagttaccaggaatatgcaacaccgcacatcaccactaattttcttgagatcaagttgcatctcaaattatttgatgtgtgccagtggatcttctcacacggtatacatcttccataccgcaccttgaacttgggcaagggcaaggcatttacgtataccgagaatggttatcttcttgacttgtcaagttcaaggtctgaaggttttggacctcttaggcccttgatcatatcccttatttggtccaactgtgcttgcatagaaggatccgttgctgtaggggcttggctgactggtcctccttggaggggctgtagacccgaatgtgctagggtttggccgaccatacattgggagagtgtatggtcgaggcaggccagccgtgagcttgggtgttggccttggccagccactcccaggtagggagattggtcatggccagccaagcttatgttgggcagttgctcatggccagccagccctgtgttgggcagggactgaccgcccgtgaccccctggttggctggtgcagtcggtgtgttaattgggggtagattgcaccagtttttggagttgggtggattcagatatctgaagtgattagactcacttcttaagttattattttgggtgtttccacccattctcggacctaactggttaaatattggcctttgggttactcgctatcggatgcctcgagaagggagctcacttccctggctagcaaaggtgcaccaccagagggctgggcagccaagggttggcaatgggggagttgttaagcctaagatccctatctggcccctaaccgctggttgctaggattgcattgttcttgctgccagacttttgtggcatcgcctgttctccttcaggtaggggaaggtctgtcttggttcctaaagaacctgattggatagtttctcggtagaccctccctgatctgtcgactagtcttccttggagtggatctctgatgagatcctggcctctccaagcagttcttttaatgaactgccttattaggtcgcttacttctcggttgcggtgatccagctctgcctggtgagatcagaggatgtactctttgtcatccatccacctcaagaactcacatctctattgaacgaatacatcgcaattaacagtgcatggttcttcaatttggccagcagcagacgacctctctaagtttggctagctcgagaaattctcccatatctacataaggctcgccaatagctggattgtcgattcttggccttgtttctccagaatagtattggggcgaggtccagttgttgttcctgggggctgctgcacgtgggttcttccttcagtgtgaggcgccagtggagggtcttcccttggaggcaggggctgattgttcaaatccaccgagatgtttgtgtcaacctggccagctgtagtggccagatttgtggtgcctgtcgacatgacaggattaaccacatctgcagtgtcgtggaaattccagtcgtgactcgaacatggacattaggatctagaatcaaagggtcttaagggagacccgatgaggcagaggttgtagtcggagttcttatcatgttaactatcgcatttgatcaaattacataagttcgtctctctctctctctctct

SEQ ID NO: 221959 - DNA, 1376 bp, Cannabis indica
ctttccctcctccatctcttgctctttttactttatttaatcttctcttttaataaattattttcttgttgtagtgcactaataattgtcacaaatatttatataatttaaattacattaattaatatagaagccctctcaaattaggagagtgttactctctattaatatatatatacttatatgttttctatgttgtaaatttacaattaccttttttatttaacagctagtgccagcaagtattaagattcacgttgggtttgataacctaagatcgattagtgcttcatttgaacctataaatttcacttcattcatttctgattattatatgtataatatatataatatgtatgtacactatgtgaagttgtttttggtatagtagtgtatgtatcttgttcccttttttatttaagacttattcgatattactttttgtcccaaaattaagttacaaaaaatagattactagtataagtcaaaataaataaataaataaataaatagcatttggacatgtttggtacgtgagactggactggattgggtaggtaaatttgtctaatcttgtatttgtatgtgctgaaaatctaaataactaatccaactaatcctatgtatctgaaattatttatccaaccagcagtgtgggatatataatctgatgcgagtgagattttttttatctatttttttattttgttaatatattttaaatttaataagaattttaatgaaagaattattattattattatattataataaaataaaaattttaaaaattaaaataaataaaataatacagtctattcttaaatcaaatatgggattactttcggcataatctaatcttatccagtccagtccagtctaatctaatctaatcttttccaatctaatcttgagctctaaacaggttctaaaagaatgttaataaatatccaatatgctaaaatatagaagaatatgtaaattaagtaaatgtttaaaagttgtgctaaatttaatataaaataaaaatttgtaccaaatttaacataaaatattacatattaatgtatgcaatttaaatagttattatttttttttttgtatttatttttacttttatgattatgatatgatttattatttcttgtatctaattaattattggcattatatgtgaaagttcattttttgttataaacattaataaatatgttaaatttttttatttattactattaattgtaaataatattttctttttcttaatttcttaatatttgactctcatatgtgtataaatagaatatcagctaacaaaataagatactaaaaaagatttcgtatcttctctattttctttctctaaattataatat

SEQ ID NO: 221960 - DNA, 3112 bp, Cannabis indica
acaattaaaaacaaccaaaaaaaactacatcacgataactataaataaactatagaacaatcaaaaaaagacagtttattatttttactgaaaatgtatttttgtaaataaaaaaattcaatgagtataaataaaaatttctgcgctaacgtatttttgtaatttttttctaaatttttagtcaattatgtaagtttttctattatgtatacaatgtttttagggtttacgatttgctatatttgtgaggctattcccatatatatgactttatttgacatgttttaataacttcaattgaatttatatatttatatttatataaaaagcttatatgaatacatcaatatggtatatattaattaattaaacccccatccatgaatgcctaagaaagtgttaaaaaattaaagtcctcttgtgagagagaaaaaaacttataacgagaaatgcaagtaatagtattcaattaaatgccacaagcaaaaaaaaaaaaaaaaaatagcacaagcaaaagaaggaaaaattctattccaaacaatagtaattccacttagtatacttggctaactcacaatttgtctctctaaaactaaactaaaaactaacaacacaattccttgggataagatttttgtttggaggatactatttaaatcgcccaatctaattcaatgatgaaattaaagtttaactcgattcccaaatgaaccccccaacctttgtggctataagcttagcatttctaaatttgttttagttttatggtgttatataagaacattgaatataggtgtggcttagcaatttttaatttgcttagcttaatagtgtaatataggttgtcattcagttaaaattaattattttataattaaattacttggttctactttgataagtattgttaaatacctacataaagagtccttttacaacactatcaactaactattattacagctaccaacggtccaactcagcattcagactctcatactcgcaactaacagaattagaactctataaaacgaaggaggctcaagttcagaaacaacctgatctaatcttcatctccgttagagagagtagcatcttgcggaaagagaccccaaaaaaagagaaaatcaaagagtttagaagaaagtttgagagactaactcgtaaaacaaaataaaaagaaagagagaaagagatcaagattacctgttggattgtatcttggaatctccaccattatcttgtaaactgttgaggattgatggtgcatgatcaagcatctgaggcgagcttaatagagacgtagccctaatttggggtgaactttgagatcaaatctctttgtgttcttgtgtgtattttttgtttatctcgaaccaacaaagatcgatctagatctttgttattgtttggctctagtttgcgtttggattttgtaggttcaagggttagagattaaagcccaaagattcgagcttgaggaagaagacaaagcatggttgctagcgttttggggttgatcgaaagtgttccgatcttcctaggttttggttttttaccatacctacacggtgtcattttggaggtgtgaacttagatccaaaaaaatgtgtgtaaaaggtcaatagtgaccttattttctcttgtttagtgttagttggtgtaggtttatttctggaattgaattcctacagtggtacagagcttggttcaagctagaaagtttcaatcaaacctagaaaaaaggtcaagaaactaaaaataagataaaagtgaagaagaaagcaatctattctatcaagaacatatgaacaagattgctctaacctaaatctaatttgctacattcttgttttgttattgtgtttatctaacgtgagtaacattaaattggatgtcaaaaaatttgacggatcagaagactataagatttgtaggaaggaaattctagctcttcttacttagaatgaattagtgaccctagtgaatggccagaaaatacctcaaatgaacaacaagaagaattacatgaaactaatattggactaataagttttaacttatctgattcttttatcaggttagttgacaaaggaaacactccagcaaaaagctagaagatcagtttcaaaagaagtctttgatcaacgagatatttcttaaagaaaaaaaaaatttagatacaagatgagcctcagcaagactcttgatggaaacctagatgagtttctaaggttacatattgagctggccaattctggagaaaatgaggcatttagtgataataatcaagctatcatcatcttaaactcattacctgaatcatatagaaaggtaaagaatgccattaagtatcgcaagatagagatcacactggaagaggtgatctcatccttgaagtctaaggacttggagatcaaaagtgagaaacgtggaggttctaatgaaaaagtgaatttcagtaagggagacctaataataggaatcctggacactttaaaagcagaaaccacaatagagattatcacaaagaaaacaatcataataagggaagatcaaactctaaaggcccaattgatcctactggctgctacaactgtggcaaactaggacatttcaaaaaaggattgttattttctgaacaaaggcaaacctaagaaatacaaaggacagagagataattctaaccctaaatctaattcatttaaggataatcaagccaactatgaagatggttatgatagtacagatagtggtaaagtttatatttttgcatcatctctaaaagatgattgatcttagattcagaatgtacttttcatatgactaatgataaagcttacatgtttgattacagagaatctaaatgaggtaaagtgatcatagtgaataatcagacctttgaaatcaaaggctttggatctataaaattcaacatgcataatggaatagtcagaaccctatcaactataaggtatgtgcctaatctatctagaaatctaatttctattagtgtgcttgatggctttggtattgtgagtgttggaaactatttttaccaggatcttatttactacttaaatatgttagattaagactaatctaacatcct

SEQ ID NO: 221961 - DNA, 2347 bp, Cannabis indica
gaacaacaatcagttgcgacatattttctatgttcagccaaacaaattatgtgtagtctaattactgtcagtttgggaccaacagggttaagatgaaataaagtggtatgtttataactgttgtataatgaaacttattgaagacagatacaaaaacatactatatgatgaatttaagagctgttccaaagtctatgtttgcatattcctcgtcggtctccttcaaaagatttgcgtatagaatgaaccatgtaagatactgcaggaacatttgccagtttctcgtcatgctcctgcaacatagatagagcttttcataaatatataaatatagatatataaaaataaaaataaattgatgtctactatctctctctctcagtttctctctgagggtatgaagcagattgattcaggacttaccacttctgaaagacgttcttcaaaacccctggcatcttcttgactaggcatgaaaatctttcggtaagcttttctaaggcttgtgatctaggtccttgtccaaagtgatataagttatttcatcaattgacactagaatggacatagtatagcttatttcaaaatatagattgtcaatgcaaacctcagtatctgtaaacccattgcgtcgaaggccctctagattcaaactgcgaagctcaggcccatctcctgcaaccatcatgtactttggaacatcatttttaacctatagaaagaaaaaacaaaccaaatattgaaaactgataaacttattatctatctaatagggtaataaaaacactcttaaagtagcatatacaacaatattgttaaagaaaaatataattcattttgtgacatgcaccaattgaagtactgacacatttcaagtagaagattcaataacttatgtgcatgctgggcatcaacaactaactgttgttgtaaaaaaaacataagttaatgatcgtaccattgcaccagcaccaatgaacgagaaagagccaacatggcagaattgatgtacagcagcacctcctgcagtgtgagcatagtcctgcgtagcacttaagtcaatttcaagacaaactttgcttgcaaaacttatgcgggaatcggattcatgctattacagaaacaagaaaggacttacttcaaccacaacatgtcctgctagaagagtgccatttgcaaaaatattactgtttcctactttgcaatcgtgagcaatatgacaagagcccatgatgagattgttgttcccaataacctgaatacataatgcgagacaggatagcatcagtctcacttgaaatataattctgtttggagaacaaaacattgtgtaggcttattcacatacagttttatcacttgattttgaagatctgtggattgatgtatgttctcggatatcattgttctccccaacataaaggaaacattcatcacctggctaaatcatggaataaaataaacatatcacaattgagtatagcagccacacatgcctgaaacttacactatagcttaaacgacaatgtgccagaggcgatgctaaatctaatggtgattaactagcaatcacatagagaggagcagaagagatctcatatactagcacccatatagaagatgcattttacacaccccctatatccatgatgtgcaattaaaagcagagaaaaaagtgttcaatcgtcacaattgttgaagctaaagaaaaccacccagtgacagggtacacactcaataatggagggctaacatcatgtaagtttacattatagtttggttcctttgtaaagtgagcaagaaaaaaaaaaaagaagttcaaataccagcatagtatcacataatgacattctaaaaagtgattagttcatatcaaaccagtttgaaaactgaccttgtacttcaagtcttggcctctaatcccaacaacggcataatgtcccacaacgttgttgcatcccatcacggtatgcccaggaagatcatcaccaaccacagcaccactgccttgaaaaatttcaagcaagtcaaaaatgtggaaccaaaaatacaaaatgttttaccaaaaataatacaatataccaatatccaaactcacgtcatcagaacgcaatcattccccaattctgtattcccatatacatggcttcccgtatgcaatttacaaccattgccaagctttgcagaggacccaacagtacaaaaggggccaatggaaacaccctgaatcatcatatacagaattttaccgacatacgcaataactgaaactaaagcaactcagatagacaatagctaatagacttagaatagttcatatggtcatgttgcaaagtagattacataa

SEQ ID NO: 221962 - DNA, 4391 bp, Cannabis indica
ttaaaaaatattttgatatgtgaaatcgggcataaaaattgactaagaaattgtagcaagaagttgtaattaacactccttaatatacaaataaaataaagtattgctatgaaatgtcgtgttccatagtaaattgaaattatttaaatttaatttttttgagagataattattaaaattttaattgttgtatggaaattagataaaatgtcatattttaattattgagtgacaaacaattttcattaatttctttttgggaaattacctcggtaagttacacatttttttttgttgaattttagttgcgatttagattgctgtataaattgcaaatcgagtagggttactgtgtgagttgcgatgtagcttgcgaattgaattgggttgctgcgtaagttgcgattaggacatttactataaaacattatatatttgtagtttatacaaattttaccgtataaatagaaaaaaatactttgaaatgtataaatgaacgaacctctcatctttttcttttatatatatatacatttgtagtttatatacattgctttaaaaagagatgagacacaaatttatgtagttcatcaaattttatttccctacgtctacggtagcaaggagttagtaccacattttcattaatgtaaaagattacaaagatcaagagcaaatagtatctatttttgtacaagatgatcaatgttgggcacgtgtggtaacctagattaggttagttttttttgtgagtatttttctttttggtaatttagattttttttttgtgagtatttagtagataaataggatgcattagacattataattatgtttgtaaaaagaaaaaggattgtaaatggatgaacttataattcatgaacaagcttggtgaactgtatagaatgtcgacgggtttgaaggtggtgtgagcactttagtttttatagaaggttattaaatagacagcctaattttcatagaaggttatgaaataggcagtatgattttcatacagagttataaaaataggcagtttgatgtttataaaaacttgttaaataagcagcctagtttttatagaagctcgttaaataggtagtttggtgaatggtaagggtgtggttaatcaaaaagactattaaaaatgaaatggttgtgtataaaagagatgtaatgagatgagatggttgtgtgtaagagagaagaatgatgaaatgagagctagttttcgagagagactcttctgtgcttctgaattgtgttgtgaattccatcagtcttccttttataggagctaagtattaacctacctttcataaaacatactctacatacaacctttcccaattataaattatcacatttcccatacatgaaaactagaccattcccaacaaacaaatttctatcaagtccaattttcacaacagcagcatgaatttgcaacccaacccacaaataatggaatgctgaacatgcctttaggacacaaaggtatatgtactatagagtttttgaaaacaagaagaccatcatcatacaggtaattgtttacaatgcttctgatcatgacattaaagaagacaacattattcacaggcatttcatccaataagtggtgggtaatccttgtttccccattggctgcataagccgccctcataagcttaatagctagtgataaattctaatgaagatgctggtcaaaaaagatcttggaatggagtttcttgagtgttttgatatctgagcactcatcaaaaactctttcaagtaaatcatcagccagatatgggctatcatgcacaagcaagtttaaactttaactggtcaccatcagaatcgtaaataccaaaatgaaactatagtttgaaagatttcgcctcaaaaaattgtgattttaagcatagcagaaattgtagcttaagtagttttgctacaaatatcctcttttttctttttaattttggtaaattaatattaaaaaaactgaaataactgaaaaaaaaaattaaacatcacttaaaaacccaaacgaaataaaataatacacagaatatgtctttattgaacaaatttcttacacttaatggtagacttcagcaaaacaaatttactcctgggcaaagggaaaatttgcacaatgcacacacaaacatacaaagaaaaatgaaataaaataaaatgtgttttttgtatattcattgtaaaatatattctacatgtgtacatattctacatttataaacatataacaaaagtaatatttcctctctattataaatatagaaacttttttaatgattttcctaaaaaattaagattgcaacaaacattagtaccattattttattagaatacaacatcatgaatacttgacaaaatgatccatgtgatagttttaagccaaatgttattattgaaatgacatattttgcctaaattatttcatatacttttatgagtcttcttatataaaaatttaacatgtgactgtgatcagtaataaatgtgactaattaaaactagaagtgtaccttctccttctcatcatcatcaccatcataatcatcaatagaaaggtttaggaatatgagcaatcttttgccaatccttcccttgtccttgtttgcatcttttctgtagtgcatcacaatcttcaatcagcaaatgtgtgagggaggtgaggccttccatcccctctggtagagtgaataattttgggcaatccctaatcacaagcttctcaagtgacatgagttttggcagccactccggcaatgtagctaattcggaacaatcttcaatatgtagatattgtagggtcttagcagcttgttgcagccattggggcagatccgttgtctttggtaactcatcaatcgcaaatgtctgaaggctcagctgaacatcttcattaacaaattcacttgccaactcgagttctttacaattaagtattaatagaacacgtaatgtagtacaatttctcaagtcatgtggcaaggctttcaaatttttacatcccttaaaacccaagaaacgaagagactttaagcgtccaattccaccatctgccaaaaagctttgctttgtggttaatccaagaatccttaggctttctaaattacctatttccattggtaattcttcaagctcctcacatccagaaagacagattttgcaaactttgcagcttacaaattgaatcggggagtctcttcagcttttcattattggtcaagtcaagatatctcaattgcttcatggctccaatcgaactaggcaagaccttaaaagataaaccaaccaaatcaaacacccgcaagttcttgaatcttgagatgcatgtagaaaggaataaccgcacaacttcatcattctcatctcctgtacactcaatatgaatactcctcaatttctttaacttactcaactttgttaagttgttctcattgataacaattcttaaatatcttatactatcagaaatctctccaatgttagaacttacaatagagcactctctttgggtttgggtgattgagcatgcaagattgtgaattaaatcatgcactctaaaattttggttgatttcaaaatcatcatcactaaaatcattagcttgaaagaaagacgtgccccacaactctaggaagtatgatctaccaatatcttccaactcaacttttttgttaggtgaatgaaggattccaagtaccatcataatactaatcaaatcaaagcttgacatcaaactatcctctttgaaagttgagcaataagcaaaacattgtttcaaagatggagacatttgcattgtaactcaatcacaatgcaggcaaaatatgaccttgcttacgttccaactcccaaattttgctgtctctgaaaattttccactcacgagcttcagtcttcaaccgaagtagactccccaaggcattcagtgccaaaggaacccctctacactttttcacaatttttttaccaatttgttggagttcaggatattttgatgcttcttcctcacctcgaaatgcatacttgaaaaattgagacaaagaatccttcttaggtaggccctccaattcataaggttttgttccacccacgatggaagcaactttactacttcgtgttgtcactataattttacttttcttagaacccacaaataacaactctgcaaattcatgccactttaaaggatcctcattccatgcatcatccaacgcaagtagaaacttttaattccatcaaagtctgactcaaagatctttgcaactgatctaaattagtcaagttactaatctcagccttcttatcagttgcactcataataatatctttcactagtctagtgacattgaaatctagagacacac

SEQ ID NO: 221963 - DNA, 1592 bp, Cannabis indica
ttatatttccttagtttttttttttgttgctaataaaattctctttttttatttgttgaaccttatatagtactccaagatttggtgaagatatacgtgtgggccatatgcaaatctatgcatataaaattttatatatattgataaattaattaagtacactttatagataggtgtcaacatgggtttggacatttggctatagagaaatgtttatatcatgtaattaactttctatcaaaaaaaaaaaaaaactttctatcaaaatatcttagattttgttattcttaaataattttcttaaactttttaaacagacgactacttttggaatatataaaagggtggtatgttaaggaagcattttactttttatttttgtttttaagtttagtactgtggattggtatagtagtctttataatttagttttgttctggtttatctttagctgcatgtcaattatatatatataatatatatatatatatgctcttatatctacactataacaaccctaaaattaaagtgcatcattcgtacgtggagatgacgttaattacagtacacctctaaaccctaaattgtttcggtagacttttctctgttttgactgcgtgactatttttcttatatgtatagtaagtaattgtttaaatcttatttttattattgtaaattatttaaaatatttaaaaaaatttaaaaatttacaagtagtcttaaatagttacaacgttcgtagttatagaacaaaattagactaataacattttgtgaatgcaaaacagatatgggtctacttgaaaatcctttaaaaatagtctattagataaatttgtaaatatatatatacacatgtataaggacagaatcaagataaaaaattaatatagttagcctcgagtgagtatgacaattgatgaacaattttaagttgttgttatgattgataacttactctcatcgtggaaagattttaaaagtactctcacgcacaaaacaaaagagtttttgttagaaagtttgatcactcgcctttgcattaaggaggaagctcgaaagcaagaccaaaaagaagaggtttttgtttctaaaaataaaacactaataaaatattcactactcatctgaaacctaatgggacaaattttaacaatcagaatcgcagagtgaatttgaaccacaatagtcaaccttatttctttgttcttgccacaatatattttactattgtggctgaaactgaaaattaacttaatagtaagatcaagatgttacgtagtgatagagagcacggaatatgattctactacttttgttgatttttataacccacatggaatcatacatgataatactgtaccttattcacctgaaatgaatgacaaagttgaaaagaaaaaatagaactcttattgaatttgttgttgttattttgttgtagttctagtgttgctttttcattggtggggagaaattaactgtgtattatgtgcttaatagagttcttaaatctaaaagcaaaaatttgattttatgaaagtttaaaaaataaacaattcaatatttcatattttaaaacttggggt

SEQ ID NO: 221964 - DNA, 3400 bp, Cannabis indica
attttaatatttttttttgtttattaaacgatgcttggttccagagaaaaatgtgaatagttcaaatatggaacagaaaaaataataataataattataataataataaaaataaaaagagatttgcaattggaactccgtgtattttcatttatgtatactgcgagattttattgttctacacaagcaaatagggtggttaagtttattgttcgttctctaataatcgttattgtattgtattataagatttaagctttatttttgtattgttttactgttaagcgtggtttggatttttttaggaagctataactaattagtatatattttgagaaagtgtatttattggcgaggtatatctatattttgcaggggaagttttatgcaaggagattttcttttattattttataagattgcatttcaattttggaataattgagttgggttcttgtggaaggtttttttttttttttttaattttttctaatccaataggaaacgatcgttacccactattgctgttttgttttaagattatgtattcaaatattgtgcattattgattttatttgcctcctttaaaaatcacatgctttaacgacaaatcaaatatcttgccttttaaatctttaaaagttggatttttagcaccgacatcattggtccaattgagaattctcagaatcctagatgcaactcttttgcaaaaataatttatcatcgccggacaacattcataaaaccatataaaataaacacctacagacaaccaaagctctatacgaaccatcatatgactaaactccctttttttctttcttgtttttcatcttgataccatgttcaactaatctacccttgaatgaatcaattgttaactcaaaggactccctacgtcaacaatattcatctgacgatcgctattaatgatatctaattctgacctaagaactttcttttaaagagtattacttagaaggaaacaatgtatgaaatacagaacggtaaatttcaaaccaagagattcatcatggccccacctagtgcccaaaaaagtatcctcaatagacttatgatcaatagtttttgttccaagaaaatatacatcaaccaattggtttgattcctaggtaaatagcaatttattgcaatcaccaaaacattaaagattagaaatcaaataaaactcttcaacactgaactatatacaacggccaacaacctttgcccgaaattctttcagattgggctggttaaactccctcaatagaaagttgtgcacaatttggggatggaatacgaactcgagaatatctaaaaaatgaccaaattgggtatctcggaacatctttaacaaattaccagagatagtattcttaatattaagaataacagagtaggtgcttgtagaaacacacttggatctataataatctccatgactaaattcgtatacccaatcctgcatttaaaaaagaaagataaaataatgaatggactatagaagtttcaaaactgtaatacaaccaaaaaacaagcatgaaaaaatagtcacacagagcaaaaactaaagaaaaatacataaacataaatatagatggaaataaaacctaatataaacaacaaaacatataaaaacacaataaaaaataaaggctaattaggatttttgcccccaaaaatttgacatgtaccaaatcttgtcccttgaacttttcttgtcgttaaaaattttccctaaactattgagattattggatttaaggacttttgtccaattttagtaaggaaagtctaacatggatgaaagttcaaggggcatgatttggcacatgtcaaagtacgaggagcgtaatttggtagatgttaaagtctaaggagcatgatttagtacataaacaaacactaaattagtaaaattgaatgaaattagacaaaagtccttaaatttgataatctcaatagttcagggagaatttttaatggtcagaaaagtttagggggcatgattttgtatatatcaaagattatgggacaaaaatcctaattagccaaaaataaatataaaaaaagtagtagaccgatccaatttaagctccttcaatatcaatttctaggatagttcttatgtttactccttaatgatatatatatatatatataccaacaaaactaataaaaacgaaaagcctatacagaaacagacacacagatcaatagtgtttaaacttgaacaaaatgaaatcaaacacaaaaacacatttggcaatcaaaacaaaaataaaaacaacaaaaattataacaaaatttaaaactagaaaaacaaaaaggaaaaacataataaactaaacataaatcaaattataaaaatagaatgattaaaaccaaaaagaacaaaaaaaaaaaaaagcataaaaataacagaaatcaaaaattgacttagaaaatctaaaccctagaaaaatcaaaacaataaacacaaaaccccaaaaaataactaagaaaaaataatcgaaattgggagaaaactaaaaagaaaaagaaaacaaacctccaacccatgatcatcttgaacctgctccttcttgttgtcagaaagtggggaaattttctgaggaacagaaactttagctttcttctttggaggtccacgatcccattgtaatacatgaggagcaaagtcagagttatcatcttccacaactggtcgttttccttcggacctattagctccaaatttaacacctattttcaattttttttttttgcaatggagaaggaaaggatgaagaacgagtaataaccatgattatagatagattcactagcaataaaaaatagagtacaaacggttatggaaatcagttcgtgaggggagatgagttcagatatggaaattttgatttttaaaaatataaactaaaacaaaatatgaaaataaaaaagaaaaaaaagagaggaaaatcatggagtgattgataggggtcaagtctatcacctgatatgtaagcaacacttgtgctgcatgtaatgtgtgtacaagtggtataagtagtaaataaaaaattttgaagagtaaaaagtaagaacaagcgtgtggggtatttatgtaataaagattgcattttgtatttttgtgtaaaaatttcaaaaatatatataataattaaattaagttatataatttttttagtattgcatattaatatatcatagcaaaaataaatagatatataacatatttaaggtttaattttaagttattatattgtattttttggttattaaaattgttaattattaagttattgaagttattaattatttgaagtagtgttcaagatctgcttataatatcaagtgcatttgagaagataaatttcctcttttctca

SEQ ID NO: 221965 - DNA, 2754 bp, Cannabis indica
tgaagcagggaagacaagggagggacaccaatgagagatgaagatgataactcaatggaaataccctaagcaatagagttattagcatggggaaaagtgttctcatcaaatactacatctcgagagatgtaaaatcttttggatagatatttgaacccttcgtgagctatactatatccaagaaagacacgaggtataaatttgtattacagtttttgtattctttttttttttgtatggtatgagattaggatagcaaacacatccaacgactttaagacaagtgtaatctagtgtggtatggaacaaaacctcaaggggtgtagagttcttaagagtaggaataggcacttctgaaagactcatcccaatatttgagaggaagtgaagcttgggaaggtagagttaatccattttcaactacatgcctatgcttcctttcaacaaccccattttttttatgggtatgagggcgggctaacctatggacaatcccagacctctcaagtaaactagtgaaagctctaaactcactctccaatcaaactgtaaagttttgattttttttttttttttttgtcctaattgtagctcaacttgagttttgaatttggtaaaagtaagtagagcctcatcacgagttatgagtaaggaaaactaggtaaacctagaatagacatccacaaaactaatgtaatacttgtaaccattgctagaatttataagagtagggccccacaaatttgaaagtcattctaatggtgcattataagtagtagttgaattagaaaaagacaatttatgagatttgtcaagacaacaagctttacacacataagaagaacttttattagacaatggtatattacattttgaaagagccaattgtacaactctagcaacagaatgaccaagcctattgtaccataaagaaaacaaaggattgacagtagacatttggtgagtgtgggattgaggagttgaaggagctgacagattaatttgtggtgagggtggggcaagacttaattaagtatagtcaaatttgtatttcccattctcaagattcccaaccaacaaaatcttcttggtagcacgattcttgacaaaacaagaaaaggggtaaattttaaaaaatatgtcattatcctaagcaaattgtgacactcaataggttcttagttatggaaggaacatgcaatagattattaagagtgagttattgagaagaaaaaggagaatggataagagaattaccaatgttctcattattgaagtcaatacctttaccaacatacacttgttcattacctgcataagatgtgcttgctccaaggttcacggaatctggtgtcaagtggtaagtcacaccaaaatcaggatactagcactcatcagtaaaagtttatggagtagcacacatgacttcgatctcaactaagtgagtggtggcaggaaaattagtgaatgatttaggacctatgaataacttatcaaaatgatagaagcactcttttacagtgtgaccaattttatgacatagttggcactgaggtttctgagaccattactggttctaaccacgaccgaaattaaaaggaccaccacgttgagcagggggaccatcgggattgtaaccaaaatcaccacgagccataggattccttgcatatccatctggtcaagggggaccaccatgaccaaagccaagtggtacagttggtataggataagcaagacaattgtatagattgaatccaatgggttttgtgtggaagagattgtcctatgctttgagaatatcaagattctttgtatgtttatcaatgcgaacaaattgagccattagaagcacttcgatctcaatcacaatgtactcatcttttcttgtggtaactgaggtgaagaaaacatcatattcaaagggtaaatggcttcaatatgatcttgtggcgtatgtttgtgatcgatggtagcaagaagattaacattccctttgatcttgagaagatagttattgagtatttgagtgttcctgtcatcttcgtatttcaaagttgagttttgtatagacccatattcgcaacattgagtacagtatagtactcataggagagcgataggtctgagcagtggtatcacaaccggtcatacgattggttgtcttttctgacataaatgacatagccaagaaaccagaagattgtcttgttggctcccaatcttcgaactatggattgatggtgttggatctttcatcttcagcggtgctccttttgatcaatgccagaacttgatgtctccatgataaatgggatgcgatctaagtaaaggaacttgttgatcgttttgtggttgagcattgttcaaccttttctgacataaatgacaacaaccaaaaaactagaaaattgtcttgctgctctcaatcttcaaactctaaattgattatgttaattctagattgattgtgttggatctttcatctctttcatatgcagcggtgaggaattttagtggagctcgagcatgatcaagatacttgtaaaggcaatgctccctttgatcgatgtcaaaacttgatgtctctatgataggtaattatgttcatcaagtttgatagaaagagaatgtgtgaagaatgagatacaatctaggtaaaggagcttgttaattgttttgtagtcgagcacaaggttgcaagaatctccattgacgaaagaaaaagtaactactgacaccatgtgaagtttc

SEQ ID NO: 221966 - DNA, 1880 bp, Cannabis indica
tgggccgtgttgggtgtgtcctagggctgagcacgggttgggttggccgggttgggagtattttagtgggccaacccaataagatcgacctaaagaattataacccattaagattatattttttgtacaacccaactcaacccaacccaatactttacgggttgggttgggttgggtcgggttacaaccgtcattttacacttaaaatttagatgtgtaaataatcaaatctaaacttaaattaaagacaaaaaaaaaaaacgttaaaacacagtgaaagtcatccaaaattccagagacaaatcactacattcatccaatatatatatttttttgcaatgaacattcatccaaaatattataaaccaaattttacaactatctaaaataatataacaaacaaaaatagttttaaccaataaccaatagtaaatgtaacatcttcatcttctcctttgttactctcttggccttcatatttattacctacaattcaaatttcaaaatattaatacttattggaaaagaaatatgcataatatacatattaaaaaatattaatcaatatttcagtaaaataaaacaagatcatatgccttattaatatcatcaataagttatgctgtaaatatgtattatatataactgcaaagaacaaaaacttagaaaacaaacaagaaaaaaaattaaatgatcaacaaaatttgtaaccaaaataatacaatcacaataatacttaatacccttagattcaaatcaagaatacataaaaaaaaaaaaaaaatacatatggtcacaataatatactcatactaaactctgaaatcatacaaaaataaaatagatcatataaagaatattcaaataaacacccctcttccataaaataaaaaaaaaaaagtcactcacaaaaataaaattatttttacagattctttaaaaatatcttgaaatgctaaatatttgccactcttatcatataacaaatataaaaaataaatgaggtcagtagatgacctgagaaggtcagtagatgacctgagactgaaaagtgagagccgacagaatatgagattctgagaggaaacgagattgtggtgtgcaaaggcctttacttgagaatctttcaccaaaccaataagaaaaaaaaaagaagtgagactaactgactgagaagagagtaaggatttcattaaaaaataaaaagtttggtagttacctacagtgaatgcaaatgagagtgatgtgcagagcggagcaatgagccgacgattaatttcctccagtggaatgacgttgtcacctgcctgagaatcttgtgcaagcttcagagtgagaagggagaaggagagaatcaattgtactgagagagggaggcgacatctgtggggagggaaagagattgatgtgttttatttgtctaggttagggttagatgtttaaggaaagaaagaaggaggcccaatgtgtctaaagcccatcatataatatgtatatgtatatatatatatatatttagtttagttaagagatgcggcccgggttgggttcatcgggccataaaattttcagcccatttccgacccattttaaacgggttgtcatttttctaacccaattaattttcggcctatagttttatgggttgatcggcccatttttggattgggttggccgggttggtcggcccaccgggttaaatgatcagccctagtgtgtcctacttaaaacccatttcaaattaatcagatttactaattaataaaagatcagaaatcattttatgttgcatagttcacatgatttatttcatgattatacttaatgtataaattctattaagtccagaacatatatatttgttcatgattatagtgttg

SEQ ID NO: 221967 - DNA, 1370 bp, Cannabis indica
atatatatatattggagtgaaaggtggcagagttagaggtgaagcatatgaaggaaaataatgcgtaagaatgatgtatagagaagctatacaaacacatacaaaacagataagtaaataagtatttaacaatcaattaattattaatgtagtgcgatcgaggccgaggcgcagagcttggaattgagagtagtaagaccttgaaattagggtttgaacatgcgagggtcacgtggccccacgtggacctcctgctcctatgctcctcctttcaaccaaatacctttctctatctagatttctctctctgctttccaaggtgactcgcctttttacgttattataattactattattcttgttaactccttcctttttgttcgtttaattcactaattaattataaattatcatatactatatctaattagcttcttttgttttctatcatatgtcactttaagatattgtacacaaagtggtgagttttctaacacagaaattagtagggatcacgtgtttgtgtttgtgtttgtgtcattgttattgtttttttttttttgtttatttaatagtttcgtaaggattgtgtctaaatttgtcttgtaattatgagtcatacgctagacaaattggtcatagcaatacttaaaagctgggatcttagagtgtgtaagtgtgtgccactgtttttatatattagaaaaatgtgcacttggtttaatttatggtaaagaataggaaaacgtatacacataaaatgtttcactaaaacacaaaaagtttcaaatatttaatcaaatatgtataaagtaattatatatatcgtctatgcataatcgacatgattatacacactaagctgtataataaatttatagaagagtgtcaattggtgaagcttttttcatcatataaaaatattgaatatttatattaattattatataacaaaaaacactacttactacttaattgacaaatttataatttatatcaattttttttaaaaatatctattttatataaagtgtgcctatataaccgaatttttagtttatgagaaattcatgggtgactttttatttatatgaaaaataaaatagtttatgagaaatttatgggtcactttttatttatatataataaaataaataaaataaatctcataaaatcctaaaagttatattttagcatatacaatataattaagaagccataaaatttataatttcgtcttctgttaaataaaaataaaagcaacttaaaacattattataattatgctgctttgtacatggtgcgacaaaaaggaatgataatcttattaatttctccatgttctaactattaatgcaaaccagaaaaag

SEQ ID NO: 221968 - DNA, 1884 bp, Cannabis indica
aaaaaatataatcataatggttacaataaaaatataaccattaaatagtcacacatatgtatatttagagatatttggattatgtttaaaatgcctatatccaagtatggaacacaccctttcaaagaaaaaaaaacaaaactttggaacaacacagcaatgagaaaaggacagatggcaattaatgagtaaaactaaaaaatgttcaaaatgaattccagcttgggaaagcttccaacgcatgaattgattaaaacttcctaacaaccatttccgaacgaaaaatataaatttatttggatttcgggctcaattacttctaatatttatcaaattctcaatatcctttttgtaatgtaataagtctgtcctatcttctctattgaatccgctcactaattcaataaagaaaataatatttatgaccaaacaaataattgtaaatgttaagcactacaagattgaaatatattattattagtataattaaatatcaaatttcacacattttaattaaatgattagtatgagaagcggctaattttttacaaagcattcattgatatttaagaacaatgctcttataaaaagtatgtggtcactagctacataccttaacatttccagcttgtttgatagcatccacaagcttgagctgaagaagaatatggtggcttcggagatgaacaccagaaatggcgcaaatgacaacatcaacaagtttcacagcgtcgacgagactttgatggtcattgaaagaagcggagacaagtgttgctcctttctccttgaacgacaatagcatttgaactctctcaatatcaacatttatctcaggtctgtgaaccacatacgtctcatgaccctcttctaaacttgccttcactagcctcttccccaagtacccagttccccctactatcaacactttgcttttccccattcctctctctatgtatatctattcctcccttcctctatagatatctatatgtttgtttctataaaatgttatacattgaatttcttttatgaggtcttcaaataatgagatgtgtcttttctctctcctcaatgattttttctctttctagctagttttttaggtgaacaaaataatgagatatgtataattttactactataaaattaaactttagaagcggtttttaagacctttcagcgtcgattttgaaaaaattcattactaatattgttccaggtgacactgtaggagttaaaaacaaccgacaccataaaactttatgaaattgattattaagaaaatactgacactaaatggtatgtgattttcataaaaaatcaattcaatttttcagttttaaaacctaatataataatacaaatttaatttatttaaaataaatattaataaatttaaaaatattatttaaattaattttacacaactaaaaaattaaattaacaatatacttaaatgtatttattctaactaaatatattatacaaatatgttaaaattggtccaagtattaacaagttaatatatctaattaaacatagaaaaataatagatataaaaattataagttaacataaaaaaaataagagaagaaaaattcttatacaattcagcatcaatctaagccttcggtaattaccgccaacaattgttttatccattttcgctgtaacactaacaattcattttttgcatcgtacgccttcttttccctaaactgtgaaaagaagtaaatatttatattagtatatatattggtttgtttgttaatataataaataagataattaataattaaaacttatagctttttgatcggttaaataacgattaggatttgcacgtgcgacaatgctactcatgtatttcaatacataaaa

SEQ ID NO: 221969 - DNA, 2193 bp, Cannabis indica
tttttgggagatgatgaatttggtaagttatagttttgatttgattaggtttttttttttagtaaggaataggggaaggggatgagtgaggagtgatgaacaagtaatcacaattttaaatttggtcatcgagatttttgggataatttaccaaacaaaaagggaaactggtttttttttctttttcctgacgtagttacttaattttattgataaaagtatatatttatgggtaattttaaaagggttgttttggtatatttatatctatttcaacattcatgtgattttttttaataattttatatgttatagttatttatcaattattttagcaacaaaaataaaattcaaatattatttgtaggtgacatggtaaacattcaaaatatcatttaagaaaacattcaaaattaatatctagcttagcaaccccaatcataaaatcaatttaaataagatatcgtgaattgttaattgggtggaattgtaatataattaaaaaatatctataatatttttaaatttaaatttaaattttttcatataaaatatctacataattttttttattttaattcaaaagttaaaccaataaaattaaaaatagtattttaaatttaaattttcttatataaaatatctacataatttttatttttaaatatataataatattataaaattaataaaaccaagaataaatattattgaatacttctacaatgcatccctaaaagaagtccaccaatacattctccatctatttcaggagaatgcaacaataaaatccttttagaggagtgcattataaaaaatttctatattatttagctaaaatttatcaatacaaatgtcaaacaaattcaaatattttcactaaaattatcatctcaattaaattattattaaatacaaatataagtaaacatttttaaaaatctaaatgctatgctaattgtgttcataagtaagaaatggggattttggaatctccattgagacgaagtattacaacttcaaatacaattttgtcattttcaccctcaagaagaacaaacacacaaacatcacctacttccaagttattctcctttgcaaatttattccatccacttcttaacattgcttttccactcattttaccattcttttcatatttgaaatgcatataccaactcctcccctccaaaactttgagtatcacatcacatgaagtattttttatatattcttttgcaaatgagtttgaaagtgtctaaaaaataagaacaaaaaaaaaaaaacaattaatcaaacaataaaagaaaacatacaattgaaattgaaaatatctcaaattagtaaaacttaccattcgattttcatacacgaaagaaggttgcatgacaactttgataaatggacgtttggatctaaaaccatcagccatttgaagtgctaaacttttttcatgcccttttagttgtttaacatgttctggaatcttcgatctttttttaatttttttaccattatttttaggtagaatatcaagttgttctatcaagagaaaagagttagacaaaattgacaaagtgtataacataaaaattgacatatccaagatcaagattagaaagaaagttttcatacctgtcattattggattcggatcatattggggaacattaactaattgaaattcactactttgcattctaggttgtggaaactcatcaaaaattttgacaaaatcagtggcatccatgctttccttcttaggtgttacgaattctatttcaccattaaatttggcttgtcttataggcataggacatggcaatgcaaatgccttcttcattttgttgttggaagatgaaacctcatcaccatttataacttctttcttaggggttaagaattctttagtgtcaagaacagaaggataatttatttctattgtatttatatcgaatataataacattaaagtcagaattcccctcatatctaaacgtgagggtgtagcctctttttagattataatgcttagcaaattctggccaaccttcttctaaccaaaattttccatcataaaattgtaatttcattttccatttatagttatcacttgcagtcttaacatatactgtttctgttgatgtctttctacactttttcataaaaaggtaaggaatccactgtaactccc

SEQ ID NO: 221970 - DNA, 1813 bp, Cannabis indica
catcccaattggcccaagtcttgtctttcagatataaaaataccttgtttggaagaatattgttaaatctagaactattctgaaaaagggggcatgtaggtgaagatactaatgtttgggaagacccgtgggtaattcatggaaaagagttcatctctactcctctggccaactgtccgggagaggttaatagggttgtagaccttctattggatttaggagaatgggacatatctaaactctattccatatttaatttggagacgatgtgtaatatcttgaaagggggtaaacctagtggtcagggcaacgacaggtggattcggaccttggatcacgtaggtaattttttgaccaagtttgcctatttagcccaagttttggagcggactcctccttgtactgtggccctatcgctttagaacaaattatgaaattgtaaggcactagagagacacaagtggagcatcttttctaatgctctgcctattcgtgctgttattgcaaagagattgcaaattagcgatactgcctgccccttgtgtggggaaggagaagagacaatggaacacctttttctctactgcaatgtttctttccacttatggagatcttccccatggggattgataccgattatggatttaggtgggcacgtttgggactgggttaaattcctatgaggcttacaaccaaagggcgttaatgttaaggaagtgttcctgtatgcatcaattgttgtggatactatttggcaagcctgcaataataaggtacacaataataagctgagtagcatcatgtattatattaactctatcactcgttgttatgcagattatggatcccactttttcacttccactattgttcgagatatatactcctcgctggtctcctctccgaaagagtggatgaaaattaactgcgacgttaaagtggaaagttcattgatgagtgtggtggctctggctcaggatcattggggaactattttgcgggttgcttcaaacaggctcatattctctaatgcccttattggggaagcaatagcttgccagcttgctatggaaagagcagtggagtggaagcacaatttcgtgattctagagagtgcgatttcgatacagttatcaaggctttgcaaaagaaagtttctgtttggcgcattaataattatattttgaattgtattagactctctaaataatttttgagttttaattttgtctttatctctaaacttggtaattttgcgggtcataatgttgctaagtgggtttttgcccaaaacttaactggaatggtaatcgtgccatctattctagtaaatattatttataatgaccatgaggtctaatttttattttgaacgcttatttcaaaaaaaaaaagtcatttaaagttgagagtattatgatggttgaaccattttgttgaatgaatgaaagagtaatttaaagctgagagttaaaatccttcttcagtactttatttatgtttttttattaaaattaaaataaatagtaataataaaattaatatgcataaaaatttacaaaataaatactttttaaagttgtaataagtgagatacgtgttaaaatatagtgacgactataattgagatatggtggtgataaagacttttaatgtagtcgtgactacaaatgagatacgatgatgatattaactttaaatatagtggcgattacaagtgagatactgtgatagtcagagtcccgtgattcgaaagggaaagagctggagttgtataatcccacatcgccgggaaggtcatgtgtgatgatta

SEQ ID NO: 221971 - DNA, 1418 bp, Cannabis indica
gcggactaatacacccgccgccattaaagattaataccggcgagcctatagcagcggatcctgttggcgtagtattgttttataaaaaaaaatataatatttataaatatttaatttataatttataatatttataatatatatataaatattttaatttataataacagttataattatatattaaattaaccataaactaattatcatcccaaataaattaacaataaactaattattacataattctaacatacaaaataaataactatcatccacacataatacacataattgaaaacttaaataaatccacatataattaaaaattaaaccaataattattgtccatacataattaaaattaacttaaactaattattattgtcttcatcaactatattatttaaaaaatttgaaccgccggtgttcaagtttaaatgggttgtttgtgcattgtcttgagcttatgatattggcggtgaagggtaatatgactgctgcaaagataaaatttcaataaattgtcgagtctgtggttgttgtggtaaattcggagattgttgttgcaaaaaatttagtgattgctgctattgcaaaaaatttggtgattgttgctgaaactgactaggaaaattatatggattttgtgtactgaaaaaattgacccggagaagattgctgcattaaacccccaaacatcatcggctgctgagatgaactcccaaattgaccaaacatcggctgttgcgactgtgatcctccaaagaaatcagagtagtaaaattaaggagattgggatgagcgtccaaacatgttcgaactaagaggagattgggaggaacttccctgcatgttaggagactgctgaaacggttgttgttgcggccttggacaagttgcaatactttgaggttgtgttggtaaatattgttagaggaaactctcaaatcgcgagtcatgcaaatcagaagtgtcgtgtctcggtggaaagtgttcatgcaatctcttaaacatcttagccataataccgacatcttaggaaaaagtagaccctgcttgagattgagtttgactttgacttgaagagccagatgttgatttttccccttcttccccaaagtgtaaccaactcctcgtatatagtcactcctctctccatatactttgcccataaccttgtactggatgtcagacggcagctttaaggttccagaatcactgccacattggctttgaagtctgcttctagccatctcttcctcgatttcatgggtcaattcatcctaaccatagatgaaaattatgtaaaatttaacagtgtgataattttaaggaaaaatacaatattggtgtaactcacccatttttctttagcaacgtcattgactaggttttgtccttttttctagtatggc

SEQ ID NO: 221972 - DNA, 2203 bp, Cannabis indica
ggaagacatgtattgactcaggatgttgacggcaaaggtaatatcaggtcttgacaaggttaggtagagcaatttgccaacaatttgtctatatgaggaaggatcttgaagagcttcaccttgttgatcatcaagtttggtcctaggatccataggggtctttgttggcttgctgccaatatatccagtgtcctccaaaagttgtatggtatatttcctttgagagagaaccaagccttctgaggcacgagcaatttcaaagcctaggaagtacttaagggttccaagagctttgagagaaaacttggtgtgaagagttgattgaagctgatgtcatcgacgtagactaatagggcaataaagttatcttcagaacctcttgtgaacaaggtataatcggccatggattgggtgaaaccttcttgaaggagagcatcagaaagtttcttgtaccattgtcgtgatgattgttttagaccatagatagatttgttcagtttgcaaactatatcagaaccggttgcaaactcaggaggtaaagtcaggccttttggaagctgcatataaacctcttcatgaagatctccattgagaaaagcgttgttgacatcaagttgtaaagtgtgccattgtttgattgtagaaatggccaataccaaattgaatgtcaccatcttagcaactggagaaaaagtatcgaaaaagtctaagccttcttgttgagtgtattcttgagcaacgagacgtgccttatgtcgttcaatggaaccaccactgttgagtttgatcttgtacacccaacggcagcctatggctttcttgttttgtggaagtttgacataagtccaagtcttgttctttagtaaggcaaaaagttctttgttcatggcttcattccatatcttgtattgagaggcttgaccataagtagctggttcgtataaagttgtaatgacaaatataaaagctttatgagaatcagaaagtttatcataagatatgaagttttgaagaatatgaggtgtggaggttttgtcttgtaagatagaatgacactcataatcttgtaaatatgcaggaggcttagtgatcctgctggtgcgtctaagggcatgttgggaggaatttgaaggtcctgtgttgttgctggcagcatcagtgtgctgaggtgaattcgaaggtgctgtgttgttgctgtcagcatcagtattatcttggtccgaaatatcaatgtcttggttatgatgtgtatcctgcaagtttatattctggtttgttctttcaacctgaaaaggattgttagtgcaaggagtatgttgaattaggaaaatcatgaacatgagtatgagagatgttggtagagggaaaaaccatattagtaaaaggatcaattaattttgtttctgtgttgagtcgatgaaagggataaattctttcatgaaagactacattcctggaaacaaaaaaatattttgtattaatatcatacaatttatatcatttgatacctttaggatatccaataaaaacacaagttcgagcccgaggagtgaacttatttatgtgagcagtgagagtattagcaaaggcaagacaaccaaaatttcttagatgctcatattttggtggttcattgtacattaattcataaggacatttattatccaaattaggagtcggagtgcaattaataaggtaagttgcagtcatcacacaatcactccaaaattggatagggagtttggcttgaaaaaaaagagctttagcaacatttaaaagatgttgatgttttctttcggctatggcattttgttcaggagtttcaacacatgtgaactcatgtatgataccaaatttagcaaagaggtctttaaaatataattcaggtgcattatcagatcggaagcatttaaaagtgcaatgaaattgagtttggacataagataaaaaatcaggaatgatttaacagatttttgtttcattaaaaaaatccatgtgaatctagttttgtcatcaaccaaagtgagaaagtatttgtgattggagtgagaaggtatatgataaggaccccaagtgtcacaatgaatcatatgaaatctgaatattgcaaaaccagtatgtttaaaaaagggaagtttcctttgttttgctagaggacaaacaaagcagggattatcttcatgaaaaacatcaaaattacagt

SEQ ID NO: 221973 - DNA, 1024 bp, Cannabis indica
ataagagtcacattatttctaattgaaaaatcttgaaaagcacctaacaccacttaaggtggcatatagctatattagtgcaattagtatatttagatttggcctatgtaataaattttatagaacattattaaccaattctaagatactattttgtagtagtgctaaacactactagtattttataagagaaataataaagggtactagtggtgcctagcactctcttatttgtcaatatcgttattggtctaattaagtatcgggtctcatacaatttaatataatagcttttaaagagtatcactagccaatcacaacgcgacatgtcgagaaagtgttaagcatcactggtgcctaataacaatgctcattttataataacatttcttttaattatatagttgagattaattgtacattattttgtaaaacaaatatgtataatataaatgtacagtacttattattctaaactaaaaccagcttctaatattttctgatattagacactagtggtgcttaacattatttaaaaatttattttatgattgattaacaatattctttaaaaattattagtattaacaataataataataataataataataataataataataataataaaggatatagttgactagtcaaaagaaacattaataactaaggacataaagacgttgggaaggttagtttgaatggagacatagatatattgactactaatgctttttctctctctttgactactaaataaaatgctaccccataaggtatcactatcttctagctacacacacaaaacataataatatccacaaaataaaaacaaatattaaattatattgtaaattataataattaataatatgtataatgaagatgaagatgaagaagattcaaatttgtaatatttatcaactgcaacagaaacatcccaagtgcaacttaatccttttggtattacaacaaggtctccagctccaaattcaaccgaaaattctgattctgattctga

SEQ ID NO: 221974 - DNA, 1584 bp, Cannabis indica
aatcacgtaatacgcctatgttagttagggtgttacaatccttatctccgccgtttcgtgcttgttttcttcaacgacatactggtttacagccgactatggaagcccatatctctcatttgcaagtggtattggcaaccttggaacaacaccagttttatgtcaaccggaagaagtgttgttttgctcaacggcgattggagtacttgggtcacattatgtcaggggaaggagtgagtgttgactccagcaaggttcaagcaatgcaagattggcccttaccgacgaccttgaaggagcttcggggttttttgggtctcacagggtattacaggaagtttgtgcaagggtacgggtccatagctcgtcccctcaccaagcaacttaagaaagataagttttgttggaatgctgaagctactaccgcctttgaagctcttaaacaagccttggtggttgttccggtattggctcttccggatttttctaagccattcgtgattgaagcggatgcttttggctatggtctcggggcggtattaatgcaagaaggcaggtcgctcgcctacttcagccaggtgttgaaaccccgcgctcaattgaagtctatttatgagaaggagctcatggccatagtactcgctattcttaaatggcggccatacttgttgggtcggaagtttgtggtgagaactgaccaacagagcttgaaattccttttggaacaacgtttggtgtttgcggaacaccaaaagtggctagtcaagttattgggctttgattttgagatccaataccgtctgggcattgccaacaaagctgctgatgcgttgtcgagggtccttccagcaacctgtgcagtcctttccacaactttgtggttggattgggatgtggtccaccaagaggttctggccgaccccttgttggccaaggttcacgcggatttggagcaagacaaggaagttcccgggttttccattgaccatggacaacttaggtacaaggggagagtggtgctagctgccaattcctctctcttaccccagtttttgaaggagtatcatgagacacccattggtgggcattccggagaatcacgcgcctaccaacgactacgggctgatgtgttttggacaggtatgaagcagctagttgtcaattttgttcatcgttgtgaggtgtatcaacgaaacaagtctatggcgatgtctccagcgggcttgctccaacccttacccttgcccgcccaagtgtgggatgaaatcactatggatttcattgaagggttgccgcgttcgaaggggtggacacaatacttgtggtggttgaccgtttgagcaagtatggccatttcattccccttcgccacccatttaccgccaagaccgtggctgaagcattccttgccaatgttgtcaagctccatggtattccatgttcgatcatgtccgaccgagattgtgttttccttagtcacttttgggctgaattgttcaggcagcaaggaacacttttgaagcacagtacgacatactatccaccaaccgatggtcaaacggaggtcgttaaccgctgccttga

SEQ ID NO: 221975 - DNA, 2361 bp, Cannabis indica
acgtgggcaagattaataccacgggagtacaacttgtcaataagaaggccaagtcatcgtatacaacatattagttgacaggaagtcagaatacataagcatgacaaagagacaatgaattggccacctaaaggggtctggccggacccctctggtcggccctatggccaacataggtcggccagcctccaacagaggaagggtcggtcagcctatatcctagtaggcacttggctgtccaacttgcaccctggcaggcactttgtgtgcagccttgaccctggcaggcacttgatgtgcagcttgcatctgggacaacaatccaagctaagaattgggcttcaataacccataaaaattgggaataaatatcagctatttacctattcttgggggataattaacctattaattatttattattttattatataacaaatatattatattttttttattttttttagagatattaggttattattctcttgtaagctctcttatataaagagcatcaacctaaacctaatttctctaagtatcaagcatcctaagctctcaagctctaagtctgaaacccttgctatctcttcctatctcttatacacgccctaggcattgtcgaagagactaagtcttcctcatctctcttacttgagatttacctactgattctcactcttgtaatcttaagaaagccactatagaatccacaacccttgtgatctgagtggtattatctctggtattaatacaacaaaaaggggagtaggtcattacctgataactaagggggtcgaacctctataagaatattgtgtcttacttttttgttcttattgtgtacacgttgtagtatcagtcataaatacaactctattgtcagttgaccaaatctgaggtcaacagtttggtgctttcattgaaagcattgtcaatttatttgatttaacaccatggttaacacaaggaaaactttggctacaacttctgcctcatcgggccagctacaactcctgcctcatcgggtcttcctcaagaccctatgaatgttgatcccaatggttttgttctagccacaactggaatgtccatgaatttaacgaatgtggcaaacccttccaacccggaaggtacaacaaacttgaccaccacgactggtcaagttgacactgccaacccggttggtcccaatggccaacctctgctgcctagggcagatccacctttggcaccttgtactgagggtttggccaacgtggagcaacccttgaggaccatattgactctagtccctgatattatgctagggaaacggggccaggaatcggcaagccagtaattcgcgagccttatgtggatttgggagaagatctcaagttggccagacttagagaggctgtctgccaagtcagctaaattgaagaaccacacgctattggttgcaatgcgtttgcacaatagagacatgaatttttgagatggatggatgactgagagtacatcttccgatctcatcaagcagagctagaatgttgtaacagagaagctggtgacatgataaggcagttcaaaaactaccttgagaggttagggctgatcagatcccctctcttagggagactagtcgacaaatcgagcagggtctacagataaacagttcaaccaaattctttaggaactaggacagaccttccgctacccaaaggtggagaagtctttccacatagatatggtggtggaaacagccaaactctggcaaggaacaacttggaaagctggccagggacctctggcaaaataacaccctcacttggccaacctttggccagccagccttttagtggtgcacctatagttggccaacaaggtaaaattcctccccaaatcatccaagagcaagtcgcccaaatggcaatctttaaccggctaggtccgggaacgggtggaaacacccaagacaacaacaactcgagaagtgaatactgatgagtctttatttgtcttataaatatgatcaatttatgtattaatattcttaaattgattcttttaattattgattggtgtgaatttaatttgttaggctattttaaagactattcatgtatttagagtcttttggagggattttagcatatattggtgaaaaatagtagagctcgattttacaaggtataacttaatttcaaatttgtatgactttagaggcagaactgaacttagagctcaacataaatgttttatatctcgttcttagctttccagaacatcttgagtcgtccaattttaagtaatatcgagagagttatggctaaaatactatcagtcatcgtagtaagaaatttctaaaaaaaaaaa

SEQ ID NO: 221976 - DNA, 3245 bp, Cannabis indica
ttttttttttttgacttttcaactagtaaagtaaggcccaataaacataacatccgttagtgaattaagtgtaaaatacttgggctttagtgagtttatggactttaacatcatttctctcaatttgaataataagtctaaaatgtacatttaatctttttacaaaaatacacaacattgagattaacacttataaaatggaaaactaaattaaattgataaaatataacaaaattaattaaaatttaatctaaagatactaaaattaatatttatgcaaaactaaataaaaccaaataaaagtcactaaaataaactaaaaatacttgagaacaaagctaatttaatgcccaaaaagatataaataactctattttcatagagttatcagtaagtaaagttgcaatagaggaacaggtgttccatcgattctacagcctccccacacaacaggcataattcatcttcaatgggaattctcctagtcaggagacaacggattggcaaagcattcgaaaggatactccaccaaagactttatgtctttctaaaattttggagtttcaaagtttattccacaatgtcggcgcaaccacacaggtaggggctctctcgtaagcctgcatcaaataagcagactttgtagtgaatttaccgctcacttccttagtccagatccatcagtcacttccctggccgctagacctacccccttttaggatgttggtaatagtctcatagtcaaacagggacttgagcctagcaatgtcccagtccccattaaaattaagcagatccgccaccttaaccgccctttcagaacaagaattaacgggtctcggatagaactctttaccatgaacaacccaaggatccgtccaaacattcgtatctttcccattcgagacaattttacaagcccctttcctgagaattgctttagatttgaccacatttttccagaaccaagagtcgaaatttttataggtggcctccagaaacggcttactcttcaagtatttagctcttaacaccctgcagcaaagagactgttcatcagtaagaagggcccatccccatttttccagcaaagcctggttcaattccaaggatttacgaaaaactgagtccacctcttgatttgggaaggcataagtggtcccaagccttcaagcacaaacaacgattaccttgctcacatccctgatcataccatcaattctggaagcaagttttttggaaagcttggtggtttgcatagtgtagactggcatggcaaggcccacagatttgataagggtagcacaaccagctttcgaaagtaacttcaacttccaaccatgcagcttcgagaccaggttgtcaaggatgaaattaaaatccgcatccttatgattagatctaaaaagttggaggccaaagtaattaatgttcgtggtagccaagataagccccagtaattaatgttcggcagctgcttcttaactttaagtggaattttcattgttatgatttttataaaatgtgactttttcaaaaaatatatatatatatatcttataaaataaattaaaggaaaaagatatatcctaaggaagagctagttagctttaactatttttcgtatattttttaattttttataaagtaactttttgaaaagattttatttttacacgtgataaagaaacccataaaatgtgtaatttctaattaagattaagtaatttgggttatagaccataaatagtcggagatactaacataattgatatagattttctcccttttcttctgttagttgctgatagtcatttcggttagcttatatagagttttgtttacttaaaaatttgtcctgatgacatagacaatacttttgacacgtggccaaaataaaacaatcttgggcaccatccaccgggactaatagtggtgaacttgggtattagaaactgtgttagtgccttggttgacattagtaggcgcccaagtaggcactatgatcctgcgaagatgtttccacctatcgtccttcgacaaagttcaagtcaacaggttttagtgaccttaaaacaatgaatcgtgaagttgaagatgtcaattggacgtcccagtgctcaacctgggtccaacatcagtgttgagcttccaagttgacatcatgtgcgccatctcgcatcaattttggttcccatcaacttcttatgggaatctgcttagccattgccctaagatacatatgagagacacgccctagccaagtttcagacttcggagatgagtttacatgaaatggcacccaggcacccgaaaagcccttatgggcgcctaggttgacaaatagtcaatctggccgcaccatggctggggtttaggtttttggagacatacttggacctcgattcctcaaatccatcaaggaacattgcaaggacatgaaatttcatcaacaacatctcgaaggagccaatgcataactatgggcgcccaggttgacatttcaacctgggcaccgattttgtttaccaagttctgcccgtgcaaatcagacgaaactaaaatatatggagcaattttcaccaaaaagaagatagagcatcaacgaaactaattttgaagatgtcgacccctacttgggcacccagtgcatgccccaaggccacagtgggcgcctaggttgacatatctcaaccagggcagaaaagttatccatgcatttcccttattttaattcatgaggaagatacaagtgctttcaagaagcaaacaaatccatctaggccccagtggaagagctgagcacccaaattgacatcaccccagtcacttaggtgcccaagttgacgtagtcacaattctagtggttccgtcgatccgattgcgattctatctcgagcattcttcttatttttctctaaatatgacgatatgagacttggaattatgagaaaatatcgttcgtttaggaagtcatcctacatgaattactaggcaccagtgtgaagcaattgggcccccatgttgacattggcctaggccttagtgttttgtccttcaaacaacaaattttgctctgggcatcggtcttattttgcccccaaaactaagatttgaacacttttgtcaagtcaatatatatgtgtcacgagcaagttcactgacaaacatgtgcactattgatcacctgggtgacgaccatgtcatctctagtaaacaattgggaatcactcgtgcatatcaag

SEQ ID NO: 221977 - DNA, 2722 bp, Cannabis indica
caacaacccatcagtagtttcagctgtagtatcaataaaggagctaaaaaactcgaaaagaaaacctacagacaagcttgacctataagcaggacttgaagtgccatcttcagggacaacagtagctctaaccaatttactagcttcataaaacgcatcatcagttagcacttttccagctaaatactcctctgcctttctagctctgattgcatgtttagtaccataagcaccataagccaactgacagcggctcactaaaactccaccggaagctttacaaggagaaacttcagccaagaaggcagcattcaggtaaggcaatgcatttccaaggggtctaggtgcggctcgataggtttcaaacaacaagacagaatctttttgatgagaagcttttttggttgatccccagtttggaattttaatgcttgtaagtatacttctaaaatctagaggtggcatttgaagaaactcttccaatgtaaaagtttcacatctggtacccctcatcacctctaccatagaatccgcagctagaagaatagtagctatgtctgaaggaaaatgcctcctttgtgccatcaccaaatttccccctatactagctgtatttctaataaatttgctagcaattttctccatatgattcgaaattttattgaacaccatctcgcctccggagggaaagcgagcttgtttagcatccttcagaacttcaattactttcgaaattgttacagcggctccaaatttgaacccctctttatccatttgaatcatgcagagttcacctatgccttttagatcaatgtattgttgatagtgctctaattccttgtagtaaccagaccctgtgttcccagttactaatttcgtttcagtcccttctccaacattattagaattgagcaagttccgtagctcctcaagactagaaggacgaagccaattatctcttttagaatccaaagacatgacagacctgatttcccttttcaagaactcaggaaatgtacaaatctcattgttacggtcataaaacggtaaactactaacctttactttgttactgtcttctttcttccaaaaggagttgagacccaaatcctcaatatcaacattagctgcaaagctcttgcaaacatcagcaatggatcgatatccggtacagcgacacagatttcctgcaatagccttttcagcttcagaaacagtgatcttagagaaccccggaggagggtccactcgatctgttttctcagcattgacaagagctgaaaagattgaaacacacattccaggagtacaaaaaccacattgggaagcatggaaaccactcattctctggtgaattgagtgtaaaccatctttgctatttccaagtccttcagatgttgtgattgaacacccacctatactgctcaagagagtaagacatgaacttgcagtcatatcctcaactttgtcatttactggatcatacttggatagcagcacagtacaagcaccacagccacctggaaaacaaaacaaaaaaaaaaacatgaaatttcaaggacttcaatagatattaccgaattttcccaataattttgttcctgcatacatcagtgtaccaaaaatttacccctgtttttctaattgaaaagattatttaagaatggattttgttattaggtgccaatactgataaattccaaatctatacttgtgtattttgctcttttcttcttacccaacgtaatacacaagaatctggttcatagtttagacagagaaaacatgggaatttctcttagcaaatcactccatctctagattactacttgttctaatacagcacatggaaaacaaatccaacacagaaagaaaacatttaaccaaaagaaataggaaaaagagaaaaaaacagaggaagaaagagaacccataatcacatcattaattaaactctcaagtctcaactaacatacctaatttacaaacaaatagagatttttgagctagagggaaagtaaagaatgaaaaccttcgccacaactgagcttaacactcttgaaacgagtctgagtccgtaagaaatgaagcaaagtagttgaagggtcaacagttggaagctcgaacctcacgccattaatggcgaaaaccaaacttccacttcctctttctgtcactgccattgcaagcttcagacacagtttttcttctattgtttctagtatgaatcttactctctcattctcaacaaaatatttaataataaaataataatactaattaaaaaaacaaagaaagaaagaaaatagtgttagatattacaccatcttccaaactttttagctcagaaatacaaaattgtcaaacctccatacatacacgtaaattgaagaaacaacaaagtagtaaccagtaaccacattttgttttttttttttattgataaacaaaccacaaactcacagtcagtgttgtttttttttttttgaaaatgtcagtgtgttaagataaagaaagaataaaagaaagaattaataaataataatcaccgccaatacaataagctaacatattcgttatttaaaggattaatcctttgaccggtatttttgcattgggtacgtttggaatacaggattaaaatgaaaattaaaataaaaatataatcataaataaggctaatgattccaacccgctttctcttcttgcggtttgagttact

SEQ ID NO: 221978 - DNA, 2602 bp, Cannabis indica
gagagcaactcgactgctagtgataatcatgcgattctccctcaattatccacggctcaataccagcagctgcttaacttgcttgcttcacaacagagtggtatgaacattaatgaacctagtacttccacgggaaatttaggtatcatactatcacattgttctagttctcctatacataattcttggattgtggatacaggagccactaggcacatttgttctaatataaaacttttttaatatatgtgtaagataccctcaattaaactcatactgcctaaccatgattgtttgattgtgaaccaaagtggatatgtcaaactagaaaatgaaatggtcctaactgatgtattgtatgctcccacattcaaatacaatatcatatccgtaagctatctcactaataagtctgccaattctgttctttttacctctgatgagttcactatgcaggaaaagggcagcatgaagatgattggaagcggcagtaatgtcaaagatctatacattcttgacaatacaccaaactccagtcaaattctatctatagatgctgagacttggcactctcatcttgggcatttatctcacaaacaattgaatctcctcaaagacattttgaattgtaaaatttctgatttacataaagaaatgccatgttatgtttgtcctattgctaaacagagaaaacttccctttcaaaacagtattactgtttctaataaagcttttgatattgttcactgtgatatttgggaaccataccacattatttcacacacaaatcacaaatatttccttactttagtagatgatttttctagattcacatggatatttcttttacagcataattcggatgttagctttgttatacctcaatttttgagttacatacaaactcagttcaatcaaagttgcaaggtatttcgttcagataatgcaccagaacttgcctttaaggagctgttttcgaagcacggaattctgcatgaatattcatgcgttgaaacgccagagcccaatgctaattaacccaaatgccttgcaccaaaaagtaaaggagtggatggaccaagcctcttcttcagcccatgacactaacaatggacaagcttcttcaaccaaaggtattaagttttactctaatttactctgtttccctggttttactctactgtatttactggtttagtataggtcttgttcagttggttgtatttcattacacttaattagttagtttggttgttacccttagtcggttagtttgtttgctgtaataacggtttggtttattcactcttttgtaccatggttcaagctctatttataggcttgacctctctttgttctgtaagtaattaaattcatttttcctttttctcaataaaaggaaacaagaagaaggagaagatggaagagaaccaggcagctacagagcgcgtgaaggaagagtgcgcgtgaaaccgaaatggctcaaagatttcattatggctgtgcgttgttgaggaatgaaattgatggtgccaaactccaattctgttagcagaggaattacattttctttattgttagttaatataaatactctttttgtaattttgagaggattgtctattgaatgaattagcaagaatttgcttgggagacttgtcctgtctcgaagagggcagtttattctatcacatatcttgtcgagaccatcaaagtaagggtggtccatagctttctttgctgagatacgctttgagggttcatactgcaacatttgctgcaaaagttggataatatttttaatcaaatttgagaaacttgtcattatggtattaacaatatctttatattgtgaatgtgatctctttacataacttacccacaacagatccaatccacggttgtccaagttaggaacagccttggtcaaactgtggggatattcatgccagttcattagcaaagctggaacatcagagtctgcaaaagcacaagttcatttctacttaatgaaaccacacaatacatcaaaacaattagggaaatgattattactttgacggtatcaagagggattttctccgtagtttcacgaaaggaacgaatgaatttcttgagatcagtctccatatactcaaacacaaaatacagaactgtcttcccttccttaatttattcaacccttgtttcacatccattaacctaaattcaattaaaacaactgaccttctctctaggtctgtacaccttcacgaaagtgccttctccaaagaatccatggccgccggtgtttccatccagagctacagaataatttcataatttattattcaaaatttggatttcttttcttctaaaatatagtagtcattttttcattacaaaaaataaataaatatgcatatcaaaaactttccccttttttttttcatattttttttaaatattccaatcctaattaaatagcctaacaaaaaaaaaaaaggtaaactaaggtctctcctttaaaaatataaataaccttcatttgtcttctcatctttctattactctttccttttgcctccgtcaccttcaccaatacattaagctatgattcctt

SEQ ID NO: 221979 - DNA, 1213 bp, Cannabis indica
aactagcaatacgtggctcggcacgtacattcacctagtatatatatataaagttatggtatacggcggtgacatgtcactcttaaatgactttaaatacctttatctattcactcttaattctctcattttttttttaatttttattaaattttaaatattttttaattaattaattaaaaaaaattctatatacctattttattaaactaccctacgtataataataaaaatagtcaatatcataatttaaaatttgaatttgaaattgtggcatttgatcctctaaaccaacctataactaacttacccactcttaactaacctagctaactttcagttatgttgattggttagttggtgttggttttgcacttagtttctagcaataaattgtacctatatataggcttttcttttcacttatgggttagagaatagggaaagaattttagaggttgagtgcttagttttctaagctctgagatcatgttcttgaaggggtcaagaactgagggtgtacttaggtgttgattgagaaactaagactgtttctttggtgtgtatctcgagtgcacgaagagcttggttactcagatattagtgattgtatttactctcctattctccatattaatgaaagcaaagatggtgtttctcagctggagtatggccaagaatcaacttaatctcttggaccagaaccagaataaatcttgttgccttctctcttgattcaattatattttattgtactgtgtttgtgtgttgtttctgttcttgttaattgatttagtgcaggtgtgagtattgaatcttgttgttgttgttgctgaatttacaacaaaatcagaacttcaggttcaagatccaataaggaggaaataaagaatcaagattcgaccaataaactcacctgcaaccaatcatgacaggagcaacaaggttcgaacttgagaagttcaatgggacaggggattttggcctgaggagagaaagcttaaatggaatacttgttcattaaaaagttgccaaagccttaaaacccaaggaagaactgactgacaagttgaagaaagaagaacttgaagacatggaggaattggcatactacactatcataatgtacttgtcaaatactgtaagaaggaaggttcagaacatgaagacagctcaagaattgtggagcaagcttgaagagatttacatgaaa

SEQ ID NO: 221980 - DNA, 2980 bp, Cannabis indica
tttaggttgaacattcacatatttgtcctaataaaaatataaaaaattagtattttttataatgtgcggtgcggtgcgatttgaactgcatatgaacaatttaaaacagcaaaccgcaccgcacttcacggtttagaaaaaattgaaaccgcaactgcaccgcaaataatttcaaaccgtattttttttttctgtgtggtgctgcgcgagcagtttgagtggtttgatgaacacccctattgaaaatggcatatcaagaagttaaagcagcaatcaagtatggaaggaatgtaatctctttggagggtgttcatgcggcattaaaatcaaaggactttgaattgtaattctagaaggagactaggaaagaagaagtctatcttgcaagaggaagaagtccaaagatcaaagtagtcaccatcaagatcaaagtaaaagatcaaagacaatcgacaatgttatcaatgtggaaagattgaacacactaaaagattttgcattcaattgaagatgcaatctggtttcagatcaaactacgatgacaaaagatgcaagagaaccccgaactagtactcaaaatctaatgatcatggaaatcaaagaaaagactctgcagctgtggctgagagcagtggagatggaagtttagatggggaattattctctattttcgaaaataataactagtaaagagtggatccttgattcaagatgcaattatcacatgtgtcccaacttagaatctttctttgattatgaagaaactagtaatggtggtagagtactgataacactatgaaaatagagttatttaattttgttatgcattaatttaagttttttctcaagtatttttagtttattttagtgacttttatttgattttattgaattttgcataaatattagttttagtattcatagattagttttagttaatttttgtaatattttatcaattttatttagtttccaatcctaaaaatattattctcaatattgtttatttttgtaggagcttaattgtacattttggcctagttatcaaaatgaaaagaaattatatgaaagatgtttcataaaagtcaatatactcattaaaggccactattttgtgcattatcatttttattggacaaatgccttttcaattgataaagaccaaaaaaaaaatgagagagaagagaattgggctgatgtgcttggcaatcgcaaaataagaacggttacaactcaattcgatgtgatgcttgtgataccaactatcgaacctatgggaaataagatctacacaattctctatatatagaaattatatcggctatccttaaatttaactagtgttgtttgctcagctctaagaacagttggggaccatccacaaataccaaaattattacttcgggaggcatcatcttcagcttcttgaggggtcaaattcttcatataatggttacgagccacataatccctatcttcctcgtcggcaggtactggaacttgtcgcccgtctaaaaactttgggaccttgaagtcattagtggattgatcttttcctagaagggcacaaaccttcaggttgttctcataaagcaaaaattcagctgttcataactcaaagggaaggccaagaagaatcttgtgccttttctcgatctcaggagttggaacaggtctcctagtaatcgctgttaacataacaaaaacaaaattagtaaagtatggccaatatgcattgaattaaaactcaaaacaaagtttttgagaaaagttatacttacgtataatttgaaattttgtggtgttggcggggaaaagacccgtggtccaaaagaagtcatccttgaactcctttttattggaaagcctcacaacaatcttgtggtcattggtatgagtcccaaggtagtagaaatcacctgtacctcgcttccttccagggcaggctttgacaggaatctcaagtggaattgggcactcccactgcagaatatgatataaggactttaaacaggccagtatcctgtatgagtttggtcaactagaatggagcaataccaaggtagttgcagaagtccttgaaatagtccctcagagggagaactgccttagctcttatatgttataggctccaagcacctattcgagagggctcgctggtgttgtagccttcatcttggactatacgttcaggagggtgacagttgaactctccctcagcaacagacctaatgcgtcatccttgttcattcttgatgccgcatgaccttaagacttccccaacataagatcctatggatctaattttggactcaattaactcagcctcaaatgtgatagtaggatcctgaggggtcttcgatttacgagctttctgagctattatttcaaaatctatgtcaactggagaaagagtaacagtgactaggggtaaaaaaatggacttgctaagggaatatcaattaagttggaaggttcaggccaagaagcttcttgcaaatagcgacgcctaccctcgataatctcttgcaagaatcgcctactatagagactagaagtttcatcttgactaaacttaacgaggtgatccttaattttctcatcatttaattcaagaatagtttgaggtctttgatttttgggcttaaaatttatggcagaaagttgaagacaaacagattctaaggattttgggattgtaatttctgagataaattgggacatggttatatataataatgtcccaatttctggaaaaacaagatacaaataaaacctaaaattctttgaattgtataaccttaaaatttcctaaccctaaatttattaaaacattcaaaatcaaaatatccaaacaacaaagcaatgcagataaggaaaacacttaccaagaaatagacattgtaagaacagaaggaaaaatcaatgaaaaagagtgtgtcactgttgggctttgttgcctaaataaaactctatttca

SEQ ID NO: 221981 - DNA, 1577 bp, Cannabis indica
tgtgatagcagcaccacgagctcaccttccctggcgatattgctccactttcttcagcactagatatcatgctataaccaattctgaaagataatatttagaatcaatatcatgcattactatgtcttacttttagtaacttttagaatgagaacttttgttcgactaaaaatggtgcattaataaaagatgagtaaaatatgatggacagtctagtatgaaataagccacaaagcgagtaacacggttgataagtgtctaacatggtgtttagttccatatcaattaagttaagaagctacctatccttaacacttcggcatggttccatagattcaagtttggcagcaacatttgcaacacagccttctgcaactctgttgaggtaaaccataggagttcttccaatcaactgcatcaatatttcagtataacaaaaaacaaaattagggtcgaaacataggcaaatatcactcggtatgcatatcaacaaatcaaatctgaaataaagaaaggacaattgtattcatttcaatgaaaaacaacaaggaaaacatcaagtgatcatcattcatatttggtttcaacttgtgataacacaagtcaagatatgctcaatactcaaaaagggtctgaggttcgagtccctcctggtttccgaagccaaagaaagtgtataacttgttatgacacaagatacaaataggccaagtaattcaataaatatgctcaacactcataaaagtgtctacaaatcactaaagagagttaactcaaatgttcaaacatgtgattttttctcataaggtctaagattgtagtccctcctaggacctaatataacaattattatagtttcctcgtctccaaacattctaaaagtctatatggcatcttaaacaagagaaattttccaaatgaaaatatagcaaaataaccattttaaatcactcatgctaccaaacatggttaatttgctcataaaaatgttcataatggttattgtttaaaactactttcaaggttagttggttcaagctttcaaattatagagcatagacataaaaactacaaataaaaattggtaaagcattgaaatttaacaacttcaaaccaaaaaaaaaaaaaaaaatgagaagcttaaaaaattgtcatgaattgagtcaaaattcttcaaacatgaaattcaaacaaacacattatacataagataagatgagataatgggacctgggttacgtcttcagcgatgttaacagctccaaattcgaggtcttcttcagtaatggctgcattgatagaacaagtccggcgcagtttgagatggtggcggggaaaaccggtgctggaaaaggaaatggcgttgggaggtgtagagaggagaaaaggagaggactttggaggaatggagaggagataaggaagagggttatggaggagaggagctggtagtatcgccatttctgactgttcttcaaaacaaaaggttttagctttgaagatatgcctccagacaatattttgaattttgcaccatcagtccctcgtttctttcatattttcaaaattaacctctt

SEQ ID NO: 221982 - DNA, 1907 bp, Cannabis indica
ctttttagggcatattattggaaaagatggaattatggtcgatccgaaaaagatggagtcagttaaaagttggccaaggctaagaactgttatagaaggacgaagttttctcggattaggagggtattatcgacattatgttgaaggtttctcaaagatttcaatgaaactaatgaaattgacaaagaagaaccaacaaattgtattgtccgaaaagtgtgaaacaagttttcaagaattgaagagcagtttatcatagcaccggtgttagctttgccattagatcaagaaaagtttattgtttactgtgatgcatccagacaaggacttggatgtgttatgatgcaagctgacagggttatagcctatgcctcccagcagttgaaggaatatgaatagcgtatctaacacatgatttaaaacttgttgtcgttgtattcgctctaaaaatatggcgacattacctatatggagaaaatgcgagatctataaacaccacaagggcctcaagtatttcttcacatataaggatttgaatataaggcagagatggtggctagaattagtcaaggattatgattgtgagattctgtatcatctcgggaaagcaaatgtagtggcagatgctttgagcagaaaaggtcccggaagagtctttagtatcgtaatgatagcacctcagttggattttgatatggttaaggctggaattgagtttgtggttggaaaattacatgacttgacactctagtcagattttttggaaataattagaaagacacaatcggaagatgttgagctaattaagattcgggatgatgtattagcaggtcggcctaaatatttctcgatgtcaaataatagaatgttgctttacaaagcgcacgtttgcgttccaaacagtgatgagctcagaaaagagatatttgattaggctcatactacagcttattcattgcactcgggaaccactaaaatgtatcaggacctaaaaccctattattggtgttgtggaatgaagaaggatgtagtggaatacatgtctaaatgtttaacatgtcaacaaatcaaagcagaatatcagaggtcgacagggttattacaaccactaacacttcttgaatggaaatggaaggatataacaatggatttcgtgtggttgtttgcctagaaccaccaaatggatctatgactcagtatgggtcatagtcgaccgtttcacgaagttaacacatttttttccgtgaaaataacttatatagtagatcagtatgcagagttgtatgtgaaagagataattcgtctccatggagctccaaaatctattgtttcagatagggatccaaaatttacattgaaatgctaggtaagccttcagagagttatgggtacaaagctaaagttcagtatagcttttcattctcagactgatgggcaatcagtgagaacaatacaaatactagaagacttattgcgagctcgtgtcatggactttgaggtttcatagagtaagtacttacctttgataaaattttcctacaataacagctatcaaagtataatagagatggctccctatgaaatgttgtatggtagaaaatgttaatcccaaattcattgggacaaaatggggaaaggaagtattgggtcctaagttgtttagaggaccaatgaagtgatgaaaagatcaaggctcggatgcttgctttgcaaagtagacagaagaattatgctgatctgaagcgtagagatattgcattttcaggcaggagaacatattttcctacgagttttcaccaatgagatgtatcaggctcataggaaagagcggaaaactaagcccaaggtttatagggccatttgagatactcaagaaggtcaggcaggtagcatattggctagcctta

SEQ ID NO: 221983 - DNA, 1571 bp, Cannabis indica
ttttcaagacttactcttttctatcaaacatttcaactgattgttcttcatatgaaaagtttggctgaaattccaaaattctgtaaatatgagacgaatttaattaacacatatttctgaatcattaaaacataaaatatgtacaactactagcattgaaggtataaccaacctgtacaacacttattcttatcctctcaaaaaattttaaaaagaccaataaacttagaccttaattttttttttcttatcaaaatattttactcctttcattaagtgaaatatatataaaaaaaaaaaaactatatctctaactaaatttctgttgttttgaatcaaaataactcttctatttactctaaactgagaacatctaaactttaattttatcaattatctcagtagatagatgatctccattttttgctgaaaccatctcgatagttagttgattggtactttaccgaaaatctgaatgatccaatgttgtactaaactagttgtttgacttcataacttaaaacttttttagtttttaaaaattaaaaacagtttttaacaactaatagaggttgtttggtaaaattttttaagaacaattttccaaaaaattgaagttttaaaaaattaaaaaacagaaaacatcaaaatattatctttaattttcaaaaacaattttttctgtctaacatattatattttatatttttgcttacatactcgaatcctaggaccagcgttaaaatatattaattttttagttaagaaaaaaattaataaatagttttaaaaaatttgtgccaaacaccattaaatttttaaatagaactaaaaaattattttttattccactacttaaaaacactaaattttaaaaattaaaaatataacaataagatcaattcctatcaatagttattattttctattcatgtatatatttatatacatatcaattagtatcaattaacttacgtagcatattaatctattcactataaattaggattattacattaatattattttatttagatgatttgtatatgatagtttttggctctctactatatattttgtgtatttgatattcgaaaaatataattagtcaaccttttcatggtatctgagcaggtataatctttttccattttttttttactttctcagccgctttaacattatttttttttcaatggcttctaccaccattcccaataatgatgacccaaacactcctcttattgttgttaacctcaccaatatcctaaagctaacaacaacaaataatttatcgtacgtggaagcttcaattgaagctactctaattggctatggcctcctcaagttcttggatggttccttcccggcaccgtcttctaccgttacctcagcatccatcatgttgtggacattgtcccacataaaataaatggtagaaaattgaaccatatataagaacatgggctactccactcatagccaattgattttgagatggaactccatgattctcaacatggtatcagagccatatcctttgcgagcaagtgatcctatccgatccgcac

SEQ ID NO: 221984 - DNA, 1366 bp, Cannabis indica
ttttccttttttgtatttttctttttttcccaattaaatatgtatttaatatttttaaaattaatatatatataattaaatttatttagtaacaattgatagataatatttatcaaaactaaaaaataataaaaaattataaacgatgaaagtgagagacgttatatccgggtgacatagatgtctcaatataggatgattttttcctacttaaaatttttgtggtctttttgctaaccaaaaaaaaagttgtggtgtttgttgggggttgaagcttgaaagacacgtgaattgagaaacaggcaacctcacatgtgatactcttctagtgacattattttttttctttcaaattgggcccttctcaaattgatctcttccacaccagtctccttctcctaaattggcagattttccactaaggaatatatttaagttctcacactacgagtggaaaacatacatacagcatatagaaattaattaataaataggaaaaatagatatgcccttagtattatcaataataatagatatttaattctagtaacaaaatcaagagaaccgaccttagctcagttggcagagcggaggactgtagttggttaaccctgaaagctatccttaggtcgctggttcgaatccggcaggtcggagacatgttctgtttttttttttcaaaccacaggatctcataattccttggatagagatatcgaagataaaattaagcagtggttaaaattttggttaatatatattatttctttttaatttaaattatacaaatatataaaattaaatttataatcacaagagttttatttttaattatttgttggttaacataaatgcatgcaccgtcccacatgattgagcggatatgcatgactataattaacctagtggaatgaaaatggtaattgaaaaatgggtccattccaatgtcatttcatcatatgtataaatatcttatatactttactttatttagaaatatatttccacttaacaatgtaatgcctaaaatagtttgacaaatgtaataaggactatatatggctatgtcgtcattacttaataggaaaaccgaaaaaacaaaaaacaaaaatacaaaaaacggaaagataataggaaaactgaaaaacaaaaaaagcctactattcacacttcacagtaatgatcatgaacagacaaaatatacatgcatgcctatatgactccatttgtctcatctcatccaatatatacttatacaatattatattagaagacgtgtaatctctctcttctttccatttcatatatatgctcatatatatacacagcaaatgaacattactcgttacaaactggccttttgtgc

SEQ ID NO: 221985 - DNA, 1856 bp, Cannabis indica
acccctacacataagatttgggtccttttcctacagaaaatactctaaatattgttgacaactctaaaagttatccaccatgatcctacatcacattaaataaatattttttttttggtaaaaaataactttctaaaaaaaaatggcatatgaccgtggtctatactgagcaacactctatcaaattagtcttaaaaattgaaccacattatatagagaaaattatattatatacctattttactttatctgttttaatttttacttttattttcatattctttaagatatacccactttatagatgatgctctcattatactttttaagttaatataaattatgtgctaaacttcagtggagggtgagggtgggtatattagtcaactcactcatgaaaacttctacattttaataaaatataatataaaagtatttttaattaataaataaaaaaagagatatatttcaacctatccccactatacaaaaacattctaatggacaactctcgaattgctgcggccccatccccatgaaaatgtgcatccttaattactactaactattatttcctgttggaagagcaggaggatttggtctttattggaaaagaggggtgcgttgtgaagatgcacaaggtgacaagaacttaattagtattgttattgagtctgatccccctggcaacccgtggaacctgctagggatatatggccccccggttttagccggaaaagaagttttttggaatagagttagtgatctcattatcaacaattctattccgactttgctcattggtgatctaaatggcacgttgatggatcatgagacccttcattatgcaaaaagaggaaatgctacgaagtattcttttgaccttcggagaatggtttcaagaaccggggtaattgatttaggggcccatggagggaagttcacttggttccaaaaaacatcagcctccgggagtgggtgtacactgaaaagagctagattggatcgagccctggcttctgtgaactggaggatgcttcaccccaatgctattgttcgagttcttagtgctgccacatcagaccatcggcctattctccttgatacggaaggtggggcgaacgttagaaaatcgcagttcaaatatgaactaatgtggggtagagatccgaaatgcgtctgggtagtaaaaaatacttggaaagatcaacttcatcataatcctatggtgaatttttatcgaaagttgaagaaaacgaaagatcatctaacaaaatggaataaagtccattttaaaagtattgggcaacaagttaaggaggccaggacaaagcttgaaatggtggagaaagcaagcaatattcaatcgaatgtacttggacaggccagagacaatctaaatgaagcgctggccagggaggagatcttctggagacaaaaatcaagagtttcgtggcttaagcagggagataggtgcaccaaattcttcatggctaccacggtggttagaagaagaaggaacttcattcaagaaatcaagactactgacgggacttgggagagagaccagctaaaaattgcgcaattatttattgaaaagttccaaggtatttttgtggaccaaagaaagtcttctttacctcttgagttcggccaggaaagtccagtgattactagggaggagaatgctaaattgaataccatcccgtcattcgaagaaattgaagcttgtttgaagtctatgggccaagagaaggccccggggccagacgggatgtcaactgggttctatcgtcaacactggataacagtgaaggatgatctctttagtatgatctctcacttcttcaccatgt

SEQ ID NO: 221986 - DNA, 1812 bp, Cannabis indica
ttctgctgctgcaaacacttacagtttttatattttcttatattcaactgacatttgcaaaaacacggtttttcaaatacgtatatataatcacattcaaatgaaacaccaatattgcaatagttaaaaaaaaaaattcttaaaaatcaaaatctcaaaccttattttaaaaaataaaaaaaaagtacattacttattttaaaaaaaattaaacatacatatattgcacttaacatcacctaattaaacataattaaaaagaaaactaattatacgtgtattgcacgtaacatcaacctagtaatattacaagtgtggataagcaactcctcaatcactttatttttgtcattttttaattcttaaaatttcatttattttttttaattaccaaatgaatttaacaaataatttaaatattatagaaatgtaaaattttttatcagaataaaaatatgctctagaaaccattcacatagtttcaaaataataatgtagaaagaaaaattatacacgaaatttttatatttgctatcaatattctttcagatattacagctagtctaccgtgttatatcgagaggatgaaatctattagtaaagtctcaaagagttacaattgtatttgacttatacaacataaggctccctcttaatattatcgcatttcctttgtattccactctactaattgaattctttaaaacgttgttgtgttggaattccttcaaagcaacaacgaatgcactcttcctcccgatgaaagacttcaaaaaaggacttctctcaaaacttgtatcacatgtctaatgaacaacaaaataaacaatcaaaacagaaagaaagttgaatgatacataacactactacaaaaaaaatattttcgtgcctaggcgcggtccccactttgtgcccatttatctgttatttgatcttttctatttttttatatctttttcctttgatatttttctaatcttcttctattttaaatctgcgaaaataaaagataaaaagcataaaattgctctaaacacgagtaaaactaaattaaaattacactaaaattaatctaaaaataatactaaaaacaacctaacaaattctcccaaactaaacatttactcgaccttgagtacactaaaacaaaaaataaaagttaaataagtcaatctctagaacatgagtaattttcaagtagactcaataatatgattatgaaaaatttcacttatgcatacaatccagaatttcacttatgcatacaatccacgaaatcatagaatacaattaactaacaattgaaccactttatgcatgcctatttcaacatcaatccgctaacccgaaaaaatattccatatgcttgctatacttattattctccactaatataaatcaatgcacaactaagaatcaaaaggtctttttaggcttgtagtgttaggcttaggtagttgaaatggtcatttaggcttacctataccataagcttctccaatcatgtcacccaaaaattttcatgcacaatcctaatatcttttttttttctaattacatgagagacattattgcaacaactttatatttatttatttattttcaaatttgacacttatttttttcttttcaagttgctgtcaatctaatttttttttttcatattctctcaatttttacactttttccacacacatacaataaactttccatccaacttcccccaaaataaagattcacttacggtataagtacggttaaatttttggatattcatgggtttatcttatttaggctcaaaatgtgtagaaa

SEQ ID NO: 221987 - DNA, 2746 bp, Cannabis indica
ggttgcagcctcgatcttccatcaacaagagtgtacaatttagtctcttgatcgttactaagtttacgagctttgcatacacatctccaaacatgtcccgccaatatctcatatgttgtatacctaggtttgttcttgtcatcgccattagtataacttacacacttggcttttagggttttgagttgttcattggtcaacttataaatagcaacatcaacttgactctcacaagaagaagaagtagtagttttgatcatggggagagggggtttgtattcaatgtgatcaaatataggtttaggtgggtttcttgcacaaagcatagttctatctataaatggtggagatttgagatcaacaccacgagcaatatcagaccatgaatttagaaaatgaacggctgatataccatctaccacatggtggtccatggcaacaccaagtgatactcctccacatttgaagtatgtgacctacattttttatcatataaattaaattcaaaaaaattattttcataatatacaatattattcgaatcacatgcatatatatatatgattaagttttgatgtaaagtagattagaattgggattatttcaaaaaattacaaaaaacagttgtacggaattttaaatattttttataaattttaagattttacttacataaaatacattattttgatgtatttttatattgtattttttattatttggctattagtttaattttgttatttgtgtattattttaatggtgttattaatttgaatgtttttttctgttactttcatatgggtttttttttcttgttattttagtgttattttttatataaacgtcgtaaaaatgtaaaaaaaaatatctttgaatacaaatgtgaaaaaaaaaattgtcaaaggtagtagtttatgtaaatttccaattagaagggatttgtaattttataaaattttaaaaaataattatttaacatattataaagaaaaaataattaagagattttttaatttatacactttaaaaaaaaatttagtttatacggaaatacacggaacaacctaaatcgcaatacaaatccatattgcaacctgacgaagcaaccccaacagtaaattagaaaaaaaaaaaaaaaaaattagtatatagagtaattcctccaattaattcttttaaattcataatagtgttacattagatattacaaaaataataatattgtctaaaaatttgacactcatgtaatttttctcgaccagctaactaaagtgaagatcgaaaaataattttgtaaataattatcaaaactaggaaaaattacaaaataattttaacaatataatgtaaaaaaaattccatcttttatatatttttcttctttattgttgcaaaatggtctaataaaatccttttaatttaaaatacaatcttactttgttttttcttgcaaaataaccccatcaagaattttataatatcaagtgcatgtgcttggaagattattttacaaattattatttaaaaaattactattatacaaaataataaatatagatattcccttatcaaagaaccttttaacgcatgccaaaaaaaaatttctaaaaaaaaatcctttagggcaactatgtcttttgctatttgagtatttctatatagagaaatgatgaaaaatattattggtgtctagtattctcttaggtgttatatcgttattagtataattaagtacatcggatctcatataatttagatataataatttttaaaaaatattgttaaccaatcgtaatacacgtggtagtaggtagtactggtgccgaataacaattcttttatatatatagtatgaaagtgaataaaattatatatgtataataatatatttacctgtaaaagcaaaaggggatatgaagaaatatcaatagagtagtcaacaatgggaaccaaagccctaagcttggtgaaggctaaagtcaccaaaatcatcaaccatagagttggtttgagccaccacaaagaggacaccctcaccattacaatcgatctcaatacgaccgccattagggttggaggaatctactaagcgaccggctacaggataaaacgggactaagactttacttagggcatccttcagtttgacaggatcaaaaaagcccttatcatcagtcgctgatgataagggcttataaaaataaatagttgggatgtgaatatgtttcggaaccaattggtccaaattagaggtccatagcacgtgtcgtggcgtctctgttgctggcttcaccattgtcttctcctttatctccatcttcataaccatttccatgcttttgtgatgagcttattattgttatatttctctatatataattggaaagatgaagcattgttcaaatcaaggatgaaattaattggttgggaaatgttggacacgtggctagatttgttacatatataataatggatatacaaatatagtaaatgtgacagctggcaagagtactactattcaggtcaacgacaattagaattaatgtgaatattcaaaaaaaaaaaattaaagccctgaaaaaagtcaaaaaaaagaatttttttttaatttataagtgtataaaataaatttttaaaacttatattttatattataaattattttaaatttttttaaataaatacaatatataaaaaaattaatattataactattcaaaaattatttgtaatatatttatct

SEQ ID NO: 221988 - DNA, 2829 bp, Cannabis indica
atatttttttttattttccttcttatttacgtatttaataatttttcatacaaaaattaatctaatgattaataatttcaaaaattacttactaaagtctcacatgctactttttaaataacattttaatgggctggtttgataaagtaatttttttttttaaaaaaaaggtaagtatatgccacttgaccgtaccaaatatagacaataatattaataaaatgactttaaaaatattaaccacattgtccatgacaaaaatcactttatgggcaaatctatcatttttttttttttttgaaaaggacaaatctatcatcttaaaatataatattttatttttctttcatttacattattttttgttaccttattattaaaaaaaaatacttcaatgctaaataactcttaaaaattaaaagtgtcctacagcttttaatatatatttattttaaattcttactttttttattttaattttaattttaattttttaaaaaataagaaaaaaaatgagagatgttaccgtaataataaatgccgactaaaatctctgtaatgcaatatagctattctttaaagtaactaccattaaaacatgttggaggtgagtgtgtgaatgttagaggtcctgagttcgagtcccaagtaaaatatgttgtaatatataaacgacttaaaaaaaaaaaaaaaaaacagtagctactattaatttaaacctggatacacatggttgactcaatttttacttaaacctactatccaacccatatttatagctttaataattaggcaccatgcccaaaggtcccagtcccaatataaaaggaggtaaaaagaaaagtcaaattttaaattaccatagtttataagagttcacagaataatattactataatcaatattagtcaaaaaaaaaatattgtccaatgtccatatcactatttttagctgcatttatttatagtgatttgatctctattggaaaacttaatcaattcaccttttctcatcagtatttaatattgcagtccatttttattatatataaatttcaagaacaaaaagggaaataagacaaaaaagagaattagtagatcctggacaagtttattgaccttttgcaattttaatcccataatatcttgtaacatatcattatatgacatatctatagatataattaatgccctaataatacatataaatataccactatactaggcagagccaacttaccaatttagttttattaatctcattattattaaataactgattaatatttatcacctcacaaattatatgcatgttatatcaaatctaatggccaaaaattttctaactagctacccaaataacttattgcttacatcaagtaggatatcaaactttattactagagaaaatcatatgcatggtttttttttttgttgagaaaatattaaaattttcaatcatagttttcctaaacaattacttagatttatatttattttataaaagaaaatatttttaaccacttgagttagtcacttaggcggccataagagagtgcgtgtgttggaggtactcggttcaaatttcagattataaaatgtaatatataaacaaaagaagagaataataattataatgaaatattactaacctgaacataaaatagaggacaaaactgaggatctgtttgatcaacatctttccaaaacacaagctgagcctcagcttccctcctagtggagccacaagcacgatcaagatgaagtaaaaactccgacacggtgaccggaagccgagcctcgattaatctgactccggcatcattagcaacaattccgtaattaacatcatctagtttctgaagccttccagagaataagggttgttgggagagagctatggctagagactccttgatccagccggcgtgaagcgagccagagtcctcttcctcctcggctaatggcttcttgttgtagtaaaggaccgtgtgaacgcaccctccccaaccccaaacgtactcacccatggctccagccgccgatgacatcactatttgacggacctttcttggagccgttatctctaacggtggcaccgtctgaaccgcttccatttctgatctaacaatcactactgatccactgccactacccataatgttttgatcagttgctgattgtgatcttttatacatttattttacgtgatctttatactcatgtatgatgtatatatttgtatactactcatatatataggcaaaagccctatctgtatatgtcatatttaattttgtttagttggtaaaattgtaatttttgtcaaaattataattgaataaatgctatgattgtgattgatatttactaaatatatatatatatatatattatatataatataataaatgatggcttttagacattagttaggaatacattttaaaagttattaaaattaaattatatgaaaaaaaaatatataaatgtataattagtactaatagtacttttaattttagcatttttttttacaaaaatgtattaaatgagaaaaattgaagaggttcataattgaagatggtagccggccaatcataaatgtataaatgtatataaaaaaaatgtagttgagtgatgtaatgtgatattattaattattacttcaatatatttataaaaataagtaacaaaatttatttctaaatttttatctaactagttgggtacgtgagctcgtagaaatatttttttaataaatttgtaacatgtcaattctttgtcttaatttgtaaattaataaagactaaaattatttattaatttt

SEQ ID NO: 221989 - DNA, 2190 bp, Cannabis indica
atagtgagctgagttttatcaagatcattatctctaaaatttaactttaatcctagacaattagattccgcaacagattaagagaacaatctaaagcatttattaatgttacggtttcgacttgtatcactaaaaacatcctacaaaaatattcaagagcaaaaaaatctagcaaagataataaaaattacaaaaaaaatatgtaaaactcaaatctaaaattctagcataataaagtcaaacaaactattgaaattaaaaagagaattcaaacttccgtgttaaaaaaatagtgaaaatatatataaccaaataaaatatatgaaaaataaataaaatatacataaccaaataaaatatatgaaaaacaacagagtaaaaacaaaacaatacatgttactatataaaaaatttgatatacaagcaagtattttttcagcaaaattatgaataatttaaactattctaattgtatgaagcgattcatctaaaggagtaaaaacttttaatttattttgatgtaacattagaggagcccaataatgaatagattaaactttaaccttctcatagtatatattcttcaaataaagcttcaatgtcaataacttcaacccttgaccaattgagaaatgctcaaaaatgaaactttgaatcatcaccttctgttatggagagggggatgtggctaagcattggattgttcctagtttgaatagtgccaaggttaatgtcgacatcgcaatctttatagagtaccagaaatttggagttggctttgtggctcgggatgataaaggattcttacttgaaggttgtactcgacttttttatggaagcattgaactagttttagcagaggcaatggggatgtgagaggctctaagctggatcataatgaaacaacaacaacaagtctttgtggagtctgattgtttggtgggtgattcaagctttgagaaataatgttaatatgatttttgccttcgggcaagttatcaatgattgtaaagccttacttgattatttaaaaaatatttctatttgttttgttaatcagtcagctaatatagttgctcataatttttctagggcatttattttgtatcatgatcgtctttcagtatggggggtgttccaactgagttgttaccaacattggtaacagattttaatggttaataaaaaaatttcattaaaaaatattaaaatataaaatatgagatttgaatatacttaaattgattagacaacagtttcaaataagaacaagagtatctaattagtttatgagatttagggttgtatttattgttttttattgtttaaattgatcacataaacatagataattcacattaggtcaagttttatatttcttaatttgaatattttgctttcttatcatcttagtaagaagaattttattatcaattggtttttgatgcgctttgtgaggaagcggcgacttgctgtttggctatttctgctacaataaattttgaagccaaatttgttatggtggagagcgactcaagggtagttatcaatgctctcaatgggaatgagtctctttgggttattggaaactatgtctctttttgtaatagtcactcttctttattttttagttgtattttctctaatattaacaggtcttgtaattttgttgcccataatgtggctaagtggacgtttacccacgagatatttggtgatattccgctatgtaccatcccgataaacatattatgtaatgaccgtgaggtctaactgttctatttatcaaattatgtttttcttttaaaaaaaaagtattaatgagtagtagaggagattggagttcttaatttttcataaatagttgaattcaatttattgttctttatcgttttttctttatttatactatttattacgttatttttcaaaatcttaattttgatttaccatataggagttaaaaatggagcggagaaatgcctctaaattttgatagaagtgagagatagaagacatgcctcgagagaagaggttagaacatctttaatgggagttgcccatagaattatttttggcacatatgcaatgtggttattattttctcattgtctatatttagaaacacccatgtggcattattttatctttttttaaaaaaaattattttatggtattattttatagtat

SEQ ID NO: 221990 - DNA, 1890 bp, Cannabis indica
ttttcctgtttttttcccttattattattaggttaattaaagttgcctttgataatatttttttaatcaattttttatttttaaaattaaaaattaaaaatattttctaaaatcatgtttttttttagaaagaaacttttattaattaaccaacagcaagaacaaacttacatcagagccaacttatcaaaaacaaagaaactatccaaacgagaaggaaacttgtcctcccaaacagaattacaattggaaattatagccaacttggcaagaaaatgagcagctttattggtggcatggagggaatgaaaacaaccagcacaacgacggaacaatccgccatccaacagatcatctaacagggcgctccaatctgtccgacaaagagccctctgcttcaaatagtcaatcagattggcacaatctacagctaagaaaaagagtgaacattgagtttttgacacaattcaagacccaatttaatagccaaccccttagccaccaaccgagcaaacacccttcctataggcagcagcaacgcctaaaatctgcccatttttctttcaaataatagccctaaggcccattctttgggaagcaagatcaatagcagcatcacagttgagtaacaaggtttcgtcatcgacctttaaccaaaataaagctttatctgaggaagaaaaagtggcaacaactgtagttggaatatgaacttgatgataatccacatgctcgattgcccacaacatccattgagtgatgcgagcaacactgtgttgaaaacatttcttattcctccgaaccaaaccagcaaagataaagtgacaaagcttccaaaacaaatgttgggttaggtttcatgaatttgctgcaagaaatcccaaggttcaagatgttgtttggggaataagtgaaaccaacctgtgtgtttccagagaggacggatggcaggacaaagccaaagagcatggcaaatggtctccattgggtaaccacagctgctgcaatccgttggaaccagcagccccctatgagccagattggctttaacagggagccaattccaacacaaattctgaaacaaaattttttactttcaaactaactcccaagttccaaataaacttccactagctctcaacattttcataggaagcgcactatgtatctgtttgaaataaacttccaccagactgacttttataaaactggttttacttctcaattttttaattaagaatgtaaactttttttaaaaaaaagaatcattttcgatatttttttaaataattttttatcaatattttggactctgactctaacttagaccttagaaaccgaatctgaccccacttccaaactcggacctgcccccagtcccgaccttgaactcgactccaaacctgacttaaataaaatcaacaaataaaaatgaaaataaaatttacagaacacacttttatttttgtttttaaaattaaaaattaaaaatagttatagaacacattattatttttcaaaatcaaattttaaaaaaaaaaattttaacttctattttaatgattaaaaaatttaaaaattaaaaagtagttaagtcaaacgtaccacctaaaactttttgctccttcacatatattaaattatgcttctgaattgatcattaaatttttttataaaatattaaaatttgttaaatttaaagatttttatctaatttcattaattatgctaatgtaacgataattcatatactaaattgtgctcctaaattttaatatctaccaaatcgtctcctgaactttagcatgtaccaaattatactcttggaaattttcatccacatcagactttttttagtaaaattggacaaaagttcttaaatccaacaat

SEQ ID NO: 221991 - DNA, 3223 bp, Cannabis indica
ttgtaaatttatttatgtaaaattaataattttattttaaattataatacatgtatgaattttatatttactctaaaataattctattatgatatagtattaatgaatatttattgttattattgttacattgatattttttgatatttttttttagtgtaactctatttagttataacatcttaattagaatataatttactggttccaagtgtatattcttggataaaggttctattgtatattcttggtaaataattatattttaaataacaaattatattaatttgttttactaaattacttacaattattaaatctcatacatgctaatgaaactatacatgaaattcatcgcaaataattaataaaaaataaaaatctacaacatgtaaaatttattttgtatttatacaatcaaagcttggtcaattattagtacgtgtctagtaaagaaagcaataaaaaaagccggcatagttaaaaattcaaattatatgtatatatatctatataaactccacacatgatatcatgattcatgtatgactaaatgaattctttattcaggttaataattatccaaccgtttcatatatatatgtgattgatttattaattgtctatatataggtacatgcatggagtttagatttttagttataacacaaaattagtaagaaaatataccaccatggaggtgaaacaccaacaacaagtgttgttattattattaagtgtatcatcaacattattattaataaatgatcacttaattatattagcttatagtatttaataataataattactcttcaaggctgccctgaaacatgtggctcagtaaaaataccttacccttttggaaccaaacaaggttgttattacaacaaaaagttcctcctcaactgcaaacaaacaaatccttcccactcaccaaaacttttcttccccaatagtacgttttccaccattctccatatttcaatccaacccagcgaaatccttgtcaagggaaaagtttctcgagattgttacgacaagagtggaaaacttattgataaacaaagcaagcttaggtctattatgcagaccaagtctaataagtttcctttgagtacgaggaacaagttcataggcgttggatgcgatacgatggcaaccatcggtggaaatatcagaggtgggagctacgtggcggggtgtgtggcctcatgttacgatataaacgacgtcgtaaatagttcttgtagtggaattggatgttgtgagactgatatcccacctggggtttctaatgtcgttacgcatgttcagagcttaaacaacggtaactcgacaaatcatagtttggttcaccactttaatccctgcggttattcttttgtggcggaaaatggttcgtacaactttaccacggttgatttgaaggatttgatgaaaaataagaagaagtttccgaggatggtgttggactgggctgttgggaatttgacttgtgaagaggccaagctcgtgaataatcggagtggcaatgggtatgcatgcgtagctgaatatagtgaatgtgttaactcaactaatgggtctggatatcagtgtaaatgcttaaatggatatgaaggaaacccttatctacaccatggatgccaaggtacgtaagaatgatcagaaatgctaaatatgcatatatcattaatattggtgtattaattaagtatttggttttacttattttaatttaataataattattataagaaagtaataaagctcgtcatcacttcatatatgattaattaagaattaagaagagtaccagtgcaccacaacaagtgagacctaatatatatgatttttatttttcttaaatataatttttattttttttggaaattgggtttttatgtacaaatataacatatatttaaatctaaaatttaagggctcattaattacggaatctagtgatctagtcacacggtgggtcaaatttgactatgtccataaactataaataataaataaaaaataaactataattaaaatatattagatagctacattgattttatatggctataataaaataaaagtattgttaggtttcagtactacttaatattttttagacgtgattagtgatattttttaaaaattattatattaaattacatgtgattcaatacttagttggaccaatagtaatattgacacataaaaaggtactagacaccttttaaatatcaccacgtactactgataccaaataataatattcaaataaataatatagatataattttaagaggatttttttatttttacattcaaaatagtttttttttatagttttacaaaaaatctacatagcaacttaaattgcaattaaaattcacataacaacctatataaaaactactagagtaaccacttgaataactgcaaattaaaaaaaataatatataagataatttcattaattttaattattatttatttaattatgaatttgcagatataaacgagtgtgagagattttataatatatgcaaggaaaggcagtgtaaaaacgggccagggacatataactgctcttgtccccatggatatacttctacttctacactactcctcaacggtactgaaatattccgatgccatcctacctatcattttgtggcaaaactttctctcgccttaggtacgtaattatatataggcaactagcgtttaaactactttagaaattcaaaccgtaaatttaaaaaaaaataaaaaaaataataatatataaaataatttcccatatatatagattacaatctaactcattaagaaaattatatagtactctctcattttgagtatgcttataatatatatgatgatgcatgtgtgttatgacttggtagtttaattgttttgtgatggttacaaaatactcatcatgattatttaacatgaaaggaatagatgaatattgaaataattattaaaatattattaatacttgcgattagtttgatcctcataaaatatgtctgttctacattttttgtaattggtcttagaccatctacaatagaagataaaataaattgatctatatttggctataaaatatgattttgtaatatttttgtatcaacttttatgctccaatatataattgtgtattttgatataaaatttaatatatcatttaatgctcatctaatac

SEQ ID NO: 221992 - DNA, 1338 bp, Cannabis indica
aaacttttctcaaacgacgctttatctctatgtgttgtagcactagtaagttatgtattgtacccatgaagtctcaaaatttccttgtaatgagcgtaagtatctctttaactttgcatgtacactttcaaccctgtataaataaagcaagataaaaataaattaaatatattttaaataaatatttatatacaaatgcactcaaaatataataacaaaggaaattataatgtatacctatttgtagtagtagtagtgccaaaatgcattactgaatctgtccatgcggaaacaaatttttctttatattcaaccacacatctttaacatagtcaattgcttgtgaatatataccataattttcttcaagtactttgagtcttttattatactcactttctgatgatgataaattgagtatgttccaatcagaaagaaaattatcccacttttcttttgactcaaatattttttggcatttagtcaacacattattagatatatgatatcggcacaaaagatgttttgcagcagggaagaccttttcaatagcattgattaacgctaattctctatctgtgacaacttcattaggaagaaagtcaatgcccatcatagtttttaatctatccaatgcccatgtgtagttatcctcttgttctgaattaagaaaaacaaacgcaatagagaatgtgtattcagtcgatgtaactccaacaatctctaacaaaggaagacgatacatgttagtcttgtaagtgcaatccataactaatacatgaggaaaaatatgaagtaaatcaactccgaatggatgtgcccaaaatatatctctaactgtattagtatctttttcatatctatgccactcgacatagttatgatcacttagctttctcatcaattgttgcacttgggactgcctgccttttctcgaactccgtgtttttgtcttgcattgtatattgtcctcatcgttgagacattacatttatttttttcttcgatcacagctagaatttctcttggcatgatattacactttgacatatcaactaatatctttgacccttctagagtcaacctctcagcaaaagaatgtccttcaagatgttttgcaattgaatggttataaaatccacacacgattgtgagtgtccaatcatcagttgttgctaatttttgtgcactcaataaaaatggagaaccacatttttttgtcgatgttctcctatcaatatttctctttttttccttcgattgtctttatgtgttgtcaatagttgccactcctttcacaagaaaatttaattcgtgcttttcgactttcacctgaat

SEQ ID NO: 221993 - DNA, 1588 bp, Cannabis indica
aagagtggtataattaaacaccctatctaatgtttaagcataaaatgtcaaatttcccttaataaaagcataaagaaggtagacaaagtaggctaagaaaaacaaaaatgtaaggtgttatctatttaagaacagatacccaaggaaaacttggttaaaaagctttgtattattgatactaacttgtacaaagtatttcttaaactcaaagtcacagtgaagcctcattaaatgaagttaaatacacttcttaatatgccttagttgatagtaaagcatcatcaaagaaagtcaacattacaaaacaagattccataagaccacaagtcaatctcttcactgcttaaagtaaagaatgagcaaatgacagctccaatattgtgtcaaacccaagtaatgaagataaaatagctaatatcttgtttaacacactcgtcggatttaatctcttttagtccataaattaagtagtgtgataccaacaaatcttttaatgattttattcactaactatggtaaaattacaagatttcgtaaaaatttataaataaaaataaatgtttttcatttaacttagaccatcctatacaacaaaaataaaataaagaaagggtgaggagctcagtaggagggcctttgtgttgtctcaaaactggtacaaattcatgtatgccttacacttctcccttggactacaaaactttgtttgttatatggcgaatgggagaaatgcacaagaattatatcttatgaagtggaagtggaatcgtcaatggcggcagaagttcagcttaatgcaattgcactgcacagccattctcaaatttgggacgaccactatacttctcagtcaccattcctttctacagggctctttctcttgataagctgctttagaaagaaaaaataataacagtaagattcaacaaaggcagcatatggcgatactatgttgcataaaagtttgttaaatgtcatgtttcctagtcagcaggcctggttgacactgattcatcgcagttatacatgagtaggacaatgaatgagaatgccataatttattgcattatttcaacaaacttaaattaacccatatctggacatgcaagtgtctaccaaaaacatcttgggccatgttaaaaagccatagttaaaataagtaaatacaataggttttacactagtaatgcaccatataggtaagcatgttttcctatttgaatataggcatgtatatctacatgtattcttcattattcgatcttttaaaactataaaaatgatcatctacagttactgagctaaaattaaggggaaaaaataagatacataaagtatataaatacaaaagacacttccttattatgataataattggatggaaagaaaatgtacaaaaaagagaagcctaccttgtagaaataacttttccgaagcttgattgccatgcgcacacatctttttacattaatcttcagtatattgtcattaaaaatctgaaatagggtaaatatataaattacttcaacaaattcaacataggaaccattaacatctttgaagatctagatattgtaaggatattcat

SEQ ID NO: 221994 - DNA, 3848 bp, Cannabis indica
cattatatttaaaaactctatgaatttacttttccataattatattaaaagtacagttaaattaattttatttatattttatattgatactgctaaaaaaaacacctattaagaatgaatacaattgggtcaaatacagaccgctcatatttatgtataattatgtctgggataagagatatatattattatattatattatgtatattaatttgtatatatatatataagctaccattttctattttcttctagtaattattttgtacatatatagctatttgtgtacacatgtccttgtaaacaataaccacgtgagcatggagtgctttgtggaacacaatattggaagtaatactgatgtggaatcccttggtacaagctgtcacttacaacttaaggccacttggacaccccactcatcccacttgatcagaaaccctaatcaatacagagggagatcgatggagacagagagagaaatgtagctacacacacacattattattctatattattattctataacacaataattataataataagaaaaaaaaaaatacatctaacaaaagcatacctgatatatacatgtatatgttggacacagtttaactttgatcgggaacaaaagtttttcattatattatttaaatattataatatatttaatatattatatattatatttataaatagatgttaaagttaacagaagaactagaaaaatcataatatttatgtcctctcttcttagctaattaatatggagatggcttaagctaattaatttacaggtaaaatatatatgccatgcatatatttagattttttttatgtacaaataattttatcacttttagctactcaaagtatttaccatcattaatgagaatgattaatacaataaaataaaaggatgatgtcataaatacacaaataataaaaaataattacaaaaatatgattttataatttttataattttatttaaagaaaaattataatcttttaatatatttttatgttgtactcttgttattttgttattaatctaattaattatttttaatattaatttcctattagtgtaaatattttaccaaaaatatttatgtaatttttcttaaaatatatatcaccagatatttatgtgttgtctataagaatgtatctaaattaaaaggtcttttgatcacggttgatatatatacagtactttataataatatattaaacggtaactaaacacaattcctaattacttgttcaaaaacacaaataggagatacatgatgaaaacaataattgagaattattttactatgcgttatttggccggcatctaatccttaaggtaacgtttggtcggaggaaataaaagtgaaacaaaacaaattttattttatttctttatttagttttaaaatattggaatgttacttttattatgttttcattcttctcaactaaacgccacttaattaatagagtgattatcatgtgagtttgagttggagagagtagagatatagaaacttagagggaatataaaatccatacgtttgagagaattaacattactactattttaatttaaaaagtagaatttacttaaaaacacaaatctcttgttatctaaatttaatataaattttatatttacattcttatcaccacgtctaaatctcatactaaatacgacataatttgctaataattactttcatgtttttgaagagacctattaaaagaaaggcaatgtgacaacattataattgtagagtgtttattcacatgcatcgtcaaatttatatataaagatctatttggaagtttagaaactgaatgatgatattccaacattattgggcatttttgtagtatatagagagagaagagagagaagacaataataatggagttcacataatattgaaaaataaataaataaagtaatatgaagcatatgcagattttttttttcttttaataatcatatgcagctgatacgtaaggatatatattacatttaaaattattataaatatattatttagatcccttaaaaataaataacaatatatattatataatgtataattaattgatacattttactactacatgccaaatgggcttcaatgagtgggcccacttattcgtcggctttatgtcgggtcgggtagcttactttgctttccacccaacagagagagagattgggctgggcccgacttgactaaccgagacttccgctgaggataagagaaaatgaaagtgacaaaaatgaaggagtataatgaataaaagatccaccctcggattatgtgtaggacccattagcgacggctgagattaaaacatctggcgctattgaagaaagagaaataccctagagttgcggcatgtttgggagttgtcaaatcaaattcaatgggcgtggccgaaccagtatttactcaattattgttctcccttatggtggtgttagcctctttcgaaccaattattgtactattccaatttccaaatatagtttcctcattaagtttatctttgcttttagattataattgtaatttgctcaattacattacagaatctggattttgatacgtcgaatgaaaaagataaaaccttgttttctagttatgttcaaaattgttgcaccgtcagatttggttagaaacacgaagtgatcttacagtggagaatgtccacgtgaaataaatggtagagaattgagctataagaacatgagctactccactcattgccaattaattttgagatggaaacccgtaattctcaaacagtccaataaagcatttattatgttcaataaataaaacactgaaaacagtaaaaactgttaatatgcatgtttctgttcaaagcaattattatgtttaataaactaattagtatgtgtggaaaggggattgaattaagaagaggaaaggaacacctcaaatgttattggaaattttagacaccaattgtacctcttaccactgaagctcttgcttgtactatttttttttcttaatgtataaaaaaattaattaggtagaataaattaggttttcgctcctgttaaataaacatatatagacataattgcatattattttattgttataatattttattccatccccgcttaataaaatccaggatccgccagtagatctatgcatagcatttcgtttttcttattaagatattttgtttgatctcatgataattttgaaaagaaccttacaattagcaacacaaaattcataccattcacatttctatatgacacttggaacatatatattttcattctcatgtcaccaaaatctatatgatacacgaagaagactctggaaaaacaacaggactctaattgctcatgtgccaatacttgtgaggccttttcactaatattagagagatgggtacaattgaaaaaaataaattaactattattaccatatttatatgtataatattaacacaatgatcaatgatgataataataatgaaaaaaaccagtatataattactcattcttgttattattattacatttccttaatgtgtatatttagatagaaggttacttatattatgacattattcttataaaatgatattaattatgtttatggcatattagtagtatttttgtgtgcaatctatttagattgtaatgcattgttcgtataatatagtaatctaatatcattcaccatttgggttgtttataaaataaataatccaattaatttaaccagcgcgatcaaatttaattcaattccgcaaactatgaatatctacacttatacagattgaat

SEQ ID NO: 221995 - DNA, 2762 bp, Cannabis indica
tcttgattttcttccattgttataaaatctctaacaggaaagtcgacggtatttttttttgtaagaaaatttatttttttaaatactactagtattttggaaaaaaaaaataatactctcaattgacacagtagtagcagtaccctattctttatgttggaaattacttaaaacggtctgtagtgtttgattaatacattttgattactgaatttaaaattgtattttttttatttattatatatataataagaaatatattttagataattttatttcacttttttttaagtcaaataatttattaaaattcatacactataaaaccttgataaattaatagcattagaactagtgatgaaaatttgaccacctcaatggggcaaagattacccaccttaatgggtaatgggatgagggtgtggtgaaattttacatacccgaagcaggttcaaaatggggtcgaggtgatactactcacctcatattcgacccaaatatataatttctaaattttcatataattttctaatcattacgtattaaaattattagctatatacttacaaatttatctcttaatcttccatgatttactgtgtaataaagttatctcttagtaattttttccccgaactttgacatgtactaaatcatgcccttgaatttttttaaccgttaaaaattccccctgaactaatgaaaatggtaaaattaaggacttttgtctaattttaataaaaaaattctaacatggatgaaaagtcaaaggggcatgatttagtacatatcaaagtttgagaggcatgatttggtggatatcaaagtctgggaagcatggtttagtacataaacaatcactgaaacagtataattgaatgaaattagtcaaaagtccttaaatttaacaatctcaatagttcgagggaaatttttaacggccaaaaaagttcaagggtcacgatttgatacatgtcaaaattcaggtggaaaaattactaattagccttattttaaagtcaatatcttattttttatttttttttaatttttattatattaaattattttctttttattattattgtattaattgtcatgggtatccaatagattcttatacccaatagggattctcctaccccgaacccatcgaagattaagcgtggtggaggtggggtggaggcataaataggaaataagaacaggggtcgggaaatgcattactcgcttattacttattcaatttttatccataataaggatgagacaaaaaatataatttattgaaaaacattaaataattgagtattaatttatttttatttttttttggagtccgatagaacaaaagtataatttaatcaaaattatttaatttaccgatatactaatgaaaatggtacatatagaatctctcctttaaataaattatttagttaaaaaataattattggttaaatgagactactatagatatttttttttttttttgtaatggagactactatagatattggtatagaatctatccaaaaaaaattattttagttaaatggaagatatttaaatgagaatactaattattgaagcaatgcggcgggagacttcattaaaagtcttattaatggaattagttttaatttaagtatattaagtatattaagaatataacacaattaattttaatactaagcatgtgatatgttacttgtaatgtctttatcggtgaattaaaaaatatatttgatgacaacattttcaatgttgacaactgaaatgaagagatttaaataaaactcaaaaaaaaagtgatagtgttgttattattgtttgaacaagttgtagaaaaagtaatgaccaaaattagtgaaagaaagccacttagtatgacctcagttgattggaaggtagattaaaattattaaatgtaaaaagatgtatagtactttgaaataatagggtacacaaccttaaatctatgttctaattgattaagagtatgtggcatttttcaaatttgtgattaaaaagctcaaaccacactgaatttgttgtctactaatgagtaatgagtattgggccccttaaaattcgtacaattggtgttcacgcgcacgcgcattataccatttatatataattttttttttgcctacttaaagtttcgagtattgttataggatattagtagtaatccgtaatttttatagtgatattttttaaaaattaattttttttttaagatgagatttgatacttaattatactaatatcgatatgatgctagacactaatagtgctttttaacaattctctaaagtagtgtccaaatactttcctgtaagtagtgcaattaaatatcaaatctcacatattttaatttaaaaattattataaaaaattattaatcattcccaagataataccttgtagtggcatcactagtaataacaatattatctcctttatttatacactatatattgttatcagtataattatgtatttatttttagcacttaattattttgctaccaaataataagctagaaaatgtcgaaaagcaccttaacatattcaatatcgaattcggtgtcattattgatgtaaatcaatattggtactatttttagtttaaattaaatatataagacatgtatgaaatcgtattgatacaatatgtgatttttcaagtttttgtaacacccctccaccgtgtatgaggttaaaacatgctaaaatttctaagtagtcaaccc

SEQ ID NO: 221996 - DNA, 1109 bp, Cannabis indica
tatttttggagggccacatctcgtgggaaagagtaataatgcccaaaagaggtatataaatgaagtgaaaaatgaacagccatcatttgctccaaaaccattgaagaaagaaatgtcgaatgaaccaccaatcattttctctgaggaagatacaaaagatgtgtgatacccacatgttgatcccttcgtgataatagtccagctcgccaataaatgagtgaaaagagtacttgtagacaatggaagttctgttaatatcctctacaaagacacattgaaaaagatgggactagaggaagcaaagttaagaccatacattgtaagcctatgtggttttactggcgatagtgttgcgagcttgagcattatcgagcttccattaactatgggagaactgccactatcagtgacgcaaatgcaagaatttttggttgttgacatcccttcttgtataatgtactaatgggtcgcccaactctacccccaacaccaaaagattcatggacctcgcatcccaaagcaaaaggaggctagggaatgctacaacgtctccctgcgcctcgctaccaagacaaagaacccagtaacaaaggcaattttggaagggccaagcgaggatggaggtgtgaatgcagcaagaaagtagggaaaggccagctacgagaagcattatgtatcatttttttagtacaaaaggcaagaattaaggagagacccttaggtagctccagtagtataacttctttcattttctttatttttatttctcttaaatggtaaaatgtaatagaagatcttttatatgaatgaatgttacatttaaactatcatattgatagatcgaaagttgataattcttttcccctaaaaataagtaggtaactcaagtacacagccccataaatggcgatgtacacttggggggcaaggagatgagtgaaaagtgtatgttcctaaatcatcaaggattagctacccttgattgacaacaggaaacacgctccttcgcgcagaacgcaactaagccaaaagaggtcctcacggacactcatggcataacactgaaacgaggtggacgtctcttaggagtaagcaaacatttttcaatc

SEQ ID NO: 221997 - DNA, 4412 bp, Cannabis indica
gtgacttctgtgtcttactcggtgcttctcaacggagcgccattagctcccttcaatcctaaacgcggtcttcgccaaggagatccgctctcgccgtatctctttattttgtgcagtgaggtgctatcgaaattaatctgtagagctgaacaaagaggagagctgtctggtgtcaaggtgtctcgtgaagcaatgcctattacccatcttttttatgcggatgatgctatattcttttgcaaggctaatggttcaaatgcagaggcaattttacaatgtattaccacttatgagcattggtctggacagaaggtaaataagaaaaagtggggtggtgttttctcctaatacctccctaaggtataaatatgagataaagactacgctgggcatgaatggcctcggttcacaagagaaatacttgggtaatcctttcttcttttcggcaaacaagcgaagggactttaagtttttgaaagagaaaattgtgactcgtctcgaggggtggaaggcaaagaatctatcacaagcgggtcgaactaccttggttagttcggtccttcaaagtattccgggatatttcatgtcaacggctctggttccaaagtcggtttgtgaggatttagatagaacggtggctaagttctggtggataggaaactcggaaagacagcgataccgtgcgtataagagttggaatgagatttgtcagcctaaacgatgcgggggccttggtttaagaaggttcagtgaaattaatctaactttgttagctaaactgggatggatggtgcttaatggtgtggacaaaccttgggtaagactcctggagacaagatactgtcaagggttagatgcttggcaagtggaaaaaaggtctggggattcgagagtttggaggggaattcttgaggcaagacatgtttgtattgcgggggctggggtattaattggtgatggggagtctgatctttgggagcgaccttgggttcctggaaaatctatggaagaggttcggaatggttgccattattctcggagacatgcttttgtgaaggtctcggatctgttcttagaaggtactagagtgtggaatgaagaacttataaaggctagctttgatgcagatgtggcttcggctattctgtgtattaggcctttgatgagtagtggagatatcactttctggaaggggtccaaatctgggcattacacggtgaaaagtggttattgggtaagtcaatgcagtagatttaagagtccaaataaagtctgggagagtttatggcagtccaagatccatcctcgtttaaagttggttctttggaaagtgtggtctgatatattaccttccaaacaacgtttgggtttgttagataagagctgcccattctgtcaagatgaaacagagtctgctcttcatttgttctgcttttgtagcgttgctcgagctgtgtggttccaaagttcctggggaattcgggttgaagatttgcattgggaagacatttttgattttggaatctggtggtctcaagtaagcgatgaaaggctgcatttatttgcagcttgcctatgtgagacgatttggaattggagaaacaagatcatatttcaagggtgttctttttctttggtggaattgatatctgacattcgtttcgagttagggagatggagatgaggttggtgcctttgaatcatttggctcggcctgagtttcttgatgtggatttggaattgcagaattatgatgacttgcaatgtttctatacggatgcctctatcgtgaacgaggctgctggtgttgcggctgtcaaagtgaacgattcaattgtcggggactcctgggtggcctcacgcttccatgtggtttctggggttcttgaaggggagctgctggctatttactaggctttacaagtggcgtgcgaaaggggagtaaaaaagatcaaagtcctgtcgaactccaaggtggcgatcatggccttgaaaaatagttgtttgccttatgcctggggcacttatcctgtttttgaatcctgatgatgtatttgtaagtgttttgatcttgttgtgtttgcgcattgccctcggtctgagaaccgtgtggctgatgctgttgcgggttgggcgagatgtgccatgtcctgctctgaaggcctgcttagggacatagctccagcagttgccgtgagtttgttgtagtttgccttttctttcaataaaatctttacttaacacaaaaaaaaagatgggtcagcgtatttggattttcttataagactagtccatttcattttataatgactttaaatactatttattatttgtttgttttctttaaaataataaaaataaaggttctttctttttctttttttactttagttttaagtatctctaaacaaatcaaaatcaaaaattactactatataattataagaagtactgaatttttttaggaaaaattaatgagacattcttataggggtgttattcggtagactccttatttatttagacattcaagtgagcttttaagttaatatttttttttttaatgatcgtgtacattgtagatatttaggatcatttgtaaatttttaaaatattttaaatctttttgtattgtcgaaaaataaagttcaaacagctgtttactgcgtatataagaaaaaataatcatgattgcaataaaatatttaaaccttatttttgacattgtaaactattcaaagttttttaaaaatttattggtgggcctaaataactataacgtacacgatcattgaaaaaattagattgaaaaatactcttgattgtcgaaacaaatagagaactaacaaaatataagtgtactatacatacccaattttttttttttgttataaaaaaaatctttatacttggcccctcctactagcataacactaacttatgaaattaacaagaacaacacataaataaaaataaacattaagtaaaataataatttaataaacattaggtgtgattttatttgtcgaaaagatgttaaattcgtagtcatgatcataaaattataccataaatgagttaattagaattattaatgtaaataattataaaatgcgagatcttttaagtaaaagatattcacttagtaggatattttgtgtgatatttcactaaaaaaaaaccattttcacaattaaaaaaaaaaattatgattaaatgtgacttttagtcacaacaaaaaattaattgtgactaaacacagtatttagacacaagttatcactaatttagttttaatcacaacaaataatatgactaaaaacacatttagtcacaataaatttttatttttgtgactaatactttgagccacaaactttttagttacaacgtaagaataataatttataattagtcacaattattttacttgtactcacaagttttattgtgactaaaagtaaaattttatatagtgtttgatgtaaatcattagagtttttgcaccaaaagtaaaagattttgcactgattattgatgtagattttaccttaaattagtgtaaccattaaagatggtctaaatattttagacttagacttttattttacttggaagactttgagatttaattttattttttatgtatttttattttgtaaatctactagtcttgtaaaaacaacaatgaagaaggctaaataaactacagaggatgggaaaaatatcaatactgaaattaaaattaattgtgtggatgaataatatagagtaatttgcggcataaatacttaagtttaactctagtagcaaataaatacttaagtttaatttttggcggtaataatacttaagttataattctggaacttttgtaggtacctgactgttaagtgttaagtaaattgccacgtggcaattcttgattggtccaagtcattaacgccaaaaattaaatttatgtatttatttacaactgaaaattaaacttaagtatttataccgcaaattacacttaacaatatatagctatatgtagttattattctacatcacacaatatatatatttatatatatactttttgacttgacttggatcttaatccttcaatgaatgacttctattttctataccacacatgtagggcaaaagttaattacaaatttgctaacccaaaacataagttaagttgaccaattaatactttagagtttgacgattctttgtggaattaattaattaggtgggaaatataaattgatgggtttaggctacatatgatcagttttaataattatattaaattaatattctacaataattttaaataggatcattaataatgacagttaaatttaaccagtataaaagtatgtacttaaaaattaataaaatataggaccctaaat

SEQ ID NO: 221998 - DNA, 2292 bp, Cannabis indica
atattgagttagtagtttatgtttacgttttttttttttcagtttagtattataatttgtggtttattttgtgcttgtccctacaagaattcccacttttatcggcaagtttttgtgccagtaaaaggtacctaaaactcgtcggcaacttttggtcagtgaaaccttttgccagtgaaaaagctcgccgacaaaagttgtcggtagtagatggtcggagaaatgcattttatcgacaaatttaataccttcatcatcgaaactttttttcccggtgagttcaatcaccaacgtaaatcttaccatcgacatccacttgttggctgagggcttttccgctctattttgctggcgtagtaactcgctggtaaaactttcgcgccctttatttcgattcccgcaaaagttatacgacacaactaattttgcaggcaaacaaattttctttttttaaaaaaaaaaaaaatatttaacttttgtcggtgccattaactgttggtttttatggtactaaatcagataccttgcggaagaatttcgtattactgattatcattgtatcatagtctaatggatctccagatgtgtgtacattaaatcaaaacataaaataacaagtttagaatacatatcttttgaatactatcagggtatcctcgaaacttctcgtgagttgtatcccttaattcagatgatgaggataataaaattagactcacatcaatatcttccaaattaatctaccacacacaaggaatagtgtgggctattaggataaagtatatagtgttgttcttgttgatttctcaacacatgagcaagaacaatcgagagaaaaaattattttctttttctctaggtaattttgaaaattagcttacaaaatcatcatcggatttctcaaattaggcttctaattcaattactgatattatgatgagaatatctcaactgctttgaaatatctttaaccattttcaaattcaaatatttatttgattgaattaattaaataattaattaacacaaagatataggtgtctacccttttcttgtttaggacaagaatagtgtcttttatcctgacaacttttgtctaacaaattttgtcttgataatttgtctttttcatatttaattaatttgaaaattttttattataaaaataaataattactatttcaccaattcaaaatagatttttgacattatactactctttatccatacccttgacagtgtttcaaggtggcgattcagggactatgaacacataattctaagctctaataaactagattatctattgagtctcatcaaccaaataatctttatttattaattccatgattactccactataaatatggaattgaactcttaataattatagaattatatatactgaattttactacagttttcattgatataggtgtctaccattaaaaaatcccaaactttaatatgttgccgattattttattcatacctaagtggtcttagttctctatacagctacaagtcacaacttcatatatgaataaggaataataatttaatattgaaaagtaaccaacctaaaagaaccgattcaatctacatttttgtagattggattggatttgatccaaaatatgaaatctgcacttaaggtgaatcagatgtactatgagcaaaatagtacagattacattagatgaacacccctaaaattatttacgtggcatttttggagcaactaataaatctgttaaaatgagaaccaacgaacttataagattcttgagcttgaacttttgaaattgaaaatttatctgcagtaaagtaaactttttaagaaattttatcataatttttcttagttgatttgaaacttagtaaaattatatcaatgatgttcaaagtaagtaatttaattttccaaggataaattgttgatgtcaataaattttccaaaattactttaacattagattaaaattctgcatacatacaggtagagtaaaaaatgtgtccaattggaaaatgtatttattgaaaacaaaaagatcatgagtttacaaataaaaataaagtataatggcacaaaagagaataggttaccaatttctaattgttacattacccttactttttacttaacatcacatatcccttagatcttagcaaaagtttatttttttggaatccaacgtctaagattttgtgtggtatgtaatccctcaaaatgtagatgaggttttacataatttgccattaaaaaaaaaaaacttatgaactctaaaaaaa

SEQ ID NO: 221999 - DNA, 1925 bp, Cannabis indica
ggttatgtcaaatatgagccgtattttattggcttgaaaaatcatgacccgtgtatgtatggtttggttatgggtttgaaaaatctaactctactcaacccaaaccagaccgtgtccacactactaagtcacattacttctatatatattttatataattattgtttgtattatatgtaacaatatgaaaaaatatttatatatagtaagttaacatatagtgatatcataggtactagtcaactcacttttgtaatattagaggcaatcaaatcaagcaattggttagcagaaattaatgtatattatttttataaattaattatatatattataatattataatatagttaaccctagtagcacactagcagtataatatagtctagcggactagcactatacaatatacattacaaaagataatctcaaaataacgacaacgctaatccaccaattgtccaggttcaccaaatcttaggtaaaaaccaatcactacaacaattattttattctttttcaagaactagatttatatttacatgtattttttatatttttatactaggtttataatttattttttctactgttctactattgttagagtttcgacaccaatttctatcgaaaactacaacagtaacagtatgtaatatatatactttttttatatatattcatgctcataatttaatatatataattatataggagttaaaaatatatatttaattctatgaaatcttttgtttgttgtgtttgaatatatgtgtgcgtatatgattattttctatgtgttcttattatattatatgctcaaatatgtgtatatgcactgtaataatatataataaaaattatctatatataaataagattatgtattaactttatctgtttatctatatatatatgtatcactattactaatttaaatatttttatcattatatatatatatatgtgtgaataaaagtatctttctagtacatcaatttttattatattttttaactatattaccttgtaatgtaagcatgatttatcacatatgtcttatattattgatgtataataatgtaaatttattttatagcttctttatttttgcatgcatataatgatgtttttattttttttctctccatgttttatatataatattatttattatcaaaatatatttatatactttttatttagttctctcttcttctggttattatgtgtttgttgataattttatatactagttgattttgtatattttttatgttgatatttttataggagtgatggagaggtacctttcccttacttctaccccattaggtgaaattcataataagtctaaccctactccaattcctactcctaacactacctccatccctacttccacaatccctattgagcttaagtcaccaaaaaaggaaggtgatgatcacgcaatccactaccaagaaaaaatcaagtagataatctgctgtttaggatcattttacaaaaagttagagtgagaatccaaatgatcctaggtgtgaatgtaattgttgtggtaaggactatgcttgccatagtactagagtaggaacaagcagtatgtggaattatttgaaaaaataatgtaagaaatatctatttagcgtatcttataagaaacaaaagttattgagttttcaaaatggtaatgagagtggtggaaatttgttggcaatgacctttaataaggagaattgtcggaatgctctagctaagatagtggtcttagatgaacatgcatttacagttgcagaaggtgaaggctttagacatcttatgcaagcagtgcaaccgagatttgttcttcctagtagaatgaaagttgctagggatatataccaagtttatttggacgaaaaagcaaagctgaaagatgagtt

SEQ ID NO: 222000 - DNA, 1417 bp, Cannabis indica
ttaaaattattgcttgctattgcggccattaataatggctttgtaccaacttgatattaacaacgccttcttcattgcaatttacatgaaactctctacatgtcactctctaagggatataaatctaaaggacatattcctacaaatgttgtacgtaaactaaacaaaagtttctatagcttgaaacaagcctctagacaatagtttaccaaactcagtgactagcttttatccacttggtttactcaatctcttacatatcgcacattgtttattaaaaatcacaaaggcatttttcttgtcctttcaatatatgttgatgacattgtggttactgatcaaataatgatgttgttgttatttcatttaaacaataacttaattcaatttttcagcttaaggatctttttcctttacgttatttttcctaggcttggagattggtcgctttctctctagagttttcgtattccaatgaccattcacctttcaacttttgattgacatgggttatttaggagcttctactgcttctactccaatggaacctaacattcggctctcatctgatgttgaaaaaccattaaaaaactccaaaatatatcgcaccatcattggtaaactctatttacttaaccattactcgccttgatatttattttgttataaatgaactaaattagttttttgatctaattccggaattcctcatcttcctgcaactcataaaatattataatatcttaaaggcacctctagccaagggctattttttcactcagcattttctattagcttatctgcttatgctgaaactaatatgtccaatacagactttcatcttaagattttttcagatgctgattgggcttgtaacttgaaagtccgtttctggctattgtatcttccttgccagaacattaatctcttggaaatccaaaaaatagtccaccatctctcattcatccactgaagtttaatattgggctatggccaatgccacatgtgaaattacctggttgttagcactccttcgggactttggcatccaccataaaaatcgtaccattctttattatgacaatacaaccgccatccacattttcgagaatcctgtattttatgaacgaacaaagcatattaaaattaactgccatgttgttcgaaagaaagtccaagaaggcacattgaaactaattcatgtcaccaccataaacagcatcggtgatatttttacaaagtctctatttcttatttatttccatacatttgtagccaaaataaacttaagaaccttatatagttcatctttaaaggaagtattagaacttatttaggcccaatatatctaaacccattttactattaggcctttgcttttgtattatacatatacatcttattattattattatta

SEQ ID NO: 222001 - DNA, 2270 bp, Cannabis indica
attctacaccataccatgacatgaacccatcctaccttgattagaccccggacccggatcatgcacccaagctcgggtccgatgtctagggtcgggtctgggtccaagtcctgtgatttgggtccgagtttggagtcagggttcggggtttgggtttagggtccgaggtctgggtccagttcagggttcgggcccaagctaagggtctgggtctagagtctagttcacgatatgtaagtaaaaatgtaaaaaaagaatatattagacaaatgtatttttgaaaataaaaaacaacatttagatgttttctgttttctagttttttaaatctcagtttttaaaaatctatttttaaaaaatttggccgaatgcctctattaatttttaaaaattattttttaattttttgaaaaattataatctgaaaatagtttttaaattatgaagccgtagattctcaatttttttttttatgtgtattcaaatttcaaagtaatattttaattacttacaattttttaatgacatattacataaattataataataaaaataaaaagtgatataagttaataaatataggcatattagataagattttttttttaaaaaatgatacttaatgtaattggagtcacatgattttttttttcctttttctttttaagaaaaacttatgtttgtagttggaaatattttaaatttggtatttcagaaaaaaaataattgacttttttttttctcaataaaatctaaaaatattatatttctaaaaagcaaattaggcttactttaataatagttgtatttttttttagtaaataaaaataaaaatctaaaatatagtattttttttttttttagattttttatctaaagaaatgtttagaagatgggtcatattcacacctttaaataagtaataatatatggacatataaatcacactcatatgataagtcattttaacaagtgtagtccattttaaataaaaataaattggctaaatttgtcacatagatatgtgttaagtttatgtgtagtttttgctactcataccatttttttaaaataataatatatgtacacataaattacacacacaaatgttaacaagttagtatgtgtcatatttatatacaaataaaaatagaaaaaattacatttttttttgcaagaaaataagttctaggaagatttacattaactattattttcgacaattcttttttacatatttacaaggttttttttatatatatttttacggtattcatcaaaatatcacaaaactatcaagaaaatcacatacaaataacatccaaacaacatcaaaacaacataaaaaaacaatatacaaataataaagaaccaacaacaaaataacaaaaatacaacataaaaatgaatacatcaaaaaatagaacttatgtaaataaaatcttaaaaatcataaaaatatttaaaattccgtataactttatttttgtaattttttattattttttaaataatcccataaaaataaggaataagttgagaagtatctttttttttttattacacatcaactaaatatagctacaaaataattttaattgatatatatcttcttttataatcaaaatatcaaatataaactcaaataatttatgaaaattagaatccttaatgtatataataggaatataactaataaaattgaatataaataaaaaaaataaaaaaataaaaataaaaaataaatatacaatataatttctttaaaaaataattgattaaattaacttactaatatatatgtgtcacttaccattatatttatgtatcgagaaatcctaaagggcaccagtggtgtctaacatcctctatgggtcaatattactattggtctaactaagtatcgggtctcatataatttaatataatatcttttagagagtatcgttagcgaatcgcaacacgacatgtcgagaaggtgctaggcaccacttgtgactaatagcaatcctattatatttagggttatttgcggcaaaacctcctaaagtggacaggtttttgcaactaactccctaatctaaaattttggtggtaaaactacctaaaccactagtccgttagcagttagccatttccatccatttttggctgttaagtgccaggttggaatgtccacgtgtacacagtgtacacgtgacacaattttattagtccacgtaaaaatttatttaaaaaaaataaaaaataaaaaaaattattttaaaatt

SEQ ID NO: 222002 - DNA, 2600 bp, Cannabis indica
tattaataatataattatatatatctttaattaaaatattaccatcaattatttcaagtattaatgatgttttaccttttttttttgttaatttacatcttaaaatgaaatgtagcatttattctttttttgtttcaaatttaacactaaatttacatagtctaagactatgttagcaaaactttgattttattaggcgtcgaattacttttttttaagaagctacattgattagcttttatgaaaaaaaaaaaaatagaacttagcattattttgaagtagtttttaattagactaataagtccaaacacactaaaagaacaatatacttataagtacatacatttgtacttatatataaattttaaactaattaataattattaaatcatgttattactttgtttggcaggagaaagaagtagggagttatgattttgcatttgtggatgctaacaaggatggttacctaaaatatcacgagcaacttgtaaaactgattaaaattggaggagtgattgcatacgataacaccctatggtttggatatgtggccttttctgatcatgaagaagaaatgattgatgatttttttaaggcaaatagaaaaatcttaagagaagtcaatacctttttagctaatgataatcgatttgagatatctcttgtttctgttggagatggactcaccatctgtagacgtctttattgatcagagatcgatacaaataataatactctaccaatgttatatatcccgaggaactagctctttctttccgaactacgtgacactctgaaaataatcgagagaaatgctttcatataactgtatgtgaaaatttaagtcttctctctattttaataaatgggctagctgcttaattgctactcttgtatttttttttttaaataatgagattgctactctataatctaatttgattggtcttcatttttataagtaatatctaaatacgtgagatggttttcacaagaattgtaattaaataacaattaattaaaattttatttttatttaacaattgaaaaataattttttgaactaactaattaaaagcgataatagaacaatgaaaacaaataaacaagatttaatcaagaaataaaatattaaaaattaattccaaccgcttccacttcatatttcaataatgcaaaaccaaccatcttctacctagtgtgataggataataattaacaatgaaaaactatgaaggttcttgaagaaaatatgaataacaatggaggaaacttattgctatattgatcttaacatatgtgttacaaggcttgattttccaaaaattctttttccttgtggaagttggttttatttatagtggcactattagccttgacatacatgtggtcccaaaagctaaagcatgccctgacttgtacttataagctcaacactcaaagggagtagtggaagtagtggtagttgggtatcacatacattatacgtggttttcataccttgtatcttcgtaacttgtactcttgcaccttgcatcccgaagtttaccatgtgttaaggtatattagctcactataaggtctttggtgaggggtcagtagtgactctcgcatctaatgcttatgaaatggagcccgtacaagtgagtggatgtgcatagcaagggacacctcgtgagtgggtccctcgcttgatgatcgaagcagagggcagtgaggggttttcccttacgaggtgagatagagcgagagtgtaatgaccgcttagttttaatatgagaattagcatataattatggtttaattttagaattagaattttaattattatttatgcaattatagagatatattacaattctaggtgtacaattatgatatatgtgaatttttttttattttcatattttatgcccagaacagtagaatgcgacgcatgatctataaagtcactttattataatttagtaccttagaaatagcgaggcaatatagttagatatttagaatatcgagaatgttaaggattatggtttaggattattttaacactaagtttataaatgcttcttggcgaaaaggagcgaaaattactaatttgaccctagttttgtctttattgggctagtggattctgtagtaatctcttgagtagttaattaagtgtaagctgattttttaattaaataattgtcatttattatttttagcctagaaaattacgagttagaaccaaactttctctttctttcttcttatttgctcgaccaatcttagggcaacaaccacggggtttttatcagacgatttatatcttaagatttgaggaatgatctagctaagttaaaataatcttcttcttcttgtttttcaaagctaaagtaaggtttcatgctttaattttagggttttggtttctatacgagctagttgtttagggtttgctttgttgggttgttttatggttaattatgttgattttggtctattttggttgttattcttgaccctagataaagtttgagcttttgagctcaaactttgctatttaatggtgaatttcatttcaagggcttatttttatttttattacttaa

SEQ ID NO: 222003 - DNA, 1719 bp, Cannabis indica
caactcatgcaggcccctttgataactttaaagaagattagaattgacaattgttcaactttgacacacttagacgaggcgcctttcagcacctcacctcccttgaaaagttacaaatttatttctgtagtaacctccgatgcttgccaaaagaactacccacttctctttctgagctagtcattttcgattgtccattgctaagaccacgagtccagagggagacaggggaggactggccaataattgcccacatccccaatacaattgtggatgacaagaaaatataggtattgctcttttctcttctcagtcctacttgtttgaaagctttattcaataatgaatcaaagtcttcaattccttttctgttttaggttgtgttgtgttgtgtcttcaataatgctggcataagaaaataggtttgtgactgtggtctcttctcttgtttaggaaaatgtgttttggtatattatagttgaagctagtacaatgaatatgtaaagcttatgataatatgttatcttattagctatttttctttccttttaaatttctgattctcagttattggcagtgttgtgatcataataacgcaagtccttaactaaggcagggtgatcttctagctccaacaattttctgagctgatgaaaactgaatattactttcaccattcgatctaaaggtttgatctctgctctactatgatataaatgagtaccggtttgcatttgaaaccggcttctgtcttaaccttggaagtctgagatgttcacatcgacagtattatgaaaaatatcttgaggatttctcgtttttggatttaagtagagagtgaaaatatctagcgtaagaaactttacactgatgttgtagaagtagaagagagtttctttttatgtcctatattgtaaagaatgtttctttgtgctgcctttatggttttcctccgccacaagtgtgggtattaatttccataacgggggaggtcggtctaagacaaacgatctctttctctttttcaaaaaggacagtgttctgaaaaatattcgacctccaatcacttgcttggctgttggtgtgggatgcaaaagtttgtggaaaatcaggaatagttgaataatgtacattttatgattttatctactaattaaatataaactctattaaataataaattaaggctattttttcaaaatacaattgtctggtgttgtgtggtctaaatctctttcctttgcgaggttaatttcgacatctttttcacaagcttactttgaagaattcactttatgacactgttgttaatgtttttgtactttttcaattttctcagattagtggagagaacaaacaagcaaccattgatttgctacctttgtttgtctctctttttaatataaatcttggtctccattttctcttattcttacctttcttttcaagattctctccatcaatttttattgttttgcaatattaatctttaaagagtcttctgcattttatgactcagtcttgtttctaaccattgctacctttgtgtgttgtatcaaagatttctaaactttgagctgttacaaaatctggtacaatagttgttaattaagacagctgggttaactaattggtggtttatttatataattaaatagtgttgactatcaaatttatttatattaactaaaatgatcagatctcaaagtttgatctctt

SEQ ID NO: 222004 - DNA, 1592 bp, Cannabis indica
gaatgtaacaatctgaagcgggaaattgagttttagatcagaaagaataacccgcacctacagaagtatgtcaaggccaattaagatcaaagggccacccaagaagacaacaataagaaccaattaatgcctccacctatggacgagcatttacaggtcattattgggggtccaaatcttgatggagactcaagcaaagctcgaaaaaggtatgcccaagccttgcagtatgaacaaaatgaggcaatcttggtcgtggaagagaggaaacctaagataccacgtgcaggggagccagccataacatttactgaagtagatgccaactacatcatcttcccacacaacgaccccctagtcgtagaggtataaattgcaaataagatggtgccacggaccatgattgataatggagcttccccgaacattttatttaagacaacttatgaaagatgggactccaacttaaagaattgatcctttacacccaactcgtatatggtttctctggccaaagcgttgcaccattgggacaaatctgcttacccctaactgttggatatgttttgaggagcataactgtaatggcacaatttctaataattgatgtcccttcaacttttaatgtcatgttaggccgatcagctctatatgacttaaaagctgttacatcagtttttcatctgtgcgttaaattcccaacaagaagtggggtaggatgtctcaaaggaaatcaaagaattgcacatgaatgttaaaaccttgatctaactagggtcaagaaggaaaaaacctccggccagagttcacacaaggggaaaagcattgcccaataggaagtcgcccaaggcggggacgaagatatggatccttgacttggggaaacaaatacaaatgttgggccaataaaagaactggaagaagtggaaatcgacccagatatcccatccaggaagctcaaaatcggtaaaggtttgttgcttgaaataaaattagctttaataaaatttctgagagtaaacctgggcatttttgcctggtcacataaggatatggtcggcattgatcccactatcatgtctcaagccctgaacattgacctaaacttttgtctcgtctagcagaaaatatgactactggacaaagagttggcacaggcactgaaagaagaggtagaaagactgcaggcgaacaagttcatcattgaagctttctaccctgcttgggtggaaaaccccatactagtacccaagtcaaaaaaaatggtgagtatgtattgatttcaccgacctcagcaaggcgtgtcccaaggactgctttccacttccaagaattgattagctcatggatgcaatagccggacatgaaatcccgagcttcatagacccctactcggggtacaattaaattaaaatgcatccacctgaccaagagcattcaagtttcccaatagatattggtctaaactgttataaagtaatgctgttcaatctgaagaatgctagagctaccaaccagagactagtaaacaaaatgtttaaaaaccagatcggacaaaacatggaagtatatgtggatgacatgctagtcaa

SEQ ID NO: 222005 - DNA, 1347 bp, Cannabis indica
tttctttttcatagtaattaagtttaagttttttatgtacaactcttcaaagcacgtgaacgatgtctcctgtactttgaggaattgcgaatgtgtgtttgtcgttggtggttgatcactatagctagttgttatgtatcatggtgattttagtgtaatttatattcagataaagactacatgtaatgttttatttctacttttttgaagtcattgaatgatcttgacatgagcaaagaatagtgatattggaaagaaagagagagagaaagatgaaaagacaaaagaattgtattgttattgtactaagaaatcaagtacaaagaatttatagtgaattagaattaacaagaagtaattctaactaatttgaataatacaagaggaagctaaaaatactaactgaaataacataacagttagcactaactcctaactgactatagcaagcttaatttccttaaacacctccacgcaaactcacaattggaagcaatggaaattgtgagtttggctctataaattgaggaaagtgttgacttgaaatggctttttgtgagatcattagcaagttgatcaatagttgaaacatgttttacagcaatttgatgattgtgaaccttttcttgaacgaaatacaaatcaaagtttaatgtgcttggttcaagcatggagtacctgttggttttacggtagcgattcagggaccatgaacttatatttaaggctccaataaattagatttatttattgagtctcattaatcaaataatctttgtttattcattccataattactccagtatctattgatataatcaattctagtgattatccctctttgtgtcggttgtaattagttttggtcaaattaccgttttacccttccaattacttctttattgtttagtactattagggctcgtttggtacgccgtataagggtcgtattggaataaaaaataaataacactatgtttggattaagtaatgtattgtattaattattacgactaaattttttaatacaatgtatgttgtattatttaatacataataaatggtccgtattagcttgtattataataaatagaccccgaacccggaccccggacccggacccgaacccggacccagaccccgacccagaccctagacccggacccgaacccggacccggaccctggacccggaccccagactcgaacctcggacccgaaccccgggcctgaaccacggacccggacccggacccggacccggacccggacccggaccccggacccggaccccggaccctgaccttggcccggaccaggaccccagacctggacccggacttaccta

SEQ ID NO: 222006 - DNA, 2982 bp, Cannabis indica
ccaaacttgattatatttatttttatttatggtacttatattgtatttatatcctattgcttatttctcgcattatttatctttcgttttagtctaataacaatataaaatggaacaacaatattttgtgaatgactatccctattacaatgtaactgaactttatggtaacttccaatgcaaatggagaatctaaatagtcttgcaaagagaaaatctatttcaccttgtctttgttgaaactccctggaaagaaatgcgtaaacattctagttatgctgtcaggagaacttttaaccgatggcatggtgataatgattgtgctaggtatatcatgttggcttcatttaatgaaaagataagatattggtatgactgtttagtttatgtatgtgacatctggaaggcagtacataacaagtacactgtcgctcatgaccaattggcctgtgagagaaatgctcatcctaacaagatggatattttgatagagttgcgaagctggaaaggaaggtaaatatgatttacttttctttctgtcttattaaataatggtggattgaattgttctaaattactgacattattttctctcttgcttctagatttgtgaacaaaagacgaagatgattcgaagaagtgagacttctacaaaattcgtgatggaagaagattttagaagagcagaagaagtcaactttagtttaaaattttgaagataatttatttagtttattgttctaaattttagttatatatttaaagtttgttttaattaaataattttattttgaacactttatattttttcaataaagtttatttgatattcaaacttatgtgtgcaaagttaactaaagacttcaatactcatagtataattctaaaatcaagtttaaatattttaattatttataataaataagtaattatattctttagggacttataaatgtttctatatttaagtttaagatgagttaaaatatgattttaattctatatgactaaacttaaaaattaaatgagatttaatcagaaagtttaaattactattcaaacatatacatggatatggaattccattcccaatcattagtagaatcatattcatttaattagatagtctaattgaaatgaactcacaattaaacattcaatagttgagtttattaattgtaatagattgtaactaactatttaaatcaatatgagatatgattttaatacatgaaaagagttataatgaaagtggttggactacatcaagattgagaataattgatagaaagaattcatacaattgaatctcaataaagatgacaattaaaatgaggataattttaaagagtcgaaattaaattttaatagtcatgaccatcaattaaatttagcagtaataaaataatttagtgggagtatactactcattaaaatacaagataattttgaaaaaattagattgttcttcataacaataattagtgtttctaaatcatgatttctaatagaactataaagatttcaatgaatgagatttatcaaaatacaagatataccaaggtaaggtttgaaaatccaactaatttaaattagtaaacattttgatatatggaatatcaaagccttagtgaaaaagaaattaataaaaatgttaattctttctaatttcaaactttggagtcgaaatataattgtttaataatcatgcattaatagtctcattgaattattcaatacactaagatgatattgaacattgaattttcataattgagaaactttaattttattaaaattgtattgattagagtaatcaataaaatggtatataagatagttcagttaaatatccataaagagaaggatgactaggtcattgacttcataagctagacatttaaattattatattcagatttgaattacaatgagattgaattcaagtaatataataaattagtaattatttgatatcacatattcttggataatatagtgatagatatctatcattaataattactaataaaattattgttagatgtagatttaataatacaatatggaaataggggatgttattaaagtattggataaacaatttaaaatagatgttaaaagtatgagatacaagttttgaatatcataattgtttaattgttgaaatttatgaatacttgtacaatgagattaaacaagtaataaacttgagatcatgaattaagaataatcttaataaaaataagtaataaatattcatatcatagacaatggacaaataagtaattgtctaattgagtaagagtattaagtatacttgaaacatatttaaaagactattcataagaaactctctaattgagtgagagtattaaatatattgagagtgtatttaaaagactatttaagaagtgaatccatttttaaaaagtttattggaatttaaaattatgagagataattgatttgaagaatatatattatagtatcgtttacgaaccaaaaaataaatattcttattaattatataatcttaaccaaaaagaatcacttagttatgacaagtgatcaaagactaataaggatgtgaaataaaaagattcattctaaacattcaacttgattagccataggatttattgaattcattaattatcataattaatataattaaatagatgtcactaatagagggtctagattaatcaatttcaaaactaaaattttaaataaatacctacatttaatattgagaatattaagtgattaatcaaacaaagtgaacctagaagaaataaaaggatgaataaactaaatatacgaaaaatttgattatgtatatttattcaataataatgtggtggtctttgggatctagtgctatatcatgtggagtagggctgtacaaaaaaatgttatattatttttaatataataatatgtagattaaaatgtggtaatatataatattatgtgaat

SEQ ID NO: 222007 - DNA, 2017 bp, Cannabis indica
tttgtcttttatagaattatgtacgctgaaattaaagttttctatgttagaattttatattatttaagtttttaattaataaggataaaacctaaaaactaagaaaattgcataacttctcatccttctctctctactcccttcgggccctagaaccagctgagcaaggaggatttttcttcttcaattcagcaattctaagttaaattaactaaccctaggtgctgttgaaagcttggaggtaagtcttgcatcctttctctttaatttcaaggtttaagttgagttttggttagtttttttttgtgatttcagggctgtgatataaaatggattttagaatatgttttgagatgttaaattaagttttcttgtatgtaaattgggtaagtctttggctactaggtttagaattaggaaaaattgagtttaagaacccaatttttactcttcaaaggtgaatttgtgtttttgatgtgttactaagttttggatgtttgaatacactatttttatgttttttaactgttgtgggaggtttgaataggtttgtagaggttttgggttggattcgatgtgaaaaactagaaatttctatttctacaggaaccggtcaattggttctacaagtcactagtgaactggtctaccggttggccaacaagggaaattttggggttttctcccgaatcttattttgctcagggtgctttccaaaactttatttagagtattttattcatgtttaagctatttctaagtctgtggggattagggtttctctgattgtgaaattaggatttattccagaattcaattaagttgttcatcaagttttattgtcatgacataggacccgggatcgtcgaccgtagttccactcaggtcgcccgcatacctaatattggatcgaggtaagaaaagataattgtgttgctatgcatgttaagtgagaaacaattattattgtgtgtgggtcgattatgattgaggtaaagatacggtcattaccgttattaagaatgagtaaagatacggtcattaccgttattaagcatgagtaaagatacggtcattatcgttattgtgaatgagtaattacttacttgaaattgcagataggtttcttacttatcaattgctttatcgagtaacgatattgacatacgtagctcgtgggcaacaagtggtaaggatgctttatgaagcgtcaaatacagtttgtcttataagacaaacatttgtttatgtaattttagaagacgcattgaataaatgtttatattgaatgataactttattgcttacgcaggattgtgttttcttgtgttatgtgttatttgcatttcattttcttttcttgttgagtctttgcgactcacgggtgcttcatggtgtagataaaagggaaggaaattgtggacaaggcatgagtcagaggtctcctagcgatgtacatatcaatcgctgtgttttgggtttagtggacaggatccacccttttgaccgtgttttgaaaatgtaatcccttattggaaaagttgttttgtaatgtgatgttgaggcttttaaacagggatcccgaatccaacagtatttagaatggttatgtttcaatctaatcaaaagttttaaataaacttcacttttcttaaactgttaatttataattatagattaatttatgaaagcatacatgtggtgtccctatgagtcagggtgttacagtatttgtgcgaacatttgtacggatagagactttctaagttcagttctaactgttgaagtcttaattcggcagcttacgatcagccaggtacttggcctctcatatgacccacttcatgactaagaatggcatttttgccaatcattatgattttcttgctgcttacgttcccactagtgaactattggtcttttacatggccattttgtaggctgtgaaactgccactacatttttggagggaagaccatgccagaacctatataaggttcatttggccatccttcat

SEQ ID NO: 222008 - DNA, 3176 bp, Cannabis indica
ataataataataatcttaatttacaaaacaacaataatttcttctttcaaacaccaactttcattgaatggctcaagccaatttcatcatcatcatcatcatcatcttactcttgttctcctcctaattcttcttctagtacttcctcttattcgagctcaattaccactactaatcgagattattattatgttaataataataattctcgaattagtagtaatagtagtactaatggtactgctctgcaatgtttgcctctcttaaacagactcgataatgatcataatcacgagataaaacctaatttgaaagttgaagaggatactttcgagaaagttactttgcatatagggttaccaaatacaactgttgtcgctgatgattatgatcattgtgattctactgagttttcttgatgatcatcatcgtcatgatgatgatgatgagaagcatatcaaagttatatatgaccataagaccttcaataggtacaacaatatgcaggttagtatctataaattatttaatttaatttgctacatttttttactataattaatttcttctaattcttcataaatttagggttttggaaaaaaaaaattgcaataatttttttgggtcacaaaaagatagtaattacattaagagaaaaataaacaaaaataattaatgtctagatgtctatgattaattgttttgtcaatatccaaaaaattctatacatgtgtgttttttattgtctcaagtggtcattattaatttttttgatccactttatttttcacttgttggtaaatatttttcatcttattagataaacctttcttttttgtcatgaattattagtggccatcccctaaaattaaaaaattaaataaaaaattattgatgacaaatgtaattattagaacctcaataggatttatttttcccttaataatttgtgtatcttaaataaaaaacctccaaaattttacatacttaattacaattgtatcaatgaagtaatttctacttattaattaaatgataatttctacttccacacgtacatatatgcatgaaagaaagaataatgctatatgtaatatatgagaaaaaccaattataaattaattatttcaatgcatgaaattccctataaatgaaattaataataatcaaaattaaaatcacatatatatatataaaaattaaggtatatacaattgtcaaaagttataacaaccacttaattagctggtctttgcattagttggtgatagattatctctaatttctcttctattatttttattagtttgaattcaaaatttatgaatttctcttaatttatatattatatagatatatatatgttgaaacattgaagagtatatagtgatgatccaaaaatataatatagaaaaattatgttcaattataaaagaagcaaaaagaaagagatatcatcacctaaccccatatatgatatttagtgcttcataaagtatatatataaatcaatatacacctttttatactccctagggggaaagtggatataatcaaatttaataattaacacaaaatcaaaaatttgaaaatgggaaaagaaccacaaaattctgaatcgatcccagctaaaagggtgtatatactatatatgaatatatatttaattatataatgttacaaatatctgctttttgatctatctctcacttaattatctttcacttcctcctaatgaacatgtcttattaattaatattaaaattccaacataattattcaaatttgagtaaattaacacaataaaacaataatgtacaaaaatatgtcaattttgacatgactctatgattgcctatatatattttgaacaaattttattgagaaaactaatatatagagatagatttatgaattttttcttgatctatataatttgtatactataatatctaaataattaacaatgaatgtagattaccagaaaaaaaaaatcaacaatgcagatccaataaaatacatatattaatagatttttttctctaaatatatataaatatgtagggcaccttttaatatatatatatatatatatatgtttgtgttgtgtagtgtatgtataatgcaaaccctaaacaaattaattaataaactaaaatatcttacaaaattgtatattatttaactagtatatcttgtttacatatatgaaatgttatataatcaaaatgaatctatatataagacttgagatgagattgtgtaaataatatatatagtaaaaggaaaaatgatatattttttgtaattttgtattaattaatgataaataataataattatgattaattatgatattgtagtggggtattaattaatttggattaataacatattaattatacagatgcatatgtggggacatggatcggagtatcgaaaagggccagattcactgaaaggaacacaaccagcagccatgctgaggctgccgtgctattgttgcgcgcaggggtgtaagaacaacatcaaccacccgcgcgctaagccactgaaggactttcgcaccctccaaactcactacaagcgcaaacacgggctcaagccctttcgttgtcgcaagtactcttgtggaaaaacattcgcagtcaagggtgactggcgaacccacgagaagaattgtggtaagctctggtactgcacttgtggctcagatttcaagcacaagaggtctctcaaggaccacatcaggtcttttggtaacggtcattctcctcatccttctctcgaaggctttgaccacgatgaaaaggagtgtgtcactgcagggtctgaggatgaggagctaataatgaccacccatgcgtaatttataactgcatgcatgcatgtttatataaaaatagacacgtatgcatgcattatataatgcctttggaaaaaagcttgtgctcggtaacaaaacattctcatgcaagacagcagggaggggtttgctaccgagcactttacttgacatataaggtattcatatatatataagagtattattatgtgtagaaaagagagagtttatgagttttaattaatggtgtttatgttagaataagagtatttaattattgattacctaaaagggtccatgaagcatatgaattttctttgtcaataatcca

SEQ ID NO: 222009 - DNA, 2239 bp, Cannabis indica
agttcctggtaaaataacttccaacaaggccttactgcgagagacctttttgtaggaggccatggtacgagaggcctactgggagaggccatgctacgggatgcttgttgcaagaggccttgctacgattgacctactatgaaaggccatcgtgcgataggcttgctgcaaaaggccatgctttaagaggccttgctatgagagccttctaagagatgccttactacgagatgccttctgcagagaggcctcactacgaaagggtctggtgagagaagcctactacaagaggcctacagggagaggtctcactacgagaggccagctacaaaagactagctacgaaagacccagctacgagaggccctgctacgagaggttctagtgtaagaggtcatgcagcaagaggcttattgtgagaggcctcgctttcagagccccagctgcgagaggccatattttacaggccctgtagcaaatggcctaaatgtgtaaggccttagtatggggcttcaatgtgagaggtctcatagagtggccctactgtgagaggcctcactgcaagaggcttgctgtcaaaggcatactgtaagaggcctcactgcgagaggcttgttgtaagaggcctcactacgagaggcctgctacaagaggccctgtttcaagtggcctcactgcgagaggcctctttcagtatagccctactatgagaggcctcattgcgaggggcttgcaatgagagggctccttgcaagggtcttgctatgagaagcctgttgcgacacgcatgctatgtcaggccttactgcaaatggaatgaatgcattctgtcaaatggccccatagtaatgacttactccgggggtgaacctcgttattctctcaaactaaccttgactaatcccaagggttagaagtcaaattaagtgggagtgttaattatagatataaacatctataacttctatgtttgtctagaagtgaaataatagtttcctttgggcttggctaaacgtgataaatgatagagcgcttattttattaattacattaatttaataaaatatcatttacaaggagctatgtattttgaggatacaatatattgaagggttaaatagtaatgttgatggggagaactcatcaacaaatctatggataaaaaatcaaaagttttagctaagaataaattaattatcaagtaaaatggtaattgaatttaacatctaattaaatttaaaaatttaacattcaatataattaattaaagtaacaaacaaatttaaactaaatatttttaaaaatacctaaatttaaaattaataaataaaagtaattaaaaaatatatgtatataaaataaagaaataattatttacagcatgactctatatattgtatatacataaaaataaataaatatatataccttttcgacagaggtagaagtggtgcatattggcagccgacggtggtcacgaggtggtaatggatgggccttggtttgctactcattattgtgaacaatgaggagatcaacaccacaaagagaggagaggagattgatggtggtggtggctcgtcgtggttgcaaacgtaaaagggatgaagatagaggagactaatggcaagatgagacaagaggaaaggcgatagaggagaccgaaaatgagaaggtgacaataaatatcgatggttgttttggctcactaattgccggagagacttattaacaatagaggaagagaatgaagacaaagtgatgagatctgatagattttagtttgttttaagcattataaattgtggtatagttcctccaaatgaaaagatcttcaaaacttgtcctagttatggaaagatgcatgtcatccagatgggtattctcgaaattctaacttgtccacccagaagaaatcacatagaatgatagatgatatccggaagggcattcgtagatgtttatcagttctacctagaagaaatcttcaagaaaactagtcttcatccagaaaggaatcccagttgactagttcttctctcctagaagggtgtttcgaatagtaaactctaggtgtcacctttcctatacgggaagtcccttcagcatgcgcctcaatccttagccccataagagtatgtctcatctagaagcactttgacttgtactggcgtggagatactgttaacagaagtttgttaagttggttatgtcgcaactaacttaacaacttagcact

SEQ ID NO: 222010 - DNA, 6834 bp, Cannabis indica
atcaaaatcaggttttcttctccatctcgaaaaaattgttcccaacagttcacgaccttcccacatctttcttccttttgctcttcaacctttcttgtcttttctgtctatctatgcagattcggctcaaatggggcacggtggaacatcaagagtggttccagcttgaatctggccccaaccgatcagccgccagtgcttttctacccttcgactaagtgcaatcttctcccctttgctggtgcaaactggggaggtgagttgcagtttcgccaaatcgttctttacagcaagaaccctggcacctgtcgacatggatccaatgttcaacatcagcatctctcccttggtcagctttgtgaccctcccctgcttctccgagccctttgtcttcacacccaatagcctacgcagaagaaagaagttcacctgcaaattcacaagagtatgatttcaactctccacacaacaggaggaaaaaaaaataggcttgtagcaacctaagcccctacacgaggaaaatcaataataataataataaaatacaatttaaaaacatttgtggattcttcacctcaagctcgacaaaaacctcggggagcgatccaacttcaccaagaacttgtcccaccaacctatcagcacgagtcaaagtaggatccatggttgtaccaacaccaatgagaccccccggcactgcatattgcagctcattttgctcggcatacaatgaaacaattctggaataaattggtgtgcatttggtgtttccgttttcatctttaacaacaatcccaggacgaacctcaataaattgattcactttcagaacaccctattacaaaacataatatattaaaaaaaaagtgttagcattgaatatacttgaccaaacataaactatattgttacatatatatatatacatacacacatacacccatatatactgacatgatgataactcagacgtctcccaaacaccctagcaaacatgagttaaaaagaatgcccaaaaaaacccccacaatctttgggaaccaactcatgattatatataggtggttcctgaaggtcaaatcaagcggcagcaggggcaaacacaccccttcagcctgacctagaggaatctaacaaaacatacagaattcttgtgtggcaatgatttaacatatagatgaaagcatacccatgggtaaaaccagttcagtaaactatgagtatacaaaatgtgtcaattgcagaaacatgcatgtgtagtatataaggttgttcaattgtgtgtaaatttagaaagaaacggcataccctaaggatacttccaccagcaacaccaccttttatatcatcgacctcaaatccaggcttgttgacatcaaatgaccgaattacaatcatattaggaggcgagataaaattcctttctggaatagggatctttttgacgatgtactcacatacaacatcaatattatacttcaactgagcagaaattggtactactggtgccccatcagcaacagttccctgataaataagcattttagaaaatatattcaacaacaatcaaactgtcactttaattcagtaccaatattttgaactccaataaaattacctcaatgaatttcttaattgcttcattctggttgatggctacattttcttgaatgagatcaaccttattttgaagaataataatgtgttgaagacgcataatttcaacagcagccaagtgctcagatgtctgtggttggggacagctctcattggcagctatgagaagcaacgctccatccatgattgcagcaccattaagcatggtagccataagaatatcgtgaccctaaaaagcggggaatacaataagcaacttcaaaaacactacactaattccattatgcagccagtgccaccatataatcagcaattgtaaaaactgccgggcataaacacaaaccaccaataacaaatcttgtataataaatattttaaccaaatgaatattcatatgcctaagacgaatgacttccaaccgcttgggactatacagtagaattaagcatttagaactgacattgttcacatgagcttaagtaaattaatgtatattaacagaacaaacagactatctatacaaggaacacaaataaaaatttatataatacacttcaaaaccttaccgggcagtcgacaaatgaaacgtgtctcagcaatttcatcctagcattctcaaatcctggaacatcacaaagaggactgtcttcctttccacttccatacgccctatgtacacagtttaaacgtgtcaataaaatgagagaaaatttaatcacctatttagttgtaatgttttcatgtgtacccacttgtaacacataggtcgagggcaccgctcatcttcacatttgtatatctttgcatttgcatatccaagcttaatggtaatgttccgctccaattcattcttgaaacgaacagtctgcaacagataggtgttaaaatgagtatgcctttcaaatttaagcaaattatgttcgtattataaaatatcactgattataatgtgaagtaaaattatatcctaaaactaatttcagaattattttgttttgaacaagatagctagaaacattagttaaaagaaacttcaccacaatgaaacatatcaaccttgaaatactaggaaaaacatgaataccgtagtattctcacacagacaaccaagacagaaagcacatttaaaagcaaaataaaacaagtattacctgaacaccagatatggcttttacaactgttgacttgccatgggccacatggcctatggtgcctgagaacaaacatcaacatccaaatcattaattaagaaaaaacgtatttgctacaattgcaaactgaggcagtttaatcattacatgcacaatcaatgtatagtcaagaaaattcaagcatataagataaaattaccaatattgatggttgcctgacgagatattacttcaggtgaaagtggatgcaacttagttacatccaatttacccaggtcttgctccatcaaaccttttcgtgacattgtgcctgttctaaagtgattctcttctgcttcaagaagttgttggtggcttatatgaccactcacgaaatttgaaaaacgattattcgcagtacttaatccctgacgaataaggaaacgaaaccaaattgagaggggacaaaaacttcaacattttcagaataacaggagaaatgacaatatcagaataaatggatgctaataagcaaaactcaaaatcaattatgaactctaactcaaacagtagaaccctttagtccattctcagaacagaattcttcccttaagaactcataaaagattaatttttcctcaagttctttagttaattctcgacacaaaaccttctccaaatgtataaataaagcaacagaaacacctgaataacaattaattcaaccaaataaaacacaaatgaatgagaaccctaaaacaccaagtgcacaaaaacatcatacactcctcatcatttccaggacagagatccaacaatggcagaatatatatacgaaaatctaataaaccctgaagtaaaatacgcgtactccaaatcctaaacgcttaggaattaattccagtaaacttctcaaccaccgaaagaattcatccccaaaagcagggcaagagagatagagagacagaaaagtgaaaggacatccatgaatgagtaggtagagtaactaaattgacatacctggatgaagttcttgggcgaggcgtctggagcaggagcagcagaggaagaagaagaaagatgatacgcagagaggggtttctctgttgttttcggaattagggtcgagaagagaaagattccacaaatggcctctaccaatatatttagtgggtttgggttttcgttggccccgtttcctaattaatcattgggccttagcggcccaaatttacatttctatgtgcaaacaaaaacattaaaattataaaaatacaattgtttgtatgtaatttaaattattttttacaaattttatgattttatttacagaaaatatggtcttttgatatacttttatgttgtactcttgttaatttattgttgattttttatttatttatatgttattttttattgttgtttttgattgttatttttagtattaattttatataattttctttttgtttttattaaaaaaagcataaaaaatataaaaaaaaattaagacgtaaaaatataaaaataaaagtattatataattttctctttttgtttttatgcttcatgtgacttttaagtcacttcattatctcaaattatgttattttctaaacatgtacctaaaatgtttcacagtttttttatttttttttcagcattgtttttctcagttttgtgggaattacaagtaccacaaattctatgctaattctcaaataagtactgactctaagcacatcaagaaaaatctcaccaagtaactatccagcttcaatactcataagtttcaaacaatgcctaaacttattttgagtaagtactttggtgcctgcattagcaagattttcttctgtatgaaccttctctagctctagctctagctcctttgttcttgtctctaatccaaaatagttttatgtcaatgtgattgaccgttcatggtacacatagatgagggattatttttgtcaaagattggctcgcaaattcttttgcgctccttaatttggattagcatattctttagttattaatctttcatttaccattacaaaaataaaaaaaaaaatgtatcatgaattctttaagatagcgtttagttggaaagaatgaaaatatatgaataaaaataagaatgaaaattagaataggaatcaaatttaaaatgtataaaaaaattattgaattttttcaaattttgtattgaaatggtttttccttccatttcaaaatagtggaatatcgaaatagtatactggccaatgattttaaatgcaaccaaacaaaggaatagaatggataataaatttattatatttcattacctccaaccaaacccaattagaatgttattacaattagtcaaacggaaaagaaatatgtaatgtgtaagtttgtatgttagagctgtggcaaagtaaaaaaataagaagtcaaatgtaataccaaaaaaacaaggcatgtgtaaaatcaactttattcccatagaaggtgaaacataagaagaatagcaaaaaaatagctagtttatcaaaaatgggcgcatatatattttttcattttcttattatcataccattttcttaacataacatagtaataatagtatacgatatatgtatattataaactatgctgaagaagtaggttgagagtccctttggtcaccaaaaatacgttgtctgaaatcagaaaccattagaggaagtcctttgcggagggacacaacaggctcccacccaagtaactccttggcttttgaaatgtctggcctcctcttatgggggtcatcctctgtgtttgccttaaactctatctttgcatttgggtctataacttcttgcacaacctacaaattataattatatattattaaccaaattaatcttattttactataattatatgttatgtatggcaagttacctgagccagctcaagcatggtaaattcaccagggttgccaagattgaaggggccaacatgttcaccctccatcagccgcattagaccttctacctgtattaaaacactgtcactttcacccttgtatattgtaaatcatttgtttcatatagatatgtagacgagctatgctgcaccattaccagccacaacataattttctttggtcagcaccacatacaaatttttgtagactgtccaccaattaatgtaaatgaaaaataatatttcttcagaaagttattgcaggatttgaaagcacaagttcctctattaagtgagattaagaagatctagacaattctttgttgacaaaatttacagaatcattcgtcaaaagacaggcaaatgacaaagacaacaagcatacacatataaatagtaactatttcaattctggcaataataatcactgtacatgtacaattagaaaaggttttattacttttcaataaatatttattctatctaattataatatactaccaactaccatttcttatcctcacaaagaagaaaaaataaaatgaagatttagagaccctatgaagttaaagcacgaatcacttttaatagtcaaccatatcgctcaagtatcaattcatgaaacttgaaagcactcataatatttcttatcatcacatgtgttaaaaactcaagcacctaacattttggaagcttgtaatttgggctatgaaagtacaatttccacatgtcaacaaattatacatttctacaaacaataaagctcattaatatatatattatatatgaacattctttagttacgatcatgccttactggtccaacttctcatcgtcaaaaagacatgtcaaagtgaattaggcaggtttaactaatcaaagttgacatattcatatcacacaaccaatcaatcttgatcctacatgtgtttagtttccattagatcaacttatataattaaaaaagaggagcaaaattaggaaaaatataatatatgttttataatatattaccaggtcagaaacgtattggaaacttcttgttttgcttcccatcaccataacagtcaatggttccttcttatgcctgcaaaacgtgtaaaaaatttcgcttgttaaaaattactaacca

SEQ ID NO: 222011 - DNA, 2093 bp, Cannabis indica
cattttctttcaatttattatttgttcaactgttgaagacaatttctttttctctatatctaatgtttttctccaatttacagagaatgccccgctgacctgaaagaaggcatctctagtttaatatttgctgccccgaggtgctcggaaattccagaacttgtagctatcagggatgtttttgagaagaagtatggaaaagatttcgtatcggctgctactgatctacgacccagctgtggtgtgaatcgtttggtaagacattggcatcatttcggaattacttacatgagtcagatttttcttgtttacaacatattctgtggtatttatttgactgagttgtgttttttgtttacagctcattgacaaactctctgttagaacacccactggtgaatcaaaattgaagatcttgaaggaaatagcgaaagaataccagattgaatgggacacaacagaaaccgaacaggaacttctcaagcctccagaagagcttatagtttgttcctcactcctcactctcaaactcaattatgagtcttttaccatatcaaacaatgttcatttacttgttttttcaggaaggaccacgcaattttgttagcgctacaagcttccccgtgacacccaaaccaaaccaatccgttgagcttaacaattcaaccacaaggtaacaacttggccattattttcacaaacttgtaaatgcattttcatgtcaatctcattaaacttgtttctctagctcatctttaccgatggggggaacaattggtgacaacaactgtgggggtggtggtggtggcaacaagcatttcgtggactcggcctctgctgctaaagaagctgcaaaatgcgctaatgaagcaattgccgctgccaatgctgctgctttccttgccaacaaagacccgaatcatgcatcatcttttgaccgtcgtaagtccaacagttcaagcatcaatgttggatatcaaaccacatccggtgcttcttctactgatcgattcattccagatggcccaccttccccgatcaactctcaatacacggataatcaatacaaaagatcttcagaaaccaggagatatgattctcattatccaagcaatgaggagactggccataattcaggagctaggagatatgtatctcagagttacaatggatctgattcttctcattatccaagcaatgaagacacaagctttaacaacaacaacaacaacaacaacatggagagtagaaaaatgtataggagtcatagcagctacaatgctccatctgcacaatcagacataaagtttgatcaatcagacagcgaggaagaattcgaagaggagaagaatcaacctcgtggcaatggcagcggtggtggcagctttggcattctaccacctgacaggctcccgccacctgtaccatcatctgaaatgctaaagcaggattcaccagctcattctgtccatccgaaactgcctgattacgatgcactcgctgctcgttttgaagctctcaaacatcaccgcaattcactaccttaaagaacattttgtccatctcttgttccctgaattatattatatacatacatatactatgatactataatgaatgaatgtcctaggaagaaagtacttacaattcttattcttttgtcaaagttggtgtttttttattaacattgtaatgcaaagatgtggaaaacaaaagtggtgttgtggttggctggttgaataatagataatataatataaatacattaataataatactttgttctgtttttgtgtattgactttttttggtctttgcttgtggctgaccctttctttgacttagaaacacaagtctatgacacaatcccacctcgttagccattttcaactccaagtctgatgttcatactctttttttgagtcaaaaataaaagcttccatcaccaccaacctcctccaccgccacccaatttcacagattcaataacaaaattattagaaaatagtcatcatgttcttatcaaagtaaccataccattaattacatgataatgatatttaccaagccaaacaaagaaaaccaaaaaaaaa

SEQ ID NO: 222012 - DNA, 2191 bp, Cannabis indica
gaaaacaggcaaggtgagttgggctgtgattaaattggatatggaatagagttttgatagggttgagtagaatttttcggaatctatcatttgtcatttaattttccctttaaagtttatctctttgtcttatgtttctataagttttaatattaatggtaagattgtaggaaatgtcaagcctactgcgtatattgagatcctttatcgcctaatttatttttgctttgttctaaagatctctcttctattcttagaataaaacaagcaactaatattttttgtggtattaaagtttctagattagctccgtctatttctcatcttttgtttgctgataacaatttactatttactactgtcaatagtgattctagtgtagctattaagaattctcttgatattttatgataaagccataggatagttaattaacttcactaaattctttattttattttctcctaatacctctgctaatgactaggagttattatcgcataattcgggcttgaaaaataaagctttcattagtaagtatcatgttttacctcagtgttttgataaggctaatagtgtctcttttaatttcttgattgacaaagtcagaagtcatataaattcttggaataataatgctttctccaagaaaaagaagtgttgttaaagtctgttatccaagcccttctttgatatactatgccatatttcagaattcttgttaaaacttataattctatagagacacttatggaaagtttggtggggctcttatagttgtaactctaaaatccattggaaaaggtggagggatttttgttactctaagttctttggagagctaggtttcaagtttttgattcattttcactagactatgttagccaaaataagctcgaagaatacttaaaaatcatgatagccttctatttatagtgcttaatgccaaatattttagaaattcttgtttccttcaatttgctaaaggtcatgctctttctttcaattggtttaatattatatggggaagtaaatttcttttaaaaggcatgcttttcaagattggagtggtacgaatattgacactatcaagcatcattagatctctagtattaaacacctaaattacaaagcttctgaatttcctattgatcccacgatttctttctttattagaagtggaagctaagacataaacaaattgctccattatagttaagagaaattctcaaagtttccctgatattaataatcacaattctttgatacagtcttgtcattaatctggtctcattactatcaaatctacataccatctagcttttacttcttatttctccccttcatggtctttttttggaatcctaattagattcccttcaaaattaaacactttatttggatatcttacaatcatattatccctaccactcataagttgcttaacaaagaattcattcctattccttcttgttttatgtggctattgcaatgtgactgtgacgtactcaacaattggttgttctaaagttgaatttttttggaaacgtactctttttatgaaattttatttagaaattcaacatttagacttaaagaatttcttgttaaatgattttgaattgtttgaaaaatgacgtggatgatttggaacaacataaatgatcagtttcttttagcaagaatcactttcctaagcaggaaatatttaatagagcagcatgttacattcatgattataaagaagttcaagtagctagtgaaaaaaggacaaataaaagtgtagaatctggtgttttaatcacctaaaaaacaatcaacaacaaaaattaaaattagtacaataacatgaactaactaatcgagagaatataaatataaatgcaaaaagagaaatcaaatcacactaatttaatgaggtttaatcatttgcttggcagtggaagctgtctactctctagatggaacaacctttggctttaatctttattattcacagttggtattacaatggtgataatcaccaacatctatgaattgacatatagctttatttctatacatagagaattgaatattcaactacaagaattattgaatcggggattcattagaccgagttactcgccttggggttgtaataccctggaattaggaaatagattagcaaaaccctaattagataattatg

SEQ ID NO: 222013 - DNA, 1968 bp, Cannabis indica
aaactagacaggtcgagagggtcatcattatcagcatacacattactcctgcctaagttcaaaataccagtatggaagatgtataccaggagagaagatcccctaccatacataaagtacgttgaaatgaaaacaaatctccaaaaagttactagcgatgtacgatgacgtatcttcctagaaaatttatctaaaatagcccagcaattgtattttaagttggtattagggagattcaattcttggaatgaattttcttgagaactctacacacaattctcatcctcgaggcagataccatcataactagaagaccttgtcgaggtaaagcaaagacaagataaacctttgaaagaatacattcaaaggtttatggttgaggctactaaggtcaaataacaaaagaaggtcgttatacagccgtactggggggaattcttccattgagtgacttttggaaagatatcaggatgatctcaacaaacaatatgaaagagttcctaaagcgagctgatagcttcatcaagttggaggaagctatctgataagcccagacaagagggcaggtcaatagcaggcagtctcagggtgccatgcaagcccaagacctgcgcaagatacaagcaagtaaaagtaatgctggctatgcctctagcggtaattacaatactttccctacaccacagaactaaaaggaaaaggaggagaagtacacatccttcaccctcctaaccgagactcctaagaccatttagatggccactcaattaagttgttgtcccatacaagaagcctcctccaatcgaaaaggatatcaacaaggaggacatgtccaaattctgtcgatttcacaatgactttggccatgacacaaacgagtgtctacatttggaaaaggagattaaattccccataaggaaaaataatccccacttgcgtcgttatgtgcaaagtaaccaaactcaggcagaagctttccagaagtgggacctgatgccaccaccagtgacaagtcacctgcgtcataattggcagaccccacatagtaggcaaaataagcaaagctagggagcggtatgctcagactctccatcacgagcaaaaaagcaacatcctcattgttaaagagagacactccaaataactcaagtttgaagagcctgccatctcctttatagagggagtttctactcaggtcaggttccctcacaatgaacctttatttataactgcataaatagggaacatgatagttgctaggtgcatggttaataacgtggcctcctccaacatcctttttaagtaatcctacaaaaaaatggggctcaaattaacaaagctagtaccatgtacacaaattatgtatggcttttttggccaaggcctcgcacccttaggttacatctgactgcccctgacagtcaaagaaagtcccacaacaaggaacattatggctcaattagtagtaatcgatgggtcgtcagcctttaatgcaatgataggctagctagccttatatgacctgaaagcggcaacatcaatctaccacctatgcctaaagtttccaacaaggtatggggtgggattcctaaggggagatcaatagtcttcctaacattgttacaacctagctttgtcttaagccaagaaagagaagatgcctaccaagcgctctgaccaagagactggcaaagggccatgaaacctgcccaaagcggggaggcaaacatagatccttgctttggggatcgtgtagaaagctttagacttatggatgaattggaagaagtggagattgacccaactcttctgaacaagagattgaagattgggaagggtttagtacgaaaaataaaatgaactttgataaaatttctaagggaaaaccttgacctctttgcatggtcacatgaagacatgatgaatataccctcctgtaatgactcaggcactaactatagatctaaa

SEQ ID NO: 222014 - DNA, 1648 bp, Cannabis indica
aaatttcaaaaatacaaaacttccccttgagtccgtacggtcttcgttgccgcagccaccaatggcctcgtcgcgacaacttcacaaagttgaaatagggtctttctgccagtcttctcgccgcgtccataactcattatcactaagaaaatgaatacctcgccgcgaccctaagcttcctcgtcggggaaactgtgtaaacttgaaatcacatctccatgcgtcattctcgccatggcgagatgcaatatttcttgtgttgatgttttttttattcgtcctgcctcagtctttttgaatcttgatgcaattgacatttcaaaccacgggaacctgaaaacacagaaaaataagcataattctgccataaaagtattgacaaagactgaaaatgactctaaacatcgaccaaaacttagctataaatagccaaaaaaattcccccaactagctctttactatccctcgagaaagactaaaagtaaaggcaaacaaacaaacaaactatgagataatcgagcttccaaataatcaaactaccactgccacttatgaaacttcaatcgataggttaaaccagaattttaatccaaaaactctaacaattaattcggatgatttctttcaaacaccatgtataaatgcaaattacacgccaatattcgaaaaaaatcacaatcattctactcttaccagctttccacaacccaatgctcaatatgcttgcatgacctacctctctccactattgtcaacaaccctcgcttggaattaaaagatctttttaggttgtaatgtcatgtcttaggtaaaaggtagatgaaaagtcatttaggctctattatactataggcacattataaccaaacaagtaccatacaaatccacatttcccaatatttacccaaagaaatttttttaaaaattgagaaattccaatttagaatcaaacaacactttttttgagtaattttattttcagtgatgttaaaaacactttcatattataaaatcttttctcaatctcccactttctaaataattccacccgtaacaatttatcccctccaaatttatctctaagcttatggcataaattcaaggtgcatagggaataaatgtagtgaatgggaacaaaataagcgtaaaagtggttcaaatttttaaacaagctaagactaaaattctaaactaaggataaaacataatagtagacttgaaaggctcaaccggtccaagaaaattgctttaatcatgttccaagcaaaaggtatcaagaattttgcctcaagaaaataaatcatgcaagttctattccattcaagtaaacattccgtaaacccaagtagaacaaaaatgatattatccaaatattgacaatttacatcgataaattttttttcaataagaaaccaaattaatccaaagtgttaatgaatgaagcacacggtttaaatctcaatccattccacaaataacatcagtagctcaattaatcaattatcatcggctcaattatgaatacactaaacacactaaacttaactagacaagaaacataaactaagcaaaaaaaaaaaaaaaaaaacactataaaattttaagtccctcccccaaacataaagtacacattgtccccaatgtgtca

SEQ ID NO: 222015 - DNA, 4913 bp, Cannabis indica
taggattctaaataatgactatgtcttatttatgaattttactaatgttatccgtgtttccagcaagagacacgtggattttaggtcagcatcaaaagccccccagcgggtcccaaagaagataatttgggtaaagcccaagtcacacaggacctttcaggaatgtaacttagctctatgaccagaagagcttccgccaacaacagtctgtatttggaagtagctccagtatcgtgatgctagagggccaaagagcatgttcttggaagacgagtttggtctacctttttattcaagcgcacagaataaaaaagtaaatgatcctcaaatctcaacagaagatcgtatcaatttaaaagggaaaactatttaaaatgaaaatcaagcaattaattcataattaatttcccacaattataggacacgattttgacaaatccaatcatattcaatctgtctagtcagcagattttcttcttcgtgggctgaacttcacgaaaacatcccaaattatgtaatttcatgtaaactccctattagagggattaagagaaactaagtataattctcttaacactataaatacccaacaaatcctttggattaagggttaaactctcttgtaatatttgctcacgcaagctaagagaacttatactcattgtattcctaaaggtttttccagcttaagatacataataacaccgactcgtgtactaaggctcgttaacgttcgacccacgtaaaatttttgtgtgttgttcttatttctttttttgaattatttatttcttcagctttaatttattataattggctttttgaaaatctcagtaaatattttggtgctttcattgagagttgaaggaagcagtgataccatctgaagattacgctcaataatggtaatcacccaaaacaagtctggtcttcactgatccaaatgccaagacaagagatacaaaagttcagaatgaagcaaccagccgtcacacgaatcaacttggcaaagacacagatctagacgctcttgtatttgaagatgatgatttagaagagaatagctctgatgatgctgaagatgattctcaagatacctcaaaagatgatcctcgggacacaccaaaggatgatcaccaagacaagactattgacgatgatactggaggaaaggataaacctgatgagtcagatcctgtggttattatggccaaaaaacttcaattaactgaaagtatgttatcttgttaggaccagtttaatgagataccacttgggaagatgataagaatggaaactgtgatgacaaccctgaccaaaggaatccctaatgtgcgaacaactctaacaacagatgcttccagaagagttgatcttaaagatcctgaaatctcaaatccttgcaaggataaagagaaagggataatatgtgaaactttgaagaatactcctttgactaaacagcaaaagaagtctaaagttgtcaaccaaccttgaaggaaaatataaatgataagaaaagatggtcatcttttctcttctctttttatacttagaattttgaattccaatattcaagagggaataaggatatgaaatcctactcccagtaggaatgcttgaagaacaaaaataattgtccaagattactaaaattgatgtcaacctggtagtttcgagagaaacgggcttagttcacatcattaagtcaacctcacacaagtatagattgagttgggggcaatgtttacactaaaagtagttttgatgatgtgaacattaatgtttgacacgtggcaagaaagaaaacatcctggagttgagtagtcccaaatcatagtaattcgacctgggagaagtccctagccatgcgcccaagttgacttcgagaactccggaatgggtatttggatcctgccaagttgtttccaactcactataattcaatattttgtatcatgaagacatgaagcatccaagtccaggccctagaagctaaaaatatacggaccaacaccttgaaattttacccgggcgcttagggtttcacctagcacccaagttgacaacctaactagggttttggttttcaggacagtcttcgtgaaaacgggtcaattttttcactgggacatgaactagaaataccatgaatatatttaaggcatcagaattagattcggagaactttcatttttgagcacccggtgcccaggcacccaacacccacgttgacaatttgttaacctatgccactttcaagcatcagatcaaaaatctgacccgtgcatattcttcatcttcatcaaaatggggaaacaagtgacacctggagctggcccaacgcccatgttgacattttgtcaacctgggccaattttgaggagttttttcaaaaattcttccgagaatattctttgttttcatcaaagattaagattttaatttttcaggagaccaaacagaacttccaagtggcttgaaactggacctagcacctaggttaacacttgacatatgtcaacatgggtaatttttaatcaattttttgaaaaaaaaaaatgttttgggtattttttccaattagaaataacgaagatacaagtaagcttagggagaaaactacaattctaagggtatcacaactaagcccagtgcccaggttgacctggtgctaggcctagcacctaggttgaaaatcaacctggtgcgctggttttgatcattcaaatgtcaattctgatttgagcattctctctaaaatggtcaaaaacagggtaggagaccttgtcctcaagttcttgaaccttggaagtatcagaacgacatcccagaagctctgaaataagaacccaacgcccaggttgacaaatggcctggtgcgctgggttctgcttatccgattctgattttgtctcgaccgttcgtctagtttttaataataactgagagtcgtgaagttagaagattcaaattcacaacttcatatcttcattttttggcaaggttatttactcaaaaattgggagttttgagtcttctattttcgcaaaacagcaacatctccgagaactagtgactaacttcgccaaaacataaaaatcgactaagtgatgtcaaaatatcaattagacatcaaaaagtacatcctcgacatgtttcccaactcaaccatcgtctaggttcacatcatatgtcaacctgggcgttgggcccaaaatagccttcagtaaaacgatcataacttactcaatattgatcctattgacgtgattcaacttgaatttccaagaattttcaatgatatatcaagtcatgtctcacactctaatcgcaactttaaattttttgactcaaaattttactctcaagagagttacgaattaaagctacaatttactcggagcgggtcctgctcgcgggactcaatctccaaaaattgacaatcaacttcaaaagttaattttcacaattagatcatcatctacggtaaaaaatagtctaaatgtacatttctatatatttttttgaattattctattcacatttaataggtactccttcacctataaaaggagaacaacactagcccatttttcacattttgaaaagtactcatatggtcagagcatctgtttctagtttctctctctagaaatttaaacttttacacttaactaattttcttataattctcgtgagaaataaaaacctgaagtagacgtagctccattaacattgcgacaaggggagtgaactactataaattttgtgtgtctctctaaattatttatttaaacttattattcacatcgccaatctagcaagctggtattgaccatttttcagcgtcaacaaatatcctaatcattttttttgataaattatgtaattttattaatatctattatacctatatttcgagcaataaatatatggctttatttgcatgtcacgtgtattaaatccctcaattaatgagctaatagttcaactcactcattaaagaatccagatttaacatatacctctcgaagaatactggttaagtgaaatattattatggttaaatcgaccattgatagattaagatactcaagattgtctcaaataaaagatgagtactattctcccttcctaaataatagagggatgaaggcacaatccaagaaagataatctagtatcagtatgatatatccaattgatgagaagaagaaatcaaatgcttcacctaagtccaaaattataaatgttgattcaatcacaagaaataactaaagcttataatggatatcttagaagatttaagacttaaactaaaggtactaaaattgtttaagacaatcagaaacattcttgagatatcgttaatacggagagataagacttatctaaagacaatcaggaacagttatatatacacttcccacctattaaaagatatataaaaagtagagaatgtccaagtttcataactgttgtctagagaacattaaagaaataaatgtaatcctactcctataaatagtagtaacaataatatacaaggcacgaccaaatttctaacttataaaaattctgacaaattgtatacacacaaaaaaatttagaaataatatttacccgtggagtatgtagatttaactataaatcacataaaaaaatctctctctacttttattattcaatattttatttattacatttatttagcaattttcgttcaaagtattaattatcaagcatcaattaatattaacgaatttttgagttaacaataccaatcaactaaaataatagtctgcaatttaattaggatatctccccctgttagagacatgaccgagattgataattagaaaaacgagtcaaataatcagtcgcctaattcccagatcgtttgacaaaaaa

SEQ ID NO: 222016 - DNA, 1960 bp, Cannabis indica
caaatatcaagtgcattgtataaatttatttttttttaatgaatttttagttgttttattttgttgacctcgtttctagccaacaatattgagtcaattaaaacaatagatataactatattcgtaattcaagaacaatcacgacacacgaaatttatagaggttcgacccttagttcagtaatagtctactctcctttttgttgttgcttatgaaagaatattaagatcacaaggtccgactaggtgagtttctcaatatctcttgaaaaggttacaagtatgttgcagagtattttctctcttgaaagtgcataaaaagaaggccccttaaatagtgaattggccttactatatataggggagaacaaatacatttagcctcgaaataataggagaaaaatcagtgtggatttgaatatgaatcctacgattgtctcatttagttaaataaatctcatgaaagtagaaatttaaaattagtccaattattggggagacattttgaggaaaatatcctaaaatatcttcagcgattcctctgatcaacaattcatgttatgcaggtggcttgcattgctcgacgtgaggtgaggtcctaagcccgttcaggtgttttggcatcatctggcatggtcagtataaactagcgttatatttcgcccatggtcaaatttccttgccacatgtcagcttgccaggtgccacgtcgtcagtacgaattttagaatgacatttttctccaagtctgcatgaaaacttttgctcgtacaaggaattcctaggcttgcacattgcacggctaggtgacatgcgtttgttcccacgtgcttgcatggatgtgacatcagttctgcctgaggtgtgcaaatctctccctgtctcttcaactctttgcattaattgcttttccttaaaaactgcaccttaaagattgtgcgctaacagttacacaaacccctgtaatgattaacttttcactttttggggagaaacatgatattttgaatttgatgaccattatacctttcggtgaattatcataatgaaatgtctgcaataatataaaatagggaataaaatcccaaactaataattgaaactaaaacaattaattcaaaaattaaagaagatttcgagcttcatcttcacttggacaatctccaccctcctgtccaaccatccgactcaactcgctaggataacaatccaagtttaagcagctggagctgaaataagaataaaataaacatggttagtagattcaaaattaatagcccaaggggataataattctctaaaacacataagtttataacaaagatagagataccatgtttctttgccaaaaacttaagacacgagggtttccaatggccattttcattgcaatagaagcactttcctttttgctttgcctttgaatcaatagcctttttattcttattagctgtgttaatagctttaagaggcttcttgctattcttccacttcttctttttgctgggtttcgaagtagagacaatgtttgccttaactttggccgtaccattagcagtgccagaactaggagctttagttcctcctttctgtggatctccaatcaaatttttaatgtctgaaggttgttgattaactcgtggaagtcgaaagtcaacttgttcgtgacatagtttgaggtgaagggaaaaaaagatggagtcaaactatttaagatcaaactcacttgagtttcttgatctataataactccatgattctcagcttcctggaaataacttgccatctaaagcaggtgatcacgcacgttctgatgaggtttcatctgtgcattgataaaattcttagtcacctcaaaccgagcttgattcgacgccatcccaaaaaatttagttaattggttcatgatatatgcagctgtgagagtattggcaaaccttgttttcaaggtgtcgaccatg

SEQ ID NO: 222017 - DNA, 1943 bp, Cannabis indica
gggcccgaacctctttaaaatcatgtgttccttattgcttactaatttttgctttatcttaattacattcctaatttcttattaattaactcactgtcgttggctaaaagcgaggtcaacaactgacatggtggaaaaagcactacgagctgagggcgcagttgagtgcattcaagtgtcccgggggactcagattggttatggagttaccgcttctcctacatttggttacggtaggagtggtagtgactcaaccacgattagaagagaaaggaaccatctacatccggtggctcgagtcagaacaagagattctgagggaaccaagctcatggcaatcgttagggtggttgtaaaacccgatacacttacctggaatgtcccaattgcaagaagcatcatctaggtgagtataaagggcgaggatgttttcagtgtggtatgcttggacattacaaaagagattgcccgcaactaaagaaagaagagcaaaggatagaaacaaagcctgctctagcaagggagtttgctcttacttagtctgatacagaagctaccccctcagttgttacaggtcagctcacagtcaacaactcttatttctctgttttatttgactttggggccattcactcgtttctgtcgaccaaaatttttgataaattgggtagacagtttgataattatgataataggtttggaaccctactgcgtgatagataattaattatctctaaaaggtgggttaggtctatgtagatttagattgagggtaaagagttgattgcttatttagtggaattaggcttagcaaattttgatgtcatacatgaaatggattttttgtccacatattctgctagtattatctgtaagcgaaagatggtgatcttccaacctgagggccaggaacaatttgtgtttgtgggattagtttagggatcctgaattacagtgatcttagtattgaaagctagagatttgttataagatggatgtctagggtttttggcagcggtattagataccacacggtctgaattacttcggccagaagacatcaaagtggttcattaatttttagatgtgtttcccgatgaacttctgggtttaccaccacagtagaaaatagattttgttattgatttagcacttggagcagagccaatctctaaagcaccttatacaatggctccaacaatacttaaagaattaaagagtcaacttcaaaggatgttggatttagggttttctcgacccagtgtgtcaccttggggagctccagtgttgctggttaagaagaaagatagatctctacgcatgtgcaccgactatcgagaactaaacaaactgactatcaagaataaatatcctttacctaggatcgacgacttgtttgatcagcttcaagggaagacggtcttctctaagattgatctccgatcgggctatcatcagttgagaattcgtgaggacatttcaaagactgctttccgtactaggtattgacattatgaattttaggttatgtcttttggactaacaaacacttattcaaggatttcctcaatacatgtgttatagtatttatcgatgacatccttgtgtactcccaatcagaagtggaggatgaacaacacctccggatggttttgtagtgattaagagaacataagctttatgctaagtttaaaaagtgtgaattttggctatcccaagtgtcatttctcggacacattgtcagtaaagatgggatcatggttgatctgggaaagattgaatttgtcagagattggccaagaccgaagacagtaacagaagtcaaaagttttttgggtttagctggttattatcgtcaatttgttgagggattttctaagatctcaacgccattaatagaactcactaaaaagaatcagaagtttttgtggatagacaagtgt

SEQ ID NO: 222018 - DNA, 3033 bp, Cannabis indica
attattcttcatttattccgttacatttctccattaacttatttcgattctgaatattgtataataaacgtgccataaaggtccaacttgagtcactgattgctttgatggcaacaccgaataatagtcgaagaagattccgaattccaattgatccaatgcaatcacttgacgataccccaataggaggatcaagccaagtgactggataaccatcaacaataggggtaactaatgtcacggtcggacaacaaacaaccacagtcaatcagaatatgggttcagcagtcaatttatcagccattccttcaatagtcaattcgtcagccattcctccagcagtcaattcgccagccattcctccagcattcaattcctcaaccatccctccagcagtcatcttgaccaacctcactgtccctgaaggctctctacaccaaaaatcccttactagagcaaacaatgtaataattgatttaacaccttctattgtgaatgcaggagtgaatgttgcacctacccaagagtagttgattgaacaaataattgcacgaaaactggaaggcatggaggccatgatccaaagaatcccaggagtcccaactccaatcaaaaagagcctgcctagcagctttgcaaatttaccctttgtagatgccatcgccttgatcgaaaagccaaagaagtttgtgtttccactgatgaaaatgtatgatggaacgactgatcccaacgaccacatagctagctacaagcataggatgttcactattgcaatacctcacgagttgggcaaggcgtgtatgtgtaaagggtttgggtctagtatagttggccgagcccttcaatggtatacaagcttttctaataattctattgcttatcttgctcaattaattgaaatttttgttgagaaatttgctagtagcatgaaattggagaaattatcagatgacctctatagaattagacagagaaggggcggatcgctaagagactatgtagcaaggttcaatgtcgagaaggtgtcaattacggcctgcaatgtggacactgccgtcacagccttccgaaaaggccttctggtagaatctgacctatataaagaattaactaaatacccttgcaggactatggaggatgtgctcgccaaagcatgggctcaaaccaaatgggaggaagatgaatcgaataggaaacttatctccaactacttaagttctcgtgagaatcgggggctaagatgagtagagcacaagtcatcttatcatgttgaaccataccccaccaacagatctagatcatttcaaggcggtggaagagctccgccccaacggtcacgtgattaccaagaaaggggacaatcatccaaaaagtttagaggctatcaagataaagcaccaattccgaactacactctaacaatagaccccgttgaagtggttgctgcaatgaaaggcatgggaaataaagtcaagtggcttggggagattcaaaagctagaagctatgaaagatatgaccaaatagtgtgaatttcatagcgatcacggacacaccacaacataatgtatatcactcaagtttgaagttgcaaggctacttcgacgagcacaactacgagatttcctttttgataaaggcaaagcaaccatagtagaaggggataaaagacaagagagtccacctgaaccccctcagaatgcgaggaccgtgaatgtgatctcaagatgatcaaaagttagtggaattacgtattcaatagctaaatgccatgcacgagaaccaatcaacagtcaaggaaagccaagaaagccagagacagtcgttggacagaccatcagctttgtcattgacaaagccacagatttgctccaccctcaccatgatgccttagtcatttcattatacattgcaaactattttattaaacgtgtattgatcgataatgggagttctgctaacattttatttctcaatgctctcagggatatgaaagtcaacaatcacctacaaatctacagtcttaattgggttcagtggtgagcgaaagcactcgtttggagaggtcaacttgcatgtttgggcagaaggagtaaccctccaaaccaagttcatcattgttgattgtccttcttcataaaatgccatccttggccgacatggatctgtgagatgaaagttgtgccatccacataccacaaagttatgaaatttcctacaccatggggaataaagcagatatcaagggcacaaggagcagcgcgagagtgttatcagagcaccgtaaaagaaaaacaatctaccttatagcaactatagtaatcaaatgcaatgattgatccagatgagcctaacatgaaggaactagacgaagtgagcattagtaaggaattcccagagcacaaagtacaaattgtatgctaagctcacaccgaaacttcgagcaaagttgatcgcatttcgcattaggcatcatgacaggtttgcttggtctcacaaagatatgacaggtatagaccctaacattgttatgcataagttacaggtagaccccaatttccctccagtcaagcagaaaagaagaaagttcgctccagaatgcaacaaagtgatcaatgaagaaattcaaaagctcatcgacatgggatcactcagagaggtcaactatcaagaatggctggccaatgtagttgttgttcgaaaaaagaatggaaagtggaggatttgtatcaatttcacagacctcaccaaggcgtgctccaaagattcattcccgttccctcacactaacatgcttgttgatgctacagctgggcacgagctccttagcttcatggatgcattttttgggtacaaccagatccttatgcacccaaatgatcaagagaagacatcattcatcacagaacgagggaccttctgttacaaggtcatgccgtttagactaaagaatgtcggtgcaacatatcaaatattggtaaatcagatgttcgtagacatgctaggaagtcaatggaagtatatatcgatg

SEQ ID NO: 222019 - DNA, 3666 bp, Cannabis indica
ttgacacaatgtgtactattacatattaatatattaaaattatattgttatgtagtaattttttattattttaagtatataatacttattttaacaagtcttttatttaatcaataagttaatcaatttagatgttccatgctctgggtcctccattgtttaaagtagtgtcaacagaaccagtattaaatctacaaagcttcaatttcattacacaaacaatgtttactccattcataacaattcattttatatgtgaatactcacaattttatacgtgagtagtgagcattattcatgtttatctcgaatactaaccctttttaattttatctattttccttccacaacatagtgctaaaaataatatgaagttagtatgatctagagattacgggcaccaattttagcatcttgtaagcaaccgtttattttgtgattttttttaattaattattataccccaatttaatttgaaacagttttctccaaagaatgaaactcacatttttggggagtgttcaaaataatttgattagagagaaattatgaaggagaatatgattatagggaaatgtgtaaactctgtttggcagtgtagggtaatatgtaatcatattactgttaattaaattacactgtttggttgagtataaaaatcttatatattattttaaaaaattaaaataaaaagtatttttttattatatatatttaatgttaattatatataaaaataaaataatttattaaaggaaatatatttattaattattaaaaattaaattttcttgtattttttattaattaaaatgaacatttctatatattttatcaatatgttatttatttttgttcactcactaaatatatattgtaatattttatttataataaatgataatattattggtaattaaatttatttattaattcaaaaatattattcagaaagtaataattaaatctttaccttttttttttttaacggtggtatgaacattaccctcctgaagaataattattttacaggggaataacattccaaaacttaaccttcaaaaacaaataaataatatttcacgttaccattaccttattaatattaacctaaaagagttcctaacatttttttttggttaaacaatgcaaaacgtacatttatttccattaaatacaaaatataaaatcaccatgcttgaatgactctcatccaatcccatcaatcaaattctaagcatggataatgaaatagctcaagatctctctcctctaatcaaactctacaaaaatggccgacttgagcgtctcgtcggaacagccaccgtctccgcttccctcgaccccgaaaccggcgttaactcaaacgacgtcgttatctctcccgaaacaaccttatcagctcggctctacatacccaaatcggccggctcaattcaaaccaaactccctctcctcgtttactttcacggcggtggcttctgcgtcgaaaccgccttctctcccgtttaccataaccacctcaactctctttcatctcaagcaaacatcgctattatctcagtaaattaccgattagcccccgagcaccctcttccagccgcttacgacgattcatgggccgttttcaaatgggccttagcccattccaacgctaaaggcccaaacgagtggctcaattccttagttgatttcagaagagtttttctcgcgggagatagcgccggcggtaacattgctcaccacgtggcactccgagcgggttttgagggaattaatctgagagggattgtttaattcatccgtatttttgggggaaggaaccgatcggagatgaaggcaaggacggagggagtagcggagatgaagcttatccgggtatgttgtggaagtttgttaacccgtcgtcgaagaatgggtcggatgatccgttgataaacccgagtaaggatccgaatgtggggaagttgggttgtggaagagtgttggtttgtgtggcggagaaagatgggttgaaagatcgtgggtggttttataaggaagtgttgaagaagagtgggtgggatggttgtgttgaggtggtggagaccaaaggagaaggtcatgtcttccatttgttcaatccaaattctgctaatgctcttgagtttatggctcaaatctctagctttatcaatcaatgaaaaaaaggtactaactacaaaccatgacaaattacagcataagtaattatgttttggtattgttttatacaatattaactaatataagaaatgaataagagtaagtcatgctaagtatctcttatgagtaatgagtattaattttgctgaaagctcctagataattagtatttgattattctaagaagtattttataatttgaatttgttaaatataaattagagattaatctaatacaataataaaaaagtaataatgctttagattaaaatattattataaaaatactaaaaaatgttaaagtatttgtagtgctcagcaaattttatctgttaattttttatttgtctaattaagtattgtatcttatataatttaatgtaataatttttttgagaatattattagttaatcgtaagacaattcatctaataagtcatacacactactgatacccaataataatatgttcttatatttgtagaggtctatatcaattttcttttagtattgaagcttattcttttaaaaaaaaaaaataattaagataaaatctttagaaccatttataaattaataaaattatttaattaatttatatacttttatgaaataattagacatacatataattaaaaattaattttaaattataatattggtaattaaaatatcattaaaatcaaaatgattaaaaataattggggaattatattatataggtaaacatatcacatcaatctagctaaatacatttttgatttaaaaaaaaaatctcaatgcatgatacataattctgtaataggaattgtggagtaaattttgtaataagtaaaaatttttaagagacatgatttaaaaacgatattaattaccaggtaaatcattatcataaattctctacaaagtgtttttctttttattatattgttaacatgtatagcttatatatgcattgcatggagtactggctagctattatagctacgtgacaagtggctttgtaattttcaacaggagtcttttcacattattgattgtggaagatagagacaacagtggaactagctaaggaaaaataaactaccttttgttttctttttgaaacttggccagaatggtgtagacctgtgacttgtttgtttctaataatgacgtggtgttgaatgatattttagatcttatcttacaattacattatgcgttagtactgttacctgtttagttaatatgtactgttattaatggcattaatgttgtgtatggtgtgatttttactaataaaaaaatgtatgagaatatatatgatgggagcgttgtgaattataataacatattctttgcactgtatgagggttttgtaaagggaaatttgattttatatacttaaaaaattaaaaaaaatatattcttaaactaaaatattttaaactaaaaactatgatattttttttaaaaccccaaaaatacccccttataatt

SEQ ID NO: 222020 - DNA, 3124 bp, Cannabis indica
taaaaaaaaaatcgaaaaaatataaaaattaaaattacgtaaaaaaattgttatttttgaatatttcttaaatgatctcttgaatgaaagctatgtttgcccaaatcctctcaacccaagaggcttcccaatctaatttccaagaatcttttattagcattaatccataaaaacaacaaacaatgttgcaaacaatgttgctagaaaattatttaagaacttaggtgggtttggttgaaggtaatgaaataaaatagaatggaaatgatatatttttcattctattcctttgtttgattgtattttaaagtattagaattacattccaatgaaatgttctttctaccattttgatagaatgaatatttcattttatcaaattttttatgcattttaaattttattccattctattcctattattattctaacgccaccttaattaaattttatctttgcctagtttttaattttgtcccaagccttatataaaatagagacggctatcaaaggataaatacacatatacaaactaaattgaagcaaaataaatttatttatatttgttcttcttcttcctctagaaactaaattagttttcacttttttgcttgcaacaaagcccaatttctccccaactctatcattgccattaaaaataactctcgactaataatgaaggtaatacaatacagtataaccttcatattttatatcaattttcatataagtccatacttggaagataatgtagtaattctgatatgaattaaatgcataatcaagttccatgtaattggtgtgagtgtgtgttcgtgattaaactccattgaaacctggccagaggaaaattctatagagcaacaataattagattcagaccttcatatacgagttgagcctaaaaccttgatattaataaaaccagcaacattaaaaacaactcaagaacataaacatgagaaagaatttctcactctgaatatgaaaatatgccaccacaaggccaaaccataaactctcatatataacaagttttaaaaaccataaaccatactaaatcataaaagcagtttgtttcatagtaataaaaaccataaacataacaataaaatgcattccattcataacagctataaacagatttaaaagccaccacgaagacggagaacaaggtgaagagtagactccttctgaatgttgtaatcagccaaagtcctaccatcttccaactgtttaccagcaaaaatcaacctctgctggtctggtgggataccctctttgtcctgaattttcgcctttacattgtctatggtatccgaactttccacctccaaagttatggtctttccggtcaaggtcttaacaaagatctgcataccacccctcagacgcaacacgaggtgaagagtagactccttctggatgttgtaatctgcaagagtccttccatcctcgagttgcttaccggcgaagataagtctttgctggtctggtgggatgccctctttgtcctgaattttcgcctttacattgtctattgtatccgagctttctacctccaaagtgatggtctttccagttaaggtcttcacaaagatctgcatgccacccctcagacgcagcaccaaatgaagggtcgactccttttggatgttgtaatcagctaaagtcctgccatcttccaattgcttaccggcaaagataagtctctgctggtctggtgggattccttccttgtcttgaattttcgcctttacattgtcaattgtatccgagctttctacctcaagggtaatggtctttcctgtaagggtcttcacaaatatttgcataccgccacgaagacgaagcacgagatgaagtgtggactccttctgaatgttgtaatcagccaaagtccttccatcctcaagttgcttaccggcaaagataagtctctgctggtctggtgggataccttccttatcttggatcttagccttgacattgtcaatggtatcagaactctcaacctcgagagtgatggtctttcctgtaagggtcttcacaaatatttgcattccacccctcaaacgcagcacgaggtgaagggttgactccttctgaatattgtaatcagccaaagtccttccatcttccaattgcttcccagcaaaaatcaacctctgttgatctgggggaatcccctccttgtcttggatcttagccttaacattgtctatggtatcagaactctccacctcaagagtgatggtcttaccagttaaggttttcacaaagatttgcatctaaaattacacaattaaaacaaaatctcatcagaatttatcccccaaaaaaaataatttcagacaaaacttctttagaatttaaaagaaaaaaaaaacaatcttgcctgattaaataataaaaccctaaaattgtatgaaacccaatattattgatacatttcacagatgaaaaagaagtataattttccaaaaattattcggtaaaatttaaaaaattaaatacaaacaggtcgagaattaaatactctaaaaaattcaaagatacgatacaagttaaattagcagatgaacaaaaagtatattacttttcgaaaaattattcggtagatttaaaaataagacgaaaattgaaaaccctaaagaagattcaattatataaaaaaaacatatatatatatatataattccacaaaaagaagattcaaagatgcgagtgctctatgatcagaagcaattatgaacaaggaagcaagaatttgattacctttaatgagtgtatgaagagaagggattagggttcttcttgggaattttgatatgaagcagagattattgtgagaatcgcttagaaagtagtaatgaatagaaatgaaggataagagggtatttatatggtgagggcaaaacgaaacccattgattaggatttccaattctattacgccacctattaacatgacgtgccgtacactccacagcttccacttacacacaaaatttggaatattaagtttgttaaacgttctgctaatcgaaccgcacatgtgattgcacgtcagcagggccagccctgggcataggcggtctaggcctgtgcctagggcccaccta

SEQ ID NO: 222021 - DNA, 2589 bp, Cannabis indica
gctaagaaaactttttgggagaactttatgaagactggggatagatttggagggccgtggcttatattgggtgatactaattttgtgctctgtgactcggaacgtgtcggatctaaaggtagagaccagttcattccggttatctcccgtttggtgaatgctcggggtctgattaatttgccaatccaaggagacaagttgacttgggataatcatccttctaggaccaatcatgttaaatcggccctcgacaaaggacttgttaatggtggttggattagacttttcccaaaagctgttctctgctcgtcccagacctccaactcggatcatcgccctctttgcctgttttcggaagggatggaggaaaatatccgaagaaaatttaaatttgaagaagcctggactagggatgatcggagcagactagtggtggactctgcttggagctactcgggttgcgcttatgcactggaacagatcccaatttggaaaatttgatactctgatccgtgatctggaaaagagacttgatttcattcaaaaactgcctgtgggatctagagattgggcgactgaaagggcattacgtagctcccttaacgaggctagagtaaggaaagatttgtattggaagcagagggccagggttacttggctgaagaaaggggataagtattctaaaattttctcctttccgcttcaatcagaggtagaaggaatgccattgagagcatccttaataaagataatttgtggatcgcgaaaagagagctgattggcaatgaatttatggagttctttaatggcatattctctggtgtggagattggccatgatctaaattttcatgacttaatcgaggataaagtctcaatggacgatcaggcagagcttatccggagaccctctcttgaggaaattagggctaccttgtttgctatgagcagtaacaaagctccgggacctgatggaatgtcagtcctcttttttaaacactattgggattctgtagggaacgacttctgcgatgcaatcctggatttcttccattcagggtgtatgcacaaaggagtcaatgctactaatattgtcctgattcctaagatccagaatccgaagagaccgaatcactttcgtccgatctctctctacaatgtggtgtataaggtcatttcgaagatcattgctaacaggatcaaaccgttgttacttaagctcatatgccccacccaagctgcctttgtcctggggaggaatattcaggacaataacgtgattgcccaggaaatagtccactcgtttaataggaaaaaaggcagagagggttggtttgcaattaagattgatcttatgaaagcttatgataggatgagttggagatttattgatcatgtgcttgagtgttttgaggtgcctcttgagtttcgtaagtgggtctctcagtgtatcacaaccacctccctcaatatctgtcttaacggaggccctgttggcaagattaaaccggcgtgtggtcttcgtcagggtgaccctctttcgccctacttatttatctgggctgcagaaattttgtcaaggctgttgaatgaagccttagataagaaaactattagcggtatcagacttagtaggaggggccctgtcatttctcatatcttctttgctgatgatctcattcttgtcggcaaagccaccttagaggaatcaaaaggttattgggactgtcttgaaaagttttgctcttggtcggggcagaaagtgaataaaatgaagacctcaatattcttcagtaagcatacacctgcgagcatgaaacaagggatcaaggatttattgggtataggttcgccggaaggcaaggtcaattatctagggcttcctttattcagatcgagacaaaaagatgcagactttaattttattctggataacctaacagcgaaattgcacggctggaaagctaagactctctctaaagcaaggagggcgactatgatcaagtcagtgggcttatctcttcccatgtatcctatgcaaacaactaaactatccaatcgccttgccgctaagattgacggattggctcgggatttctggtggggttccgaaaagggcaatcacggacttcaccttagagcctgggacaaactttgcctccccaagtcagtaggaggcttgggcttccggaaatccaaagaaatgaaccaagctttcctggctaaatgggggtggaaccttctgactggaaaccaattcttatgttgtcgaatactggaagcaaaatatcttagaggtaagtcttttcttgaatgcaacctaaaagcctcggactcgtggttctggaagaatgtggcgaaatcaagacctattatcagcaagggtgcctgtaagcgagttgtggatggtcggaatattatcatatggcatgattcgtggattgcgcatttgaagggatttcttccccacccaagaggaccctcgttgaatggggagacaaaagttgcagagcttctcctggacaatggtggatggaatacccaaaaacttaaaagtttgtttgataatgagactatctcggctatactg

SEQ ID NO: 222022 - DNA, 2754 bp, Cannabis indica
ataaatcacttcaaatttcttatattgataactaatcagattgtaaaaggttttatttagggcacaaaacccaataattataagttggccgaccatagtggttgttgtatgaagctagctggccattaactttgctcgcttattttttttaggcctttatgaagcttagctttttgcatggcaactccaggttgaggattgaactcaagaggtgttaggagaaactgaaggctaccctcgatggccaataggccataaaggacaagtatgttggcttgtcttcggagctcatctacgagtttaagctacgcaaccctagaccgttttctagtacctgagaaaacagtcaaaaacggtctaccattttctataggatcttgtggctgtagggtttttagtcatttaaaactcaaatttcttcctataaaacctattctaaactctcacaactccccattctgatcttctaacactaaatagcagcccccattttctctctaaccctttctcactctttaaaccaattcctttcatctgtttctcaaaacccatcttcttcttaaatctcaatactctccatctctcttctatcttcaatgattgcttcataatctaggcaagtaaagaggacaagactttccatgcaacaagaagagcaaagaaccaaggtttggcatgagctcttctctcatggaagatttgcaaatagatttcatgaagatttttcgtctagagaagtactccttggtaaaaatgtgatctatatgtccttgattatgttaacttttgagatctttttagagattaggggtggaaaactttgataggtattcaaacatatatttaccttaggctagtgaggctttttatgcttgcattgaaatttcttgtagtccatatagtatcaagggaaccctcaagggagttagattcaccttaacagttgactctttgaatgcattcctagatgccccaaacgaaggtttcttacttgaccctacgcctagacttacaaatgatgcctcatataaatataccctcttttctaataaaatttgtgtaggagaaggttttcttgataatctaaaacgcaataatcttactcttcaagaaaaaaatcatacactctttcatttgtaacaacctagctcctagaaagggacaccaagatgaagttagtgcacttgaccaaattctcctttttaatatcattatgcaaagcaagagcattaacttagggtatcttataattagaaccatcaatgaagtctacaagcctaagcaaagaaaaaccttaccctggtgctctccttagatacttgtttccttttctaggcatcgccaccaaaaatgaaactgaggtcttagattcaaggatgatgacattttaggcacaatcacattttagggtatgtcttacaaggaggaagaataggttcactccaaacaagatctacaagctcatggagaagcccaagtgctttatagtgctagtgaagaagaagaaaaagtgcaacctcaagcacctctaatgccttaagttcctcatttcaacattgaagaggcatttcctcgtcttcacacttcggttggtactcaatttcaaattgacatgcactcacaattcaccaggctccacaatgaaatgaccaccatgaggagtgacatggtgcatgggtttgaaaatgttcaagatgagatggcacaatggagagcatacatggaccccattggactccctctatcttagtcacttgcatcatgttttagcatcatttttcatgtttatgtttttcattttttaatatgcttagtgtgcttgacgttctatgtgttggtgtgttatgttttagttatttgtactttctctttatacttggatgatatggttatttgaacttgaatatctatggtttatggttatatgtttaaatgaatggtgtgttatgatttttttattttcattttatttgccatttattttttgaattcctttgccaccctttttgatgaatcaaaagggagagaaattccatagcgattttttttttttggcaacaactcaaattcgcaacttttaatgatatctgaatataagtaataaattgagggagagtttacaaaatcatgcaaggtaaaattttattttttttaacccttgcacatattaaagggaagctaatctaatatattgttttaattttatattctttcccttttcaaaataattaaatatttgatatcatcaaaaaggggaagattgttgactcaatctcttaagtctccttgttttggtgattaacaaatatttgattattatttgtcaataataagttgttgattttgtagcgcagttaaagataaaataagatttttttaaagcaaaattaactccaaaggcaaaatggtacttttactaaaaattttgaaagtgacccgaagcaaactcaaaggctcaaagaactcaagataagactccatgaaagtttatttacatttcttagtcttgtacagtgattttcaagttcatgcttaaaaagttttaagtataaattttggtccactaacttgtgcgataaattattttacaaaaatgatatctaaaaattctaaattgatctttaagatcacatatcatttaactaaggaaaaaactagaaagtctgaaatcggataaataagtaaagagtcatgcgcgttttaaagccgaaaaaatgagatttcgcccctgtcagggtctactttcttcttcct

SEQ ID NO: 222023 - DNA, 2866 bp, Cannabis indica
ttcaattgagtgggagcactaatcatagatatagaatacaatgaaggatagaacggtaaatttgtccctattcaatgtagatcatctatagaggatctttgactattaggattgtaacaatggataattataaagtatctatatcttggtacatatagagcattctatataattgagagtataatatcgaatctattgtggtgcaatgaggaattaataagttagggaatttacttggtaaattctagatatacgtattggaagctcagttatataggcccatggtctactcactagttgagataatactgcttgcagactcagttaacttgctttaattaatcaattataattctaaaattagactatgtcttatttatgaattttcacaaagcaagggcttaatttataggattgaaattagaaatatggtattattgaaagaagaataagtggttgaaataaagtggcaaaattgttactagagagtggtccactaagtggtcggccttagtgtgtaattttgtcaatattttactcttttttaatccatataatttatacctaaaccctagttgaaatattataaaaggaacatgaagctctcatctcatccaactgactattcaaccaaactaaacctagtttccattctctaacaactagtagatgagagacaccttttatagtgatttcaagcctccttcactgttcttcatacttaagccatagtgatagagttccatccccacacatagaaagtcaagtactcaatcatagtgcggaagacgatggtaaccaaacctgaaggagagaaagagatcctggcttaaatcttgacaatactttgcgacagaaaggaacaagggttaaagacttgagtagaaggagtcatattattcctctgcaatcaatgtaaggttttctaaactcttatgtgtgtaatttcattatcttatgtaaggttttcgtgcttgcagctctctcgggctggcgccatggctaaaacaagggcaaaaactcaatccaagatccaggctactgctaagaagaagaagaaacgaggtccgaactcttcagctgatgtgaagcaaactaagactatggaagaaattttaggggttgaacccctagaattctctaatgatgatgatcattcgactggggaggaaacgaaaccagatgaagatgatggaagactaacagatgtgtttatgccgctatgccctaagacttctttgaagacaatttagaggcaagatgccattaaagaagatttcacaatgttcatggtagcaaatcagaggtgttcctctatggttaatcaaggtatggatgcagtaccacctgttcttcgatcgggaggtgttatttgaaatcttgaatcagcatatgcaacacagagtaaagtgaagattacagctgatgacattcaggaggatgtggaattttggaattccttgatagtatgctacgttctgggagctaatccacccttgacagttctagaaggatttgcaaggaggatttggaaggataaaatgataaagtaggtatgatttcttatggcatcttccttattagattttttaacattgaagaaatgaattctatgttgaatgggggttatacattctttaacaagcgtcctgtcattatgaaaccttgggatccaaatgtgaactttaagaaggaaaacattcgtactgtaccaatttggattcatttagaagatctggaacttaaatactgggggtagaaattgctgttcaagattgtagggcagattgggaaaccattaatggtggatgcagtgaccaaagagaaggataagctgaatttcccacgagtactgatcgaagtctctatgacacaagaattccctgagttagttgattttgaaaatgactttggttccaatgtaacagtgattatcaattatgagtggaaacccatcacttgtgctcattgcaaagggatgggtcatacagccacggattgcaggaagaaagaagggaagaaacaggaatgggtagtcaagaaaaatgcgaggaaaattgaagagaaacaatcggatcctgaagtgttccaaacagttgtgagaggttggaaggtgaaacctattgttgacgctacagcacctgttatctctaatgcttttgatgctttaggtgtagcagatgtagcagaaatgccctcagaagaaatacaacagcagccaggaagtttgcctcaatcgcaattgaaaggaggaggaggagcacctcctctttccaatggataaaatcttgagttggaacgtccgagggctcaataaccagcacaagcaaaagaatgttaggcgattaatctccattcaacaagctggtttagtgggtctcctcgagacgagagtcaaagccccaaaacttggggctttgtatgtgaacatgttctctagatggtgctttacgactaacatagcttggcatccaggtgggcgtattatagttgcttggaaccctctcaggtttgttgttaacatccttagatgcaccagccaactaatccacttgtttgttattgctattgataacaaaaaggagttctatgtgacttttgtttatggatttaataaagaggaagaaaggaaaggcctctggaatgagttgaagatgcaaatgacgaatgatccttggctaatcttgggtgattttaatgatattctaaaaaaggatgagagaattggtgatagagcgaggtatgtttcgtttgaatttccttaatgtgttgattttttttccaaatagaagatgtaaagtacacaggtaatttctttacttggagtaataagcaacaaggaggagatagaatttgttccaaaata

SEQ ID NO: 222024 - DNA, 1566 bp, Cannabis indica
acactgctcgagctcgcatcttccagcttcaatttcaacttaagctctgaagaaggatcaatgtcaatccatgactatgttctaaaaatgaaatccattgctggcggtctcaccactactggacagccattcaatgatgacgatctcatcctctatatactcagcggactaggtctagagtatgactcggttgttgttaatcgcacctatagaggagatcgtatcacactttcaaatgttcaattcctcttgcaaagccaagaaatgaggattgatcagctcaatactactattgctgatcttgtagcaccatctgccaactatgccacccgaggtagaagaaattttcctccctcaaaccctagcagatacaccaaccaccgcagccatggacgtgggtggctgtggtggaaaccaaaatcgtgttgtctgccaattgtgtaacaagccaggacaccctgcatcaaaatgttatcactgatttgatgtctcttttgttcctccaagtaccagcaatggaataaatcatcctaaccaagccactgccaacaatggaaatggttaacaggcatttttggccaactctggacaacagccacacactgatgataccaactggtatgtggatagtggagccacaaaccacatgactcacaattctgcaaatctgcaaactcaagctgagtacaatggtaagacccaaatcacaagaggtaatggtcaatcactccctattactcatgttggtcattcagtcatttaatcttatagtaattcaaaacctgttaagttaaataacatcatgtgtgtgcctaatattgccaaaaatctcttaagtgtgtcacaacttacaaaagataacatacatatgctaaattctatgctaactcatgtgttttgaaggacatggattcgaagaaggttctacttcaagggatggttagcaacgggttatatcaactctctactcccaagatcgagtcaatttcctcttattttcaagcgtgtgtcaatgagtccaacttatggcaccttaggctaggccatccgtctcttaatgtactcaaacatgtgttagttaatgaaaagaaatctttaccatctaaatcatatttttgctctagctgccaattaggcaaagctcatcataagcctcactctccctctctctaaaggagtcaaaacatgcacttgacttaatacactcggatatttggggaccatcacctattttatctcgtcatgaggctaccgatattatatacattttatagatgattttagctgttacacttggatttatccccttaaaacaaaatctgaagctatcactgtctttaagaacttctaggcacttgttgaacggcaactctccaccaccatcaaaactgttcaaatagattgggtggtgagtatagaaagtttgctcctctcctcaccaatctaggagtacatttccgacacccttgcctaggggtgggcatccgatccaatccaacctttttttcttcatccaatccaatccaattagtaattggatttggaaaatcatcatccgatccaatc

SEQ ID NO: 222025 - DNA, 2260 bp, Cannabis indica
cttatatcgagttctcggccactaattaatgagtttttaccgtcaacagaaatactaaaattcaataaaaggtctttagaatattcaattattctcaaagttatcaaaacacaattttttttcttgacaaaaaataataaaaatttattattattattttttgtcaaaagaaaataaataaactaagaaattgaacagctagattgatccaaccaacttaccataaatcatagataagtatcgtatcttaacaaataacgatacacgatcactccgattattttatttattatttatttatgttgaaacaaccactccgattattatactgcaaataatagcacacacatcaatatatctatataggcaaacattaaatcggaaatgcctcaatgacacagtacatagcgttgatggttctgatattgtatcgattgaaaccggcctggcagagaacataggcccactcctctaaggtcctctctttgcctttgttagtatgagcaatcatgaccatgtcaaggaacaaacccacatctttaagctccagctcttcatgcttttcttctacattattattattttcttcaataacacattctaccattatcaccttccccttattctcaggaatagcttccctgcacttcttcagtatttggatacactcatcatcctcccaatcatgaagaaccgactgtaatattatgtaaaaaagaaaaagaaaaagtaagaccaactaattaaagactttatcatagatataattatagtaattattaccatgaggaaagcagcatcagctttaggaacaaacttaaacatgtcaccaccaacatgctcaacaccctcagattttagcgcaacagacacaacatgaggaagatcaaagttgatgcctcgaatccaaggacaagccctaaccaacatccgcaaagctgtcccattaccgccgccaacgtcgacgatggtaccaatcccatcaaacacgtccaaacaaccatccaatattgctgccaccgtcaccctagcattgcatgccatcgcttcgttaatgagctggctgtggccgggattcgctgcacagtagctccacacatctttgccgttggccacttcaaatggtgaaggcgccgaagaatcatcaacttcagtcttgacgcgggcacttaggccgtgccatggagccagcatgggagggctactctccatcaacacgaacgtcgccatgcttttctcgccagacctcaggataaggcgagaaagagcagtttgcgcgtataaactaggctgctcggagtcttgaacattttcctttctgatctctttgaatagttttcggtttactaaaaacctcatgattcgatgaagggctggagcagcacagcctaaggctgatgataactccaggagagacatggggcgtccatggctttcgatggcgtcagctattccgagctcaatggcacatttcactacagccatttctacaaacccgaatatgtatttatagatatcaactcttgctcgctcttcttcatcctcttttggtacccatattagctcatctttgtgtgtttctgcagccatggtatatctctgtggtattgtaattttcctactccttataatatataaaatagaaaactatcatgtgtggtatgtaaggatcattgctattaagtatcttattaaggtgccaaataccatatttatgcacagcattgtgaatagttagcgatttttatattatttattaaatcaaaaaaaatataagactaaatattaaattatggtaatttggcacttattataatatttgtcactttaaaatatctcttaatatttgttatcatcatgtaaatcgttgctttttataaataatattttttaggcaacaaaataataattgtagtgttttagaatcacgggaaattattgcttgtacaatataattttattatttggtagatttactttttaatatttacataatataatattgattgaaaatctatcaaaataatatttatactgtagaaagaatagaagcattgttttttttagtccaaaatactacaactagatcaaaaataatctgtccctgtcagttgcgctcgggccagccctgaaaatataatgggatttgaacctattaccttagacattatgccatccacttcaaccaactaaactatgaatatttgttatttataatacacttaaattttacttaataaaagcctaataaattttttta

SEQ ID NO: 222026 - DNA, 3617 bp, Cannabis indica
acgttaacacgcctatgctagttagggtgttacatcaaccttggttcttctaagcccatcttctttaaagtcttcgtttagagaatattgatggaactcccgttattcacgagaaccctctttatcctcttattggcgagttaggctgttattaccagagaatctatgtgaggaaaacacacatgtgatgcatcttcatcagtatagatgatagagaggttcattagacttggctcattttagggttctggtgtgaaagtcgatttcttattcttgactttatttatatatctttttttagcattattgttgtttcctgcaaggtgtggccctccagaattgactaagatatcctcgcctagggaggttgtaatctttgattattctggttgttaggcagaatttgtttgtttccttgaagtcccacaacatctctagcatgagtggtctgtgccaccttggccctcagacgacctgaaggctcctttgaaggtccactagctagacctctcaacttggaagacatatttgcaaaaagaaagtagtaaagtcagaaaacaagttataaatatttaatgcaagataagaatataaaagatggtgcaattaactatcaaataccatcatctttagaagaggaatcatttgaatcctcaacacctgccttgcccttaactctagatacaagaaagaggtgagtaggccctacagagatctggcctccaagcctaatccaaagagtagtacccccaactgcgcccccacgagccaaccactggtagaggggcctctctctcctctccagaccccgggctatccgggacataggcataatgtcatccatttcagggacttgtccatcaccaggatagatctcctcagcagttggggctccatccacacaaactgatggacctttagcccacacaactccagaagcaagaggatacaggtcgtacttttgaaagttggccacactagccaacctgataatgttcctcttgaccacagggagggctaggatgtgattcgccctatccctcgtctatagagtagggatggagcatttgtatgtcggcactcactggaagcagcagtgttgaatctcatggatgtcccaagcaatggagtagttctgggcatacccaccaactttggacataggcgtgttgttggtgtcacctaatcactgatggctggcctgactaaagtattagtatccagtctagttcttctttggggtagatttcaaatcaaagtagtatcaaatctcatacggcgtaagttgaggccagcctagctcttcatataaaacaaacatcactgagaggtattttatacttttcggagtgatttgttttggacatatcccgaagtaagtagcaatgtctcgaaattatgggtgtaatagtaacaccgccccttgctaaatatggcactcgaccatgccatccaattgaaggtaagctagtgtgctctctgatctctagtgggtatcttacactaagcacccctcactagaccactagctagtatcctgtcaaaagtcttaacagggataacagatgcgagagagacccacctgtctccctgtgatccatcaagaacctgaggctctgaagactgtatcaagacatgatctagacctaacactgaaggctagcctagcctattcaatggctacttttcgacattatccacctagagggcagttgggaaggacagcacaagttctgtaagtccttctcctgactggcacaacctcctccacctcagagtcggtgtcggagctctcgaccccctagtcaacctcaagcacctctgcctgactgacctccgaatctacatcatcacaaggttgtgtggcctcctctacaactctgactttgcccatcgttaccaccatagcaacatgaggatcatatggtggcacactatgacatgattgtttcgttacggccatgactatcagtccaaaatgacacaaaaggaggaaggtgacaaactaaatgctatctctcaaaagcaaagatcacaagacctatgacatagaggatgtcgcctccccaaatcaacactctcacctgcatagaagagacacgggcaggtgagcaacctgacaaagctacagacaaagttctagtcaattgtacccaagggtactttccaagtaaatcacattttacaaggctgggtatcaacaaagtactgtctcaagtacatctacttatacaaatagggagtcctaagttgtgcacttaactataatacactcactacctaatcttatacagagtttccaaggggaatcacgcataagattgcagttgtatatgcctacaagtctgtcacgagaccctagccaaggttaatagaggacaaaagactggcttcctacttagaaccttggccttggccggctagggttcccaagccttattgggttgattaggtcccatgcccctgcctagggtcagctagaaattccacttccaagcataggtaggctagcctataggatatccactattgaccagccaaaccccatggtgaacacccatggctagcaaggtcttaaacaagacctccttggccgggtatggtgcataaaggatctgaacatgtgttttttttaagaactaaaacatgttcttcgtgttcttcatgactcaaagagccaagaatcacaatgaaggttagaatcagaactcttttgtccaaaaattacacattacacatcctaagactaccatgtggatcaaaatatcgaaaaatattacaatctaatgtgaaaatctaaagacattaaaaaccaagaaaaagattcatgcattcatggcaaaatcaactaaaccaagcaaatagcaggaatagaaagcttacccactacaagaaattgttgatgaagaaaacgggaagcttaaatcgtctaaatggaacaaaattcccaagagatggagaaatgtgggttcggcctctagagagaaggaaaagcttttcaaagtttctttttctagtgagagaatgaaaagtgaaaagtgaagagaagtttcactctaaaagacttatatagcttctgtggagccactcctaaactaaccacgcagtgtttaactaaaaagcatgtagaactacaatgcaatcaacttttggtaacaaatgagatcaaacagtcaaaaggagatattttaaagactaaaaatgcagcaacatttaatcagttaaggctacatctattccaacttagcttgtaagtccctatctgcataaacatttgcactggaacttagggacaaatgttatgctaatgtttgccgacctcacgtggcatgtctacgtggccaatatcagcacaactcaccaataagaagttcaaatcatctactcaacaccctgcccaatggggggtcctagcacttaaacgggacaacgagtgacaaaccaaccaccttaaggggctaaccggtcacccttggctagccagcttgcatcctgtaggtgcatggctggccagaacttggcctagtaggaatttggtgcatagcattacacgtggacagcaagctagactgcgaattgggccttaacggctcgtgaaagtagatggaaaatatcta

SEQ ID NO: 222027 - DNA, 1575 bp, Cannabis indica
cctcctcgagcttaatgaatccatctgctcgatccaaaaattctgccatggaccctacggggtcaaaccttttaatgtctttccacagtaacccgagcggctcaatgcccccaatatggcaactagacttccctcctcaattaaccccttaacttttgtagcctttgtcctgaatctgcttatgtaggctcttaggggttctcttggcacctgttttagctcgatcaggtcttctagttgcgaggggagttgatgggaggaggagaactatgcgtgaaattctgaggagaaggcttttcacaaattaagccttcctggaggtagcttaaagtaccattctttggtggcctctgcaagtgtagcatggaatattttacatctcacatcacctcgtaccccctgcagacccatcttcatctcacaatatttaagatgtcataagtggtactctttcctcgtatacatcttctaggttgacatcttgaattttaggggtaattcaaggacattgatctttagggtgaatggtgatttgtgtgcccggtccagctcgagatcagtcacttttgggccggccagtccttgtatcatgtattttagttaatccaattgtgcttgcacaaatggatgaactggtttggcctgttgactgacctatgtcacattaggatctcttggatgtgggtcctggatgcggatgctaggttgggcagctggttggacgtcctgttcgtccagaccccttcttctgttcaagtcagccctgagatcgtgtgcaacacccaatctgttaaatattgaggtaccaggtcttctcagtttctaacttgtttggtcggcaggttggccgaaattttcaatatggatgaagttaataggtataactccacccaaagggcagtcagggaggatttgcccatctatcgtttcacccacaagttaaagctatggccgtggattggacggttgaccgttatgagtttgggcagtatgcctagtagcatagtcttctataatgctcagttggatattagatgcggtagcttattgttgtttagcgacatggtaggccctccttatcagtatggcggcctaccttgtgcgatcattgatggctgcttgctgacctttcaaagtttccatctccctatccctccactctataaactagcatccctacccgtcgaacacgaggtttgtagatgcacggatatcctcctgatcatgatgcaaagtgttattatgatcttgcatggcatgcaagtgatgcatatataattataatatcaacatgagatttcaaattataaatatatacctaatagaaatagaatgaagttaataaagagaaaaattctactaaaaaataaaacatataactaacaatgtaatgtatatattgctaaaaaaatgtgtcaacccttcatcatcagaaataatattttcagaagcattgaaagcaatacctttacttttctcggtcgggaaacttcgctcactctttttcttgatctgttgatttaactcaaaagttcttagagagcccatgagttcttcaactttcattttgccaaa

SEQ ID NO: 222028 - DNA, 1948 bp, Cannabis indica
ttgtctttggatgatttctcgatgatgaagacacgaccaattcttccacatagattgaaaaggtgagagaattgatgggtaatggttattttttaaccacgggaaacttaaaattgtaatttttgtacttaaggtatagataaattttgaaccatgcatttaatgcaaggttgattttttgtatattgctcatacatccaaggaggcctataaaaagagctcaatcctttgcatttttttatcccatcacaagctattccaaaagtgaagtgtgagactcttgagagaataatagagagagtacctcttagtgagcgaaatctgaccgagagagaaaaagagagttccttaaaattgtgagaaatattttgtagagagatagtgaaattgccacactagtcatgagtgtgagatttttgagtgtattccacaagtatttatcaaaacttgagagtataatattgtgtacccattattgttattatagttgaaggttcaccttgatttttatttgccaatagataatttcttgagggcatttactgctttgattattattcataaaatgctatttacattagaagaaatctaaattttttaaatatgttgtgggattgtagttctgactcatcatttatatcaaaaaaaattttagagactccattatattttcttagaaatatttttcctgaagggaaacttgaattttatccattattcccaacaatagacacacactgtgtccatatttcaaataatttatgacaatatactagtagagtccctacttaaacatagtcctataattctatttaggaatattctcggggaggatttggagcatttgggactgaatgaaattcaacagcttgagcaaaaattggacatgtcattgaagaaaataagatcaactaaggtacatacatacaattattattgaaaaattaaatagtttattttgttgccataatattggggtcaaaaaatatttactaaaattcttttgtttaattcatatgtacaataaattaattgttaatcataataaaatggataatttacatacagttgaacatttgttgcattttattctgaaaattaacgtgcaaaattctttatataagtctactgttatttttatatcactattgaatttaattgtaccgctagtcattggcattaattttgtaattgaagtatttatttttatactttaaaacgatcgaaggaattttaacattggacaaagaaaaagatcttttattttttaattatttttgaagtagggcaatggatgttgtgaaaatagaaataataattaataaactatattatattttttttaataaaaaattattattattaatgtgagatttatcattattttgttatttactttattattttaaaacaatttaaaaatatatattattttattaattttattgtaattcttgatctctattatgcacaatttattatttatctatttattttcaatattgtaaaacttactccaatgaaactaagagttactttatttgtgttaaaaaataatacaatcacaacatactcttcaagtgatcaatttaaaatgtagaaaacaagtgtttttccatcattgcttacaaaaaaaatttgaaaaccgcccaaaccgaataacccgcccaaaccgaaccgaaaaaactgataaaaattacaaaccgaaataacccgaaaaaattacaacctgcccaatctgtttattgggcgggttgaaaataggtccaacccgcccaattaaaccgaataacccgaccaacccgactttgactttttttttttttttaactttttagtttttatttatatataacataaatagattaaatatataataatataaaaataatatacttaactagttagtttctaaagtacatatatattgtgttgtgctttggtggaa

SEQ ID NO: 222029 - DNA, 1474 bp, Cannabis indica
taaaatataatttatattttttattatataggaaaataatagtaggatgtttactatttttggtatacaaagaaattgcagtttaatttttttatgacaaaaatattaaaaatattattcaaataactagttacatgtgtattttactattttttacacaaatataactaattattttaaattatatttttaatatcgtaaattatttaaaaaatttctaataccagtaaaatatttcttataactatattatagaatgcaatatatatatatatatatataaaaaaaataagatataattttgctatgtgccaaaaatagaaactaggtctacaaaagaacaaaagtgatatcccatttaaaaagttcccttaatttttttgtcttccaaataaccattcagttaaatcttaacagcattaaattaaattgttttaacttggatattcctaataattttccattttagaaaaatattcctaataattaagtcatttttaatgataattattaagtcaaaggttaaaatttataattggattgttttttttaaaaaaaagattattgtaagcttttttttttgagataaaaaattattgtaagttaaatgaaaagcttattaatggtttttttttagaaaaaaaaaatggtatatcgtttatatttatttttcacaaacattgaacttaacaataattaagcatactttgaaatgaagaccatttcagctttgaattttgtttgattgttcaatgttaatataatattttcttaagaggttataattttcaaacaatattcttaagatataaaagttattacacgagtaccttaacctttagtaaaaatttgttcaaaaaaaaacttcagttaaaatgaaattattttcatacaatattataaaaaatatatcaactggattcttattgctaacaaaatagacgtgtataaacttctattattcccatttttaattttaaaaaagcttagaaaagttttgactaatagatttatttttctctagatcataacaatattaattcatattacatataattattataaatttaataatatttggttaaatcttaagttgtttatacattctgctaaatgtgatgtgtttatgggagatttaacttatgaaacataataaccttgacaaaaaaaaaaacttatgaaacataataatgatgagaatttacttttggggtgtcttttttggttgcagaataatgataataattaatttttatttttattttttttaaatgaaattcttataaattacttttttctttttattttcaatgacgatctatatgtcaaacattgaacttatattaaacttatacaaataaaattaaaaagtaaataaaaatacaccttcatgttctttcttttttttctttttttctttttttttttgttttttttttttgaaacagttttcatattctttcaattgaagcat

SEQ ID NO: 222030 - DNA, 2405 bp, Cannabis indica
aaataaatcttcgtaattaacaaattacgcttatttttccacttatcgagtcttcagggtcgctaaacctgaaaataatttttattccacatatagctcatattacattcacacaagctatataaatctctataatttataaattacgcttatttactcacttaaagcaaaatttaaattttatgctgaaatagattagtaggatcataatcccacttattacctaattaacctataatataaatataaatcttaattatttaccattaggcttatcggcatattacattaccagaacacgacaactaattaagtgatgtcaaaataccacttaggaatcaaaaatacaagtttgggacgttttggcactcacccggcaactaggttgacgttagaatgtcaacctggtcgctggatgtcaacatggttgtagggtgttaaacaaccttcaataaaacaaccataactccctcaatattgtttcgattgacacgattcaacttacatttcgaagctatttcaatgttgtatcaagtcatgtctcacacgcgaattgtagttctgaatttaccaacgccaaatttcgtcatcggtagagttatgaatctaagccacaacttacccgaagtggatccgcagacgtgactcaagctctaaaaattgacgactgacctccggagtcaatttcacttttatatcatcatcaacgataaaaaatagcctaaatttattttttcatgtttttgagaatattttattattattttaatatgacctcattcaatataaaataagagctcttctagctcatttcccacatttaaatagggatggtagttatacccgcgagttcgggtacccgcccctaatggggtgggggcggaggttgacttttgggggctagggccggtatggatttaaatgttcatacccgagttggaaacggagcgagcgggagaatagatacccgcccggaacccacccggatatgattatgtgtgaatttaagttttaaaattaaaactactataattaaaataacttcatgttttaagctttttattgattatagtaatgagatattttagttttcatgaaaatacctgtggtgatacatattaataatcacacttaattgctttataaaaatgacacttaaccatttattttcgattactaattttgtatttactaactccatttactatacacactatttcacttatgtttattgttttactgagtttctatgattttttttttaaattctctttgagacatcatatttatcaaaaatatatatgtaatgggtatcctatgggaatccttctcccgtcgggtaatttttgtcccgcccccgcttgaatttaaatgggtattaggacaagtatgggggtgaatttaggaagtgggtatgggggttgatgagcgatccccgcacccgtcccgccctgtttacatccatacatttagaaaaagtaccccataatgtcataacatctctctctagtttctctcttttcaaacttagctatttttcttgtaatcaatctcgtgagaataaaaactcgaagtagacgtagttccattactataaattcttgcgtgtgctctgtactttacatagttacttataactttcatcttgtttatacataccagtgagttggttaaatttttgcgtcaatatatatattaatttatgtttaagaaaaaaaaattaaataaattaaaaatatagacaaatctatgattattattattatagctacactgactatttataatataattaagattttttattatttaatataatatttattgtagacattgtctcacatggaataaatagtagagtattgagtcatatataagaacatggacaactccactcagagatgtaactccataattctcaacaatatttatgtttatgttgctaatcactttaatagctatgatcaaaaatatatattaagtttaagatatttaaataaataacatatatattgaaatctaagaactaaattattctgtaattcgttaaccaaaaaaaaaaatattgtgtaattaattgaatgaatgaacttatactcttggaatatcccaagataaggaggcgtttggttgggaggaatgaaaatataggaataggaatgggaatgggaatagaaataggaatggaatggaataaaatttaaaattcataaaaaaattgataaaaaatcattaaattttttttcttattacattggaatggtcattcctttctttttaaaatggaatagccattccaccaaaatggtagaaagagcattccattagaatgtcattccaatactttaaaatgcaaccaaacaaaagaatggaatgaaaattgtttcctttccatttcattacct

SEQ ID NO: 222031 - DNA, 2034 bp, Cannabis indica
gcctgaccgagaaaaatcactcctcttatctaaacatttcatatagaaaatttatccctaacatttttatataatccctgaatttttagtttttaaaaacgggtaatgttgtgatgaccccttttgtagctattatactacatttacctttgtggagaagacattctaacgacaccacaaaacaaaatataaaaactttaatacatagtacttaaattatttatttttattaaacaaaaaaaaatctaaatagactgttaaaaatgtctacattattagtcacaagatcagtttattaaactgagaaatggttaacttttatatttattttattataaaaacacatgtacttttattgttaatttcacaatctttaatatttgtcacaaaatgaccacttttttatattttttaaaaatagtgaactatgtttctaatttcaatactattactttatttgtaataacacacatcaaaatgttatattttaaattatatcactcagtataagtacaatatatataaaatattacaaaaattggacaacactgcacggagcgtggcttagttccctagttcttatatattgtaaataataattaatttttatgaataattaattttttataaatattttaaaatatttttgatttaaataattagataaatttaaattatttaattactattaataaagataaaataaggggttcaaattaatttaatgaaattaactagtaatcgaaagtagtgcttataattacacaatagtgaattaatggtagattaatggtcaaagaaggatggtgtgaaattcctaaagctacatcaaccaacaacaaagaagagttattcatgagagagattattcttagtgtagtttatttcttttatgtttatgtcaaaacttgttattttagaaatacccaatatttactcgcctcacatattaatatttgatcaattatttgctaattgttagtgtatgcatatttaattgttatacataaaatcccacacagtttgtcttttgataatcatgcatctcatattagaaacatgattatttaagattatcctctatattttatgtgcattgaatttgttgaaatcaattacataaagtactaggttcagtttaataatttaataacttggtaaaacacaccaagtgactttctccaacagttagtcacataattaactaatgttttcaaaatatggtattttcaaaaattacatagtaatatgatatttcaaatctatattatagtaatttaattaatgtattacaactagttaatgattaaaatcaacttttctaaagagattttaataaaggcaaatacattttaaaaaagtttgtgggagagggttgtcatctattatgaaacccatggtctccattattagtccaacaccaagagtatggggagggtctcgagacagttttgtttttgtccctttaaggaaggtgttgaaccgtacattgtcaaggttagcttcctttatggataggataaagttatgtagtttagtgcgatactgacccttagagtgacgctactaagttaagtaatagagtccgaaataataggttacactcacaaattcatgtctatgtctttgacattcgggaatattacttgaccaaataaatagtactttattttgtaaggaaaataagagctattttatttgtaattaataaaaacaagaacaagtcttgtagattattcgatgttaatttgaccgaacctaaggaaaaactttaatctttggataatcttatcatgaaatttctaaattgttttatgtgtttttctaagtgtgctcatgcattatatttaaattccatgcatgacatttatttctcatttatggtacttatattgtatttatattatattgcttatttctcgtattattgatattttatttcagtctaataacaaataaaatagaatgataattaaataaagaaagatatctctattacaaaatgactgagtttgatggtgaattttaagctaa

SEQ ID NO: 222032 - DNA, 3509 bp, Cannabis indica
ttgtaataagcaaactttagggagtaaagtgtaacatttttataaaattgggacattatgtactccaaaatataaattgggtcgtatgtgataaaagtaatataaatggagacctttatataataatatcagtcgaactccttacagagcaaaaaaaaccctagactagtcggcgagtgtgaggaagacagggagagatgcagatcttcgtgaaaaccctaactgggaagaccatcacccttgaggtcgagtctagcgacaccatcgacaatgtcaaggctaagattcaggacaaggaaggtcaggactcagttttcactctattcattctctttcttattgttgctggcaaatatcgattgcaaatgattaatgttgcgattgcttttgttctgttaggtattcctccggaccagcagaggttgatcttcgccggaaagcagcttgaagatggtcgcactcttgctgattacaacatccagaaaggtttaccattttttttgagattatcgaataagagtttatctatatagatttgagtgaagttattgtttgtttggttaaaaaattgagaattttttagagggtttgagtttgaattttgtattgtcttctgtaatgttttttgtttataaaatttaaccaaattgtgtgaatttgattgggtcatttccacagagtccacattgcatttggttttgaggctccgtggtggaatcatcgagccatctctaatggcattggccaggaaatacaaccaagaaaagatgatttgccgcaagtaagtcataatcttaatttatcaatataacatatatgtttggtttatacaatatgatatgttctttgctcaactcatttgtgtttgtttcttaattaacaaatgttggattttgggattcccctcattaaaaatatttggcttaatgattcatttaagctataagctatatggttcctttgttttcattacccttacctgttatgctttaagctatggtgttcttgtaatgtcttatgttgatactagttcagttttttgtgtctttatgtatcaatatcgatatgctttgtttgaaacttctttgattgatgctcatagtgtttgttacttgcttataggtgctatgcccgtctccaccctcgtgctgttaactgcagaaagaagaagtgtggacacagcaaccaggtaaacgaacttttctttgattatttcttttccaagtttcgattaataattattatgaactcgtttattcaaaactcgattgttttgtaacttgaattgcagttgaggccaaagaagaagatcaagtagattttcattcctaccataaggtgctgcttctgcagtttcctattattagaactattaattttgtttttgctatcttttaggaattcaaagtatgttttggacaacattgctctattgggaaaacttatttcttatatttctttgtactttggaattttggttattcagatgttgagtttgacctattttaggttttacttttaactattctctaatacatttatatggttttgttcttgctcgattgtgttttgccttcaagcatttttcttgaaaattatttagaaaaaagtttagggtgtaattgatttaggatttgaaaactgttttcaaaacaaaatctgaatattattttgagttttagataaaaaaaattaaacatcatttttatgttttcaaaccatggaatctaaaaactctttaaatatactcttacctttttattttgaggttctagtctcaactatcacatattcaattttttaaaattaaaaaacattaatccatactaaaaaaccaatcatatttttagaaataattttttacgtacaaaatgtaaatttttgttttcaaaacgtatttcttacgtagatcaattgccatccgatactcaccatttttactataatgccaatgaatcttatcctcaatgtcccaatcaatacataggagtttgagtattaatttagaatgtaaaatattaaagttagcacgaataaaactttcatcccacttcccatttgaatgctttagatcagtcccatacaattgctcaagaaagctaggtgggttgaagaccttgaaggtataatgtcgtggcagccatagatcttcaagaatccgcacactctttccattgccattgccaattcgccattaagaattgtttgttttcctcaaatcaaactcagccacacaaaagaagcagatgcaccacatttttcccccaaaaccgttccattagggaaatagctagcctttaaaaccttgctacataagctctccgggtgtcgaatacaacgccaaatttgctttgctaaaagcacttgttaaataactccaaatctcgaaaccctaacccctatgctccttaggtttacacaagtaagaccatttgcaccaatacatcttttttttcttttactaaggagccccaccaaagccccaccaaaagtgggcgaccaacttatgaatattattatattattaattatagttttaggcaattcaaaacaactcatcataaaagtgagaataacctggttaatagctttaattagcacttcttttcttcctgttgaaaacatagaacacttccaaccacgtagcttattccatactcgatttttaatgacatcaaacacttgctttttacttctcccaacttgaacctccaatagacttgctaattcagccctctctccctcattgacttgccttccaaagctcacttcagacttgtgaaagtttacaagttgaccagatgccacggaatatttttccaacaatgtttgaaaattttgacaagtctctcttgtagcatcaaaaatactaaattgtcattcgaaaaaaaaaagagatgagatatcaataatccgttgcgcccaaacctcactccattaatactacccggcctctcttcatgtgtataagactagaaaatgcttcagcacaaaagataaataaggaaaagagattggaggtctccttgtcgcaatcctcttcttggtatcacttccccttgcacctcactatctatgagaaaagaaaacctaaccgagcctacacatctcatgatctgtcaaacccattcagtctgatagcccaactttaacatcattgcctgaacaaatctccattctaccctatcataggccttagccatatccagtttcagaactagctttttcccatttcaaaaacgattcttcctcatacaatgtaactcctcatagcccacaatggcattatcatgaatcatgaatcaatcggcctttaataaaagcactttgagtatcggaaataatcattcccaaatatcataagtgtaataaaatgtcaaaagaattttttaattaatttttattttttttaaaagaaaaatgagtgttttaatttattgtgtaatttttttttttaaaaaagtaagaatgagtgttttttaaattaatcaaacataacattaaatgag

SEQ ID NO: 222033 - DNA, 2466 bp, Cannabis indica
cttcagattccctctgacagaaaaagaatcttacatatggttgcaagtgagaaacactggggatcagttctactagaagaaaacgatcgtggaaaatgcaaagtgtgcggttacaaaagtggggcttttaaagatttccaactacactaccattccatacttaaagaaatactagcagtaaaaatcggtatcatgaaattcgagttccacctcatcggacacaatttcctagtagaaaaaatagattttaccacatttcaagggatgctcacgttcaaatagaacaaagcagtcaatgctcaattgctaagattagccatgtggttctcacgttacacgttcgaaatcaaatacataatgggaaaacacaaatgtgatttttgatttcctctcctagccagaaaatcctttataaatatgatcaacccacacactgagaattcaatcccattggtctacatggccaacctatctcttatcatccctacatttcccagtgatgtcaaaacaattgtcaaaagcgaaaaaacccaaggattaaagcaatccaaagagccctagaagtccattccactctcgtgaggggatatggcaagactatatctaaagaatttagcttctacccagactacccttttgccaaactcttacacatgaaaagtagcatattcacgccaaaaaagataattgacctctactgatatctcgccagttcatacactattgtggtcaaaatacacacgatagggctttgaaaaatccgtccgtagctatatccaatggcctgacctcaggactgcttaccaacatccaatggctatgttacaatgatttaaaacattgcccaaatgggacgcactcctcacacaagagtaggaaaaggttcgcattaagagactcgtggaaatcaattgcccagctaccaaaaatatggcgaacccattacgttgttttacaatcttgccactcgggctacatgtcaatccagacttatcatttacgtcaagtgaacacccacttgtcgtgataggaagcctagaagcaagacagctggaaaagcacctatttgccattaacatggtgattctatatgccatctggctaaaactcaaagatgacgcaccatgggaatattattcgctcaagtatctccaaaaactagaagaagatatatgaatcattataaaaaaaacactatgctgaggaaaacgatgttgactataatgatccaatcttccaagattcccaatacccaaacattgcttgtaactgtccattctcaatcaatgatcttgatgaagaaatatgtaggggactgtgtataactccacatgtcaacaacaaacctactgtaacaacaagtcgcaacaagagagcaagtccttcattgacatggcaagaagaaaatagtgacatagatgagtacatgaatctcagtccctcacatgaagccattaacaaaagatggtgaagcatctgaaccctgcaaagatacccatctatacttatgtcgtgtttattttatgtcaataataaggtggacatgtgactcttaaggaaatcagtccattgtttcgtgtgccaagacctatgactactcacaagaccaataaagattcctactcataacaaaatgacaactaaagacaaggaatcattcagatgacagagatttctctatccaactgaaaaatttgtctgtttgtagttatgaataaaaaaaagagtctgaaatgctagagttttcctttctagggaagaatgtaactaaagtttttagcgctttctgtttgtagagagcctatatatatgacctctcatttttagttgtgagcacacaagttcagataataaaatctcatctatcttttcaaaaatgtctttctaaatttcctatatggactatttctctactaggatagataataagaatattaccattagctcaatattaccaactagaatgtatatcaagcaaaatttttatagtaagtgtcaatctcaatagcacaacctacaaaggctaagagaaaaagccaactttagaaaaagtattgagattgattctgactatatggattatcgttatatctctccatcagtatacatataaaagtcattccatatcaaatatacttccatatcaaataatactaaaatcttttttcttcttgctttgaatttattattatttttatttatttaatttattgatgggaacataaaataacaataatttattttattttgttgttagttatacgaaaaaaaactattttaattacaaaaatttaacgttaaaaagtaaccaatccagaataattgatccaatccatacttttgtagattaatggattagatttgagttactatgcggatatgattggatccaaaatatgaaatccacacttagtgcgaatcggatgcactatgaacaaaatagtgtagattggatcagatgaacac

SEQ ID NO: 222034 - DNA, 2902 bp, Cannabis indica
catccacattgaccttgattctattgaccggtggaactgtccaacgctcagtactggcacctgtttgtgaaccagaccccgacgactctaatctagagttctgagcaattctccattgatcaaggtagctttttgcgtacacaacaatattgtcagccgagaaacttttgccattctaaacaagatcatttcgtgctccccaaatttcccaacaaagagtgaccaacaagcatttctgctgatatccaacaccttaaaacaatccatacaccaattgagaaaagatgtacctgttgagcaacttgttccaattcccactatgttccatactagttgaactatctgacaagtaatcaggcagtgcacaatagtctcatccgcactatgacagatggggcaaagagaggagacatccacgtgcttagtcttcagttgtgtcaatgttggaagacaagccatatccgccctccagagtaaattcttaacttttggaggaacttgtaaactccaaagtttcttccaaaacaaagaactttctgaatcatcccactccccgcgttgcttctgaaggagattataagcacttttgacactatacaaacccgaaatctcacaagaccaaacaaagtgatcacaagtttgagtaagattaatcggaatgttgagtatcaaatcacgatcacgctcgtcaaagaagtcgttgaggatttccacatcccaaccgccaccatctaccctcatcaagttaccgaccctagctgtttgaagggccaggtgtgatgatgtcacatacgggtgcccaggatcgggaagccatggttgagataaaacattgataagactcccatcaccaacacaccaacggacccccattttaacaagttgttgggcttccataatacttctccaaataaaactaggattattacctagagaggcatccaagaaagaaccatggggatagtaccttgctttaaaaacacggccagcaagagagttaccccgagttaggagccgccaaccttgtttacccaaaagagctaagttgaagtccctcaagtttcgaaaacccatacctcctttcctcttggatcggcttagtctatccaagacatccaatgaatgcctttacttgttttgttagaagattgccaccaaaaacttgtcatcagttgctcaatgtcatgagagatctcaagcggaagcaggaacacactcatagcataactaggaagagactgagccaccgacttaataagaatttcctttcctgctcttgatagtttaaatacactacaaactttattttattcatatagtatgatcttaattctcttgcacttccttacaagagtaaatttcagcaaggacacctccaccacatctttttcatacatcgaagggttctttcttacaaaaataaattgcattcctaagaaatggcttgcttggtcagattttacatgagttccattatacgtccatagggaaacatgcgagtaagctaaaacttataaaaacctctaagcgtagatgttttgggaaggtatgaagttcaatgtgcataactataattggagtatgctatttgccaacaaaataactatctcaccaccacaccagtcggacttttagcacataccgctactatctcaagtttggattaacattactgtgcatttcatagaagggttaactatattggaagggtgtgacaccaattggtggtggttgataaattatcataatatggtcatttttgaagcttcatcatccatttatagccactacagtagctgagtttttcatgcatgagatagtttacatggtctaccccaataaattatttatgactgagactaaatttttcttagcaacttttggtagcatttattcaaactccaagacacacatcttaagtgaagcatcacttactatcctcaaacggatagtcagactaaggtccttaatagatttctagaggcttactacagatgaaattcactaataagaatcccaaaaatggtccaagtggatctcatggtcgaaattttggtataatacttcctttcattcccctatcaagtggacttttgtcaaggctctatgtggtcgagaccctccatcgttgttgccctataagaaagtgattagcatagtttccatcgtggaccaattgttagagtcccgtgatgccattctagacgacctttgaatgcatttgttacatgcataacggcatatgctaaagtatgcagactttaatcctcgagctctacccctactgtcataagtccttagccacgggcactaataagaaacttttacctcgattgtacgttctttatatcattcaacatattggaaaagtttcttacaagcttcagctacccaatcatgccactattcaccttgttccatgtgtcccaacatagtctagccattggtgatagcaattcttcaccaacacctccaccatagctcacatcagacttggagcgtcaagttcttcctgaagcaatcttatagtagcggcaaaaagccttggattcgtctattagttaagtccttatgcccaagtatgaggctacttgggaagacttcaccatcaagtagtaactgtaattccatcctactttccacattgaggaaaaagtgatggttttttttgtggggtattgataagcctaaaacttatcaaatgtattacgcaaggattaaatgaaatacttgttggaaattattttaccaggatctagatttactaccaagtatgtttgattaacatcctaatatgaattctaaaacaatgaaaataaacacataagagtttaagaaaaccttacattgggtgtagcggaatattatgactccttccattcagatctctagcccttgattc

SEQ ID NO: 222035 - DNA, 1131 bp, Cannabis indica
tatatatatcaagcagacaaacaaatgtgatacgtaatagctagttactagctaagctaatcggctaagtttatctgttttgtatttagaatattttttttttattatgatggttatattgtaaagttttagaaaattttaaataatttataataataaaaataaagtttaaatattatattacacatatgtgattatttatcttttgtatatgtgatacataattgtttaaattttatttttaaaattataaattatttaaaaattttgaaaatttataattaattttaaataattacaatatatacaactaaaaaaaattaaattaaaatcttatttatgtcaaaacaaataaaagaataactattagaacatccattagtatgctacataaacttagtcctatatattaatttatttattttaacaagtagtaataatatcagttattgaatctatttcatctgctgcgtgcttgatcttgttgtttccatatactttttttttcttttgatatatatacatacttgcatctctaaatctttgatgcagtttattattattataatatgacagtgtatattgtctactctataaaataaattaaaattaaaattatttagatattgaaaatacgaattttccttattttcaaaattatcatatatatggtaaattggtaagtagtactgaacctttcacgtgattattataagctacatttatatttgatcctaccttttggagtggtactacaattaatataaattccctcgtacgtgcaagttcaatatattcatgtgcatgttttttaattttcctgaataaatataatatgatacgatatggacaaatattattaatggctcatacgtacaatctctcttcctcaaatattatccttaatttccaattcaaattattgcttttgtttttgtttcacccatataaatttgttgattgtttatttctttttgccatatgagtgtatttatatgattatgtcttatcatcatatatatatatataatttgaacatgttatacttgaaattgatgacttcatccatatcatatgtatataatattaaaagtcattatcaaatgtattaaaagtcattatcaaatctag

SEQ ID NO: 222036 - DNA, 2778 bp, Cannabis indica
gattttaggagcaacaattatatatatatataaagtgattagaattactaatgaattttgagatataattctctttgagccatgataattaattgtctaactaaacaatatatttagtcaaatcaattgccacaaacaaaaggttgtgaacacaaaactgtcccaaacaattataagaacaataatttgcatctattatgaataatctataaaatatatacaaaataaaaaaagatagtgaaaataaattagtcccataataatgttaatattataataaaatcgagaaaattttcaatatttagaagaaaagaactctctaatattatatttaaaattaaatttatcgataatagaatgacttcacactttgattaaataaaacgattatcctatatattatatttaaaattaaacaattttttttttaagaataaaccaaacaattttattaatagcaatctgcaactcaattagaatatcttttttgttggaaacacaactaggattaaaataagaaaaacaagccaactaataagtcgcttgattcccagatcgttttacaaaagaaactaaaataaatgcagataaaaaggattgcagcactagagttaaccttaaaaatacctatatttagtttactctactgcttaaaagttacaatagtagatttattgcaataggttcattcaaccctttaacttgagcattcaactattgtacaaggtatgtaacaacatcactaacaaccccttcaaccgaaaaagaacttattgttcccatctactaacagaactttgatggcgaagcattaaagaaaaataagacgaaccaataacgaaataaaataaacaaaataatgccacaaagacaagactaatcgcagtaacttaacaaaaaaacactcaaaaccatcttacacaaataaaactaatcacggtagaaaaaccacatacacctaagcccatagaggatcgacgggtctagttggagataaaacaacctcacttggataaggatttggaaaaagaaacctagcagacaatataaaatgtttaaagaaaaccgaagtagctaggactggaatgcaattttttttttttggtttggtaagataatatggtataattgtaaactgaatgagtgagagtgaaaaattgggggcaaaatggttaattgatcccatcagtagagatgcttaaaccctaaacccttatctttgtccctctcgtgtaaccatttacaccagtccctttatctaaaaccctaaacccttatcttccttcttcgttcctcatgcctacctcccaggctaacatataaatttcaccaaggcaccattttcagattttggtttacaggtccggccatgcccgttaagctctttcaccaatttcgtcttctcaatcctgctcttcccgttacctgcttctcttccatgaagcttggaacttctatttcttcttctcagactatctcaagtttttctcgtatattcccattcaagctcaagtaccgttgtcttgggtcatatcacgttccattaaaccaccagctcggtatgcggaaattctcgactcgcccgattcgatcaagggcctcagcttcaggctccgagttcagtcgcggaagaggagacgttcgtggctcgaagagtttgattgaggatgaggctgagctcagtgactgggtgagcgagttgaaggacgactcgttccgtggtcggttgaatagcgaagacgaaacggatggtggtgataggggtcgcaggggtagaagtagagatgtaagtagtagaggccaattcgatggtggtgataggggtcgtagggatagaaatagagatataggtagtagagattcttttgctgtgaaaaagagaagagaggagagtgattcggatgatgctaacaattctaataggggaagaacacgaaccccaattgggtctcgttctagggattcacagatgaataggcgattggatacaagagggggcggtggcagtgaggaagctttccaacggaaaaggtcttcatcgtttcaggaagggaaagtgagctccaattcatttgccgggaagagaggtggaagagatatggaatttgggtataataggaatgaagggagtaagggtttaaggaaagatggtaaggattcgagaaaacaaggtcttttaatggatgaggacgatgatgaggatgaagagggaaaaaggttgggcattggggctttgcttagtgaagaagacagtgatattgatgaagatgatgaggataaggaaagttcggttctttgtttggtttgaagaggaagctagtgccaagggttcagcagcgtcttcaactgtaaaatcagactcttcttacttgagtgaaactaggtaggcattacagtttctcttctctaatggcttccttatcttcttaggtttaggagttctttaggaagaaggttgaaaatactcttgtcattctcattaatatttctctgcatatatttctgcagctttgacaaatttccagtctctcccttatccctaaaagcaatcaaggacgttggatatgaaaagatgactgtggtacaagaggcaactcttccacttatactcaaaggtttgattctagtttcgataattgttactataagtttcgttcatgatcaagcatcaaggataccaacttgcacatttaatgccttgcgaacatgttattgcaatgatcatctttgctctacacttagtaacttgtgaatgaggtgtatcagtgtcttcatttc

SEQ ID NO: 222037 - DNA, 1474 bp, Cannabis indica
attatatatatattaaaaataaagatttgaatttcaggctcagataattgtttatttaaaggaaaaaaaaattctgacacgcgaagaaaaagaaaataaaacatattacaatttgaatatataccgcatactaaattaagggaaatgatattggacatatacttaaattaaataaatagtcatatatctataaataaaatacagttaatgtattttggtgtaattattccttaatagaaatggggccaaaaccgcaaataaaatcaaattaaagccatttggtgtaaatttctattaaaatatttattttattatttatattttttcaagataattttatcttaaatatatttagttatttatttcatagttaatatttatctttaaaattataattttattttttagatttttaagttgaattatgttagctaaatataataattttgttatttaagatactttagtgttatttttaatttcgttattttttttgtggcaaaaaatatatcatttcgtcatattaaaataatcactttgaaaaatagattgcggtataatttttaattttaaactattatttgtgtgacttgacaatatttttaaacttgtgagaaaaaaagtaagagagaggagtgaaatccattcattttaatattaaaaatctattatatattataataagttaatcataataataagaagaagagtgagaaaggcaccaaaggagagagaatttttttttttaaaaaaaagacattgtagaactaacataaaattggataggaaaaaatacaataaacaaataagtaaacgtgtcaaaaaatagaattgaaaaaaaaaaaagacttcactgatgcatagatgtacgagcgtgagagagaatccacttctccttcgttacggtataccaatgtgatattttcatgattaaaatacctgaagttatttgtataaataaaatgagaattacgtatgtgagcgtaattttctcattaaattaatagttagaatgagattgaattatattggtattataatgtagggaaacttacaaaaatactggaatttgggttaacttttacaaaaatacggtcacacggaaatctttacaaaaatactgtgtttttataaaacaccagtaaaacacaaagcagtataactcaaaacaacagtagaacactagtaaaacactagtagaacaccagtgaaacttaacacagtatactgcagtatgaaacttataaaaaaatacagtaaaaaagtaaaaaataccgcctgacagtatttttgtaaaaaaatagcaaaagttagtataccatgtaaatttcccataatgtatttggtgcaatactaaagcatcaaactattttgtaataataaacataatggtaaaaagttatttaattaaaacaaatgtttaaaagaaaacaattattaaaaaaaattaattggaaaattactccatatacta

SEQ ID NO: 222038 - DNA, 1826 bp, Cannabis indica
taatattttttagaaaaaaaaatggtataattataaatgtgcgataaaattattctagaatttttaatacctagaagttcgacaacatagctttaacatatttgacacaacaaatctatttcttttattgagcatcgaaaacctaacatcgtggatttcttttattatttaccaacttctacttttctcacatgaaaatcatttcaagtatattctcattttaagaagttgggatcatacatgacaattccaaatccgaatagctaagcatgtctacatatgcatgcagtgcatctggagagaagcacataaaataaaaaatatacaaataaaaataccttggatgcttcaaacatataggtatcaaaaatctgcttaaacccatcccaggtttcctctgtgaagaactgatgagcattcatagcactggaaaataaaaaagaaacattgaaaacataaaggagccatttctcaagaataagaagaagtaaacgccattatagcagcaggatgtataccctctcatcgaaaaagcaccgaactttaagaaatttttatgacagaaataccacaattcaactttgggaaatggagagatttgaactctcaactccttcaagaggaaaagtgtcaaaactgtctgtctaacctcttgacaacactcccagtacaattagaagaggatcacatagcgggttgcaacgccgcccaataagctgacagtagcaatacccgtgatcctctaacttagattcttttaaaaaaaggtgtcattgatacaacataagatataaataaagcaattcagcattcgggaaatggagacttgaactcgcagctcctctaagagcaacagtgtccaaactgtctgtcacacctcttgacaacatacccagtacagttgaagaggatcacaaagcgggttgcaatgccgcccagtaagctgacagtagcaatacccgtgatcctcttatttagcttcatttaagaaaaaggtgtgattgatacaacataagatataaataaagcaattcagcattcgggaaatggagagatttgaactctcagctcctctaagagcaacagtgtccaaactgtctgtcaaacctcttgacaacactcccagtacaattagaagaggatcacatagtgggttgcaacgccgcccaataagctgacagtagcattacccgtgatcctcttgtttaggtttatttcaaaataaatgtgtgatttatacgacattcggtatgaatacctgaagtcataatctggatacatatgatagagtgtcagaaccaagtacaccaatgtctttcggctgtaagaagcaaatacggaaaaacttgttaaatacaatacaagaaacctgtaagcatgaatgcattttatcctatcaacaatcatcattcacgaccttgatctgctcaaaagaaattctgctggcgaggaagagtctgtatcagaagattttccaagatgatcaaggatctaaaacaaaaaacagcattgacaaatcatcaataatcagcaatttgaaatcagaaaaagataatatgattacagcttattggacgtgaagaatacagccatgaagcatcaaaatgaagttcttttcttgtatataaacattaatagtgaaaatgcctgtattgaactcaacaacccaatttttcaaccgagaatcggagtcatttccttattcacaatacaatctacaaaggtcacgcatatacaagttaaaaaatacaaaatcggctttaaccaaacaaacaatacagagattaaaaaagaaaacaatgtacaaataaatgagaccaattggc

SEQ ID NO: 222039 - DNA, 4153 bp, Cannabis indica
aaacctttctgggataaacatttctggctcattccaatacttggggtctctcccaattgtccaaaagtttatgatcacacgcgagtttcggggtatgttaaaaccatttactgtgcagtcttcgattgttgcatggggaattaacaacggtgccactggatgaagcctcattgattcctttactaccatgtctaaatatggcaagttttctaaatctgattcttccaccattctttccattcccaccttgttcttaagctcttcttggagttttttcattgttgttgggtgctttatgagttctgatatagcccattctactgctgtcgatgatgtatcaattgagcctacaagcacgtcctgcataaataaagttgagtaagactattgagtttagaaaataaaataataataaaaaaaccttaaaaatattattttttctaaatctacatcattttttttatatttggtatgagatatagagtattaaaaaaaaaatacaaaactcaaaaatgtacttaaaatccaacgccatatttaaagaaaaatcaaaagccctaaaagtattgaagaaaacatattattatttttggaaaaattccttgatgttaaattatttaaatcatttaaattgcatgaatttataagagtactcacaacatatgttttaaaatagagattctctaaaatatttaaagagtttaacaaaaaacacgttacatcagatgctctaaacttcttctctattttaaagcttctttaaaattcattattcatgctctacttttatagaatactattcattgctctaaacatattttatcaattgtttcagttttgaatttttctttttatatagaaatatgtgtaaatattaatattaaatgtttgaaataaataatatatatatttttaaggtaaaccaatacatgttaaaataaaatatattaaaatttgaaaaaatagagttttagtgatgtattttaaaaaagttgatgtttggtgtaatgtgtttgaggtaaaataaagaaagtaagattttagtgatgtgttttaaaggatagagtagaggacattgaattaaagaagacctaccaaaattatagctttgatatttggtcgttcaatgcgatactcagactcttcagatcccataattctcaacatgacattgacaaaatctttggcttcatgatcatctttagccttggattgaatatgctcatctatgatcccctcaaagaattcatcaaacactttctgaacaaccttcattcgctttgtcaagccctgcaagtcaagtggagcaaggaaaggaatgtaatctcccaagttaggagtggcacccaagtacatcaactctttgataatttccttaaaacccttaggatcaaactcttcatcagagtacttcttcccaagcaccatccgacaactcatatcggcattacacactgcaatcttggcgctcaaatcaactgccacacgattagtagtagccttttttatgaactcaataaaatggccaacctcttctcttctcatagctttgaaagtgcttatcttgagactacttagaagctcaagggtgcacatttttctcatgtcgcgccaataagagccatattgagcaaatgacaagttcctttgctcccaactcatgtgctgcgcagccaagtgaggcggtctactggcgaaaacaagatcatgggtcttgagaaaaagctcggcagccttagaggaggacacgacaatagtgggaattaggccgagctgcatatgcataatcgggccatactttcgggacaacctttgcaaatcgcgatgagggtttttgcctaataggtttaagcttccaattagaggatacccttttggaccaggggggagattcttctttttctccttgctttgttttctcagaacataactaactataaagaatacaaaagccagtactttccatagccaattagccattttttttggtgttaacagttgtgggaaataggtttattcaaatgcagagatttttcataacttcagagtctaggtcccattgttttgttgggatcaataattgccttttttttttccattattatatttgtcctattgaagtattatattactttttgttgtaatttttctttttgagttgacaccatacagaaaattaatggatagatataaagtgtaggagtaggagatgctttcatgtttttgaaataaacaaaattaataattacagaaagagaaaaaagaaagaaataattgatagatacgtaaatctaactttatattaaaacttgcaaattgtacaatgtgctatatgtgtgaccacacaatttgtatcaaatagtatgacaaaattttgagtaaaaaataagtggtgtattgacaaaaatatcatactttaaattctttggctatgatgatgacataggtgtagagctatgatgctttttcatatagatcttgtaatactgatgacattgttagattattaaagctttaatggtgattacactatagggtaaatattattttgaattctatgttttgcaaaagttaccgattgaattttctattttgttaaataacaaaatgaactttgaattttttaaaatggtaaaaataggaacctgaactcaattttcaacatttttttattaatattactaacttgaagacaatttctagcacgaatagatgtaaaaaatctaactaattttgtcataacacttcaaaaatcagtttagagtcctatttgtagtgtaccattttagaaaatacagagtatattttatcatttaacaaataaagggtctaaacgataggttttacaaaatacatggtccaaaatgttagctggaaacccccacaaaacttcacattttcaatctcagattctcccaaaccattctgacccattttcacatttatttctcatctgtggtatccagagaatcattacaagtgatacttttggtataaactgctcttctctgctgtttgagaaaatgtccataagaaaattttgcttcacttctatgcggataaactctttggtagtttatgagggtcataagtcaggctccattggtagttttgaaaaagaagaagaagaaaagtctacaatggctctgatttagctgacactcaaatctgtagaatggtatgagtgaacaacagacttgatttgagtaagatttattttctcactgtattgatttaatcataattaattgattgttagagtagtaaaatcaaattatgaggaatatggggaaaaatgttaagtttcttatatttttattgtttcatttttcatttgttttaccaagttatatgttaatgatccaagtctcaattgcttgttgtgaaattaaaattacttaaatttgttttgccagttaaaagtaaaagggatatttgcggcgaaactcccttaacatttacaattgttacacatatgatcataataaaaaacaagtggcaccaaaagtaccttaccttacgattttgttgcagttgtactattttttagttgttaagtaccaattaaacctgttaagtgtcacctcaacaacacgtggcgacatatttctttaacttatttaatacatagtccaataatatatcgccacgtgtttctgagttgacacttaatggccaaaatatggtacgactgcaacaaaatcataagataaggtacttttgccaccacttttttgattaggatcatatgtgtaacaattgtaaatgttaaagaggttttgccacaaatatcataaaattgaaaatagctcgaaaattaataacacattgaactaaaaacttaactacccttaaagagtttcctcaagtctttcttaagatagaagatctaggttcttcgtttttatttcgaagggcaattaaaaagcttaaaatttctattatttcttaaggcgatagctaggaatggctactagatgttgaactctagtagtagtcaaaccaaactcttcactcatatccaactccgaagctaccattccatcaggtagttcccaatcaaagcagtgaacaagttgagccaccatcaacctcaccacaagcagaccaagctgcattcctgggcaccctcttcttccagacccaaatggaa

SEQ ID NO: 222040 - DNA, 2788 bp, Cannabis indica
tccctttgtgtttcaaaatttcacaggggtcttggttttcgctcaatgaaagctttcaatcaggcgttgttggccaagcaagcttggcggattcttcagtctccacactcacttgttgccaccttgctcaaatcacgttattttcctcatactcattttcttgattcgggtaagggtcatcggccttcacttatttggtctagcatctcttggggcaaagaacttctcttgtcaggtcttcgaagaaccgttggtgatggtaccactatatccattttcaatgatgcctggatcccaggatatggtaagctccattatcttagacacaactcagatgtatacacaacagtggcaaatcttttaacaccaaccaaggaatggaacctcaccagtcttcaaaacaccttcccttcagataattgtcaagccattttaaccattcccctaaccaacataggcacacctgactcatatttctggtcctttacaccccatggcacctacacagtcagttctggctatcatcaagcccatactcaactacaccataatgacccagcatcttcaaatagcacagcctcccaagattggtggaaacagatgtggacactccctttaccacccaaactgaaacactttctttggcctacttgtcatgatatcctgcccactagtcacaacctttttaagcggaaaattttaccatcatcttcttgctgccggtgtttgtatcatgatgagaccctagagcatgctcctttcaggtgcccagctgtccagggggtatgggaacttactagttttcatgatttcattgctaaaaacatattattaaattgttgggacttattacatcttgctacaaacacttttactgctggaaactatcattattttgtctgtttgttgtggaagatttggaactgcaggaataaatggttacatacaggtttatctacagcacctacccaagtcttactttcggttgtagactttctggaccaatatcaaagctgtaatatgaaggcatctggttctaatcacgcacagagtgtctgtttgctatccaaggaaaaagatcccaccattccaagctatcaccttcggctttcggttgatgttgccaaggatgttcaactaaataaaatgggctttggtatggctatacacacacatcagggagaagttcttttgaatttggcaatgccttggtgtggactacattcccctttactaatggaagcacatgcattatactttgctcttctttggtgtcacaaccattccatttatccagatgccattgtttcggattgtaaagttttagtggactacatttgtaataatgctacacataacctccaccttagcaaatttgtaactgaaattaaaagcttactgtcttatttccctaaagctgttattagctatataccaagaggggcaaatgaagctgcccattatttagctaagaaagctttaggcctagatcaggaggctttgtggaagaactcatccttacaattgtaatttgtatctaggtcctctttgttatttattaatggatacatgtttctttttcaaaaaaaaaaagtatttttaaaatgtttatcacttaaatttataaaataatttggcccccctaactttacattctggctctgcccaatctcgctcaaggtgcattaggaacaaatgacaagtacatttagaacaattgtgtttcaaatctcgtttagatcttgtaacttgatctcatttgtttcttctttgtgttacagatctaattttctaaaaaaaaatcaaggagctctttatacaaagctgataagaaatattagaaagtaggaccgctaatatacattattacactagaccactagctcctaacaaatagcttaacccatttatcccaatacttgattgatgcggttatttacccatgaacacactgttcctaaagacttggtcatatgaccacaaatgctacaataaacaataaataaaaaaatccacataataatattttatttaacattctctttcttaaattgatgtgtttgcaaacactcaatttattatcgtctgtcaaacttgattttccaaagcacatacactaagcatcttccttaatttttgaaatgtaagcaatttgaagagatttgtgaatatatcaacaacttattcttcacttatgcaataaataagatcaataactccttccatactgttctctcttaaataatagtatttcacatcaatgtgtttgcttctaccatgaagaacaaggtttttaaaaaatttaattgctgagctattttctcaataaattatggtggctccttcttgcttgaagtgtaactcttcaagaatctttctcatccaaacaacttgacaatcactagttgttgttgctacaaattctacttcagttgttcataatgtgacaattgcttgcttcttttaagactatgaaacttctcctgaacccatcataaaaatataaccatatgtgtttcttttatcatctaaatcaccagcataatcactgttagtaaaataaaataaatctgctttttttccttttgattagaatagcccgaaattagttatattttgctactatcgaaagattttctttgtagtaagaagatgtatctcccttggacattccatatacctgctaataaaacctcccaccatgcattatatctggccttgtgctgtcaagtacatcaaacttccaactattgacttatatagagtgttgtcaaccttctttccttct

SEQ ID NO: 222041 - DNA, 1664 bp, Cannabis indica
ttacactcacaacatcatcatattaactgtttctttatcatttgaactagagaaacaatcacaggcttggggaagcttttgatcattctcaaggcttgaatggcgtgtctggtcctccattagttttcgcttcaaagtttgagaagcatgcaactgcaattccaaaagctccagggaatgctcagcacctggtagaatccgacattagtactacaactgtaacaaataagggagtgactattcccatgtcactgcagccaaattttttcttgccaaatggtggtgcatcatctcattgtccacctaggctgccatctgatttggaaaatagatcatttcaacctcagtctcagttatgccagactagatcgtgtaccacagttgatggttctattgcaagtgataagctgaaggaagaagagcttactattgaaggtggtacgattagcatctctactgcatattctcaagggtgagcattctatacattacgcttctatttgttttctattaaatattttaggtgcagatgtctaaaacttgtagatttaataatatactcctgttgctttcgactataggtttgcaagtagttatgcaagaaatattgtttaaatttttggattacaacattctagttttctttttcaaatggtggatctttggtgtcaaaacaggttgttagatacactgacacaagcactgcagcattcaggcgtggatttgtcacaagctagcatctctgtgcaaattgagctcggtaagcgagcaagtagtaaaactactgcgtcaacatccactactaaggtaaacagattgtgtttatgctattgttacataaaggttttgcttcacttttgaccataatcccttttctcctaatcataaactataatgattggataatagaacaaagtgacatttcatccactagttgataaatttccttaaaatttggacttgattgaaaaaaaaaacattagtgtatgggattctcaccaaatatttctcttcttttgtggtccataggataaggagattccatcaagcaatcaaggaataaaacattctagagttgctagtgtcaatgactctgaccaagcgcaaaagaagttgaagacaagcaaaaactaatatgacaaatttctctgtattctttttcacttcctcataaactatatttaattcattcgttttttattattgaaggacccttgtgctacctttggagggtaattaaattcacatgtctgctgggtccataacaacatcacagaccatggcctaggtttattgtacatgcattgttttatgtttagtatgttgggtatatagatctccccacaaaatatttgccatttttttcatagaagcttccatactattgtttgagaagctgcttttttcagttaagcttccattcatgtaaagttctctccgctaatattatttacctttgacgtggtagactttggatttttgtttttttgtccttgaactttctttccttggtctatctgaatgcataagttgtaaagttctttatctgcatgaagcagaacaaaggattctatgaagcccttcactgaatgtaaagagttaatgaaggatttcagttaatgattatagttataaaaagaaaaggaaatagtaaattttttgtt

SEQ ID NO: 222042 - DNA, 2448 bp, Cannabis indica
tctataccatagagttatcacccccaagtttctcgaagcgaaggccggtaaatttccaagaggtggccaagggaggatgagacaagaaccgccaattcttctgagcatttaaggaaaggtgtattgaaaacttgaacccagagaggaattttcagtaagctatccccattgagaacatccaaagaattcgggatgtccataaggatttcttggttgagataagtccaaggttgttgcagcaaaacccgacgcctatccccgtcgtagccaaactcaacaaggaagagaccattggatcggtcagtgatggtcacggggtttcgagagatattattccaatctttggtcattttttctataaagttcttgcggttaaaagatttaaccgtgtgaactttgacaacaaggaataaagggatgggttggatctcagagtcaggagtgttggtgggggcaggctcatggagggtttgaatggtgcattcggtctgtgtgaggttgagagcaacagatagtgatttggttatctcatccatgatgcaagtgaataaatagtgactgagttcgaatgaaataatatgaatgtaataggaccgtgtgaataaggtaaaatgacgactatagaaagtctgaaaaatgaccctgagtagaatatggtgagccgaagacaggggcgaacaagagtgtatttgaacaataatattcgaaaaattaaaaacagggggactatgagctaataaccaacgaactgtgcaaaaatattgacccgaatattgcaacgactgagtgaacttaagaccagtacaataccataacagaaaacttgagagatcagagagagaaatactggagacaatatgcagaactggtctcggttgtgtgcagtgaaagagagacctggggggaactaattgactattacagtgaataaagtatatatataaacagaagtagttaatattggaaagcttttgcagagaataaagcttagatatgataggaatgtagatgcgaaaccaaagggatgttctgcccttatataggaaaaacattttgaaatagttatgaacaaatttggtaactatcacatctgtagcatttactttcgaacagagttgctgcacaagaggatttcgaattgtaccaggcagatcacaattgcagactaacattaatgctatattttgaaaaatttgggcaaaaggaattaaaccttttctggaaattaatataaaatcattttctttacccaaaatccctttctggtatcggttgtcctgaggtaatttaatgggaagtccaaatttgtatctaaaataccctaagaaaaacccatttctctgatgagatttgacagtgaataggaaaagatgatcaaaagagttaatacctgtaagagagtgattaatgcgtgtacggttcgatcgtctgggcaactagccggagttatggcggatgcgactggagtggttgggacggatcgttttgatgcagctgagacggctcggacgagtcgagctgctctgagtgtcgagggaagatggatcggagccacctagatcgagggatctggggctcggcaaaggttccactgagtgggaacgcgtaggggataggtgtgaactcattgtagaggaaggaggaggcctgttcagactttgcatgtcgagagaagaagaagagtctggaagaaagtcttctgtttacatcgtatatttagttgttattagaaaatttatttatttatttatttcgtggttatcaaaataatgaattttttttcttgtaatttaatatctaataaaggttaattgtgtaatttacttagtggaaagcccaaaattattctcatttttattgtggttatagactaggcaattaaagtgtggttcgcgtgatatttctcaatttttgtaatttttataaattttgatttttttgtgtactgattgttttatgtaataaaaaaatataagcaaagtaacaatttaaaagttaacgttaacacagatttttattaactgaaatattaatttttttataaaaaatatagaattttttatatacaaattaagtactaaataaataataaataacataaaaattttaacgtagttttgaagttaaattttcatagttcacaagtctatatctttttaaggataaatatgtttgaatacagaatacaatgatacaatttagcaataacatctcttttttttatctaaaattggtcgttccctttaccctgggttcagtccctatttataaatgtacgaggtgacagttatttctttgggctctactcattcataatcgttcataaaacgtggacattcctcacgtttcattctttatgtacatgggataatattaaataacaatttaactactttcttttatccattgacggttatgctaattgtataggatagttctcgtcgatta

SEQ ID NO: 222043 - DNA, 1325 bp, Cannabis indica
ggagacttttctattattttggtctataattatcaaattaaaaaaattacatttaattttttaaaaggtaatatttttgttagtagcccctacattgttacttgtgggtctgttcctggctataagtatttttatgtagaattttgtaaaaaaatataaaagaaattattttacaatgtaaaaataaaaaaacttccaaaaataataatgcatattactataattaaatttaaaaccagaaatgaaaagttactatacataaatgttttaaatttaaacatagatagtgtaaaagtagtgttttatgaaggaaattttgattatttatgcatactaataatggggaaattaatttcctaaattaatgtatttcaaaattttaaaaataggttcactttacattaaactcaaaaatactcatctcatttgcaccccatagacccatggcatatccacggtgcacccccaccaacccacgacgcactcccaccaacccacggcgcacccccaccgacccacggcatacccacagcgcacccccaccaaacgtgagactcaacccataactaacggtgcacggaggtttgttgtgattttactgttataaagatagattttattagatttagggatagatttaggtttagaatgtcaaatctgtgatttgggcaggttcgatgcacattcgatgtagctcggatggggtctgaggggttcaatgaatctgtaaggttgcgaggtaggagacgtaggtccattggggggggtcagatgtggggttgatgcgaggttcgatgcggggtctgattgtgtccgatatgggatctgacggggtccaatatggggtccgatgagaaagaaagaatgggaagagaagagagagaggggggtgatgtaaatggggagggtaatttgagaataacattaaagttggcctagattacaaatattagtaattataagtttagggaaaaattttaaacgttatgtaagcatatttaatcaaatttctctttataaatatatgttcaaaccgatgtatatttatcatttaattatgtatatgtccattttaaataaatatatattaagggaagtatataagagccctcttaattattattgctactcaatttacttaattaattttcatatcatatctttagagatggattactaataattttttaaaacttctccctatttgcaaattgatagatccccaatccatttaattaaagattagtcaaccacatctattaccatttaaatctttaatcctcttaaataatacacaaatttctttaaatatttccttaaatcat

SEQ ID NO: 222044 - DNA, 3089 bp, Cannabis indica
tgccgcaagcttgatgtattccaccttccaatcgaatcttgctgaaacttcaagtgcttgaactcccttcgatctcattgaagagtgtttgcttcctcccgagacaagatttaaaaaacaatctctcgaaagcttgtaaaactttctcccgaaggtagcactgttattcttcttcttttacagagttgtaaatagaatcaagacaatacaaaatacatataaacagagtaagagacgaacactctctcttatctactaaataaagacactcttttctcaagatataatacaattcaaagtgtaagaaagagatacaagacctaactgttgtaaggtgtatttataatcaatagacaccttattgacagttcatacatggtctaaacaagaccacaactcactagacaatttctatttttgtacctacagaatggtgagcagttttctccataacaaatctgatcaaacatattaggaaactcacagaagatcagattaacacagccggatagacagagaaaggataactccttaaacttaccatttatatattattttcgataaatagaaaatatagacaactttcctttcaaatataaatttcaaaaatataaaagtcaaatacacaaaacatagaaaccaaataaatatcacagctaaaattaattaataaatgataaaatatttatgtcaaattaaaaatgctaaaaatagaattaattatcttcccatttggcactttgattgacaaaatattttataaggaggaaacatacatcaagtgttagagacaaaaacaatatagtataaaaagtactccccctacatgaaaacatactgacacataaaacaaaatagtttttcaatcagaaaagtgtacaaacaataagcaaaataactccccctaaaacaagggtcaataattgtaaccaacaatctaaaaaatagatactactctccctttttgtctatcaaggagccaaagataacaaacaaaataaacaaattcataataattcaacaaaaaacatagatgaaaagcaaaaagataaaaaatgaacaacttaatcatcattagagtggaagaatttcatgatgatgtccatcctcttgagaagtagagcttgactagtctccatccttcccaaacacaaattgaattcagccaattctgttggagcagaagtggaggaagatggagcagcaggttcatcagtagcactaagggaagcaaaccgagcctttttcttagcagattttccttggggagatttttctgggactttgaaagtggtaccaacaatagacgtttcaatggattcattctcaagaatcaactccttttggttagacaatatcttataaatcaagtgaggaaaaataagattagacctaagtttcttgctctttcgaagagagacaatttgctcccaaatcatgtaagtcaaatcaatttttacactagtagaaactttatacaaaaagaaagcaaattcatttgcaacatttactggatcggagcaaggaaacaagttggatagggcaaacctcataagggcagcatgatgataggtaaattgagacatgtgcattgtgcccaagtgttccaaatcattgtcaccagtgaaaaacccgaacaccttttgacattcaaattctactctagctcaattccaaaaggtagattgagagcttcagccacacatccttcacaataaaagaataccagtgtcacttaacaaaaacttttccgaacataaaggagtcctcatcgagactctcataagttatattggcataatactccttgacaatacgatctacataaccatcaaatccgatcaatgtatccatccatcgtttttcttttagcagattctataccccaaaaggattatgagaaataacattaaattttttttctccacagtaaaatttctcttctcataaaattttatatctctagcatgatcattgtaacaaaaataatgagaatgagacttgaagttttcaagagtaataccagaaggtcttttccttttcgcggaagagtagaactaattggagaaatagtgggtcttttttctttgtctttttgttgattagtagcaagaacagtaactagttctgtactgataggatcattttcaggcacttcactttcaaatctagaatcatcagcagagggttgttcttttggaacaaattcttcactagaattagactcaatatcctctgatttttgaaagtgtaaaaataaaaaaattcctaaattttaatgctatatttttttatattcgtaattatatttatagtaaattattttgatcaatactaggtcttaactttaaaatctaaaaattattaactataaatataaaatttattataattgttttataaaataattaaaatacatattacatatgaattataatttaataaaagaataactggaaattactggcagcccatgcaagacatgactccccactagtgtatatatatatccatataatcgtagaaataattcggaatgaaatgttcctatcatttatcaaatccatcgctactacgcaataactcgaatcttggaatgaagatttacaataataaattaatggttatcttaatcttaatttaatatatttaatcaaacagtgtcagatattgttggatcgtccatcttgtgtagattctttccacacatgtagaatgtaataacaaccattcaacaatataataatttttatattccttaaagtctgtattatactcatatagtataagtagcttcttctatatctttgtcaaacaatgactgctctgtttttcaattttttttttcttgttttccactacccaaacatcttgatcatcactcaagaacttaatattatattatattatatttatttattaagaaaagtatttatctaattgtgtaattcttaattgtgttatatagataaaattgattctacttttcaaaaaaaaaaaaaacacactactataaaattgaagtttcccaacgattaataagaggatcaattatgaaaaaccgttgaaaaaagtaagtggagattttt

SEQ ID NO: 222045 - DNA, 2354 bp, Cannabis indica
tattttacaaaaaaatactaattgtatttcccatagtataaataagaccctaaactatttttaatcaaaataaaatataataattattcgattaaaaatatattatgacaaaattaattatattttttacatctcttcgtgttaaaaattgttttcaaactgattatattaaaaaaataaattataaaagattgaactcaaagttctatttatagaatttcaaaaaatacaaaatttattttaccatttaacaaaataaaaaatctattcaataacttttgcaagatgcaaaatagcattcaccgttatttaatggaattgtaaaaaataacaaaagaaaggtctaaaagagctactctcgtttgtgttaatgaaggacaaaaatcattgaagacctattcctttgaggaaattaccaccttccttaatttcctttcttatatttggcttagcaaataaaaaaaggtcaaaataataaaagagatcaaaaaacaatagaacactaaataatatacattatacaacactaaactactaagtaccactactaataatactattcaatattcaacatcatcatcatcatcatcatctccttgaacgttttttaagcctcccaccaaccccaacatccccctcactattatctctccctcgtttattggtagttacctccgtcttggccgcggccaccaccgtcgccttctccttctccggtttcttcattggtctcccaaccgttttcctcgtcttcctactaccctcatccttattactacgtgtcgaatttcgggttaccctttcttgtactctctcatccaatttaccattattctttttcgtcgtaatcatcttcttcttattgatcttctccacttcttcttcttcaccactactaatactatcatcatcatcttctaaaacattatgatcatcatcttgatgatgattattactatgatctgttgagttttgcttcattctcttcaagaaattagccaccccagctttcttcttagcattctctttattcttattactattattactattactaacctctaacaacagagttttactagtgtcatgtaaactaagctcatttactccaaactcatgctgatcatttgtaattttcctcccaataactctttcttgactcctctttttcctaatacccttttcatcaatcgaaacgaaagagctagtagtactgttgttattactatcatgactcttactcttctttttcttcttcttcatcttcttcttctcatcatcatcatcatcatcaacaacaacaaccttttcttcagaagacttactactccttttaccacaagttactataatagattgagaagacttgtttgatttgggagctgatgaatctgttttttctactactacaacttttttactatgatcaatagcaataaagggtcgagctttaccaaccttggctttcatttctttcaacactaagctccttagctcctgagccgcggcgtattccggcgaactttcccggaagaagatgacggcgttggtaaatagaagaagaaggtctctaaagaacttgtggaaaccattcaagtaaacccctttatcaagtctggcttcaatcgttctcaggtcaatgtgttgccgtatcatgtctttgtacctttgagattcctgtcccaattattagaaatcataattatacaagaggggcaagattgtaattttacatcgtggagtaggaaccaaaccaaaaccatacacaacggttattaggcaagaatttattgagcagcgaaataaataataataaccacacatgttttaaagttgtttattataattaaattaatacttaatatataccaagaatttaaaaattaattattagaaaaaattttaaaaagatataagttacgggaattatttaatttataatattttaattttttttttaaattacggtttgagttgttctgttccttattctaaaattttttaggtaagttgttatgaaaattttaattgccattaaaactgttatattagttgttatgtgaattttcatgtgaatttctataaaaaataaaactaaaaactcttataaattaatcttatttaatattgggttgataatatgagttattctgcaaatattagagaaatgaaaaaataaataaataaataaataaaataattttttatttttacaatttaaaataattttttttagtatttttttattacaattagcgctacaacttaaattgtaataaaaaatcgtataaaaacaattattgccactactttagaaacttaaaacataaatttaaaaaaaaaattaaaaaaaa

SEQ ID NO: 222046 - DNA, 3469 bp, Cannabis indica
atcggaccatgtggtctgaccatcggaccatagtttttttttttttttttttccgcgagagagagagagagagacaaagtagatagaggggggtatttttggagttttgaaaaaagagtcatatttttcatagtgtaaaatgtattggttcaaaaaagaaattttgaaaatttttaagtatagaaaatcaaatttccctttcacaatggtgttttatggtgaaatgcaccaaattttaggttgaattgtgaatctttttcggagttaagattgttgcaactttagtaaaactcaagtaaatggcatagaggtcgttagaaattttactaaaatcttttatgtgataattttgactttagggttttgaaccctattcactagtagagagttagccatctccaagaggtaggttaggtgtatgtcgatcatagtgcataataggaagttgagcactgatattgtacaactagacttagtagactttgatatcattctagagatgaattttttgtctaagtatgcggttagtattgattgcaagagaaaaatggtgacgattcagcctaagggtgaggagtcatttgtttttgtgggattgattcagggttttctaattccagcctgagggtgacgattcaaactttgatatcatttattaaattgttcttcatcttctgatttttctttcaaagttaatagtatattttataaaagttcagtcatgcttttcttatgtaagttaggctgttaatattttggtatatctattataatgtatgtcgttaactgcattctgccaataatagtattttatcgatttatgatatataatataatatgttgtcaagttagaggtgagattcaatttatgcaagatcaattaatttgcgcttttattatatataactctcagttgtaattaatggtatagaattgcaactattttttgaattaatatcagtattaaaatagaaattgcatagctacatatctaccttaccaaactctttatctgattaccccctttcactcatcattttattatttttaatttatttataattctacatttttctatttactaaactaacctttagtggtaatttgtctccctatagatacgacaaagtccgtttactaacgcgactgctgtgtaacaaattgggtgatatcatcgtcatttagtatatttccatattgggaagatacgatcctcggatgaaatcttaagagttaagttttgatattgtaggatcttataattaatgagtatgattatgagttggatgtctggacgctcgttgatcacttctttagatgctctaactgaggtcttgcatatacatgttgtatatgagggatgacttactaggatgagatatctgtccaacatccagaagacatgacttactaatggatctagtccattatattggttgggtctgttgttaggcttgaagtaactaagttgtattacttttggtattacacgtgtcttcatccagaaatacaaattacactaagttatgtatatatataatatataagtaatataaataactatgtatataataattatactatatggtataattagtagaataattgtcctaacttggattaaaggggattttttttcttacagttccccggaaacgacactaaaaatatgttgcaccaaaaatggtacgttttaaatttatcaactagcaagcacatgactcttttattgcagtgtagagattgtgaagaacgaggttgaacccatgaaaattgtgtgaaatcaaagaaaatactttttgtttacaccaaaagtagccttgatgatgtggacatcaatgtttgacatgtgacaagaaagatgacatcttggagttgagtagtcctgagtcatagcaagtcgacctgggaggggtccctagccctacacccaggttgactttgagaactccataatggaatcttagacttcaatagctcgtttccaactcacaatcttttaatattttgtaccatgaagacatggagtaaccaaatccaagcctcgggagctaaaaatacatgaacctacaccttagaagtcaacttgggcacttagggttaaacccagctcccaggttgacatcctcaactagggtttcagcttttagaaccatcttagtgaaaatgggtcaaacattgcatggggacatgaactatacataccatagaaatatttcaagcattagaatcaaactcggagaaagttcatttttaagcacccagagcactcggtgcccagacacccagctcccaggttaatttgtcaatctaggctccttccaagtatcagatcgatgatataacttttgcaacttctttgtcttcatcaaaaatagaaaaatatgtacttttggggaagaaacaatacttcctgggtgtcagaagcaaggcctagcgcccaagttaacattttgtcaacttggaccgattctaattatgttttatgagaaatcttccaagcatgttctccgtttgcagcaaggattaagattcaactatttctagggaccaacgaagattctgaagggccataaaggggacctaacggctaggttgacacttggcactagggtaagcccccaggttaacatattgtcaacctgggctgtttccaatcaaattctcaaaaaagtgttccaagaattttttttgtcatctaaaataatgaagattcaagaaaaattagagagaaactacaaacccgagcccctagaatcagagcccaacgcccaggttgacttggtgctcggcctggcgcccaagttgacaatcaatctggtgcgctggtttaaattattcaaatgccaaatttgattcaaccattcaattcagaatgctcaaaatggggtaggagaccttgtcctcaagttctagaacctaggaagtatcaaaacgacatccacaaagctcaaagataagcactcaatgcccaagttgacaaatggcctagtgcactgggttctacttatccgattatgatttcgtctcgaccgtctgtctagttttttacaataattaagatccatgaagtcagagaggtaaaattcacaacttctcatttctcatgtccaacatgggaagaacactcgaaaatgaaaagttttgagtctctcatttccgtagaatagcaacatcttcaagaactggtgaccagctttgccagaacacaaaaatagactaagtgatgttaaaatataacttaggcatcataaagtatatttccttgacgttttattacttacccagtgtccaggttgaagtcatatgtcaatctgggtgctgggatgtcaacttaggcactgggtcatgaacaacattttgtaaaacggtcataactcaatcaatattaatctgattagacgcaattcaacctggatttcaaagctagttgatttctctatcaagtcatgtatcgctcttcaatcgg

SEQ ID NO: 222047 - DNA, 2339 bp, Cannabis indica
agaaaacaggtcgtgaagaacatcctcatcccactgtctcacattcggaatcattagttgagaatctttagcatcaatcaaagcaggatgcaaagaggaaacataaggattttctttatccatcaaccacgactgattcaaaacatccaccaagtccacacttgctacactccacctaacacccgtttgaatcatagattgactcttaaaaatactccgccaaacataactaggattatttccaatactagcagataagaaagaatcttgagggtaatatctagctttgaaaacacgcccaaccaacgaagactcattagttaagagacgccatccttgcttgcccagcatcgatagattatgatcatgaagacttcgaaaacccatcccacctgagtatttatgaacaaccatcctgtcccaagactcttaagtaatgccttaccttgtcttgaagaagagcaccaccaactagaacataaaattctttccatctcttgacaaacttttagcggtagcaagaaaacactcatcgcatagctaggcagagcttgagccactgttttaattaaaacttctttgccagcacgagataacatcttagcatcccaactctccactcttttcctcactcgatctttcaagaaaccctaacctgaagatttattccttcccatagtgctaggaagaccaagatacttgctattatcatcagcctgagccattcctgttattctcatgatacgatctctcattgccacatccgtattggtgctgaaaaagattgacgactttgctaaattgactttttgacaagaggcaagtttaaacttcctcaacagagtcataatgtaggaagcttctccctctgaagcttgacaacataagtaactgtcatcagtgaaaaacatatgggaaatagagggtgcaccacacgcaatatcttacaataatggatcaatttattcatctcataacgctgaataagagccgagaaaccttcagcacaaagaataaacaaataggtagacaaaggatcccttgacgaataccccgagaagccacaaccgggcctatcttctgacctccatgagtgatatgatattggatcgaacgaacacaagccagtataagataaatccaccactgatgaaaacccatcttagtcagaattgcttccaagaaaggccactcgattctatcataggccttactcatatcaagtttaagagccataaatccttttttcccttgagatttcctctttcaatagtgtaagacttcaaaagagacaagaatattgtctgaaatcaaacgattcgggatgaacaaactttgaaaaggagagattatttggtcaagaagcccattcattctattagcaagaacttttgacacaattttatacaacacattacacagcgcaatcggcctaaggtcacccataacaatggggttcttctttttgggaataagaacaagattcgtatcattaagacccgatgatatctaaccagtagcaagaaattgtgaaccgtcgacaccacatccgcacccacaatagaccaaattttttgataaaaggcaggagtcattccatccggacctagagatttatccattcatatcgaaaagagccgctttcacttcttcagcagagaccgctttaaggagcttctgattatgaatagccgagacagatggctcaatacaatcgctaatttcatcccaatgagaatggcctaaagctgaaaaaatatcagagaaataccgaagcatgacctgatcaagacccctgccccattcaacccattgttatcatcttggagtttttaaatgacattgttcttctttctagtagtagtagaagcataaaaaaattttgtgttactatccccatctttgagccacagctgtttagatctttgacgccaataaatctctttttgatggaaaatagcattaagatttttttctcagcttcataaagggaacaagaagtcaggtccctttgtttttcaactactgcaagatcttttttgattaaacaattcggctcttaaagttacctgttatagcctttccccacgttgacactaattcaccacaagcagtcaccttatataccacagatgtacccacactcgcttcccacccatctttgataacttgtaaacacataggatcagagagccagacattctcaaatcaaaaacaatacttgtgagggagagataaataggtaataggatctaagaataaagtagtaagatctgaagaagaatagtcaagattgaataatttagctaaagaataaacattaagccaagaaataaaag

SEQ ID NO: 222048 - DNA, 1533 bp, Cannabis indica
attgaaccttgtaactcattgtgttctcttgctctatttttactcttgctgttattgtttttctagttcatgttttattgttttcaattgatcttgttgatgtttgttatgttcttggatggtgtttgattcaccactaatggtatcagagcacaggttgttgttgaggaaccaagaatcctgaagatcaaagcttgaacacaaagatggcaacagtaagattcgaggtggacaagtttacaggggtcaatgattttggtctctagcgaatcaaaatgaaagcaccactcgtgcatcagggcattcaaatgccattatgaaatcagtccctaaagaaggagaagatgtcaagaaagtctcccaagaaactaaaatgaaggctcacactgcaatcctgttgagcttgggcgatgaagtactttgaaaagttgtagaagaagagactgccctgggtctgtggaataaactttggtcaatatacatgaagaaatcccaggataataaactatacctgaagaagaagctttacaccatgagatggatgaaactaaagaacttagaaggcaccttgatgatttcaacaaagtgatcttggacctaaaaaacattggagttaaaattgaagaagaagatcaagcaattctcctacccagttctctaccaaagaattatgaacattttgtggacacaattcattatgaaaaggatacactgaccatgtctaaagttaaggctgcactcaactcgaaagaaattcaaaagaaggtagatgataaatttaagattggtggggaaggattatttgctcaaggaagatcagaaaagagagacttcaagaaatccaagattggacacaagtctaactccaagaacagaaatgcagtaggaaagaaatgtttctattgaaagaaagaagaccatttcaaggatgattgctacctgttgaagaacaagctcaagagagacaagagcaaggaaagaggtgaagcaaatattgcatcaaatggctatgattctgcagatgtcttagttgtctcaagtgaagattctagtgttgaatggattcttatctctagttcatttcacatgactccaaacaagcacctgtttacaagttatgaagcaaattcagttggtacagttcttttgggaaataacaaagcctgcaaaattcttggaatttgttctgttaaaatgaaaatgcatgatggcctaactcgatctatacaaaatgtaaggtatgtgcctaatctcaaaaggaatttattgtctataggtatgtttgataatcttggctacactattagaatagacaatggcactcttaacatttgaaaaggctcactggtggtagttagaggcagactcaagaatggtctatactacatggttggcactgcaactactgggacagcatcacctgcaatcaataatgacaaaaatgacagcatacatttatggaatttgaggcttggtcatgtcaatgagataggcctcactaagcttgaccagcaagggttgtttcaaggtgga

SEQ ID NO: 222049 - DNA, 1875 bp, Cannabis indica
agagagagagagagagttttagatgtaaacaaaacaatgaaataagtatctcaaaatttgtatgtacatcaaatcaatatctttattatatacataataaacattgattgagttagttattcaaatttgtatattattgatatacatagatacatacatacaaatttgaataacggtcaaagtttagcaatcataaatacaagatggtatcagataacaatttctgttgttagaacaaataattgataaccaagaaagcaaaactagtcaatgcaattatatagacaaaatcttcaaaagaaaatcaaactaaaagtaagcaaatgaagttacaaaaataagagaattaattgtaagtgtctatttagaaactgacttgttgcattctttaactcaaattatttccactatgaaatactctagttgattggttctgtatcatccaagtttgtatgtagcccaatctaagaacacttctaagcttaagacaaaattcgatagatttgaaatgcaaacagctactcaattatggtaatagcttgtatttacatgtctcacaaaatatgtttgttcatttcttaggtttgattgctgatgttgccttcgctgtctccactctttcaatttattccaattcctgttagtgatggccaacatgtaggattacatattgtagctcaaatatggttaccaagatcattaagacccttgatattccatttcaaacctttttaacagaccaagctagcaaataacttacatattcgcaagtaaaaaatgggaaggtgttaatcagaagggaaaggtaaacctcgtgctagtttgaagtaatgaagaaaaattagaaaaaggtgtttaagtgaaacaaataaagaaattgtgaaatctaccaagtttaaaaagagtaagaagaggcaatacttatcaagtggaaggtatcacctcacaacaacataaccaagaattccatctaatagagaaccaaggacagcaccactcaacaatagaattttggaacagaaagcaagatccacaaccatctcatccttggtcatttcagtactggaaaagaaacaacaacacttattccactaaatacaggatgcagaatgtaacagagaaagaaaaattggttcaaagatttcacaacaagacatatttccagaagttgctcccgcaaacactgagtcacatcatgggttgaaacacaaagccctcaagtcgtatttgaacaaacacaaacatatagatttagcagcattatcaagctttaaattgatttagtgcactcactctttgatgttggtcctttaaatcgtttagcaaaagaagataacaccagctgcaacagtcaatagaatagttccacttgcaacagaggctatgatgatacttcagtttgctgctgctgcttctttactggtagagatgcaaattccagacctgataatttaaattttggattatgttatatatatatgtaagtatgtatgtatgtatgtgattatttgataagtgcttgtgacaatgtttcataccatgtgtcaagttttgagttgttgaagccagatgtatttccttggacaatcttttggttacagccaatatatctagaatcaagcaggtttttagttgctacacacttgattattgtcatttgcatacaccataagttgatataaattaatatgggacttcactaactttatgtagtagaaaaaacttacagcatttccaaatgtggcagcattaaaagagatctgggaaatgacccactaagatcattgcttcgtaaatctctattggaaaaatgtaaatcaatcatgagatgagaaatgaaacaaacagtcaatactgtttgaaacatgtaattgc

SEQ ID NO: 222050 - DNA, 1382 bp, Cannabis indica
ctaagaggttcgaaattattcaaggaagaagaagagggtgaaggtggcggctaggtttagagagagaaggctcaggtttttctctgaaggaaacaagatgtgaaagtgtatatttcctaaagccttcactatctatttatagcataccacatagggttaggcttgaattatttggcattaaaataatgaaaatatcagatgatatttcctataaaagtggccggccaaggctttatggatttgggcctcacttttgcaaattttgcagttttatcaattctgcatcttactttctcaaaaatgccaattttcaaattcaaccatttaaatgccaattctaactatttaataactatgatccaaggttgtagcaaccttgagaccctaaacgggaaggcctttcaagaactcacatcccttcagacattggatattagtggttgtccaaggctggggtgcttgccagaagaagggctgcctacatctcttactcgtttatatattgatggatgtcctttgttaaagaaacagtgtgaaagagagaaaggagaagattggcctaagattcaacacatcacaaaagtaatattagacggtgcacgtatcaaataaatgatgtgtctgcattctgcaatggtctctcactctctttttttctttaagtacgtaaggttacattaatatcgtgtttcttcttttatttatgatcagatcagaatgatcaatccaaataccaaattcagattctaacacctcctatcctaactcattgcatgtgcagaattcaaagtgaaatctctacttaaacttaaaacatatatcatcgttcatcaaggaagtatgatattcgtttgattctagttaaatgtgtatatatatatatatctctctctctcacacacacacacatattttagtcattgttgacattttttttgatgaaccgtagtccaagcttgtgttttctctgttttcctaatttcctaatgctcttatttcaagtgttaacccattgttctctatttattgaaagaaatattctattatgtgcaaaatatatttatttatgcttttgatgtaaaagaaatgatatatctactgtccatcttttttatttttattagataatataaataatgaaatacttttgatgtaagtaactatccctatcgcgtttagaagctctgattaggcacactgcaagaggttgcttattattgtttcatcagcaaacagtcgtgtctgaattaacgtgatttcaaatttatcgttccttgttgcttaagtagtgaaaggtttaccatgtttaacttggtgatgtctttctttcctttcacttttagattttgttgtttgaaatatgataatggttcaattcaaat

SEQ ID NO: 222051 - DNA, 1910 bp, Cannabis indica
cttgaaataaatatgaaaaaaagttaaaagttttcaacaatacaataattagtggactttaggctggacatttcacatattaaaacctaaaaaaatataaaatatgtattttttataatacgaagtgcaatgcagtttgaaccatatattaacaatttaaaattataaatcgcactgcatggtttagaaaaaattcaaactacgactgtaccacaaaaaatttcaaaccaccttttttttggcagtgcgaatgatttgagtagtttaatgaatcctaaattctaatcttagcatagcaaccttaaatttgtagtagtattgatgcccataattaaaattatcttatagtgttgttgggcaatatggcaagaataattgcatttgtttttggtatttattcgcaggggtgagcatcggtcggtttaatcggttttttttctatataaaaatccagaattcgattttcaatctagattagtgtaatttaaaaatcgaccgaccaatccaaaacctatcttaaatccgatcgttttgaacctcaatttgatcaatttaaaccgcccaaaccgaacttcttttaaaaaaaaatatgattcaatttattctataaacacattacattttacgactacaaacatataaatcaattattcaaaaactaattattttattcttttaactttaataataatataataatatattattaataacggaaaaaaacttaataaattaatatatatgtataacaatcagtatcgatttattctcgatcgatttattactaaacaaacaaccgttcaatgtcgattttaaccagccgttttttcggttctgtcagttttgattccaaaagtgttcaataggtcggtttgaacgatttttttaattttttaaattttatgctcagccctatttgttcgtgttaaaaattagtttctgattatattataaaaaattgaaaaaattgagctcctaatttattttatattttgaaaactcaaattctaaattatcacttaacaaaatataatttataatttttgcaaaataaaaaatctaaaataatatttacctaattttaataattttaatatatattttttgtgtggacaaattattatcattagttatattagataatagacaactaaatctacttatattgtagatctaataatatcaatagtaaactatcaacatacctctttggccttgtaaagtttgccttctcaagctcgtcatggtttggagatcatttgaaagaggaaagcatgaggagtattatatcacatatttccacgttggtactataattttcacttttgttttctaccactaatattaggtgaaaaggctataagaaaaaatttggtgagatcaacacaaaactataagtttatatatatatatatataataaaaaaaaaaacaccaaactttaccaagattgttgttagaacaatttgtaatatggttcaaacaatttgaattcacacatgtgtgaatcaaaattattttcaacaaatttttaaattttattgtgactaaaaatcttagaaaagtttactaaactctcacacaattgagaagattgactcctcatcctcacttgaaaaaaaaaaataaagaaatcatattaatcttgcctgaatttcaagttcttcagatcccaccagaattggatttggaatgatggattccctactttgaaaaacgggaggcaggcttctctactctagggcatgaaaagacaatttatagtgaaagatgatcaactctagggtttctttatacatttgaaatgaccaaattgcctcacaacctcacatgtttattgcccaacgaagggttagaaactgtcaaatcaagtttgttagggaataatcatgatttaaaaaaaaatcaagt

SEQ ID NO: 222052 - DNA, 864 bp, Cannabis indica
caaaatacttacagcaatcgaaagtttgttttaatgatgagcttatttccttaacagaggaaaagtgaaaacggcttcaagatgggttaggtaacatttgattaaacaattggagttttcacaaaacaaaatactataaaggatcaaacttttgatctgggcaacagctaaactctaatcagaaggtaaatcataagcttcataatatatatgggcaacctttaaagttaataatacataacaagttggtctattagttacaaatttgggaccatttgcaaaggcacatagtgtgttatatattattatattgctttgctaaattaaaaaaccaaattagctttttgagataaaataataacaataagacaaataaatacagctgtatagcttatatcaagaagataatcagtattatatagttaggatactataaaagttgtaccaatattgtcagagtaaataacaatggatgaatagtaattatgaacgaagaagtaagcatgtgctaatctgttagtgattaacatactttgtatggcaataaaatattataacattgacatcaaaatattataactactcttttgctctcattctctcctatatagcttcctctctgaatctttgacaattgtgtgtagtgactgagcttgttaccgatggctgagcttgtgattggtgctgttctctctgcttcttttgattttttgcttgaaaagattgcttctccttatgttgaggagttcttcttcaagggaaagaatgaaagtgcatctgttgtttctgagaggtcttttcaagttgaagtcaaccttcaatgctcttgctgctgttcgcttcagtggagacaggagaatcaaa

SEQ ID NO: 222053 - DNA, 1548 bp, Cannabis indica
aagctccacacgcccaagctgacaactaaatgtccttgttaataaatgacttctttaatgtttttttttttggaagaaagacgtactcaagtaaataaattggttaaatctgacggtcattacataaaatatttgtcgaaatggaagttaacgagataaccccaaacctcttgtgggtaaaagcccacttagtcacattatgagcggcataattacaatccttgctaatataagagaaaatacaactagaaaacaaatgagagtaactattacaaaatgtgacatagtttccaataccccagtgagactccttcccattgagcatattgataactaccctcgagtcgctctccacaattacaaacttggcaccaatatccttagcactcgaaatggccaaacaacaagccgccgcttctccacacagagcatcagagaaatcaacaaaggacgtcttgacctaaaccactctaccaaggtggttcctggcaacaattgaggagcacatgctatcaagcccaactctaacatcgcaattaaacttgatccaatcttgaggaggaggagaccagctcaccgtcgaataagggctaggtaaagggaaaattgtagcatgtaaatctgcatagaaaatacaaatatagtaaatacacttcttcacatcaacaatatagttattatgtactttgtcatttcgagtgcgccagatgatatcaaccacaacagacgcatatgggaaaacctcatccgcattaatccccttgtgtttaagatcccaaatgaatttgacccagtcccacatacggattctggtgtcacagaccggataaataccctaaggagaaggctgccagccatggaaagccacatcacaagtaagaaaaaaggtgttctaaagattcatcctccttcccacacaatgggcaactcgcatcctcaatacgaaatctttcctggatcacagatctgacagggagggcactagagagaatacaccaccacataatcttatggcgctccaacactttactgttccacaacttattccagagagtgggagcaacctcacagaagggagatctttccaaagcctgggtaagataggcagatttgcaagagaagcgcctgctactttcaaaggtccacacccactggtgtttaccggtgccagagggggcaccaccttttaaaattgcagaaatattctcacgatcgaaaaggttgttcaacttgtggatatcccaacctccttcgttcgaaaaaagctcagcaacacttctgttgtccatgacgggagaaccatttggcctagggaggaaattacgcatacgaggaatccaaggttctccccatatacgcgtgtccctaccatcagccacccgcttacaagcatctttctttaaaatggacttagacttaacaatatttttctaaaaccaagaatcagactccttataactacagttaaagaactcctttcttttaaggtattttgctgctagaatcctacaaaagaaagactgacttccgttaagtatgttccacccc

SEQ ID NO: 222054 - DNA, 2011 bp, Cannabis indica
agtagtgttacattttctatttttcatttctttttactttgtccttttttttttttccaatgttctctttgaagtatttttttttttttttggagagattctctatgaagtattgatgtcactctttgttgtttttattttttcattcataacacgtcttagtgtaacatatatatcttgttgtcaactctcaagccaatctatgtcatggtcttattatatatacaacgggtacgtgcatagcacctaccatgactaattataataaatacatatacaaatcctacactaattaccaattaacgtgcatgcatataatatatatatttatatatttacattagttatatatatatatatgattatcatgggttgagacaaaaataaagacagcataccaaactcaccagacctaaaagttaaaaacaggcgtacttacacttacactacggtatagttatagcagtggatatatagtataaataagacagacttcctccatcaaaataatcattgctactactcaaccctttcccaacaataaccaacattacatattataattcttaagctaccttatttgtaattatcatcaaacttcaatactgctgcaatggctcctcaactaaacaccactgaattttcggttgtaaaagaggaagttgagcttgtgaaaccatctaaagccacaccttcagatgttctgtctttgtccactcttgacaacgaggccaacctcgaatgcttttccaaagcaatctacgtatacaaggcccaagatgagactaatggcgtcaaccctgctgagatgatcaagcaagctctctgcgacgcactcgtctactactaccctcttgccgggagactcaaacggctagaccacgatggaaggctccagctcacttgcgacgctactggcgttccctttttggtcgccaccgccaactgtcgcctttcctcccttaattacttggacgatattgatttcgagatagccaagaactttgtcttcccttctcccacgagtgactgccctattgtcctacaagtcacccgattctcttgtggaggtttcaccattgggtttggaatatctcacatggtctccgatggtttcggtgctgctcagatctttaaggccatggctgagctctccaaaggcaaagaactctcggtgaagccagtatgggaaagagagagacttgttgggacacccatcaaggagcctgtcaatttcaactcgtgtcctcctgccacgtcaccttacatgccctcatcagacattgttgatgaaatcttttacttgaagagtgataccatgaagagactcaaagaagatatcatcaatggtggttctcccagtaatattactacatttgaaatacttgcagcctttgtttggaaagccagattgagagccttagagctcaaccatgacgggaaaacatgtttgtattttgctacaggggtgaggaagctcatagacccccctctacctgaagggtattatgggaatgcatttttgacatctgcagtggaactcactggcagagaactcgaagagaaatctctatctaaaatcgtgaatatgataaaagagaagaagaaagacgttttggacaacaactacatcaaaaagtctattgatatttgtgagacaaaattagctcacggtgataatccaaagattaaagctacgggagcactcatggcgttgactgattggagaaacttagggttggtttcggatgagtttggatcaggatggaatatagaaaatgtgacatcattgccatgggactgttttggatcagtggatttgtgcaccttcttacctgctccaaaatctgatccttcattaaaggtggggttgggatattggtctctcttcctaggcaagccatgcccgtgttcaagcgagagatagatgctcttcaataactaccataaaatgggtatacgatatgatataagatttttaataaggccggggagtgttataaatattaat

SEQ ID NO: 222055 - DNA, 1731 bp, Cannabis indica
catgggtgctaatattatgagttctccaaatgtagtggaagaaaacccacgtgagttttcttcaacagaggatgtttcaagggagagaagaatctcaataacccagttcaagtctctgtgccatgacaggttttttgaagccaaaactaataatacagtagagtgttgtgtttgtttatgtcgttttgaaggtgatgaagaggttagtgagttgtcttgcaagcattttttccacaaagggtgtttagagaaatggttccataacaagcatgaaacttgccctttatgtcgttcaattgattagtcatgcaattgtgtatgaattctgaaggtgtttcatagaaaaagattagttcttcacactttgggtttttttttcttggcttaattagcttagcttagcttagctttgtgtgtgtgttgtgttttgtgtgtgagtagattttagggataaccattaagggattttagcatcttctgtactcactatactatacatgttttctatgacaatgttcctaaatcatcttcagaaattcaacttaagaacattgaacatgaaagagcttttttcatttaacaaaaaagaaaagaaaataaaaaagtagcactttcttcatcatttctctattatgaaagatagagcactaataataaaacaaaactactcattttagtcccataaaaacagcctttaatgctactttttttttttttctttctgttatcagatgcaaactggtctatgataacattaatggaaaggaaatagtatgtgttatgtatctttacttcaattacagcctagtaaatgtaattctttgttcatatgtgttgaagagtaaaaaaaaaatgactaacaaagtggagtgtaaataccaagagaatggtaacaaattacaatcatggggtgaattcattttaaaagcaagaagatttaggtaaatattattttggatcttgtattttgtaaaaattattgattggactttttattttattaaatgataaaataaattctgtattttataaaatgataaaaataggacctaaatttaatttttgacaacttttttttttaatataatcaacttaaaaataattcttaacacgaacagatacagaaaatgtaaacagttttattataacacttttggattagattattattaaattttatgtaaacaaaaaattagttcaagattctatttgtactattttaaaaaatataaaatttattttatcatttaacaaaacagatcatcttgataacttttataaaaaacatatacaaaatagtattagtggagaagaatttattaccatggtcaactcttaaaaggcaaatagataaagcatttatgtatacatacatatatttatatttatatttatatatatttatgtatgatctgtggaaagctgtatgtagcacatagtattgtattgggaccattttactattatcactggccaaggactagaatttctcagtagatgctttgggatacctttacctctgtctatagcagctgttatggtcctcaatgaaactttgttacttagaggattataattatatataatatatactattgggagaagatgaagtatttttatggatgggagaacttttacctattgtcattgtcattgtcattgcagaatcagatttttatgctaactttctttttttcctactctataccccccacactatcgataaacatt

SEQ ID NO: 222056 - DNA, 896 bp, Cannabis indica
ccatatttcgagcattaaatatggacacaacacgtggatatgagtctcaaagattgaggaaaaatataaacgtgaggaatgaaataagtttctcacatttggatgtgttgaaattaatgatgcatttgtctcgcattgtattataatatggttatccaataaaagtgataaagttataaatacaacaattagcaagaacacaacatcataaggccatctcaaacttgaccgagataaacaggaagtgaatagagtacaaagggatgaaacactagaaatggtagataatgagttctttaggagcttgcagatcattgatccacatactcatgagtatgttgaaagactaagagatatgagaaaaatacgatccatcttagaatgttcatacatgacgcgaaaggattgaccctaagggatacaaaagatacaatcttaaaggctatcacaagacttgtcacagatagaaaaagcaaggaaatacctcaactatcatctcacggaatacacccagttattttgaaatattattgaagaatgtgaggaatattttttgtatattatctctgaaacttctttttgataaagacaaaaataaggttatcaatagttaatttatttatcccatatgttgtaaatataaaatgtgagaatggtccacatttcataaataattatctagataagatagaaaaggaataactgtcatttctaagaatcctataaataggaacaaaacctacaaagatggaaagaataatctttttgggaaaaagaagactctaacagattaagtattggaaatgtctagatatattatcttgtattcagaaatactataaaagaataatcaaaaataatgctgactcgtgaattatgtagattttaactacaaa

SEQ ID NO: 222057 - DNA, 1910 bp, Cannabis indica
attttattaaaaaaacgttgcctattttgtttactacaattttaaaccatcgggaatactaaatttttcccgacggttttaaatagttacttaatttttttagcgacggtccgcgaaaaaaatagtttttaggaccgtcgcgaattttaatatttgtagtagtgaactttcaaaaccaacatgaccctggagtgaggagacagatcagggagaccctcagaacactcaggaagaacaaccaagggaaactaaggatgcccttggagatgaggaactgaatgatcaggcacattgtcaagaagtgcctcggagaccccagggatttacaacccagaggaaatgaaaccgtgatttacaagagtcttcacgtagaaatgcgagcagaatgcaaccccagactagggaataggaaatccttcgtggtaacgagagagatcttgggactcaacctaggataggtgggttgcccccgagacaccatcaacatccttctcgcactgatagggaaggggcacatacaaatccgaatagggggcatgtatcaacgcattcccaaaagagaaggccggtacatgacgaggcaagctatagtttgggacatgcaagaactcatagtcgatctacgtgaggaggggatagaactcatcgcagtactgaacgagagagtacgggcacaactagaactgaaagttacataaggacgaagtctgtaagtaactataatccacaacggccagatctttgtaatcaactaaaccagaaaaaacctcacctacgtcaacaactcaatcaaaaacaagaggatcctatccaattgcgaattatatagttggaggacaaattcaggaggtaccaagatgggaaatttgagaaactgcctggttacgactcggacgaggagcccaagcctttccacccggacattatgatcgcagaattccccagggatttaaaaagcctcatgtctcgtcatacgatgggactacaaatctggtcgtgcacttaaataattttaatactatcatgcgagtaagcaatgtaacaaataatttacgctgtattttattccctaccacactagttggggtagcgagcagttggttcaacaaatttacccatcattcaatcacctcttgggaacagctgtctaaagactttcagaagcagctgcaggcagcaagagacaaagacccaaagcgtcttctcttactaacataaaacagtagtcgggcgagacacttaaggcctacttgagtcgtttcagtacaaatactgcgagggttagaaattagaatgacagtatctagcttactgctctctaagcatggatcaagactgatccctcaactgctggaggcgagctgtgggatgacttgcagggtcgccctgtgaaaaacattagtgagttcaatgagagagctcatgtgtttgttcaaaaagaggaagcaaggaaagagatgaagttgttaaagactggctcgagaagtaaaccctgcagtgtctcgacaagcaccgtcttgacaaaggctgacaatccaggaggctcttgtacaaaaaggaaagatgactctaaggaatcagctaaggacaagaaaaagtagaagaagcaccacaagtacgtgccaatcaacactatttataccgagcttaatgaaactctggaaaatatctatctggcacatgagcgcagggtcacattccgtaaacctgagcccatgaggcatgcgagacacaaaagagatgcaacaaatttttgtaagtatcacaaggacattgggcatacgacaaaagaatgtcgtcaattgaaagacgagatagaaagccttatctcgcaacgttacttctggcaatatgtgaaacgcaaaggtgatggacataaccagccaaatctgcccaataacctaggcaac

SEQ ID NO: 222058 - DNA, 1573 bp, Cannabis indica
atccccccaaaagactctaaatggatgaatagtatttaaaataacctaacaaattaaaatcacactaatcaataatttaaagaatcaatttaagaatattaataaataaattaattatatttataagataaatatggacttatcattaatcaaattcaataaattataaaataccaactaaaattaactattttgtcaaaaaaagtaacaaaactaaattagcttataagtaaaagataagaaaacaatgaaataaaataatagaaagaaaattcttctaaatttattaatataaaattaaaaaacaaaatccaaatttatttgtaaaaatctgtaatagcacttttagaagttgtatcaatgaaccatcgagccaataatatgcggcaaaccaaccaaataatatagtataaaatagccaaaacaaaatggcacaaactagctaaaaatatggcacaaggcaaccaaactcaaaaaaacaaaccaaatatagaactaaataatcaaacaaaaggaatactcaatatatatatatataatataacatatgagatatgttaaagaaaaaagcaattaaagttaatacatttaattgtaattttactgctcataatatggtaaattgagcttttactcacaagttgtacggttctattccgattgactcggttccggtggaacttttatgtaatgacggagaggtccaatttgtttatttaatgacatgaatacgcttattttcaaaaaacaaaagttaatacatttaattaaaataaaacttaatctagaaactaaaatttatatggaacaataatatgactaattagtcaaacctaacaaaattggtaggaaaaatgagtcactagaaaccaccactttttgaatacatcagattcttcaactacgattcttcaacttccattctttcaactactataacggatcaatcatattaagcagattgttaaataaaaaaccaatcttctataataatccaaaaaaaaaaaacatatataggtaataaattttgaataacttttatactgttattatactgaagttcggttattgaccagaagctaatatatgtcttacaaaaggaatatacattagctcaaagaatataaataattaaattgcattatttaatgtggtttaattaactcgttccaattaattaaaattgatataaaaatttaaactcgcgaactatataagcatacacgagataaaaataataactattgacaatatagttgacgagacaatatgtcaatctcggaataaacagagtatcctaataagaacctacaagacgagacatcaaggagcttgcaactcattgacccacatatttcataaagaatataaatacattcactgatctcgctctttatataacaaagtagccaccttgcaaataactctatgatataaaggacacagcgagaagaagaatatttatacttagcgttttctcttataaaaacaaataaaaagaataactcacatttaacgagaaataacatttttagtcagcatatataacggtttaaaggataaagacaaagag

SEQ ID NO: 222059 - DNA, 2160 bp, Cannabis indica
tctcactccattactaaaagggtaaagatcctatcccattcaagtatgtaatatacatatagtgcaatctattctcttaagattgcttctttttgtcaaaatttcggcagcactttccttcagttctcataagtaagcaaattattaacaagtctgccaacttacatgaacgcgcaaggagacgacgtaccaaaatctttaacaaaaaaaacaatcaaatgagcaatagatcacactaaatgtatacaacaagcccacactatctatggagacataaaaagtcttggataatttggagaagcgtatttaagagtccttactgacttaacctctccaaatgggtctaaggaaaatagtgcgcgtgaaagaaaattatcactaggtgataatacaaatataaatgttctatcctataacaaaagatatcaaataaagataagaattttattttacgttatgttataatgtcttatgctattttatgtaccacctataaacttttattattaattttaaattttacaattagtttgaattaataatttaattcgtcaatttgtcaatttttaatttattaaaattaaaacttattttcaattttaaagttaaaaatttgttaaagtttgaaaattatttttaattcaattttttagttaagttataaacttgttaatatcaatttttaattatttattataaaatctttatttatcattttaaattttttaactgggcgaccctgtaagtcatcccccagctcacctccagctttcgagaggttagtcgtaatccttgcttgaagagcagcaagctgaatactgtcgttcaagtttcttaatttggcagcggctgtactgaattgacttaagtagtccttaagtgactcacacagttgctgctttacattagtaagggaagacgctttaggtcgcctatcccttgctgcctgaaattgtttcttgaaatccttagacaactgttcccaagaagtaattgaatgatgggtgaatttattcgtgacattgctggctcacatgatggtatttaagttgttgaggtgatcaactacgttcatagtcccatcgtacggcgagacatgagggtttttgaatccttggagaaattcataattcataatgactggatggaaagactcgagctcttcatccgagtcataaccaggcagtttccaatattccccatcttggtatctcttaaatttattatccgactcactgattcgcaattggattggatcctcttgctttccattggcatttagttgttggcgtaaattaggtgcattctgatttaagcgctagcgcaaattaggttgtctccgatttaaatgttcacgaagatctggttgtcttcattcattgttgcttatggacctcgtatctgagtaactcttaaatttcctactccttgtattactcatactttctcgatcatcactacaccgaggtttatcccctcgtcatgtagattaactgtgatctcatggacctcgtcctactcttggacctcatcctactcatggacctcgtcctagagtaactttcagttctacttgtgcctgtactctctcgatcagtattgcaacgagtttcatcccttctttgcgttgatcgactacgggttcttgtgcgtcccgagctggcactcgccacgtcacgtcccgaccttctcccttgggtatgggtcgttgcatgcccctactggagtttgtacgtgccccttccctgttcgttcgagaaggacgttagcgatgtctcgctggtaacccacctgtcccaggttgagtcttaagatttctctcgttctcacggggatttccagttccttggtctcaggttgcctcctgttctcatttctattagaaggctctggttggtcatttggttgtttattctgaggggaccctcagtttccccaggttattcttcctaagcattctaaggattctcttgagccgtctcctgcctcttggttcgtgagctctgaggtctacctcacagtctcatcactctaggatcatgtaggttttgtgtgttgttttcctatgttgccctggccgctgctgcctttcattccaactcagtgtttcacgtgtttctctcctctagattgtaacgccctaatgctaaggcacgctac

SEQ ID NO: 222060 - DNA, 3068 bp, Cannabis indica
aagtagtaattaatagtaatagtaagtgtcgccgcatatatataatttattaagtttttttagagcatttgtttattttgtatgagtaatgcttagaggtgactatttttatatttggttagaaatattttctaaaacttattatcgtaagttatatgaaatttgatgcttaattgtaccaccaatagctatatgacattgagaagggtactagtaactactggtactttttaatatttttcttatttttttgtctacattttatatgtgaaatgctaaaaaacatcaatggtgtttaatacttttctacgtgtgaatatcactattggtgcatttaagtatcaagtttttatataattaattaatataataacttttaaggagtatcgctaaccaattataagataacaagtctacccaataacaatgctctattttatctcaaatttaattttatctaaggccctattaaatactttgtgaattgttaaaagacattactggtacttagtatcctcatcaatgtaataacactattagtgtaattaaatatcaggtcctatgtaacttaaaaaaatagacgttaattaaggaatatcactaatcaatatagtggagtaccacacctataaaaaagtattaagcaccactggtgcccaataacaatgctctaaattcttcaccaacaacagtctttaataaaaatactaaacatgattattgagtatcgggtgtactaaacatgaatactggtgtaattaagtatcagattttatataacttaagaaaataacttttagaaaataatatcgtcaaccaattgttggacgccacctataaaagatattagacaccagtgatgtttaataacaatgttatttaataaaagtagtaaagatgttaattaattaagtaattaatatggttgtaattaacagctgagctattgggatttgaggattatattccaccatatgcaactgctcgaggccaacaaattcttggaggagtcaattttgcatctgctgctgctggcattagagaagaaactggtcgtcaattggtaattaattaacactaattacttaattattattattattattattattaattattttacttaattaataaaacattatatatatatagctttttagttttttcatcatcatttctatttatatttatatgcatacacacaagtttattaggtccgacttaagggtgaggcagcaggtgtccacacctaactctttaactaaacttaaaaaattgtttaataaaaatatttcaaatttatttattaaaaaattcatattttttatttttattattatttatcaaaaaaatataaattttcttgtaaaaaaatactttatttattttttaaaatattacatttaatatttcatttaagaaacatgaacttattatatttttaaaataatatattttagatttttaccgatatatataaaaaaatttcttaaataaaaaaaatactatatatatattggcttaatgtttataattattagagatatttaattaatatcacctaagaattatttttaataacctcttcattttaatcaaatgattatgatgtgtagtcttatgcatgcttagatagaatttccaaactttttagaaaaataccataaatatatataatttcaataaaaacaagaacaacaacaatttagaaaaataccactttatatataatagttagaaaaatacatttttttctgataaaaataattttaattttctttcattatagggtggtaggataagctttagtggacaagtagagaactatagaaacacagtgtcacaagtggtggatttgttaggagatgagaacacagctgctgattacttgagtaaatgcatttactcaataggtttaggtagcaatgactacctaaacaactatttcatgcctcaattctacaacaccggctctcgttacacccccgatcaatacgccgatcttctcattcaagactatgtccaaaacctaaggacattgtacaattatggggcccggaggtttgcactttttggaatcggtcaaatcgggtgtagccctaacgagttggctcaaaatagccaagatggaaccacttgcgtcgaaaagatcaactctgcgaatagaatctttaacgcgaggttgaaggggacggttgatcagttgaattctcagttcaatgatgcaaggttcatctacattgatgcttacggtatttttcaagatattgttcaaagtccttccacttatggtaactacttcttctcacttatggcgtttttgatattttttttgagaaaatggcatttttgataatttttttgagaaaaatggcatttttgataatttagttttgcataatttttattagtgctagactcagtaaaattgtggaattatatggagcttttgacaaaactattattattatttttctttgtacatacaaaagtggtatttttaaaaatttatataaatagtgatatttatatggtctaacatcaaatacaaagtatatataagtgtaacataatatattaaattaaaatatgtgaaactcgtaaaaatgttatctagtagtattaaacgttttgttacacgtgtaacgtatcgtaataaaaaatgacataaattaagattagggtttgattagtactcgaattaattatgattattattattaataatttttcaggatttaaggttacaaatgctgggtgttgtggagtaggaagaaacaatggtcaaattacatgtttacccctacaaacaccatgtcaaaacagagatgagtacttattttgggatgcatttcacccaactgaggctggaaatgttgttgttggaagaagatcttactctgctcaacgtgcttctgatgcttacccaattgatattaaaaccctagctcaactctaatcatcaaatatatatacatatctcatgattatatatatatatatatatatcatgatatgtgatgaatgagttctagtactactataccatactactactactactacta

SEQ ID NO: 222061 - DNA, 3220 bp, Cannabis indica
tgaaatacgcgttcattgataatgaaaattagaccttatgatcattacaaaataaatttttcagaataaaaggaacgttcaagctactatttagtccgtctataaaaacccacttaaccacactatgggcggcaaaattataagatctaagaatacaaagtaaaaacacaaccatcaaaacatcgaaagtttcaaacaaaatgaagaatagttctcgatttcccaacaatgtgatagctgattgagggaattgatcaccactcttgagtcgctcttcacaatgataaactcgtgccctttgagcttcaatatctaagtaatacgcagccgcctcgccataaaagccttcgaaaacttcaatctagccttagaaatccaaaccactttgccatagaagttcctagcaaccaccgcaatgcaagaactttccaaacccactttaacatcaattaattttaagccaataatcttgaggagggggctgccaatcctccgtctggaccgagcaaataggaggaaggagagtaccttttagatctgcataataatagtgggtataatcattacaatgatttacattaatcaaacaattattgtgaaccttgtcattcctaatgtgccaagtcgtatctgccacaagagaagtgtacatgaagacttcattcacattgatactcttattttttaaactttagatgaatttgacccaattccacatacggacgccaaaattagtcacaggatatatctccaaaggtagaaagcaaagttacacttaaggaataaatgctctgtggatcctcctccaacccaaagattaaaaaattaacatcatccacaaagaatctcttattaataatggctcaaagcgaaaggacattagaaatgatactccaccacaacacattgtgcatctccatgactctactattccagagcttgttccaaagtgcaagggtcacctcgcaaggagaggctctttcaaaggcttgaataaaatagacagatttgcatgagaacctcccatttttattttttagtccagatccatttatttttcccttgaccagacggattgtccctttttaaaatagttgatatggtaacatcatcaaaaagactccaattttcgacggtcccattccccattgacagttaacagatcaactaccttgttaaagccatcaacatgacgaccattaggttttggatagaaggatttatcatgagctacccacggatccttccaaattctagtatccaatccacatcaattcttgcaaatttcattctaaaaattgtgctgcactaaacactataaataattgccacagtggtcttacaatacattatttatttaattattaaaatattttcacactaagcttttaattaaattcatatattaatataaatataaacattatataaaatttaacatacaccaaatttataaatagctcataaaatcacataatcataactaactaatctaacataattaaaaaaagaaatattaatttaaattatttccaaatttagatcatatatatgtgttcctaaatattggtgaatatttctatcatgagttttaacatgcctttgaagcatattcgaaaagtcataaatcatacaattcatatgtattcatatgcaatatgatacatgcatatacataatatctttcaaatcatttcttttttgaaaccaagcccagcaacttaccaaagacaaagaaagaggaaatatttctattggggcatcgatggggtaaaccaaagggactctgatactctagtcagtacgattgtaatagaaaatagcaatacgaaaaataaataaaacataaatggcaatcagacggatgactggatgagcaaatgggcggacgggaggttcaagtacgatggtggaactaggacaaggtttagaacagatgaccgtctgattgaatgaaagcaagtgatcatagtgagtgtggaacgtttgataccctgcttctgctgtatggttttcttttatcatgatatttcaatagcgttgcccactatcctcatccgatgttggtcatgaaagttgttttctcctggtcctctggaagcatgagaatctggttgtatcttgaacaggcaaccatgaagaataggagtttgtgccctactgtggtgtctaccagcatgtaaatgtgcgacaattgaaacgagtcttttgagcataccttgttgaggtctgtaaagtcacttgccatttttctttttcacaatcagcttgcaaattttctagctgctctcgatctttggctgcttgctctcgatctttagctacttactctcgctccttggctgcttaggcggtgaggataacaatttgggtagctaggtctggagtctcagtcatatcggccatggtgcccaaatgaacccttagaatccttgttgattgaatgattgctaggttaaattgtagagggtgaaatctacagaagacgccaaattgtagagggtgaaatctacaattacaaatttcgggcaccagcaacctgctaaggacaaagagagaagcaagagttcaattgggggcaccgatggggtgtcaactaaagggactccgacgctctagtcaatacgattgtaatagaaaatagtaataaaggaaaataaatgaaatataaatggtagtcagaaggatgagtggatgagcggatgggcagacgagaggttcaagtatgatggtggaacttaagagcaagatttagaacagatgattgtctgcttgagtgaaagcaagtgatcaatgtgagtgtggaatgttcgataccatgcttctgctatatggtttccttcatgatatttcaataccgttgcccactattcacgtcacccatttgactcgctcaagttagttgctctcctaattgcgagagtggtaaccgtctttctaattggttccaatatctacttcgctttacttatttagtggtcgaattcaaacccaaatgcggggtgaactatcgtatggccttgtaggcttacccatttgtattttccaaggctcaataaatttgtctcactatcttaaatattaggtttatgattaacgagcctgtctgaccttcatatcaggtttctcaaacacgcagaaaatagtaagtaaatctttaccaatataagagtaaaaatgtaaaaataatcacaaaaaaaataactatttaggtaaaaaa

SEQ ID NO: 222062 - DNA, 4113 bp, Cannabis indica
tcagttaatcaattttgttttttttttcgaattttgaccaatgagccatgtattgatcttatctgcattggagaagatgatatatttaattatgtatcgtctgttattttactaaattgattatttgatatcaaacaagaaaagaagtagattaccaataagtttaatatcaaataatcaattagtaaaacaataacaaccaagaaaaaagaagaaactagatcatattataacattaaggatggtcaaattagagtactatgacttgttaaattagagtttggatttattggtgtgatatgccacacctttttgttctttgaacttgatagaatggtcaaatctataagccatggtatgatcttaatatatggatgaagaactgtttagaagttaatgctattatggagacaatagtagaagatgtttgttgtggataaatagaaatggtagaaccaatcaagacttaagtaatcttattatgagagtaaggttgaacttctatgcctctttgtttcaagtaaagcattatgaagttttagctggtatattggttttgagtgcttattttttatgttttgaaattgaatcatagtgttatcgttgaaaatagttaatgatcttttttcgatgttttttcgtatttcagatatgtattacaacaagtacatccgctggtttacagcagatattgccctggattttttatcataaagtacttggagtttcgaattttttactctttgtggaagggaaggctgcctctcctaaagtaactaaagtgttagaaagcattccggtgagtctacgtatccaattttctaaattgttaatagcttttagttttcattttataagacgaagtcttttttaattagttgaaatcggatcatccatttctttgcatggactaatatcagggtgtgaaagttatatacagaacaagggaattagaggagcagcaagcgaaaaggtaggttccatccccttttaattttatggattatttgatgatttatttattgtatttgttatctgaatctatctttgtgttattagccggatatggaatgagacttggctggcaagcttcttctataaaccatgtaattatgagttgtttgtgaagcaatcactaaacatggagatggctattgtcatggcaagggtatgggcttcaacattttatgtattctttcaataatttttttaaaaagaaaatgtaatattcttgtttacacttttaggaagctggaatggattggatattccatctggatactgatgagctgatacacccagctggaactcgggagtactcattgagacaactactatctgatgtgcctggaaatgttgatatggttatttttccaaattatgtaagtgcccaaaccctccaatggtctctttgcattttatctttgttatcgataatttatgttcgaattagctaaaattgtgatgggggtattgtttattgtaggagagtagtgtggagcatgatgatatcaaggaacctttcagtgaggtataatgtttttaatttacactttccgtgtattttgtgaaaaatgtattgtgaatatcttggtttctgatggacttgtgttagaaaacaagagaaagaacatttttaaaatgcttaaacaaatttaaagttttcttattcaatttactttcatctacttaatttgaaatcttcttagtctactctattaattcaatttaaaaatcatcataggtcatgaagggaccaaatatgatacaattgaaatgtcatgaccaaactctcaaacttaaatattcagttaatgatatttgctaaaactatcagcaaccaattcatcaaaacttatttagtcaaaggactaaatgttctatttaccctaaatttatgattaactgttttatctgttttgcaataggtctcaatgttcaagaagaactatgaccatcttccgaaagatgtatattttggaaattataaagaagcaactcgcggtaatccaaactactttttgacctatggaaatgggaagtcagctgctcgaattcaagatcatctccgccccaatggtgcacacagatggcacaactatatgaagacaccccagtatgataatttcatctctctcatatttttcattcttttaaagattaaggctcatcatgattgtacagcccctaatggataatgcccatgctaaatatgagatacagctactatctcaagtcgatttgccgagttgaagtttctaatacatgaattaatctgtcttaactttcaatagtgaaatcaaattggaagaggctgctattttgcattatacgtataccaaattctctgatttgacttctagacgtgatcgatgtggctgcaagcctacaaaggatgatgtcaaaagatgcttcatgttggaatttgacagatctgtgagttctgctttatctcttattttcaacaagttttcttcttgaagttgtgttgtggcctttattatcaagtttacatgatttccccgcttagtgtaccttattttccatccatttaggactggtattacatcttaaaacccacatctatttgtcatctacaatattgtcaagctggatatgtttgtcatccttgatagctttgtcttgaatataatccatttcacaatcgcttttcgattttggtttgatgtagaaactccagctgggttttaatctctcttacatgtgtttatatttctctgcaggcatttataattgcttctactgcaacagatgacgaaatgcttcgctggtaaacatcttgtaaactgtaccttttttctgaaatccaatattacacatgctaatctaattggatgaaaatattcaatatcgacgaggttattgtttgtttctaacttttaaccttctaggtaccgagaacgcattgtatggaccgataaggaactaaacatcaaacttacaaggaaaggaatcttgactaggatttatgcacctatggttagttaaataaacttgtttacaaatccttttctcatttcatctaagcaaacatgtatcctaaagctcattcatgtaattcttttacaggtgatcattcaaggtttaagggagtctggtgttttcgcgtctgtaattgaatcagccgaacaagccagtctttcaaaagataagttcttatcatcagcagaaagtagcaatctcactcgaactgcaacttccactgattcactcacttcaagaaagattggcaaagtaaatgttgaatcaatcgcgagaagggtcttggaatacaccgaaaattctactcaccaccccttggcaatcccacctctatctcctcctgcctttgaaaatttccaacttgttgcctagtccacaatgcagacaggcaaatgaccaccgaccgatccttttatcattgtttccagcttcctgctttacgaagcacctaatgtttatcgaattttccagagaatggagagaagcacagattgtggcagcttatgtgttgaggcaggcaacacattgtttgttttcatgggattcttcccgatcacattaaccaagcgctggtgtacatttcaggtgtagattatagcttttttgtagtgttagaaccggtgtagatcgtagagggcgggattcatgattatgtttcaggccaacatagagctttggttggttaaatttgtctggtattttcagcttctattcttttggttactcataattttttatgtacacattaagaaaaggggtaaagctgctatactcaatccccattctcaacagaataaagggaaatatatgtttcaataataatcactttgtttttacaatgcttcagcaaatttagtaacaagaagttcatttttggttcagctacttatttgtcttattttttttttgtttagaagttggatttgggtaagaaaagaaaaaaataaggaaaatataaaaatatatatatatatatgataaataaaaaaaaaggtcaaattttcatttgatacaacaatttttttttgttgaatctaacttttttttctactatataattctttctatactaaatgtgagaaattaattttatttttgggtaaatactat

SEQ ID NO: 222063 - DNA, 2107 bp, Cannabis indica
ttgttttcaagctcacacacctctgaaattttggtctgaatgcattatgactgctgcgtttctcataaatcgcattcctactccaaatctaaacaacatgacaccttatgaattattataccacacacaacctgattatactcaattaaaaatattcggatgtcttgcttttgcttctactcttactgctcatcgaactaaaattgattctagagcaaaagcttgtatttttttaagttatccccaaggtgtaaaagggtaccgattgtatgacataaacagtaagcaaatttttatttccagaaatgttgtgtttcatgaacacattttccctttccataaacttaatgatgaaacaggtaacattgatccattcactactactgttctaccctctactggtattaataatacaccagttggtgattaccctattgacaacaaggctattcctggcagtgacttacatgtgcaggacattcccaggatacaacaccagctgacataacacacacaccagcagacacaactcacacatcagcagacacaactcacgcaccagctgacacaacaaatacaccagcagctgaaacttctacttcagcagttcttcctcgaagaacaagcagaaccaccaaacctcctgcttatctacgagatttcgaatgttattctgtccttcaagacaaacattctacccctcactctattgataaatatatgtcatattatcgattatctgaatcttataaagcatttattcttgcagttacttcactcaaggaacctcaaacttatcgacaagccatccaattcaaacattggcttgaagcaatgaatgcagaactccatgctttacgcaacaataatacttggatcgttgtaccattaccttaaataaaagagccattggatgtcactaggtttacaaaatcaaactaaacagtgagggttctatagaacgatttaaagcaagattagttgctcaaggatatacacaacaagaaggcctagatttttttgatactttctccccagtcgctaagatggttaccttcaaattgctacttgccatttccacactcaaaaattggcatatgctgcaaattgacatcaataacgcttttcttaatggagacctcaatgaagaggtctatatgaacatacctcatggactaacaatttctacttctgctcctgcaagtaccactcttgtttgcaaattgcaaaagtcgatatacggactaagacaatcatccagacaatggtacaaaaagctaactgatgcactacttcaagaaggttttcagcagtctcaagccgattacaccctcttcaccaaaggacgggaagacactttcattgcattgctcgtatatgtcgatgatatcgtaattacaggccccaaccttaccatcctgcaacaacttcaagaatctctacatcattaattcaaactcaagactctcggcaatcttaaatattttcttggttttgaaattgctcgaaccaaagacaacctcttcctttaccaacgaaagtacaccctacaactacttgaagaaaccggttacattggtagcaaaccagctaaagcccttatggaccctcgacacaaacttgatgaccaagaaggagagcccctcaccaatccatccaactatagacagctcattggcaaactcctctatctgactttatcacggccagatattacatatgcagtcaatgtcctaagtcaattcatggcatctcctcgcactccacacttacaggccttgcatcatctcatccgatacataaaaggcagcccaggacaagggattttgtactctgcacattcatccttacatctccgaggattcttagattcggattgagcctcgtgccccatcacaagacagtccaccactggcttttgcatcttcttaggggattgtctcatctcctggaaaacgaagaaataacccataatatcacgcagttcagccgaggctgagtatcatgctctcgctgccacaacaagtgaaatcacttggcttcagtacctcctcaaggatttacacatccctcaaactgcccctgcattcatatattgtgacaatca

SEQ ID NO: 222064 - DNA, 1405 bp, Cannabis indica
gtgaccaaaaagacccctcaaagtggtcttcacattgtcatcgaggatgtaaccctctttctctagagcatggtcctgagccatgcgaggggagggaatacatcaaacgctgacaaccaaaatggggatcctagtgtcgatgatagccaaagtgtcagagaggaggggaagacgacaatgaagagtatgttaaagatggatattacaaggatgggtactactatgagcaagaacctataattgtttgagtgtctagaaagctacaggagacccaagagaaattggcctgtgaagagaagttttccagaggataaaaagaatgatgggtcacctccaagacaaatttggagatctaggtgaagaagactctgacaatgatccttcaatggaatgtgtcgattgaaataataaggaatggtctattgatgttggaacctctactcttgtacaagaaaggggaaaggaaaaagtgggtgaccctcagaacctgatagctctcgtacctcctcgaaaaaatgcaaatctagcccgcaggcccactcaggcgcagaaggccactgatggctctaggcttggacgcccttctgctctaaaaggccttacagatggaaaaaaaaatctaccgattaagccagcagtttgagtgaacttagtgggcgtttgggtggtggagacatcaatcgtggacctacagcggaagagcagttggagacgacttggggctcgaagtttggaagtgccctttgtccatcaatagagctcaccttggcctttggaggttgtcgtcttcaatggaggagggttggggatcggttttggagagagatgcaagcatagagatgagataagaataaaaaaataaaaataaaaaaaagaattgaaagaggctctagagagaggaaaacaaatattaaggttttgaaactattaccctaaataatattttaataaaaaaatataaaaaagtgaaaaattgaaaagatttattgagaaagagagagaacatgattactgtgccttttcaattttttatttttttatttattttttattaaaaatacctatagtgacgtgcaaggcaaatggggacacattttcctagtcattcctgaagtgactttataagtcagtttttttaataaataaaaaaaattatgggtaatactttttggtgactcttcatatttttagtgacctacaacatgagagagtaacaccgaaagtttatagtctatttatgcatgtcactaaaaatcaattcttaactatttagtgatccacacaaaagtgtcagtatatatgttgcgaaaattattaattactacgcaagtgcacgcaatcaagtagtatactcacgcaagtgaggtcgaaccacagggaattggattaattactactaaactat

SEQ ID NO: 222065 - DNA, 3616 bp, Cannabis indica
cacaaagcaattgggcgtaattgagtcatgttcacaggctttttaatcttcgggattaagacaatatttgcatcagcacaaccctcttcaaacaaaccagtagagaaaaaattatgtaccatttgaaccacatctttacccacaattgaccagcatttctgataaaaagctggtgtcattccgtctggccccggacttttatcgggatgcatttggaacacagcttttttgacctcttcttcagtaattggctgccgaaattcttcatgaactaaatcaggaatggaagtatcaacacagtcaacaacagcttgatttgatcccccagtcgattcaaaaaggccattaaaatagttggtaatgaccattgataaaccattatcccaatctacccaatctccttgactgttttgcaaccgatcaatttgattgtgccttttccgagttgtagcagtcttgtgaaaataactgctgttttgatcaccttctttcatccataactgcttggatctttgtttccaaaaggcttcccgttgatcaatcactttaaacaactgttttttaacttcactataccgctgaaccgaatgtgcatccctcctattcttaaggtttgataattcagttttgcactttcgtattctttgcttaaaattaccagttatctcttttccccatggcccaagtttctctgcacacagcttcagtttttcggacagattactatctctcgatctactccaacaatccttgatgatttcacggcaaattggttctttaaaccaagcattttcaaatttaaaagcagtaccaggtgtgaagacttgagtgatttcaggttccaaaaaaattggacagtgatcagaggaggtaatttccaaattaaaaagtgcagcaagaggaaaaacctgaatgaattgttgatttatgagtgctctgtcaagtcttacttcgacccaaccgttggtgccacggcccttctcccaggtgaatgggtatcccgtcaattcaaggtcatgtaactggcagtcgttcaaagcctggaggaagccattaattagttgttgtgggtatcgccggcctcccttcttgtcttcctgccgcatcacgttgttcaggtcaccaattatgcaccacggtagattggaatctcgagctaggtaccggagtaaatcccatgtgagttgtcgtcggcttcgcattggttccccatacacgcctgttagcctccattcttctctttcagtcgaggtcacaagaaaatcgatatggttatttgaataacccagaattcttccatcctgttggtttttccatagtaaggctaggcccccagcactcccttgggcctctacagtaaacagaccttcaaagcccaaagcacggcccactctttgcatcatgtttttatcacttttggtctcacagaggaaaatgaaattaggtttcttttgagatacaatctccttaaggaattgaaatgcccgttggttcccagcccccggcaattccaacttaacacattcataatgctcggcgggtctgtgaaacagaacccgcccaaacaagttttttgtgttattacccatctcagtatccatctccacatctactacattgactggcccatttgggtttatgtcatttttgttaatacctatctgttgcacctctacaggcccaagatgactttcaaggcccattcttcttttcttattttctaagaatagaagggcatcttcagcattaactaataacgtgtggtcaatctccacatcagtaccagctatatgttctctcccataaccttccttatttatctcttcgattgacttagtggagatttctttcatatttcttgtagcttgattgatcacatttattgctgaatttgctccctgattttttgtagaggatgtccctgattggccgtcccctgatctcacgctggtctgagttgtcccagttccaaaattattgggattggatacagttgtcttcccgtagctagaatcggcaccggacttgttcatgcttcccgacctcagccatttcgcaccagtagcatagttcttccgtcttggggctgccttcatctccaatccatatggttttgcaatttgatctaagggggtatcaaaaagtctatcacaaaacctctcggagtgtcccaaaattccacagatgaagcagaaggtagggaggtcttcgtatttgaataaagcataacaccacatacctccttgtttaaccacctttttctttctttttaatggttgatcaatgcttattttgacacggatgcgcagataatctctccaaacgcctatgaagttgttaggatcagacttcacatatgttccaatgtaattcccaagtcgttgaatcactgtttccgacatgaacccagtagtcatgttgtgaatttgcacccaaaattcaatcttattgagaaccactaaccggggattttcgccttgcttcaacctctcaaatatcaaaagaactcgatcaaacgtccatgggctgccctctattaccctagcaatgtcaacttcatgataaaattggaagagatataggttgttttccaattctttcacatacattcctcttcctggctgccataactgtgccattttgttttgcattgcttgaaaatctattgaacgatgtgttagaaatcgtccaaccaagcaccacctatcgtcgatgtcaaccgattcatcatttcccccgtcaaagatcaatcctcttcctcatcttcctcaatattaaacgctgcatactgatcttccagatttgattcgttattcatcttcacagtacacaagaacagaatagcaaccgcacttttaaacaaatcaactagaccaaaaccagaacaatttcacaaacagagccacttctcacaaaacagaccaaacactcacaaaacagagcaacaaatccaccatgtcatacgacaagacaattatactgaaaacgttatctatgcaatgttttattacatgggctatcttaacagtttctaaaatgttataaaatacatttgattacactttttcagtgttatcgtaaatgttttttttcttgtagtgaccagtatgtaccacaaacacaaagattttctcaaagagaattgagaattgagaattgagattaggccaccatgtccaccttaagcttgcttagttccacatagattgtgaatgaattttgactattattaaatcctacatatattaaaagagccaataactactaccattcatgaaaatgtcaaccaaaactattcatttaatgagattgcaccttttgttccttccatgcacctatatatatcaataaaatattaataaaattattcaacaataaaaaagttactgccctcactttccgcacttatataccccatctcatctattccacattttatcactattttcttcatttttttttcttttaacttatttataaatttattgaacaaatcagcatattagctttttgttaaatgtattttgtaatttaataataagaaaccataataaatttttttaaataaaataatcttattctaaagagcatagtaaatttataaataattacaaaa

SEQ ID NO: 222066 - DNA, 1701 bp, Cannabis indica
acaaattagagttagattctgcatttgagaggctagtgatttaataagatggttcaatgagagaaccaatagaagaggccaggatctccttagagagatccacttcaaggaagactgctgccaagttcctcaaaaactaggatagatcttcccctgttagagggaggaaaaacctccccaaaggtcaaacaacgagagcagccatatctcggtaaccaacggcatgggggtcatccagagatctctggctaagcaacacccccattgtgtagccactagttggttagccaccaagaagagtacccttggggggccagagtagaccacttcttccccaacgggagcgaggttcccagaggtcaatcttcaaccgacgaggaccaagagtgggtggaaaaacccaaattagcgatttaaggagtcaaactaatcacttcagacatctagatctaccaaactccaagaattggtgtgatatatcccctgtcaacacacaacaagcaccagttgaccgtgaagtcacaagcggccaaacctagcccaatgtaggtctggtcggccatggaagcatcacgggtggccagaccatgccctttgcaggtctggccagccaaggaggagtattgggcagtcaaaccccacccaatgcaggtctagccacccaaggataatagcaaggtgtaagcctggccgacctaggccaactcctgtacttgggaatggccggccagggtctacagttcaacatgggtctaactaaccttcaccatacactttcccaagttatggccagccaggccctatctctccagaatctgtagcctccccaaggtgggtcagtcagtcaagtccccatagcaacagatccttttgtgcaagcacagttggaccaactcacggacatgatccaaggcatagttttcctgaagtcatcagaccttcaacttgatcggtcaaggagatcaccgttcttggcatacataaatgccttgcccttgccaaagtttaaaatgctggtatggaagatctatattggatgagaagacccactagctcacattaaatacttcaagatgaaactcgacctctagaaggtcactggtgatgtgcggtggtgtatattcccatccacattttcagagatagcccaacgatggtactttaaaattaccctaggaagattcaactcttgggctgagttctcaaaagaattctacacataattctcgtccttgagacttgtaccatcatagctggaagaccttgttgaagtcaaacatcaacaaggggaacctctgaaggattacattcagagatttatggcccaggctactaaagtcaaaggccttatagaagaaagccgatatacggccatactgggggccatactcccactcagtgatttctagtaggatatctggagaatctccaccaacaacatgaaggagttccttgatagagctggcagctttaacaaacttgaagaagctatacgacaggtccaggctgggcatgtcagcaacaagcagtcacgtggcacccaacagcctcatgacccactaggcgcataggcagacaccaacaattctgctcagactcctagtggtaaaaacactagaaacaagcgcgacaccaatagctctagcagaaataatggaaaaagggggaagtttaacaattctcccacgccatagaagaata

SEQ ID NO: 222067 - DNA, 1845 bp, Cannabis indica
atttagtgacacaatttagtgacccgcacattttttaatcaatttttagtgacccacattgctacacagtaaaactttcacatatatgttcaattatatcggttactagacagtaaaaatttcatatatattttctattatatcggttactatacatttgaagggcaactaaaaacttatttaaattatagtgaaatgctgtaagagtcgctaataattacaatctgaactctaaaaacacgagggactgtaaaagaatttagtgacccatcctgaagggtcactaaatactatctttcctgaaatctatttttgtagtagtgaatattggattgttttattgagtagtaaattaaggtcagagaacaaacctcaaagaatattccaaaaaatgtttgaggtattaattgtccagatgattcagaagcatctactcttagagttcccatttggcttccaccatattcactaccacagcatttcgaaacaaacaaatagagcagaacaatactgaaagtagccttccaagaagaacccatttctcaatcaccacattcaatattcttgaagcctattaaaaggaccaacaaattcattcatggagtcaatgaattctaattcaatatttatcatcatttaataactaaaactaatcatttaaaataatattatatattatatattatatataaattaatatatgagacaaaaagtaataggaagtagaagaaagaagaaaaataaaaccttaatttcggaaggaactcccaaagagacacccaaaccaaagtgtgaagagtttgatttatgggaatgaaatgtgagctgatttatataagtaaagaaagaattgcttacacgtaagcataagagagagaagaataggagatgtcccacttggcaatggattacaaggaactcatcttaacatattatattgtggtggtgtgggcccctactcctcttctacttcccctctctctttctatttctacccaacctaagaccaactttcacttctctacttggagagaaaaaactaaaaaaacacttttgaagaaactaggtaatacagccgctcttttgcgtggttatcgtaacttcttcgtataatacaacaattatttagtaatgtcataaatactagcgtattttttatttttatacttcaaaacagttttttttttttacatttttacgaaattctacatagaaatccctattgcaactagcgctgtaacctaaattgcaacaaaaaatcgtataggaactcctactgcaactagcgctgcaaccactttagaaatccaaattgtaaatttagaaaaaaaaaaattaaaaaaataacatatggggtaattcccctaaatactaactctaccttaaaaaaaattattattttaatatataataatattgtaattatattgtctaattacttattattattagtaattttatttatttaaaaaaattatttttatattttaaagtagtttttattttttttatatttacagaaatctacatggcaactcacatagtaactaatggaattgcaatttaaatctatatagcaacttacatagaaactactagagcaattcaaacggtaaaaataaaaataaaaagttaaaaaatggtatatggggtgattttctaaaaatttatttataatataataagtaattacacaatgtaattttatttattaaaaattaaaatacttttttttaattctattaaataaattattaattattattattattaggataactgaaaagttctatcatttactaaattttttattaagaagttcaaaatttatacgattatatatgt

SEQ ID NO: 222068 - DNA, 2180 bp, Cannabis indica
tttccgaattacaaaaggaatcctccatgatatagaaagcttgattgctcgtttttggtggggatcaacatctaataatcacaagattcattggggaaaatggtcgaaactttgcaagctaaaagagaatggtggaatggggttccgtgatttagaagactttaaccaagccctcttagccaaacaaggatggaagatccttcaacaaccggattgtcttccagcccgagtacttaaagctctctactttccaaacgaaaattttttcgaagccaaattgggtcattttggatcctcggtttggcgtggtattctatggggtagagatctcattgtgaaaggttatagatggtgtgtgggggatggtcggactatacgcatcaatgaagatccttggcttccaagaaatattccttttcacctccgcacgaagattcaaattcccgaagaagtcaaaataagctctctgttgacagcaaagggagagtagaaaactaatgaaataagtagttggtttcacaaggatgacatcccttgggttcttggtattattccctcagttcataagtcggattggatcacttggagcttaacaaacaatggccaatactcggtcgctagtggttacaaattaagatttcaagatccggagttagcagcctgttcaaacaatgacactacaaaagcttggtggaaatttgtgtggggctctaaactcactcctaaaatgaaaaacttcatttggaaagttttcaacaattggattcctgcaaaaacagtgttgaaaaaaagaggaattgagttaaataccatttgtgattggtgtaaaagtcaacatgaagatatctatcatgctctatgggggtgtcctagtgttcaaggcctttgggaacaactaggattttctcaacttatgcctacaacggtgttagctgctgatgactttctctggtggctgtggaagcatatggaaaaggaagagctgcttcggtttattggtttctcttggttgatttggcagcgacgcaacaactttgtttttcaacaaaaacaccccgcggaccatctgtggctatcatgggctgtggattttattgcttatcagcttggacaacagcagcaactccctcttcttgttcacaataagtcgactgtttcatggcagccccccccttctgattttcatctaattaatactgatgcttctcttaaattgggtcatttggggtgcgggctaagtgcaattattagaaactcagctggtgatttggtggtggctgaagttaagtacatccaaggctgtatgactgttcctatggctgaagctgctgcaattcatttgggagttcagcttgctgttcgttggtctatcaacaaagcttgggttggttctgattgcatcaatcttattcaagctgctgccaataattcttttcctcctactgattggggacagcttatgaaggatatcatcaatgggaacaatcatttcaaggagctgaattttattttttatcctagagtttgtaataaagttgctaatagtttagctaggtggagtctaatgactcaaaagtcgattacaatgactaaaatgttaccttcttgtgctgctgctttattaatagcagatgtgcctagtgttgcttagtaataaaagtattctttcaaaaaaaaaaaatactgcaaggtcttaaacaattgcctaagttatcttttttatgttgtaaaaatggtgtctcaaagagcaagaacaacaacaataacaagaacaacaatgacaaatatatgatcagaattaaaagctgatctaaactgaaaaaaaaaaagagagagagaaaaataaaagtaaattgacaagaattacgtggtagtcgaacaaaatgcagtgtcacttgcctactttacgaccaaaacagcttcaatggttggtaatctttattgatcaatggaaagagctacaaggagtcaagttacagagcactgtaacaatacacgctcatggagactttccaaaataatctcacttaagataaatctcctctaaaaagaacaatctctattacaaccctcttctctctctctttcctttctctttgttctcactatctctctagatccttggatcatcacaactcatctcactaaaatagtagtagagacagtttatataggttatg

SEQ ID NO: 222069 - DNA, 1727 bp, Cannabis indica
tagagagagagagagtagtgtttagggctcaataagggatttttgtaagtggagaatatagtgagactgtataagtagcatttaggttgtgccaaaggccgtgtgtattatgtgggtgggaaatggtgggcattttattttattttatttatttatttatctaaaaaagtgttttttgtaaagaaaatataagaagaagagaaggtattttacatgtttcaacgtgcacgtgattctgtctaattaaacaagaacatgtagtatctgtaaataaattatatgtattccaaaatttgttattagcacacaaaagaaaaaactgaaataattcagtgaatataacaaaaatacacataaatataaataatataggagttatagaatgctttgactggctccattaattttgtgaaaccatatttttataatttttgtgaaataattccatatattaatctctgcaaattactttgcagggtttagatagaggggagaaaaaaacttaaaagttttttctataccattgggaattaaaataaataatacaatatgattcaaaaaaataaataatacgattaataaaagattcttcttatttaggcaactaatataaaaattaaaataataaaaaagactaaaacaaccttaattaatatttaccaccctccctgaaatcgtatgtaacttaaaaaaaaaaatatcaccaagttgcaatgaagaaggaacaaagggaaaactatactagtgcatgacttcacattgtgacgagtaaaatgacaattaatctcaatatacttggtgcgttaattcatgaaacacctagttatcagtaatctgaatgacactttgactataacaatacataggagtaagataagagtgaatggcatccatatcttcaagtgaccatctcaactaaataatctctttagtagtagatgccatgtcatgatactcaacttctgtagaagattaagaaaacagattatttcttaatcttccaagaaataaggaaatctcccaaaaagattaaaaacagtgatagactttcgatatgtgggatcacgaccatgatcaacatcacaataagttcacaactccagaaaagaggtggaagataatagtagactctaaaagatggtaccccaaagataccgtagaatacaaagattagtaatcctgtatacaggaacaaattgactaacaatatgaacaacatatgaaatgtctagactagtaatggtgagataaaccaaactgtcaacaatggtgcaatacaaagtaagatcttcctaaagagagccattagaaggagaatgctgaacattcaattcagagtgagtgtcaacaattctagtattagtaaggcgagcacactcaataatgtcagaattgtactttgaatgagaaagaagataattttttggaaaaaatacaactttaatacccaaaaattagcacaaataacccaaatccttcatcttaaattgagaagctaattctgactttaacactttaattccttgtaaatcatcccgcgtaataaccatatcatcaacatacaaggaaagcataacaacctgcagatgtgcacatgacaaataaagttgaatcatgatcacatgagacaaaaaatatctgaactttgaaccatgctcggggagcctgtgtaagaccataccaagtttttcttagcttacaaacctctccttgcttatgaggaacac

SEQ ID NO: 222070 - DNA, 3055 bp, Cannabis indica
tacaattggtattatcaggtgtaatcttcattgaattacagacacaagcactatcattgtcagaactggacacaagattgcattgaagagtagtagtaggacatgatggagagtcagcacccaattgatataagccatctttaaccttccctttgaggagcacctgcccagtggtcttgtccttgacaaagcaccagtgtttatgaaattcaagaaagacattgttatcttctgttagtttagaaacactaaccaaattctttttaatagaaggaatttgaataacagaatttaatttcagtgggcaattattaaaggaaggtaaagtagctgagccaatgtgagagatacaaattgtcttaccatctgcaacagcaagagtttctgggccagcataagcagtggctgcatcaagtgtttcaaggttgttggtgatatgagttgttgctcctgtgtcagcaaaccaggagagatcatcaccaaaatcgggaaggacagttggctggtgtggttcagtctcatgttcacattcagtaagataagctcgtggagcatgaaaaccaggtttcggagtagtccaatttttgtcaaacctgtaatggcagactgctgctgagtgacctgatttcatgcatacttgacaaatgattcttgaattggtggtggagccacggccagatcctcgagcataagttcttgactggttttcatagggaacaccacgaccttggggcaaagaaggtctggagtaatgatttcttgatgcaccagtagcaagattagcttgcagcttaacatttgtatccagaactgtatgatgatgatccaaacgactttcatgagccatgagtagagcttgaacttcttcaagtgataattcatcacttcttgaggttatgttggaaaccacgggatcatattcgggtcctaatccgtttaacagttgaagaataatatcttgattttcgacatgcgagccagctatggagattgaatcagataacatctgaactttatctatataatccgagatagataaagaacctttttgaatgtgagaaaattgtcctttgagttgaagaagacgagcacgagattggcttgtgaatttttgctccagggctttccaaacggagtaagaactggtgtagttggctacggaggctaggactccttctgtcattgaggatcggagccatgacagaagaagctggtctcgttttttccacatcaagaattgggtgtttggaacaccagtaacaagaaattcagggggaggaatgccggtgaataagatatcatcaaggtcatgtcctatcacagtaggaaccacctgagatttccacgcaaggaaattcgttcgatcgaggcggacagtcagagaagcagagagagaattggaaaaaggattccaattcatcgtggctggagcttgatgatgagcagcgggagtagattgatcagtgggaataccagagggatttacagaggaagccatggaggacgctagtcaacggcggttgataccatgtgaagcttttaacaatggtgaaggtagaaaccaaaaagagaaaaacagagcaagtggcagagcctatagcagaattgaatgccaagaaagcttaaccaactggttagcttgagaccaatttatttatactgtaataatgttcagtacatgagaaaataacagaaaagagcaacttgcctaactaacatttaactaactaaactaactgataataactaactgttattattgtttacagcaaccttcgggctagggcaaagataagtagatttggactttggagaagcatggagagtttacttgtaagtctgcttatctggcttgcaacgagcaccgcattgtgatgttgttcaaacactttcgaataataaactgtggaccagtaagatcttggagcgtcataaaattttatggcagtgtatcttgtctaaggctttaccggtgtgttcaattctcaacaaaagattcaggtttgaggatactagttgccctatttgcgggtgtgtggaggaatcaatggaacatctatttctatcatgtaacttggccttccacttatggcgatcttctccctggggcattttttcgatttgttggaaatagtattcacatgtgggactgggtaaaatttctttggagcttagataagaaaggtctcaatatcgatgaagtttttctctatatatacttcatcggttatcgatactatttggcgagttcgaaatgacaaggtacacaataacaaattagataatgttaaccaatgtattgaatctattgctatatcttatgcagattactgcgcctctcttctccctgcccctactcctgctgcgctggatgtttggctccctcctcccgaagagtggctcaaactcaattgtaatgttagagttgaactggatagcatgtgtatagcaatcgtggcaaggaactatcacggcgaggtgctttgggtacaaactaaacatatggattttactgacgctctgtgtggggaaacaacagcctgttgtttggctttggaagtcgccaaagataaatgccaaccaatttataattgtagagtgtaattccaaggttgtggtcaatacactcaatggaaagaagtcttgttggaggatccagaactttgcctcattttgtaaaaaatctttttctttttttgtgagttgtattctaaacaatattagtagaacttgtaattttaggtgtttgatgtggataagtagacttttacccaaacagtttggctggatttctgttggtctaatgtatctatatataagcacgcttatctcaaaaaaaaaaatacttccgtttctatatttaaaactttttgagaatgcattaattctaaattattaaaaaaatataaatgtaaaatatatattaaatatattactctcatctcatcaccaataccaactaatatacataatacaatacagttaaatagcaaatcatgaatgataatgatatataatctttaattaccagtacaataatatgattaagttatgc

SEQ ID NO: 222071 - DNA, 1350 bp, Cannabis indica
aacttgtctaaaccaaaaattagtatatcttatgtcaccaaaattgatcccttttctctcaagatttcagttctccctctttaaatattgtgataaagtacttatattatttttgtcaaaaaaaaaaagagagagtaattatattagattgtttatgcctgactagtacttttcacaaaatggatcatagtaaataagaaagagagaaacctgtgccagtcttcccaatgcaaaagctgacatttccctcagttgtacatccggtgattgaagcatctcaatgagaggcgggactgcacccctctgtacaatgtgaacctgcaaaaagtcttactagttcagcacaaatattaagaaaccaaaggagccaaaaagtgcaaacgaaagcatcaaaaggattgaaaagaataatcagggatgagacccaatcatccattatttagtttcagaataaaaactgcattagtgaccgaaatgcaaattctagtatttatttgtctttgctgttgcggtaataaatgggaaataaactttgaatagattgtagaacaggaagatttaaccaccttgcaatctgaatcagtagcagcaaactgaccaagtaacaaagctgcttctctttggctctctgaacagcaagaactgccatacaacatatagcctttagtatttgttaaaaaaaaaaaaagatcattgatatcatatatcataagtaggatagtacaagacaagggaggaatacttaaaatgatggctgaattgagtaagtgaaagatcaccaaaacatacctgagtaacccaataaccggttgaagagctcctgctagaagaacttctttctttatatttggagaagaatgtaccaaatttccgatcacaccaacctggaactcatgaaaattagttggtggtacaattaacatgaatgcaaagcacctaagaggtggcatagtagaaagtccattaaacaaaacataccgcttcataatgtatagcagcatcctcagaccgaagcattaaaatgagtgttggaagagcattacattcaacaatctgcaagttcatggaattacaaattatttcacatccaggtcaaccttataaaatcaaaattgaaaggacttcctactacctgattcttattttcatcatttttgaaagccagtgttctcagtgcaccagcagctgccctttgcacctttgtatcagtaaaatcaagcaactcaaccaatggtggaattccaccttcaatcctgtaaatcaaatccgattctcataaaaatacaaaggtgctaaaattagaattaaaggtcaaatgctagacaaatgaacaaacctgacacgtgtttt

SEQ ID NO: 222072 - DNA, 1153 bp, Cannabis indica
tgttaccctgggagagatttgtagaagcagcagtaatggtagtaggccactgacttattccaatagagtgaatggatgatggagttgtagcagtaggtaatgttggaggatggttacttggatgattgtttgatgattccccctgaagtaactgtcttggatgagatggtggcctagtgtttaattgagggattgtggcagtcaaagaggatcgggccaacttagtcaagaggggccaagcattacctttagagaagtcggtcatgtaccaatcataactagaagtaggcaaaggtgcacctttaaggcttggtctatatgctaattcggactcaatgccattgtccatattttcaagatgaacaagacattttttaaaaacatgaccaatccaaccacattccataaaataatccggaaatcgttcataacgaaactccacccaaaattcatctttaattattggaagagtaatcatttttcctcagagtagtggtttggtgatatccatatgaacccgaaaacgaaggaaaggaccccaaccctcaaagcaaaagtcttgaaagacttcaagaaactctccaatgagatttcctaaggctttggcaagggattgagattcgctaaggaatgggagacggtaagcctgaacccaaaagggagtgaaaatcatttgattgttaaaacagaacaatgtggtgaccttggaagtgccatggttctttgtctaacacccttatcttgtcgcctatgcagccaaaagtaataagaatcaaatctgagtggtgttctgatattacagccttataagttccatcacaatgttgagccatttgtgtttgcaaagttgacaaccagactttcttgggagaaagtattcaaacaactaaaaccaagtcaagcctctcattggaatctggtgtaccatcatcaataatggctaccactgatcgctcatcatcggtcaaggagattgttgatttcattctcttaatgaaaggatccatgattgaagaactgaggggcgaaatgcaataggaaacttaaagtaactcgagaaaactagaaaaagtaggaaaatgggagaaaaatgatcataagaatttgaagtaattgtaaaaaaactaaataactgccgcagagcacaaatgtg

SEQ ID NO: 222073 - DNA, 853 bp, Cannabis indica
aacataaataactgctaatttccaaattaactaagcgggctttacaattcatgtaacaaaaacacaaaaaacccctgaaacttaaaacaccattaaacagattcctatttcacaaaatcatgcaagagaaattaacttaaaactaaagaaaccacaaaaggatgagctaggaagcttacctaggactgagacctcaacaatgatgttaattaagctctgaattgatgaagaaaaaccttagcttcttgctggctaaggagactttcatacgtttaaatgaaaacttgggacaactggtctttggatggagatatggaaggatttggtggagacattggtggagataatggttcaaaactaggaactggcattgaataagtaaaatgcctagctaaaccagaaggggtaaggacaaacttgggtctgacaaaggtggaacagtaccggagagaaccggagaggagctagggctgacaaccttggaaactaacggtgatcccccgccaaaggatgactctttgaccttgcggcacattttttacccatatcatgacacaagaaacacacccaaaaactaccaaaggaagaagatgaacagtgtcgagagtaggtgtgtaatttacttcccaaagaataaaaagtaaaatgaaaacaaaaaaaaaattgatcttagtataatcccaacacgggataaatgacataactacccttcgatccaataaatggaaaaccaagcccaattaacatgaaaaaaaaaatccaaaacaacaatatccaacaaaaaacaccccaaccaaacacattgtaaaaaaatcgacaatggaatcagatttttattactattttttttttt

SEQ ID NO: 222074 - DNA, 2778 bp, Cannabis indica
ataattttggacacattcaagcaaaatgtgcaaatacgctcaaaaagaaaaagaccttattggcagttacttaaagtgacagtgatgaagacaaagaggaaaacttcagttatggatctgataaggaaaaccaaacggtggcatttgtggccaggagtagtatcaactcaaaaaattcagaggaagagggatcatgtagctcagatgtagatagtactgaaaatattgtcatttgtaataatgcatcactggttaaatcaatattggagattctactgctattccaaatggtttagccaaaagaaataatagtattagatcaatacattgtctttcaagagcttatttactattattagtgttatcatatggtcttctcaactttttatcattgactcttgggtttaagtgaagaaaagctgatgatgttatcctagtgtttgctagttttgatcatattgtacataatactcatttattccaaaataaatacgatatacaaatactatattgtctagtgttcctcattatttgtttatgtgtcatcatgtttgataaggaaagtgcttagttggttgcaaagaaaaaaatcggagtgacgaaagatagaaaagattttatttttcttaaaaagtaataataaaaaaatgggcaacaaaatattaaaaaaaaaattatgagagacggagctaatgttctcacataaaatgagctaataatcagtgcacacataagaaatatcttggttcaaattcctgttgagaatttcttgtttgtttctttctcaaattgtatatgaatatatgaattgtacagaattgtctcagttgcatgaattatttctttctcaatgtttattgctcaacttattaattagtttgatcaaataattttttttttcttgaacatgttaatttttgagatgcatcatctcccatgttttaattgaaaataaaaataaatttattttagcattagcaataatataatggtgatttgatagtgtttacttggtcaatatctgttatttgtttatatttattattattagtatccatatgttagatggattgacatttccactttaatgtggtgttagatggaataaatatcttttatttatttatttattttctttttgaaaatttcagaactaaatatcttttttgctaaatatttttataccttattgattttctaaaattgaggaaaggtatttaaaaggagtattgttattcggtataagtgtttagtatctctatatatattattttgtgatttaaaagttattacatttaaattatattagattcgatgcttagttggatcaataataatattaattattaacacataggagaatgctaagcactacctactagtacattttaacatacaaatgtatgaatttaaggccataatgtcagcttagagtatctctaatagagagctataaatgtgatgtattaccattttttagaatattttattaaaagttaactccaatggtgatgtaaaatgtgtgctaaatttagcccaaactaaaaattgtactaaatttgtttcgaaaaaaagatagcatttgccaaattttagcccacaatagtcaataaatgtcatttttttcaattaccgatttgtcactcattaatactattcattaataaaaaatatttttatatttataagttattaaaataatataaataaagttaattgtttgtatatttttaatgagtattaatgatattattgacttttatagctaatttgcaccttgtgcattggagctcaaatataaaaattggaccaaatatagttttatagtatattttgaaccaaatttaatccaaaatatacaccatccattaaagatggtcttaccactcgaataagaacaatagacctaaattaaagcactcttgacacgtgtttaattttgtgattatcaaagttagagtgacacgaattaacaaaacataataaataattgaaaaatgctaaaggtcacagtgatatctagcagccttttatgtgttaatatcactattggtccaactaaatattggatttcatatagtttaatataatagtttttagggagtgtcgctaatcaatcataacacgacatgtctagaagatgctaggtattactagtgcctattatcaatgctttaaataattagatatataaaaataaaaaaataaaaaaacaaaaaaaaaatgagattctagtacaatttacggtaatattttttttttgaataatttacggtaatatttttgttagaacaaactagagttgtaaatgttaaaagatgtttacattttttttttaaatgattcttcataaaaacaaaatctacattcttttaatgtagttattctttttctttttagcaaaattcccatttttttttttaataatagtagagaatataagctcaaatctataacattgttttcagatgaatgtagtctataacgttaagaaaatgaccttttactttcaatttttcttttttgaaaaaacaaaaatatattccttaagtttgaatgaaagggcatatttcatattggcaacatttgtttttgttaatccattagcgtgactataatacagttgtgctctgacaaaagtagttatagtaatgctaaaaaaaagaatcaattgcagcaaaaattgtagaaaaaagttaaatgtatttagtaaaatcataaattttaaagtaatatgagttgttaagatatattataatgataatgttataatctaat

SEQ ID NO: 222075 - DNA, 10552 bp, Cannabis indica
tttttatcttttgtttatcatttatccttttattttaaatctctaatttttccttaatcttagtagcattaggaatggatgttaccttttaaattcaaattcttattcctatttctataggaattttgaaatttaagcttaatggagaaggggaaaaaatatatttatatctttttcttatcatttacctctttctttaaagctttaaatttaaaagattcccaattgttctaggattgggagattgaaaacacttataagtaagagagttgtcaaccaaatttttcacatttccctttttgaatcccacgcccaagactttgtagaagctcctttgaattttatcttcatcaagccttcaagtgttcttcatcctccaaagtagaattttttttttctttttttttccttctttcccttcttacgacgccacttttttgaaaaattttcttctcctcctcctttgttgatcttaatccaaggattcttaaactccaaagaatcctcgaattctttttttctaagacctccaaaattctaaaacactttcctagtcaattgaaaatttcttcttttgaaattggttgaatttttttacagacaataaggctttttttgagttgtaagcaacttgaagtcatgactaggatgaagagaagtataaggtttcctgatgaatatgatccccatgtggctcagttcatcaaagctaagctaactgtgcccaagtctaagaacttagacaaggcccgtggtgggaaagtaatggcaactgagcttctcaaagctgccattgaaagtttttagcactcttactgaatatcaagcccaattaatttaggatgattattgccttctcaaaattgttgtccaaaatccacgatatggtggtcttagtggctcccagaacacttattgtaatgcttggtctagatttcacatgaatgtgggtgcttacttttccttgaatccatagtttatatcaataggtgatttctttggagtttgtccctaccaaataaatccaaatggctataggatatttgccaccttcttcatattttaccgcttgacaactctctacaaaataaacttcctttaagacttaaaaataattcaaactcaaaaagaagaaggcttctatcatttccaccacttcagcccatacatagaaaatattaccaaaagtaactaagacctttaccaccaggagtacttatatatgccagttttttcatcgggacacataactttccaaaaggctagcccttttaaaagacctgctcctctaattgacaagaagaggagagtcgatgccatgctaattgagattgatctatgagagagagagatggaagaactttattcaatgttaagaatctttgtaaggttggactgataatgtcttcccagcgagtgtatgttgatacttactttgctaatgaatcttggataatgccactcgaggaggatgacgaggaggatgacgaggatgctcaaagtccaactgtcatcttgtctcaaacagtgttagaagatgcaacctcagttcaaaatgacatagagtattcaaggagaatatatgtgttcttagactaggaagatggagaagttatctacactcgaactgcttcggagaaggatggagaatcaacaagtggatgatgctccacattgtgaatgttgaactttgctatttttcttttcttttgttgtactaatcgcttgtcttttttcttcatagaaaatatgagtttcctggctgctatgacatcttgttcaaacttgaaacgaaaaatctagtgccaaaggaaacctctggttagggaagttgtctagggtatccctactgcttttgttgcttcaaagaagaatgtcagaaagaggagtagacctgttgatgctgctcctcctgccaaagtctctaccaggagaaatttagtactactggtgctaatgagatatctctaatcataatctctctggataaggctgagactagtactccgaactcgagttcgaatttggtggagcagctacgtgcgtagagctcttggcttcttgcccatggtgattccttgatcggctccaaggctgagaatatctcgttgtagaagttggttagcaccgaacctccgcatgttattgctcaaagatgcttcaccgacatctttgggaaaattatttttcttgtctccttctatcttaactctcttttgtttaccatcacttgacaaatttttcctttcttcaggattgagttggttatgcttacatcatggataaaaaaacacaagaaggtggtcgagcttgctaagaggctcgaggttgcaaaagatcttgttgttgctgcaaaggaccaggtgactactttgaaggaggaagattgaatctctagagagtgagttggctaatcttcgagaagtggctagtggtgccaaagctcgagagagtagcttgaagaagagcctgccaattgctcaaaagaagacttttgatgttgaagagtcttctcgtcttgaactcgatgaacaaaccttattggttgcttaccttagagatcatgtcaaggccttgaaagagcaagtgactactcttgaagactaagctgttcttgatgtcaccttctacaataacttatgctttgatgccatctacaatgcttggtctgctaatgaaggagcgaagtcattcaattggccggccttccctaatacacaggtgtcaaagtttgtaaagtgtcgtgagcagtgtttcggtgaagaagctctccaaaaaatagactttactcttaatggtggtgagttagtggtcgaagaagctgccagagttgaacgctacaaccctaagcatcccgactttcccccttctacagttgttgtgctagttgtagagagtgaggataaggatgagtttaccattgttgtaataaacttcctagatgtttcctaagtccattctccttttttttgtagcatttaactttagtgttttagttggtcattctcgggcgacctttccatatggataaaccttagtaaaatattctcagaatttgttttagttaaattagaaattatttctaacttaataaaacttttattctgatgttagctttctttattttactttatccgttaccgcttgaccgtttaatttccctgtacaccatgttttaagaaactcaaccactaggagtaatgtcactacttcttaaagttatatttaccatgagagtacttacgtatatgtgcaaaaaattttgaatgctcatgtaacatatggctctcgtataccataacataatctatgtgcccccaagttatcaaggaagttccttcattggtcactttccataccgaattcccatgggccttcatgatcattgctcttgggtggtgttacacgtgcgaacactctccacttatcaaaggatttgtggggtgttagtgttgaactcactaaagaaacaactgaagttatctcaagaccaaccctactagctttactcaacgcttgagagtgtcgtcaagtctgtcaactgtaattgattaattttaatgaataccgaaataaatttgttcaacactttttctcatcaaattaaataaaattacattactgtgagcaaagttgaaagaaaaaagtacatttaaagtagtagtcgtagatttcctttttcatccaagcttagctgaagtgattctcactatactaatgcattgtttgaattttcagtataagtgccataccttagtgatggacctcttaagttagagataacttcatcacaacccttttaatttaagaggcagtcgattaacttgcacaaggtaaagtgaatcttactatgaagcgagcaattttgaggacaactgcttttatttgtagtaccgccatagatgcaccttattccaataccttggtactggtactgggttcaagttgtagtcatagcatgccaaattttaataaccaggttcaagtgcttcagtgatggcatctggtccttcccaatttgacccaagtactgatgttgatgcgtcttgcatgttgaggaatactcatcgtaataccatgtctctaggtttaaatttcctatccttaaccttggagttgtagggttttgtgactctttgttcatacgtcgcctttctaaggtcaaacctttctctgatctcttcaatttcatctaaagacttggctagcatttgatgatcagtttatttgtcagatcagtcttcaatgtgatggtggtgtgagccctacaggtatcatggcccttaggttcgagagaagggagtgggacctgttattatattttctgttgtaggataagcccatagtacttcgagcaattcttcaagctaattcccttttgcttgctccaggaatttctttagcatatccttaagagtttggttggctgcttccacttgtccatttgcttgtcgataggcaaccgttgaaaaactcttaatgattccatgtctaatgcagaaattagtaaaatggtattgtcgaactgtgttttgttgtctgacactatcttatgtgggagtcaaaagcgacaaatgatattcttgaccacaaaatcaagaactatctttgacatgatagtgggtaagggttcttcctcgactcatttggtgaagtaatctaccaccaccactgcatattgaatttcaccttctcccttaggtagtgaacctataggtcagttccctagacagtgaatggccaaggtgtttgcatactcttgagttcattcggggcaactctaggtattttggagaatctcacactcgtcacatttctcgacatagtccatcaaatcttctgccaatgttggccaaaagtacccttatctcaagatcttctttgaaaggctttcccccaacatggttgccacaaaagccctcatgtaccttgaccataaggtgttttgcttcttcttttgtgacaacccacaaattggcattaaaatcttgttctatacattactccatccatgatgataaaacgagctattttctctcaatctttttgcttcattccgatcagttggaagaataccatgttctaagtattgtgcaattggggtcagacatgatagactatgttgattatcaggataggctctaagtcttcattaatgctctatttggggaggtattcagtgggaactacactaagagtgtcaaaatcttttgtactagctagtttagctagtgagtctgcatttgcgttttattcacgtaacacttgttcgatggagtagtgcttgatctgcctaatatatatttagctttgcttaagtatgcgatcatgtttgaccatcgggcttgatactcattgagaatctaattaacaactagctgcgaatcattgtagatcttaagtgattcgacttttattgctagtgctaatcatagttctactaggagtactccatactttgctttgttgtttgttgtggtaatcaaaatgcaatgcactatgagtttgaaatccctctagagtaactaagatgtgcccaacactagaaccgtgcttgttagaggatccatctacatatagtctccaagatggtctagtgtcctcccgagttgcagtctcaggcgtgtggacttggtcttcacatatcatgggatcgtcttcttcaaggttagtgcaattagcaataaattctgataatgcatgccctttgactgatgtttgaggttggtaggtgattttaaactaacctagttcaaatgcccactttagtaggtgccctaatgcttttggcttcatcagaacctacctaagtggttggttagttaacaccttgactgtgtgagctaggaccaagaagtaggccagcttctcaatggagggataccttaactcaaccctaatgagacacttattggtgtagtagacatggtgctctatcccttcttcttcacacactagagtagcattggctgcatgctcgatgatgacaaaatagatttataattcttcccaatctattggtttgataggatgggaggtttggctagatgatgtttgggagctcataaggattgctcacattcatcagtccatttaaaccccttgttgcttcctttaaggaaagttaaagaagggaacacactttttggttaacttggagatgaacctgctaagtgcagcaattcatccattaaggctttgcatgtcttttatctatgatggtgacttcatgtcttccaatgccttgatcttttctagatttacttcaatccctcttcagttgacaatgattataagaaattttcctgactggatgtcgaaggcacatgttagagggttaagcttcatttgatattcctataggatgttgaagcattcctctaaatctttgatatggtctttggatttgttcgagctaaccaacatatcatcaatgtagacatccatattgttcctgatttggttgtggagcatacagttgactagtctttgataagtagcacctgcattcttgagtctaaagggcattactttgtagcaataaagccaaatgtcaattcaaaaactagtatgctcttcatccggtgcatgcatgcttatttggttatagtcggaatagacatccatgaatgtgaggagttcatggccagctattacttccataagatgatcaattcgtggtagagggaaacaatctttagggcatgctttgcttagctcagtgaattcgacgcaagttctctacttaccattcaacttaggcacaagaatagggttggatatcaaaactaggtggaaagcttccccaacaaagttgttgtccgagagtctttcaacttcttccttgagagctttggagcactctttgttaaggagcctatgtttttattgtacaggtcgaaagtttactttgtgtaggttgagggcatgacagatgacctgggggttgatcccgatcatgtcctcataccacaaagtaaaaatgtctttatttttctgagggaagccatgagcgtcttgctcaagacctccgtcaggtttgtttcaatcttgacaaccttggttaggtctgctattttgaagggaagttctttgtattcctcagttggaccaactcccaagttgatttccccaaaatagggctcaatgtcgtcaccgtcttgggtgcaacttcaagtggctttaggtgccatctttgtcttttttgtagtttgaactctgaataggccttcttcatctttctagctttttcaagagaggctcgttcgtccctctggtgccatagcaacagagggggtcttgtttgtcccctctcaagccgtattaatagaggatgtcttcttggcaagtgataacgaagcgttatagcactcgcgtgcacttccttgattgccaaggagacaactaataccagttgccattaggaacttgatgaacaaatggtagattaaagagatgggtcgaaggtcatataggtctagccttccaagaattacgttgtacgaagacttcacatccaccacaataaatatggccatgattgtggttttccttggtaaagtaccgacactgagcgatagtttgatcttgccacatagaacgatgatggttctgctgaaaccatacattagctacttgcatggttccaggtattctaaggtcaaacccatcttattagggatcgcttgaacaggatgttttaggatgctccgtcgtcgatcatcaccctttccaccatcatatctactatttgcacctcaacaacctaaggatcactgtgagggtagctgacatgataggagtctaattctccaaatgtgatgggatgacacctgtagcattgagacttttaaggaaattatgtgacctctagtactttgacccttggttcatgtcagagcgatcttgcatacatttctaaggccttgaatttcaagctaggttagggcctccaatcacaatctctagcttgattgcaactggcctaggctagagagatgcattgcccccagctggagcttcaggtcgtacataccattggagagcaacatggttttgtctaatgagaaattctatcttatctctcaactgattacactcattagtgtcatgaacgtaattgttgttgttcatgtccttcttccctaactctttgaaaagaagaggtttgttgtacgacattgttgagtgtctggccgtatagatttcctctataggggccaagaggatggattaagtggtaaagagaggctcatactcctataagggcctatcctcaaccttgggcttctttccaccgggggagttgcctggcttaccaccattattagctctctttccccctttggttcctcctttcttcccatttccttacacctcagtgttagggaatggggagtctagtggcttattcttgccaccctttaagcccttggcctaggtgatagctttttctaatttgataaagccatttattctatcgaggaagtcattcaaggtgtaaaagatcttaagacaaaggtcagaccatagaggactcatctcctgctgcttcgcatccactaaatcattgagttcaatctggcattgcgggaaggagaaaattggttgccaacattatttgctagagctttccatgagtcgatcgatctagggagagcttaaggtaccaccactgagctaggtctgttaatgtggcagggaagattctacatctaacatcatctctcacaccttccagatcggtctgcacttcaaagtagtgaatgtaagaaagtggatcttccttcccactgtattaatgccaagaagggttcttaaaccttggagggataggaagaactttgatacttttagagagttatgagcaccgctctctatcaagttcaaactctgataatataggggccttgatccctttcacaaaggctgctaaagtgtcgaattatgcctagttaaccccatcggtggtggtttacattcagttggagtttgtattacccgtgtagggtctcctttagaagttcccacttccaccgaccttttattagtttggaggtcacgcaggtttcttggtcttccaagttgatcatgtacttcagtctttttgttttctcttgaccacggggtcatgaaagtaacactggtgaagtctccggaatgaactcaggttcatctcgggacgatccactatgagagtggtcattcagagcattgtagtggctacttctttcaaagtagtcttcatctggatcacaagtgtgaagagaattgaactggtttctcaagttcaactcctctcctcgtactcgagggaagtactcatactgctagccatcgaggccacaagcaaagtaacgacacaattcacccttttcatctcgaaagtatttttgagtgtgaagttgttcactggtccttacctgccttatctcatagcctctggttttaaagtagtgtctcctactacctctatcagtttgagtagtaggtctctttctccttgtggggtcttggggcctagtgtcatgaaagcattgagaaggacttggcaaagtagtcatgttggttctatcagtgttgtgaggtcattcaatatcaggtggagggcccatcaattggcacccacgagcttaagtcctttcgggatcttgttcgaaggtgcttcccctctaggaggcctccccgcctggtgcttacttaatgcctacttggttaccaggtgtggtagttgtattccaagagttaagggttcccccttgagcattagttcccacatgactagttggtcgacggggagtctctttcaccaacttagaaagacccatgtggggagtatttccttgacaagagcaataagtttctctgatatgctaagataggttatctctccattgttcttgcttaacttgtctgctttcaaatattcctccaattttccatgaaccagtgttgaaactgtttgtgttggatgtcaagagagtcttgcagctattgttggagatcaatcacagttatggtaagctaggcaacccgaggatcgacctccttagggtcatcaatctccacgtgaggcttcccgggtgggatctcgttgctggtgctagtcctacgagcattatgtggccttggggaagagttgtggagctagttttagggcctcctccttgcataagaggttaggagtagtcctgtttccaacttcagtaaatggcgtgcccccagatgtatggccagaagttgggattcctctgtcaacacttgtagagcgtgttacaaccatctcgctagtaacattctttagttgtggctctcaatgaaagtatcaaaatattgactcaaaaatctggactaagacttctaagccacacccgctagctagattggcaagaatgaaatagttgttaagtaattataagagagacccaacagatttataatagttcactccctgtatcatgatagtattggagctatgtctactttgagtttttatttctaacgagatggtattatagaaaaagtctaagtgtcaaagctctaatttctagag

SEQ ID NO: 222076 - DNA, 2214 bp, Cannabis indica
aattttaatcctgcgggaatagaaagagcaatatatgattggcactatccctcaattggaaagttggaattgggcgaatgaatgttggaaccttctagaagtggtggcttacatacctgacatccctgccaagaaaataactcctagagtatttccaaattttagacatagccttgtaacctaactggctaaagtaaaagtatccggacctaccatgtttcaaaacagatgttagctcaaagtagtagccaacctcgtaaggtgagggttgtggctagcctaactatgcgaagagaatgaaaagcgttaacaggtaattaatgtctttcggggtaatctgagtcggacacaggctacagaagttagctatgtccctgaaatagggatgcaagggtaggaccgccccttgctcgatatgaggacccgaccaagccatccagttggaagttcccagatgaactgatcataaaactcatcgcttattctcttcaaatagcggtggtgttggacctcagattccagagaattgttgctaacctcaaaatttctcgaggggctacccgaagaacccttgggagaagaactggatgatggtctttgtagagaagactgagcaagtcttcgtcattttggttgtcacctccccaaaagtcgtgcgagttcatttatgtaaaaaggtagaggaaggtgagcaacctggcgaaataaaaagacttagacgaaacacgggtcaactgatctaaacctaagaatattagccagatagccctaatgtataaagctgttaatcagcaaagtacaagatccaagtgtaaaaaattaaacagacattgagttttaagctattaattggttgggataggctctacctaaggcacgccattcagagttcctacaagaactaagtattgggtaagggaggaataggctcaaaaagccatgaagagtctttgctaagattaagtgtaggccagaactgaccaagctattgggacagaagccacgaacaggccagggtcccaggatggaactatgaaccagctgggttctcaagtttgaagtcacgaactggccaggttcttaatccaaaagcatgaactggctacggtcacaaacgaaacctgtgtgccggccagaggttcatgagaatcaaattcctagttttcaaaaacttaaatagtgttcttcgtgctcttcatgactcaaagagtcaaaaatctaattggagctcaaacgctaattttttttttatcaagaagtcatacattatacgtcctaaaactattatgcagattataatgtaagaaagactatactacaacgtgagaatcaaagattttaaaaagcttaacgtcagccatggcagattcaagaaagcaatgagaatgtgaaaattgaagacttacccactgatgaagaccgctatagatgctcggggaatggtcggataaaaaaaaaattgaaaccatgagaaatggaagagtttggagcgtcgggttagatgaggaagatggaaagctttcctttttcttgtaaggagttcgaaggagaaagagagagtgaagggaagtaaaataaaaatgaaggcaagttgaaccttatatagcctctgaagtatgatttccaccaaaaactagatggtcatttctccgcaataatagccatgcagaagactaatagttacgaaaatgggaaaatgtgcagtcaagacatatattcccacaatgattagcaataaagtctttttttgtcatcaatgtgagtcatctgagaggttaaatatctgactaggcatagttgtctggttaagattttttacaaccaagattggagttgaaaagtctctatctatacagacgtccgcacagggacttgagagcaaatgttatttcaatttttgctcacttgatgtggtatgtccacatgggaaaaactaaagccacatggagtacaacctgtcaggaactggacaaatttgccttgtacatcatgttaattgtcaagggttctgaagcaatcaagcaagatcaagcaagggagaaatggctagccagggaaccttggccggactaaaccctagccgaccaataaaatagggctggccgaccaacatgtgcaaataagcctcgagttaaggctagatggatggtgggatattgtaacgccccaatattttgccttattttacaaaatactaattttgatgcattaatt

SEQ ID NO: 222077 - DNA, 3914 bp, Cannabis indica
ttgcagcccctgttacaagtgctgcaacaaacggggggatgtagtctcagcgggcgtgtgattggcgggattactcaatgtctggctactcggttactacttcaacaagtgcttcgagtgccaccaacttcatctgcctcctctaccacttaaatttcatcttatagtttcaattcaagcataatcatatactatcaaaatcataaatccaataccttacaagttacacaattgtgaactttaatttaacatttgtagaaaaagctccatctttgaacatcttcctacattaaactgctacatcttctagtacacaatttttctacaaactgtttgaacaaaaatcatcctctaaaccatactgttcggctgatacttgttttgctttctcgaaatgaaactaattctaatagaaaatatttcatattatcaagagaagacatatatgctcgaatagccaaagatgtaggtagacaaaatcacaaaaacttaccacgtccatacttattgttcgacatgcgacaaagacagaagtgagattctccatcccacatcgacccaatctgatctgaagtagacttatgcggtaggagagaatcatcaaccacaaaaccatttccgagtctgcaaaaactctgcaatagaaacacaaagaaaacaccaagaaacatggcagaaacaatacaacaaatactaaataatcaaaataatagagcagtgatgaaacaccaagatgcttggttcagaatcaaaatgcaacatttgttaattgagaagttccgctcatcttcctattttacgtctgcagatgaagacaacaaacacagtggcaaaaatgggcggagaattgatgaagttggttgttaagaattccttaatgaacaaaaaaatattacaatcaagacataaaaaacacaatgtctcctatgtcccattataaataatattttacagctttacaaagacagatatactgtaagacccaaaaatctcagttcacctgacatttataaattgctctatgaagaatctcataagttatctcattaggtccacaaccttccatttccatagctttaaacaaagagagaatttcaccgaaatggcctctccagaacattgcccccattatggtgttgtaaatttctacacttggcataatcccttcatctaacatctgatctctcagctggagggcaaaagatatcttccctttcttgataacacctctaactaaaaatttgtaggtacaaagatctggttttagtccctgaaaatacatgtccttcaacagctgctccaccaacacatcgttaccctcttttacaaaagcatctatgagaatattgtatgagatcatatcaagtataaatcctttatttttgagatgttcaaaaagcttccaagccattttgactaacccattatggcacaatttgtgaagaagcaagttaaaagttatttggttgaatttcagctcattgcacatcatgtcatccaataacttcaaacactgagaggattttcctaacctagcaaagtattgaatcaaactaacataacttacaccattaagctgaagatgctcatttctcattcgacacaaaaccagttggatcaaggaagagttgccctctttgcatgcagcagacaaaattgcattaagggaaaccagatcaggcccatttgcaccccactcaaagcaatctaatagctcccaagcttcatggaccttgttctccatacaaaaaccctttataattgtgttatatgaaacattgttaggcataaagcctctttctgtcatattcttcaatgaagacaatgctttatctgacttattcttatgacataaacaatggaagaaaatattatatacaaccacgtccaaagtaaagcgcattgaaatcaaatgagacaatagcctgtaagcaatatcaatcttacccctttttagtagacttccacccaaagaagcatatgtatatgaatcgtaggaaaaccctttttgatcaatcaacaggaagatccgagctatatcttgaaatctatcttgaagacaaagctcgcgaagaataacattgtatgtaatcaagtctgcttcacacccttctctttccatcataaccaacacatctaatgcctcttcaatcttaccattatcacaaaacaactttatcaatgtggtgtatgttattaaattgggcatacacccacaacttctcatttcatctaaacaacatagaatatcttgccatcgacattctctaccaaatccataaattaatgcagtgtaagagcagatgttatgtacaatgccctttttcttcatcaaacaaaataattctagagcaatggaacactgacctgatctacaaaaggcccatagaatcgaattataaacatgcgaaccataaatgtgacccttgtgtagaagaagagagctcacttgaaatgcctccctaagcatacaagcttttttaagcttagagatcaataaatttaagctgctttcggtcaggttatagtccaatcttagcataaacttgaatacatcaagtgaatcaactaaactccctgcctccaacattttcttcaatatcttagacaaggtcgtaaatgaaggtgtaaacccacaagcaaacatttcttcagcaataatgtagctatcttctaagtaatcacgagatagcatcccattgataagggtattaaaagttgatgcattaggaggaccaaactttttcatggaatgatatagctcaacaaagacctgctttggtaatggcgcattcgatgatttaaagaaataatatatcaaagcattatagtcataaataatttgctttccattcatttctttcatggaatccaaggtatacagagcttcactcaaatggccggatttcgcataactctgcatcctaaactgcaaatctttatggtcagaataattcacattgttcccttttatgacatcataatctctaagtgcatttgtacaagaaaacttcaccaaattaagaccatgcttcaaaattttgctcgactgcctgactatagaactctcacaaagaagcattatacgaaagtaatcattgtagaccaaacattgcaactaaactgcatcaagctactccaccaaatagattcagtttctgtttaagaacaaaaaaatcaaaataaaacacggttacagttcacaaataccttcagctaaacttaagagctacacatttgaattgaaaacctcaaaacatgccaaagaattacagagtcaatattcctcaaaatcccctattacattcaaatttctcattacaaatccgaaaaggaagtatgactagaaaataactaattaagaacaaagaaaatcacagaaactatcaacattaaaatgtaaatcattaattcttctaatatattgaaattgaaagcgtagtaacaatttttaagagtactagtgttctcaatctgcaatgaaaccacgctacaagttacatttcctttcccctttctttaatttccttcaaaagaagtgatctgtgtatgtacatatgaagaaaattctgaaaaatatatagctgaaatacagagaaaaatcatatgtatacatagcttaagtaaagcagcacaattttgaagcacatatgatcacttatacaaatgttgtaaatatagggctgaacagataaaaatgggagattgaatgtaccttcctgttggagcttgaagtcgccagtggccgttgtcgaggtcggctgggactgagggaggtagaagcagaggcgtggagagaagtgagaagaagcagggtttaagaggtttcttactcttattttcgaggtgttccggttcaggtctaacaaattttagggtttaggttagtgaaggtatgactgtgagtaagagtg

SEQ ID NO: 222078 - DNA, 1663 bp, Cannabis indica
aatttctgacacctcttgtatgagaagaattcgatactcttctttgagcacaattagcaactctctgagccctttgattgatatcctcaaattctttttatttgctttactgtttcttcagtcaattgttatgtatgttgctctgatgacaagtgtaatcccagctctatgagaccttttgtaggtttgagattagaatttgttcacacagttctgagctttttattctagatttcttactttctcatattttaatttcgatacctttttattgctatttgtttgttattttcattaaatagaacaattccctgtgatgctataacttaccatgctaattctgatcattgaagtagtgattgattcttactttgtttctgagggaattttctggttttccatgtttccgcagtgattcttcttttcctatgtgaataatatatttttctgaaattcttcttttttaaccaatcaatcgaaatatttagttcctgttatatgtttattcatgtgttttcttattgaaaacaattttgttttatcaattaatgtgttttctttgatatcgtgattattgttgtgtttgtatttggactttttccagttaattattgttgcatatgcttttagtttgttcttttaaaaaagtagggcgatgatgatgagtgcttaatttctgacacctcttgtatgagaagaattcgatactcttctttgaacacaattagcaaatctctgatcccttcaccagatatcttcacaatttgtttatttgttcttcagttacttttataatttattgttatgtatgtcactatgattatatacgtgtgttgctcactcaaagagcctttccagttccacgcaatcttacatgaaagatttagactaattagtattctttgttacataaaagagcctgtccagttcctcacaatggataattagtattgttaatatgtaatactattacacaaataattaatgaataaatgagaaaaaattaagattatttttgtcagagtttgactctgatttaaagagggtaactcgatgcaattagggtctgtttggaaacaagtgtctactagtgtagaaattacactgcatagtaattacattgtattttaaaatacaaggtgtgttttggatttcaagtggtaattgcatttgaatttctaatattatgtttggtgtgatagttagtaattacacagtcaattaatataataatatttaaaaataaatttaatcaattaataatatataaaaatctcaatttcatatattcatatcatttgttttttttacaagataaactgcactcaaaataaatattataaaatagcatcagacatcaaaaaaaataataaaattgtgtacgtgagaaagaattttttttttttttggcaaacggtatagataggttgagtcttttctttttgattgagagaaatggaatatatagaaagggaaatttgaatgcttataattaataattaatagaattggtcaaatataaccacattattattttcccacaatatcctcccatttaaaaactaaaatcaaaaaacttaagttctttctctctctctcgcacggtacatccacacaccaccatcggcttcacctccgacgacgacagacgatccacccaccg

SEQ ID NO: 222079 - DNA, 2967 bp, Cannabis indica
gcttactctgtatttccccttatagctcataggactactgactatcacaggtttaaaaatggcaaaatatttagagaaccttcggaagaacttggaaaagtttgattacttttttattgagcaaatctggcctcgtaacacaaacttgataacttaaacttggtatcggtggaagtgttaagcgagccaagtatatgtgaaaagaaagaagttgagatcattgacgcctcgcgtacatggatcacacccatagttaactatatacttaacatacaactttcagcagacaaaaacgaggcacaaaaactctttcgcaagaaatgatgtttaccctctgttatttcttgtaggaaacacctatagcgactagcaacatcatcttggttggttttattaaatgttctctaatttttgcatcgtttatctccaatttggactagggtttgaaaattctgggtttgtacgagatggccaattcattaggacattctatttctaagtactcaggagaataaacttttgaaccagattaattgggacatttttacaaaaaagaacaatcccaattcctagaagaaatttatcaaactataggcttataaatacgataaagctaaattttttactctatctaaaccataaaggttacccaaaaaattaaatcaaaaccactgaaacccaaaggagccacaaaaatgcaaataattaaatagtgatcataatgcatgaaagtgaaaaagagaaagaggatggaggacttaccgttcgaagttgggatgtcacacgatgaagaactctgaaactgaggatggaatgatcagtgtaatgacctctatggattcctaagattgaacagtatatccgagtagatgcgaaggaaatatatcaatgataattagggcatgcaaggttttgagaaaatcagaatgggttattttgcaaaaagcttgaaattttttgaaaaggcaaaaatggtggaaaaatggctccatttctatttttataccttgagcttaattaccgtaagattaaaggatagagatccaatggataggaataagagagaagtagaaaagatggctcattaatgttaatgatgtgttttgaaaacataaaccgccaaattcaaaagcatgcattttttcaaaatggattatgacgaatataccctcggtaatcatttaaaaaacactttctattgaaaaggactttttaagaggcaattgttatacccaaaattcagttatacttcagaaagtgacacgtgtgattctcgtgaaatatgaacccacagatataatgataattatatcattaaatgcaaaatagaataactcatttaatataaaataaatagagtatattcataactcactgactgtatagtattaagcgagaaaagaatatataaactattgattcatgtattgatgagaaaccatcttgcctcagaaggcatgatcctgagggaactacggacaatgcatagtgagacatctatctcgctacacataagaaagtatcgactaggcaaattggatgttgaagcacttagcgtataacccacgctataataactaagtgtaatagcttgatgacttgaaggacatgattgtccagtctgcaaggccttatggtcatagagcaacttatgccattaaaccaactcattcatctatgtacaaagcgagatgcctctagcgagatgcttctatcccacgtccgtacataccacttcaaagataagagtaaaaaatagttatgcgaacttttagctatacacgtgttaaaatagaacgtggtcaaagcccgtgttttggggaaacagctatgtatttcaaatttcaatgtaaataactgccaacctatattcctataagtaggggcagattatacagaaaaatgtacgaaaaaatctttgagaaaaaagtgatcagcgatcgtaaaaccttaattttgtatccagaaatatcctaataagatagactcgtggactatgcagaattaactgcaaaaccatgtaaaaaacctggtgtcattattgttattattattcttttcaaatttcttatagtttatgtgtttaatttattacgataaggccttattaattcgttaacgaaaatctgcgttaatagtctatttattttaataaatcatttatgaaaaatttacttgatttaagttggtctaaaattaattaaataattaattttcaactttaatctatttttcaaaatttcaaaatatccgcatttaaataaaattcatttcgaaattataaaaaatgattaataaaataaaataaaatatgtttgaaaattattctaatttaagttgttcaaaagttaaaattttaacttaaatataattttctatctaattgaatatcttgaaaagtaactaatatttaagtttctagaataaaatcaacttaaatatttaattttttatttaatttaatgtattaaataagagaaacaaataattaagtgtcttgaataaaataaacttaattattagttctaatttaatatctaagaaaaatattgtaatttaagttggtctaaaattaattaaataattaattttcaacttaaacatattttctaattaattaaatattagaaaatataaagtagttactagaaataactatctagaatatatctcattaaactaagtgttttcctaaattaattttaaaatactctaatgaaaataaatttcatatattttaaaattaatttaggttaaactaatataattagcctaatacaattatttaaataagataaatgagcattcacaattgcggtggttcatgtgtaggagggttgtgttcagtatgtcgtatccactctatggccccctaactctcacacaaggaccaaaatagaggaatttaaccattaattaaataattattatttattgtaacaaacccaatactaattaggcctaaat

SEQ ID NO: 222080 - DNA, 3175 bp, Cannabis indica
gcacattataaaaattattttttatttatttaggtccaatatatgtaaatttccaatccaaagcttactaattattataggtatatattatacgtatcctatttggtttgaaatatgtcaaagaatccaattctataatacccagcccaaagattccaaatagggaaccttagtgaacagggacagagggactttagctcatatgtaggctaaagccctcactcaaatatatacatcaattttttttatatgtagatatatacatatattaattcactttgctcaatttattaaagcccaattcacaaaagctctcactcaatatcttaatcatgattcatgagcctactttcattctaatcaagcccattttaaaagtagttcaatacaaataataataaaaaaataatactttattaaaaaaataaaataatactattgacaatattttattttattttagatgaaaatttgaaagatacatttatcaattatttttattaattttgatttaatatttattcaagccctcactcaactaaatttttggcttcgtcactgttagtgaagaaacaaaaagatctttttaagagtggaaagaaatgagtgttttgagttggactctagctaatcttaaactaatattatctgtttctcttaatttgtaattaacatcaattaataaaaatataaatatttaatttaatgattaataccattttaaatactgtattttataaaaattattgatcaagtcctttgtttgttaaataataaattagaccttgtatttgttaaaatatcatgaaataatactataagctcaattttcggcaattattttttagtataaccaatttgaagataatttatatcatgaacatatgcacgaaatgtaaccagtcttgcaacacatctaaatcaggttatatattattaagttttattttgataaaaaatcagctaagagtattattttgtatcattttgaaaaataaaaagatctaatttgttatttaacaaaatagaacctaatatgtaattattacaaaatacagagtccaaaataatataatttaacattaaacatacatttaatttgaatacaaagtcttcaaaagtcacatgatataataaaaacaagttcttagttaaatgaaatactaatcaaaacaaatatatagaaataaagtgtaataaagtatgtgtagagacctaccctatatataaattgagaaacatgaatgaaaatactgaataataagtttgttgaatatggtttttaaaatatcaatttttgctattacttctattataaaaaaaatctaaatgcggcaaatttgtatagaattttgcacacatcacctactttatgaaataatcctttacattagataaaaatggaaagtgagataatcaacttaaaaagagttgaaaggtacaagatttgattcttcccatgctttaaacttggtagggtttaaataatcatggtcaacttaagcattgctttccttaattgattccatatcctttctagaccataagaattaaaaacaaaagaaactacctttactaatacaacatgaaccaaaatcaattttatttatttattaatttggacaataatgtaaaacatgaacaagatgttagaatatttatataaggtaatattaaattaaattattattaatatatttattgattttaattgattcaatataataaagtcaatatttacttaattgataaaatattttaataaatggtcattatttattttgttaccacccaatttgttttgattaattattaaaatattttattaattacttgtgtcagaaattttaataaaaaaaatcttatttattaatttatataaatatagggtattaatctttaagcccgtcacattcattctatcaaattactataaaagagagccaataaaagttcgaaaggtctatatccactaatttatttttcttttattttgcagatctaaagaataaatatttacatcatgtgcaccttcatatacaacaattgtttttattaaaatgattgttttttaatgaaaattatttaattgattattgtgcttataaattcatttcaccaaacaaaaaagaaagaacacataattttcactagtgctatttatgaatgaccaaccttttggtttcttattagttttgacttgtacccatgaatacattatatcttttcaatggcaaaattaattttgggctatgcttataattgaaattgcactaaagattcttggtagaaatctaaagaaaaaaaggtaaaactttgaaagtgcagttgaagctttttaaggcatggaatgaaattgcgtgcatattttcttggaaggtactgtttggttatattattattagttagttggataaatattaaagctgaaacttgctttgctttgctttgctaggctgtcagtctctcagtcctttcaatgaaaaagctttcgaccacgctatacatatatatttcattacaaataaaaagatacttccttctttacagaaggagaaggtaataaaaaacattagggaatatgactatgtaaataaaaaacaacccaattcatatccattaattatatatatatatatatgtattgcttaatttgtttgaagtggacttgtcatttgtagttaagactttgtttggttgaacaagaaaaacttcaaagactttgataaacacttataactaactttcagaataatgataaagtttggggaggttgaaaaagccatgtatacatatatgacatatataggtttattaacaaagaaataatttgttattgtaataaagtggtagatatatatacatacctttattccttgtatggttttatatagatggatttatatataagagagggatataagtaagtggggacaaaaatgggaaggagagagatgctttttgcatgttatgattggcattgacttgcttgtccaaatgtctttggaaagttcactttttatttttattttataatttctagtgtcctaattgtgggattttcccctctcatataagaattatacccttatatttataggcctattcccatctaggccccaattatacacaaaaccataagagacacataattttgttttttaaatttagtttg

SEQ ID NO: 222081 - DNA, 2317 bp, Cannabis indica
gctttcgcctttcctttacctacacatggaagcaaaactgtgagtcgacaaactcattaagaagagcgtataacacatcatgcaataccgacttgtatccaggcgcccatacacctatttacaaggcttaacagatgaataagaatgctctaactacgatacgaccatgtaccatgtaccacatgcactcagtatatcttcgcactagtgtagttagggtatggagcgcacctttagtactattaagtgttgtaccacagacacattgtaccttcccgtacaagtgttggtaacaccacgatgtactttcagacatcgtacactttaccaatgccctttgtaccgcaattgtacaagtgttggtagtgtatgaatcacatcatataagcatgcatatacactaaacatatacatacattcgcatatccatatcacacattagatacaattcttaccttctttctagattcaagtgtgttggctgacctgaacataaagttttgtgctaaatggatgccctaatcacataataaaacctactaaatcacatgatcgaaaccctaatccaagaaacccaaacccgcaactctaggttctattatactttctagggattacactaaatcaggaagtagcgaaacactcaaatatggcactgaaatggacgagaattgcgaaaatgagacactcagggaaccctgcaaaaactggctaaccagctttacaggtacgggtaaaatcggttacccaatttatacaagctcactgtttcgatccgatatggtccttcccaattgggtctaaggaccccagccgtcgggtcacgtgtcactgagaacacccttcttaacaaaaagtcgcctattataaactccctatttcaaacacgagagtcataatacttctttacccattgttgttgagcaacattatgtaatttagattcctctcttttttcatcgagtaagtgtagcgcttcctctaagagtaggtggttacgatgtagttcatagtattgatttcggtgtgaggtaacttaggtctaaactgggagcatggcctcactcccaaaggtgagtcagaagggactatgccctgcagcggttcggtgtgaggtcctatatagtaccagagtacatgtgggagctcctccgaccatcttcctttagcagcctctaggcgcttctttaatgtagtcttcaatgttttgtttactgcctcaacttgtccatttgcttgtgggtgagctagtgaagcaaaactcttgactataccattcttcttacaaaaatccgcaaataaatcactattgaattgttttccattatctgatactatttcttgtggaactctatagcgacatacaatgctcttcacgacaaagttgagtaccttttttgatgttatggtggccaaaggttccgcctcagcccattttgtgaagtagtctactgcgactactgcatatttaactccaccctttccttgtggtagagatccaatcaaatttattccccacacaacatagggccacggggaggtcatagaagtgagttccactaacggggctcgtggtattgttgaaaagtgctcacacttatcacacctttttacatactggagagagtcttgactaatattagtccagtagtatccttgccttattatctttttagctaagccatcccctccgacatggtccccacaaaacccttcatggacctccttcaatatgctttgtgcttcttcaactatcacacacttcaataatggcatggagtatccccttctgtataattttccatcccccaaagtgaaccttggtaccttatacaataacttccttgcttcactcttatcagaagggagactcccagtggttaattaatcaataagtggagccatccatgttatttgagtatccaccagctccatgttagcttcctcgttctcctccacattgatgctcgatttaggaaggaactctattgagacgaggttgagtgtatcggcttccttagtggtggccaacagtgttaaggcatcgacattcgagttttgttcacgaggtacttgttctatggagtagtactcaaattgttggagttatttttgcacttgggagaggtaggccgccatttttaatcctcttgcctgatactcacccaataccttattgactactagctgggagtcgctaaaacaacgaattgctttcgcacctagctccttcgctaatctcagcccaaccaacaaggcttcatactcaacctcgttgttggacgcttcaaacccaaacctcaaggctgaatgaatt

SEQ ID NO: 222082 - DNA, 1386 bp, Cannabis indica
aattgattataaagttattagattttttttaataaaatattaattagatattaaattttacattaaaattttgcaattgtgcattggagcacaaagctaaaattttgtgtaaatttaccacaaaactactttttgtgctaaatataatacagtttttacatctcccattgaagatggtcttataatcaaataaaaattgtgtgagcttttaaaactgacgagacatataatgcctaaggtttagaaccgacgaaaataatttctaaatctctaaacccccaaatcgatcttgccactgttcacattcgtcttcaaccattttgaagacgaaaaaactctaaggatcctaccatcttcaaccctccatcgtcgacctgccatcgtcgaccgctccgctcccccctcttcctctcgattgtcgaccctccataattgaccgctctacttctctctctcttcctctccattgttgacaactgctcccatctcttcccttcgaaccctaactctgcaattttgacccatcgcgcccaatcgttctccccgacagacaatcctcctccctcctcttcccggcaacagcaaaccgatacaggtaagttatgttttcagtaacattttaatttttgtgttctattgatttggttatgtttttagagatttctattgtgattcatacaaaataagttatatccctttcgtaacgatggatgaatagattgcatattctttgagtttttttttttttttgcttagtatatccattgttattttgccattgcagttaaggaattttgtttgagtttgttatactaatttaccgaaaagaagtagtgaatagatttgtactatttttttccacttagcattgattttgtaacttttttctcacgtagcttttttctcactgatttagtgataaaagcacctcactgacatggatgacttgaaaatttcccctgtggattctaccataacaagtagctaatgttgtctctgttttaagttttctattctagactagtgataattaattataggacagatctaacttttttttagaatcatgataaactatttaatgaggttcatatgatcataagttactacatacaactatctatacactggttgattattttggtagaaaaataaattattctttggtattattctttaaactcgcaacaaccattcggttggttagttagtcttgaactaatttaactgttaattataacagcttgcatattgggtctcttggcctatataaagtggactactcctctcattccataagagaatcacaagggaagaagaacaagaagtagagaggcacaacacaatagagagagaagttagagtgagaaatagagagagatatct

SEQ ID NO: 222083 - DNA, 2164 bp, Cannabis indica
ttgaagatgtatacatgcatgcatgcaaggtttttgacagaaaaaaagattcaaatcaagaattggtagagttaagatagaagatggtgaagagattacttatgaaaaggcgactgcgtctgtaagaaaggcagttcaattcgtcgcagctttgcaggccgatgatggacattggcctgctgagaatgctggtcctttgttctttcttcctcctttggtcagattaattaattccttaatttatactcttattaagagaaaaaacaaaagattaaactatagttctaattatatagtcacttatttatttactctttcaatcaattttataagatgaatttatgttataattttttagaaaatgaattggttatgaaacttccaatactattaaaatattgtactttcatttctattttttacaagaaagtttttttatttatatatatatatatatatttatatatatattatacatcatgaaatgaaatgttatatattatgaatcatccctgaaaattaatacaataactatatatatgttttcattattatttttctaatccttgaatattacattaaaaataataataaagatataaatgtaataattaaaagcctaatttgaaaatatatatataagtttttagtgtatatattcatcactatcttatatactcttgtgcctgtataaattatatatatacaggtgatgtgtctttacattacaggtcaccttaatattattttgagccctgaacattgcaaagaaattattcgttatatatattatcatcaggttaagaaattataatataaagtataattttttattgtatattaatttatatgttgagattttttagtttttaaattcaattcttatgtgtagaatgaagatggtggatgggggttgcatgttgaaggtgaaagcactatgtttagcacagttctcaactatatttgtatgagaatattattaggagaaaaatctaataatggtgaagacaatatttgtgaaaaagcaagacaatggattcttaatcatggtggtgcaacatacataccttcttggggaaagacttggctttcagtatgtatatataatctataattatttgctataaataatattaatattgatctttataattaggttatgaaattatagaaatattaaatatctcttttgttttaggaatttgttagattttattcttgtacctcttttttgttttgttacaatagtcattgacatagtctaataatactaggttcttctcactaaatttgaatccattctctgaatttgttttaaaattctgtacctaagctaacctaaggtggcttaaacatacaaatttcatttgtactttgtgggaaaattagaactaatatgcagaataaatttaactataattgaatcatcaaacgattagcaataacaagattaacaaaattataaactaagaatcagtgataaataaataaagtacaaaaataataaaatcaacaccaagatatctattagttcaagtcttatagattgaagtgattgagcaagaacacatgtacaatacaatcgagatgcctttgtttggattctctaaaagtgtttatctctcacactcttacccaataatcttctaggatcttcttcaatatctacaaaagattcttcatacaaatcccaaaactcaatctctctctctcttttctctgtacctctcaatctcactctgcgttctcaatctttaacctcaaagtcacttctccaaaaaactctatgcttgcaaatgatgagtatggtggtatttatagattagggacatggatccctaagtcggtagttgtagtaacaaagttgttaagtctgttacaacttaacaaacttataaactcctcgtaacaatatctccatgtcagctcaggttagaacttttgtgaattagaggcacgcttcctggacaaagaactgaagcgtacactggtaacgcccgtacttttataaaaatataaattttatttacaagcgttaaatgcgaaactcaataatataatattatgaatatgaataatatatgtatatacgtagattgaattaaaatgtatatatataattgggattattaaaactatgaaagtatatatatatataaaatat

SEQ ID NO: 222084 - DNA, 5364 bp, Cannabis indica
aatattttgtaaaatagttgtaaattttaaagatgggatcccatgttatgtaatgttttaattaattaggtttaaagtttaattaagaaaattttgaaaattatccacgatatttcaataaaccgttgattagcaacagattgcacaattagtatttaaatcacgataacacgcctaatctagtaggatgttacaatttggtatcagagccaccagattatattttgaagattgtcacgatatgtataatcgtcattagagataagctcgagtcatgatttagtatgctttttatgctttaatagtttgttttattagtaagtgataagaaaatcctaataagaagcatattagtagcttgatagttgaataggcgcatgttttattttctcaagtaagcggtaattaaaatttattcttgatcgcgatctaactaggttagctcactatttcgtaggatgttctaatagaatggacgccaggcagaacacgagaaaccaagataattcgatcgaatcaagtggcagtcagggaattaaatttccccctaatgttagcgatcgaggcagaggcccaagagatagagcacgcggtcggagtgatgttaatccaccacaggctgcctaggattggaagaataggtttctgaaatgcaagccatgattaatgagcaagatgaagaaattcagcgtctgagatagcaaggtgctcctggaatgcttgctcctgaggtgcaaatggctcttgcccttgtcatgtaagtgggccttgttgtcgttgtcaattgaatggaaccactctatgaaaggttgtgtaagtaagcaccttcagtctttctaggaggtttgaacattatgaagccaagcaatggctaactattattaccaggattttaaattttatgggagttactagaaacgacagagtggcttgtgcaacgttccaattctaggaggatgccctggtttggtgggacatggatccctcactcgagatgtcaccagaattacttgggaagaatttcaatagttgtttattgcaaaatattataatgagacagttcgtagtgttaagagaaaataattcacgcaattgacacaaaaggaaaatatgtcagttacagagtatacgatacagattgatagactggctaagttaacctcgagaatagtgtctaactttagtaagaaagaaaagtatctggatgggttgaatcccaagattagacatgacctgatgattacaacggatgatgccaccacttatgctaatatggtgggaaaaacactataagctgagggcgcaattgagtgtattgaggagtcccaagggactcaaattgctggtggagccactactcctcctacctctggttatggtaggggtggtagtaactcaaccactaatcagaaaagaaaagttccatctgtgtttggtggctcaagccaaaataaaaggttttgagggaaccaaggtcatggtaaccgtcagggtgggtctgagaactgacacacttacccaaaatgccctaactgtaaaaaacatcatctgggaaagtgtagatatcaaggatgtttccaatgtggtgtaactggacgctataaaagagatttcccacatttaaagaaagaagaacagaaaaccgaggtaaaggttgctccagcaagggtgtttgctcttacacaggctgatcgcatgtgtattgactaccaggaattaaataagttaactattaagaataagtaccctttacctaggatcgacaatttgtttaatcaacttcaaggaaagacaattttctctaaaattgatctctaatcgggctatcatcaattgagaatccaagaggaggacattccatagattacttttcatactaagtatggtcattatgaattcttagttatgtgtttagactacccaatgcttcgatagcttttatggacctggtgaatagggtattcaaagatttcctcgatatatgtgttatagtatttattgatgacatccttgtatactctcagtcaaaaacaaagcatgagcaacatctacggatggttttataatggctatgggaacataagctctatgctaagtttagtaaatatgaattttggctatctcaagtgtcattttagggcacattatcagtaaggatgggatcatggttgatccaggaaagattgaattcgttaggaattggccgaggccaaaaatggtcactgaagttaaagctttctgggtttagctggttattactgccaatttgttgaggggttttctaagattacaaaacctttacaaagttaattaagaagaatcagcggtttatgtggacagacaagtgtgaagcaagtttccaagaactaaagtagtgattgatcacagctctggtattaacactaccgtcagattaggaaaagtttgtagtttattgtgatgcatccagataaggtctggggtgtgtcctaatgcaagctgatagggttatttgttatgccttccactaattgaaggagtatgagcagcgatacccaactcattaaagatttggcaacactatctctacagtgagaagtgtgagatttacaccaatctaaagagcctcaaatatttctttactcaaaaagatttgaacatgagacagagacagtggttggaaatggttaaagactatgattgtgaaatcttttatcatctcaggaaggccaacgtagtggcaaatgccctaaataggaaaggttccaggcaagtatccaatatggttatgatttcacctcagttggtagatgacatggtcaaatcggatattgattttgtagtgggaaaacttaatattttgacattgcagtaagatttgttagacaaagttagaactgcttagtgagtggctccagaattaataaaaattcgagaagaggttttaactagccaatttaaagattttacaatgtcaagtattggaatgctactttacaaaacttgggtttgtgttccgattagtatagaacttagaaaggaaattcttgatgaagctcataccacttcctattcgttgcatcctggtaacaccaatatatataaagatttaaaaccttattactggtggtgcgatatgaagaaggatgtggtggaatatgtatctaagtgcttgacttgacaacagcttaaggctacacaccaaagacctgtagggttgttgcagcctttgactcttcttaagtggaaatgggaggatgtcaccatggattttgtggttgggttacctagaaccacgggtatatttgattccatatgggtagttgtggatcaatttaccaagtcagcacacttcctaccattgaaaacaacatacacagtagattagtatggagaattatatgtaagggaaatagtaaggttgcatggggctccaaagtcctttgtatcagacagggaagggatctgatctgaagtttacttctaagttttgggaaagtctctagttagccatgggtatgaagctaaagttcagtataactgttcatccccagacagatgttcaatccaaaaggacaatctagaaattggaagatatgttatgagcttgtgtaatggattttagaggctcttagagtaattatttgccattgatagagttttcatacaacaacaactatcaaattaccataggtatggctctctatgagatgttgtatggcaggaagtgtagatctccaattcattgggatgaaactagagaaaaaaagtacttgggttcagaatcaatttagtaaaccaacgaggcaatagaaatgatcaaggccacgatgctcacctctcagagtaggcaaaagagctatgcagatttgaaacgcagaaatatagactttcaagtaggagattatgtattcctacgagtgtctctgatgaaatggattaaacattttgggaaaaagggcaagttatgccctagatttatagggcattttgaaatttttgggaaagttggatatgttgcttatcgtctagccttgcctccagtattatcatcaattcataatgtatttcatgtttctatgttacagaaatacatctcagatcccactcatgtgttgagttatgaaaacttagaactctaatcatatttatcatatgaggagcaaccagtgtagatccttgataggaaagataaagtcccccagaataaaaccataacattggtcaaggtactctagagaaatagtaaggtggaggaagccacttgggagttggagtctaatatgagggctcaataggttagattttgaggacgaaattcttttaacgaggggataattataatgaccgcttagttttaatatgagaattagcagataattaagatttaattccagagttagacttttatttattatttatgtaagtatggagatatatttgaattctaggtgtattaattatgatgtatgtaaaattttatgattttcatattatatgcccggtaaaagtagaacgcgacgtatggcatatatagtcacgtagatatgatttagtaccttagaaatagtagggcgatatagttagacatttggaatgttgaattatttcagggttatggattgtgaccatttcacccttatgtatgttgattacttcatgttgaaggaagggtgttatacccgaaatttggcaagcacttcagaggaggacacgtgtcaaactaggaagaataagaatcaaaaaatataatgataattatatttgaaaatggaataactctttaaatgcagaattgacagagtatatttacaacttgctgactataaggtcttacgggagataaagatatacaaattgttgcctcgtgcattaacgagaaaccatacgactctagatgtgcaaggcgaggcatcaaccttgttacacatgaagagacgcaggcaagatataataaatgttaagacacttagcgtataatacacagtatacaaactaattataacagtcgggtaaacccaaacaactaatagcgaggcgtccatctcgctataggaaggcaccctcgtggtaccttcactaatcagctccaaacatctttcaatgagattcacaactccgttgagttagttctctcagatagaagctgacattcaaatgatgttgactgttgaagttcaccttgtcaccaagaactgcgattgccagatggagcgttatgtcttcagcgtagaagcgacgagatttacattatcaacctccaaaagatgtgggaaaaactctagatcgctactagagttattgttgctttgttcccagcgagacgtcccagaacaatacgatttacaacgtatttaatacacgtttacattgacctagtaaaag

SEQ ID NO: 222085 - DNA, 1013 bp, Cannabis indica
tttagtgtatgggattagatattaaaaaaaaaaattttaaaacaaaaatgggatgaaattgtgaagaaatgagggagatagggggtttttagtggtggttggcgagattttcgtgggttttcgggagtctgctatgggggtggctggttatcttggggaagaaaaagacgagggttatttttatacaccctatgctatcggttcctagcaaataaacgacggcataggtgcacacaatgttaataaagtgtgcacctatgctgtcggttatttgctaagaaccgacggcatagggtatataaataaaccttaaatttttctaaccccaaccgactgtaaaggatatatttaatatttatacctacgggttttaccaaaaaatcatctctaaatgtcaatttcgaatcagggggtattttcacaccctttagtttctctttttgataaagtggattgaaaaagggaagttaaaggcccatattatagtagtgatccctgacgaaatcaccacagtggtccacgagctcactgttggttttcttcacggtgacacaagttacggaggaaacttcctctcttcgtcgtgagttgcatggtttttcagccccaaatcttattgcatatttgtcttaatgttgtctaatattaattagtgctaaaagtgacatgttttaaaaatgttgattatttaaacaattttcattcataatggttcgaaataataagtttaaatagacgctatcccaccaaaaaaaaaaaaatagaagttgagtttgcagattggtcaaaagaaaaggacaaagcatttgacaagcgatttaaatcctctttctagtgttatattatttaataatataatatgtagatgaaaatgtagtaatatatattattatctgaataatatatattaagtgtttggtaaataaattgtgtaacatataatttatttaacctaaaattataacctacactttgtaatatggggaggaattacaaaattaattatttttgta

SEQ ID NO: 222086 - DNA, 984 bp, Cannabis indica
acccggtgtttccccttacggatcacgggactactgactgtcacaaacagccccttatatgactagttggaataatatgattttctccatgactctacaattttgtgattttgtgcgtgtatttatcatattttgtcattggttcatatatacttcttcaaaccacataatctttttcgtaaccttctctgaagctttacctaaacatggcttattcttattcttttttagatcctattgattatgtctttgagtcgttttggaatattcaagatggtattttcataatgctttactttcgggtttgagattgaaaaaaaatgagtttttacagggttaattatgacattatttgcagtgtcataagggaatagaggggacagtggaaccctctgatcaaattacttctgagagtgaacatggttagtggatcatacaaaaaaatgagcccttatttaaaaaaaaaaaatatatttttcaaaatcgataaaaaaattattaaaagaatttttttttttaaactctatagagatagaccccgacagagtaaagaaaattccattttggttcaagtctaatattcttcaccaactttaggtgaaactattgaaatttgtttcattttcatgttctttatttaattgtgactaaaccacctttgttgagagaaaaaaatatttaagggcaacaacttcaccgccaaagatgtcaccgccgccaccacctctcacctaaagaacaatagaagatgggccatcgaaggagttagaggagagaatggtcagaactagcattctttggaaatttttgaaggaggcgacgaagacttcaagatcacgtgagagttgcttctaggttaattcgctaccagagcgtggtaaatggtaaaagctaagatattgagacaacttcaaagtcatcttttatatgataatccgctataagcaggaccaattttaaaagtggactagtcccgttttcgat

SEQ ID NO: 222087 - DNA, 1714 bp, Cannabis indica
tatgttaaggggttcacctttcttagcatacaccaattccttgcccttgcctaaattcaagatgtcaacttaaaagatgtacacaggggaagaagatcctctaatacacttgaaatatgttgagatccaaatagatctccaacaagtatcaggatatgtgcgatatcaaatcttttcagcaactcttactgaaataacccaatagtggtatttcgagctagcccccggaagatttaattcttgggaagaattctctcgagagttctatgtttagttctctgtctcaagaaaaataccttcacaattagaggatcttttagagataaagcaaggcatgctgaaccttagaaagactaaattcaacagttcatggctgaggctaccaaggtcaaaggcctaacagaacaaggtcgatatacgaccatacttggaggaatcttgccattgagtgaattctggaaagatatcaaaaagatcctaacgagtaacatgaaggagttccttgagcaagttgatggcttcataaagttggaagaagctattcggcaagcccaaacaagagggcaagtgaatgttgaatagacacagggcatcacattgccccaagtcctgtcagacatgcccaccaacatagaagatctctcccaattctccaacaatgagaatattagaggcaagcgcaacaacgatggctctggccaaaataatggcaaaaaagggaaattcaacgattcccttacgccatgaagtttaaaggagaaggaggagaagtgggcatgcttcactctcctaccaaaactcccaaagcaatgcatgccaaccggtcatggcaataggtttcatcaaaacttcaagcacgtggccaaccacttaagtgaaccaccaaggctcgaccaatataaggccacctgtcaactttgaatgtcaataaaagacctagctctcgccaacttcatggctaaacataaaagcaagaaccaaagaaaaagtgagagcaggaccaagacatctcaacctagaaggtgcattgacaacctgcccgatgcaagcatggcccttagaaaacttgggggcaatggttgcacaaggcaataaagggtagacgaaaagtttctaacaacaaggttgcatatgaagctctgattgctggcctcaagctagcattgaaagtacgagctgaacacctagacatacaccacgagttttaacaagtcatcgatcatgtcctaggtgaatatgtagctcaatgtaaaaagatgatgacctatttgagctaatattaggacttttcagctcaaaggttgtgctaaaaggcatgtacccatagtcgatgtaacaaccgacgcactcgcttgactagccaactgcaccttgacagccaaggcaaacttggtacccgcttagttcttcaaagaactaagcatccctatttcgaaagagatagacatgctagacatccaatatgggtatacctacaatagcatacatccaaacaaaaatcttatgagaaagcaggggcatagaggatagctactcggtgtccaatcctggacagcataacacatagatgtggtatcgcaataccacctctaagaagtgttacaaagaaacaaattgaataactattgacaagagtgcataaaatgctctacggtaataatatcaggggccaaagccaatcgagtgtaaaaacgatcaaactacagtatccacc

SEQ ID NO: 222088 - DNA, 1386 bp, Cannabis indica
ctctctctctctctctctctctctctctctctctaaccgactgaacccccaaagaccatcgatcccgcgcatctcaccaacgcacacaccaccgttgaacctagtcgtccacccacaaattaagagctacccacggcagagcctggcaataaaacctattaagagctatgatggttcgacccaccgaggagccagaaaatcatagacccactaccttctacgacgaatcaacccaaagctcattcttccattttataataatgtcaaaggtaaattttttattttagtattttcaaatatgcgttgatttaaaatatgttatttagggttttatttgggtgtaatctgcgttcttgaatgaaatttggttttttaagcttggtctgatgcttgccccatagtttgtttgttgaaatatggatgaaggttgaagatgaatgccttatatgggcacgaaggttgtacagtataggtccgatagtcccttaataatgaaattaattatagcttcgatccgatagggtacgatcttagtttgatatgggttcgatagtttaggactttagttttttaaaatcgagtctaatatggtacgatgtcgatccaatttgggtttgatagtaatagtgtgtcttttaaatttaattttggttgtctatgcttgatggggtacggtgcttgtccaacaatggtctaattttttttttatttgtgtttgtatgtgtacaatatggtacgatgtgggtctgatatttggcccgatatgtttagcaagcttttcaatgtttgttcatgtgtctgtgtctgatgcgggtccgatacccacctgatatcagcccgatgcttatatacaaaatgtctaactttaatttttacattatttttttttcaaaattcaagacctccacgccttatagttctaatattagaccattacacaggacatatcacttggcgtgacggtagtttttacttttcaaagataaaaaactaatttgaggaattttaattattatagaaggtgaaggaatctccttccaaacaattttttgagcaattaaactatttgggtgtccatcatctattcttgcacaagatcaaatctaagaaggaagacgaagtctacttttacattgcgaagaagagatgcaaattcagtcgatctgagttcgctgtagtgactggattgaacttgttacccaaatcgattgtgaaagatattgaagagaaagcaacttcgatccagttaattgtggagtacttcaatggtgatcaatccatcacctttggtcaactgcacagagtttttgagagtttcacgaaagtcgatggtgtgtacaagttagggatcaccttgtttgttatgtgtgttctcactagtaaaga

SEQ ID NO: 222089 - DNA, 2215 bp, Cannabis indica
acccaaaaaaccatatgtcaaaccagtagaaattaaataaaataaaaaaaccttaaataaccatgcatatttataattgggcaaaggtttgatttttctaccataaaaaaaggggaaggggggtagagatggtggctctggcatctcaaacttctcaacgagctagacccggtcatgaatgggagggataaattaaagggtaaatatttttttggaccctgtgttttgtaaaatttatcaattggaccttcttttttgttaaatgatagaattgactctatattttctaaaattgtacaaataggaccatgaactgtttttttttttttttgtcaaaataaaaattaataataatctgatctagagatgttatgacaaaactggttatattttatgtatttattcttgttagaaattatcttaaagtcggttatattaaaaaataaaattgttaaaaattaagctttgtgtcttatttttattatcattttgaaaaatataaagtcaattttgtcatttaataaaacagagtgtctaattaatgactttaacaatgaatatatatagtattctataaatatggatcataaatagtaaattttaaaataaaaaagaaaagaagtaaaataaaatatatattttttatttttataatttttaaattaattttttacaatattttaacaattaatattacgtggactattaaaatttactatgtgtacacttgtgtacacatggatagtccactatgacacttaactgaagtttttggacggaaatgtaatgaagaaaacgaaacttgagtttagtaggttttaccgtcaaaatttaaatttttgtagttaagtgttaaaaagtataaatttaagtagttttactgccaagattccatattaatattaatattttcctaccaatcaattattcctctaataccaattgataaatttttaccgtattattagagcattctcgacaacttctttactttatcctttagaacacataaccaaaattctactttctagcacacttttatattacatcatacatcaatttttttagaatacattactaaaattctactttcttcaaattttgatatattttattcattttaaatatgtaatataaatatatacacatatactcatatacaaataattattaaaatctaaaataattaataaaatatatttatttagcaatgaatatatagtattctataaatatagatcataaatagtaaattttaaaataaaaaagaagtttagagcatttgctatagtatgtttttagtaccaatttttaaattttttagtgtttctatattttaaaggagttgttatgagtggtcatatatctatatagttaggtaaggtttacctattataaaaaaaataaatataaataattaaaataaaaataaaataaaattaggtaaggctagcataaccttaacaaatttctcctaggttaatgaatgatattacgcggataaggccacgtcatagattctctacatactgtgtacacattacactttttattttttcggtatttaaaataattttttcaatttatttttgtaacacaaattgtaattttttagaaccatatgtaaatttattgtacaaattactattttttttttttatatatattataaacaattgtttaaacttattatttttgactttgtaatttattataattttatggaaatagataaagaaggtaaggaaagagccttttaaaggatgtatattatttctttttttcttaatatttttaagacaaatcaattatatttatatttatataaaagaaaagaatgatgaaaagaaaagctgtcggtaaataatggtgtgctctatctaaccaaaaataaacaattgcatgtcatagtcatacattatattttttttttggaatttaataataatgtttattatatagtatacaagtaataaagattccctacatatacactatattttagcaatctataggcaacattgacctcaaatggtctttggcctcttcgtcaccgggggcagaatcttttggacaatggtcaaaagttttgaatttgtaagtagtataaacctaataattatttttttagcagcataagtacttaatgtttgtaataaagttgtaattttgatccagtttcattagtacatactcttatttttttttttttgaa

SEQ ID NO: 222090 - DNA, 2206 bp, Cannabis indica
gcataaaacccaacagtcattacatgggattttcaaagaccaaatcagcatccaccagtttttaaaagtagctacgttagaggaagagggaaaagaagtagaaactaaagacttggcaagatgataggaagaattgacagtaaaactgctcgagggatgacatccccaaatgagagtgtcctccatagttggacaaataggaacctttaggatttcatctataatgtccttagggaagtaaactctatgactttcaacatttcatgtatcattatcatgaataaaatacaagaccgagtgattaaggggaaattttttctttaaattgaagagatttaacattgggaacacaacaggaactaatagtagagatagaagtgtcatttctaactttccaaatcagacccttcaagagcggtatcttcctcacataatacttctccaactggtcgaagagcaatgacctttggaggcatggagaaaatcattgtttttaaaatacaatctagacaaaagagacaaagggttaagaaagatcctccaagcctgcttaacgaacatagcctcattgtggtggtcaatggatctaaaacccaaccaactaaaaaaattgaaaacacagagtgatggccaaatttccaatgatttttttcttgttaacactagaactctaccagaatttagccataaggctctccaggattttacaggtagtcattggaagacggaaacaagatatagcataagaagggataacttggactgtagctttgagcagggattctttcccagccctggaaaagaacttgccattaattctagctattgatcttagaactaacactttgcagaagatagtggaaagaacttttaagcctaccaacactgatgaactcctaaatatttactgataaaatccttattagacatccctaattattgtaaaaaaaaatacttttatcacacaatctagtatttggagagaaaatgatagaggatttgtcaaagtttacagactaaccagtgaccttattatagaggtcaagtgagagatgactttacattaggctatcatttgcaaataacaagtgagagatgacaggggcagttctgcatatagaaaaactcttaaaatgattagcacacatacgagcacagatggcatcagagaggccttcagagaccagcagaaagaggtaggagaaagggggtccatttgcctgatacctctagaaggacggaaactttaagagagacagccgtttaccaggattctaaaggagacagtggaaatccagtttaaaatgagagagacaaacctagcagggaaactaaaatggagaagaatagctttgaaaaaattctactcaaccctatcaaaggccttttccactcaagttgttggaagtgctcctttataatagttaagaggtaataaaaaagaaatattaataactaaaatcttgctttcgttcccaatcaaacaatttaagcctttctccatcttaacttttttagctacttgctccaaactatttacaactatttatgaggtacaatattttatattatttttttaaccttttatttttgtttattcttgaaataattattttattttattatgtttctaatatttaaataatgtaaatgtatttggtaaaattaaaagagaaaattaaaattttagtaaaacatttcaaatggagtagacgagtgttgactgctgaatttgagttattacttttcactttttttcacctctcttttaaactaaataactataataatcctttaaaaaaaactatgataacaaatgggaaatataattttctatgcatttattggattaaaattatttccttaaacctaagttaacccatattggtagaataggctaatatttcataaaaccaattctacccatcccatttcaaacacctgactctctctcttcctcctttctctctcttgctctctaaactcactcgaatgactcgacccacaactcacttcccacaacctcgatcccttctctccacgaccaccacagccacatacccaacgatccacagacccaacaacttcttcatcaaccacggcttctccatcgacaatgtcatcaaaggtaagtatcgtttttttttcttgtcatgattattgagtttgggttagacttaagtttagaatggtcggatatgtgttt

SEQ ID NO: 222091 - DNA, 2715 bp, Cannabis indica
tgagatcgcatcacgtgtgtgcgccgcgtaagacgcgcgctgcatgatgagtggcgcccttgttggacctcgtgaacgtcccaacctgcctgcatcatatagttctataaataattatattgacaaaataccttacaaaaagagtattgaaaaaaatatttatattaattccttgtcataaaactggatagtgtagtgaaaaataacattgtacgtatatagtcaactacataagttattatatcactaaaaaatgtcacttttactagtacagtttgctattgtgctggtaaaagtaacttttaccagcacatttcgtaaactgtgctggcaaagaaatcaaagttttaccaacttacatttgcagtgtctaaaatctaacttttaccagcgcatttacacgttgggaaaagtcatttttgccagtacttttcattttgtgcttacaaaagttttaataccaatattgatttgctaacccccttttgccaacacattacaagtaaattctattttaccagcgcaataccaatttttgtcagtataaaaatgtgctggcaaaagtaacatttcttgtaatgtattaaagacataatatatagaactcatttggtttgttttaggttattaaattaggttatatatatatatattacatttttatatcataatattgtaaattttaatagggctttttttatttacatactaaaaagaaaacaatattaccaaaatataatagattgactcattaaatatttatacaactcacaaataaaaaattacaattatacttcttttgttaaaccttcagccgcacaaatcaaaaaacacacctacgaaagctttgaccaatcaacaaagaatgcaactgaaacgaaacccaaaaaggtgaaaatctgccatttattttggcgacttaacctgagaagaagaacgaaatcaatccaaacaaatactgtttcaaattgaggaaagaaagataaaaaaaatggtttgaaattaaaattcaaccatgaattctggttaaatttacaaagaactaatcctcctaatatcacttttttagattcagaaaatgtagatctcatacaaatagatttggagctcccaaacaatctaaatcaggtatataatccacaaaagtaaaaaaatatatatatatatcaatactatagctaatgtttatcccgttacatttatgttgttttttaaatttctaatggaggatttattaatatcaaattcatcaaaaagtttagtaattcttatgaataaaaggtcacatcgaaatataattatgaatttttatgttacattataattgcattaaggttttgctaacactctgaaacttgacataacaatgataacaactgataacaaaataatgatcgatgtttatcaaatttgtaggtgttttatattgtcagtgcaagacaaatctctttgaagaaaattctattacatggttagttatatgagtatattcaattagttgatatttaagttggtttacaaatgtctaagagttctttctcgaaatattgctattaatgtttaattgatagtttttgaacgataacaataaaacatacacaaagtttcttaaaaatgctaatttataaatctgtagttgcattacagttgaataatagttgagcaataaaaataacactgtgtaataaatacaggattcaaaattgacaatacacttgaacagagaaaagtcgatagtaataagttttttttttttttttctattgcatacaaatttttattatttttcttatgataaatggctcacaacatatataacagttgtattatagctttattacaattttcagtaagatgacttacaaaaattaatcttttgtaatctcaacaaaaggattaaatttcattctttgtcttttgcaacaaaaaatttaataatggaatgaatgatgcaaattacgaagctagtgggaaattcatctcaattgattacaaatatgatgaactaatacacaagttgaaagacgtgctagaatgcaactaagaaaacactgacttgcaactgaaataccgccaagtgaaagaaagataccaatcgttgaagataaaagactatcaaagcctacacttttacatacatataaaaatgaaggaacatgatttcacaacgtatctattttgtgtgaacgtggtgagcaacacaacgacaactaacaatacatcattcttggaaatgagcaattcattagttgcacaaacaaatgcaatagcaactatggtggacaatgcaccaccaacagaagaatcaacaactcaataacaaacaaagcaaggcacaatgttggaagatgggggaacaatattcaactttatggactatgcaaaactggtggctggggaaatagttgcgcaactagaaacaacccatacagaggttaatatcactgattatgacgaactactaattacagatccttaatatcctaaaatacaagaagcacaaatttacaaggacaaagaaacattaaaaagtgtgcttagtttctatgcaattagaaacaacttctaatagaaggtcaaaaagtcttgcgcaaaaatatacaaaatttgttgcttggattcaaaatgcaagtgagcactaatggcataaagaaatggaccaaccaaatttttataattcgtaaatatgacagaaaggtgatacacacttgtgat

SEQ ID NO: 222092 - DNA, 2026 bp, Cannabis indica
aaagtgtgtcaaatataaggcatgccaaaaattttgtgaaatttagcacaaaatacaattgaactatcataacacacgataaatttattctttctttcatccattttatttttttgttaattgaaagtttctcacattttatttattcattctttttttttttctttttcgaaaatagattatatgtatttcaatcaaattcaagtattgtgttaatttttattattactattaatttacactttgtgagctcgtttgatagatcatataagagtcgtattgtattaaataataaataacacactatgcttggataatatattgtattgtattaattattacgatcataaattttaataaaatgtgaattgtattatttaataaatataaaatgatttgtattagcttatattataatatttacaaagggtccgagattggggaccctggctccaaatcccggacctagatccggacccctgacctgaacttgaacccaactctgtctcagaccacgaccccgactcaaattcgaactcgaaccccgacccaggcctagacccaaacccagacccgaccccgaccctgaccatgaacccgaccccaactctgaccccgacccgtcccaatatccagacccggctctagaccccaacccaaccccaaacatcaaactcagacctcgacccgtcccgagacccagacccggctctagaccccaacccagccccaaacctcaaactcagaccccgaccccaacctggactcagacccggacctcgaccccggcttggccctggacccaaacacggctcaagaccccaaacccaaacctagaatctgccccagacccagttcctaggccaggactcggaccccgaacctagacccaaatctagacctagaaccggacttagaccttaaccctaaccccgaccctgactaagccccgtaccctaacccagacccagacccaaacgccaaccctgaccccaaacctagaccccggatccgaaccccaacctggccccaaacaaaattgttaggttttatgtcctgaaaaacctgtaaaaacatttttgattaaaaataagagttgaacattttcatgtatacttgtttgttaaattattaatgtttcatattgaataattttatataaatatcgaaaaatcattattcatacatgaggctatgacttgtattgtacagagaattaagatcacgtagacataagtaaaacagtcaacaacatattaaattttagaaatctttaatcaacagttgctagtacggtttactgatacatgttattcggtgcaagtaatcttaatttgaattactgatgtagcatgatatctaagtgaaggtgttgtatataatagagattatatatcacaatgacaaatatgaataaagttgtctttatcaagcttactatttaccataaagacctaattaatatcataacaatgatcaataacagatctgagagtaattatgaactcatgttcacgttattagtttctttaattcactcgttaaagtttctctgagaatataattcttacaacttttgttttaagaatctaataatgtggatggctgagaacatacaattatgaaatcatgactttcctaacaaatcaaataattgttccttttatattttaattctggaactaaaaagttgtgcaaaaatttagattcgatctaaactacattttcactagcgaattaacggtactaaaggataaagaagtaattagaagggtaaaacaataatttaaccaaaactaattacgaaccaacacaaggagggctaatcactggatttaattatatcaatggacgctataataaaactcaataaatataattctataattactaagagtttaattctatatttatagtggagtaatcatgtgattaataaataagattatttgatgatgagattcaataaataattctaatttattgaagcttagaattataggtccatggtccttagatcgccacc

SEQ ID NO: 222093 - DNA, 3043 bp, Cannabis indica
agagagagagagaaatctaaagcgactgagtaaatgaattaaacaaaaacctaaagactaaatataaatgagaataaaagaaaagaaaaaaaagtataaataaaagtaaaaacttaaaactaattaaatgaaaattttgtaaaaggtaataataaaactaattaaatgagaaattattttttccaattaaaaaaaataaaaaaaaaacgttttctagtagaatgaacaaactatagatattttttcaaagaaaataataaaggtaattaaatgagaaaattatagtaaaatggtgataaataaaaaaattaagagaaaaggattgggaaaaaaactcatacaaactgctacatgagcaactattatgctttcctttataattatgtatagactcaaaactcgaaattcgaaaccccataacctcaaacccaaaaatctcaaaacctcaaaccccaaaacctcaaatttcaaactccaaaaccttaaaccctaggtggtagaccctagactcaaaaccccaaactctaaatagcagaaccccaaaacccaaaaatcttaaaccctaaaccacaaccccaaacccccaacccctaacccccaaacaccaaacccgaagccctaaaccccaaatgccaaacccctaaaccgtaaacccccaaatcccaaaaccaacaaaccccaaaccccaaatcccgaaacccataccccaaaaccctaaaaaccccaaatccagaaccacaatccataaacaccaaaccttaaaccccaaaccgcaaatctcaaaccccaaaccctaaacatcaaaccctaaaacctaaacctgaaacccaaacccgaaaaccccaaacctcaaacgccaaatcccaaacctaaaccccaaaaccccatgccccaaaccccagacccaaaaccctaaaccccaaaccctaaacctcaaaaccccaaaaattcaaaccttaaatctcaccattttggtggaatgactattctattttgaaatggaaggaaacaccattcaaatgtagcatgagaaaaaatttaataattattttatcaatatttaatgcatttaaattttattttattccattcccctgaaccttgacctcggacctaggactgaacattttgagcgagttcgacccgatgccgggcaatccgcccgatccgcccggacccaacccagaattttttttttttaaaaaaaatattaaggcaggtcgggttcaacccggtacccttcgggcgggttcgcaggttaagtttttaggaccatcgggtttcgggttgaacccgaacacacccgccaacccgcatatttcatatattatatatatttattttttattacatattatatattaatgaaaaaataaaaataattaaaaataaaaagtaaaactaaaaaaccctaaactttcctttaccttttactatggatatggatgtattttgaaatattttagtttttacttttatcatgattcatgaacatgaagatgaagtttgattcgatgaacaagttgtttgttggttggattgattaatgcttaatttcttcaatagttgatttgatgaacaagttattatattatatatgttttattaataaataaaaaataaaagaataattatttgaataaatataaatttttttaaagagttgattgagttgaccgggtcagcctgttgacccggtcaacccgcccaaccgaaacccgccaacccgctaactcgacccttattggggtacgggttcagtttcgtttttttaaacccaatacccgtgaacccaaaattgcgaacctgaaacctggtaaacccactcaatgtgtttggttgcattttaaagtattgagatgtcattccaatggaatgcctttacaccatattggtggaatgactattctattttgaaatggaaggaaagatcattccaatgtaacatgagaaaaatttaatgattttttatcaattttttatgcattttaaattttatattattcccattcacattcctattcccctgaaccccaaaccaaaaactctaaaccctaaatcctaaacacagaaacccaaaccccaaaccctaaccccaacatccaacaccctgaaccctgacccttgaacacagacccttagatggcgtttggttagaggtaatgaaatgcaatggacaagaaataaatttcattccattctcttgattagttgcattttaaagtattagaatgtcattccaatgaaatgccctttcaaccactttgctggaatgaatattctattttgaaatgaaaggaaagaccattccaatgtaacatgagaaaaaatttaatgattttttttatcaatttccttacaaaattggtaggggaagttctcccttatttaatcaagttctccctttcctaattttaataatgtaagttaacaaatgtaagggaatgattaccttaccattgattcccattactttattagtaaatatgccataaactctgacccatgaccctgaccctgaacccttacccctacccctacccctaccccaaaccctaacccctaaccctaacctctaacccctaaaccccaacaccaaccctaagccctaaaccctaaacccaaaccccaattcccattccccagcccagtcccatacccattctgattcccattcccatttccatccccattcccattcccattcccattcgcattctgattccgattcccattcctatttgcatttgcattcctatgcccattcccattccccagcccattgctattactattcccattcctattctcattcccattcccattcccattcccattccctgtcccattcccattcccgttcacattcccatttccattaccatccctatccccattcccatacccattcacattcccattcccattcccatccccattcgcattccaatttccattcttattcccattcgcattcaaattcccattccccgcccattcacattcctattcccagttgcaatcacattcccattcccattcc

SEQ ID NO: 222094 - DNA, 1403 bp, Cannabis indica
agagaattgagggagggagagagacaagttggtgggttttaaaggagtaattttgggttttaggaaaagtgtgcctattctaacaattacttatacctttaatttttctaaccaatttaacttttaaatatgcataaaaattcaaattttctttaaaatattaaagcatattttcttaaatatttaaaaagtatgtatggtgagataactttctctaattaaaatgaggtagtatgttgccattagtataattaagtatcaaattttatctattttattttaatcagtaatgatttctttattttattattaccttaataagaataaaaagaaaatcaatgattgattcttagtttatgcacttaaataatttccatgccaaggtatgctaattatttatcagacacgagtatctattatcccaacactactacaaaattaactttttctaacggtttataactgtctttcatactatttcccaacggttcttaaaaccgttggctataagggtgtcataaaaatgcggaactttaaatgacagtttataactgttgggaaaagttactttaaatgacagtttacaactgttgggaaaaatctttttaaatgactgtttataactgttggtaaaagtattatgtagattcaataaaatacatttaagctaatttattatataattacaataataatgtaaataaattttttaaaaaataataatataaacaaaataaaaaaaaattacaatcatataacgtaaatttaaattattatatatgtttacaatatttttcaaacaattacacacgattatcaaactcaaacaattacactaaagagaagcccagaacactaagaacaacgacgagctgaaatgctcacaagagctccttcaggggtggcgatggttcccagtcaaaatagatgcacgaaggatcgagtcacagatccttgaagcccttaaggaggataaccccacacacctacatattaaatataatacatatcccagacataaaagtccatgccttatcaatgttggagatgctagtaaattcttgaagtagcttagattgtaaagtgtatttttcctcacttgcttcatccaaccccaacaacagatcctttcctgaatcccctttagaaccctccattgcaaatacttttgacaatcttttactgcagaaaaacaaaatcatcaattcaaaatgtatggggaaatatctcatactaaaacttatcagttgagtggttgttcagatagaaattgaataaaccaactgtaacccaataagagatatcaaatgaatgaaatttaaagagaccaactatggccacggatatccatcatcaaatgactatgataaaaaagcagttaatgttatgaatttgaatatgat

SEQ ID NO: 222095 - DNA, 1639 bp, Cannabis indica
ttcagagtccttccctctcgtcaataagttcctgcaccctcttggattcatgttccaggcctccattaagcttagttgtggacatcatgtcttctatttgctgctttaagtcattgataagcttgttcctagcaataagttgcttgttcacctcacccagttgtctgcctttcaactcaacatcattttgggcttcctccaaagtcttctttaggtcattggtggttgtgctagttttgagagttgttgacttggctcagaaatctgcataaaacagcttcaaattagactgcaaaaagaaacaaattagaagtgtttgagtggcatagcctgaacaaagagctctaaaatataaacttaccctagtaatctccttcaggaacccaccaaccaagagcttcacgggcatatccttagcctcggtgagttactcattaacttcagccatcaagaagtcctcatagaatccgagcatctccttggccttcttcgtttcagccaaacagtaggtggagtagtagttggctttggaaaattaggccattcaacattaacaccctcagaaccagccgagcccttagaagatttagagtttttggcatggacgattggaggtacagttttggaagacttcttgactggaggaggagagtcaaagacgactatagctacaaccacaaagctctttttagcatctagacaaggcatcttagagctcgaggcaatgctcataggaagggcctcttccaaccttggtttcttaaccggtgatttttggctgtagctgtcacctgtcttcctcttcaacactcacttcaacctctctgacatagctgtactgaacaaaacacttgttaaatacttagacaagtaaaaagagaaataaagctatgtaaagcaatgactaccttgaacgtcgggaggggcaccctcatggacaagtaaagatggagaatcctcatcagaagagtctccatcattttcctcgaccacaaccttccccttccctattattgggatgatgggacaagcaaccactttggagtcatctctaatttggataggtctctcaatcggcccctaatgctccataggatgcttcttcttcttttgttgcacctcttgatcagtgagaatttccttggctacttggtcaaaattttgtaccttgttggacatataaagaccgtacttaaggaagttagctatggtagccaagagagagatgttccgagctgatgctaatagttgaagaatttcttgggctctcgactttaatccaaaagtgaagggcaaacgacagtaagatggggcaagataaaaaattaaggtggtcgacatccatgtctttaacgatgtaataatcttccaaaaagttgttgatctttgaaacctccttgttcgtggtaccgctcagccatcggtactcattctatgaaaaatagaagtaccctcggcctattctgttttagacttgacttcaagtcaaaaagccagttagtgtcatggctagaaggctggcaccattcctgcttggcatagagcacgaacaaagcagccaaatacttgatgcccttgggagtaaactgggtcggacaaatcttataataaatggtgatcttcttaacatatggatacg

SEQ ID NO: 222096 - DNA, 1129 bp, Cannabis indica
atggaggtttaatttgtctattaagtttcgatataatatttatacaaatgacatatattgttggataagtagctgcttattctcacgttctaggttgtcatatttattttttccgtttttgttttttgaatagcttatcatttatttgttaaaccaatatattaccggaaagcaatatgtatttttattagttatcaaaaaaatgtatttttatttgtaagtaaaaaaaaaaaagaagaatctgcactgaaaaacctcggaattacagtcatcactgattttgagagaatttgaaatcaaacattctggaacttagatttggaaacagaataaacgtagtacgtagagcatgtaaattaattttgtagcaggacagtccacagatatgatagtattgtaatttttttaaaaaaaaaaaaaaaaaatcattcaatttatacaccaaaatatttataataatacacattccacaaaaaataataaaaataaatattccacatatttttatttctcattcttaaaagatctagtaataaaaacttgtcacagaacctatgataacattgatcgatcatctaaaattatcaaacgagacgatagttttttcgagagcttttgtatttcagtcattatgagtttgtgtaatcaagtgtaagtttcaagaaagagaaaattagttaaaaaaagtccttggtgcaaatttcaataggctagattaatatctcaatctcatatacacaatattattcatatctttgtcttggacttttccatgcttattaaaattaaaccaacaacttttgcatagtatcataattataattaagtattgaatattatataacctaaaataataggttttaaagaatatcactaactatagttataagataatatctatatagaaaatacatagtaatgaaaattaattgatactacataagaataaaaaacaaatatgaaataaatacatatttaacactttgaaaaaatgtatataaatgcataaactccctgtttaaactaaatctgcccaaaaattaattgaatatatataatactaacaaattaaactaataagtgccttttactacaaaaaaaaaaaaaaaaaaaaacgtaaaaataagta

SEQ ID NO: 222097 - DNA, 2425 bp, Cannabis indica
ttgtatttaggggacttacaaatactattacaaaataactctaatttattataaaaaaaataatatacccaaattaattataatataattacatatagctaatttttcaaatcgaagacaaacattgcaatggataccaaaattagtgtgcctaagtatattgtgaaaagtattaaattttatatgctttttatgcatagtatattttaagataatacattattagtaggtagtatgatgttatattgttgtatgttgaaagaaaacagaaaaagaaaaagatggagaaagagaaataggacacaatggatgaaaaatggaaatttgctgctcaactaaaacagttggccaaaagatctttatttatataatgatttcattacagaggaatacaatcagagagaaatgcaatcaattaataactgaattaacaaacttgagtttgttatgtcagagtcggttggagctgacttgtgatagctagcattagtttgttactgatcttgttgttgtgttgctgatcttgttcttgttgttctagtgttccaatatccccctcaagtgacatgggtggacaccaagtgtcaatttgtttcttagaaaagcaaaggatgatatgggcaagaccttggtaaagatatcagcaacctaatgaattgtatcaacatagtgaacttcaagcattttggagaggactctgtcacgcacaaagtgcatgtctatttctatatgtttcgttttggcgtaaaacacagggttggaggctaaggagccagctccgaggttatcacaccatagaatgggacaagtcgatagaggtatggacagttcaacaagaagagattgaatccaaataacttctgaggtggcaagagcaaaggctctatactcggattcagtgctggatctagcaaccacctgttgttttttggaacaccagcttaagagattgttgtctaggagtatgctataaccaaaggtggattttctgtcatcatgatagcctgcccaatccaagtaagtatagccttggagttggaagttcttgactggtgtgaatgtaagttccaagtgtatggtgccagcaagatatctaaggacacgtttgaaagaaaacaaagaaaggaaaaagatggtgaaagagaaagtggacacaatgaatgaaaaattgaaatttgctgctgaactaaaacagttggccaatgatctttatttatataatgatttcataacagaggaatacaatcaattaataactgaattaacaaacttgagtttgttatgttagagtcggttggagctgacttgtgacagttggcattagtttgttgctgatcttattattgctgttgctgatcttgttcttgttgttctagtgttccaatatatgtataataccatttgatattaatagctaattatattatattacttagtatctatatgattacaaatttataatatgatatcatacctaaagttttagatagcacattatcgcaatgacaataatttattttaaatactagtgactattaaattacatactactaagtatcatattgtaataatagttagtataaggataatgctaataattaaattgaaatataatagtttatataagataaaatattgttgacctcatttttagttaacgacagtaaatcaaattaaatgattgagaataatcaaataacaaaatataaataatataaagtaaagaaaacaccataatttatagaggttcgaccccttatatggtaatagcccactcccctttagttcattgaagaatgtcttgacttctcttgaaagctcttacaatgatctttgagtaatttactcttagatcgaggtttctctcatgagtgttctctttctaaatgaatttcgtgtccctaaatagtgaaatgagtccaatatttatagggattaattagatcatattagtttcctaaaatcaataataaataaaatggtaaactaatttattttctataattacaataaacaaacaagaaacttggcagattgcttttttttctctaaagatacgaatctatcccatgaatttagggatagtgttgtgacttgcaagcttgagaatacatgaaatatatctctgaaatttctatctcacatgccctgatcggtgcatgcgagtcagctacttaatggaagctggtcggatgtccacgcgtactttacttggatgtcacaacttctgtctgtgaccttgagagtcaactcttcctatacatcctactaaaagtagaactgttcgtccagattataaaatgtgttctacgtgtcacctagatggatgccacatcatcatacaaaaatttggataacatttacctcccaagtttgcgtgggatcttcctggtcgcacatggacttagtcagccacgaagctgat

SEQ ID NO: 222098 - DNA, 2130 bp, Cannabis indica
aagttgacggtagcactcctctagtatttatataaggtatgaaaataataatcacatcaatcaaataaaagagaaatgctaaaaaaaacattttatagttagtgccaaacactacaaaaaatgtcatactgctattggtgcaaattaataacaagtcacacacatttgatttaattaataatattaagaaactgctaaccactcgtaacgtactacatcgatattatgcactatatagtatctaataacaatactccaataaaaaatattaacaaactatatatgatgattttgaaagtttattggattccaattaatgtctgcatttaaatgatgattacatcaattcatttcaagaagtacacatcaacctaaaaatgatggttaatggagtgttaaggatataccctagagatggtgtggaggctttggaatggaagatagagagtgtagaagagtaaactacttaatcggttatgtacttaattcatcattttcaagacataaatcatatttaatatattaaaagtataattaatatttaaatgatgtggagaaaagataataaaataaataaagtgacatttcaatattctaataatgtattttaaagaataaaataaataagctcttataataatagcaaaacccaacataaattgtatctcttaactaaataagaataacacattaattaattgtcaactaaaaaagaaaaaactaataataagataagccttgggatattaatgcatataccatggagatggatgtggaggctttggaattgaagatggagggtgtagaagagtgaacacacctaagcagttatggagattattcttcataacatacttataatgggtaagttttgggaatctaccatgaaatctatacttgtcttctttcacttcatatatgtataatcgatattttagtgataagaagataacattgggattgtttggatgaaaagcaagcacaaatgtctgattcattttaactgtttttctaattcgaacatcatgaaccaaacaccataattcatcatcatcatcatcatcatcatcatcaaactcccaaattctcaaacgaaaaaatccaaccccatcactcttaatcaacgataatcgcaatcgccctcgaacaattccaatgcaaattctcttcctgtaattcactccatgtgtctcaacacaacctttgggaaactcaatgaaacgaagccgttttggatcagtttcttctctaaatggattacatgagattattcctttaactttatacactcccatataatttcctatagtcagtaaccaataaatatttcctttactactcgtaactggctctttaatagagaacgattcatcattttctattgaaccccaattagttggactcaaggaagaataagaaaaggtgtaactactccattctctagtatttgaacaaaaggttaatactctaaccatatctctgttaagataacaactatgttctaaaataacaaccttgtaattgtatagctcatcaatattattggccccatgatcatattcaatttttggcttagcaactaatccatacaagcataccaatctggagtttgataatggaggataaggtagatttatacgtttttttgtgagtggattgcaaatgtaaaattccctttcaaaacatgcacttaacaccaacaacatgtcatggaatgtggccctaatttcacttaaacaaccacattcccaaggccaatgtctttcatcatcagtatcatatgtatgtttttgtttcataatatcttcatgaatgatttttgattctccagaatatacttgataaaattgttttggaaaataagagcatcgcatcttgtttctgaacaaaattgtgtatggcataataatctcatcatcatcgttctcattattgtatcggcggcgtggtttgtggttaagcaattgaacaaaattaggaataaattgattttgagtgatgagggagtaccaattttgcaaacggtggtgcattgaatcagggatggaagatcagaaatacgaatgaatattttgagcagtaattcatctggaacataatcacttgctttttccattgttattatttctc

SEQ ID NO: 222099 - DNA, 1472 bp, Cannabis indica
taataataataataatatgaattaggatattctagaattaagattaataataatattatatctgatgataatattataggaaatatctgataaaattataaaaattataggaaatatcatacgtactaattatattaggattagggctattgtgtatttaaatacaccaaaaattagctaattaatcattttcattttcatttttttgctctctctctagatctctctcactctctctctcatcaatatacgtacgtactacttaattagttcttgacattattaattgccaaggtaaaattattacgtaataattactaaaagcttaaataataattaaagtttcatcactaattaatactactcatatacatatttttttttaattaatttgatgaaatattaattaatatatacatttattttatatatagctagagaagatatgaggattaatagtggattgaataagatcaaatctaaactccaaatgtcccacacatcaacagcaaaggtaattaattcaactacaactcctactttaattaatcattatgtatatttatatatttaggttacatgttcttaaatatattttttttgtaataaattttatatttatatatatataggtagaaaaacaatcggaagctaaaattgctaatgaggaaataccattgcacaaatctgaaacgagaagattaattactaacgaaagaaaatcaatttcaaaatcatcgcaaaaatttgaaactcgagctccattggatcatcgtcatcatcaaaagctaaatcgttcggtacaaaaggttaaaacttgtgtttaattaattattacatgtgtttttttttactattgtgttgtgttaattaatacttacttttatttattgtatgttatagaatgaaagagtcaataatcatgatcaatctatgtttttgactgaggctgtaattccttctttatctaagaaaggtaattagtagtttatttaagatatatatgtatatatttttaatttaatacattaataattactaatcaatttgttgtttgatttgattagaatgtgatttgaagaaagctcttcttgctgcgaaatccgtgtgcgctaattcaagttacgctgcttgcacaaagtataaagccgagaatggattgaaaaagagacaacgtgaaatatttgaaaagacgagaattgaaaaagaaagagaagaaagagaaaaaactatcaacttacaacgacagaatgaaggagaagaaagagaaaaaattgtcaacttacaacgacagaatgaaagagaagaaagagaaaaatttgtcaacttacaacgacaaaaagaaagagaaaaaagagaaaaaattgtcaacttacaacgacataaagaaagagaaaaaattatgaacttacaacgacagaaagaaagagaagaaagagaaaattttgtcaacttacaacaacagaaaaaaa

SEQ ID NO: 222100 - DNA, 3575 bp, Cannabis indica
agatcctggtaaaataaattccaacacacataacttatctggataccataggcgtcaaacatgcccctttatatttcttttcccttgtacttagttctatcttgggtgtacttccccttaataaggtggaaaaccacccatggtgctgcttaacgatggtttgaatgtctcgcattcaagttacataagtgttcgttgtgaaatacagtagcctcaaagttatcaaaacacatcttcttcctctccctcaatctccatttacaatctggatccttgatgtaacgtacaacacattgggggctgacttattcaccatccactcaaaattattattaattgcaaacctagccactacttatctcatttctttctaattttcataaaaatttccaagttgtatctcccttctattatgtcttcctttgtcaacataggagcattgaacttagtacaaacttcaaatgacgagaacgttgacaagtgtgcatgaagaggaggagcatgttcttcagatctgccttgtcgactactcctagttctaggtgtattgtgattttcattatgggatttgccattctcgccatgtaccatggttgctcggtgcacactctaacctcaagggagtatcaaactcctcaaactaatcaaatcatgtcacttcttgctgctgatctacattggtaggaaccttctcattcacaccaatcctaacacttgtttcaagaacgaaagaccctaccacacttcgaatgagaggattagtaggcgggataggctccaaatttccaacttttctcaccttagtcacaaataatggcataaaatctgtgtttgacattattgccctcatctctaagaacgttcttagttggcgttctttcttaataatatctggcggtaccatttgtcccttcatgtacaaggaataaatgtctaatttcaaatcatacaccaaatgatcaacttccaactcttcgtataaaatatggtgcaattgttgtatggttgtgtcagttctaactgtcaacgtcaaactgcctttggcttcataaacccaattaaaaccatcaacataccaaacaccattgtactatacaacaagaaacacagtgaatcttgcaatttcaaacaaaaaaggttagttagggaaaaatactaaaaaactattaaaaaatactaaaaacggcaaaaatttaacataatcgacaatatatcgacatcctatatatcgatattccattgataaaaactgtcatgatttcgagcagtggcatcatcgacagagtatcgacatatcattgatatcatatcgataaagagtgacctcaaattaagcttgtatcatttttggatcctatcgacaacgtatcgacataatatcgataaatgcacattccatgacatacacgtgtactattggacatttaacgctgattaatttttcttaccttcccaacttctactctataaaatttttgaggcagtcgataagctatcgacttatcattgatatcaactcgataaagtgtgacctcaatttttattatcacaaaactatcggtaacatatcgataacgtatcgacataatattgatgaatgcccattgcatgccatacacgtgtacagttgaacatttaatgctaattaatttttcctaccttcccaataactattctgctctataaaagcaaaattctacttcataagttacatatgtttcttattctttaactgtaatataccagaaaataaaataatgtttaaatagacatgttttattaaatatgtaattattttggtaacgaagtaagattatgatcttacttagggtaactactgagaatttattgaatgatatatagcgtaattcattaattacagagattatattgagatatgtgggtatcgaggatgctatttttgaaataaaaatattttatcgagcccagcgactgtggaaattaagcattgtggttagaaatgtcacgacattaatggatgaattattttgagagtatttcggactaggttagaagttttagaatgtcggtttaatggattagtaaaattaccaaaaatgcccctaggttattttaaaaattaagtttctttggaggataattttttcattctttaagaataggtattttaagtttaattatttatgggctgattgaaaaaaaaaaaaaaaaaccctaatttaagggaaaagcttatgaaacaagttaaccataatctcttttttttttctttccttctgcctagccctagaagaagctaaaaaccaaggaaaattcatctcacttcatcaaattcttgagcaaatttctaactctagaagttagccaagttgaggtatgatcttactactttttcctttgattttcttgagtttagtttaggttttggtaagggttttaaggatttctagggtgaggtataaactgaagttagagttggttcttggggtcaaattgaagcttgtttaagtttaatttgattagagttaggggctgtttggtcggatttgtgttaaaagtgataaattgagattaattttcattagagaaagtgattttgagctaattgatgaattgtggttaattgatgtgttggatatgctgtatttggtatgttatactgttctggaaatgctgtttaggtctgtgatggttttggttcgagctggggaagaaaacccagaattgttctggtctgccagaaaccagtctaccgattgttctggtatactagaaccggtcgaccgattgcctgcaagggaaaaattctcaggttttctccgaaccctattttggctcggggtggaacctggtacctatctttggttgtttatgagttatttgatctattttggagttgtttgggggctaggttatattcggttttgaattagggttttaaactggaaatttctagttaagatattcattcagttttcaattatcgtgacataggactggggatcgcttagcttatttttccactcaggttggcccgtacgtttgagctctaaactaaggtaagaaaactggtaagcaccgtatgtggctaaatattaatggttgaatggttatggccttgattattatcaagactttgattagatatttgttgagcctaggttatgacctagggttgggaacggttaataccgttacgagtaattactcttgaaactacggataggtttcttacttatcgtatcctttatcgggcaacaatagtaacatattcagctagtagttaacgagtggtaaaaagggatacttcataaagtaccagagtggtgtttatattattgtgtaaatgtgtatgcaagttaatttgagattgaattgctaaacattactggttataattttattcacttttcttgctgagtctctgtgaatcacaggtgctttatggtgcaagtaaggggaaagcaaaggttgagcaaccatgagttcgaggtcgtagcagcaatgtacatatcagccgcagtgactcggcctagtgaataggatactccgttttgatagtattttggagttgcaaagtttatgttgtaaaa

SEQ ID NO: 222101 - DNA, 3068 bp, Cannabis indica
tatgtgcatgagggggagacatattcatgttgcactctttttcccttagctcaggttttgtcccactgggtttaaaatgaaaggtgattattacaggtgccttgctgaattccaaaatggttccaatcgaaaggaggctgtcgaaaacaccctttctgcctacaaggctactcaggttagaccttttagttcgattctattaatttaatttggatccattcacttttagtttttctagagacgattcgactcattttatttggatccattcgattcgtgactgttttcatgtttactgggtctgtaattgcatcaatttttaaatcttcttttagctcaaaatattggggttgtcttttattccaatttcttcaatatagtgtattttggtttcaggctaaataataaagaaatttctttgaaatatttgtaactaataagatttggtagaacttaaattaataaaatgtatattaaaaccaatttagacctttcatagctcaactctgcttatgggatgttctcaattaccaataagttgttgtttaaaaaaaagtataatgtgacttactcacatttatttagtttgcaattgcatcaaattttgttttttgttttttgttttttttttcatcaaatcttcttatcattatgccaatttttcttaacatagtctattttggtttcatgctaaatatataaaaggactttctttaagtatttgtaattaataatactaagttttttgggatgtcttctgctccattaataaatattggaggagcaaaccgtaaactaaatatttttgcacctgaaaagagaacaatctttaaattgtttgtaaatccttcagttatttccttgtgcagactgtatttgagaacagtctcatggagcatcgtgttttttttgcctccatatgttataagaaagattacttacattgcaccagtaggttaatattctttgcatgtttgtttcttattattttaaaattacatatgagattaaatttagttcattgagtattcttcttattgaattgttttacatgtgcatgaaacaaaagaaacatttctactgatatactaaagtagcaacaatcaataaagattgattgtgttaatttgtttcattcatatttgcaggatacagtgttaagagctagatctctaaggagttacaaagaaaattaccatgcttcacgttttttaactttgctgcgacactgcttctgaagctgacaattgtacaaagttcagtgaaggcaaagtggaatcacaatttttcggagataatggatatggacctacatttgatgtatttggtagcgtatttcaaatgagatgtgtctttccttcttaaatgatttgaatgattgattttattctttcttccacgcgaaaacaataagtactaactattgatttttttttttcacttactcatatctaaaactataacttaaatattcacggtagatataatattaagatattgaaattaacgtactttttattgttaataacaatgtacatatcataagtttataaacacaactatgttttacttactaaatacactgacacaagtttacttttataaaacaaatcgttcaaataatcataccactttagttaccaaaatcttaaaaaaaatataccttaaataaaactaacacttacgtggctcagcacgtaacattcacctaatatatgtatatatttaaaaaaaaaaagtttctttcttataattcaaaatatgatattctatttccttaaaaaaaattatggtaagttttgtaaccattgtttagtgttgatgaagttgaatggatatcttattaatcaccaacaactataaaggctaaataacataaagcccattataaaatactaatatagtaaaatagctaaatcttgtttattcattggttattttgggaattctaattttaacatttcttttaattaactctacaatagagtacacaatataagattttcaatcatatatacaaccatttttatttatccataaattataaatagtttcagccctcacaacataaataacatcagaaagaattgttatgctttgaaccaatccaagctaagccaaacttgaaactagagaggccaagcaggacacccaagccaatctcgaacactcaagccaacctcgaacaacttgcacaactctttaaaaaaagttgcactcaaagaataagtgagagtgactctcaagaatctgctcacaaataaagtataaaattaatttaatggatattgcaagtcaacaacttgtttttagttagtaaatgatcattcaccgcttgccacataatgaatttatgcttaggcatattaagtctacaccaaacaactttggtctaagtcacctactcgtgatgaagaaagctctgataaagctaacttgccttgaacttgtcattactatctgctttggaaatatcacctagcaaaaaataattgcctaagattgaccaactttctccaataccaactaacatagctttcaaagaataagaccaaaaatcctgatcccttaaataaatatatgcacccgttttgacccaaaaattatcttgcttcatagaaaggtccaaatgaacttagctaaaatagctttgttctatttagtaccctctctaaagccaatactaccgaattgttttggtaaacaaacctactctcaagaagtaaaatagagtttactttgattctctttagcccccgacgaaaatttacaaaataatttattcatttttttgcaatactttgggaaagtaagaaaatattcatacaatagctttataacccccaaaagcataaagtgaataagttgggctctcgctgcaaaagaaagataacgactaatccaagtatgtaaccttccttgatctttctaagaataatcccacaatctgcaactctcgatttagtaggccttaaaggaacaccaaggtacttgagaggaaaatctccttcttcaaagaatatcaactctaacaactccttttggtagcaactgaacccccccccccc

SEQ ID NO: 222102 - DNA, 1539 bp, Cannabis indica
gtatttttaccgccaaaaatacgagttaggtatttatctgttgattgacataaaacttaggtatttatgccgcaaattactctattaatatatataagatttgatttttaattgcactaatatcgatatgacaacgagaacgatactagtaccaacaatgtcatagaaagaattgactcatatttagtggtaaaggtctctcagatccaaacaggacaaataaattgaaaattttgatttcttgttactctttattattattattattattattattattatttttaatatttaggcaggtcctcaacataaacataacaaaattcacaaattcaagtacgtccgtatcccatgcatggatttattgttatggaaattaagggtggggtggactgatatcttcatggaaggacgattatttaatttttatttacaaatataccgactctattttattttcaaatgtaacgatgaatgcaagagtcaagacctgcgattagggcttgtttccactagtgctcaattgaatatttaaaattgcttttaaaaaaaataataactgaaattcaaaaagtgaatgaaatactatcttatcttttttttttatactatcttattttttaaaatatcaatacaaatatatctatgtggagagatattttgtttaaagtataatttttaatataattatgaagtgaaatatgcaaagatattttattagattaaagataacatttaaaattttaaatcaattcgaattcctgtacgtgttaggagaactaaacaattccctatatatatatagtaacccattattttcattctattctactcaataataatactctcatattaataactaaagaaatttctctctctctctaaacctacaaaaatgctctacaaaaataatctcttcattccaaactagtactaatgatggtgaaaagtacattaagaaatgttttgaagctcatgtggctgctcaaacagcagccgacaaactttctctcatgttggttgtattttttgaccttaatttcaaatgatgatgccaatgatgaaaaaattattaaagtttttgagatgttcagaacaattataaaaccaaaattagttggaaagataagggtagtagatagtattttattagtattagagttggaagagaattggttaacacagagatcatcaaagaagaatactggtactaaacctcacaaaattacagaggagtatataagtaatatggtcaataaattttgtgatcatattttaaagtagaagaactcatgaaacgcatttatgatctcgatcaaaatgataaaacattaagttatgatgttttattagattttgtcaatggtgaattcaacaagtgtttgaaacaactgaatttgatgcatagagatatccagagttattattgggaacctcttataaggaaaatgatgctgtcaattgatcatgatgtcataaaagttgtcaatcatgattagaagattataattttaatttcgtttttttttagtttttttt

SEQ ID NO: 222103 - DNA, 2011 bp, Cannabis indica
gtgaagcactttaagacttttatgggatgaagagcaatggttcttcgaagattgatcttgaaagtgaccaaacaaagaaaagtgtctcaacttggaacaacaagtccatatgattagaccctttaataagggagatgtcaaaaaagctttgtttagtattcacccctgcaaaagcccggggcttgatggatttggttcaggtttctacagagacatgtggagtaagatagaagatgatgtttctaatgttgtgttgggtttcttccctaatggtaggctcccaaagcacttcaataaaacagttatctccctcatccctaaaattacaaacccgacttcagcaaaggactacagaccgatagcttgttgtaacacatataagtgtatttcgaaaatgatttgctcaagactttcggctgggtttcgaaatgggtgtgctagggttttgaatggggggacgacacgtgaaataatgaagcaacagtttgtaaaatttaagttttacaaatgcattatcgtatttgcttcggtgcacaaccgtagcaaatatattaacctcagttttcaaccgaagcaaaagagattggcttcaattttgcactgatgcaaaatgcaaaaggcaattttttaaattgccacattttacttcggttatactttttgcctcagggtacgacccgacgctaattattatctttaagcttcagtcacacactgaagcataaaatctccccttactttttgcctcggtcaaccattttggagggacgtgttggccgacgcaaaaagtactttttgtagtgattaatcaaggtgcgtttatcaaaaatagattacttgctcataacatcatgatttttcaagatcttcttaaaggctacacaaggaaaaatatttcagctagatgtatcatgaagattgacttaagcaaggccaacgacaccgttgattggcaatttgttgaagagcttttgaggtctctttgcttcccctcgcgctttattagctggtttatgacttgtttggaaggcactcactaccatttactggtgaatggtataattcaaggcaacttcaaaggcaagaaaggctttcgtcaaggtgatcctatgtcccctcttcttttcgttgttattaggatctcactagactttgtagtcaatttgctgggaagaaagggttcggttaccacccgatgtgaaacaattaagattaacaaacctttgttctgctgacgatcttgtgatcttttgcaaagagaatttcagctcggtaaagcttatccatgaagctttcttgtgcttttggaaagctataggtttagcgcctaatacttacaagtctcaaacttttttggaggggttaataatgagactaggtagcagattcttgatctagtcaagttcgaagaaggtggcttccctcttaaatacttaggagtcaaccttcgtcctaccaaatggaagtttgctgattgtggtataattcttgacaagatcaacaagaatcttaattgttgggctagtagaaacttgtcctttgcgggtagggcccaatttattcactctgtcttgcttggaataaggaacttctggatgaccatattcattattccctctaaggtaacgggtgccattgataagagttgtcgagattttctgtggggttctaatggcaacaggagcaggcttcaccgtgcctcttgggaaaaagtttgcctccctaagggtcttggtggagttggcttcctagcggtaaatattggaataaggctctcatggcaaaatttctttgggctctttctaacaaacaagattgcttatgggttaaatggatcagctccatatatttgaagggtagagacatatggagcttcccaaagactcaagatactagctggtattttaagaaattgttgaagcttcgggattttacaaatgaggctatgttgaggcttgcggtgacaggtaccaaactcttgcttgttttttgaataaagtttcctcttttt

SEQ ID NO: 222104 - DNA, 3450 bp, Cannabis indica
ttttgaaaacaacaaaatattatttttaaaaaacactaaccaaacatgacttgtattttgaaaacttcaaaaataattttttattctcatttctaaaaataattttttgaaaactaaaaacagaaaacaataccaaacatgctcttaaactctcaaattaaaaataacaccaatcaaaagaaacaagataaatccaaatgacaaaatgtacaaacaacaagttagatagcacactttctcacctttatttagaaacccaaagaatgaagcttataaggaagcatttgaattgatcaagtcaagctttctgtaatgaatttctaacttaattgagtcttttttatagtgtagaaagaaatagtcattaggaataagattagagcttttaattttagatttgaccccatcaatttgtaatatgtaaacttgagaattgtctcaataaagtcagaaattaggtcacatgtcgccagacttcaaaaaatttcttagtactttttatttatttattaaattagacttgttcgatgatatttcactttatataagatgtcatactattactgtccaaatatctaaaatcatatttagagcactcacatcagcttctcttctttattcttcaaaatacctcactaaaatcttactttttttttattttacctcacacttttatattacatcatacaccagcttctctatcttttctctataacattaaaatattatatttttaaaatattttatttaaaatattttaactaacttaactaaccaccaataatatttcatatatttacattcttacaatatttatggataactatatcttattttaaattaatttaaatttatatattagagttaaatcgaagttaacaaaaaaaaaattatgtaattaagtatattatgagaatattcattctaatcctaagaattttattaacatttatgatatatatttatataaaaatacataaaaaaatggatcttataactattgaaataaatgaaaaatacaagaagtgtgctcataaatacaataaccaaatcatactttgttattatatttttattttgattgaaatttgaaaatataatcttaattttactgtgtttagctaaatataaaaattataaatttatttctttgatttcactatgctaagtctattattatacctttactttccttgttgatgtcataataatttcaagagccagaccaccaatccaacaaaatcaacaactaatgggtgaagaaaaaaagtaaccttgcattaggcttcttgtttgtgcatagttctatacaaaaaattattgttgtttttgtgtcctaaacaaaagactattataagtaacccccccattacactttagtttgtgcatagttgataattctatacaaaacaaagtttcacaaaaaattaacagataagcattcccaaaaagttgctgcattttaccattcaatggtgactttgtacaccttcacttctcaaaatcatgagtccattacaccatcagatcattgttttgtacaccttttcttctcaagtatttccaattggaggctacgaaaatattcttgttgcattggagataatgttgagaagtctatcctcataatttcattaacttctttttgtttatccaattcaagcctctcttttgtaagacaaataaattctttcttatattcttccttcttagcatcttttttatctctcttctcggagatttgaagcaccaaatcaataatatcagaagaggtactctcttgcctctttcgcttctttgcagccttctttcctataggtctctctaaattaacatctatagatggtgatgtatcttcatctaggaactctggcatatcaccatttgaagttgttgatccccttttagtttttgcattgatactctcaaccacatattctttccatttgggatggtgtcctagagtagtccaacaatgaagaaagttgaatgttgcgaaatggttacttcgataaagctccttcgcttgctcaatctgaaaataaatagagtgtgaaacatatcatataaaaatataaacaataaaataaaaagatggtggttgtataaacaataaaataaaaagatggtggttgttgtaccttatcttgctcattaaccccacttggagaccttctttctatttgagctagggcaccacaaaacttatttgtagcttgctgaatgatagaccatctatttctgagagagcatgaactgcggtcataagatgcagattttttgtttttctcataatattcatgaactctactccaaaaggaatattttgattgatcaatcccattgattgggtccaaactagtattaagccaagctgacactaataagttgtcatcttctgcactaaaatttccttttctgggtttagttactttagtgctctcttcctctaagttgggtagagtatagtgagattctaagtcattcaaggatggaagatagtcattataacttttttctccatcttgtaatagtgtagtgaatgaatgaactccatatagttgagaatccatccttcaaaatctgacaagagacattatacattgctgttaagtttgttcatctttaaaaaccaactaaaattgtctcaaaagttatattagtcatacatacatatgttgttaccaagtctatagctgaacaactccaatgtcctgcactttttattttatcatcaacacttgaaattaaaaataaatatataataaatcagactcatctcttcaaatataaaaagcaaattcaatacactaagcaagattcatgcatgctccaatttcccttctggtaaggttcttccttacaacagtcaaggcgaattgaatgttcacatcaatgaatttatttaaagatacctttacaattttaagaatcggataaaatcatgtctcatgtattcattttgataagtgtcattaattagccatatcattgtcaatgataagaatcaagcaataaaatttaaaattttggctttaagtcaagtgtgatatgggcttattgcagccttcctaacccagcaaagaacaaactcacaataacaaaattatgctaacaactagcatttaaagttttctaatggggtgtataacaacaagatcatacaaatacttaatgaattagtatgagaccataaatctgagtagagcaaagtaccttatatgcaaatattatacagatatactactataacttgacttatatttatatatatgtattacaattgacatttttataaaatccattttgagccaacttcacgaattgggctttgaaaaaaaaaaagttttgtactaattagaaagattccttataaaatcaatttagcatatttatttgttttaaatatttgatggggatatagatcagtaaagatgaaatattgttaaa

SEQ ID NO: 222105 - DNA, 2026 bp, Cannabis indica
tctaaccaagattgattcaccaaagcacgatcgatacgaacttccacccactccggcttaccacggctccgttcccaagtatatgggtatccatacaactcaagatcatgaaggccacagtccaccaaagtatcattaaaaccctctactagccaccgtgggtaagggttaccaccctttttgtcatcttgagaagtaacattgttaagatcaccaattatacaccaaggcaaagtagacttacttttcagctcccgaattaagtcccatgttctttttcgcaaattcctattaggctcaccatacattcccgtcatccgccaatgaccttgatcataaccacatattactacatcaatgtaagacaccccatactccaaaacttgaacatcctcctcatctctccacaaaagagcaacaccaccactcttaccttgacaatcaaccgccaaagcaccctcaaacccaatcgtcacacgaaccctctccaccacatccttcttagcaagtgtttcacacaaaaataaaaaattgggcttcttttggaccacaaggtccttcaagaattgttgagcccatgggttcccaagcccatggcaattccaagagataacactcatgatgatgggtgggcctgcataccaaggcccacctgtgaatcgttttttgtcccaacaagcccatcatctccacttacactcttagccgaagctgccacctcaccatgcactgccacctcgccatgcactacaccaaccctccctgtacgtcgcctcttgctatccaacaataccaccaaatcttcatcatcattattgtcctcatcaggagccaaagattgagcctctccataaacaccaggctgtcgaacaccctgcccactttccatacatatttctttcttcttttgtcttcctaatttcatgggatcatgatcaccaccatggtcaacacaatcaacatccatgattttaggagatgcatttacatcagaatcagcaccatgcgatcggccggcactgcctccagccaccactccaccatccaattcagtccgaagccattgacagcccacccgataattttttctcctcatatccgcacgcatagcagccccgtacggcttcaccaattgctccacagattgttcgaaccttttcggacatgagcgctccgagtgtccaatgattccacacacaaagcaaaaggtaggaaggtgttcatatttaaagttttgcccaaatccattctccattctccttgcaaagcttcattattctctttagaggcttagcaatatcaaccgttgtacgaacacgtaaatattctcgccaaatgccattgaaattctttggatcggatttaatatacgtacccacataaccgccagcactacgaaccactctctctaacatgaaacccgatttcaagtcatgtatttgaacccagaaatcgatcttgtgtaacggcactaccttcgggtcttcgccttttttcagtctatgaaacacaagagggcatcgattaaacgtccaagggctgccatctatgacagtttggacatcaagttcattaaagaattggaatagatatctattcgggccaaattctttgatgaaaacacccttgcctggttgccaaagcgaagccatcaaatgcctcatcgcatcaaagtccaccggccttcccgtaagaaacctcccaaccaaacaccaccggtcatcgaataaaacgtcctcagcctcatcctcccccccaatcaagactccttcctcctcatcatccaagctaatctgagcgtattgctcattcaaatcaaaatcatgttgactactagaagccatgaaaatcaagagacaataaaaaataaccttaaacaattgagagaacttttaccaacatgtcatacaacaagacttatatattttatatttatttatttatacttatttgtttattattattatttggtatgttttatttgtattgtttcaaaatttagatttattaggaaagttttgtaatt

SEQ ID NO: 222106 - DNA, 1104 bp, Cannabis indica
taagtgttaaaatttctttgcatgagttctccatgctagttggatgcattgtacggtgtgggtgcaccccaagtgagcacgtagacttacgatctcttggtcacttggaattaaccaaatttcatagatcttacctaggaattttcttggggtgctaccgggtgtacgcatgtgaaactaaaaaaagaataacattaagtagttaatcttgttagcaagtgttttagacacaatatatttgaagttaaacaccattttttattcatcaattggtctttgttgctttgcaacttacattaattgattctacaagcttacaaaataaaaaatctgcttctagatgtcaagtggctacccctgcctataatgacagacaaaggccattgctgaagagcaatgggagaccgtgctaaaaagccataggtactagctcttttaaactaactctttctaatgagttcataaaacttctactggaaattagctttcatataagcttgacactggtattactcacagaggtgctccccattccaatatcttggtatgagaaccagctacatgttctcgttatacttgctcaggttgtaggttcccttactcgttatcttagtaacttggtaggggccttcctagttaggtccaaacactcctactgtgggatctttggtgttcaggaacactctttggagcactaggtttcctatgaagaatttcctttctctgacttgtttattgaagtgacttgaaaccttttgctagtaggcctgcagctttaggttgacttggtctcttctttcttctacttcatcaagggattccgccaataagatgttgtttacatcttggtcataggttatcctcctgtgtgacagtggcaccaactatacaaatagcatcgcttcatagccataagctaaagcaaatggagtttgcccaggggccgtcttctcgagggtcccgtgtgaaaacacctttgggagaaattctagccaattgcattttgcctcttcaaggtgctttttcaaggtgtccttgagggtcttggtcacaacttcttgttggaagttattttactaggaacttagatctactcacaagtat

SEQ ID NO: 222107 - DNA, 1201 bp, Cannabis indica
aaggagtggcatttgggagtgaaagtgcagtatcctggggtaatggttgagatgctgtgtttgtattgggtgatatttcagtagcaggcatgtttgtgtttgttgctgaagtagaaggcatgacagtaggtgatgcatgggcaagttgctcagtaacaaatgagccaaattgatccacaggaatatgagatgagttagaagcatgattagaaggcctggaagtagaaaaagtagaactaggaacagcaaaaggtgggtcagaatgtaccttggttgctgatgctactgaagttgcaggaaatgttgtttcatcaaaaatgacatttcttgcaatgaacaaccggccttgagaattttcacacaaatatcctttgtgaacagaagagtagcctagaaatgtacactgctgagatctatattccatcttgtggttgttgtagggtctcaagtgtggataacatgcgcacccaaatggtttaaggattgaatagtcaggaatttggccgagcaaacactctagaggagtttgttgttgaagcacctgtgtggggagccgattgattagaaaggctgctgtatgaaatgcatgccaccagtattgaaagtctaagcccgattgtgcaagcaaggtaagtcccatctctgtgatatgtctatgtttgcgctctgcccgtccattttgttcacttgtttttggacaaggatgtgtaaactgaattccttgatcagtgagaaacttagcaaatggtctatattcacctccccaatctgcttgaactctcttaatagggagattaaattgtttttctgccatgcttttaaatttaataaaggtgtcaaaggcttgggatttgagggtgagagggtagatccatgtaaacctactatgatcatcaagaaaatgaacatagtagtaatagccatctttagattttatgtgggaagggccccatagatccgtgtggatgagttctaaaggttgagaggctcttgaggttgagatggggaatggaagtttgtggcttttacccatttgacaagcttggcaaaattctaactggtttaaggaaccagtagatgagacatgaggtaatatttgacttaggacatttttagaaggatgtccaagtttctggtgccataggttgatatcatgcttgcaagatatataagcagtaggacaagaatcattctttttatt

SEQ ID NO: 222108 - DNA, 4098 bp, Cannabis indica
cttgctgcatactataaactacctctgaatcgtgtggttgtggtaatttcgctcttactatatttcattttcaaaagaaaatatatataaattttaaaggcttgctggtatgattggtctttccaatctttgcatcatatggtatattctaccctaaaagatcttttatttcatttaactttgtaatctaacaattttatagcaagtagatccttttcttcttctatcccaatttaccattaatattttcacaagctagacacttgtgctcatattggcattttggtaatgaaagagataagccatgtctcacttctcgtaagttcattttctaaattttttggtctctcttgacatggtcattgagcataaaaatcagaaattataagggcaattccatctaaaattaaaaccacagattctcaaccaatttctatcaagaaactctaccatccttgattacttttttgtttatcccttctctcaacaactttaattgttcagctttttcaacacttcactctctatatattagtattatatatttagaaaacaattctggtagctctattatgaaaaagcagctgactttaatttcccaagaattatgtggttcatataattctcgtacaatctcatccataaaatcaagaaaagaatttgagcttgttgagggtgtcaacaatggaaactcttcatttccgcctcaggcagtacttgttttgcatttatggggtaccacctcgtcatttctgtgcttatgtagacagccacgaccaacttctttgtcctcatttttatttgttcacatgtcctcatcctgtcctgtcatattttctcctttgtggaatcttgcttttaatcttccttgagtcacaaatagtttgactactctttagtttgccatagaccctagttgaatgtgggattttgatgggaaggctgatattttcattttatacaatttattgtttgatacaagtaagtttgtataaggctctatataattattcatatttttcttggttgtagtttcatgatgatatgaacttaccatgtggcgttcttcgtctgcacgataagggaggtcatggatgccacaatgggtatgatctgggccctggccaaataattatggttattgagtagtttataatagtaatatcttggtttggcatctaggttcttaactggtaattttaacacttgggaaaatgatttacttttattagtggcagtaaaaattaagattcttatgcttaagtgtaacaaattgtaagttgagagtgtggtatcaaaaacttaggcaaatcttagtgataagaacctgctgccaaatacgtaaaccagtagcagaatctccaaacagtagccagaaattacagtaacaataaaatagtagcagtagaatattaggaaatatggggaagcttgagacaacgagacaatgtctctaacaatggtagagagcaaaagctctccattgatgcagagaattctctcaaaattttgcataccctcctatttctcttacacacctatatatagtactaattcctcaatcaagactaccctcccatacaaagactcatataccctttttatttactatattctaacacaccatactaatcctagggcctaacacttaggagtgtaaaatgtatattttcccctgaaactatccatatgattattatatttgcttcttttttggtccaatttttcatggggtcatatttgtttcttacttttttctttttctcatgaaatttcttgaacaggatgaagagtgtgatctatcactttagaggaaacaaagaatttcctcggctaagaattggtgagtttgtaattaaaatctgttgtttatttcttttcttgttctcatctttgccgaaaaaaactcattaggtatcgggaggccacctggtcaaatggatcctaaagcgttcttactacaaagattcagcttaaccgctcaagaacgagtaagtcccttttcccattgctggtcaaattcattttttcagattagtgatgattagctaaagcaatggagggttttcatttttcctttctagtaatgtgttttcgctttcttggaacagattgataccgcattgcgagaaggagttgacatattgaatcttctactatccaagggcttgtcagagagtgcaagaaggtttaacacagagcaaaagtacaagcatataagattgcagacactgcccacttgaaaaaaaaagccttagctgtttagtttttttctcagctagaattatacaaattttaggtaggttttgtatattgagaggggattcatacattaaaggtggttttggtaaaagggtccttagtatattccatttttgtgtctattatagaaacaagtggggtaccccaaaatttgatacactttatgtttcatcatgatatgatgaaattttatattattcttatagcttctttggtcaaattctacaatttgttgctgattttacttagtcaatataactatatctataaagctgagttttgagtttgagttttcaacttcatcaagtaattttgtctgtatgtattctctgtcacactgatgatctgcaaatttagtaagagttcttctcttctcttggaaccatttggtgcttatttttatttcgcttcttcacaagttcggtttgatttgggtgattgatttcacagagagtagatttgtaaagagcaatggtgtcgtcgtcttcttcttcttcaaaaggcttgtagttggagaggactactttaagattctctcccatttaaggtgaacacttccttttgtctcactttacgaatttttgttggattcataaaatcaagttgtttatttcatgtaatgtctaaggcactgactagatttcactgttgcttttgatcccatatttatattattctacaacacaatccacttagtcttgatcaatttactagtacctacttctacttcaacatgaatcctcacctacttctcaccacatttcactttcactaaagttatatctcaaaccaccctatatccaatccatatagctacctcaaggcaggcacatttcactttcactaaagttatatctcaaaccaccctatatccaatccatatagctacctcaaggcaggcccaggccctgggcataggcgggcaggctaggcctgtgcctagggcccacctaacctaagggcctaaattttttttttttctcccttctaaaattatatatatttttttactgactttaaaaaatatcaccatttttttaacataagggcctaaaaataaattttttcctgtgggccactttgtttaagggccggccctgcctcaagggtatcatcattgctacaaatctcaagaaggtattttttcctctgccaccactccaaaaaaataatgattcacatatagaatacaattttgtggtatgggttttatttcaatctcttggtgttaatttgaaatttcctttttaatagagaatataaatatatatagggtatatttttattagagaccaagaataggagaggatgtaagtttctcccaatttcactttgttttggttgatatgttgaattggtttgtgcttcacaatgtatttttcaaaatgacagcttttaattatatataaaataaaataataaaaatctgaatttaatataaatatatagtcaaaccatgacaataattccaagaaaacacaaacaccatttataatagattcatatccttattcttcttctgaatgaagacctaatttttcaaatcacattatagtgcaagccttaagtactttgcttttccttttcttctgtttcggcggttgaagagcaactcttatggtcgcatcaaagacttccatcacattctgtgtatacaaaacgagtttattaaggcaacgaaaaagaaagaagggaagaaagttttatgtttgtatacctgttgtgttttcgagctgcattcgatataagcatgtgctttgataagcttttgaagttcctctcccttaatttgatggacatgtcaatttaaagaagagaaaatgtacaataattatg

SEQ ID NO: 222109 - DNA, 1675 bp, Cannabis indica
aatcttataaatgtagaataataaatatagattgaatatatatgtaaaaagatggaatatatgtaactccagttattgatgattctaaatccctactgatattgggattggggtattccttatgttgtgagttctactattgcagactccacagtttccttgtaattcttataactagaaagcggttcttaagtggccagccattttaataatttttactcaaatttttattcttttttaatccatataattcaactttaagattgagttgaaacactataaaagaacacgatgctctcgtttcatccaactgaactattgccttcaaccaaatcaaatcaaacataattttctcttcgagacaactagtagatgagagatacattctatacagttttcaagcctccttcatcgtttttcatagtcggcctacagtgatagagtgtcatgcccacatatagcaagttaagtactcaattatagtaggtaagacggtggtaattaacccgaaggagagaaagtaacgagatccaggttcgaatcttagtaatactctgcgacagaatgaaataaggattagaaatctgagcggaaggagtcatattattccgctgcaaccaatctaaagtattctatactcttatatgtttaattttcttgttttaaagatattcattgctgatatgatctaattgcctctctacaaaatagagactttcttttttaagttagattaacagtgaattagtgactctgcttttttttttttttttcaggaagaaactactttgcatctcttctgtaaatgccacattgcgaaagggctctggtttgggagtaatgggggctaagaatggagggcctcaattggaattctaagtaggattttatcctctggtttgtggaatcaaatgatgcagattttcttttgtatggggcttgcatttgtgatacaatttggagatgtcgcaataataagttttttcgtggttagaactttgacctgccttctttaaattcatctattaatgcccgctccctagagttccaaagggatttaggcatggatttgaagtgtcagaagaatgtgttggaggactacccgaaggtgacaaaattttttcaagagagctctaattttgtattgaatgtggatgcatctttcgctcagaacaaagttggaattggagtggtctagttgaaagaagggttggagatatctcatattaagacatttaagtgctatgcctcaagcactttcaaagtggagctcttggcgatccgggcaggactggagtttgccattcagaaaaactagaatatatgatgacaattaagtttgattctcaaacggcgataaaggctttgtgtgcaaaatacttatcttttgggtggggttcttatcagattgtcttagattgtattaaaactttcttgtacaatgaatgtcaattttttatttgtttccttgatgagaactgtgttgttgaccattttgcaggttgggtaaggacttctttatcttgtgtccaaggtatgattggggaggtagtcccttatgtggctactaattttaatgtttaattcaattgactgatatttaccagcacaaataaaaaaaatgctgtttgtacaaaattgttaatatttgtatagtttttagattttatttaca

SEQ ID NO: 222110 - DNA, 2956 bp, Cannabis indica
attgcacttaatatcaccttattcaacattaaaaagaaaattaattatacgtgcattttgcacgtaacatcaacttagtgtattaaagtatgtcattaatgattaaagacaaatataaaaataaaaatagtacttattgtgtgtcaaattttggtataatgctatattttgtattaaattttactcaatttttcgcatgagtcaaatttaaaataggttatagtatactatttgaaaaaaaaattattgaaaagttctaaaaaatataatacatgacttatttaacactctattagagatgctctaattatatatttataaaataaccacatatactacaatttggaaaaaaaaattattatttaaatttattttttcaattttatagtctttttctattatacgattttttattattattattttcaaatttctaataatatacaatttattcatcaaatcatgattgttactattcttttctcttcgtcaaccactcgaccttggagagttagagaccacacaattgtcactgctaccatttaagagaaatcataatcgtaaccctccccacaactcatactattcccatgttgacaatttaaaattacaacccatctcacaactcataggactctagcattagggagaccattgtcataatctacccttcacactactacaaaaagtactttttgcgtcggtcaacgcgtctcaccaaattgattgcagagatacgagcattgtagcccaccctaaatctcacatcgttttggttgtgagaaatgataattgcatcataccttgtaactcacaatgccttagttgtggagaaaccagaattgcaatgcaccctgcaactcacaccactttggttgcagagaaaccaaagttgcagtccatctcacaactcaccctattttgattgcaaagaaactagaatcgtaacccactccgcaattgtaacgccctactgcttagacatgctacggttacattctaattactgtgcacattgctaacaaagggtttctcaataacgtgtcaaatttaaattgtaaacctttataactatatacatatatccatacagaaggtcgagatctcgcttttaaaatttatattcatgttcaaaatacattttataaatatgtcgcacagcgactataaaataaagcccaagtcttaccatcttgacatgtacaatcatccctgagctctggattcactattcctcagccttagcctttcctttacctacccatgtaaacaatattcgtgagtcaacaaactcagtaaaataatcatataacacaaagtatatgaccgacttgtatttaggcaatccatacatctatccacaagacttaacagatgattaagaacgttcttaataaaagtatgacctttgtaccatatgcaataagtacaactattgcactagtgttgggaggtttgaaccgtacctcgagtacccctgagtgttgtaccacatgcactacgtacttaaccatactagtgttggtaacactgcaacgtacccttcgaacatcatatattgtaccaatgcacttagtaccactaccatactagtgttggtagcatatgaatcacatacacaacatgaaatttacatacatacacatatacatatacatgttttatactaatcttacctcgtttctaaatttaagtgtgtcagtcgacctgaatggaaaatcaagcgctgaacggaggccctatgccacaatcacataaatgggtaaataactcgctaaactttcttgaggatctaaactcaaaactagaaattttcctatcgataaatagcatggcaaaaccctaaatatcgaggaaacataaaaactaaggctctataaattccctaaaccagtaaactgaatttctaaacggcaaattggttcctagggtcctgtctggagaaacagttaatcggttctacaaaattggtcaattagtactctgtagaaaattgtaaaaaccccaaatctctctcaaaactttcccaaacttaaccaaactttctaaaatacctgtaatgacatccaacaataatttccaagcaataacaatagcagacacacacataaatgaaaagtgacactgttgagccaagtttgagttctcaaactccaacttgctcaaccactcctcaaactagcaaaaccaactcaaataagttaaattcaactcaaatataatctaaaaattaaaacaaaacaaagcttaacacatgcagaacctaaattccaaaaataacatgcgataacccaactaaaagcttcaaaaactcaaagaataggatttttagggtttaccttgtcagttccttccaattgctatagaattaccccttgaattccagctaaaccatttgaaaaattagaaatggaacccttggttcctccttgttcctttgggttcgaaaagagagagagaaaaagataatatttatttttcttaactttttcttccaatgacttaattaattaaaacttagtcttatcttaataataataataaaaataataagagttaaaagtctaataataaccaacaaaagaaaatctaaaaccaagggtaaaaattccataactacccctttacttccaactttagtaatctataggtttaaggggtaaaatagtccaaacccataatcccacttgaacctgatattccaaatatcacttatatttgtcccactaaaaaaatgtccaaatctcacccatgtgactctaatagctattcgccgtattttccatcgttatcaagcaaaaaatataaaaattataaaatttcacatatagcataaataatataatttgagtttattaaaatctcagaaattgagaaattataactctaatgcctatttcttataaatatagcccacaacatatatattcatataaaattataaaatcaaaattat

SEQ ID NO: 222111 - DNA, 870 bp, Cannabis indica
cttgagctagcctcaagtagtgcgctgtattataattcaattgttagaaatctacacttataacattatatgcgtcagtttacaatataatataatgtaaactgagatctatagtgttatttaacagttaataacagacgacaataggggtattataggtgtcggcttgaaagagccagtaacattcggtagagtaacgttcattaccaactattttctcccaatacctatgccacccaattttttataagtcgaataggtatcagccataaaaatcaacggccataccattaccatttacctcactcttttaaacagcccaaaaatccattttcttaatagtgttcagacggtcattttacacatctttatcaacactatatgtaattttattttatttaaattgtactgatatgacaataagatcttatataacaaaaattttatattttagtaatgtgaatatttgaagaaaattttgaacagacaaaaaagcaaggcacgattttgtaataatattaattgacagataaaaaaggaccaaaataaaaaacaataagtaaataaataaataaataatgagtagtattttggtaggaagtacagtgggtgacatcatgttcatagttcttgacgaaaataaaaaattaattatttatttgtttatttgtggaagtaagtggagaaatattctcatttaaaaaaaaaaagtggagaaatatttaacacaagaaaaatataacaagtgatgaaaaggcaatacggtggcgccacgtgtgaaactgaagtgtcagttcgtaggaaggcaattttgtggtggccacgtggatgggatggcccacatataagatggtaatagtatagactata

SEQ ID NO: 222112 - DNA, 1181 bp, Cannabis indica
cctgggtgcctagtgcatgccccgaggctctagtgggtgcccaagttgatgtatctcaattgagggcactccaagacttctttcaagagaagttgttcaggaatttcccttattttcattcacgagaaagatacaagtgctttgagaagcaaacaaacccatataggccccagttgaagagttgggcacccaagttgacatcaccctagccattgggcgcctcggttgatgtagccacactttttgtggttctgtcaatctaattgtgattctgtctcgagcactcttcttatttttctccaaaaacacgatatgagagttggaatcaggagaaaatattattcgagtagcaagttagccccaagcaccagtgtgtaagcacactaggcacccaagttgacaatggcctagggctcagtgttatgtcctttaaacagcaatttcactttgagcattgaccttatttcgccccaaaaataagatttggacaattctataagtcaatatctcatgtacatgtgtcacccgcaagtccactaacacccatgtgcactagtgatcacccgggtgtcaccttggagaacatcgggaatcactcgtgtatattaagtaaaattgccaagagaaattccccacggtcaaagaatgaactaaggatagctatcacatcattcaagcatctcaaaatatacctaacgaccaagaaaccaagtcttgggcgcccatgttgacgtttatgtcaacctgggcaccccaaagtcaggttgttctcacagtcttttctagaatgcacactgcttagtaaaatgaccatgactctctcaatttatatccaaatgatgcgattctagtgaaaaaataaagatatttccaaggcgcatctaagtgtgtctcacattgcgccgcaattctgaagtttcaatcctcaaaatgaacttgcgagctatttccaagcaaattttatgcgaattttcctattattttattgtaatttaattaatcctccttccatgtaaaaggagagttcccctaactcattattcacactttactttctctctccaatgtcagagcttctctctctaaaaattgtgaagcgaagctagacttagtcattttttcctgagttctataataagacaattagcttttagtgacaataaaaactctaagtagacgta

SEQ ID NO: 222113 - DNA, 2525 bp, Cannabis indica
cacccagtgtaaggtttcctaaactttatatgtgtttatttcattgttttagaattcatattaggatgttaatgaaacatacatggtagtaaatctagatcctggtaaaatatttgcaacaaaaagttgcttctctcaagagtgagatgactaagctttgagaagtggctaatggtgccaaaaacttaagaaagtactttgaataaaattttggtggctacttggaagaaagcttctgatcttgaagattcttctcgtgatcctttgaataagcaggttgttgtgggtgatgacctgagggaccaggtcaaggtcttggagaagaaagtgactgctttcaaagatcaggctctgcatgatgtcacctactacaatgacttatgttttaatgccatttatacaacatgggtcaccaatggtagatcccagtcgttcaactagagtgaatttcatgacacatctgtgccagacttcacctggcagtgtgaaaagcattttgatgcagaatctttggaagaaactgactttactttaaatggtggtcagccagttactggagaaacttcaagagttaaaggttataaccctgagcatcctaacttccctccttctattggtgaggcgcctcttggggagagtgaaggcatggaggacactcatgttgtaataggcctccaggaccttctttgagtccattttttgctttagtggttttgttatcccattttttgcactatgacgtagcagtacatgctggtgacacgtggacctaattctttacatctggctaaagagatgtctcgaacagagctcaacatacacctgcacggataatattttccaagccgagcagtagacaatccgagcagcgcatcagcacttagcaattctaaggcttgcatcgtgaagcataaaagcaatccctatcagtctgggatcatatcacagagatatggcaagatgtccaaatcccaaaatctgtgtattctaaatatgtaatatatgttcttaccaactatagacattgtaagcaaaaaggaaaccttccctcaagcatttagccctataaatagtgatccattcgcactggtaagggggtcgaaagaattactttagagaaatctaagatagcatacttagagatttcattgtgagagcttcaagagaggaaacactgtattctttgttcttgacttaatacaaatcaaggggagtaggctattaccgaactaacggggacgaacctctttaaaatcatgtgtatagttcatacttcattttaattatattttctatcgcttactatttgacacactgttgttggctagaagcgaggtcaatattttggtgctttcattgagagtaataatccaagtttgctctttgctttaagttggatcagaaacattatggtggtacaaactcgcaaaggtgtggtcgatcaggtggatccattcgcggcagatcctgcactgcagaccccagggaatgcaagggtcccaccagccacccatcttgaacaaccaaacacgcaaccacctaccgcgggtcaaggtgtgacatctcctttggctagaatcacacttggtgtgcaagagactggaaacaccagttcaacagctgaactatgtactcccagcactgggatcccttcagcaacaaatgttcaaacaaccattggagatgacactgagatccagaacctccgtaatgctcttgggctcatgcaaggtcatactaatacctagcatcatgatcaagaagagctccgtgctgcaataaaccttgcgtttgaagagcaaaggtgccagttcactgaatggagggatgcagccatcgacaactgaacaagacaggccaccgtactgatacgaagagcctacttccagcgtctcgctgggcagctcggaagagattctaactgggcatactgcccaaactctaaacggtcagctgtccaatccccggtcacaggttccacctgtgggccaagtggtaggcggccagaccttatctggaaatatcaggtggggttatacccaatagctccaccttgactagcgattctagccaagtgcttggccaaaccaagcagtcattgagacaacctggtgtttcagtatttaacagactgggaacagctcatgatctcagggctgatctgaatagaaggagaggtttagacgaaaaatatgttcaaccagccactcagcccggagtccgcattcatgatccagctcaaagagatcctgacgtggcactgatcggccaagaggtcaaacaggtgcatccatccgtgcaagcgcagttggatgaactaaaaaatatgttctaaggcctggtcggtcaaaagctcaatgatctcgagttggaccgagcatgcagatccccgtttactcctaaaatcaatattctagaactacccctcaagttcaagatgccgacctggaagatgtgtacagggaaagaggatcccttatcacatctcaagtattttgaaatgcaaatggatttacaaggggtac

SEQ ID NO: 222114 - DNA, 2053 bp, Cannabis indica
atataaaaatattaatattcttggtatgttcaaagacattaatcataatttttacaactaactagatttaattaggtggaatatcgatggcttatattatttgttatgtatttatttatttattttgttagcctacttgctagtctatatttaataattagctagttttgaatttgtaaaagagctcaaaagttgcattgaaaatgtctatgtttaagcaacgcaatcgtctaattataaattataactaagagaagaataatggtaattatatagatatgtatgtagcactattatttatagtacttcttatttactacgtataacttcaaacaaaggaacccaagagtcgcaaagcatttatatatataatattaattcttggtaattgataaagatattttatttttttgaaaagagatattgatcttaatttcaattactgaatttaacgtttaattggctggttatatagattaaaatcttggaaatgataattaaaaatacatatatattttatgtgcatgcatgcctatataactagctagtaataaatattatttcgatgagatgatattaatttttgacggttgcgaaactcgaagaagaaagattaaacaacatgatcgatatcataaactataaaagcatatcatattttttttctttggatagattttatatttaatttactaaaaattatacgtttagacattggcctatgttttaattcaaaaagcaagaaaatttaggttaggttaggataaaagtccataaggccttagtgggctatgactaaagagaaaatttaggttaggttataaacaaaattggcaccactttttggtacctaaaaaggctatattgtgcctaactcacattttaatttacaaaagaaaaacataaaaaaagtgtggcacgacctctaagtaggcttttacccaccggatatatggaattattccgatttcctctttaccggaggattttttatgtaatgaccgcgaggtctaaacatatattgagatttctcaaaagtgtggtagagctatcccacattgtataaacagtatcacatcatttttttcttgagaaacaattttttgtgttcattaattaatttaattttgtaattctgtattttgtattttaatagttgattatttttttctaattttattcattagtttttattcaattaaaatgttacaaattttttattttaattttgaagggttttataacactagattactcaaagccattgtaattattatataaatataaacacagttttgagaatcatgggattccatctcaaaattaattggcaatgagtggagtagcccatgttcttttatattgctcaatactttgtcatttattccatttgggacaatgtccacaatattcctcctcaagatgatagctattttttgcttatcaatcttgaaccgtatcagagtgaacatggtcactatctttataggtgcggatcgaatacttgcgcgcaaaagatatagctttgatatcatattgagaataatagaattttatctcaaaaccaattgagaagaatattagatgctgaatataatataaaatcacacattttaacaacactaacaatcaatgattcaaaaggaaaagttgtaacccaaatattgataaaaccaaacaagtaaaacaaacaaactaattaattaataacatgcacaaatacaatagcatgccagtacaaatctttgtgtcaagtcaattccattttgatgtaacttcttccaagactttcaaaccataattaagatcaatggaagtaggttcatcatcatcatcatcatcatcatcttcgagttcgagttccatagcgaaagccttatggtcgatgaaattggcaactgtaaagtccttttttggcaagttaggtgacaaaataattttccttttatggtaagattgctatgcattcattttcgaaatcttacctcttttattcggtttttagttgccattttccttgtttggaaagttgcactttcagctgaactttcct

SEQ ID NO: 222115 - DNA, 4530 bp, Cannabis indica
ttttattttattttttctactttttattttggtactaatttccatgtacgcctcagggtaggaattatttaaataaacgaagaagttttcatttcatattggtctttaaaggttctattatgtaacaagatatcaaaaatttcaactattaatcatttgggagatattatatatgatattgtcagtaataattttacctctttcataagaaaacagttaagttaaattctcaaatataagagtagggagtattgcctcaaactggaatctcaggaaactaaaagtaagtcattatcttattatatttgaagttaatttaacatttaaccaagcataagagtaggaagtaaggggtgggcatcatccaatccaatccaattgaaccgaattgatccaatctaagctaattataaaaagttggatatccaattacaattggattggattggatgctaaaagttagattttaattggattggattggtcattggatgtcaatctcaaaatccaattaaaaaccgatccaatccaattacatttatgtatgttaaaaaattatttatattattaaaaatattaaaaattataatatatatttattagattttattcatttttttgtgtgttgaatttgtaacattttgttgttttgtgtatttattttcatgatgttttgttctattttattacttataaacattattattttaattatttaaaaattttagctacattatacttgtaacgcagtatgtttatgaagtattaaacttaaataaaaggcgatacctagtttttacgtatttttcttcatatttttatgttaatattaaacttttggtgtgtaattagatatccaatttaaaaatcgatccaatccaattagtaatggattggattggattgaattttgaggtctaattagattagtttggatgatgattttctaaacctaattactaattagattcgatccacccctagaaagtatcacttgaaaccggaactttagggaaccaaaagtaaatcactactatattatagttggaatcgattctcacatattaaatagttaatccagattaacttcaaataggagttcatgcttcatggttaacccaagttaacgcaatcagaatattcaggctacttaaactaattgatttaggtcatttaaaaagttaagtctaaaaaggctctgaaaatagtacttaccatgaaaggtctagtcgtaaaggtaattaattagctcatgttaattgactatttaaagttccagagaaaccttttcagtaaaaacactttcaaatattttttctccaaaaatacagaaaaaatatgtaagtctaagcatttaatcaaaaatctaaaggttcaggcatttggaaccagaacctcatgaggctggaagcattaaaacttagcaaaatttatagataaaagtacaaatttctaaggaattaattaaacagtactacgtacttgaaaacctcgtggcaagggtataaaatattgtctccacacacgtaaaaagggggacccttgtcccctaaaaaataaaataataaagataaagttgttaaagataagagaggatggttaaggctaagctagatccttcaatgattgtgcatttttggtgggaacatcagacgagacctttgggagggcagggttgttcgagataggaaccttagacgccaaaagagcaaagtcacccacgttcacacctataggaacggtagttccaggattgatcgcttttgtcccctgagccacttccttagttttgtctgcctcctctagtgccaagatcttgggtacctgatcttccttatctttcaacatcaaagagatttattatagatttgtcatgttgccaaatggtatacactgagtagacgaacgcctgttctagagccttggtgtgttgggcttcttgctcctatttttcagagattgcttgttgaagacgtccctttaaatctgagtttttaccctctacctcggtgacccttttcatggattcttcattagccttcacagatgcattcagtttagtctcagcatcgtcagccctcttaatagtctctgcctcagcttcctctacattctattacaattccagatggtgcttcacctttctctccatagtagtttcactgatgtatttatcctggataatttgagcctgtttttcgtactttagagatagggtggtaatctgttggtctttctcttggacatccagcttgacctgcttcaagttggcttccaagtcttttattttgataagagctgtggaatgcaagtccttgtacctgtctccacggtccctctccgtcttgctcgccttcctttcacgggtcaaggccttgtccaaagagtcagacaccctttactttatagtagcttccatcttggcgttggcttcagctaaagcattggttgctttctctctccttagctcgacattggcatgcttcgccattagcacccctaaatcataggctagttgaatgaccatggagcgatttctctccaccatcaagtcaacctgtgaaagagaaaatacaagtgaatcaaacaatggaaaaaatatgaagtgtttatccaagtaaaaataagttaaacttatagcattagcctaggtcctcatagcatcagctacgtacattgcatcactgcttcccatcatggtaaacctatcagcaccgagcctatagcttgtagtagctctcaattccaacaggtcaggcaaaaatgggagcacatcaatttcaatgtgaggacagagcttcttcgtcatctcaactctgtttacaagaggagggcaagcttcatcccatttgttgtagtcaacaaactcagcattacgtatggaagagatgctgttggtcagttttttcatctttttgtactcgatgccacacctcttctggtagaattgctcgacggcttctaggcatgcattctctccttttgtcattgacaaagtcttgacaagaagagtgaaaggtgccagaggcaacggaggcaattcagtcctttccctggacagctgggtaaaggtggctagaataactctaggcgctagggtggtgttggaggacctgattgtcccttgaagttttggtgcttcgcctaggcatccttccgccatcagaggcattagaccccttctgggattgagtatctgaggtctgcctccttgaggctaccaactgtaagaccttttccttggtctccaccctcaccttcttattggtgtcgccttcagaagccagaccactttttattgatcacgactggcccatcataatcagagttatcccctctagtgttctccatatgaacccgccttaaaggttccacgaccaaaataggttcagtcatgtcaatgatggaagtagacacggcttctttgcttagagccttagaagcagcctctggattcaaagttggaggtgctggctgttgagattcgcccccagaagcctggctcttcttgcccttgtctccgcctcctcttgcgatttccaaaacctcttcggacctagattggatatggcccaagaacctatttagtagccccatctatagagtatttacctatgttagtctcgtgttggaagaagcctgggaaataaattttactaaaagcatccactttgaaatgattgtgcacaggtggaatgaagtagttgggactcctgatgatgcaatctactttatctatatacaacctgtatggatatctatgatggtctaaatttaagcaatatgaatcaaatccacatcgattgacactctcaaaatcagttagagtggtagccctatttgtatggaagggtgtctcaccactaccggaggtgcttgctcccgaagcaccctcattccgcactacttccttgaatataatagtgagatctttagcctcgtttaggttttctaggaattgtgtccataatatgtcacccattgctcatcggctttcactgcctttagagcctcttcaacagttataattgtgatagcctctttaacctcgtctatgtcccctgacagagcatctttgactgtgtccttcacaaaaaggtgggccacgtcctattgtggggcaatgaggcctacttctcggaggttcttagtagtcacaagcctctctacttgcaactctttagacgagaaggatttgtaaaaagttatccactcttccaactctagagtcaaaggtgtttggggaaggcagtctagcaaatgtgaaaaataagatatcagtataccataaacaggaggaaaagtagaatcccaaagtttaaagaagggaatgacacttacttgcagtattgaaatccaaactgagggtaggaaccctcttcagtgggaagccggaggtgtaaaagagtattctctcaagtcgtacgtatacttcgtagaattggtggggcaagtaatactgctagtgtagcgctccagcctatagaagcccaccttctctttgtgtcccctcatgggctgagacttgat

SEQ ID NO: 222116 - DNA, 1468 bp, Cannabis indica
atgaaacttataaaaaaacacagtaaaaatgtaaaaaataccgcctggcagtatttttgtaaaaaaaatagcaaaagttagtataccatgtaaatttcccaattaaaacatgaccaaagtgtatattgttaatcatctcatcatgagtacaaacgtgaaacgttgtagttaaagttacatgattaaaaaaaaatgattcaacaataaaaaataaaatggggttaaaaatacatatatattctttgacggtttgaaggggtgaaagtagtgacaaatggggtgtatgtaacggctattaaagcaataactaatatttaaatgtataaatagaaagtgatataactagtcggaaaatataaaaataaaataaaataaaattataaacatagaaatgataaaaagcaagtgagtaaggaattgtcacgtgaaaagggtacgtacctgggaaaaacgcttcaaagtttgttttttgatttgttaaaataatacgattaaacctttcttggttcgtaacgtaagagtatagtctttgtttcatattgatgaggtggcacatttgggtgcatggttttgtttgtacaaccactaatcatgccacctaatattaataaattaatacataatatactatatactactacagtactctaattatattcatgcaaccaaaggtgtcatttattcccactataaataccatagagcttctaagtttaggttcgtgccaatacaaaccaatacaacaaatattatatcttctctcccttataataacaagctcttaagtttcatttctttgagaaaaaaaaaagatgtctatcattgcaactggtcatctgggtgtttttattttcggtcttctagggaatatagtttcctttgtggtatttctggccccagtgtaagagatcatcatcattaatttaattaatttgattattttttatttatgtgttatatttatatagttaatttgtatgtgtatgttggaatatatataggccaacattttacagggtatataagaagaaatcaacagaaggatttcaatcagttccatatgtggttgcactattcagtgcgatgatgtggctgtactatgcaactctcaaatccaatttgcttctccttgttactatcaattcatttggttgtgtcattgagaccatttacattgctttgtacattgcctatgcaccaaagcaagcaagggtaagtaattaagaataattaactacatacatatatttaattatacataacaatagtcttatatatatataattatatatgtgtaggttttcactttgagactacttgttgtggtgaactttgggggattttgcttgattcttctactctcacacttcttatcaaaatcacttagagcaactgttttgggatgggtttgtacaagttttgctgttagcgtctttgcagcccctttaagcataattgtaagtactaa

SEQ ID NO: 222117 - DNA, 3206 bp, Cannabis indica
tgcatacttatacaccaagtacagaccattgtttctcgaacagaacccataaagctttacaatgttccgatgtcggacttcagttagagctcgaatctcattttggaaacttatgcgactaaattctggaatgccactcgaatctgacatgtgcaaccgtttaaccgcaagaactagctcttgtgatctcaatgtagccttgtaaacagtaccaaaacctcctttcccaatgcagtattgtcgtcaaagtcttcagttgcttctacaatttctccaaaagtgaattttgcttccttctcccatatcaatgactggtgcgtgtcatttttgttggaatcttttctgtgcttatccaacactataaatttatgacacaatacgagagtgatcacaatgacaataacaaatagtaataggccacaaacaagactaatggccaaaatgagaccattgccaattttgtttctttgccttctgcagggattaagtcctctagcatttccacacaatccaagatttccatcataaaagctttttgaagcattttggtaaatggctccaatcgggatcggacccgtcaagttgttataagaaaaatcaatgtaactaatgcttattaggttggaaaataattgtggaatactacctaagagttggttatgagagatattaagaatttccaactttgtaagcttggacaaacttgagggtatctctccaacaagtaaatttctactaagatccaatacagcactcaaggacaccaaatttccaagctctggtggtatttcactagataacatattgtgactgaggtttaagctcaacaatcctttaaaattgccaagccaatatggtatcttccctactaaactatttgtcgacaaatcaagatgctctagcccactcaagtctaataggcttgtagggatttcccctgttaaatggttattgctgagattaagctggtacaaaagtttaagatttcccaattgagttggaatttccccacttaactcattggactctaggctcaaaactttcaactttatcaaacttccgagttccggagggatcttacctgagattttattttgacccatctgcaatctggtgagattcaaacattgtccccacgtacttgaaacatggccaatgaattggttgttgtttatgaaaatggaatcgagatgtgggtgaactccaaaagctttggtaatgttgccaacaaatcgattcccatcaagccttactctttttaattttgtgcaatttctcaagcactcgggcaatggtcctataaagttgctgttagctacactcaagtattcaagattgaatccactacacaaatcttgtggcaactgtccaaagaagttgttgtttccaaacataatgaagttcaaatttggattgttcttcccaaagtctgtagggattgtcttagtgaaattattgttgaaaatggagaacaactccaagttactaagcatggaaatattaactggcaactctcctgatagttggttggtgcttacatcgaaagttgacaagagttttagatttccaatctctggtgggatggttccaaccaaattatttttgaaaagttgcacaaaggtgaggcttttgaggttccatagagaacttggtataggacctatgagattgttagaagaaagatctaatatttcaagtttttgcaagtttccaatctctaaaggaattgaaccagtaaaattatttttaaaaacaaataacgtttttaagttactcaaccttaacatattaattggaagagctcctgatagttggttggtgcttacatcaaaaatagataagagttttagattttcaatctctggtgggatggttccatccaaactatttttgaaaagttgcacaagggtgaggcttttgaggttccatagagaagttggaataggacctgtgaaatggttcctcgaaagaaccaatgttttaagttttttcaagtttccaatctctaaaggaattgaaccactaaaattattggcaaaaacagataacacctccaacttcttaagcctagaaatgttaactgccaacactcctgacagttggttggtacctacagacaaaataacaaggcttttgaggttccacatagatgttggaattggacccgtgagactattagaagaaatatccaatgttttgagttgtgatagatttttaagttggcccatagaagaaggaatactcccactaaaaaaattttcatacagttcaagaacctcaagatcatgcaaaagacctatttcactaggaatattacctttgagaaaattagtttgtaaatgaaggtgtttaagcttagaaagtttcgaaatattagacgacaagtgtcccataaatttattatttgtgagattgaaagattggagtttgatcagattggaaaacacagattctggaattgagccagtccaactgttttgagacatgtcaaggaaggtcaagttcctacacttcgatatgaaatctgggaatgttgaattaaacatattcaaataaatatcaaggtaagttaaggaaggcatgcttgaaaatttagaccactcagaattctccaaattgttacctccaagtgataaataccatacctttggtagaatggtgagttggtaaggtattggcccctcaagagaattgttgaagagactcaaatattgaagctctgacaattggcttatctccactggaatttctccttcaaaataattgtcactcaagtctaacaaagtgagcttggtgagattaccaatggctgttggtatcgaaccagcgagtttgttgttgttgaggttgaagacggtgatgttaaggaatggagcgaagttgaacttgtccaatgttccattgaggtccaagttggagagatctatttgcgagacttctccaatgaaaccatcacagacaacattagtccaattacaaagattattgaagttgttgttggaccatgaatcgagagaagatggtctcaacaccaagctgttcttccatcttataagagcctttgcttgtgttcttggtgaggaactaatcttcaatggaagcaaggaaagcacaaagatatgaagaacaagaagaacagagaaacaagttcttccaactcttttcatggtgttgacttgaaacaagtaacttctttctttcctttt

SEQ ID NO: 222118 - DNA, 1444 bp, Cannabis indica
gagctgcacagcatgtttaaaaagcacgtaatacgcctatgttagttaaggtgttacaaaaagggtggaagaatccgaacctgtcccctcaaatgctcctcctgctgctccaatcttgctccctgctgttgcaactgcatcaaacccatgagattcatcgcttcctcagcgtgaatctcagactgtgaagcccaagccgaaacgaattccaaaacaaatggctaggaaatttgtgcgaccacacaaatttttcacttcatcgtcctcatcgtcgaaggggtctcctcctcgtgctactgcatcaagtaagggtgttgctgcatcaactccaacaagcccttcctctcgcactcgtgcccaacaggtgtctctcgagaacaaacttcgcactaaatgaagccagcacagaccagttcctcctgccaagaagttaaaattgaatcccccttcggcttcttccaattctgaagaagaagaagcaatggaggttccatctgaagattctgaaaccaaatccttgtatattccctctgaaaaagagcttccagaagattttggtgtctcctctgatagtaaggaaattgatctcgatcccgagccaccattgtccaaatttgctccagcacctcctcgtgcatcttctggagccaaagcctctgctgctgccaaaggcaagcagcctatgcagagttcatctcctaataatatttctccatctcaagcagacaattctagattttactatcatgataatcagcgtgattagaatatttatgttatccaaaagtttgaaagtgagaggaattatgatttgtatgctcatagggtgtatggtattgttaagtttgttcaataccatcaatgggaaaatacccttactggttttgaacggtatatagaaggtattgtcaaaaaattctatgtcgatttgactaataatttgcttgatgaaaactctgaattttttggtaaagtatatgtttgggggcattggttttcattcactatcaaggaaatttctagggctctacatttacccgaaggtgtgtccaatgcggttatgtccatggatcgtcatctaatgctcactgaactcactggtgcacgagttgaatggaaatctaggcaaagtcttcgtattacacatctcacttatatgctcatgcatcactcatgaggtttgcacttagcaattggcttcccgattccaacaaaatcctggtatgtcaagattcgacatcctttctctttcgtatcaccttggggcatccattgatctggcttcctcaatcttggactagattgtttcatttcagagaggtaaaaagcgtactcataagcttgtttttcctaacttaatatataaaattttgtcctctcagaaagatgtagcttactctcatgagacacttgagcctcccctcactggcaccatcttccaacc

SEQ ID NO: 222119 - DNA, 1219 bp, Cannabis indica
gagaaatggtagcatccaaacaagagataactttgcctctaataggggcatcagcagcattaactaactccattaatgagagacaacaaaagacaaagagaagccaactacccacacgaaggacccaaaaacagagaaaaaaacgaaaacgaaaaaaacaacaaaaaaaaacaaactgcactaaccccacagaatcacacagaccccactcacacgaagagaaaaacgctagggaaagaataggaaaaacgagtaagacaaggaaaacaaccagagaccacacgaaacctaacacacgagaaaaagaaaaggaaaggaaccaaacaaacccaaacacaggaagagatcagacactacccagcagaagcgaagattaaccagcaaaaacacaactaacagagattggtagaagaccaagctcaaggaagagagaaccagtatatgaccattctcccaccatactttttcatatttttggggctttaatttggtgaaatgtatattattgttgaaaaatgatgccaactggttacatccgcgttctatttgattttgcaatcttgttttcctttttttagtaaaacaaaatctaaatatctagttaatatacatttatatgaatagaacatatacttttaaaaaaataattaaataaatttacaaacaattattatattatttgataatataatatgtgtacattaaaatgtgataatatatattattatataaataatatacattaagtatatagtaaataaattgtataacatgctctgtatttaacttatactttgtaacatatgtattgtaaatcagggagtagttacaatttattatcacttgtaattttacgctaacaataaaagtataattttcattctaaaaaatttaacatgtctttctcatatatttttgtcaacacaaatatgcactggcaaaagtctccccctacacatttttttacgcgaaaaaattctctctaaattgtttctgacctttatctactgcataattgcgccaacaaaaggttcatgaaccattggaaatgattcgcgccttaaggcgatttattccaacacttttgccggcgcgattcatgaattgtgctggtataagtaacttttacccggtacaatagtgcgctggcaaaagttgttgggttttatgccctaaataaaactcatttcaatgtaaaccagattattcaatatcaata

SEQ ID NO: 222120 - DNA, 2903 bp, Cannabis indica
tgactacagtacttcaaccctctagttaaaagttcttgtagtcaacattagtataatatgtttttgtgttatcattcatattcgtacacattaaggtaaagttaccattcttatattatgtgaacttgaatattagttaagacataagcctcaaaggaaatttaattgaatttctacacaaacagactattgtacacatcacaattacactgaaataggtagatagtgtttctaattggatttcattaaattaaaatatggagaagctcctttgaagttggaattaaacttcatagttgtgtgggattaaagaacatatttaagagctgaaatattctgtgtcaacaggtccatttaaatttaagagatcttgtacctggtgtaccacttacttttgattttcaacctacagcccaagttgtatttggtcctggggcgacatcatctcccataaggtcatttggggtacctaaagatggaagcactagtagtaaaagtcgtgacttagacctcaacgagtctgatggtaatgcacaaattcccttatacttgccctcaaaaacttctgaatctgcagtaacatttcatgattccaccaacaaatcaactcgaagtagcaagaaagaatatattgaaccctgggtaagaagcactcaagctgatctctctctatctctctgtcttagcacatacatttacattcttgcttttgctgttttgcaggattacaacagttactatccaactgttcttcctctgaggaagccttactctggaaatccaggtatcatttgttgaaatgccatcttacgtaatcttcctagatatctaacattccgtatctgtcttagtgtgcgcatgcacatatatacaagccttttgttctgtcatatattctttacctgagttatattttatctttctcttgccactctagcctttagacactcttattgtctcactagagcgatgttatgatgcaaaagtatgtagaatatttaaatccagaatgaaacatggaagttagtcaattatgaaatcttaatgttacaagataccaagtcacttcacttttgctaaacatttcatctttgttatcattgacttttcactttttgcgatttccataataatgtgttgaacaaaattgcttctttttctctttttggctttaagatcatcttaacaaaatcgaatttggggaagctgctacaaatgcagagtacgttgaggatgctaccaatgctgcttcagaacttggattgatggtacgagagacttatagcaaaaatgttgaaacacttgcagccgatactttttgtcgaatcttttgatgtgaaatgtgatgttgatgacaggaggaaaatacagaaggaaatatgtttggttccagtttccccgcattctgccaacagttaagcaatcagctagtattaagggaaaagagaaaattggatcatcaatatcatcaccgggtccaagtgcttcaagcaaaggcgctaaattggaagagttaccaaagggacatgtggggaaaatgctggtttacaagagtggagcagtcaagttgaagcttggggatgtcctttatgatgtgagtcaaagcattatgattaattttcatatgactcgtatattgaatttctatgtattttctttaagattcgaagctctcccctctgacacatgcgcacaacccttgagcaataatttaattgagctaggaaaattaaatctctatgcatatagtttatcttgcagctacctagtatgtcaaacgaactgtgctggacgagcagcaacaaggactatgggacatttttcaactagttggcaggctgaaaaagctggcaaactgttagcttttttgggttgccgatgaattgaaaaaagccgcatgacaacccttcaagtgctggtcagaaatttcatgtcaaactgagtatatcttggttttggttgttatgtacgtatgcaggtttcacctggaactaatgtgatatcagctgaagatgttgtggcaatcaaccctacagagaagcagtgtggtcttcttggagagatctgcaaacgagttgtggtatccgctgatattaattcccttttgaatgcagtgattgacttgggctaaacgaattgtatattctgaaggtagaggtagtaaatgcaatgtatatgtatctgggatatgatgtctgagtaaatttgtaaccaaaattgctgacattattgcttgaaatgatggtgacaacagattatggcgacgattattagagcccaaccacctaatttttctgcttgaaaaaaatggctgaatttagaatgatgtaaatccttttcaaacatgatcaaacaaacaattgatagaaagaaaaaaaaataattagaacacaatcaatcacacaaaataccaagacctatttcataaagaaacctagtttctaccataagaatatttgatctctccttctctctcaaatacagtcagtaatctcacaaatgagaataaagagtctttatataaggcaaaagaaacctcgcaaatgtgaagccttctcaagaacgtgcataaattgtttttaactgatgctttatcgaaggatagagtgatgggaacgcagtggcgaccgtggataggaatgctggttagtgggtcactcagcacaacacaagtggaagctgattctactcttgagggagtaaatcaaagctatgaagcaggcaatgggattgcctctacctctaatgattttttattctttttttatgaagaaaaatgcattaaaacgaaattgatagtagttctgcactgattcaaaattagtctctcatttgtcctggagattggaaattatggagtctatctttagatgttctccttgttaagtctagatttactacct

SEQ ID NO: 222121 - DNA, 4894 bp, Cannabis indica
atcagatctcttgggttgtttcctcaagaccaatctaatctaaaagtctttcctaacaactatgatgtcgttttgttaagccgttacaagaatttcggtgtcgtttagtcgcaacaactttgatgttggttttccatatttcctcataaaacgacatgtcgtttaaacattcccgcctcactatgaaagtatgctattattctcaagaggatttgagggttatgaactcttttcctctaaagttataggaagctccaaactgtcactggccctctgaatctttaaaattacttggtcaccaacattatagtcatccaatgctttgtacaattctgctttgttttttacctaaacacaaataatttttgttattttagaaattttatggatcactagactaatgctgcaaacactagccaaattacaaaacaatatcttacaggtttgttgtcaactgctacaatgatatccccgagtacaatgctaccggcgaagccccttgtggtcggaagtagccctgctttggcagccacgctgtttcccggtacctatcatatggccacagtacaaaaaatttatgcaggaattgcagtaatgtttagggtgcgtttggaatggaagtaaacctagtaattacgctatattttaaatgtggcaattacttatgaattctaaatgtcttgtttggaaaaataattggtaattacagagaaatagcacttaaggtttaaaatggaaacaccgattctcatgggggtatgagaattgaaaagtgtaattgaaacacttgacttacctccaattacacaattacagtataattacgtgatcaaataaacatgcaaaactatttaattaccttcaattatattgaatttccaaacgcgctgttaagtaataagcaataagaaagatggtagaccaaaatgagaactcaacaggaatacctgtagaacaagagctccatatcgaacattgagctgatttgcaatcagatcaggagcaatctctatattcaaaccagctcgaaaagcctaatggatttgaacaagaaatatgtaagtagaaacttccatacagtgagaaatgctttacaatgacaaatactcactttgccaaattgaattagttgggggacaatcttggctacagttgaggattgaatggcaaaccctacccctgctgaagttcctgcaacacattaaggcgaaaaagtttttagaaaaggtttcactgtgaaaacccgaaaaaaactgaatgaagaggagactaaacctaccagtctgcgtaaatattgcagtgttaatccctattaaatttcctttggaatccaataggggtcctccactgtcacagttatagaagaatgaaacgattttggatcaaagcaaggagaatcgacagtttaaagtttaaagcttcgatcaaaaaattagcagcgtacctgttcccgggattgatggctgcatctgtttgaattccaccgctaattgtgactccagcttgactgaaaatgtctcggttcagcccactgatgactccaacagtgagagtatgatcaaaaccaaatggatttccaatcgccaagcattgttgaccgactttcagtgaagatgactgccccacaaggattggctttaacagatcttcaggggcttcaacctagcaattcgtagaaaatggtacatcattatattttttatgttactacatatttatgtcaattgaaatttcctcagccaacactttgcaggaaacagtgatgattatcagtttcttcctaaataagttcatttcttagaataaagatccaactcgaaatttaacaaaattgaatcagcaaaattaagtgtttcttgatacacacatgttgcatacagattatactgcaatcaaataaagttcaacgaaagattaggttcaacactgataagaatcacgagattcaatctcaaaatcaattagtaatgagtggagtatcccatgtctttatatatatagggttcaatattattacatttaatctatgtgggacaatgttgtccaataagagaaagcaacaagataaatacataccttcaaaacagcaagatccttggcacgatcagcgccaatcaacttgccctcaaaattcttttgtaccctttgaaaacataaaagaagaaagaaaaggaatcatgaaattgatgaaacaaaactcaaataaaacaaataagcaagtctaagatgcactgtttttctcacccatctgatgttaaaatattaactcgtgcaacaacctccccggggcttggatttctagtgagggcattgccaatcactagcaataaaggagaataatgtcaataagatatcacagtactaaaataatccattggcatcagattaaatttgaacaaactttgcataacagacatacaaggtctgacccttttggcaaactccccaatcccaaaaattgttaaaagggaaaaaccgaaagaaagaaagaaggaaagatgttcctttgccagcttttaccatgataatttgtcacaatatgtccttctctatcccaaactactccagaaccatttccttctggaatctgtcaatacatgataatttgttactactgaagctataaaaataaaagagaaaagtaaaaaaaagttaattaggatttctatcccagaacttcgacggataccaaattatgcttcttgaaatttttaggccgttaaaagttcctttgaattattgagattgttggattcaatgacttttatccaattttactaacctaagcctaacgttaataaaagttcagggggcacacgattgacagatatcgaaatttggagggcgtgatttagtacagacaatcgccgcatcagtaaaattgaacagaattggatctcaatagtttgggacaaatttttaatggcttgaaaaaattgggagatataatagcaaaaatactaattagccaaaaaaaaaaagaagaagaaagacaatgatgatcattttggtaccaaattataaatacctcaactgcaccagttacattaagttgagggcgcaatgttacatcaaaaatgttgacaacagagtatgtgtttttctcaaagagttggacaattctgttctgtacattacacacatcaacaacaccacaattacatcagacaaaaaacttcaataagacacctgctgtgatcagaatgaaactaaacataataaaattgatatgatgaacctcagtagggaagagttccccggaagcaatgacagtaggagtaacttcatcaatggttacagttggatctcctaaagcttgagctgaaaatccgtacataacaatctaagaagccagttttttcaattggctaataattaagaaaaccaaaatcccaattataccatatttgactctgtgttttaccaatgttactgattagactctgttttgttaaatgtgaatttggacccagaagtgttacgacaaagttgacacattctccatctgttgttggtgctagaaattatctaagtttattatgtattaacccttttataattaccaattcatttgcttaaaccaccatatcaccatagagataatttaatgaagcaaaagataaagtaaaaggctcaaaagtggtgagcagacctgctaagtaccttgaggaatgaaaaaaagaaaacaaaaacaaagtggagaacaatgcacgccttgaagtgaaaggagtaatcttcatcaacaattggctcaaatcctttgtgggattttcaacactaaaaaaaccaaatcaaaagttaaaagctttagaatcaaagcaagcaaacaaccaaaaaaaaaacaagcttcataataaatgaaaagtaaaagcttcacgtttgaatggatattggactgagtgaaggaacatcaatggaggaggaggaggaagaagagacgccattgaagcagagttgtctacgacccaagtagtggttttgggaaacacgtgatgagattacatggaattgtagagggcatgccaacaagaccatctttttttttttctctctctttcttgaagggaaccaaagaagtatagtgtagactctgtagaggggcagataaggggtggtctggtcgagactttctcgactccagtcctgtccctgtgtttttggctctctctctcatctcaccattctattatactctaatttagtttcaatattcatatattataatttgcaatcagaggacataaagtcaagatggccgagttggtctaaggcgccagtttcaggtactggtccgaaagggcatgggttcgaatcccattcttgacataaaaatcttttttaatttttaaattattatttagtttatgtttaacaaagtagagattattattagaagttaataagaactctctctcgctttttgtttaaaataaaaagagataaaaaaaaatggaaaacgaaagataatgaaattaatctatatgatgattatgatgatgatgatattatttaatgataaaatgatcaaaattttgttttattaggctctctgttttatgattgtaaatgcaattaaaaagactttaatagagagtggtttcctttctatgggtgattatgatctattgtccaagcctatcttcatgattaactaaaaataattataataagagtaatatggcaaatgtcattgtaaatcatttataaaaattattgattggagttttgttaaccggctacactccctctttatacgtagagacacttgctaaattattttgaattttctttgtattcaagaaactcatctaagtttttttttatgatctttgtttacaaacacgaaaaatcaagtacaacatttaagagaattaggctattaattacatcattt

SEQ ID NO: 222122 - DNA, 1509 bp, Cannabis indica
gagctagattaaaaagatttttgtgtttatatatatttctttaatccatttataaaatgattgactttttgcagaaaatgaccctaattgactaagaaattaaaagttcattaaaattagttatttgtactaaaaaaattaaaactacaaagaaccaaacaagcttaaaagtcaaataataaataaaaaatatgaaagccaattcttctttttaacttcttattattaatttaatttgaaatgttgttaatttttcacactgattttcaacacagggtagatattatatagatggcatgagaagacatgtacacacccacataatcacaaaatggacaaattaacccattaaataaataaagattaagaataaatgcttttgtttataaataaaataaaaaatagggttgctttatatgactcaccttaaaaattgtaaccaatatttatgtataattttcaattacagttttgttatcaatttgataagatttagtatacattaatttttaattataatattgttattagttattttttaaatatttaatttattaatgatattttatttaataaaactaataagtcttgattacaataagctcaataagctcaatttttaacatttttttaatctataattctttacataaataaatagatgcaaaaaaatataatcagtcttgatgtaattaaattagattattattaagttttattaaataaaaaatcagttcaagatatcttgtatcattttagaaaaagcattgctattaagcaagtgacgccttacaagtagttagagatacacttcataagaagtcattatattaaattatatatgacacccgctctttcacaaggaatattactccttccttagagagtactagacactattgatattttttatcatttttcttttaaaaaatatatagcttagtgtatcttattgcagagtgaccttgttatattatagaaaatttctgttgtaaacccctcttaaaggattgttcaattagactctttatctatttcagtcaattttttttcatgatcgtctacgtagagatttaagatcacttgtcgaaaataaattttaaacaaatacttatcacgcgtaaaaaaaaccaaaattttcatgtacttcacaacagattgaaaatctaccgaaacacctttagaaaatgcattagagttaccctataatatatatatataaatatatatatatatggcttgatgagtaagatgccttgcagaccacggatcttacatcatagaagaatatatcatcacaacttaattagctgtctcaactgaacaactctctctctctctctcctctttctctctctatataaacttcttctcttcccttttctccactttcttttaacacttctctcctcttttttacccatcaaaaaaaaaattcaaatcagattctctctctctctttctaaatcttttcagattcagtactcatagtctcaatcatctatatat

SEQ ID NO: 222123 - DNA, 1322 bp, Cannabis indica
taactctttgcatgaagagatgaggccaaatttataggcctttcgactaacgagtcgagtagacccgatccattagggttttattcatgatccaaacccattgatgtagtaaatacaattaaatattggttattgggtcgggtaaattagatctgggttgtgagtaatttttgtccttacagggacacacactgttgaaagtagggatgcatattttcaccatgggaatgggccccatgaggacccacccctaatggggtggggtattagaatcagtgaagttagttatgttggttactcaggttagttactacatttcagctggagttagtaaatcctataactaactcaactctatatcttgggctatatataaatgtacctagtatattctaattgattaatacaagcataatataaagcatttcaacttcagattcctcactttgttttactcatatggtatctaacgaaattcttcctactacatccatggcgagaccatccacgaggtcctaagatagtgttcctctatcaacaaacgatccacctccattagagtctcaatcagatgctacttccgctcctattcctcattcttcagttgctccaagaagacaacacaattcaagaatgagatctcaaaccaatctcgatacaccagatcctgtccaatcagttacagatgctccaattgaagatgcaccacaatctgtcatgtctaccagacgatcttcttctcacgatcgtctcgcccacgaggatgtttccagtccattttttctcagcacatcaataggttgtatttcatatcctctaatacctcaaaggaactctaggtcaaggattgttcttccctgccaactcctcccttagacattcagcctatgcagaaaccagtttgtctacagctaatgttcaattatctttctttgctgatgttgactggggaggttgctaggacacaagacgatccatatctggatactgtgtcttccttggccaatctctcatatcctggaagtcaaagaaacaacaagttgtttctcgattctatgttgaagatgagtatagagccatggaaaatgcaacttctgaagtaacatggatccttgctctcctcactgatttcgacatcacccacaacaaaccttcatacctatactgtgacaacacggctgcaattcacatatcatgaacgcacaaaacatatcgagatcgattgtcacttcatcagagagaaaatacagcaaggagccattaaactatttcatgtctcctcccaacataatctagctaatatttttacaaaagctcttctc

SEQ ID NO: 222124 - DNA, 3104 bp, Cannabis indica
atattattttattactgcaatttggtaacactcttcaatggatttgtacagattactgctatatgtcaagaagcaggaatgcatgcagttcgcaaaaaatcgttatgtgattcttcctaaaagattttgagaagggatatcgaaccaacgtgaagaaacctgacactgactttgaattttacaagtgaggagaggagaaatactattactttttttttttttttttttttgttatttatttctttaatgtaaacttagaaataggagtatagaaatcaatgattttatttctcttctctagctgttttctttttaatgtgctttttgtttgtttgatcagctctattcttttggtcgatgagattttaaccaatttgtacgtttgcacttttatttttttttttagagaaaacgtttgcactttatttaatgtaatattagtatattacatattattttgattgaaatgttctttaaatcaatttaaattgtacccaaccttttcttaaaagaagggcatacttaaatagtaactactatattttttttacggattaaatgctaaacattgcgttttaaatttcctctgtttttttttatttaagcgtttatatattacattgcataatctgggactcgaacccaagacttccaacacacacacaccctcctatagccacttgagctagcctcaagtggttattttaaatttctctgttttaatactatattttgttagttgtgacaaggtgtacatgtatttacaattttaatttaattttcctaaaatagttaataaattaaaataaaaaaaaaatgaaaaagaaaaagagacttaacctaaattgtaaatgcaccttgcccccttcccttcttcttctcctaacatatatttttagtttatatatacctagtttaatatataaatattacactttaagttggaatgaaaggattactaaacaagacttcttattatttgaacaactacaatgttatcccggacttcaactctttttatgcgttcttcttattttttttctctttgttttttaattctttcgttttagcagaaagatggatactcctttagcagacaatcacttattcacaaacctcctgtgggctaatagttttcattttccatctcatagaaaacctttttcgctctgtcttgccctatccctctctaggggtattttagtgggatggggtttctctcgcttttggcatactgggcccccagtgggaggcccgcacgacgggctattagcttagtggtagagcgcgcccctgataattacgtcgttcttgggttgtgagggctctaagccacatggatagttcaatgtgctcatcagcacttgaccttgagatgtggattatccaaggcacattccttttctgcaaagtctaatcttccctaagcctaaatggattcccttgtgaggtgtatgcattgtgtcaggctaagctaaaaaaagactatggctagttagagctcttatgtgtcttgaacttatactaaatgcagttaatataaatttcataacatttttagatttttttttatagtcgccaattaaaaggaaatattttctccatttttgttacagtggatcacgaaatcttggtgatcttctctatctaatgaatggggagtccactttgaaatagtccaccctacacccaccctaaggtagcgaaattccttgtcgggtaagtcccacacgaaaggcgtaacgatctgggcattgtctcaaggagaggctcggtgaaatagacatgtctgtgaagatacatactgtcatctattcacaaatctacacgaaagagaaaaataatgtcattggtcaagaactattcaatccactattgtttatcaacagggtgtgagtaaatcatttttaccttcttctccagcttcgtaactttgtcaaaatgttcatcttattagaatgagcatttctctcataagccaatatgtcatgagtggcattgtacttattatgcactgccttccagatgtcattggcataaacttaataatcatattgatctcttatctcttcatgaaatcaagctagcaagaaaaacctagatcagagctagggccatcctcccctaaattatgcacttaaagtgtcgaacacattagagctggggccatcctccccttaaataaatatttcaaagatttttgtaactacctcacagtcgcaccttttcagctcgtccctaatacatataggatttagcatgtttgaagattttatatcatattttggggtgggaatgtctgacacccctataaattttatgttttcatgtagagacgctagtatgtagctcctgcattctttagtccaaatggcatgattttataacaataaagccccgtgttattcataaagctcgtgtgttcttgatttgggacatatatttttatctagttatatccaaaatattcgtccataaatgacatagttcatgccctgccgtggcatcaacgagctgatcaattctgagcaaaggaaaataatcctttggacattctttatttaggtcagagaagtctatataagttctccatgtgccaatcagttttgggaccaaaactagatttgaaatccagactagataaaatgtctctctaatgaagttgttagtcaataatttgtcgacctcttcctttagagcattccgtgtctcaggatcaagaaaacgtctcttttgttgtcttggtggatagttaggatctatgttgaggtggtggcaaatgatattcgagtcaatcccaacatggttaggatagctccaggcaaattgatcctggatttccattaaaaaacaaattaattgctactttaattcttcccccaaccctttaccaatttttataatttcggtagggttgatgggatctaataccacctcctctaactcctccactggcccaagttgtgattgttcatcaatgagccttgggtctagatcttcaatctcttcttcattgttagcctcggctataactaccatagtatgatgggtcatcgctatttcttttagctctatgttataactgttgggtttttatgccctaa

SEQ ID NO: 222125 - DNA, 1093 bp, Cannabis indica
gaaccaagtacatcatatatatatatatatatatatatatatgttgtggtgaatggttattttcgtgccattcatctacctcaattttaattcaacttcgttccaacattatttgggtttattgttgatgctcacaatattttttgtaattttatttgtaatgaaacatactgctccaccatttttcgggtctaataatgtctcgtagtgttagaggtccatggtgggaattcttatggcattttgatgatattatgaaaaagagctctcttgtggaattttaaactttaattaattaaaaaagaaaagtggaatctattattttgaagagcctcataaagactttgtgttgtagctttgcaaattgatcttggaaatatgtgaaaagcactgaaatctgagttttattttgcagaaactcaggctgtggtttaggaagatctaaagtcagaaaagatgatgaaagttcctatatgtgacaattttgttgtgatgttataaatttctaacttctttttaaagcaaataaatttctacttatttattgatgtaattatataaaatataatagattctatcttttattttatttttttaaaaaaaagagctttaaattataattaagcctagtagtattacatttcaatgatttcatctcaaattcaaatcccttttcttaaatataaaacaaagtaaaaaaatgataattaaatgcgttttatagctttgtagactacaaagatataatttggattgtctgagaaattgttattgatttaaataaaaaaaaatgagtaaagacactttcagttaaaatatgaagagtgttttcttaaaaaatttctcaatggttatgtttagaagttagattttcatgggataaaaaaatacaaggaatgcgtagggaaaaaaatgtgtgttgtataaaagaaatttgatttaacaaaatttttcatatccaacaataaaaaaaattgatatatatgtataagacatgtttatagtagggattattgttttgtccctatttttatagccatataataaatctaatgattataagtaagtagatgtaagataatagttaatattt

SEQ ID NO: 222126 - DNA, 1239 bp, Cannabis indica
taatactggagttgtgatcaatctttgcttcaactccttgaagcttgcttcacacttgtctgtccataaaaactgttgattctttttagtaagttcgattaaaagtgtcgagatcttaaaaaatcccttaacaaaccgacggtaataaccagaaaatccttagggagcatttgttccagttagtagaattgagaacacaagagtaaaaggaaacaataaaagcttacatactatctagaaccataagggttccaaacaagaaaatcaaaattttgccagcattttagcagcaaaatagggtttttcagagcaaggcagcaaagagattcaattcttattgagtctaaaaattattcaagaagtcactcaggaaatcatatttctatcaacaacagactcccagccacaagcctatagctatagtttttaaatagcaactaaatcacatgtaaatcattatattttgatatgcaacacagttcaagaaattaaaaaggagaaaacttacctggtgataaaataggcgaagactctggaatcgaaagaaagtatggcctgggagaacccacactaacgtcaaaagacggttgtatagaaattctctgaactgaagggaccttcgagtcgatcaagcttctcagcaatggcgttggcctggtcggtaaggggtcaattttagaactaatatctaaattcgcaatttccactggcaatgcagtcataatcactggggggtggtgcacctggaaattcttgagccttgattaaaagaagaagatgaatgcagaagtcgatatcacactccagtgtagtttggtttgtgtaggattttagttctgggttttcactctcaaagattatggttttgaaataggaaagtacattgggtaaatgtggtaaaaagtggcatttggaagtatttatatttgcaaaatacgatccgtgtaaattcaagatccatggttgagacagatcctcctaaaacacaaagcaaatccaacgattaagaaaaccctctatctaggatttaatgcattgtttaaactgaggcaaaatcacatagtgatactccacccgaagctcgtgcagaagtaaatggccgtcaaaacatttggtttgccacgcacgcctcatcaattgaacgaacgcctcacgagccaacgaaaaaaatgtcacgttgaaccctgaaagaaaatgaatgaaatctgtcttccagattcaattttgtttggaaaaatt

SEQ ID NO: 222127 - DNA, 5272 bp, Cannabis indica
aactgaaaaaaaaaaaaaaaaataagagagtgagatatttttcaaccaaaattaagcttcaaataaaataaatttagcagcagccatattagttgtatgcttaatacaagtaacatttactttattaaaaaatgaataaaaatatctacaattaaatcttaaaaaaaaaatattactaaggaaggtggtttcaaaatattttatttaattaaaaccatcaaagcatctatctctaattgtacaatgggtacttgcttctgaattagggcccaacttaaattatgaaaaattgctttaggctttagcctctaataatgggcactgaaagagcagcaataacctgaccgcaagtgtctcgatcggatatgtcctaactccaatattttcttgttagcatttaaggctgcatccacattcaatttgaggtcacctatagctggtggtttctatggcaccggtacaataactggtagagagagaaccttggagttgcattctgcccatagaccacctgatttttttccgcccaaattgaccaaaggatacatataattagttccatctctaccttcaagtaaatagtagagaggtgcaccaaatagtcatctttgcgcatggaggatgattttatcccaatcaaacacctgagagcaacatcaaacagtatttttagcaaaatggtcttgattgaataacaacatccatttcaatctaagaatattgcactttgtctcctgtcttggtgtaaagaaatttgattttattgttggactttcaagcaggcgagttagaaattaaagttaataatcgatcataccctaattagttatgattattatttaaagaagatcatataaatctatattatattaatttgaacaatatgaattatttgtcaagtcaaataaaaattaatccaacctcgttccatgatgcggcatgatcttatgtatctttattcatgacttgatttggttttaagataattaattagttgaaattttgaaatgggtccacgacattgtaatgtgcaatatttaaaaatatattcattgacatgcccaccttataaattcttgaacatcataacttaaattgcagttcataactaatattgattgttccatgctaaatctcttatttaattggatgaagatagtgctggaagtagtaattatcatgtctattaagggccgaccctaggggcaaccaaataaaacattattttttaaaaaaccattattttataccaaaaaactttttaatgattacagaaatattattatattatataaatgtattaaatattatcaaaatatccaattttccttagccccatactcacagaccggccctgggtcactgatgaacagaaatagcatattgttaaacaatcatttatcaattgtattattggaagtggaaaccataatatggatttcttcttggaatttttatacaatatacctaaaatagtacttttttatttttttatttttattatttttacgaactttatttttttacaggttcttacatttttactattactgtatgtatgaacaaacatttacctaaacgttgcttatgttgctttcatgacttgaaaacaatagaaaaacaactttaaaaaaaacaaattatttttgtaaactttttgtcattttttcagtatttatgaaaatatcctattaattttctaaacaaatagatgatctgctacagtaacctgtgtgactagcccagcccatccaaaatctaaggcccaatggccgacgaatgacacacactactgtcactcttgtgatttggtcatgattatcaccctttgagacttgataaattacacccgattaatgacctattttctctctgaaaactatttaattaggacaggccgattctatttctttcctccatagccatatattgtgctctggacaatctctagcataggcttcgtaatgatattagttcacgaacaattaatgctacgtgtacacaagacaagagcataaatatatatttatatctattccctctgcactacagtaagagatcatttactgtacaagcaatatgtcattttttggtagctgctttccttccaagtatctacaccatactagttcttgtactactgactactgaagctatatatcaactatatcaagagtcctcctttaattaatattcatgttatatttgttccaactttgctcctagaatgtcacttcctgctgcaccatatccaaataatcaactctctatgttgggatttgcctcattcaacaggtgccacattattaattacatcatatctattctcggcctaactaacaactaatgcttataaatagaactccccacatgctagagataagactaagatagatgaatccaagcctaaccaagatacaaatctttcttggtgtaattctgtccaagctagatttttttgtgtatttttgagagttgtaaataggatacttgtgtgtttgatcaaggttttcttagggtgagatttatttgtaattggtgtttatcaccatagtcttttggtgtgttgtaatctcggattgcattagtgttgattatactaaagttcattcattcacgaactaagtttttcttcgattgattaaattctattttctcattgattttgattggttttagttttgaattgtatttttgattaccaccactagtgtgacaatacatgtgagagtggtctttcaccacaaacagtataattagagctcagtatttagagttcaaaaaacgcattcaaccaatcaagattcctctttaatattttcaaaactgaattcaaactttcaagaattagaatcagatggatacaacaaggttcgaggtgcacgaattcactagattaaataatttcagtttgcgaagaagagggggggtataaatatcctacacctatctccaactgagtccactcaaaaattcgtgtagaagttggaaattcaactttctaatagagtcgttgaaatgaaagcaattttggctcaccaagtgatttaaggggctcttgatgcagaaattatgagattgacagaaagaacaaattagagattgaagccaagcacattgtgccattctcctcagtcttggagttgaggttttgagagaggtttcaaatgaagacaaggcattggaactttgaaataagttgacttcaatctacatgaagaaatcacttgctaacaaattgtatctagaagatcaattatacacacttcgaatagatgaatctaaggaattgagaaagcagctggataacttcaatagaataatattagacttgaacaatcttggagtgaaaattgatgataaagataaggctattatctgatttcactcctcgtatcaacacttgatgatacaatcatgtatggcaaagagactttcaccatgacagaagttaaggctgcacttaattctaaagaaactcggataaaagagatgacaaaaaagagaccaatcgagaaagattgctcattttcatggaaaaattctattatatgtagttctgcttacacattaattttaattattgaaagcgttattaatcaaattaccaataataaatactcgatagcgttacttcaacattaaaatctaacaaaatggtaatatattgtacgtaattattaataattttattattttaaattaacgtgtaactatgcaattattaaaacataattaaaatcgaatatttttaataaccaataatttaaaaattactacgtaataaatatgtaatttagtattatattttttaaaaatttacacaaatttactttttctaaaaggcgttaacttttgaaaaacacgtgcaacatggcatgagtgacgaaactacatgcaacgtaaggtaagccgccgttgcaccaattcgtctatcctcaaaattgggaaattgtatttacatctattctattaaattttatttccacttttatgttagcattcattcaatataaatcgaaatggcatgagcgacgaaacttactatgcaaagtaaggtaaagtccgccgttagcaccaaattcgtctaatcctcaaaattgggaaaatgtatatacataaacatatctattctattaattttatttccacgtttatgttagcattcattcaataataaatcaagtgtagttaactattttaatttctttttcaaaagatagaactactttattcaaacaaccgaataaactacaaagaaaaaagcaagctagtctgcaacaaaaatctatattctctacctaacattaacttcatcatctaaagctatttttgcaaccaattattttgctttccttacacatcttaattatattagcgcgccataattaatcacgccaataataaatactgaatcctattactatttacattaaaaactaacttgttagacatatatatgaaatttacgtaagtaggtaggtagaattatatttttatacattaaattactattatgtaaattgaactcggtatttttagtaactaattatttgaaaaatattagaaaataaatttgtattttttgtttaatttttgttaaaatttaaattccgccactacatatacattgcctaattgtttataagtatatcctacttgttattattctttaaaattatatcaaacaaataatgttttaagatatatacattatttaattagtttgtaaggagcaaatatccactgagagcaacattcggaaaaccaagggtaataatgtatatatatatatattacatgttaaggtttatcgatccaggtgttattaaattttcatacagttggttttcatcatcacatgaagactttgtagagactgggatatcgagagagtgttccttttttttccccttgaaagatagagtcatgtttaaaagagagtatctctcacatatattgatctcatgattcttttctaatatttacttgtgagtttgattgaagatggttgctattattttcttacttggtatatatacttatttgcaatattgtttgattagcttatttagctaatatttgatgtttgagaatcgtacatttttgtttgattagcttaaatattattagctaatatttttttagataaatttcattttaatataacataatatgtacaaatacaaatcctatatatataaatacattattacttgtttaaattgcatcaatatgatcaaattttatttatattgcatcaatatcattt

SEQ ID NO: 222128 - DNA, 1570 bp, Cannabis indica
ctagcctcaagtggttctattaatgtccgtttagggtttgggagaaatcatgattttcatttactttaaacactttctttattgtttaaaggtttatgtgctttaatattttctaactcctaaataactggttaacatcttaaattaatagtgaaattataaatcccttttcaatctttaattatatacttcctctatttttcattataaatctcatttaactattaatttgagcgctaacaagaggaaaatagttaactaatcaaacatatagctaaataattctctttcatatcacacaaaaggatctaattttacaatgtaaaattagtaaaatactcgtaataagttaattctgtgatcattgtttgattcggaacattctattggggaaagaaaaagataaattagttaattaatgagtttaagaagcaaaactaactaactcacaataatatgtagtagtagcatgtaaatgctatacatagacatatggaaaaatatacgcagtatagattttaaaaattaggcagacttaaagtaatttgatgatactaaactaattattgacttttccatacacaacacagactacttgctttgagtgtgagtttcaattattgagtgtgagtttcaattatgtttggttatttttaataatctaataatgttgcttcataaattaagacagtttgttcaagttaatattttaaattgagctaaataatacgtgatctaattaaatgagtttaataaacattttattggacatgatcttctgtaacacccgatagtaaacttaattaagatttatatgagactctaattagtttgttatataaagaagtttggctaatctcaatcatttttctcctccattctcatcaattgagtaagaactcatagagagaagattagtatatggaagaccatatacccacaatctcatctcgtaactaatattatggaattaaatgtcttccattttattgattcataaagtaatcttaataatttgatatgattttaaattttatatatattttattcaaatctaatttttaacaaatggtatcaaaaattatgttaaaatattagagttaatcatattgattatgattattaaaattagatcaatatttaaattcatgttaatttaaaattttgattcatatgtgtcttataaatcatgattacatgattgttattgaattgataaagattaatatgttccaaaagcattcaggggtggtatgtctaatgaggtatctgtaaaaggtttcctattgaagagattgaaaaatattttgcaaagaacaaaaagaccgagacaagcaagcttttatttgattttatctagatgaaggtgtaaaggaaaaacaaagtattagggagtacattatggagatgtctaacatcacttccaaacttaatgcactaaagcttgatctctcatataaatttcttgtgcatttggtacccatactcccttcctgtatatattatgacaagtttatagtgagttataatactcaaaatgataaatggactctaatgaactcatttcaca

SEQ ID NO: 222129 - DNA, 1789 bp, Cannabis indica
aatagaaaaaattacattgaaatagagttttatttagggcacaaagcccaacaatttaccccaagctttcagaatgctacacatggtggaagcactgaaagcttgctataatctcttgatttggacatgtggagattggataatgaagtaatgatatttcacaggctactcgaccatgaaagctgactccgactatgataatgatgtgtccacgtggcagtcaagcatgtgatagggcgcgactatcgaggagtcgtattccaagaacgtctacattttgacagttgttcactgattgatacgaaaactgaaaagaagcatcttcatcattacttcacatctttattctagagagcattaaatgtgagaatacacatagattgttgatctccctaactattggatagagatcgtgtttttcaagaaaagatcgtagccgtccattccttcctcatgtggatcactttcttgaggtataaatacctcaagtgaccttcagttaccacttttacttcttttcaatttttcaatctttcaaattgcacaagtcttcttaccatccccagaacttcaaatcgccttcaaggagaatcccttttcaccaacctggaaaacaccgtggacttctgtcttctcttgttaatgagaattagggcacaataataccctcatcttccttctccaatgattagggtgactacaacaaaggagattgcaagcctgtattttggagccaaaattgactcgttgatcgctacaacttctcttcttcgagaaaggtgcaaccaactttgtgagccaaacccagcaacgatcaagttaacctctccattatcaacatcaggtacattgtttttatttacgaaatgcatttttaaaattttttgttttgaattgtatgtgcatgctctattttggaatgagattagggtttcttaattaagtgattgccattgtgggtagatttagatttcacgaactgctctatcttttgattttttttcttagaaattttttggagtatgttaatttacaacaagggtgttggccaattttttgcccaaaatctttttggttttgggtttgaagtgagtttctgttgtttttttttcttgcgtcgttctggacttcctacttggaacaagtgactcttggaagttctcgtttctggatagtgagtctgattgggacctctccaagtagtttatgggagaggtcccacaactccctttctatgctaggtagtcagggtggctaactgcttggatttccttttctttgtataattatgcccaaacgaacacgtcgtgaagaggctgactctgaaaaggagacaatggagagaggagatgctccgaaattagtcctaaatgacagtccgtgggaaatggagcaacacgtcaacctattcaaaaattgcaataacctgaggaagtatgaaactcaatggcagcttgagagtgttccgagattattctggaataggatctatgtgctcgaagacaggcctagcaagtgcatagaaggaggctttgatgtatggagttgggctcatgtacgtcgagatgggggcacacctgcccctaaggtgctattatgcagagtttcgtgtagtagtgggaatagtaccttatcaactcatacctcaagcgtaccgcttgctgtcaggatggtatgtcttctgtgtcaaacacacttatcgcttagtccattctccacctttatgttataaaatttcaccatggttgatagtcggcgtttttcacagccactaaataatgacctatct

SEQ ID NO: 222130 - DNA, 2262 bp, Cannabis indica
tttttgtttttttcccttttaaaaattgacatttagagatggttaatttataaaaactgtacgtagttataacatttattaaaaccttttgccttcgatttttaattagaattaataaactgtaaaaaaaataggggtgttcatcaaaccgctcaaatcgtccgcactgcaaaaaaaaatgcgatttgaaattttttgtggtacagtcgcggtttaaatttttcctaaactgcgcggtacggtgcggttttaaattgttaatatacggttcaaaccgcaccgcaccacacattataaaaatactaatttttatatttatttagatacaatatgtgaatgtccaacccaaagccgactaattattgtgttattgaaacttttttttttttttcatatttattttcaagccctatggtatttttaataagtgttactcaagctttgttgtatttgtgatagtttaattattggtaatattccaaaccgtaaaaactgcaaaaaccacacagcaccataccattttttacggtgcgatttctgcggcttttagtttcgcggtgcgggtgcagtttgggaaattagaaaaactgcatgtgcagtttggtttgaaaaagtggtcaaaaaccgcaccatccgcaccgcgaacacccctagtaaaaacacgccccatggcatcggttatttgaaaataatcgacgacataggtgtcatttatttttaacatgtgtagcttataccgtcagctatttttaactaactgacgggatagggttatataataaccctttcgacttcgtcttgaaaccaaaattagcagagagaacagcaccacgaaacccttgccaagtttagacttatacacttgaaaagtttagatttttacccttttttaagtgtaaactgaagccaagaagtaattgtggtggttataacttccgccaacaagttttagtggagaaaatattaaatctcaacgtccattaaggtattaaatatgatttctatttatcttagtaatgtacattactttattttttattttgcaaattcttttgaagatttttctatattattaagattgtattgttgtggttgtgcatggtggctggatttttatcggtattagtcaccggattacagtactacggtaaaaatttaaaccttaataatatatatttgtgtattttgtgttttattaaatatgtattgtgtgttattcaaaaaaaaaaatatgtattgtgtgtatatagattttctggatgtattgtatttacaaaaaaaatattataattgtattgtatatattctaagtattgtatatgtatatattgagtattttaaactaattattttattaaatattgtgaaggagaatgaaataggaaagttttaattagtttagaaattaagttttcaaaattttgttagtgtgagatataatttattatatatgactatatgtatatgcatataaactttttcaaaaataaataagaaaaaatagctcttttattttttttatttacttattaaatttatttttaatttcattcctatttatgtgtttttatatttttactaactatactaactagttacttttttttttcattcatatccatattcatatatttttattactaattagttattcattactaactagttactcacttttgtagaagacattccctctcaagattttgtcgattttactactataaatcctgatttggaggtgatttatttcactgatgcatcgtgggaaaacggtgtagcaggtttggctgtagtaaggttcaacaagagttctgattcttggttttatagaattcaactttcgagtgctacttcagcattggaagctgaaattcaagcaattcacatggctctgtcttgggctttggaggaagatcagaagattattggtgttttgtctgattctctaggattcatgctctgcgtagggatcattgtccccctgattagagatcttttagtctttcttatgcggtacttgatttagttaattgttttaatttatgtactttcggtttcattaagcgtttttctaatggtgtagcggatagcctggctaaagatattaggttgaacaatcttgcacgtagcaggaacatttccaagggggagggagttccccctatgactcccttttttcgtgcttagtaatgaacttattgttctttccaaaaaaaaaaaatacatataactagtaagtaagtagttaaataattaaaattt

SEQ ID NO: 222131 - DNA, 989 bp, Cannabis indica
aaaataaaatcgtacggtgaggtgcgaaatgaagggatgtgatgtgtccacgtgtaagaattgtgtggcaattaataaaacgacacaagtgacagttgtgcacgtgggtcttgcacgattggtgggtccatgggagccagggtggacccagtcgtataggaaaaaaatataaatgtcaaatcgaatgtctcgtcaattaaggctttttcttgaaatgagtgtagtgatgagttgagttgagtgagtgagcactcttctttgtcacttttctaaattaattatttttttaattattattaaaaaaacataatcattcattaattatttgacaattttttttttaatgtattatcaatctaacgaactcatttttttgtttttgtttttttttggtttcttttataactaaaaggaatcatataatgcacatcctatccaatatatctccactttagtaattccaaaaactatacttaatagtcaattaggacttatatactagtacttgacaaaaggaatcagatacaatagcacgaatcgaaatttatacaaaaattagtgggtttgggtttgtcgtttgctttatcagtttaataaacgagtcatgtttaagttgacacagttaacacgaaactgatctattaatatttatttaaagttattttaatactttaacaggttataaatttattgaatatgttataaacgtattattgattgacatatttaaataaaatatacttataaataggttaaacgagtcgtgtcgtgtcaactcgtttataaacgggtcgtgttcgggtagagcatatacctattatacatggatctcgacataacacgaatacgacccacaaacataaatttccactcttagcttatacactatcactaagatggttgctagtcgaagctctcctatgaaggtataccatggcctatcttatagggcgcacaaacaaccgctactcccaaatgagcgccacttt

SEQ ID NO: 222132 - DNA, 1765 bp, Cannabis indica
ttgattgacatataaaaataaccaatcaatccaatctacatatatatttgaaaaataatatatacaaatatcttaatgtagaaaagtacgaatttaaattcaaaacttaataggtcaagtgcatattctatttttatttataatgaaaatataatctaaaaccaaattaaataattctttatgcatatatttttttccctcatttgaatgtgttatttttttttttattttttttttaatttgttgttggagatataaaacaataatattttttttaataatttgttgtttattatataaaaaaatattttttttaataaatattaaataattcgacattgaaaagtaatcgatctagtccacacttttgcgaattgcattggattggactgaatttgagttattatacagattggattggatgtgaaatctatacttaatgcggatagatgtactgtgagcaaaataatgcggaattgattggatgaacacccttacatatattcttttaaaagtaaactaggatccttatagagttttgcgcctcaaatattttttgttacaatttttttttcaaactatacaaattgctgcaaatatcttcctattacaagtatagttgcaatacgagagtctcactactacaaaaataccctttagaggcgatttttaaggcctttcacactacaagaaaaattagaaataggggcggacgtattgccggcggagcatgtccgcccctattaatactgttattaccggcggataccagtgaagttaaataattttttttatttttaaataaaatgaacaacaccagcgaactttagttatgaccaacagaatgttccgctggtattgggtggtgtggatttatgcgggaaaattcccactttttttattttgaaaataattagcagcggaattttactagcggataccgctgctaataaaaaagcaatttgaccatgtaccctattaccggcggaatgcactaataccggcaggtcctgccggtaatagttttatatacttaaaaaaaaaattgttgaaatcatttcgagcctcttccatctttctcttcttcatcaatttttttttcttctttccatctctctcttactctaggccaaggtatatatcaccaccatcccggatctagcccaagctttcaccactatcccaactcaacaaactttttggtaagttcgaatatagtttttttttccagatctgaagtcatatctttccatctctctcgcactctaatttatttagttttaaagaaacttttcaattttttatagatctgaactttctccaacgaagaagctccgcccaagatgttgtccccaccaaatctccgtccaagctccctgtagtccatctaaagctccagcaaagtttttgctctggtataaatatatatgtaattatatataaaaattatatttgtgaatacaaacaaagcattttctgaaactcaaaaattattgttcaaagttatatatttatatgaactatatatgaactgcaagatatatttttttaaggtctttattttgtgaatttcttctccaaaaacctgaaacccccaaaatcttactgctcccttctcgtctctttctatttggtctactccaactctcaggtatgtctaaaatatgctttcacttattcatcagaatgacagttttgttgggactctatggtgtaaatgggactgccttgtatttatatataagattattctttaaggaaatgc

SEQ ID NO: 222133 - DNA, 1779 bp, Cannabis indica
ttttaaaaattattacattaaagtacatagaatccgatacttaattaaactaataacgatgttactatataagaaattatcaaatactactgatatcgcttagcatttctctatccttctcaattacacagtattcaacggtatgaaaattaaatatgtatcgtagtatgaatcaagcaagtagaaattatgtatcctatagaaaagagaaattgaaattattaaaatattaagaattagtcagattaattattacagcagagatctaacacatttttaaagcactacagatcacgttctatggacttctaattgtcaatgatcatcacagtcaaacaaacatatatgcacaaatatataaatatatatatatatatatattccagctgtttcttttttcttccttttcttttcaagtcaaacattcatataaagtaatacattaggtacatgtagataaattaacaaatccaacttgcaaatatatgcattgaaacaattcatttactttaaagtatgtataaactccaatactccatatatccatttctcttgttagtaaaacaaaattagtaattaacaaaaaaaaaaaaaaagaataaataaaatttttgccctcaattactattaactacaacattattagattgtgtcctctcattttgttcacattgtaaaatttccaaattattgacattactgaattatgcacattacaaaattatgcaaattgacaccaccgaggagactatcactaattttcctatttaaaagatcatagttccttgtcataaagagagggtttctacaaaattatttcggttaaattaatatggttattggtgacagtattgatgaccacccattaatctataaaaacagaaaatgacaagtcctgaacaaaaataatggtcagctagcatagattcaaaaatggattccatgaaaaaaataaagtctgagaatatgtagatgcacctgatgattaccatctaattagatgtaaatgggtctacaagaagaaagaggtgttgatggacaagtcgaaacatttaaagttagacttgtagcaaagggttatatatacccaaagagaaggtgtggagtactataaggatacttttagtccaattgccatactcaaatccatcagaatacttctctccatagcagccaatctcggttatcaaatttgacaaatgaatgtcaagacagctttccttaacgaaattcttgatgagacaatctatatgaagaaactagaaggttacaaacttctaggacaattgaagagaaagtttgcaagctgaataagtccatttataaacttaagcaggcttctcactcttagaataaaaagtttgatcaaataatcaaaacttacaactttcactaaaatgaagatgaaccttgtgtttaccgactcaaggataatcaagtggtagtatattcctggtcctttatgttgatgacatcttattgtaacaatgtcaagaagatgactgacgtaaaggaatggcttagcacctagtttaaaatgaaagacttgggtgaagctaattaattatgttcttggaatccaaattattagagatcgcaagaacagagcacttgttctctcacaagcaacttacattgataagatgttagagtgtttctcaaggaccaatgccaaatgggatagtcttctactgatccccaagagatagaagccatgagaaaaatttcttatgtttcagcagttggaagtttgatgtatgctatattatgcattagacc

SEQ ID NO: 222134 - DNA, 2961 bp, Cannabis indica
ccattgtgtttggaagcaatcttttgaacaatttttgcttgctcgagggcataagcctctaaaaacagttaggaaattcagtgcaaatcacatcaagcaacttttaaaagcaaaaccattaaatttgactattaatcccaatatgacaaattcaataatctaattcacctgtgccaatgaattcaaacattaaggttggagtttcgggcaaattctttccattggcaaggttgatagccttgatttgaacttcatccattagctctacccttgataccttgcaagaattaacagaagaaactgttaagaaggtcaaaattcacagcataacacagagtcagattcctacctgtataccagaatgcatagtagcaatagctacatctgctgcatcctttatagaaggaaaattacacatggcaacctgcaatacattgagctttaaatcaaatgcatcttgtatgagacagtataaatttaaatacatagcaagaactaacagacagttaaatcatccccaagtaagcaattgaatgttgtacaagtagttggaaataaaataacatattctttatacataactaaacgtctctgatgtaacatattgtatgcataaacattcagtaagcatccattataaagactataatacctcattattcaatagggtaaataacattttagaccctattttataaaagttattgatttctttgttttgttaaataacacttgtgtattttgcaaaattaaacataacaataccttgagcccgattttttgtcaaacttttttacgatttaggattagattcgaaatcagaccacaataggtagagttagggaagagaaaattttaagattagaaagatgaacttttaggtttagggtaaaaacaattgacaaaatgataggaatttcctatcatttaagtataaacagtagcaaaatagaggaaaatagctaaaatattgacagtggaaattgaagtgaacaaaggtagtgggtatttgagagacccagtgctctcccaaaccaagagcagcactattacaatttcattttctccaaccaaccttctaatactctcatatatatatatatactgtcccaatactcctgttacaatgacctatataccctttttatttatcttaaggcctaacacaaaactcgggctcgaggtattattatattctattttgcaaaatacaaggtctaaattgtcatttaacaaaacaggggtccatgtatttacccttcaaaaaacaaatagaaaaaatatgtgttttaagacacatccaacaattttttaaacctacatttcaagcaggttctacagattccatatggtttgaatataggaaatctcaagttgagcaaatataaaagtaaaatgagaaagaattaacatgtatgtcttgtcatgaatgcaacattagacacgaaattacaaaaacaagcaagattcattgtcaacaaccacataaaattattctaatttgtccaattaagcctttggtaaataaggacaagggtagcaaccactgagtgttgtggaattttctgaagcctaagagtgacttctgttattacacctagagttccttcgcttccaattaacaggcgagtcaagtcatacctatttatacaaatttgaggttaacgaaattgaaaattcataagttaacaccaatacacaaggtacaaaagcctttaaatcaaaatggttccatttaaatgacaattcagaaatccattcgtattatccactgatttggccaaagtatctaaggctcatttcttaggaaaatacaatctaaggtttgaatacgggtgacaaattttctctggttaatagtgagtgtatgcaaggatagagaagattagataaatatatgtaatatttatgaacaataaaatcacccggattaattactataattttggcatcttaatttacttaccataagccttaggtagcatttctcgagaaccttttaaatgaaggaatgttgtactactttttatgtaaaaaaaaatccaatatgtaactgtgttaatatttttcgaaacagccaagaacaccaaaatccatatcagaaagtgaagaataaatttgtaagctacaataatttatcacaaaaaggaaaacgtttgtttgtttgtttttcctttgccgataagattactgaaaatactgtcgctacaccaagagagggtatccctatttataatgtaatagttctcagggtgatattacctggaattaaacttaccctgcggcactcttacgtgcacgagaagctgtcttgacaacatctccattggcaagaactacctggaacaaaatggcacagcttaaaaatttgggtatcacaaggaaaaagctaacaaccttaaaattttaaaaaaataaaaaattaataaataaaaataaagtcaaaccaccttaagattaatgacattgtcgcgcattgttccatacctacaagcttaaaaaaaattcattaaaatcactatttagtagcatcaaaactgtgcttgggcctcttgttcataatgcttggtaaaatatatatatgttttacgtgaataaggaatcataatattttacatgatcaaatattcaaatttttaaggctattgaaatgtgtagtgaagatacaaaactaacataggttttgttaaagaaaaattataaaaaaataagttttagtctcttgggaatctttgtacgcaagtgagttattttttcactttatgtaccaacgttgggcatattaaacattcaagaaatagctcacactttgttgaaagcacaggactaagactagagttgatatactcatataatggtctaaatccttaaccatatgaacgatatgattcagttaaaagagaatagataccctcaaatattactaccaaaagaaacaaagcaggaaagttcaaagatttt

SEQ ID NO: 222135 - DNA, 1678 bp, Cannabis indica
agtttttttattttagggaacagttttgggggagtagaacaagcatcaacttgggaaatttagggtgtagaagatgcagatttctggccattcaatcatattttctaacaattttgatgacattggattagttttttttccttaaaaatttgtcgtacttgttgattcttacccctcagcaattgcgtctactttttctaggagacattcttttttcagtgatctaggataattgatagagaatattacaagtttgttatccagttctcctggagtgtccctaatctatgtactttggtcggccaatgtggctgcacatagattagttgtgcatgctcttcggatggattagcatcttgtttggctagatgactgttcattattttattctttggaatgtatatagtctcttagcctgtatgatattattcagttatcaatgacattggtcattatttttaagaaaaagaacatgatgtaagtaactatcgctatttacctttttttaccttttaatctttttataatatcattgtaagtgatgataaatagtttttttaaagaatatacaaaaaagacaactatattactaaaatacaatagatctgttctttcaacaattatacagtccacaaataaaaaattacaataatacctcactactacaaaaatgactttttgcttcagttgtaaaatgacacaaaaactttttgtgtaggttgtgtaaaccgacgtaataaaaatagacgcaaatagtcaagttatttgcttcatttctaaaccgacgcaaattttttttgcttcagttgagaacttaagcaaaaagtacgctatattagcgtcagttttggaatgaaacaagaaacttagcttcaaattgtaaccgaagctaattagattattacgtcggttaacccttgacacataattttactcaattttttttactttttgtgtcggctataaaatgacccaatgctgtaggtagggaaaaattgcaaatttctttacaattttccccacctacattttcagatattaaattgactttcataacaatatttatatgttataaaaaaacaatatttatatgactaacaataacatttataatataataaggataagatttttcatgtaacttaaaaaattatataacgatcataaaaattgtattctacatgtcatattaaaaaactgatataactatgaagtatatcaataaaactaagtatcaccaaaagtaacgatcatatagctaaaagttttatatcttacatgtatcataacaaaatgtaaaaaaaccgcatgctcattttatcaatatataagacttcacaaatctacaccaatctataacttgttgaagctagctacctctataagccaatctattagaattaccctcatgcttggagtaacatctttttgaactttctgcatgaaatctgttgagggccttttattaacctgaaattccaatgaattgaacagagcttagcaaaagaaataagcttaatgcacaatgctaacaaaatgaagttgccacatttgcatttctagcacattctaacttaccatatctatactttttcttgagtttatcactgtgtgtgtttttctattgtttctaagtcagtaaacatataagatattgaacttagtttttgaacaatta

SEQ ID NO: 222136 - DNA, 1449 bp, Cannabis indica
ctaacaactctcactctaacagatctgactaacctacagcttcactaaacacactagactaagctatagtaccatacaatatcattaaaaatcaggatagaaaaaaatgaacatgaatcagatttgataagagcactcacagataaaagctgatattgaaattaggaacacaaaattaacaaaagaacagcaagtacttttcttgatatcaacaaataatgcaatatcaaagcacacatgatatatggcctttgtatcaataatccatttgccattataagcaagattagtcttaccagaaaaagtgtgacacaattggttggtttgaattgacagatgaaggagaattttggtttttctaagataacattggagagtaagatttgagattagatcttgatgatattttgacagtttagtgggcaaaaaaaatatttttggacatttatttagagttaaatgtggtattttttaaaatcagtaagaaaattgtgattttaaaagggaggatttttttggacccctgggctaggtgggccataggcacaaacttagctcgcctatgctcagaacccaacctgagttttgccttcagttcatattgattattctttgatctttgagaaatttgtagtagcttttcgtgatggagctccatcacttcgattaggaaattgaggctagtacttcctacaaactgatcattagatgattctggagctgaatttgaatcttttttaatgtcaaaggtaattggacaaattcctctatgcctttcttcttaaattatagaagtataggctttgttaactccaggttgtgtttcttgtataagaaaatgcgagggagcattgttgtaagactcattaagacctatcaagaacttcataattttgtcttcttcttgatattcttgaacaacctttatttattgagatttttggaaatcgtttaatgaaaaaattaagcttaaataagaataaattaaagataatgacacaataatttttatgtgattggagcattaatgaaccttagtccgcgagtcaatattattaagcttgaatagttgtggagtatttttacacaagtgttattgccaaatttttgtaaagtttttagtcaaagttcgtaaatctttgcatgaagagatcaagtcctatttaaaggtcaaaattggtatttgggtcaaactcgaacccgatagagattggtacatagaaataagtccactagtggagtaaaatataatttaatattgactattgggcctggtagatgaggctcaattgagagataactgtcctccgtacgctatagtactctttggtgttgacaggtggctatgcatcgccgattatctatgatactggtcaaaagagtggacattggacaaaacgtagattacttttagtgttgtgcgtatttcccaggcccgttgtgagggac

SEQ ID NO: 222137 - DNA, 3179 bp, Cannabis indica
tttaaatatacatattttttttatgtaatattgtaaatcacaattacaaaataagattttaaaagagaagttaaaaatcaaaagacatcaaattaaaaaaaaagtatagtagtgtaattttttttttttttttaaattttgtacttggttgttttattgggttatacattatttttattaatccttgcttaatgactcgtgctgccatttaactattattgttataattatgcatgaaattatatagataaataacatgtcatgttatttagttagttaatttaataataataataataataaataaaatattatataactacttatattatcatacatatgattcgtgaacaatatgtattgcctatctactatgcagcacatatgacctaactattatacacattatacacattatgcagacaaaatttaccatttcattacttaggtatgtacatataagttatttcttatatgattatatatatatatataattagatgcatttatatttttaatagtacgaaactttgttaatttgaccttttccttttctagttaattttaacacaacaataatattatattatataattaaaactatatttttataattataccaaaaaatttcctccttttttttaccattaaaacttgacatttttatatgtcactaatgaaaaaaattattatgatcgatctcacagcaaacctaaatgtacataatatcccaacgttaattaaagccaactttcctccatatggcagagaaccaaccagaagattctcaaacaaaaagtttgtcacccattttcttgataataatacataatgataataaaaaaattataaatattaccatgttattattatataaatatatatatatatatatatgatatatacttgagggaggtctagtgccaactttgcattttttcactcaagtcatttttacttttatcttttcaaacaatgatattaattctcaaatgggaagcttgaaattaaatcgttatgttatttgctaaagtagggaataatctcttaaggggtgctaaccttgcttctgctggtgctggttctgattatgatctcacctcaaatctaaatgtacgtaatatttattaactatatgtatatattttttttttccaattaatggcatttatcatagttaattatagtaaaattttagatttttttaataataattataatttttaaaatgagaattttattaattgtttcctatatgtatacatgcagtttgctatcaaaatagatagcaaatggtaggagaggcaaatgcttctctaagccacttactctaccaaccagtttaatgacattcttctccaaaattattctacttttattacggtatgtacgttgtaattatttatatttatatattttctatatacataatcataaaattgtacaattatttcttaatacgtacacaattaatatgcgtggatgcatatatatacatggttttttgttgtgtatatagagtttatacgggatgaaagcaagataatttggtgtgacgacacttccaccgattggatgtgtaccggcaacaattacaatgtttggattagggcgcaaggatgaatgtatagagaggctaaattatgatgcaaccttgttaacaaccccgttgaaaatggtactaattaattttgcgtaatttataagtttttcttattttcattggcgttatattaattagttgttttgttaatattaatataggattttttgagtcgagaaaaaggttttgtgggattggattactagaaactttagttctttgcaacgtgttatcaattcaaacttgtacaaacgcactaattaagatgcttttaagaatactaaatatgctactccgttgccccattattggtttgtaaatagccaaaattattgtactacgtactcttttgtcaccccaccaccaccatcacggccatctccactactagcaccatctccaatactcccatcacgaccatcacccacttcctcagtttaacattatgccagagtcatgcattctacaattttataagtactattctcacgatcaaccaatcaacgcatcatgttgcgcgaactatcttagtgtcttcaacacgtgtactaatactcagtggtcgaaggtcagcctcaaatgccacgactattgtcgacgtcaactctcatcaccacgaatgctcttagttaggatcatcatctaagtttttcaactttaatcttttcacttttatttattattagtaattatatatttagtattttttgatagaaattattcattatttagttaagactatttttgtgattatttttattgattcataattaaataaatcaattcaaattggaaattgctatagttgttagatttaatagaatagagaggcaaatgattcatctatattttctaatagagttcacatattttgcatcggaagcagagatttcatccaaaattattcatattttatgatcagttgcctcatatatatatatatatatgttaagttataaccaaaaaacctatgaactgattttgacacatcatcacttgaaaactcaaaatttttaattggtaaaattagtatactcaaattggcaaaaaaaggtattttattttttaataaatcatactctcatatgatatagggtagtaataaaataaaataaagtattctatttttttgataaatatcatactctcatatgatatagggtagtaataaaataaaataatattcgataagaaaaaggttatataggataagttatggtgaattggaaaaataatttaattttttatcgacaacaacatatgttctggacttaattacttaaaaatttcagcattttaattatatccatttaatttaaacgtttataatatgacaattaaaaaaaatgctatgactttttccaaaaataaacactactttttctaataaaaatatctcagaactgtaaatctcataaaaaaagataaataaataaaagttattgttgtatattttatcattcattttgtttttttttttaaaaaaaactaaactaattataaacatttaaatttacagtgatagatatctaatagatatttcttatcttatttaatagataaaaatctatataaa

SEQ ID NO: 222138 - DNA, 2524 bp, Cannabis indica
ctaatgtaccacggaatatattccgtgaaagtacgttacggacaaaatcgtgtccctacttttttatgctctaattaacatatttttcattcacatattgggtccaactttagtttttttttttttttttggccttaaaaaggtagaatcttttgggaccttatgaaaagaatatttttaaaaatcactatatatgtattttaaaatatattttttttcttttggactgagtaagtcttaggcccagctagcccaccttaaccttgggctatctttgttcacatgctaaaataataaattttaaaatatgagactttgttttgtcatacttttaaaatttatgttcttaattctaaaatatttgagagactcgaaccacccttatgaagagaaccaaacctctttattgattatcttaacaaaagaacaagtgtgtttgaattgaataattatgtggtacttgagagtagctagaatattagtagaaataaatggatgacaatagaacaaattatatagaaatgagcatttcagcacttttctagttcaaaattttgagattatattattattttgtaattttaagagtatttataatgaagtgctaaaaaatagaatattgctatattttaacacatttaataaaaaaatactacttcaatagtattttaaaaagtgtgttaaatttgacacatgctaaaaattgtgttaaatttaactcacaataaatgttatttttttatttataataatgccactaattattatcatttattaatttttactaaactttacattctttatttatcatattaccattacttaagcaataaaatatcaattgtctatcaatatagttaattatttttttttatttattttacatcttatacattagagtacaattataaataatagactaaatatagtacgaactcatttttttttattaaatttagcataaattttaaatcttatattggagatggtctaacatttaaattgttattatcttactaatttctaattcaatggcacccaaatttgtcaggaatcgaattcatctagcgatttaaacaatttgtttctatttgtattaggttcgagggaggaaatccatagtcgtcatcaacatcatcattgttattgagtactagtggtgttcaacaccttctataggcagcactccatgattagttaacaatattctctaaaagttattttcttaaattatatggaactcgatatttaatcacaccaatatatgtatgacaccgaggagggtgctagtgttgggccccattcttctaccttatcggatcgctacctcaccttgactctcaaattagtatgatattgtccgttttgggcctaagccctcacgattttatttttgagcaccttcccaaaaggcctcattctaatggagtaggtggaacacttatgtccaagataactcttgcctattctttcaatgtggggttggattgatacctcaacaatcctcccctcaaaccaaggaccacatactcgtggcctcccctccgcgaaaccaccttataccgtcgctattaccgacagaactcgcctcctaactatcacatttgtcaagaagactttcgacacaggtcctaacactaatctccataatgtaccgccgtaatcatcaatgggatatgctacttgactacccaatataaggtatactttcgatacaagacactatatagatctttaatcacgaggtcatcacattaagcgcttcttccacacattgcaaatgcagcccactatccaagggctcctaaacctttggctctgataccacttgttgggccccgttcttccaccttgttagaccgctacctcaccttaactcccacattagtatgatattatccactttgggcctaagcctttacagttttatttttaggtaccttcccaaaaggtctcattctaatagagtaggtggaacacttatattcaagataactcttatttattcttccaatgtaagactgggttgataccccaatagctaggcaccagtaaaatcttttagtaattctcataatataattattattattagccgatatcaatgattttataatataattattttattaggtatcattgattttatgagattacaaatgataactaagtgctatataacaattattaaattaatatatatttattcgatacttaattatactaataaaaatatgataggtggtggtgggactacataactcaatagaaataaatataatgtagaataattagcaatttttttttttgaattttcgacaatactgattttttcctttaaaaatatatggcttgttaagaatttttcctgaacttttacatgtatagaaatttattctctttgttaggtttcgtcccattacttcgtttaaatgttgacgtgtctttgtaaattagcaactttgtcctctaaactttgacaattattaaatcgaactccctcaaaataaaaatgagaaagatt

SEQ ID NO: 222139 - DNA, 2993 bp, Cannabis indica
aaatgacgctaataaaaaactatttgcgactacggtatatacgtcgatttaataaaccgacataaattctttaagtgatacttaaaaactgacgggaattatactttttgtagtagtgttgtaatacatggtatgatatattccattgagataattgtgcaaaataatcaaacaaaaggcaacacccctcaagtgtctactagcatcaatgccagcatacacttggggggagataaaggtaagtaggtaagcatacacacaaaaggcaaaaagtttctccttaagattatggggattagctacccccatcaatctgacaaaagagagaacctagtaaaggcatgcaagaaatgtacatacacctcaaagtacccaagccccaaaaacgtgcgtaggaggataaataatgaacacaagcaaaaggtcgagtcaattcacggaacaatcatctcccttaaaaacaataaattataaacacttgtaagaagttgagtcggttcatggaaccgtcatctcccttaaaaaacaagagtgtgaggacaaagagcacattgtagggtgcccaaaccctctttcacaaaaaaaatgagaagaaaaccacgccgtaaaattaagaaaccgaagtagtgaaatttgataatgaagaatggaaagcagtgtaggagtagctagtaaaaagatagggtgacattccccttaatgcaccagctactgagtgcaagagaaaaaagaagcgtaaaaataaatgagtcaattatagtcatccaaaaattatagcaaacacccatgctaaaataataaaaaggtgtacacaaaaaatggtaatggcaaagagaaagtcaatttaacaacctccccctccaaacttgtcgaagtaagccttccattcaacagctagctgaatagctgcaagacaaaaaaagctgaagtcggtattgggattggcacgccacacgttataaagggcctagtccactacgacactatcatgctccgctaaactttggctagccaccctcagctcttccttcaattcccagatgtgagattgaagtttgcaaacttgacactcgagtctcctcttatttttgcgagcacttttaagtcaatgtgttgtttcgtccccctcgtcagcagttgcagcaagcgtgtgcgtacatcatcctgctccctcgtgacttcctcaagtgacaggttgaatgttactttataatcaccataaacagcaagggccttaactgcttgcttctaagcctcccttgccgctacaagctcaccctcaaattcctggatgcaggactcgagagaggtcaacagggtagatagccagtcgctctcctctttggttgatgtcaactcacccaagagtatctagtagctggaagaaaatccaggggctccaccttgtgaaagcatctcctgagacgctgcgaccatctgtaaaaagggctgtcaagcaaggaaacaggtaaaaaaaaaagaagatagaaatttagagacatcaacataacaacacccaaaagaatggaaggaagaaaccagacccaaacggaggaacaaaagagtttttcgtagagacctagtgggggaacccctcggatgccttcccaatcttccctcaaatattgggacatacattgttggaccgcacccatataatggtaggtgcaagactgctcctaggacgggctctctggcaaaaatggaggtgccatgcctgaaccaccctcatcgaaggcaaaagtctgatttaagtaatgatcctgtgtattagcgttagaaggtgggtagaaggccgcaggtgcgtggtggcctgataagaaagtgggagggtcgtaatacccttgctgggagaaccctggtgatgagggtaaatcacctggggatcctcctccagaaggtgttcgcccctaaatcagtgaaagcggataaaggagcacccttaggatggtcgggtgcattggggtcagcctcgaccacttgccgagagggaacccgatgcctcaaccgcctggcacgccccctctcttctcttctaggcgcagcagcctggatatcatccgcttcatcgatgggagggggcaccaagggattcactcaccctgaattagctgggtgcatgggggacccaaagtgagcaggagattgggttggggcagtggcaacgggtgcgaaaccactactagcaccacttcagacaggtcggggggtggacaaaagggcatagaactccaaagccctgagcgaactcttccctctgcattagaaggacgtcctacgacgagatagttgaaggccgtacaccaatgttctttttgagaaaattcttagtcttgcccaacagacccttaggcgaaggttcagtggggatgggctctggctaatgtaccgcaggcgcgactaacttctcacccaaggagagaccccccaaggactcacccacaacacaagaccgccgacggcccacaggaacatcattcgtgaaatttacaaccacctccttcagcgtcgtgtctccctcacatgcctgtgaaggagtgtggtcggacccagcgtcgtccccaacctcctcttccacctcgctagaaggaaggggtacaaagtacaacttgtctgccatcagcttgtcacccactcgaataagcacgctttttataaggcagggtaaagacaggaggtgatggcagagcttcttgtcatagtctgccctaaacaacttaagcaggctggaggaatactcctcttctgtaaggatggggcggatgtgccgctacaaaagacaaaaaggggagttaaaaggacattgtgataaggtcaatgtttgacaattgatgaggatacaagttgaggaatcacttactgggcattcgaaagaccacctgtactccatcttgatttgaaaaaaagaaaaaattctctttcccatgcttccctgcattagaacgaacacccaccaccaacgtatcagaaggaactttcttatgaaagtaata

SEQ ID NO: 222140 - DNA, 2391 bp, Cannabis indica
tgagttcggggtcgtagcagcaacatacatatcagccgtagtgttttgacccagtaatcaggattgtctattttgaaagtattttgggagtacaaagtttatgttgtaaaaacactattaaaccagtttgtgaatattttgaaaacagggggaccccatggttaataccacttatcttttatcatatagtttatttgtcaaatttttaattacaaaaaatttaattacccacacttttggtataattatatagtatctatataagaattttattaaatttcacacacgtggcgtccctgttggacagggcgttacacacatcttttgttctagtctcttttgtgcctttctccttgaggcatcctcaaaggctttcggtagtgagccatgttgcaggttactttgtacaaattctctcaagtattaattaggctagtgaactcaaagaattttgactatccgagagtgatactacatcttcttatgccactatatacacagaaaaatgggtttgcataggagcgagcccaacagcagaaggtcaatagatagccagagagtactagttatgggaagtgagattgtgagaaccaaaacttgtggggtgaaacttgctgtggatgtggaagtagttggagacggagggagtctaaaagctaaacatattttaaattgttgacaccttgtgccttggacatgaactttaatagagtatcaaccttttttctttacactctttgcactataaagagccaactatatgtctggactaatcttggtctttgctgctgtatacatcatcctttgaataaaggtcttcaagctttcatgtgactcatgtttgatgatggtgagcaatctgacttccatatcacagtctcttgtcactgtaaattgtttctaaaaggaataatttaactcctttcatctatttattgatccaagggttaggctctgcaattattctttaataaacttgattagcattaatgaaaagcaaaggcccttggcatcattgctcactcttgctacttgcatcatcttattatattttgacaggtgagtcctaggatccatatggccatcatacaactctatttgtggtatcttgaaattttcttcaagtggggcttttatgattttcttgacagactgttttggattctcatctttcgaatctgagagggccccacattgattccggacgagctttgtcaaagtagaaattttctcttctaacctttttatgtcactatctagaaggtcacgtcctcgagccttatcatttaagtgattccttaggtaatttcttagtggcctcaccttctatcctttagctttttcatacttggcatcgaaacaccttcaaaggtctacattggactagctatattcagagaattgttcttctatcccaccatcttgattaaaacaatcactagggtggtttttccttcgcttaggcttgggtacttttccaccaggccatttttgtgcaaatttgccttttagagcaaaagtttgtccatgcttggaggcatcaatggtattctacgtttgtaagggctggttggctgggttcacgccttttcgaggaggtaagggagctattttgttttgaggatcacccatgtttgccttctttctgtccctcacgggaactaaggttccaacgtcagttggatttgatatattatctctgccaatgagttccattgaagcgtcctattttgagtcttcttctaggtttcctaacatttcctggaggcgggaaatcatcttttccatctttcatgaaaactcatcttaacgggctagcttctattagtgtccaacaactcattagatactcgaactaagtctggatcctcctcgtagtagtacatgtatctgtaggtactatctctaatgtatcctttgttgtcttcgtcctcgtcatcagcgtcagggtcttcgtctttgaatttgttgcaacgttgggctgtgttatcccctctattcttagtttcagatgtatccctttccctcacattgtttagttgggcgtgctctagagagggatggtttacatcatccatgacagtgtcggagtttgcttaaggagtcttctttatcatttcatgtagaaaccattattgcagaatcatagtggctcagatctttcctcaactctcaatgaaagtatcaaaatgtttactgacattttcaaaactaatcaagtgaaagatttagtaattaaaatactatttaacaaatgagatggagaattttatgtgatttaggcgttaattatccctagttcacgagtcagtatattagccttttaggcatacaaatgtcttaccaatggtgtttagaataaaattcataactctagttctctaagtttct

SEQ ID NO: 222141 - DNA, 3032 bp, Cannabis indica
aaaattattttaaaatttaaaaaaatagaaaaatagcaaaaccattagaaaacattttttttccttcttattcttcttctgctgtgttattcatcttgacaaccaccattatcatcatcaccaccacacaaccaccatgatcactattgttactattttctaaatcaaagaaaaataaaaactaaattagggcaaaaacaaaaaaaaaattgaaactcaccatcataaacaatataaaatatttcaaaccaaatctcaaatcccaactccaagtcaaaatccctgttcaaatagattcaaacacaacaaaaatatttaaaacaaaacaaataaaaaaaagcttacttattacatttttaccattgtattataagaaaataattttctacatatagtttgtatatatatatataaaaaaaattacataaaatattattttttttatatttttacggtgttttataaaataacaaaagactacataaaagtaacaagaaaataacagttaaaaataacatacaaataataataaattaacaagaagtacaacatcaaaatacattaacaaatcatattttttgtaaataaaattataaaaatcgtaaaaatatttaaaattctgtacaaccgtatttttgtaatttttttattatctattaataaaaaatactttcatattatatttttattaaaatatgcttacttttacgagtgagttattctaatatactctctatttaagtctattacataatttacattaatttaagaagtataataaagatattatttataaaaataaatatattttaaagaatatgaaaaataaaggtaaaaattaaaatagataaattgaaattggtatataatgtaaacctaattaggggattcattggatttggtatttgtttattgtacgttagaagactcttagaaagagaagaaaaatggcatttttcaaaaatagtgactttggtacatattggttggattgatcgtttaggagtcgattgggttatgtatagttcgtattataatttaattaatttaatttcttttttcttactcaataaaattgtttccaaagaagagagagtatataatttatacatttatgatatttttcttctcaaattaatagaacacacttcaaaggaacagtcatccaactgaagcacacgacctgtagagaaatttgcagatcgttttacaaaatactaatcaataaaaaataaagccaaaagtaaatttcaaacaccttgaacattaagagcaaattgtaaaggcataaaaataccgctatgatgaatcgcttatatacacaccatgctatctgttttcaacatgactctatcccacgaatgagttgcaatccaactcaagacttctttaatgcctatatattatctcagcaatttcaggttgaacacattcaatcttcctcttcttgaatgcttctaccaaagcaccatgatgattccgagctatacaacccatatcaaaagacaagacttgaaccagaaaaaactaaaaggaaaagactaaaaaaccatgtcaaaagacaagactaatgggaaaaaactaaaacaacttcaacacataaatacggtcacaaccttaaaatcaattaaagaaagtataattctaaccccaaaaacactaattggaattaacctaataatagaaaattaataaatgaaataaaaaaactaaaacagagtaggactcaaaaactaagaaactgcaatccatgtatgtgtttcttaacctaataatagtaaattaataattgagataattggaagagtgattgaaccaaatcgccaccatagagaacatgtgatatgggtagaacgttcaaatacgactgaaccgaatcactatcagacaactggagataactgctcggcgacgccggccgtcgttgatcggcgataccgaccgactgaaccgaacagaagacgcctatgggttatcgcagaaacttcacgaaggtcccagctaatacgcgatatttcctctctcttcacttcacgtgcgcttttctcgcgatatttttgtaattatattagttaaattataaattggaaaattttcagaaatactattttttttcatgctttatatacaatgacttagtttttattaacaaaaaataatcttttaaaaaattataaaaatatactttttttagcgaaaaaataagaaaaaataactgaaaaacaacgacatttcaacttcacaaaattataaatcaactataaaacaaccaaaaataaaaaatttattatttttaccgaagaaatattttgataaataaaaatgttcaaaagataacaaataaaatatttttgtattaattgtaatttgtttcaaatttttaatcaattttgtaaaaatttcaacaatatgtatattgtagaatatagaaaaacatgaaagtccatatagcctattaattacattactaatagagaaatgttaaaatgcatcagtagtgactagcaccctcttatgtatcattattgctattgctttaattaaattaagtatcgagtctcatataatttaatataataacttttaaggagtatcactaaaaaataaaaatattttcgtattaattgtaatttgtttcaaatttttaatcaattttgtaaaaattttaacaatatgtatattgtaaaatatagaaaaacatgaaagtccatatagcctattaattacattacaaatagtaaaaggcacagtaaaccagtaagtgatgactaccacctttctatgtgttattattggtattattttaattaagtattgaattttatataatttaatgtaataatttttaaggagtattgctagccaatcgcaaagcgacatatctagaagtgttaagcaccactagtatccaatagcaatgctcttactaataataatacttatttctatatgttgatgtgacagtcagtagtccagtgatccgtaagggaaaataccgggtaagctgtgcaatcccacatcgcctggggaag

SEQ ID NO: 222142 - DNA, 1013 bp, Cannabis indica
atgctttttgactttgctacattctttttgttggcatttcttccagattgagaggtcttgaaggtggacctttggatgagactaccagacgggggagggccaaggtggccaggacctcacgtggtgaagatgttgctggatcatcactgcctccccctccactagggccagcaccaggtggacagcctatggtacagcttgccggccaaggtactcagaggtagaacaaaggagcagggtcagctgctagataaaaggttgctgagtcagccaaccaatgcatagagagggcttttcctttcttggatgaggctctgaatgagctgggtgacgctggacctgacacgctttactctatcgagcttcaaggtctttctctggtgatttatactttcagctcggttcatcttcttcgtactatataggctggtcgaccatggtgtttcttgcatcttcttggaagcttatatggggggctagccagccatagcagtccaagaaggggactagccggcaaaagttaggatgtttgactctaatgttatttcgctttgttttcaggccctgatgaaactgagctcaacttgtgatagctctagggggtcttcagatgcttttcaggatcgtgtgaagatcttagaggcttcccttgcagtaaaagacaaagccaattttgagctggaggtcgttgtgggggagaggcaaagaatggtttttggattggagaccatgcttggtgcctggaatatagagaacaccacccaggctaccctcatttctaggttacaaaataaacttgaggaccgtaagaagaagttgtaggaggattttgatggccaacaagccattaaggaggattatatcgacttgtcctccgaacttacccatgagtttcatttgcacaatcctcgagccaaactgtcatacatggacagtacgacttttgcgaagagaacattggcccatgaaaaggcactatttgagagatgcatggagacaaactaggttgctac

SEQ ID NO: 222143 - DNA, 2421 bp, Cannabis indica
aaataaaaaccttggcatgatcgccccatcgagtagggggcattctaaacctaaggaggcgttcatcaaaccctacaggcctacatcgagaataatcttgagcagaagggacatgatgaacaactaatggagacttaccggatccagaggtacaagcaccaggagccccagtgttgagaactgggaacagtggcttagcccgggaaggcgcctactctttagtagcttcaaccggaagagccctcctggcagcggcttaggccttgatgtaagctaactcttgttccatcctgaaaaggtactttttataccggtcttctgcaaaggcgataatgtccgggctgcaaatgttgggacaaaggacctaggataaattgaaatcatccactgattggctctctgtgattagcttagcccttctgtagtttgcagtagtgactaagtccccaacattcaagctgtccttgtacgtggagaagaccttggcatgctagaggaaaagctgggtgggggcggtgcgatgcatcggaggtaccctgacccactccgtgagcagttctgagcgttcaacgacttgaaaactggaagaaaagaaaaccggtgacggtactccttgacattcttttgaaaaataaaaggaatcgtaccctcattagtaggatgggcccggagtgtgaaaaaatcgtctttaagtctatctcccttcttggggacagacacaagttcatgaaaatataaaattttggtcgggcttggcgaagcccagcctctggctacataaaaaataaacaagcctgaaagcaagtggtacgcttggggaatgagttgataaggcgcaaggccaacaaaaactagaaagttgatgaagtaatcctgaagtggtagcatgcccccggacataaggtgagtttggctccaagccccaaagccaccatagttataattgggcgtttcctcatctcggggcaggcgattaaagactccagaggcgaaaggcttgatcccggccacagttacgatcttttccaactggtgggcacaggtcaaggtcgagtgtagctcgtccacctcccaaccgttggatcgacacgtgtacttctcttggacgacgggtcccttcatcacctcttccaaggtggccaaggaagcggctcctttgtaggaggatttagctccggatgtagagacagacatctcttgaaggtagtgagattctaaaaaaggaaaatccagcagttagccctcaaaccaaaccctaatgtgaaaagagggaatgggggtcccctaaccgctggaaagaggccccctccggatgtttgccaaaaatggaaaatccaaggattctcctaggcaaacatcaggtgaaaatatctcaaaagcagcgaaagcagaggaaaaagaaagaaaaaacgagagaaagggaacatgagtatgaaaactgttccatattctgagcagtcccccagtaaaaaggtggattacaaaacgaaaaaggaacaaagaagcagaacacaagaaaaatgtacacaccatacgacggcctttgccaaaatcgtttcccaaaaatcaagcacttaaccaaaagctctaccctaacatgcaagtgaacaacaaaagtgaaagatacccagaaaacttacgtgaggggtgtgaactggaagtttatgacgatcggcggtagaatgtagcctagcaacgacggaaaaaataacagtaagaaatctatggtttctgaaattttctcaaaggagttcttgagtcgaaatggcgaaataatgaaagtaactcaatgaaaaaaaaaaggttggcttttatagaccagaaaagggtgccaagcagctgtaatcagacaccatcgtacggtgggaatcgtaatcgattcgtattctaccaatccaatggctgagataaatgcgcattagggcggttgaaaacgtttgagtacttttctgacactgattaaatgcgtcagtttctcaatagacgggaagcgaatcgttgcctacgaaaggaaataaatattaatgatgaccatcgtaaatgcagcccatgcacttggagcacgtgtcgttataccaataagcctaccggaggcaccaagcaagcctcatttacccttcactaaacgaggcttggggggtaaatgttgcccttgattttttccaaaatacgtggacatggatgaggttgacacgtggatctgtaagaatcaacacttatggaaataaactaagtcttagacgaaaaaggagtaccttagggaaggtgtctctcggaggagagcataggaagtatccttactcttcgggaggccagaggaatgctaaggcaattccgggaggtatagagatccctcgaacagtcacttcgcatttaatgccgtatgggggaagatgtgttgaaatctccataaacgacatg

SEQ ID NO: 222144 - DNA, 2359 bp, Cannabis indica
atgatgtcaaacatgcacttagccgttttcattttttttttctttctcttatccttttttgtcattttttaacttttctttctcttgcacacaattagaaatgagctcattcagagtccatttctccttttgatagttgtaactaatattaaattagttaaacggtagaggaagcattaacaaaaccatgagcacaagtacatcatcaaaaagcttaatcttaagtgtcattaatcttgagacaatatgatatattttcattatgtatctccttacatttccctgacccttatacttcatgttcattaaagaaccaagaaaagttttcatttcaaccttatcgtttttagcaaaatatttctctattttaagaaaattctggccacagtaaccccttctgattttgtgccccaaaaggcttctgaaatgctgtgtttcataatcattagactcaagcgatttcaaagatcccacctctcaaattcccttttatcatcatgggaattttccttagtgagaggtgcaagttgttcatcctttattgcatggtataaatccctacattccaaaattataagtaagttcattttttaatccttgaaattagtctcattaagcatagcaatataattaatattaacagatattggtcacatcaatgtacattattaaacaatgaattcaaaaattagttaatcccatctcaagatactaaagacacaataatatcaagtccttggacagtaatattaattgtaagcgatactcttagtgtagcaatacaaatatttgacaataaaattgtaccaaacaataagtcaatatttggactaaggtactgttcacacaaaatatctccacagattctttcggttagtcaatatatacatcaattataaacacacaattatcttgatattttaaataaattaatctacacaaaaaaaaaatcactttgacaacatattatattaattaatttatttaaaatattaaacataaattaacaccaaaaattaaattaaatcctttcaaatatctatataactacatataattattcaaactgaataaatgaatctaacccggaatataatagaacatataaatttttaatcatgtaattaacatcatacaattcaaattaaataatatacattttgacatatatgatcttacatgaagatgaagacatagtattgctacatatggtggggctttatagtgcttatcgatacaccaatagcatagatggtataccatttacaattgacagtattcactgccgataacaaaataataaatttaaattgagtcgaaaggaaaaatcaataaacattaatataaatacatatatatttacctttgcacatatataagtaaagccaaaattggaagtactaatcataaaatcaaacaccaaagcattaatattcaaatccatataatcacaaaagtggataataaacactcaagaaatacatacaatcagatatctaattatatttttaaaagtactctaatataaaaaaatcataaatcatattttatagaacctttgctatatcaaaaaagaaaaaaatgataataaaatgagcgaaagcactacataaaactattgttggagattgtacaaaaagttatgatatttcaaaaatacaccatttctctaaatttctatacagttggggaaggaaagaatatagttgccctagtatttcttgggactgctacttatttatatgcttattataaaataagtttttagtatttataatttaatcccttaataaattataaattaacttataatatttaataggttttgatacctataacttagttacataaatttgtatcataatttataattgcatatctattatagatatgtacacccacaagattttaagatttaaatcgaataaaaaagttaaccataattgcaccatgatgaaaattaacgacaccgcatgcaaataatgcgggtttcaggttaattgaatattctgctcagctctacatttggcacctttaattgacaattttttattgagcagtggtttgtgtttttctaatgaatgaatttgtaattaaaattaaatataaaacaaaataaataatgaaagtttagagcacaacaataaaattgaaagacgttacaatttgtatattaatatataaatataaggtattaatatagtattattaaatataaatataatcaaaaatataaattttcctataaaatactctgttctaaatttgttgtaagtttaaaaaaaaagtatgctatataagagcatattcaatcaagatgtaaataagtgataataagtgatgcaaatgtaaaatatag

SEQ ID NO: 222145 - DNA, 2229 bp, Cannabis indica
ttaatttttgacatttttttaatataacaaacttgaagacaattcctaacacgaacagattcagaaaatgtaaacaattttgtcctaacacttttagatcggattattattaaatgttattttgaacaaaaaattagttcagagtcctatttgtaccattttggagaatacatagtccattttatcatttaacaacataaaaagtacaattggtaacttttacaaaacacaagatctaaaatggtatttatccttttttaatattaatacaaaattagttaaattaattttatattatctcgctaactttatttaatcgcaaatcaatatgtgataagaataaatattctaaatatggtaagtttttaatttactgaatcatttattttccgatttgatttcttaaattaattgttaaaatattctgataattaatgtgacgcagatactgatagagtatctcacctataaatcattctatactaacagcaaattccatctaaaaatgtagagagagcttggaagcccgattacccaatctgaagctacactaggattgaagctcaaagatcaatgactggaactcgatttgtcgttattattcccttggcaaaccgattatacatgttttatttttcatataatattttctaacaattggtatgagagtaaatatatacatttgccttgattcttcgtttagttttagatgtagatataggtgtatatatttactatatataatatgtataattttgttaatagctgattgtatcgcaagatatgttgccaacatgtcgtgaaatatcgttgaacactaggctacgtatctatgattcttttttgcgatgattcaagacatatttaagattcatgttacgattttcatttttttttattattttaacaaaatttctaataattttgcagatggctcctgaacttaaacttctaatttctcagtatttcacaggttgtcttacctatcaggatgcagataggtttagagatatcaaggccaagtttacgaagcttgagttgattgatgcgattaaggctagtcctttcagacacttctggaaagctagaaagttgactttctctggcactttagtccacagcttcctcttacggaagatgaaagtcgataatgaaaaggaagatgaggtttggtttcatataggcaaaaatgacatgtgattcgggcggatatagtttggacttattattggctttcctatgggtagtcccactatagaggaagaaataaaagtcaagtccaacaaccatctagtcaggatgtattttgaagggaagagttttgtgcagttggattcactgttgctccaactacagaggtgcgaagtaagagatgatgcctataagcttggactgattgctttcattgaaggtgtattagtatcaaaagagggcaatgttcaagtttggcctgacatcttaaagtttgttaacgatcttgaattcttcttcaagtatccgtggagcgagcgtgcttttcgtaagttgatgcaaacattgaacaaggacatgcaacattataaagataatattgacaagaagaaggggaagaaggttgctcaggaggaaacactgttagtggctatatacctgtcactcagtactgggcatatgaagccatagagaaagtgggcaagaagtatgttcaatgcaatggtaccaagttccctagaatggtaaactggaaaactccagagggccagcggaaacaagatgtgaaggcaaccgacatcgcattattgttcaacactcgggtatgtttcttttctgttttgtaaaattcttttgttaattcaataaaaatactggtttaaaagttaaattagttattcgcgacttgtttcgcgacgtatcttgatttcattcgcgatttgtagatgtatagtacctttgaaaaattgttttctgatttgcgacttgttttgcgatattttgagatgtcatttgcaataattatatgtttatgcttactttttaattcgcgacgtgtatcgcgacagttcacgatttgggtacaaatattcttttgagatgctagacctgttttgatgacatactatcgatgattttgatacatatcatgatttttgtaatttagtttgtgaaatattttgtgacatttttcaatagtttttaatttctgtttgtttttttttttttttttttagttttcttttttgtttttttttt

SEQ ID NO: 222146 - DNA, 2325 bp, Cannabis indica
aaaaaaaaaaacccccaaaaaatcgttgtttataccacaaagacgtgggacacaaaaaatgagtatgacttcttgaatgatgaaattgaaacgttgataagagcaggagatttggggaaatgggttaagattcccatcatatttttggacagggggtcattcacagacaggtgaatgattctgaacagcaggctactgcaaattctttgcatggagtaagtcaccctcaagttctcggaacatatccttcgacactccccgctcttccaactctagctgcggtggctttgatggctctgagacctatacatcccctaaggctagcaccaccactggttgacaggcatgtggtgacgatctcaggtagactgaacctcatcagaagctccaaaaggacagctttcccttttccttccacaggagcagatggccgagcagggatatcaagttccctaatcctgatagcgtgttccactggtgcttggtcggttgggggagccttcttcttcttcttcttgctcgacctctcttgctctgagtattcttgagcatactgcttgggtctgttgcctcccttcaacttagcctcacgcttgagttgaatgagctctttctcttgctcagtaccaccagtccggtttggcttggcctttttcttgttctccttcagggcctcagcacaaagtccgctaggaagagattacacttaaaaaaattagcttcattggccaaccgagtgatgttccgagcatcttctggaagttgaagatttttttgtgccctctccctaagtcccaatgtgaaaggagggcagcagtatgaaggaatcttcaggaaccaattgtggacggtatccatgccctgaacgaagtactactcattcgcaaaatgtcctatttcgctgacatcagtgtccacagttcccttcaaccactcctcatccaatttagagaagtataagtacgccaacctactctgctttggagttgacttcaggtcgaaaaaccagttggtgtcgtgcggggatggctcaccccgttcttgcgaggcgtaaatgatgaatagggcagataaatatttaatgcccttcggggtgaactaggtcgggttgaggttgtagtaatccacaatcctattgaagtatggaagcaaaggcagcattgcaccttgcttggtatgaggatctaactaggcacaaaatcccttccttggactagttgcccggtgatttagagaagggaagaagcattcaacatttccaaagtagttgtgcttttccaaattcttcatcttggcttgggtgactacggacgaaggagaaacccaccgagcttttacggcaccttgctttctttaaggaactgcctcagtgtattcctcagtaacatagtcctcaccctctaccaagacttcaccggcctcgaacacgggttccccttcctcattgtaacttgcaaagggaaatctccaagcaactccctcctcctcagcttcagatggagaatcaagacatgcctcaccttgatcctccacctcttggacttcaatgtccccttcattgtcttcctcctcagtagcaggctgggcatgtttagtgcttggcatcatggaaagccgagccacgtgaggatcagttaaagtagttttctacactgtctatttagcgcgggccatgattctatccctggacggcatttggttagtgtgcctagcaatggtcacagcaaagttggctataagtataccagcagcaacaggttgttggtgggtccacgagtatagtgtcaactatatctgcccggacgatgtatgtctagctagaaggcaaatatcgcctccacccctacctgagctcccaaatgaaacatccatagccctcacctacgatctagttgggataaaaatggtgtttcaccttgggttctagagagggtgtgtgttcgttgcttatctcccaatcctcaaaactcgagttagaaagactgtcacttgatgaggatggactagcacaaacacgagattgattctggtacagaagttggagaagatcctggtcgatatgatgttctcctccctaaaactcactagggttcatctacaaaaggtaggacacaagatgagtatttggtcgggatatcgaacaaaaacaaataacatatactgaccaggtccaatcgaaggattaaaaggaggaattttccatgatttaggtttatcacccagaatttcaagacgtcaaattaagggttaattttcactaaacgtcgaacaagcaagtgaaaaccaaatacgtgaaaccaaagtcagaatgcaattacagtcaag

SEQ ID NO: 222147 - DNA, 3676 bp, Cannabis indica
tactaagtgatatctctagctagtattgtggtattccacctgtgcttattcttttaggtaatggaaaagttttcctgtgagagctctactaggaaatagaaagttattttgatccgaatcagtataaatattgtgctttgtcttctttgtgtttgatattttatcttaatatatatttttgtaaagactacatttaattagcaagtaattaatatgtataaaaaggtaaaaatcttgttttttttttttttttttagtattttgagactagggtgagtttatgaatggttgtacacctgaaaatgatgatgtaccattccaaaaaccagggttctttaattcccacatgctcttctatataaaatggcactagagtagaacccgtctgcagcagaaaaggttatacttattagatttaacaaatattatcaacagttctgtgtttgttttttcctttttcttttctcaataaataaaaatatagggtaaatacttagtacaatcctacaaatattgttatggttcattattttatctattttgatagttacgagactttttatttattttttataattatatatgttgtagttgtttaggttaatctataattttttttttaaattctcaataatttaccatacagaaaataatgtttaaattatattttatcatacttttgactgctttttgttatatatatggtaaataaatatttaaattttattaattttaatactataaattattcaaaatcttcaaaaaatttgcaagtgctcttaaaatactaaaacatacatgatcgtgaaaaaaatggactaaaaagcttttctaaatacaaaacaaataaaaagtctacggaaattaacaatctttcataaaaaaaaatgtattataaatttttttagaaatatatatctcattaatttgaacggtttacactattataattatcaacattataatataaatttaaaaatcactctaataaagttttcacaatacaaaaaaatattattaaagttttaatatgatatactaatcatcaagtcattatattggattcttaatctaagaaataatatataatatacacaaacatttgttcttatataaaaaagaatagaaatcttattgtcaaaataagttgtataactttataatatatagtgcatgcgatttgaattgcggttattaaatttaaaattgcaaattgtaccgcaccacgcgatttgacaaaaatacaaatcacaatcgtaccacaaaatattttaaactgtattttttacgtagtgtggtgcagtataaatagtttgatgaacacttttattttaaaatgtaaactgtaaagacagattttgataacatgggattctgtttaatatattctcaatggatcaaatcaagtaataatataagagttagtataattttgaacttgtattttacaaaaattattaaaattctacattttttaaaatgacataggctctaatctaattttttgtcaaattaagctaacatggaagtgttatgaccaaactcaataataacataatatggaagtgttattatcaaactaattatataatttttttttaaaagaaaagactaaattattatttagtaaaataaaaagttcaacagtaactttaaaaaataaaagtccaaaataatatttacatataatcataacaatatttaattactgttatagatttattatgaccactatttgaagcatagatagatagatgtatggtagtgggttggttgttgaatttatactgttctcgttatatttgttaatttattgtataatatttataatggtttcaagtggacagtagtactgaatactgatatgaaaaaaataaggaaaaaagtaatgtatgtctgaaaattttgttggtatgcttttgttgttgttaagagatattggaggcattttctaatttgttgtataacgacaataatgtctgtctcccttaaatagtctcctaaatcgtgttacttttttagctcaaataattaattattatatttgacagtgatcttacgggtactcatatatttgtatgtatgttaccaaaactaactacctacatccataatcgatcgattatataaattataattatatatataaatattctcaattggtatatttattaattaattcttacatattgtgaaaaaaataaatgaagactgtctgatttcttagtaaaagtaaaactataaaaaacaaacaaagaaacaaagtttactgctttgtattataaaaatataatattctgatgatcgatcgaatatattgtgatcacgggtttcatacaagcatgatttagattttatatcaaatactagtagttatatgctaatctattaacttgaaagatataacactaattaatatgatcatgtttcttataatatatatctatattaggtatttgtaacatgtaatatatatttgattagagttatgttgttattattatttcattattaatttaaataaatattagccttatataaaaaattaggggttttcttcataaatttatagctacaaaagattatttttttctttggccagccccgctggccttcccctgcgcatgtgtaggttggttgagggttgtggtttgctattacgatttaatttttgctattgtgaatagtcttatttctttgataataattttgagtgttttagtcttatctacgaaatataatttaatttgttttgttttgttgttggttcttctttaatcttcgatgactcgctatcaaattgctgttagtggttagaaataacaacttctttgcgactgatgaggttgctagtgtagtgcaattacttatcttgaacaatagttgagtgcttaagctacaaggttaaatgaacctactgcaacagtttttagtattgtatcggtagatgaaactaaatatatgttaaagttaagtgtgatactataaatttttttcttattttatttttaggtttttttatcaaatgatctggtaattaggtggctaatctttttttctatttctaatcctaatcgtgtctccaacaaaaaagatgtcccaactggattatacattgccattaataaaattacatgatttattcaaaaaaatattaatttaatagtttaaatattttttttaaaatatatatataatttaatctagttttgaatttatttataagaaaatatatctaactaattttattgaataataaaattagcaaataagtttagaattttaaataatataactaataaatttattataaaatatgattaatcaattgaattcacttcgaatttaaatttaaataaagatttatataaaaagattatctaattttattaatacttttaaataattatctaagttatatcttaataaataaattaaatttatatattggaaaaaaatatataaaaaataattaattgattaatttaacggtgttaaatcatattttaacgaaaaaataataaaaaaaactgttaaaccaataatttttgttaaatagccacatttaatataaagaggtacaaatttaattatatgaatgatttcgtatataatacttcattcgtaatacaaattttttttaccctcactacaaaaacagttacctttagtgata

SEQ ID NO: 222148 - DNA, 2221 bp, Cannabis indica
aaaaaaaaaaacaaaaactttttcgtcaattataaaaagacaacaaaaacaaaatgctcgctagtgtattaatattatgttttagactgtttaagatttttgttttcaaattatgatatatgtattattgtgatcttgaatttttctatccgttagtattgtaaatcggttattttgtcaaattttgatacacatgacaaactgaatgatgacatgattgtactttagataattatcttgttagcgctacattaacgccacatatataattaattttaacaaataatttaattttttttatttagttttacgtaatttttttaatcattatttaatttttgagtacatgtaaataccattttaaacattgtgttttgcaaaagttatcaattggacaatattttattaaatgacaaaatgaatcttatattttctgaaatagtaaaaataggatcatgagttcaattttcaacaattttattttcaattaatcaactttaagataatttctaacacgaacagatatagaaaatgtaacaagttttgtcataacatctctacattagattataatttagttttattttgacaaaaaactcagttcagggtcctatttgtaaaattttgaacaattcaaggtcttactagtacaacccaccgtcgacacccacgactgtaacaaccccaacaatggcagaagacgactaatgtacaccacagtgaaaaacgaagtataaaaagtgaagaaaatgtaaaatctaatttttacctaagctcaaacgaaaatggaaaattaaaaaaaaaatggaaaatgagtgtttaccctagctgagacgaaaatggaaaatcgaaggaaggaaaaaatgaaaaatgaaaaacaaaaaagaaagtgaagaaggaaatggaaaagtggaggacgacggttgatgtgattgatggatgtcagttttcactttttcaaatttaataaatttaaaattcaaaaacttaattggttgctatttttttaaccctatatacctttagattaaccccagcccttagatcaaattaactaccccatcctacagttgttgtacatcacggattacaatccatcaaagtataataacggaacaaaaattgtgtccctatattatatataatattctctctgagaagttgaaaatattcaaagagcacattcctaaggaaaggtagctagccatagtactaaatgaccatgaccgatttgattttttttttttttttagtattgaaaaatttggatatatcaatgagaataaaatgatcacaccatgagctttatataattattcataatttaaaaaaaaaaaaaaaaattatgtataaatggtttctgtttgatcactttataaatattgacaaagtgatcacattcacatgcaatgtataatatatactcacttgaaaaaggaaaagtgaataaatgcattattatttgattttgctaatttcctttccaaaaaacatctattttgtagtaatctgtacatgttgaataagacactattgttacttttttattttttattttttgaaaagaggaacaacatattttaatacatattagaaggataaagatttataatccaattgtgtaaactaatttttgtaatggaccactttattttatagtaatctgtacacatgttgaataagacaccattgttaattaactattgcaaaaatagccatctgacctatgcaagaaaattattagaattgtcttactgaacggattgttagattaatttttatgttatgttaatttaaaaataatatttttgattaattttcaaattaataaataatatcgcagtcataatttttttatctatttaccgttacaaagataaataaaaatataaaactttatgtgaactttttttttaaaaaaaaatggtagttttatttgcatcccataaaatgataaatacacctattattaaaaaaatataaacttaaataatttttaaaaattactcttagtatttttcttaaaaaattttcttcacattattttatattaatttcaataccttttttttttttgagaaaatgttaatttcaatacttattttgattttattttcataattttttctaactcatgtatatatatatatatattttttttctaagaaaatttcgtataatttttattttaatttttagttataatatttaaaatataatt

SEQ ID NO: 222149 - DNA, 1282 bp, Cannabis indica
agataattacgaactgagtcatttaataattagataattggtaattttatttttcaaaaaatacctctatatatcattaatccatgtcactttaattaaatttggtatatcggtgctattataaatagagaggccttctctttttgcttctcactctgccaccaaacactctctctctctctctctcacacgtctttttctctctcaaaacctcgatcgaagatggtgagtgccgaagctgctcggaatgtcgtcggtatcatcggtcagtactatatatactgttactattacatatatgtatatctgtattgtgtatatatactcatgtatagtgatcgagaacactaatggcgttatacatatgtacatatatttctcagtgactgtgtactgtttaactgtggaatatataatcttaaatctacagattaaattatagagtaattaatatatatgtatgtttttatataaatatatttattacctccttattatgtgatttcttcttctatctggtatttgctaatcatgtatatacatgaatattttcttgttaattatctttgttttattgacgaatgattttttttgtttgtttgatctgtgtgcagggaatgttatctccttcggcctgtttctttccccagtgtaattctctccctctagatttgcttcgctttctctctcttttttccaatttaaattttaattttgttatttttttatataaaaaaagaatataattgttctcatgatcagatcgctaaatgaattcaatatataaactattttgttgtatgttgttatttatgttaattaaattgaattattttgtaaaaaaaaaattgaattacgaaaagtgcatacgcttttgcattaacactgtttgttaagaaggaaaagaaaagaaatttggaggaaaacaagttggtaaactaggagagaaaattttcctctgtcaacatgactattttgtttatagaattttaattttattaattatttgtagggataatatagtaaatttatatgtatttatttgtttgggtggaaaaattttggtgggcctatcctattgtttctcttcacttttctgttctaatttttctttccttctatttttccaccataccaaacacacgctaaattagagcccacgctgattgcatcacgttaagagctacgcacacacaacactcacaccaaaccttaattcaatacataatcacaataatggttttatttataatttttccatctttttgcttttttttttttt

SEQ ID NO: 222150 - DNA, 2800 bp, Cannabis indica
tttttttatttgaataatttataaaatacgattgaaaagaatatatttttttttatttgaataatttttattctgttaaagaatggtatatttgaataaaaacctaatataaaaattagataccttcaaatgctgatatttgaagctataccttcaagatttagaaagttgtgcaataactaaaaccattttgtttagcacatcctataaactattaacttgtcaaatatttggcacgaagtaatatatttgtaacctatttcaatttataatcaaaatgtgtttactggcttatagaagaatataattaattattataataattataccctttctgctagactgtgactatcagtgactttgcccctcctggctctaacatgaacaacctcctttagtttctcttctacttttattgtgttgtttttcactctcttcctttttccagaatcctgcaactaattaaaaacatttaatgttgaaacgtaaaaataaaaatgtaacattaatttacatatataaaataatattgctaaagatatataaacaaagtggttacatttttcttctcaaccccaacaagttgagaaactggacgagaagagttgcctgagctgcactcagaggcatccaaattggtcatgagtgcctttctcttttttgcattcatgagatatctcatttgtattctcactaacagttggctgatgatgatgatgactataaaagcctaccttagctcctgaaaatggttaagagcacactataatcgaaacacaaaagtatagtcactcggtgaaatcaacatcattttatcagatatacaatcaattcatgagcatagcaacaaaattttaagcatcagtctgaagaaacattatttagaccaaaacttcgcaaaggcatctacaaacacctttaaaacgacccatattgggttgccttctggttttccagggttcttagaggcccctccccaagatttactgcgaaagataaaaatggacaaatgaataagtccaaatgaggctgttagaattacctaatttttttaatagaacaaggatcactaatcactaaaaaaattaaaattgaaattattttatattatgagatttgaaattacttacagattgattctatctaaagttggattacttcctttctggggctggcccacttgttgagcatcaacttcattttcattcagctccgtctcagttttcaaatgctcagatttacaaacacccttgtcaatatacatcacattgatgccatttggaacatttatagcctgtaaatgcattaacaaacacaactcaataaattataaataattgcggaagaaagaatagaaacaagtagtaccaattatcttgttcaaatattttaatgtatcaatattacttaaacaagacattttgtgaatcttgactcttgagtgtcaaaattattaaatgatgtagcgatgacataacatgcttcaccaaaagcctacgttagctcctgaaatggtagagaattgagccatatataagaacatgggctactccactcattgtaattctctgctacaaaactttctagcaaaagacatcctatcttatatatgacaatatagttagtacttgatcgactatatatttatataatcattttgattaataatttgttaaaatgtcaatggtgttcgattgtaacagattttgacatttttatttatttgtttatgtttttcttgcttccaaagttaacataataactattaatacatcttccatcctctataaatttttaaaatattactacttgaataatattttgattgttatttccacaaacaaatacaaaaatataatataccaatttcgataaaactgaaaaaatgattatattattttacagagcttcgttgataggcttaattactagttactacatttttttaccattgctgggtttggtccaaaaccaaatgatctccataactttgtccttacctaataattgactttttctatccctttcacctctattcttttttatttttctttatttttataagatcataaaaaatgacatgtatatgccttaccatcatcctattatatactctatgcatatataaaaataacataacaaaataactccaagaaaatatataatatatattaggaaatgttggaagaagtacttttgtctttctcattctagaaaaatctattttatttggattattctatagcttacagccttacaatgcattttctccatctaaagcaagcattataactattattttataaatatatagtttgaacaatgaacatttcattgaaatatatgctttgaattaataaatagtattaacctttcggtttcctataaagaaaagaaaattgcccattgttacttttgatctaccgaatataaaaagtgtctccctttaagaaagaaaaagagagaatttcttggtgtgatgtgatgctctcctataaaaataatgttttatttagttttttttaaaaaaaataaaaataaataattcaatgcactttttaaaagaggtgtacctatatatttttatctatattggtatgaggaagtatatttaattctaattttttttttatatcgtgtagactatattatttatttaagatattctgtaaaattttgagaaattcaaaaaaaaaaattaatatgccaaaaataaagttaaaatagtttattgcacgagtaactctttcactttaaagatgctctgaaggatacttgataacatagatatatttttagc

SEQ ID NO: 222151 - DNA, 2225 bp, Cannabis indica
ttcttcgagtatctgtggggcctcctttcttatcagaagttgttgtcatccacagctgaaagtatgactgacctaaggaagaactacattgataaggtctccactaaggataagacaaagaagaaagactagattccctcgaatgtttaattggagtacccccaactccgttacgaaacataatgtgaagcaacctgatgtggctgcactatttgagaaggtatgtcaatcttactttctttgttgttttggtatttattttgataaactgttattttctacgattttatgcgattttaatgcaatgtttacatgttttttgtttgcttgcctgtgttgttttgcgatcttatgcaatattcgtgcgacattttgtgcgatgctaagtagttttgtgcgatttttcttgtttttgctattctgttattttatgcgatattgagcgacgtttatgcgatctttgtacgatattaagtggttattttgtgcaactttatgcaagtttcatgcgaggtttgtgcgattttacctattttatttgctaatctgttattttctgcgatgttatgtgacttctatgcgattttaatgcgattttctatatgttgttaaatatttttttggttttttttttcagatggttgttcttcaaaatttgtatcctcagaattgggaggttgactattggaagaccaattgtgagggtgaggtccccacagtggaaatgggcttggataaggtcgaagaaacacaagccgggcgcatgattcgaccgcattccagacccaaacaaaacgggtgggggattatgttaaaagtgcaaatattattccaccatccgcacccaaagaaacaccagagccctccacatctgccattgtgcccccaacccctgccactgtgcccccaacctctgctacagttaatgactccggctacctcttgttggcaaagagattggagaaggttgaagcgcaacaagttgcgattctgactgcacaaagtgagatgaatgctgacttcaaaagaagtctgaaagagataaagaatcttatcatggatcaaattacaaccgtgataagtttgttacagaagcagccttcggagcagacacaaccatcagggccgacacagcagtcatcgccgacacatccatcagacctgacagagccattacagacgatacatccatcaccgccgagagatgattttgatgaggatgatgtgtatctggaagattgggaacccaacgtagatgtggttccttgtactcctacaaacgctattgtgatagtcctgggtgatacagaatctcaagatgtgcaacagttggacgggccacctgctggggtgcacttctccagggttaggagaaaacggaagccagttttcttaaatgactacacggaggggaataagaaacaacgacatgggccagttgaagtagacactgtgaaatcggcagactcgcggctgttaaaatttttctataagtggatcacttacacgagggacagcggccgccctagggatgttcacactggcccagccaatcgatcctggttcgtcaaactgatggtgcagggagaatggctcgacgatgctataagttatttcttaacaaaataaatttattatgtttttaaatttttttgcgactttaatgcgatttatgcacttcttttatttatgaattttttgtgcaacttttgtgcgattcaagttactgtgttttagtttctcttgtgaaatttcaggcgatatttgtgcgacattgatgcgatatctatctaacttatttcttttggaacacagcaaattgatgccatggcgcacttattgagaagaagaaggaacctctatccagaagtgtatactcgaaaaggtgtagttttagacacatctgctccacatatattctccatgtattggaattattatgaaggtgacaagagcaagaggaaatgggatgaggccgttttgaattatgtgcaggggatagagcacagacacttgccgtgttgggagaaccaggattacatctactttgtgttgaaccttcccaaagagcaccactgggtggcagttgaggtacatattgataactgggagatcattgtatatgattgtgatatcggtgccaccactgagcagaacatggagtcatatttgaagccttacggcgagctatttgcaaatctaattcgagctagtggttattttga

SEQ ID NO: 222152 - DNA, 1876 bp, Cannabis indica
actcgaggttcacggggcttcctgttctcgcaattttcaggtggaggggatcgcaaaatatcctctgtgaacacgatacatccccactagacgtgtgaatactgagcatcaaagaatgtaaatactgggggtgcagctatcatataaaatgattcatcttcatcatcctcatagtattattcctctctcatgcttcttccaacatcttgcagtgcataaaatctcaagtctcaccattggttattgttatcagggacagcaggtctctttcctggtgcagagtcactgggtagttgattcaaattaagagcttctgggttttgctcatttgaccgctctcttgtatgatacatgcaaccacattcaccacgacgtctagtattaggaataagtacctcattattagcattttgtacattggtaggttcacgcggtaggggaacattctgtgtacattacattcgtgcgacctcggcttgcaatgctcacatctgttcttgaatagttgtatattgtgcagttgttaattgcatcataccctcagtagtatgagtaggtgtaattagtggaaaataacctgtagtcgtcataggagtcgtcgtgtctcttacaactctgacaaattttaggaacaaatttaaggggatagtgctagttcgtcttattccccccaaaatggtctcgccagtaggtcacacatgaagttccaccattattgggcatattgaaattgatgttattatttttgttattttggtttgtagccatcgtgatctttctccaaaatcacaaaatactgctggaaaagcacccctccttctagcaccaaatgttgttggaggaatttcgataacaccaaaaattatgagtattcaaaggctatttggttagccttttatagaattgcgagtattcacctaaattggtgaatacgtaaagaataatgttggttatgattgcaagttttgttgtcagggagtggaagttgtgaagccagagagtatataccaaaagtatattgtggatctaaaaagccctttatgggaggtcttgtagagtctgaaaggttcttcttcataagcttgtaccgtgtatagattatctctcttagatagcttgttatgaatttggaggtacactccttgatagcttgtcagtcttgaaggttcatcttggaaggaagccatgtacctatctggaaggattgggtgtttataatgctctcaaattgcttgtagtaaaaacacatatttcaagatgacgtggattattattactggtgatgagttggatcacttaaggtggtgtaaatgtgtcacaatgatttaggggttatttttggtaacaatgtaaatctataaatagttgtaaatctttgtaacttgggacgagatttttagaccagatttgcttgagtgaaaattgtgatggtgtaagatagagtataaactagagagagaaacatcctttcgtaatctctaagaagttcgtaaagattcttatagccttataaatactgatatcaataaaagttatggttgatgttctaatagagatgtaaagcattgcacaaggctcgaactcgttaaacctggtgttgttcttttttattttactatttaattcattatcttgaattcttgagatctcttggtatattatttcttgattttgtagcgtgtttgttggtactgtaaactgaattgtaagtcattgattgtttccattttgcacaacaaacttgtaccagagcttggtttgtaatcatggctacagggaaatacgatgtcaaaaagtttattggtacaaatgactttggattttggtggatgaagatgaaggttctgttagttcatcaagggttgtatgaggctct

SEQ ID NO: 222153 - DNA, 1235 bp, Cannabis indica
attactaataataacatgaaaaatatcatcactagcaaactggcttcatggttggagccttccataaatattgatatattgtactgataagatattgtataaaagatttataatttaatttgttatataaagagatacatatatagggtatatatactttcttttatttcttgatttgataatatatatctgactatgttctctcctaactatgttctctcctatttatatagtaaaatgatgtaattcgtttgcatgtgagtcattatggatgggagaaaaaataatatagcatatgccctaatatatgtgagtcataatatatatatagcagtgtatataggaaagaataagttatatgtattatatgggaaatgtaaaatacaagtggttacatatatatcgatccaatttaagagtaattgattgatgttataattgaccgctaaacattagatattcaattatatatgatcgaatcaaattgaatattagatggagtgtccaaatatccaatacatccaatatccaattgaattaattattattttcatttaagtgtcgtttggtaacacttttattttctaattttgtaatcacaaaatgaaagtaaaattttatttttgaaaaactaaaatgcgttctgcaactactaggtccgggatcgaattcgggttcgggtgagaggccgagttcagcgtcagggtcgtagggggagatttagatccaaatctggtcggagttcaaaatattgattaagaaaaaaattgtttaaaaaattatagaagttttttttttttttttgttttcaaaattttaattcccaagtaaaaaattgaaaagtgaaaacagatttatagaacatgttttgaaaattatttttacttttctaattttaaaaataaaaaattaattaaaaaagtgttaacaaatgccacattagtttaaatgagtaatgtgctattgtactaaaattgtatcggtatatatgaaaatttaattttttcttttagattagaatgaatctagtgtgatttaatcctgtactagatctaaaatattaaatggacaggattggattgaatccgattcaaaaaatatcatatctaaaatattaaataaatcgaatcaatccaatagatttacatgaaatacatatggatagaatattatatgtggtccaataaacatctttacctttaattacctctaattacacaattatagtacaatta

SEQ ID NO: 222154 - DNA, 1959 bp, Cannabis indica
ataacctttaaattgtaattagttatatattttctaaatctcgttttaacaaagtatatatctatataagaataattacatcttaataaaatatatgcatatattctgtaaatctatttacgtaaaattaataactttattctaaattgtaatacatgtataaatattattgttgacgttaaaaattcgtcaaagaaacaataaggattaaaaatggtatcttgagatcttgattgaaaaatgcatgaaataaaaatctttcaattttttctcttcaaaagtcttaatgttttctccaccagaaagttcccttacaatgaattcaaaggtcctatttatagtgatcccttaacattttacttcaccagattttaaaatcatggaatgttaagtcattttcacaactgatagtgtggttctctaggcggtctgatgtacttgacattttacactaaaaatgcccctttcattttgtaccgtgagtgaaataaattttgtccctattatctatactcattgtgttattgttattctatctgacattttctcgcttagattgcatgtgttaggagggaaaagaaaatcgacgggagtataagaggaaagaggttagacgcagagagtgggcacgggcagggatgcaggtggcgacaggcgagggcgcacaagcgcgctagcgctgcggggggcgagtacgggcagtgcgctgatgactccaaatattacacttaataatctttgggggtcaacaactatatttactctaaaataattctattataatatagtactaataattatttattgttattattgtaacattgatattattttgtattttttttttagtgtaactctatttagttataacctctcaattagaatataatttgcttggtctcaagtatattcttgaatagaggttctaccgtataatcaaacacgatatgtacattatgatttaaaatgacatagttcccaactttttatttcaaacgtccataaaaaattacattcaccttgtagtatgacttgaatattttagaacatcctacatacataaagtcttaattaacaaaaactcatttattgaaacatccatttcttttactcatccatcagggagacatgtcatagtctactgcataaggataaattataaacttttattacatattaattaaatataattctaaaataattttaattaataaatatttttttataattaaaatactaattataacttcacataacttatcaaaattataataaaaaaaataaaaaataagtatacaatgcaatttccgctattataaatgatgaaaaattcctttctaccgagtttagctctttctaaaacttttccactttcgtattggatgttatagcttccactgcatttctcagcttgcttgtctacaaaatggacctgtaggcatagaaattttttttcatctaatgaaatttagcagctacagtgacacaaacagatgaacatattataatgtaaatactgaacaccattacaattcgcagatccttaaaattgattcaaggtagaatataatcttcacatataaccttctacgataaaatatgtgaatgaatgcagcaaataatgtgaatttattatttgtattcaagattctaagtttgtgaaggagaaaatgtaggctatttcatttatatattaagttgatactgaccaaaataaaagatcaatgtcataattaactcacaattacaatttaaacattgttctataagcagtaatgaaacactctatagcttcccttgcaccaacaaatctctaatatagtaccggaatcagatagaggaataacttaaatgactaggcatgtgattttctctcacacggtttgcggtttgagagtgttaacgcagattttcgttaactaaaaatttgagcctaaatgataatttgcacagaaaaat

SEQ ID NO: 222155 - DNA, 1743 bp, Cannabis indica
tttttttacatatgtggaatggatataaaaactaattaataatagaaatatttatttttaaatatgtacaataaatttaaattttaaatgcaatgttaaaaaaaatactatgttatataaccacatttattatattatccaccatcattctctagttgcccctccctctttttctcttaaattttctgtctcactctttctttatacatctatattatattaaatgtgattgttaacatataaacagttgttctattttaaaacaatacaatttaaattcattacacataattacactaaaagtcaattttgtattactgaaattatttagttaaattacaatactgtaagttatttatctttatcatcactattataataaaatcaaatcctctaagtattgatgattgttttagttcttctttataaaatcttgaaatctacacatatatgcatttatacaaatttatttcatagaataaccaacataatccaactgtatgcatttattgataggcaatcttccaatagctcattcccctcaaaaaatattccaataactcattccaatcaaaaagaaaaccaatagctcattaattaattaattataattgaaaaattatcatccatatatatataaatatataaaatatcacggttaaataatttaacttgttttgggggccggatagctttgactttggtaaccattatgaattgattaattagtttaaagcataattttaagagcaaaacatgcaaagatttcaacttcacatgctccacgaaggtggtataagtaataacctattattattttatgaaacagaaaacttgctatatatattttaaatatttggaatggattggtagtgtttttaatatataatatttatcttatactagaaataaggtaactaatcactaataattgttacccgcaaatataaaacaaaaagtcaaaacataatcaataagaaaaaaccaatgaataattcgtgaaataatttttatcaactgaaaaatgagaggatttccaataaaataaaataagaattaaccagttagctttccaatggagagaattgaaaaaatatatacatatatatatttatataattatttagtattgtgtggttggcaaactagtggaaccaatttaattgtatccattaattaaagagaaattctaattaatataaattatatgatgtaatgataattagcaacgttaaaacatcaattcatgtaagcacgatataaaaactttaaaagcattccaatattaaagaacaatttatttgaatctagctagataatgttgttgaatacttttaacctaatcaaattttagctcttgtttttataattttattttttaaaatgaaaatcactttatatatctggaggtggctccaatggttacatttttattgtaaccatcttgattacatttttttagccattacatcactattaaatggttgtgattaatttagaaattaaataaaaataaataaaaaataacttgtaacctgatattaacttgttaatttatttccttttaaaactttaattaagattaattatattttaaaattgaattaagtataattattaattaattttttacaatttattgttaaataaggatcttttagcaatttattttttttacacttaaattattttaatttttataacaaaacttttaataatttaaaattatacacatataatttc

SEQ ID NO: 222156 - DNA, 1504 bp, Cannabis indica
aattagaaaataatttccataaataaaaatattctaatacaatattcatacttaaagtactaattaaatataaaataggctcactttttcattccgttgatatgcataaatatgtacatagtaaataaatgttttgtctaaactaactcaaatattatgcgaaaaactagattaaaataaaatttaaacaattatataaattatatatatatatatattaaaaaaaatagtatatttttctaagaatgggtgtgatgcataactccaaattgcaatttgcaccgtactacttaatttggaaaaaaaattcaatccacaatcgcattgcaaaagagtttaaattgcaattaatacgataagaatagtttatacagtgtgagcaattaacaagaatctatttaacaactttaagctacttgagattcagtttgttgacattaaacatacaaacattaactctaagaatgcatatatattttcttaaactaactaaattagtatcacacaggttttacatcaacaaattatttaaaaaaataagtaattggtaactaaaagagaatatttgcaatgatttttatagtttaagaaaaaaaaaatttaataaaaaaaaaaaagaaacgtttatgagactaaactctgcaggaatcatagttcatatggacaaatcctatttagtccacatgtaatagatattttttttattgttttattattattgttgacgagattttttgtcaactgatctaagaaaattgtaaaaaataaaaggataacactaaatcaatttggttaaataaagtcgtaaaaaataaaagggaacatcgagatttatagtagtccactccccatgtcgcgatggtaatgtagttacgtctactttatttttttattaatcaattcaaacacactagaattatgttcttaagagtgtgtgcacaatagtacaaatatagatttctaggcgaaatccatatcgaagcttatgaataaaaggctcatacgagacccaatactcataaacttgataacaatcgtggttgtaatattcttcggaataataaaccaatgaagaaaagaatagagaatggtttcttcttcttggtaaatgtgtatgtcaatggtgatagaataatggatgcttggtgtcatcaaagtatgaagaacaccaagaaaaagacgaagaaagaaaattgtctcaatggatgaagtgattgttggaaattattttaccaggatcttagatctactcacaagtatgttaattaacaccctaaatatgaacttctaaaacgattatgaataaacacatataaagtatgagaaaccttacattgggtgcagcgaaattatatgtctccttccactcaaatctctaccccttgtatcctttctgtcgcagagtattatcaagatctgagcccgaatgtcctcttgttgaattgctttcttcacgatattccacactatgattgagttactacttgctgtatgggggcgacta

SEQ ID NO: 222157 - DNA, 1321 bp, Cannabis indica
aaaaaaaccatctactttttattagtttcaattttgaatattaactgtgttagaggaagtttaatgttattttgtagagagtgttaggatttgtccttgtttgtagttagcttgtattagagttaggtagttaaagattgattatgtgtaaaaagttaattaggagctagtgtcattaattcattacaaattagttccttacaaacataattgattcactttcaatatacaatttagatattttcagcaatactttttttaatctatttttcctattgttacagaatgaaatacttaggggtagtttagtcatggtctattatgaggtgtctccaaagttgttggaaaattttattccagaggtaacaaacccaactgtacaaccaatatcattaggcctgattgtgtgaagattctttttgctctgtaatgattgtaacacgtgtaaggctaagattgtatcattgtattactcattgtattaccctgcttctataaatgaaatgctcactatcaaactcaaattgagctgatcaattaaattcattttgtcctgaaatttaacttggtatcagagcgcctaattgccaacataatgtcgattccccaggattagtcaagtgcaacaaatgttggtgattagactccagtatagacaatggttcagacaccatctgcatcaagccctgctccgattgcaactccgttcaataacacgttgagccaacccttctccttgaagctcgacagaaacaattttcctttgtggaaaataatggtgaacaccatcataagaggacaccgtttggaaggcttcataaacggtacttgactagctccatttgagttcattcccacgggtacactagtcgaagaagtacctggatctggtatggatctaaatccagactatgaaacatggcttgtacatgatcaactcttaatgggttggttgtatgggacaatgacgaagccattgcttctgaggtcatggggtgtcaatctgcccttgctttgtggaatgcttttgaagaactttatggagcacactctcaagccaacatggatgatttaagaacaaagatacaggttactcgaaaagggtctcagtccatggtagactacttaaagatgaaaagaatgtgggcagattccttagccttagcaggtgagccctatcctgagagacacttaatccctaatgttctttctggtcttgatgcagagtacctctccattgttgtgctaattgaatcgcaggctaacctatcttggcaacagctgcaaagctcacttctcagctttgacagtagactcaaaa

SEQ ID NO: 222158 - DNA, 1499 bp, Cannabis indica
accatgcaacataaaattttatttctgatgtttattaactagtaaatctgattatattgaaatgggttttatttagggcacaaaacccaacaaagctgtcaacaaaaccctaaaggacacctagaagaagtgccttgatgaagcaaaaggcaactggcctaaactgctgagaagatggccactggcaaattcctttagctctagcttatggctacgaggcaatgtttcttgtagagccagtgccgcggtctcaaagatgaacaacctatgacgaacaaacaaattacaccttgctgccagagtcccttgatgaagtagaagaaagaagagaacaaagccaagctaaagttgcaggcctacgaataaaacgtaccaatccactccaacaaacacgttaagagtagaaaattcttcataggagtcatcgtgcttcgaagagtgttccttaacactaaagactcagtagaaggagtgtttagacctaactggaaggcccttatcaagttatagagataactagtaagggagcctacgagctgggaaggtacaacgagaacatggagctcgttctcataccaagataatggaatggagagaaccttagcaaatactaccaataactggcttaaagaactctactccaaagtaacggttctatctactcaaaattaagtacaaaaagcactagcacccacagcccttttttagcgtggtcttccattgttcttcaatagtggcctcttctttactaggtgagaaagggtagccacatgacatctagaagctaaatttgtttaatacaggcttgtagattcaatgtatgtaagttgcacagtaacaaagaccaattaatgaaagtaacaaagaccaattaatgaataatatcaatattctgtttctggtgtctatgagccacttgctcatagagtaactttctaaagttattctcttagttgcacatgcgtactatggtaccctcgcaagacagaacccaggcaaagtctgtgaaacttagtgaatagcaagtgaccaagagacttgtctgcatggtcatttgggggcacccatactgtagaatgcatcgaactagcacaaagaacatatacagagaaattttaactcttagtataagctactaaacctgccgttaagtcgtacatgcatagtagtttttgaaaatagagggcttatggccaaagatattaacatgaaggccctggggctgaaaaataaagtagtgatctaaaaagtccataggccacataggacatgaaagcaatgttctaaaaaggcctcatgccagaaggacatgaaagtaaagtttcaaaaagccataggccacatggaatgcagaagtgagtaatgttcttaagctaaaagggcacaaaccattagaggccacaagctatgcggaacatgaaaacaatgtctatgtgatacaaatataatactaaatatactaataaacatgttgtctacatgtgtgtaagggtagcagg

SEQ ID NO: 222159 - DNA, 3137 bp, Cannabis indica
aaaaactcattaaataatagctaaaattgattcatatgaaccaagaacgtaatatatagtatagtctagggaccatatggcaaatctatccgaataaaactatttgagtctctgagatcgtcttcctggtcgtcctccattttctagggttaggtttcttgcttcatcgaattcataatcttctctgtgaatccaattgcgatttaggaaaaagaaaaatggcgtggagaaacttcttcaacgagattaggggcctgaagttgaaggaattgcccgatcacgtgaagccaatgatctcgatcgcgagtgcgaagaatgctgtagtgagaggcttggataactacaacgctaagtacattcagaccggttccatcgatcctctctaccatgtctgcttcggtggaatgatcttctcctacctcgtcgctctgcccgaagagcgccgccatctcgagcaccagcagcacgccaaggaacacggccattgattcattcctcaggtttgggctttctcttttcttattatcaattcattatatggatgtttgaattgggaagattccattttgtttagttttgttcgcttttagggtttaagttttacttcatgtgatttggaattttttatgaactgatgagatattcaactgaggagataaatttcttgactttattcattgggtttgatttggccttgtttcttttcctccgttttcgaggtgtgcgaggggattttgattgctgttctttctgagattttgtattgttgcttaagtttgtgtggccttacttagtttacattaaaaatatatagcttgattgaaactcatatctggtaatttgaatttgaattattaatgtctttttcggatggaagcctgatatatcgataatgagtctctcaaatctgatttgatactaagttttgcctgattgtgacatacattcatttttttctcaaactgtgtcatcgtttatggactattttatccgtagtagtagtagctttggtagccgttggcactcgtacaattagaatcaagaaaggaatgaaccaatgaatcatcactgtagtatcaaaagagtggcggaataaagtcaataacatatctcatagattttgaaatgatttttctgttaaactattaatttatcatgtactttcatgtgtcagtgtagttaggagttttttccttggtggtgaatttgcacaacttattttagcattttttaaatttcaagattcatgatatgctctttacaaacttaggatgagttagaagcacacttcttttctattttattcattactatattctttaatgtaacgacatgattcaaaaacttgatgtcaattttaataataacgttttcactcgtaactcacagtcacaggacctttttcttaattattattattatttttggctttgatctctattctatctctgtttttctcttgtttctgtcagttggatggaatgtgtttaatattttctgcagacttgattttattatattcttttttctaaaggtcgaaagtgacatattggtgaaattgttctttgaaacggctgttctggtaccaatgcatttattgaatttcacctgttggtgacattgaagcatatttgcaaaaaaaaaatgataaaagtgcgcagtagatgaagagtctagtgttgaaagttaaggaagttttgtttagtttaattctgattcttattattttgatttgtcattatctttcttttttgaaattattttatctgtttgatttgaaattttactgtttttatgttttttttctaagcttaaaaataattttatcgcgaaacaatgttattaaagtgaggcaggcttaagcatccatactggctacacattaggtgatgtatatatattctgcatacataaacctcctcagatcttgaaaagctgaaattgttcagtatcaaagaatggatggcatggtattgttctttgacagtgtcatcatattttttctccctgatttagcatttcttatttgaagaatttgctcatcttatttcaatgcacaaataacattttcagttgctcttctttgtaaggtctttttctacattgtaatttgatgggaaaaaaattatcttgcattctcccatatctagtgagattcatataggatattcctttattcaatactatttcaaaagaaagagacaagttgtcatagtgtttttatagttacatgactttaattatgtcatctttaaagttgtcttcgtttcatttgacactactcttccctctctaaattctttcatattggctgcatttttcctttgagcttcattttctcttgtttaattattgttcctctggaattatttttggaaaaaccatatctttagtagcaaccacttgtaatgtcatcttgttcacttaccttgtgtaaactctaaggaggtctagccgcttaaacaactttcatcagaagctctctggccaatacatcaaaagcaggagataaaacaatttgtattatcttttctcttgaataaaaaagagagttcatttttttcatctttcctggaaagtctggtcttgtctacctatcatgtctgtgcctgtgctcatgtcatgatgttttagacacatttatgtcttgtggtgttggcgtaggcatgtttactactcttgttgtgtgtgcctgattgacccaaatacaattgctattatgtgtaatatgactcttattgaacctttttacagttaattttgttttgtgttagtcatcaaaaaaaaaaaaaaaacttatgtttcgtgttgcaatttttgtttttttaaagagaggagtagcatttcaaagatctgaaaccttaattgttgtactagcgaacaactgcatttgatcctagatttttggtactagtgattctatcatgtatggatcttataattatacttgatagtttttctttttctattctcattattattattatttgtattgatatgttttctatttcattgtcagcaaggggtcggatggacctttatttttggggcttattgtttgtttgtatgcttttcttcttttgtatatcttcaaattttagactagaaagaatctgtcttctatggttcatgtcagc

SEQ ID NO: 222160 - DNA, 2629 bp, Cannabis indica
tagctagactataagtactcattagatatgttcctaatatattagagtagatacgtttgtcttgatgaagaatctggattactttcaatacgatagctttaggcagagagaatatttcattatttgctcgaggatccaaaataaagtgttaatggttggatctggacttgagtttttaatttttttactgctgctattttctcatatgtgttcatatatctaacttttatgttctttttgcagaaaaacctcaaaccatccagatggacattcttaatgaattcctaggaaacatcgccattcagattgaggaagtcagggaggctgccaagctggccaagggaaaaagtaagtctggaacatctttccggacacgaagcaaggaattagcaccctcagtcaaggtgtcggaggctgctctagatgctcaactcttgaaagttgttccaagatctcaaattcaagaagttgcggtggaagctcatgctctttaagtggaacctttgcagcaggttccacttactattcaacaagtcattactgttgaagaagaagaaatagaatatagcgaggggatggtcttccatacgaagaggcctagattatatattgacaaagaaggcaaaaagctaaaggctgaggttgtcttgcaactagttcaacgccgaaaaaataatgaaagagaagaggtcaagtggagagagactgagtagaaggaagctaagaagaaggatgcaaagaggaagaagccaaaacaaagaaagagcttccgtattaacaaagatgtttatgatcccaaatctcgaggtgctagacctagttttaggccacaccttcaaaatccttccataaagctcacacttcctctgcttcctccattccactataacttttccagtctgaccactagaattactggaagaaaactgtgtccagctcgaggagtcaacttaccttttttggaagtgatttgaagacgagtcaacttcaatttatcagagaactaatgtaattgatttcatagaaaagtttgaattgtcttagataactctagatgttgttatccatcctcccacaattgatagtgcaacggtcttggagacaatcaaatctagggtcagaagtgatatggcttcgttcgtggtggacttgttggagcaaactggcgacacctattgtcagctaggtgcagaaaagtgggacacgacagctagtcaagatccagccttccttggttactcttcgtcaacaacttgttggggttagtattcttactcacatttaaaaatgatttttcttaacacttgtacttgtgcttgattgtatttaatttctttcatggaaattatttacagaaagatgctcagaagcagtagctaagatgtctttggagctagagattattaaggttgaacaagatgcctcgaaccagaagagagagaaagccttgactaaactgaatagagcacaagcccaatcgaaggatctggtggagcatcaggttaaagaaaggttagagttggcaataaacagtgttgtatcaacttacaaggatgaaatacagaagctaaaagagcgcgaagatgattaccatcaagccaaggctctgctaatctattggaggtccgtgaggaaagctcaaggctaaaaattcaaaaagttgagtgtaagaaaaaaaaattctactcttgaggtggaaagcttgaaggaggacatcattgataaaacccttaaaatccacaactggataggaggtaaatttgctgactagcgtcaagaattttgttgtttaagctcaacaagagatctctgccaagcttactatggtggaagccaacttggcaaaagctgaactgaaagtggctgcaaagctggaagccaagaaaatagtgtaagcgaagttgggtgtcaggaagaaagtagaagaagagcttaaggcagccaaagaacaagctaaggagaagctggctacaattgtggcccagtgagaaaaggaattggctagttcgttagtagctattattcacttataaaaacttgtgctgatgaggctgaagagtctgagtcagaagctaaccttccaactgaaaagcccattgcaaaaccttttcttcctacttccaacacagatctgagtaccagaacttctatgcatgttgacgcttccatccatctatgagtggccttatcttttcctttatttattttttttattttgggggacaagggtctctccttttattaatgcggagacagtatttttccctagccacggggctttctagtatgtaaatatttttactctcacatccttgagatctgaacaactttatttatcatacatctttgttctaatcaattaagtattttaaaacttgaatgaatttttatttgttaatttagtttactttcggactccctaaggttccggttctaatggcttgaatcttaggatttcaacttttacacttagacttttatcttaggtttcttgtgaattgtttcactttcgggttccctagagtcctggttccaaaggccaccttgagatttcaacaactttattttaaccttacactgaaaagctttacataaattacttacttccagttccttgaggtttcagttc

SEQ ID NO: 222161 - DNA, 3392 bp, Cannabis indica
ctctctctctctctacaaagtcatcgacacacacacacccttaccggagcaccctttaattgtcggagtcttagcttgacaaccaagtgtgtaggagcaacccaaactccctaccaacatcatttttgaaaaaaaaatgagcatgtaatttaattaataattattgttgaattaagttgtatttaagttgaaatgaatgatctatatcattcttttattttggttgtcttgttcctgaaactcgagctgctaaaattctgtgttttctagtttttttttatcgtattttagcaataatttacgatttctagcgatataacgcgacattagcgtacggtgaaggttagggatgacttttaacgatattttctgacataaagcgactaagtttacagcatgtgccaacttatgcttactatggacgatttttgcgatgtctgtcgacattatttgtgacatatgtcgatattttagacttagagtattgtgttggtttagtgggaagaattttatcgacattttagcgatatatatcgacatagtttttattaactaatgttttcccctttttttccagattcaaatgtattttgtcgacatgttagcgacatacgtttaattaataagcaactttgatgttctgcagaatttagcgttatctgacgatgctattaacgatgtctgatgacaacatgttgttatggaacatgtcgtcaaatatcgcatagcatatccctatatgtcgctagttgtcataatgcgtaaaaccataacaacaaatatcgtgaaatattgtgagacgtcgcacaattgatacaaactgataaaaatggacaaaccatagacaccattggggacgatatcgctaaatatcattatcattgtcgacaaaagtcgataaatacaaaaaaataatggaatcgaaccgctaccatcaaaattcaagcccaaacacaaaaaatcaacttaaaattgaacaaatatccttaatctcaaccataatcaacaaaaccaacacaaaatttcaatacaaaacttaaaaattggaagaatcactcgtgggtcgtcttgggtgcttctcgtgggtcatcgtgagctgtcatggtcgtgggtcgtcttaatcctaggcggcggtccgagctcgcgagaagagagagggtcggggatttgatgcttctcgtggattttgatgctgggaatttttggggttaagagagagagagggaggggggaagttagatagaaagagtgggagaagagggtgtgttgaattgtaagggtaattttgggtttaaaagtgtttggagaatatttagtgtatttgtttacaggtagtatattaaaagaatggtctaaatttttaagtacgcttttccaaatttccttttagaaaacaattccctcccccccccctctaaaataaataaataaataatatcgtccttataaatttttaaaaaaaattcgaatagtttacagtgtcaaaaaaaaaagtttgatatttattgaacacaattgttaaattgaaatatcaagaactatattttcgataatgtacactatttaaaaaaatttaaaaatttataaggatgaatactataatataataaatactaccatgcaaaaaaaaaaaaaaaaaaaaaaaatattaaaaaaaaaatatttacagcatgtgtttgaaatgtagagattagagaaagatattataggaggttgtaattaacactcgtaacaattttaccctcataatttatgacaaagtcttttccaatttcatgttcccttgcatctttcaccaacttattaatttatttaattaactgatcaaaaaagcaataaataaaaatttcacatttttaaaatattaaaataaatatcaaacaaaatttcacatatactaaattaataacataaaaagttaactattattatataattatatgcttcatagtaaaaattagtgcttatagttagaaatagaccttaaataaataatttcttatttacagagattttatatattctagatgtattatatatgttatatataagcttttatgattttcatactgtatgtccggtaacagtagagcgcaacgatttggccattaaagacaagtaattatgcttgagtatcttagaattagcgaagcaatttcacatatactaaattaataacataaagatttaattattattatataattatatgattcatagtagaaattagtgtttatagtcagaaatagacttttaaaaaataatttctcatttacggagattttattgattctagatgtattatatatgtaatatatgagttttttatgatttttatactttatgtccggtaatagtagagcgtaatgatttggccattagagacacttaattatgattaggtatcttgaaattagcgaagcaagctaattagacatttggaatgttagaattattactattttacatttagattttaaagattatttaagtgtgatggtaaggggcattttggtatttcacctaagatagtggtatattgaatttaatgaaaattgtttgagttatctaagttattctagctgaattatgtttaaataggacaaaggacatttagtgttatctgcattaaactaaaaacaagaattcaaacttatctcactctttctctttcttcaccttcgtctaccatagaacctaagagaaatcagattttctcctccaattaaaaccaaaatcttgagtgtttagagcaagattttaagcatctaatgaagagattacccaaggtaagcttctactcctatttctctttgatttctaagtgataaagttatgtttggttatgcaattttggggtttaggttctgtatgagttggggatgcttaggtattgttttctagagttgttttagagttatttgtgttgttagttattggttttgtcgattataatatgaattgaacaaggtgtgagcttttaagctcaaacttagttctttaatgatgaaatggtattcaaagacttgttgagctgttttgcggttggaatatgttgtatatgttgtttttaggtgttccggtaagtttggtgtagtttggttttgatttggtggagttttgaggttttgtacaaattctgctgtgaaaatggcagaccatttctaggaaaatagtaacagtctaccatttttctaggcaaaatacccaaaacaatagcctaccgtttttaggaaatttttcccaaaatctcagttttttttttcttgatagttaaggtattgccatgctatctatcgatagggaacatcttagttttgagtttaagtcctcaaagtgaattagagagtcacttaccaattttacgtaaattgtgacttagggccttaaat

SEQ ID NO: 222162 - DNA, 1946 bp, Cannabis indica
ttttcatcgttttagaaattcatattaggatgttaaaaacatacttgttagtaaatattttctaacaacatcattgattgaggttttgaactatgagaaactgtggttgctgcagagtcatcatccatggcagctctgcattgcttgagccatttcgctccaatcatgtgatttttacgtaaaggcctcgatctcctccattccccatacgacttaattaactgacccctgccaaccacgaaacgtcgtggacaaaagttttcagaatgccccttaataccacaaacaaagtcagaaagtggggagatgttcatacttaaagttaatccagaattcaatcccttcagtattgcgaagcttcattcgtctctttagtgtcttcgtaacatccaaagtgacacgaacacgaagataatcccttcataagcccatgaaattcctttcatccgattcaataaattttccaatgtagtttccgttacttaacaaccgtagccattttaaaccccgatctaagatcatgtaattgcacccacatatcaacttcattcaaggtaaccaatcttgaatcctcccctcgctccaacctcttaaagattagcaaaaacttattaaaagtccaagggctacggttcatcatactttgaatatcaatctcatgataaaattgaaagagatatcgattagtatccagctttttaacaaacacccccttcctcggctgccacaacgacgccatcaagtgttgcatggcctcaaaatcaatttgccttttagtcaagaaccttccaacaatacatcatctgtcatcatagtcgttaccaactgtaacactagcatcataagataaaacaaccgcctcctcctcttcaagcggaatatgcactcctgtaccctcttccataatcgcacaagagcaaaccagaactccaaaaataagaaacaaataaaaccagcaagaatggttaaaaaaaacgagagagaaagactagaaaaccatgtcaatagacatgacaattattacttaaaaatatgctatgaagctgtattgatcaatgaaattgaaagctttacgcacataaaaagactgtgaaaactcaagaaataaagagaaactctaaaccattgattaccagtgggtgcacgggctgccaaaaataagggtttgattgattacgtcaaattcgttgtggaaatggtttaaaaataaatttagtttttggattgctctgcataaggaatacatatatttatacatatatatagatacccaaacctaaatgtcgccttttctttctaacaatctgaatcagcgagtttgagtcatagccatggcgagtaggattctgaagcgaagctctgactcgacttctttctcaattcctaagttgttgtcgtttgtcagcgactgatggagaagatgtcgttgtcgataacgagcaggggagaagcaatcgtctgcgattggggaggtaccgtcttcttcaatcgtcatccacaacaattttctttatgtatatttgttaattatcaaaaattactgtcaaattaataaattattatattaaaaattttaatttatatctatgattaattaaataaaaatttaaatatgaaaagctttaattatcattatttatttatttataattatatatacaatagttttttttacacaacttttaaatctgaacgtttgttcggtatatatataaattagtaaacatctcgcacttcgcagtggatatataaaatattttaataatatagataaaaaataaattgtatattttaattaataataattacttaataaaattatactaaaattttaactttactattaaaaattttgtgacataaatacttaaaatattaaatttgttactaataaatactgaaattcgaaaaaatagtaacataaatcttcatttatggtttaattt

SEQ ID NO: 222163 - DNA, 4504 bp, Cannabis indica
gttacaccaagcttgtctataagaaactgaaaacgagaatgagacaatccttttgtgaagcaatctgcagtttggtctgatgatggcacatattgaatgttgagctttttctgcaagactctatctcgaacaaaatggaggtctagttcaacatgctttgttctagcatgataaactgggtttgttgcaagtgcacttgcactcaaattatcacaccatatcactgaggttgtaggtagaggaaacttaatctcattcagcagagattcaatccaaataatctctgctgtaacatgtgcaagcaccctatactcggactctgtgcttgatcttgagaccacagattgttttttggatgaccaggacacaagtgtgtctccaaggtacacacagtaacctcccactgacttcctgtcatctggacagcatgcccagtcagcgtctgagtacccagttatactcagattgttgctgtgttgtatgtgcaacccatggtgttgtgtccctttcaagtaccttagaatcctttttgcagcactgagatgtgttgttgtgggacacttcaaaaactggcttagcttatttacagcataagctatatctggtctggtgtgcacaaggtattgcaggcctccaattagactcctgtagtgagttggattatccagaacagttccatcgactatagaaagaggcttaccagcaaccattggagttggacagggttttgtattcaacatgttgaatttattcaacaactcagcaacatactttccttgagtgagatacatccctgtactgtctctgtaaacttcaatacccagaaagtaattcaaggctccaagatcttttagagagaatgtttgatttaacttgacaacaaacctctgaagttcagtagcattgttacctgtgatgataatatcatcaacatacacaagagccataataatgaactttttggttctgagtatgaagaatgatgtatctgcctttgagtgatggaaatcccacttaatcagagtctgtttcagcctatcaaaccaggctcttggtgcctgcttcaaaccatatagggacttttggagtttgcacacatgattaggtcttttagggtctacaaagccttctggttgtgtcatgtaaacagcctcttcaagtttcccattcaagaaggcattattgatgtcaagttgcctaacttcccagttgtttgtgacagcaattgtgagaacaattctaattgtagaggggtttgattactggactaaaagtctctccaaaatccaagccaggtctttgatgaaatcccttagctacaaggcgagccttgagcctttgtagagatccatcagcattgtacttttctttgaacacccatttgttgccaactacattgtattctggtgaaggtggaaccagaatccatgttttgtttttaaccagtgccacattttcatctgacatagcttttgtccagcccttatgtttcaaagcttcagcaacagagataggttcacctacactgtcttcccattgagttttgctcaggtaaatttttggtttgaaaacacctgatttcgatcttgttgtcatgtgatgacccacctgtggcattgtttcaactgtaggttcttgattttgatcagtataatgttgctgagaattaaattgttcaccttgactgtccaagacagtagtgttggcaggatcaatgtttaaatcgacaaaaagatgtccagtaagatctacctgacttgtgtgtgatgagtcatgttcctcttctggtgttgatgcagtagaagcttgtggagtgcttataccagtaggtggttctgaattttgagggacatcaggtgggctatcttttgtctgagactgaaaacttggtaaagtgaaccaggtaactggtgttgtgacattaacaggttgttctttctgatgtgtattgaggaagccatttttaaatgggaattcattctcattaaaaataacattcctggatatgtacaaacgacctgttgaacttaaacacttatatcctttgtgatgttcactatagcctagattgacacatttagttgagtgaaactgaaatttatggttttggtatggccttagacagggataacatgctgtaccaaaggtctttaaaaaattatagtcaggtttctttgcatacagcacttcacagggagattttccatttaacacaggagtaggcagtcggtttatgaggtacacagaggtttgaaaagcatcaacccagtaccttaatggcatattggcttgagcaagaagtgtcaagcccatttccacaatatgtctgtgctttctttcagcacgaccattttgtgcagaagtatggggacaaggatgattaaaggctatgccacattcattaacaaggttagcaaaagcctgatattctcctccccaatcagacctgagttgtttaatcttagtgtcaaattgattttcagctaaagctttaaattgaatgaaagcacctaaagcatcagacttgtttttcataggatataaccatgtatatctgctatgatcatcaacaaaatgtatgtaataactgagattagtgttggatttaataggtgctggaccccagacatcagagtgtattaactctaatggtgctttagctctgctatttgaatttttaaaaggaagagagtgagacttccaaactgacaagcttcacaaaactgctgtttttcattcattgaaaactttacatgtgcattgtgtagcacttgactcaagactttgggagatgggtggcctaatctcctatgccacacatctttttggatacagaagtttttagagctactgacattagacactccaacagaaggactcaaaacagtattaacagactcgacagtagactggacattttgtgcaacagcacttagggcacttggagtaaaactggaagttgtatgtggactttggaactggtacaagccatccttaagcttcccctgcagcaccacctgtttgtttccatgtccttcacaaagcacaagtcagaatagaactcaatgtacactttattatcagaagtcaatttagaaacactgatcaagttcttagttatttgagggacatgtagcatgtttttcagaattaaatccttcccatcactagaatgcaaataaccagtacccacattgtcaattgtgagctgactaccatcaccaacaataagtttttcattacctccataggtggatttgttgctgagattgtctgcatcagtggtgatatgattggtagctccactgtcagcataccatccctcatgatcgactgtttctggtgtggctatgaatgctgcagggtctttcttctcttgtccagatcctccttgtccagtgtttggtgttgaccccatgtaagtctcatcatatctattgtagcaatgagctgcagaatgaccatatttaccacatacttggcaggttggttttgaattcctgcctccaccacctctgcctcttcctccacggccagcatagtttcctcttccatttgatgaataacctctgcctccatagttctgattgttggagaagcctctcccacgactgttgttgttattgttgctgttctgcttttgtgaaagaagagctgagggtgatgatgtatttcctgagttttgattctttgatgagccaattcctcctaacctttcgagtttgctgtcaaaactcaacaaggtttcttgcagttcctgccatgtaacaggtgttagattatttttggcctcaatgagagccacaatggtgatgtattcaacatcaagaccactcagaacatttgaaaccagatgactctctgggtacgggtctcctgctaatgctagctgatctgaccaggatctcttctgtctcaggtattcagccattgtagttgaacccttcctggttgtttgaagcattgttctcagatcatccattttagctcgtgaatgagctccatagaggttttctaaggatgtccacaaggatctagcagtagcacatcccattacctctgtggctatggcttctgtcatgaaaccatagagccaccccataagcaattggtcatacacaacccattgctcatattcaggattcacttgaaccccaaagccaggttgactgtctccagctgcaggacctgctggaatatactcaggaggggcatttttcagcccattgatgaaaccatctaatctatggcctctgattatggtggataccatagttttccacaacacataattatttctatcaagttttagagcaaaaggctgagagagtgtgttaccaaacggtgaagtcgagaatccaccagtgctgaaatgaaaaccagaggaatgggctccattaacagctggtggggagctggtctgattctgtgtccctggatctgcaacatttcctgatgaatgtgactgttgcctgtcgacatggctgcgtgagcagaacggtac

SEQ ID NO: 222164 - DNA, 3980 bp, Cannabis indica
gaaattaaataatgtaaatatagatgattaaagaatatgactcgtgatattaaagatgaaagaaattatttaaataagcaaaaaacatttatagagaattaatacaaaaaataaatacttaaataaaaatacatgtttgatcgtctaacttaatagtaagtgttatccgtgccttcggattaatgacatgtactttcaatgcccaaaagaagccaagacgtgcccaatcctgagcccaatcaagttaatgaatcaactacgacgaaatcagactatggttcctgatccagatgcaagcccaacgtacaagcatgataaagttggaccactttggtccaaaaaaggctgttctacctagaagatgaatggtctatcaggacgtatccagaaccctcatggggtaatccagaaagagcgaatgaagaggcacccggaaagcatcctatgtacatccctttgacacatgatcccacctaattagggactttgtcctctacatcagacctagagagtgcacacaccaccaaaaagaaaccatattttaaggaaatttacacaaattacctaaaatcatactttttttttatatgtttttatggtttttttatatactgttatttttttagaagtaaattgcagcaaaactctcaaaactcatattgtgttagcagttagccatttctatccaaatttctctattaaattccatgttagactatctacgtgtacactcttgtacacgtgttaaatttacattggtacacgcaaggtggctacccaagttaaacaatgacgaaagggatagtgaaccatgggatcgagaagcctattccaaggaaaactcagagttgaagactattagtcgagaggaggtccagaagccactagattggagtcaaacatctcaaaactccatggattctagcgaatgttaatacccgattccaatgatcttcaagcctggtccattgaggggttttattctcctagacctcctgagtttaactgtaccattcactgtccaaaacgatgttagaatctcaccaaaaaaataaattgaaggttttaggggccacaactttaactaaattgttctcctcgttggcgactcgagtcaggctgacttgcacgggtggatgtttcagagggtggtcgttctcttcgtgcaatgcgtgtctctagctgataatgggaagatcgacgtcgattctggagcataaaccacacgatagtgaaagggcaagaggagagagaaggttagggtatgaataattttgggggttaataataatttattagtttatgtttaataattatttatttatgttattgaaataagtatattagataggtcaatgtaaatctgacatgtgtataagagtgcacatgtgtatagtccaacatgacatttaatagataaatttggatgaaaatggctaactactaacacaacacgagtttgagttttgggggtttgccaccaaaatttggatttttaagatttattgttatcgaagtagaagtattgggagttatgccaataaatttaactttcaatcacaaccgaattttgtgggaacatattgtagctacagaacggtgcgaatctagccttgatcaaggaatgattctcactttgattttctttgagaagtttcccaatcttggttgattgtgatctatctagagagatactcagtggtcaaaaaaattacaaaagaaattaaatacttttggtaacaaaataaagtctaagcaaatatagaaataaataatttatttttgcttaaacttactattaggattgttaatccttctactcatagctgaaacaccaaagagacaacaatggagaaacagagaaagaagaaggagaaagagtaaagagaaagaagatctaaaagactagaaagaaagagagagaaaacaattgcattgattattattgttcaagtgttcagagtacaaaagaggatcacatttttatacaatagaacagagagagatgaaaggaagtaagcgagagtaaccaactaataaccttccaacaatcctgtaactaccaataacgacttttaactaacgctgaacagtgagtccctaatacttccctgcaaactcacaattggtagggcttgcaattgtgagtttggtacaaaatttggaaagctatggttggaaatagacttggtaaggccatctacaagttggtctgtagcagggacgtgcttaacttgagcttgtttgcggaggaatttttcacgaacaaagtaaagattaagttcaatatgtttggtgtgcgcatgtagaaccagattggcagcaagcagcacagtgctaaggttgtcagttgtcacaccaaacaattggaggctttgattgaggtatctgaagctcagtaaagagtgaatgcaaccaagcaagttcagatacagtattagctaagctttgatattcggcttctatacttgattgacttatagtttgttgcttttttacactgccaagtgattaaatttccacctagaaaaatggaaaaactagaagttgagcgccagtcatcaagatcggaggcccaatcaacgtcacaaaacgcaacaagatcagttgaggaggacttgtgtatgtgtaagccatagtctattgttccactgagataacgaaggattcatttgactgcttaccagtgcggttgtaatggggttttcatgaactgacaaactttattaacactgaatgcaagctttggtcgagtgattaacagatatcacagggcacccataatcgacctatacagttggggttgtcaaacggttcatggccatgaacagaaagctttaaaccactcaccatgggggttggaagtggtttggcatcctccatttgggatttgatgagaagatctctaatgtacttggattgtgacaaatgcagcccttgtggagtggtttgaacttcaatgccgagaaaatagcttaagtccccaagatccttgagagaaattgagaattcaatgagttgacaatactggcaatgaggttagagtcacttccagtgatgataatgtcgtctacatatactaatatgagagtagtagatgtagatgtgtggagaatgaataaagatctgtccgatttagatgaggagaatccaagggcaagaagactagtgtgcaacttgtcaaaccaagcccgaggggcttgtgtaaggccatataaggctttgtgtagtttgcacaccaaatgaggggtagaggtaagaacaaacctaggggtggttgcatatacacttcctcatgcaaatcaccgttgagaaacgcattgttaacatctagttgttttatatcccagtccctgagatgacaactctaatagtaatcgatttgactactggactaaaagtttcagttaagtcgaaaccgagttgttgatggaaccccttagcaacaagccgagctttaaacttggaggtacttccatcaggattctccttcttcctataaacccatttacaaccaattgccttttttccttctggtagaacaacatatgtccaagttttatttctctttacgccaccatttcatcaaacatggcacgattccaatgtgcactttggagagcttgcttgacacttaaaggctcttgagaaaccagataggctttcagctttctgatgccaaacttaccacgagtctccatctggtggaagttaatgggaatagtagcaggaatgttgccaatgggtctcagtgacagttggttgtataggaatttcaatcacagtagtgtttccaataacatcggcaggtggaacgacaatgtcaactgtagtgacagcaggagcatgacttgaggaggcataatttgtaggatctgttgagtgaagaatgttttgcattgcagaaactggttttgatgcagtagatggttgtaaagcccgcttagttaatttggaaattagcagttatttatgttaat

SEQ ID NO: 222165 - DNA, 2652 bp, Cannabis indica
ggagtagtttatataggatttgtctttttcattattattatgtctagttagaatttctcaagtgctagtttcggcttaggtgtagtcttctgaagttaggtctaaataatttttttttaggactttatactaatatatttctagtcaaacaaaattaagtaaggttgtttgatgtagtactgaatctttttaaaagttaaaaatgtcacaagttcaacactccacgccttaatttttttatttttattttgatttactttttttaaagaataactaaaatattattgttgggatttgaactacctagaaactgtgtaagatgaaaatataaaatgttattctataaagtcactttaatataattaaatacattttataatatctaattctataatcttcttgaaattttaaagtctggacaagctataaaaatatgtagtcgtctcacttcaattttctttctagcttcgcccctgatatgagataggggagttctatttgcgcttcacaaaataaaaagtatatcctaatatttaaaaaaaaattagtttaatataaattttaaaaaaatcacttttaataattttttatatttttttttctcattattattttgtgttaatttcaacacttcttttaattttattttcatatttttttaaattgtgtatgatttttttttctaataaatttcacatattttttttataatatttataatataatttatttttgcgtaatagatatattttttaagaaaataatttggaagaaaaataaaaaaaaaactaatatatataaaaatatatatttaatgtaaaataaaaattattgaaatgaggtttatttataagtttttgggtagtaaataaaatttctctatgagatagaaataacatagaaagtttaaatacacaaaattataaaattttaacttatgcaaggaaaaaaaaataactaacttagcaacttaatttaaaggagaattatgtttattgcataaaatataaataaatatgttatattttttaaaataataaagattattattgacttatttatgtcttaagtttttgcaagatttttaaaaaaatactataatattaagagtaaatttaacatgatacaatgtatgtaattcatatactaaccaccacgtgctacacgtgaaatttaactagtatatatataaaaaaaaacaaatcaattagaacttacatcaaagctcactaaactattcatgtaacaaaacttctaaaccaattactatcccttgtactaataatcatcttttagaacaaatttcaaactttaactttttaataatatagggaatagtccaaacaacctgatcctaataagccttgttcctcacttgtcaaatgaaataaattgcaaccaaataatatctcaaacgtgtgattacttagttaaaataatatagttgtaacaatttaatggcacaaaagacttattactgtaaatagttcttattagagtcatatgcataataattttaaattagtataaaatttactgtaaatatctcaataatttgagtgctaaaaaattaattactaaaaaaactttttttaggttccgctctcttcgtgattttcacttggctatgttgggtaaacaagcttagaggttcttgaccaagcctgattcattagtttctagagtgtacaaagctcggtactttaaaaatgagaactttctttcggtaaaacttggtgttatatttggggaagtcttgctgcggtaaaagatttgatttgtaagggggtgcgaaagggaattggtaatagagaggagactcttttatttgatgctccatggaccatggcttccgaatgggtcaatttcgagtgaaggtagtttggatcctagtttggctaatgaaaaggttagtagtctttttgtggtgtgtgagaaagcttgggatgttgatgtagtcaaagatttatttgatgaagaagtggcggttcttggtattcccctttttaatttggttaccaaggattactggtcttaggggtttgaatctctggcgagtatacagttaagggtttgaatctctggtcttgggggtttgaatctctggcaagtatacaggcaaaccgtgagggtagtgtggatggggaggttgtggtgttttagaataagttttggcaattaaatttcttccaaaggtataaaattgtgtatggagggcagttagtgggtgtcttcctacgagagttcatttgaagactaaacatgtggatgtctctttcttgtgtctaatttttcatgggacaggtgaatcaattttgcactgtttagttgcctgtgattttgcacagaattgttggcgggtagcgagtttggctatgattctagttgatgtagggtcgcttggggactggttttttcatttgttctcacgattgggtgaggaacaaattgttcaggcggtgatgttggtttgggtaatttggttcgcacgaaatcaactcttatggaagggtaagaaaagtcaggtggagttcgttgtcaatttcgctcgtatcattcttgatcagtggagaaaagctcaagaaagaagtttgtttccgtttgatacttggtatcttttggatgaggctgagttatggtttaaatcaggtt

SEQ ID NO: 222166 - DNA, 1330 bp, Cannabis indica
agattaatttcatcaatttttaagcatatatcagcctcacaattcttaatttttaattcaatatcaataatttcttgagattaatttatttcatttttgtcattaacctattttcaaaataaatctttatctacttttcatacataaccttgtaggattatgtcaaagaatcttcatccagtttggattcatcagattcagattctatagcaccatcaaaacttttattatccaaaatagtgttgtttaggcaaacaaaatttctatttttctgcaaaaaatgagacatgctagaaagaacagaggtttaagcaactaattcatcatcactagtttcataattactgtcgctcaaagtagcattcaaactattttttttctttttcaaaatattagcacatttagactttatgtgaccaaaaccatcacattatctacattgaacaactcttttattattatgtatacattttattgaagatgaattactttctaaaaatttagaaaagttctttttgagtccaatcgctttcaagtatttcttattaatatggtcaattcattatcttcctcatcatcacaacaaacattctcagaacttttgaaggcagactatttttatttttcttttactttattgagtttctccttatgtcaaatttgttgattaagctcaaatgtccgaagtgatcccatcaactccttaactttcattatgctaaagtctttagcctcctccattgccaaaatctttgcattaaatctgtcaggaagaactcgaactattttcctaactaaaacaaattcatcaagtttttcaccctaggcaaaaaattcattagcaatgtcagataatttttcataaaattcagaaagagtttcagaatcaaacattctatgatcattaaatctactttgtaacataataaactgagaacgctttacatctactatttcttcaaactgagtttcaagaattggccaagcttctcttgaagattcacatgagaagattaatttaataaaacctccaccaacacaattaaaaataacatgcaaaactttattattattgctagacagtatatcttcctcatttgaccattctaattcagattttaccttagtattaccttcatcatcttcttcaattggtggagaccaacccattagaatagattttcaagccttttcattttgagatttgatgagagtcttcatcctaaccttataataagggtaattagaatcatttagcaattatagaccaactatagatcttccttcaacaaagggaatatattgaaaaaaaatacaagaaaatgttaaa

SEQ ID NO: 222167 - DNA, 1111 bp, Cannabis indica
ctagcccgcactagtccttgtatatggtggaagaactagaagatcaatgtgagagtttgacgtcaccgttccaaagatacaatatacaaaaatactcaataatactttgataagcttcaagaggtaaattatcttttcatctattttactttcagatttaatgtatgtacatatgttgatcttggagatatagtgcgatgataatcagaaacttttgttctgctgcatacttgatttagtactataaaaccaataatttaatgttaataaatttaatcgtaatttttttttaaaaaaaataattatattttattattttgatatagacaaatagctataggacatgtgttatttttggtcaagttaaaaaatcttctaaattgagtaccaacagaagtgtttattttagaaatttaagtatttttgacgctatattttgaatttaggtacttatgaataataaactcaacaatatatatttataccacaaatacaactttaattatgggtcctctacctcacttacaagtaatgcaaataatggatctcacatttatatattttctaaaattatataatgcaatattaatttattccttatctttcaataaaaatattactcatttatgaatccataatctcaatgataacaaaataaaatataatatcaatacattacttaatttaattgatagtagccacaaaattgagcaataaatatgatagagaatcgctcttatttttctaaataaatttatttcatatttattatccattaaagatatttaggtgtaaatattattttaaattttgtgttttgcaaaaattactttctgttttgttaaataataaaatgaatttcgtattttttaaaattgtacaaataggaccctaaatttaatttttaacaaatttataatataatatttatattaaagcttctatgatatttatatatatttattttttttagtgtagcgtaatagtattttacaatcatatattagcttaatagcttaaaagtcctaaattcgaacccatgaccttttcttttttttcattcctctctcaccactaagctaactcactttatatatatttatttcatatt

SEQ ID NO: 222168 - DNA, 2651 bp, Cannabis indica
gaggctaacaaaaggatcaaaagtccaaaattagaagaactaaaccttgtgaaccacaaatcaaaggtgattggaaaaacactagcactgaacgaccggaaaaccagaattgaatgatcggaccaaaactgaccaatggagatgtcagcacgtgctctcatgcgcaggtgcgtgggagctgtcccagcggaggacgacggagcatggggcacactcacgaggcttctgggcaccaaattccggcgataggcagatcggcaggtgggcttcttctctggacaagctgtgtgaataaagtactacccaaaaaataaattttctgaaatggtgcccttaaagaaacaaaaccctaatttgtttgtaaacccaaagacaacctcaacgttgaaaacacaaaatttgaaacttgataccatgtagaaaatagtaaatcaaaattatctattttattcaatagaatagcatgtatttatatatcaaactagagaaactaagctaggaaactaagtaattacaattgcttctttttatttagttttttactttatctgataaatttctgatcgcttcttgttgcgtcacaggttcctcccctcttacttgatgtatctgcagatcattctgtacttgacagtaagcaatttgtttgtattgaatgcattatttttatattttgtaagaaaaaattattgacagacctctcttattttatttttttgcaaactctcaagtttaatactttttgacataaagaataagtttatatttccgtcccttgtttagctacaaaggaaaagtacatggattgaagatgaataaatctctgctgccactttcttatcgaaaagtttcttctcttttttttgtttaaaagtttgaaagttaagaagattgcttgtctctatggtataaatttgacaatttgataacttattcgtttaaacttaaaaacaaaaaaattaaaataaaacaaagctttatttattcatttatttatttgttatatctagtttgttccattttgcctcagtgtgtgctgcacccggttcgaaaacatttcaactccttgagattgtgcatcgttcaagcaaatcaggaacactgcctagtggactggttagtaatgctgagtttattttgtgttacattctttacgtaggattttgccttttgctgtaagtctcttatgtatattcttggataatcctttccttaccgtgtgatgcacttttcttcatcctgttactttgcatgagaactccctcttaatatattcttttgactaggttgtagcaaatgatcttgatgttgcaagatgccatctgcttattcaccaaaccaaaagaatgtgcaccgccaaccttattgtcacaaatcatgaagctcagcacttccctggctgccgtttaaacagaagtcattttaatgcatctgaaaatgtaatggaagactcaactattagccaacttatgttcgatcgtgtattatgtgatgttccttgtagtggagatggtacccttcgtaaggcacctgatatgtggagaaaatggtagaaatttcttgccacacccattttcttttataaagaaaatcttttaacttagtacttgcaatgattaatgatatctgctccctttgtttatgtacaggcatacaggactgggcaatgggcttcatagtctacaaattcagatagccatgcgaggtaccttcattggaaatagttgcttaatgctataagatttaggatatgtaggttgacgttcccctcccctcttttcaggcaattataaatgattggttgttctgaaaaaaatagtaaggacaagctcaagcaagttatatgcagtactattactgtatttaaacttaagttttgttttttttttgttttcggcctatctggcaaagtctagattaatttgcttccctggtttgatttaacttcctattaaatgaaaatgttgatgctgatttgaaaccaaattatgtatccggcagggattaggattgcttaattttcctggctggagagggctgctgatgctgcgtatgcacattggtctttctaacttaatttctgaaaaatttattagagcttaacttgtaagcaagagaaggcctgatgctaagctgatgatagatatggatagaatgcacttggaaactataggccttcccttctatgtttttaacttctaatgatgcgttagtttaatgtcttgcatattattcctggttgcatattataaatgtattataatgtccttatttgttgattataaaggtttatgtaaattattccctacaaatatgattattattgaaaagcattgatattaatgtactttcttgaacacccgaaaaatcctggtcatttagtcatatgtttacatagtatttttgttatgctttaaatgaaaataggagtttttgctcacaagattttatttattttcacctgtctgtgagccaaacttaacagaagatgggctgattaatgcaggtttaactttgcttaaagttggtgggagaatggtttactcaacatgttcaatgaatccaattgagaatgaggctgtggtttctgaggtaatattttgctttgtttatttcttttttgacataaaattgtggccttcttttcataa

SEQ ID NO: 222169 - DNA, 1342 bp, Cannabis indica
gtaaaaataccaatttgtcttgaaaaattttattttctcttttaattttgctacaaaatcaacaaatcattagtaacaaataataataaaatatttattaatcatcaaaataaggagacgtaaatgtttgagttaacataggggactttacactatggggagaaagttcaaaagggatcgtattgcaccagaaagtcttcaaagttcttgaagatgagaaattattggctgaaaagaaaccagaagataaagtaagatgaaggagatggcttattacacgatcatcatgtacctgtccaacagtgtgaagagaaagcttgttgcagaaaagaaagctaaaggaatttggagcaagcttgaagaactctatatgaagccattaattgctagcaagattaatttgctagaaaggttatatggttttagaataattttttttttctatggatgataatattggcaggcttaatgatattattgtaggattgggtaatataaatcacaaggttaatgaagaaagccagacaatcattttgttaatcaatcaagggtaggaacttgctccaagatccctcaaaatctatcacacatcctcgcagcatgtcttccaatatttgaatagttctctcagactgaccatctatctgagggtgaaaggctgtactaaatctcaacttggttcccatggctttctgtaaactctcctaaaacttcggagcaccatgaagtctcactatttctttaatgtacaattagccatactggtaaaagtattgacttggtgaatttgtctactatcacccatatggaatcatgtaacccaatagtcctaggtaaaccctactacaaagtccatggttatgtcttcccacttccactcaggtatcctcaaaggttgaagtaaacctgctagcctttggtgttcagccttcacttgctgacaggttaaacacttcgaaacatattcagcaatatcactcttcattcctggccaccaatgtaatgccttggtgtcatgatacatcttcgttgttcctgggtgtagggaatacaaagtagtatggaactcattaaggatttcctttctgatttggtcatttgtcagaacacaaattctatctttaaacctcaatagtccacttggagtcacagtgaaatcctttgtagcaccaatctcaactttctttctgagttcaatcaatttgagatcattttgttggccaatcttgatccttttcggtaaatcagactgcaatgtaatatttgccaacttcccgaatgttgggtttatgccctaaataaaactccatttcaatataatctattttattcaacatcaata

SEQ ID NO: 222170 - DNA, 2412 bp, Cannabis indica
tctacatagacaactcacatataaactattagagacaaatccaaactagtaaatttaaaaaaaattaaaaattatatatgaggtaatttgttatatctttagtataaaaaagggaaaatagagaaaagcaattgagtttttttatttttacattttaagacaatttttcttatattttatatttttacggaattccatataaaaacttataactgcaaccaacagagcaacctaaattacaactaaaatttatatagcaatccatataaaaattaccgaagaaaccatcttaaaaaacccaaatcgtaaaattttgaaaaaaaaaaattaaaaaataaatgcgaaaagtaatatgtacataatttaattaccagataaaacaggttgaatattattgatgaggatgcaagtggcaaggacaggagtaagctttttgacaagagtttcaacgtctgagtcgtctgaaaataaggttggatattcattgcgtgaggcgatcaatataattgacaaaaccaaaccaatgatgaaggagcttatcactgccaccactagtgagaattttgctgttcttgggtgagctgcccctaactcgtttgatactctaacactgcataaattaatatggtcaaaataagaaacatacatatcattgcaatattgtcatttgtgtagtactacaacagtactagtactactcatgatcaatggtcataataccttattgctgcatttatgcccaaagctaccatcactgtccaccccaatatgttcatgctgcaaattattttagtatagttagttcctttatcaattatagattagatttataaatttaatatatatactcttaatatttttatgatggcctatactcttaaataatcttaattaagtggagaagatgttaggcaccactggtacctagcaccttttagacgtatcgttttacgagtgattagcgatataatctataaaaattattatattaaattatataaaattcgatatttaattacaccaatagcgatattaagacgtaagaaggtacacgtgcccttttaacatttttccatattaatttgtatagctaatatttttatttatttacttaccagatggaaagggcatccacggaaatttttgcattcttaagatatccagcgaagagaataagtgccatgaagtaccaaacttccaaactgcccaagatttaataaaaattatatataataatataataaataaatgtcaatcaattaatatgtgttaataattaattatactacatggtctacatgcaagagaaatttaattattagtagatatgaagatatatagacgtatggacagaaagacaatcggtcaccatatatggaccaaagaaaatttaataagtctacagatcgatctctgtcttgtataatttaatactcgatcaaagatgaaataagtgactgtttagagatttatttatttatttatttattttgagatagtgtactgtttagagattcgaccaatattgtatatacgaaagtattaaatgaaataagtaattaataattaatgtttgatcctgttttttgacatattataattatctaattgcacactctattttataacaaatgagtttttcatatttgtatttttgttaaaaaagtaacttattaagacttgaaattgagtatggtaaaaatatttttttttaatattagtagatccaaaaaatctgatgaatcgtaaaaataaaaagaaaaaaaaaagacagtgatgcaaaattcagtaagaagtacaaattatcatcttaacaacatctttaatgcaaatgtaaataagtgatataaatataaaatatagttcaatttgttaaaaatatatctactctaatagtgtgctaaattattatacaaatatctcacataaaaagtaatctacatttgaatcacaataaatgctataattttatatttactattatgctatttttaatattttattattaaataaatttcataattattattattttattattaaattttatatttactttaaattttctatcaagatttacaattatgtattgaaacataataataaaagttgatacaaaaatatcacaaaataattatttgtaccaaatataataaatcaatattttttatatctttattgttctaattcccattcttacgatcgaggtttatattttgatgccttgaaatcttattagagtaggaatttttcagtgagaataatgttagtggatggaaatattctctttcattatatataatattatggactagcacctcgtcaaaaaaaaaaataatattatggactagcatttaattaaccaagagattatatagttaaatttaaataacttattaaatttcataatat

SEQ ID NO: 222171 - DNA, 1758 bp, Cannabis indica
aaatgggtgcatcggataaagctcaattcagatgattcagtcaaaaagctcaagtctaggcttgtagcaaaaggctacctccaaactccagggatcgatttcacagacacattcagtccggttgtcaaaccagcaactattcgattgctcctcaccattgctgtaacaaacaattggccaataaaccagctggatgttttgaatgcattcttaaatggcttactcaagaaaccgtgtacatgccccagcccctggctttgtagatgctgagaaaccaactcatgtatgcaagcttcacaaagcattatatggtctaaagcaagcaccacgtgcttggaatgatacactgaaacaaaccttatttcaaaaaggttcttttgcttctcgatcgaacacatccttgtttatccgaggctctacaaaagatttagtgcttcatgtgtatgtagatgatataatcatcacagggccaaacaacacagtcatcaacagtcttataaaggaattgaatcaagtgttttgtataaataatcttgggccattacactactttttggggggttgaaattgctcgaaatgccactggaatgtatttgtcccagacaaaatatatctctgatttactagttaaacttcatatggatggtgctaagctttctccgaatcccacaagctctacacacaagctatcactatctgagggagaaccatttatggatcaaacactatacagaagcacattgggggccttacaatacctgactttaactaggccgggcattgcattcattatcaacaagttaagtcaatttattcatgctccaacaacagtccattgggaagcatgtaaaatgttattcagataccttaaaggggcaattcatgagggacttctcatcagaccagcaccacaactctgtcttcaagcatactcagatgccgattgggcaagttgcccagatgaccgacaatccacgggtggctatgcaattttctttggaggaaacctggtgtcttggtctgcaagaaaacaacctgtagtggctagatcgagtacgaaaagtgaatttagagcccccgcaaacacagcagcagaattaaggtggctctgctctgttctcattgaactcaaagttcctctacccacaacaccaataatttgggttgacaacttaggtgcagcttcactagctgccaatccggtctttcacgctcgatcaaagcacatcaaaatcgacctacacttcattcgagaccaaatcttaacaaaacaagtcgaagtttatgtgccttcctgtgaccaaactgcagatatcctaacgaagccactgtcaactgatcgatttcattatctcaagcacaagcttcaagtgtgtccaacaccctttcgcttgaggggggatgatacaactactactgtacctaaactaactgtttagttagttaattagttaaaatagttattactgtttctttgtaactactttctattgcttttcgttcttgcttactcaatgtattctcccttatataaatgaaatcatttcctaaggctagttagcttttgttagtcttgaattgcaatctcatagattggattctattagattcttagcatagataagctcctacacatatagagaactatatcatatctcacctatagtgatctaaatatagtagaacctctatttaagaatactctattcaagaataacctctaatttgttataaaaaaatcaagtcccgatttgggcc

SEQ ID NO: 222172 - DNA, 4495 bp, Cannabis indica
tctctctctctctctcttacattgcttcgttcactttgacaatttcaattgacaagtcctggttgcacgatgatgaacagtgggaaagagtgggacaatgttgttgagtgaggaaggagaggttgatggggacgcttgacgggtgtggcatggtgcgactccagtttagcattgaagtagagagagagagtttgtaaacgagagaaaaaagcaaaaaagaaagtaaagaaaggaaaaaaaaaagaaagaaaaataatatttttttaataatttatttttattattttttattttttaaatatttatctacatgggctaataatattatgctatgtgtacattgtgtctagtccatgtgggtaatactctttgtacacatggacaacttatttgacaattgactatcaaagatggatagaaatgacaaaatgttagagccagtcaatggtaatattttttaaaggtgctagaaatattcacatcatttaaaaatataataatttattttatctttcttccacattattttttattctcttacttctaaaagcactctaatggtataataacattcttcaaaaatgctataattatgatatcatacattattatttgatatattatttattttaactatcaatattgtcacactatttatttacttttattattttttttttttgaaaaagatatagcatcaatgccatatagtggcatcattacaattttctatgataataccaaattatctccaatggtataatatccttgtattttttcaaagagcattgctattgggcaccagtagtgcccaatattttttataggtggtactttacgaatggttagcgatattttttaaaatataatttcttaaattatatgggacacaatacttcattacactaatagcggtatgacaccaaggaaggtactaagcaccattggtgtcttttggcattttttttttgccaaataagtattctacacaagcaaacattcttgctatcaaaatttaaattttaagagttaactactaatgaactaaaaatataaaggattatatggcaatttactaaaataaaaaagaagaccaatttacaaaacgtcagctcagtacacttggaaaccttacgtcaacatgagtcaaagcactttgttataatattataaatatatcctcactgttaaataatggaaagttaaaggacttgtaagcaatcattacgtatgcttacgcgtgtgggccccattggataatctcatccgtactactattgaactatccaccacactattcctatttcctacttattcttcttctctgaaaaaaaaaaaaatactgatttcattatttaataaaataaaaataaataaaatcactatttagtcatttcttctactaccgagttatccctttccttgactcactctgtactgagtcgcctcgcttctctttcttctctccacctccaatggctttggcttccaccactcctgttaccaaatcccttctcaacaatcaaaatcccaatccaccactctcccccaagttcaatctcaatctccattctcatcttcctcgcctccccaatcgccgaaaacccatctccgccgtacacgccgctgaaccttcgaagccatcaaaatcgacgtctcagacgacttcgaatccctccaaatcatggactatcgacagctggaagaataagaaggcaatccagctacctgagtacccggatcgggccgaactcgattcggtgctcaaaacccttgagtctttcccgccgattgtcttcgctggggaggcaaggagcctagaggagaagcttggccaggccgccatggggaaagcgtttctgcttcagggtggggattgtgctgagagcttcaaggaattcaatgctaataacattcgggatactttcagggttctgcttcagatgggcgttgtgcttatgttcggaggccaaatgcccattgtcaaggtcttcaattttcctttttatttttattttttattattattttgtctaattcatttttatatgtatacatacacacacattcttataatattatatgcatgtattcaaaagaattctttttaagaattgtgggcttggttgtggagttttcaaaatttattcctttagattatagttggtaagaattatggtgtttgaaactggtttgaatgattgttatgttaagagttctattttttttgttaattgtttcatttttctgaaatgcaaatgatgatgtttttatgaaggttggaagaatggcgggtcagtttgccaagcccagatcagattcatttgaggatagggatggagtgaagcttcctagttacagaggtgacaatgtgaatggtgatgcatttgatgaaaaatcgagaattccagaccctaatcgaatgattagagcctatacacaatctgctgcaactttgaatcttttgagggcatttgctactggaggttatgctgctatgcagagagtgacccactggaatctagatttcactgatcacagtgagcagggggataggtaaactttcattgttcttttcttcttacttgaaattttgaatgtttattttccataatgaataggattgaaggaatttgttgatatcgggttttcccagatttctcttggtttgtactacttttatcaagattcccgctattaattccatactacaatagagtttgtttttttgtaagcattctgcaatagagttttagctggtaactttgtatcatgttttatttgtgatgatttggtataatgttttataagtcatctccaaaggatctctacagtattttagctaacatagttagttacttttttgtgttactctctccaaccattctctaatattcaatatatatttatatatatatatatatatttttctcttttatccgattacttttattttttgttctatgtcaggttgttggtaataaagtaatattatctgtaataaaataataattttaaaaaattggtggctagctacagttgaagagtgaaaaaaatcaactttaaaatagctagtttgtggattgataagaaccaactgcaaatagactagttataatatatttttgttgtgaaactgaaatagctaaaaggatgacttatttcttatttgttatctcttcaacagattacctgtattgtaactattttaatttttactttcttaactctcagactttaaggctagtcaaatcttattttattgttattttgttatcaacctgacataaagcaaaatgtaaagcttattggataaagttaaatctgcattaattaaattaatcagttggtaataaaattcaacagcaatattaatataatatgtgttttctgaaaatagggagtgtgatgggagagggccacacaaaagttactagctagtttagctataaaaaaggagctattgtgatgctctaaagttaagaaataagtcataatttagcttttcaattaattaagttaataatatataatccgtacctttggagttgctcttaaatcatagtaattttttttctctattattaattataaaattacataattttgtaattttataaactaaaccaatttgcatcttctttttacatgcatttatgtttgttggtgtacttaaccaaacaccaccaagtaaatgtttgtaaagggatgaatagggttgttgtcaagatggggcgtatgtgtatcttcatcaatatttggcttgcaatagtttatgggtcatttaataatgcttttgatgtgcctcaacagataccgtgaactggctcatcgggttgatgaggcccttgggttcatggctgctgctggacttactcttgaccacccaataatgaccacaactgaattctggacatctcatgagtgcttgcttctgccttacgagcaagcacttactagggaagattctacttctgggctttactacgactgctctgctcacatggtgtgggttggagaacgcacccgccaactagacggtgcacatgttgaattcttgagaggagttgctaatccccttgggataaaggtatatgaatgtttttatactataagtagaattttatattaatttgcaagaaacaggaaattattttcattacagtttattttttatttaatttaatgtattgcattgaactttgtctattactataaaacttaattggacacaaattacttttgcgcacaagatttgtgtctttattagtgtgcttggttcgtaacttcatgttatatacatactattacctttcattttgtgacgttaaggctttaaaataaacacgaatgtgatgcaggtgagtgataagatggatccaaacgagcttgttaagcttgtggacattttgaaccccaataacaagccaggaagaataacagtgattgtgagaatgggagcagaaaatttgagagtaaagtttcctcatcttat

SEQ ID NO: 222173 - DNA, 1462 bp, Cannabis indica
atggtgggacctaaaggagtccataagaagccagtgtttagattctctaaccgggatcttgagtctcattcatgggctaaacgtaagaaacccatgggggaagagttcacaggtgagagcactgggaatgactgtattgctattgtggataatcatagggtcaaagatgtgtttggtgaaggtagtgctattgctgcttgtggtgatgatggggaggagggagagttgatatctccaccaaaaaagatgtgactcgaaggagagagttatttggaaaggcctgaaatgatccctcccatgggagagtatttcgaatccattgattcaggacctttgatggaatccgcccctgctaggctggatggacagcagaaagtgggtaagtcttgcatttcggatgcaaggattcttcacccttcggtggaagctgttggtatcgtaaagaattcggagtcggattttcagttggccgaggagacgggccttatcatgccccccaaatccccatgaaactactatcttggaactgtcggggcttggggcaagctcaggcagtatcatcccttcggggattggtcgtgaatgaaaatccggatgttctctttttgatggaaactaaggttatcttgtctagaatgaagttgggtgtggcgtcaaattgggttttgctaatgcgatcgtagtggaagctcgtggatcggcggggtctgtgtttatgctggaaacagggagttgaaattgagaacctcaatgcgaataaggatggtatcatggtgcgtttcgagaatactcttaattgcccggcttgggttgggtggtttgtctatggtccaccttttcgtggagatagagaagctttttgggaagatatcactctctaagttttgtccttcaatgaaccttggatgcttgtgggtgacttaaacgttttgctcaatcggtcggagaaatttggggggtcacaagtgggtgaagctgattgtcgactattttctgagttcttgttgaattctggcggagtgggtatagggtgtgttggaaatttctttacttggtctaataagagacaacttccgaaccttgttaaagagaggcttgatcgggtggttggctctactgattggatgattcggttccctaaggccggggtcaaagccttgccaatccgatcctcggatcatgcgcctctgatcttggacttgctttttgatcaagatagttttcataaaccttttagattcctggatgcttggaccagggaccccacttgtaaagaggttatccgggaggcttggaatttggttgtccacggggttaaaagcttgaagttaatgctcgccaaagcgaaatctggttccaaaaatcaagggagttgtggaatcgggagggggatcgcaacactcgtttcttccacgcctctacggttgttagaaggaaaaggaattggattggagcgatatcg

SEQ ID NO: 222174 - DNA, 2028 bp, Cannabis indica
accggtaacccgggcacactccgccgacccgacccgaatggaagcagctcgaagctctgcccgttaatatccacgcccattttatcaggctccaagaatctctcgggccgaaactcgtcgggtttgtcccacaccgatgggtctctacccaaactccaggtgttaacgaagaccgtagtgccttggcgaatgtcgtagccgctgacgtggcaatcgcgtaaagcgaagtgtggggcgagcaaaacagcaactgggtgttttctcatggtctctttgattatggagtcaatgtaagggaggtttgggatgtctctctcttcgacccacctttgttgtcctatgactctgtccagttcttcctttgctttttctatgatgtttggttgtcttatcacctctgacattgcccattccaccgtcgttgctgaagtgtctgttcctcccgctactaattcctatatatataatattacatgttcaacaaatttaggatttttgtttttttttatcaaaataaaaattttataaaagaaaattactcaaaacaaaaagttcatagtggaaactaataaataacaagaggttacatttcctccaaatatattatcacaacaattaaagagaaacagaaacaaattaatatcataacatattacagtttagtatgggattttacaaaattttacattcaataatgtgtcacaattttcaaccaatcacaaatttttttaaacacttcatataatacttgtccttatcattactcataaaaaatattataatatatcacgttcaaaaaaataaaatatggcgtgatccatgcacacgtattgatagttagcaggatattaattctctcatcttatttataagaaatatcttatgtgtacacacttttatatcttaattattaaacaaatgataaatgatctgaaaaagttgataattaaagaaataagggaatatttttgtttttttgctaaaacaacaacaagagaaatatcagtaaatatgttaacaagaagaagatctaagaagcaaattatggaataatatatataatatatatagtacatacctgaatgaatgccttgatactatcataactaagcttaacttcaaggtcaggggtctcaccgagctccaacagaaaatccaccatgtccttaggttcaaaattacccttttgtccctgctccattctatttgccttgtgctcatcaataacatggtcatgaaaccgatgaaactttttactcaaactattcattctcttcacatagccctgcaaatccaagaaactaagaaacggaatccagtccccaatgtttaacaccccattaagcaaaaacaactcatccaacatctcctgaaactcttccagtttcaccaacgacgtcgtttcaggtgttgacgacgccgattcgggctccttgaagtacttcttacccaaaacaattctacttataacgcttagagtcacacgagagagttgctctttaatgacaacgggtttacctgacaacgcaaatagtcgcgaaaggaactgacgcctttcctcgacacgaatgtactcataagactcgagtcttttcgagttgaaaagctcggtcaggaagattctacggccctgacgccagtgagggccgtatggagaccaagtgagttttgaatagttataccccgtgtactttccggcggctgttttgggtcttgaagcgaaaacgtggtcgtgtgttctaagaatgagtttagccatttccgccgaggacaccaccaccaccgggaaggacccgaacttgagttgcataatgggaccatatttttgggacagtttgtggagcgactggtgtgggagaggaccgattaggttcaggtttcctatgagaggccatggtttaggacctggcggagggtgtagttttggggatgagttaagtcgttttgagattaagatgataaaagaagctaaggttgccaaggtgagaagaaaagtccagaaagaataagcttccatctttaggcttg

SEQ ID NO: 222175 - DNA, 1717 bp, Cannabis indica
tcattttctctctcatcactttctcattcattattttctcacattattttctctctcatcacctctctcctcattttcagtccgggccatggccaaggccaagctgaggacgggagcaagatcgaggtccaaggccaagattcgggtctaggtccgagctagggtttggggccaggactagggacaaggttcgaggttgggactggggacagagttcgagatctaaggctgggaccggggtcaggcccggggtgttagttttatagtactaaatcaggtacgtagtagaataataattatttgattatcattgtatcatagtcccaagaatctccacttgtatatacattaaatcttaaaaataaattacatgaaaggaataaatacatcttgatgactatctggatattttcgaaacttctcgtaatttggatctaataaatcccacatcgtagtcttccaaatcaattcaccacacacatagagtagtgagagcaacttggataaagtgtataattggttcttgttgaatccaacacatgagcaagaactgttcttgagagaaaaataatcttccttttctttgtattattcaaaaatagtgtatcgaaaatagtgtatataaaagtgtgttctgatttctcaaattagacatctatttataatagtaaatttaataaattaaatcatatataattattcaaataagtatctataaccgaatcggttactaatatttctcatgagggaatctctcaactacttgagagaatatctcaactaacttcgagagaatatctcaactactttaagagaattaatcaactaaaaatatattcaactacttttcaaattaaaatatttatctaattgaattaattaataattaattaacccaaaaagataaaaccaataaagactcccactgtatggggcgcatgcacagtttctcgacacagcgcatgtggcgcctttgatgtcttgtttaagacaatgaatgtgtcttttgtcttgacaacttttgtctttttttctatttaaatttgaaaaattatttgttacaaaaataaaaaaattactattttgccaattcaaaatagatttttccaaacaacattatacaactatctatccttacccttgatagtgttcaaggtggcgatttggggaccatagacctataattttaggctccaataaactagattatttattgagtctcatcaactaaataatcttgtttattaattctatgattactctactataaatatgaaattgaagtcttagtaagtatagaagtatatttactgagttttattgcattgtctaatgatacaatcaattccaatgattagccctccttgtgttggttcgtaattagttttggtcaattaaccattttactcttctaattacttattactcctttagtagcactaattcactagtgaaagtataatttagttctcatctaaatttgtgcgcaactttctaatttcagaattaacacataaagaaaattgttaacgcagatttttgttaactaataaataagtcttttttgtaataaatgatttccataattaattaagtaataattaatattaataatagcaataaatgacaagaaggtttttacgtggttttaagttaattcttcatagttcacgagtccatcttattctgtgttgatcaattgtatacaaaatataat

SEQ ID NO: 222176 - DNA, 4047 bp, Cannabis indica
tgtgataagatgaaagctctcttacaatatactgaccagacaaggtttgttctagaaaatccaagaatttatatccttgtagctggaaaatttgggaaggggatgtgcttttgagttttgatactattggcttcaaataaataagggactgtgcacttgtcacaagactataaacaaattgcacacaattcaataagacatttatacacccaccctgtctatgcaagtcaacttttactttatataagatattcttaagtcaaattttaaagaagactaaactaatctgtcaaaattttattggaccttatatagcgcccgggcatgatattattatgaatgtcaatggtttaaggttttaaatatgttgcctagcaatagttttgatggattgtacttgaatttccatggtatccagatttagaaagagtcataagtgtgttgtcattctcatgtgaaatagtttcatttttgttgatgcatagtaccaatcttaagtcttattgtttcttatgtgttagtttctttcttgaagtaattttgtttattgattcgtttcatctggtgacagtgcacaagctcattccttgtatgaagtcctctgggggagatttcttgttggccttgggataggtgtaaacacggttctcgttccaatttatatctcagaggtactagtttatatcattcatgctgtatttactattaatcgcaagtttccaatttgcttttgtgtttgtgatgtgttatattttaatattcttggtaaatctaagtgatcttagcacttttctatgtttttgttttatattcataataattaattcagttcattatgtaaaaaaaaaaagatcgtcacaagtattgtgtagaattataaggggtgatgaaaagtaatcaatattctggaaaattgatcaacatggaattttattttatgccttgcttgtcaattattggtgtcaaaacattctgactgatagatttggtttgttgaatggcacttattgtgaaattattttacatgtagttctcttattaccaaagcaaagtgcgatgtatgttgagtttcctccttgttttgttttttgtcatattgatgcttgttattgcttcaaacttttatctacatactttaatcatttatctgatttaaacggtacacgttgcaggtagctccaacgaaatatcggggttcacttggcagtatatgtcaagttggaacgtgctttggtattatttcatcactatttctgggccttccctctgaaaatgatccacattggtgaggttctttcctttgtttttgtggttatctggattggacaatggatgatgagttgacattaaggattatttttcttttctccatttataatttaattgcatgtttagctatgtgtgctactgtgtctgagagaaaatttgataaataattttggaagcttcttaaaggaggtacgaggaaatcagtttttgaatcttcttggttttgtgaagtcatgtgccatgatgggtatatatttgagtgtataatatctagtgtagtctgtatagactttgcttcttaaagcatttgaattttggatttaccaaatgcaaacatttgtgagagaaattcagaaaattaaggtgacgtttggttgggtggaatgaaaacataggaataggaatagaaattgaaatggaatggaaataaaatttaaaatgcaataaaaagaattgaataaaaaaatcattaaatattttctcatgttacattggaatggtctttccttcaatttcaaaatagaatagtcattccaccaaaatggtagaaagggcattccattggaatgacattccaatactttaaaatgcaaccaaacaaaggaatggaataaaaattgtttccactccatttcattaccttcaaccaaacgccacctaatttcctacaagtttataagaaaccttttttattcttcccttttttataattgttatgaatattataaaatgatacttcatttatgttttaaaaaaaaaaaaccaaacacgaaaagattagaatcctttggaaatcatttctttcccattctcaattccaagatccaaatagaaggtacaggtgcttcaagtgtaatattgtgctcctattgcattgtaagaataattgtggtgttcctctattgattgttcggaataaatattttctttagttttcaaggcgcgttcatttctgaagatgggttggtagatgattcatcttctttcataggtggaggacactgctttactttgcaagtatccctggttttgttcttgtatttggcatgcagtttgctgttgatagtccccgctggctatgtaaagtaggtttcttcttgtaggtttcttctttaggcacttctactgtcataattttttatttattcctttttttgtttcttatttatggaaatgccatatgcatttgtctgtgcaggttgggagaaaggatgaagctaaaatcgttatccagaacctttggggagaatctgaagtggaaagagcaattagtgattttgaagcagttattaaagatgatgatgtgaacagcaattggttggaactcttagaagagccacattctagaggttgtgtaaaggtggttttcatatttgaagttttaaaatcacatctatgtttgtctttcattccttagaaggctggatatttgctatccaatctctcatggcagtgaaaattgaattatccatctcatctcaatttatttaacttcaagctaacttgatgtgacattcatactcacgtttgctcttgaatattcatgtgctcttgcagttgcggttattggagcttctctttttgtacttcaacagttttctggtataaacggagttctttacttttcatcattgacctttcaagatgttggaatttcaagtagcgcttctgcaagcttactggttggaattaccaattttacaggtttgagatttgaagcctgtgtagtatatatcatgattcctgaaaagacctctttacttttgtttgtttgtgtttgtcctcaggatccatgcttgtttcttacttagttgataagcaagggagacagaagctcttggttggaagctatggaggaatggtgagttgcattagtcacagagagagcgagagggaatttatattccatttgtttgcaaatgatttagttggaactctcttttgcttcttggcaggctgtttctatgttcctagtggccactgcaatcacttttccagttgaagaacaacttggtcacaatttatcaatactgggaactcttttgtaagttgttttactttaattttctttgtggagattagcttcctcccccttgagtgcaggggagtttgcaaatactgtgacataaagatgtgaagcctttgctgtgctgtattggccaattactctaattttctggagtagacgagcaagagaatgatgttttcatattaacatatttttgtaggtatatattctcctttgcattaggagcaggcccaattactggtctgatcataccagagcttagcagcaacagaacacgtgggaaggttatgggatttagtttttctgttcattgggtaagcccaaaacaattctatttcaccttatttttcctcttattaaataaaaatttgaactttcatgtcaagtgccaagaaattgttttctaactttacctacaaataatggctattattttattaggaaatctctgagaatactattatcgtaatctttgttcacttcaccactatgcttctaatgattcaagtttgagtttcaaatccaacttatattattcatttgattcagatttgtaattttttggtgggtctattttttctggatctggtggagaaatttggtgttgctcccgtgtatgctacttttggtggagtttccttgttggcagcaatatttgcaagttatttcatagtggaaacgaaaggccgctcccttgaagaaattgaaatgtccttaaaccccaacttgctgctagagatgatgagtaa

SEQ ID NO: 222177 - DNA, 2709 bp, Cannabis indica
atttatttattttgaaaaataaagtagaaaaattgtttgttggaaaatactatgccatttaaaatatatagtgttgatgatctcaaatatattttacttagataataattatctaatttaattttttttaaaacttcttatatagtttaacacacatttatacaatattattataagggtaagtatatttttgacattgtatttttgcaaaagtcattgattaaatttcttattattttgttaaataatgatatctgtatttttcaaaataatacaaagtaatatattaaaaaaaccttaataataacatgaacttaatgtattataatcatactagttatattttttttttttgcatagtttgtgttgttaaactcatggtactattttgaattatttcaaaaatacaagatcaaatttattatttaacaaagtaaaaaaattgaatggtaattatttataaaatacagatgtaaaatggtattaacactaattagaatgtggtgttatattttaacttaacacacaattaatcatgggagaagttgaagaataattctttttttttttctttgaaaagaaacgttcatttataagacattagacctcacggtcattacaacaaatgttcttaagaatagtagaaatgtcaatacaaccatataagttatgggtaaaagcccaattggccacattatgggccataaagttacaagatctagccgaataacaaaataaacaagaagcaaaggaagcagcgatactttttaaataataaagagtagttttcaatttcccatcggggatccaagccgttgagagtgttgatcactatctttgaatcgctttccaccaagataaaatggtgacctttctccttagcgacctcaagcgccaagcaaactgcagcagcttctccacacagggcatcagagaagtccattttggtcgtaaacacccaaattaacctgctcaggtgattcctagcaaccactgctatgcacatatgctcccctccaaccctaacgtcgcaattaattttgatccagtctggaaggggcgggttccaaacagcaatgtgagtcggggatgatatatgaataatggaatctctgcaatctgcataagagtgagaattaaaatcaatacattgtttcacattatccattctgttattgtgtaccttgtcattccggacacgtcaaatcgtgtcaacaacaatagaggcatagaggaaaacctcatcagtatttacattcctactttttagattccacaaaaatttcacccagtcccgcatgcgaattcctgttcctgaaacggggaaaataccccagggagaagaacgccataaatagaaagccaggttgcaatggaggaacaaatgctcggtggattcttcatcattaccacatattgggcatttactgccctcaatatagaatctaccttttttttatacattaactaaatttacttttaaataaaatttaattcaaatatttttttttttatgaatattgtactcaaataatcgtgacacactcatataactaagacataattttaaatataatatatttgtattctttgtaaacggatgtagatgaaaacaaccgctgaacacgaaaatatataatatgaatacaacgatgagaaattaatatatttttattatttattttatgatcaggatgtatttgtagcgggaacaaacacgtcttccattaccatggagtgggcacttgctgagctaataaacaacccaaaaatgatgaagaaagcaatggaagaaatcgataatgctgttggaaaaacaagactagtagaagaatcagacgttgccaaccttccttacattcaagctataattaaagaaacactaagacttcacccacctggcccaatattaatcagagaagcttctgaaacatgcagtattgatgattatgagattaaagaaaaaactcgactgctgatcaatgtttgggccattagcagggacccaaatcactgggaaagcccatttgagttcaagcctgaaagattttacagtgatgacaagaatgaaataagtaataatgctaagaatatggatgtaaggggacaacattttcaacttttgccatttgggagtggaagaagagggtgccctggaactactcttggattgcaagttgttcatacaagtttggcttcaataattcaatgctttgatttgaaaacagatggaattgttgacatgtctgagggacctggcctgaccctacctagggctcactccttggtttgtgtcctcaaggctaggcatagtcaattgccattataaatatatcctcatatcttctatctttatatttcatatatatatatatatatattaaagtttacactttttattataattattgtttgtttttttttttttgagtcttttattaaagtttagatatgtcacgtttgctgaattgtaactagaatcagaataatcataaatgaattgaattaaaatataaaataatcagaaataatattttattttgttgtttactaaactgaccggaaagaaaatcagaataattttattttgtttacataatcaagaaaggtaatcaatttgactcaatttgactaaattactattgtcagaacataaaattattttttatttatatatttttggatgacatatttatttttttttatttt

SEQ ID NO: 222178 - DNA, 1588 bp, Cannabis indica
attaagtattgagatttatatttttgaaaaataatttttaaagtatattactaattaattatggggtgctacttatggtgaaaaatatctttttgtaaaaattttataattgtacatttaaattaatttttttatatttttacggtattgtataaaaataatacgaaaataacaagaaaattatataaatgtaatagaaaaataacatacaaataatatcaaaacaataaatacaaataataaaaaattaataagagtataatataaaaatatattaaatgactgtatattttgtaaataaaactataaaaatcgtaaaaaaaaattaaaatttgtacaattttttttttttgtaatttttttttgtgagtttgtgaaataatctttgttttaaaaatatttattaatttatatatattaaaaaagatgcgtagctattagtagagttggacatctgtgatctaatatttttctcgtaatctaattcaatcaaattagtaattaaatgtagaaaattatcgtctggtccaatttaattagatttcaaaaatctaattcaaatttaatttttttataattagattggattgtatcatgtccactcttagttattggtgtcaagaggctcccaaatagtttttttgcattttgaatctttgatatatggtggaataactctgtaattattaaggtagtaattatacttattttaaaatacaatgtgtatttagatattaagtaatatttacatatgaattcttatttttatgtttggcaaatgagttaagaatgtgtttgataataaattatgtaattactagctaggtagtgtaattacaaccctagtaattacatatcactctattttaaaagtatagtaacatttaacggttagttatttacatagttctaaaaatataatttaggtattattaccgccaaaaattaaatttaagtatttatttacactgagagttaaacttaaatatttatgacgcaaattattctaaaattaattgtaatttttttttaaaaaaaaaaagttaataatctttatcataaaaagataaaaaaaaaaaaacaaaataaaagagataatgaatcaatccattctctaatcaaagtcagcatgcatggccattgagttttaatttaaaaagcatattatctgtattaacaatgtggaaaatttcattttggttaaaacattacaaaatttgaactttaaccaaattaatgatagaaaagaataccaagttccaactttttttttgtttaaaactaatgccaattgccaagtccaagttaaacactagtatttaatgaagaaaaataaaatgaaaaggcaataaataataattgtgtggcccatcttgaatagggtatcttttgatatagaaaaatgctaaaaggtattagtggtccttagtactcatttatgtgttaatatcgttattggtctaattaagtatcagatctcgtatattataatataataacttttaaagaatatcgctaactaatcacaatacgacgtctttaaaagttttaagcatcactaatgctcaatagtaatttaggtttgtat

SEQ ID NO: 222179 - DNA, 1534 bp, Cannabis indica
gacgccgggtatgttcattttaacggtctttcatttgctgttagttagcttttcgtttggttttgatctatgttttctaataatccatgacattgttaattcgtaatgtgtcattttgtaccaatgtttgttaattttaaacataaattagttgcctttatatgagatctttcgtattcaaaatttgtggtagacagtttctattctttgttgatgtgttctggtccatgaattctgtaagtactgctgctgtgtgtagcaacctggccgtgtagtctttcatttactggtcggcagcctgcaaaagctgctgaccaaccagtaggaaaatgcccggtcagccctttcctgcgtcttaagcgggatgatcagcttaacccttctgtgttgattatgttaagtagcgctaagctattgagttgtatctaaaacatgatgtatgattttaatttttcgttattgttttcattgatgctaaagtagaaatagaaagagttcttttggtaatttcagttcagtacaattttgctaggaaagttctctcaatatgcaatattgggttagggaaaataatatgctaagtgtaatgggtagactgttgttttgtgattacattgataatatatgccctttttttgttgttgtgtgcaggaggacactgctaggcccggcggtgcaccaggccaggctggacaacgcccagcaggaggagcaccagctgctgctcgcacttgaacaaagtgacatgcaatgtttttgttccttgagcatcttctcttttgaggctttagttattggatgttaccttaaaagtctttttttggttacctaattcagttggctatgagacttcaatgtattagtgtcttgtggatttttgcttcaattttggtagcgttcttgttattggttaatgattgaaattacaatttacaagttaattcaagaaattctccgtgccaaacctactcgtgtgcatttgttttcgtaacaaagtgattattttgtattcgatagttcggaatctatctaatgaaaaagaaggaatatattatatttgttttttcctgtaaaggtattcctcatgtattcttctctggtttgttagtcaattttttagttaaccagagtatgaaagagagtcgtttacctttaatatcgtcaatttccaataacacaatattttgtacgtgaacttctaataaaggtaaaacaagtggaaaaacgacgcatgtgaggtgttgtaaattgtaattctaacgtaaacgtgttggtagtagtagccagtactgcttctgccattatttcattccataatatatgttatgagcgtctttcataatccctaagggtatttgtgatgagcttgagaaaatgatgtgcaagttttggtgaaagtcttcttcaaaagatggtactgcatacattagatgaattggaatcgtatgagtatcccaaaagagcaaggtggtatgagattttgacatttgcatgattacaatattgttctgcttggtaaacaagtgtggagact

SEQ ID NO: 222180 - DNA, 1063 bp, Cannabis indica
tttgggtacaatacatataaaaagaggtatatttcaaataaatataaaattataggtaaatttaattaattgattaatgaaagaggtatttttcaacttaccccaaaaatttattggaggtggggattttcaatggggttcgcctatatcaataagtgtgttgtattggaacttatgtgggcttgggaaccaacagattgttcattcctaaaagaacattctgttcaaaagaagccttttttttttttctttttgcatgagacattatgtcataaagtgaagattaaagcttttgaccaagttttttgacaacttattaaacaatttataattagtaataaatgtgtttgtgtgatcatattttaatatagttggagtgttaaagagcttggtccaggagtcacttgtattcacgttgaaatgttacaataatgatatttttacagggatattttggcagtcttttctttgttttcaagtctcgatccccttttacaatggtgtttgaaccctatttatagaggaatgaatggagttttggatggaaattaggctcgttccctcttccagctataatcactaagggttgtttccttaagaagggaatttttctccattgtaggcttgttatctaggcccaatgtaggggtttagtgagacaagaccatacctgtctgtggctgatgggactgttatgggtgtgagctgtctgtctgtggttgggaaatgtgtgtgtcaaaaaaggaatggggagaatccctaagaatatttgcttttggtggtaaactaatttcgctgcttgtacgaaggggacatgtaacaatactatcactaggaatggtctgacacaagttgagaccacacgcgataaggggatccagacgtctcgattcttcccggaggctcaagcatattcaaatcatatccaagtgctctataggattaggatgaccttctgggagtctatcttcttcctggagctatatgttcttgagccccaagataattagtcattagtaacgtctaagctagaccccactggacacttgactgcctgctagga

SEQ ID NO: 222181 - DNA, 2357 bp, Cannabis indica
ttttaaatttcgtaaaatttctataagaatatacaatcctaaataaaaaaactaatgatgcattaattttaattatttttaacttcatacaaatgttttagaaaattataattacagtattaaaatataaatatattatttaagaaattattttgcaaatatataaaaataacaaaaaaaaaaaattgtaaaaatatggttgtacgaaattttaaatattatttttacgattttatttacagaaaataaagtcttttgaggtattttacacccgtataaaatataaaataggcacgtgtgtaatacattgtttgaacgtaattttcggcgtgaaacttttctaaattttttaaaattttacaagatgtcttaaataactataacgtatatgaccatgaaaaaaactttgactaaaaaattatttcgggtgctaaaacagataaaagtgtatcaatgtatccattttaagagggtgcattgtagaattttcgacgtgcgtttttcaaacttttaaattgacgtgagatatcaattacatattagacaagtactcctatatatatatgctattttagttttgttttttgttttgcaaaatctaattttcgcttttcataaatttgagagaaagggtagtaataattaaacaataatatatatatatatatacagcttaattaattattaattatatgcatagtacgtactaataatatttaagcgcgtacgaggagtcgaaagcaagttcaactttaaatatttgttgtatatatatagtgtaattatatattaataattataattttcctctctaataattgattaaaatggattaatattcagtaagacataataataataattatacaaatgcaagtgatggatgatttagtaaattgtatatatgtagtctacgacaagcgttttcaacacattattagggcccttataatcatagagagaatcctaaataaataatagttaaatctcatcatcatcatttttgttaatattaatttggtgaatattggccaatgcaattgcaacttggtatgttccatcttcacacccatcacatgcttattatatttataccgaatatataatcgaagattaattaattatttctttataaatatatatttatatatttatatatatcgatcacaatagatgagatgaggagcaagagccatgtggttggcagaagctgcattgatgcttatacatagtggtttttcatcaccattgattctcttattgctaattaaggtaccccatttaaccctgtaatatataaatatatatatatatttatatatatatatatcaactcgttatttgaccaatcaccaatgggaactcatcggatttttcttttttgtatataaattgactaaaggggggacatgcattataattcatctcatcatctaaatatatatatgtcaatgcatgtattaatatatatgaaaattaattgtacattttttgtaatccaactatacatatattaatgcattataataacaccgtcaataaggatttatattatagcattgcctgactataataaggaaatgcaaaatgttttgggcataaatatataatatatataaagaaaatgtcaaaatgtgatcatattattcaaataaatcatttaaattaattaggtaaattaataatagggggtgtatatgtataagtcgtggtatattaagtggtacatttataaggtacaataataatcagtcaaatatttgtataagtagagaaatgttaaaagggtatcagtggtgcctaacactcttttatgtgttaatatcgctattggtccaattataagtattgtgtcacatataatttaatataatagcttttagagaatatcgctagccaatcgcaacgcgacatatcgagaaggtgctagacaccactaatgcctaatagcaatacttgtataagtagctagagagatatccaattggcgccaaagacggaatttatatgatgagagaattagaaagcataataacatgggtacgtacgtacacttgatgtatcatatatataatatatatgattatattgacgacctcttaatgattggatcatgtgttgtgtgttattataattacatataataatatggatttaattagttatcacagcaaattctttcctttaattctggctttaattattattattatttaccttttgttttcccacttaatttaccaacttttagagagcaattaagtcaactttttattattcttacacatgacatccttttttatcggttttactctccctttaattttgtatatatatatatatatatatatatatat

SEQ ID NO: 222182 - DNA, 1561 bp, Cannabis indica
ccaggagtgtgcaagcagtcgaaattttccggtcgtccccagtataaaacagcccagtcgaacactgtatcgaaactctattgcacgatagagtgtcgtcgaaattaaacacccaaaaccgacgactactgctcgaaaatataaatatgtattatagtagtatgtaaatatatcgtataatttttcagagtgaaaaaagatatttttcttgcactactcagtcgcattatataggcaatgcactgaaagtagtaacgggaagaaatatgttactggaagggaacgttggaacagatcgtgggaacgatgcacaaaatcaggaaacctttgtttactgattaatcaaacacgtttaaaaaaaaatcgttttaattaattaaataaataataatttaataaataaatttttcccaaaaaataaggtgacaccacacccgcccgctcgactccaacatgttcagttgggcgaatattgtgtggacgaggtgggagggttagggtaagagggagggcttgagtgcacgaattacggaccaagcgagtcataagaggccaagcaacatttcgaccactgctattaaatgcaggttgaccattaccccttctaggcaaagggtcctcttcatccaagggccataggacgaagaagtatcccctcctacatattcagcttccaaaaatttaatacaacttaagtaagtatgtccaaggcgaacacacttatggcatatatcaggaagtttctcatatttcaaaaccacccataaatcatcaacaaggccagtaatcttcaaaagactgccacagatgaggggttgagaaacattaatagagatacagacacacatgaagggtccccacccttcctcaagagagtcatcatcaacctccaagaattctcacccaatgatgttagtcataaccttggttttgctaagaaaaggcagaccatgaacctatacccgaaagagaatgtgagtaaaatcagaaataacaagagtagacaaagcaggagcagaataaaagacaatcgactgattattgaaatgccaataactaattgatagttatctcatattgttttgttcatattttttttttattttcttttaatttttcctacaaaataattatttcagaaaaaattatatttttataattacaaaaaaaaaagataaaaattaaaattctcaatatttggaagactcttcttctctacaaaatattgggcggttacttcttgctagggatgcacattttccctatagagatcaccccgcagggacctgctcttaatgaggcagagattttccgtctaaatgaggaacggggtggggacggagaacatttatgtccccaaatattaaatggggcggggatggagataccactccccgccccaacaggcacccgtttaatttattaatattttatattttataatatgtgtttgtatttttttagtataattattgtcatttttataattttttaagttgtatttttgtataataattaatatattgaataataaatagtgtgtaatattttaatttttatg

SEQ ID NO: 222183 - DNA, 1300 bp, Cannabis indica
ttcttattcatcaaaaaaaaaaaggtgaccgtgccacgtgtcgtaactcttgccacgtcatcattgtccaaatttaagtaaacaccttcatgcatatagatatatttattcaattaatttttcatctaattacattttataaataaaataaaataaaattatttcaacttttgaacaaataaaatttagagaaaaaacgcttatatagatttacttaaaattatttcatttttaaaaatcatttgtaacttctgaaataaaaaagatatagaaatgcaaaatagaaaaaaataaatcttaaaaagaaatttaatctataaatatttaaataataataaaaatatttaatatttatttataaataaatttaatctaagtagatattattttttaaaaaatattacttctaaaaatataaataatatgctatatataaaaatatatatatatttttaagaaaatccttattggataaaatatatatatttttttttgaaaaatagcgtttataggaaataaaaaaaattatacctcacggtcattatataagatattttctgatatagaagatagctcgaccataccagtaacatttttagcaaaagtccacctagcaaaattatgagccgctaaattacaaagtctaaaaataagcaaaaaattacaactaaataaaagattagagagctttttacattgatggatataattatcaataccccaattagagcaatttcctttcagtgcattgataactgtctttgagtcactcttaatcataacaaaatggtgattcatcataatcgccatccccaaagataactgacatgctgcagtttctccaataagcgggtcaaagaaattaagcatgttggtagtcatccacaaaacagtccctgtgtaatccctagctaaagtcaccacgcacatgaaacaacttcccactttaacatcacaattgattttgacccaatcctttggaggaggggaccaaacaggagacacaacagccatcatcgaagaaaataaacacaactcgtaatctgtgtaacaagtagagatagaatcaatacaatgctgaatgttacccagagaattagtgtgtaccttgtcgttgtgggctttccaaatcgtatccaccataatcaaagcatatagaaacaatctgtcagtatccacccctttcgatctcaaattccaaagaaattttacccaatcccaaacacgagcaccagattccaggacatgcataacccccaaggggatgacctccatgttggaatttattttaccaggatct

SEQ ID NO: 222184 - DNA, 1608 bp, Cannabis indica
gacctcacctctgtgagatttactacttgattgcgtatacttgcgtagtgtttataaattatagcaacaatcttttccttttcaaataatggagtacctcaaaggaaagaattttatattattagagattgtgcgtcgcggtatgaaagcactttgagattctgatactataaaatctattaacgacttcatgcgattggtcgctactttagtgatgatcttgtagagaacattaaataatgcaacatgttgtttgttatcaaattagggttctttttctttggaatgagaactatatttgcattaccacaaccaacttcaaaatctttagtttgaaaaaagatgcgcacaatttcaaccacatccttgctaacaatggaccaacacttttgataaaatgtatgtgtcataccatcggggtacggactcttatcagggtgtatttggaagattgctttttgacatcctcttcagaaattggtttcaataattctcaattagcctcacttaaaattcagcttcttgcacagtttaccacttcatcactatccacattagaagctgaaaacaaattagaatagtaatccacaatactacctgagagaccattctccccatgaaaaaaatgtcactaatcatttttacctgttgaatatgattgtctcgtcttctatttgaagcagcaatgtgaaaaaaaaaaaaaaaaacaaaaaaatactattttggtcccctctttatctagaattatttgtagccttgcttccaaaatatctcatgctggtctagaacctcaaaaaatttctttctgcctgcactattttgctttgtcgaaacaaggggtcttttgttcttcaaggaactcataacagctttgcaactcttaattctctacttaaaattgctaatgatttcctttccccaactagctaaattaacgacataagaatttaatttatcaaaaataccaacaaaattttaaaaatctcagctctctttatcgatctgaagcacatcggctccttgagccatgcatttccaaaacgaaccacttcctgttggatcaccgactccaaaaattaaggtgaatgatcgaaggtagaggtttctaaattggtaagttttgaagaaagaaaagattgagcccaagaagaacttacccatagcacggtggagacacacatccacccaagcttctgtacctctgcttttctcccaaatgaacgggtggccgggaagctctaggttgactaactcacagtcggaaagggtttttctagaacccatcagtaagccaattcaagtaatatctctggcttgtcctcttttcatcatggctaataatattgttaatttaacctattacaaaccaaggcaagaaatttgtgttggccaaccaccatagaagatcctaagagctacgatgaagagcacagttaggttcactgtagaacctcgccaatcgccattgaataccatcttcgaactcaacaaccaaaaaaattaattctccacaaagtcaagtccaccaccacttaaaactaccctcaaagcccaaatacctttttagccactcaattcttgtttcattacatttggtttcacataaaa

SEQ ID NO: 222185 - DNA, 1752 bp, Cannabis indica
ggggatgataaagctagtcttttacctactgtttgttagctcattcttataactacttttctgttattagtaagttacatttccctttctgttttttccttcaattgttgtaagactcgtgcactgtaaatatataagagctttgtttctaagtcttgcatcttttgtaaacttagctttcgtctctctatgcttgtattgataagatatttcactttaatattacaactatgtatttattacactgtatgatatgtaacatctcttatgttacaaaaatatgtacactatatatattattcacttaataatatatatcttacaataatttttaatcacaatattatattattaatttaatatataaatattataacaaattttggtctaattttatttctagttcgtcatgtaaaaggacgggacattgtcaatttgtcattaatcgagttgataataaggtagttttgtaccaatgtaacaagtaagaaaatgattgtgagatttaataattttgtaatcctacttgagatggtgattaagaagtggctgtgtggggctgaacttgaaattatgatgaatgatgatcacatggatcaatctaattatgtggtaataatcaggtcacgtccccacttttttctaaaccaagaaagtttgattgtgggatccatctttggacaagtactcataattataccacaacaaattttgttggaaaaaaaataccaaccaaaatgacaatattttgtgatataacactgtgcccaccacactccaaaaaattaatatgataaataaaagggaatatactcttggtattttgtgttttgttgaaaaataaatttataacactgtattttcaatgatattcatatggtattttatattttaaaattatacaattttttataccctaaactcaaattagatatataatttttataaatttaacataattgccttcacaggttctcgtatcagcaagaactatacttgaccattggcgcaaagctcaagataagaataatttattatcattgtctctccaatacaatgataataaaattgaacaatggactaaacccgaagtaaacacggtcaagatcaacgttgatggaacctcttttgagaaagaaaatgcttacggttttgttgtggttgctcgtgattcatctgggcatcttgttgatctcacatccaaataccaagttggttcctatgcggctgaggtgatcaaagcacttggtgttaaggaggctcttagttggttaaaaggcaaggttggaataaagtcgaggtggagattgatagcatggttacagttcaagcaatttttagtaaacaacaaataacttctgtttttgggttggttattaatgattgtaaatttttattatcatctctataaaatgttagtcttcgttttattagacgatcagctaacttagtcgtccactttgtggctaggcggtctcagtttttatctgattgtagcattcatgggaatgttgtccctgatgatcttcaaacagttaaatttcaatgaagttaataatttcatgttaaaaaaaaaacctgccttcacatataattattgagaaattatattaatcaaatttaaattacaagtattaaatacacaccatttcaaatataagcatattacaaaataaataattttaataaaacaacaaagaaaatgggtaggagatgcaaaagaactttggccttgtgtggtgataacaaaag

SEQ ID NO: 222186 - DNA, 2221 bp, Cannabis indica
aatatgaacagataaatcagttttattataatatctttaaattagattattattaagttttattttgataaaaaattaatttagaattttatttgtacaattttaaaaaaatatagggtgttatttaataaatcaaaaggtttaattggtaattttttagggtttaaaatggtatttctttttactcttgttttaaggagatatctaaatttaaggcatcttactcattttaacaacacgaaagcatcagaccactattgggcttgacaaaaaaactaatttttttgtttaaaattcaaatctggtcattttcgattctatttctaaatcacatttacttatagataataaacattaatcataaaatttattttttgaaaatatgtcgatcgtgaaatcgttgggtccgcagtggtcattgggtttgtggtggttattgggtctatagtcatggtggtcgtagagagaagagacttatgttatgtgtgaccaatattgaatagtttagatttagaaataaaaattggtccaataaatatataattagttaaattttccatctcatctcaaatgtatacataattcaaactcaaattaaataatacaaaatactctttttttttccaaatacaaaacaattaactgctataaaccagttgtacaaagtatcataacttaaatgaaaagtaattttcgcttgtcatttatacctaatttgttatgtttattatttttttttctatctttttatattataaaaattaatttatgtaaatataatcaaacactttaatgagatttcaaataaaaatttcagtaaataaatatatttattttctagaattaaataaaataataaaaaaaaagtaattacttatagtttacatatagaaggtatactagtggtatactagtttctaaacattgtggtctttttaacaaattaataacaatttccttaaataaaacttgaaactcctactaaatattaaaaatatatatatatatatatatatatatttatatataagatgctactctcatcatttttatgttatttgtcactttcaattttatgcactaaaaatgtatgaaattcttttttcttttcacagggaccgaaagattggatctagtcataagaaaaatgtttggctaatatataactcatttcttggtctttcaccccctcagtcactatgagcgcccctatcagtgcaatgggatgtgtatttatctatctccttactcaaaatgggattaagtttgaaaaatagatcttagagtgtcaagggttgggtctagagggtctcttaacacctttttccttctcatcaaagctattttacaaaaacttgctatgttagggaagaatggaggaacaagcacacttggagagtgtagtaaaacagagagttgtatgtggcatttgagaagaataaatcgctttaagaaaaaaaatctattgattctctctaaattggttggacgaccatcggtgtgatgatttacttcacgagctaggtatctggttcaagtccatgatagcccaactacgacaaggaaaagaatagaagaagcatttgactccttcatgcatgctccacttggctcgggagtttatagctcagttggtagagctctgctcttgcagttggatcgttgcgattacaagttggttgtctaattttcaaggcgataatgatagtatcttgtacctcaaccagtggcttgctttttctaagtaatagggaagaggaccgaaacatgtcactaaaatactctactgggacaaagatagactgtcaagaatatacaagaagtagaaagggcagttgaccaaatctagtatagatcgtacatggacggtagttggagtcggcgactcttttagggttccctcatttgggatctttggggaaaaggatcaagttggcccttgcgaacagcttgatgcactatctcctttcaactctttgagcgaaatgtgacaaaagaaaggaaaatacatggaccgactccatcgtctccacctcgtaggaactatgagatcaccccaaggacgcctttagcatccaggttcgcggactgaccctagaaccctattcaataagtggaacgctttagctgtccccttttaggttgggtaataagggtcagagaaggacaatcacttattcttaaaattaccattcttaagacctgaaaaagggggggaagc

SEQ ID NO: 222187 - DNA, 3436 bp, Cannabis indica
tgccgggccatctctggataccttgaaaccttgaacgtgcccctcgaccattcttgtagttattagtctagatagaacatccgcagcaatgatgaaaagggccggggatagggggtctccctgtctgagtccacaggaaggtttgatggtaccttgaacagatccattgataagcagtcccatttgatgaatggaaatacacttctcaacccacttcaccaaattgagatggaaacccaaacctttcagcgtattaagaatgaatccccaatccatttatcatacgctttctccatgtccagctttatcatcatgaaccccttttttcctttctttcttctcatggagtgaacaatttctctagccacagctgtattttccgcaataaaacgcccatgagtaaaggccgactgagccggggagatgatggaaggcaaaagggtcttcaaacgcagcgccaagagcttagaaatgcacttgtaggcaacattacaaagagcaatgggcctgtagtcactaacattagaagggcagtccttcttcgggataagcaccaggtttgtgttgttgataaacgagggtagatctgcagtcctaaagaaataggtaaccatgttcacaaagtcctgtttgatcacgctccaatgttgaagatagaaccccaccgacataccatccgggcccggtgctttatcatgtcccatagatttaaggcaattaaggacttcggattccgctgggacttgaatcagcatatcgttagtttcttcttctataatgggattacatagaaaaagtttccccatagccgaaggagatgtgtgacgggtgaaagtgtgctgaaactttgaaatgaataactgcacaattgtcttcatgtcagtgacccattccccgctctcagttttcacagtttggatgtaattccgtctacgcctgatcgctgttgaagccatgaaaaattttgtgcagctgtccccatgtttaagccaagccacacgagatttctgtttccagaaaatctcctctctagtaagagcctccctaagattcgcccttgcatcccctaggacttccttctgaataatatccttagcctccaattgccccagagaagccttagcttcctcaacttgctgacgaacattccgaaattgggccttattccatttctgaaggtgattcttcgtcattttcagttttcggtaaagattgatcatcgggttggaatggagttcctcccgccaagcattgcggacaacccaaaaacatctcgggtctcttccccacatcaattcatacttaaactggggtcgaatacatctcgctcctccgatcgtattaaggatgattggtttatgatctgaagtaccaaccgataagagctcaacaattgcattcgggaataacactctccagtcagtggatgcaagagctctatcaagccgggcacgtttcacagaggagtttccttgtgttcttgatgtcttttgaaaccaggtaaatcttcccccctgacacccaagatcaatgaggcccgtccggttaaccattcttctaagatcgaaagagtaccttgccgaattctttctattaacatagttgatacattcatgatccgccaaagtaccattaagatcaccaaagaggaccaccggggtattgcaattcgagattatagtgccaattctagtccagaacaattccttacccgtaagagtaggagggccataaatgcccaaaaaattccatatcacacccggggggtcagattcaattgttccaaagatcacattcttgtcagcttcgagcactttgcatatcacccctgttttccaacttataccaaagccccccgataaacccgcaggagggatatagatgaaatgaataaaatggagccttctcattaacttttcaaacttttctttaactaaccttgtttcagataaaagtatcatttcgggattggattgacggagtacctctgtcaattgtcgaactgccgcagcattcccgagcccgcgacagttccaagcgaggatcttcatggggaatttggagacttttttgggcaagtctccatagccccgaaatgaaaatcctgatgcttgatggtctgagtatccacttctccatcttcaatcacttttggtacatgatccccactttccggcacattgatgatctcacactgagtatttttctcctttgatttctccacaatcacaaagtgattgtccaaatctatagttaagtcgattcccttggcattccagagatttcgataatggctaccatgacccttaagggccgacttcttgtttttcttcttgaggcttgttgaattaaccccaagcatctcaattgactccgaattcttatttctttttgcagaggtggagggagtcgaacatgtatcattaacttttcttggtcttcctcttttccttttttgtagttttccttcattggatccaggagaaaaagtagctaacttattcgtctcttccaaattctgagtattgagaccactagattgtgagtatgatatttcttcttcagcaacttcagttgggaggactccagggatcatgaaaaaaccatcagtggccttccttttcttaggcccacgttccacttcagggcacttaaaatcctcaatttgaagtattgggttaaataatgtgggctccctatgaaacttatcaatagttatggacccagttaatggttcaaaagccctggcccaacacactcttgatggccattctagaggttgggcttgcggcccaagaagggaatttatatactgacctatttgaaattggctttgcagggtgaaattctctcttacttcaacggctttatttcgtgtatctccaggagaggaaattaattccgtaggcgaggagaattgcagatcttgtacgcctttaccaggtaaattccttccttgattggtcaatgtactcttaccgtctgaatgctctgtagactgagtaccatgctcagcagaaggtgaagatggcacgcctggagatgtcactatcgactgaagagggcgtactgggatatctttttccacaaccaagtcggctgtattctcaaaaggggtaatttctccgattcccggtaagtggaccgccgggaaacggttcagcaccagttcttgagtttccggtctcttctccaccaacacctccacatgtcttctttttccaggtaattgccttttcagctctctacattccatagaatccgcctctttccatcgtcggtcgtttctcagcctactctgaatgacaggatctttcagagcttgttggttaaggatccactcactaaaccatctcggaagcgggagttggaatggtgatctttcaatagcgtcttcattcatccatgtgccgtacatagggaagaaggagccctt

SEQ ID NO: 222188 - DNA, 4428 bp, Cannabis indica
  modified_base (241)..(241): a, c, t, g, unknown or other
atataaatatataaattcatgacaaaattgtgagactagagcacacgtttagctttagcgggggttttttttttttttttttttttaatcttttttatcatattttttaaaaaaattaatttgaaaggactagctctttatattatttaataaatctttgaaaagaaaattaagaagtactattaatttcgtaccaattataattttttaataattttttatatttaaaattatataatanaatttttttatagcgatatttataataattataattaataggagatttaaaataaaataaaagggggcataatttacttttgtaaagtaggagcaaaaataaacttaaaaagaaaaaaaataactcatatgcaatctagtttaaatattatactaaatttaatattagactaattaggatctttaccctcaaactttaacatgtaccaaatcataccctgaacttttaagatcgttaaaaatgccatctgaactatcgagattgttagatttatgaacttttatataattttagtaaacaaagtctaacatggatgaaagttcaggatattatctagtatatgtcaaagttcgagaggtatgatttgatcgatttcaaagtttgtgagtatgatttagtacataaacaattactgatatagtaaaattaaaaattaaacaaaagtccttaaatctaataatctcaatagtttaggaagaatttttaacggtcagaaaagctcaagcgcatgatttggtacatgttaaatttatgggtaaaagtcataattagccttaatatgatgcttataaatattattttttattacaatgctatatattttttcttaattttatttttcaaaaaactgttccaccttgcttttatgtgagtccatctcttaaaaattattaaattttataaataatttagagtctaataaaaaaaattaaaaaacaatattgtagcatattttcggacataaaaattaattaaaaaattgtaataatatgtaaaaaaaagaagttataaaaaattaaggtaagactcatctaattttcattgataaattgtaatttattatttattttttttaaaaaaaaaactaaaaagagaaagaattgtttctttctcctccctccgtcgagagagtagtgagttgatttctctctcttccgccatagctaccttttatacattctctccatatattcattcattcaatctctctctctctctctctaatgtagtatttacctattttgcccttcttcgacacctagaaagagatccctcagatccattttcagggttttattatttccaaagcttttctcaaactccaaccctctcactccatttttctccaaaaaaaaaaaaaaaaaattcatccaactctcattttcgccatttttgcacactcagatccttcaattcaatctcgcattcttcttttcagcttaaattattgtactcacagtttttgcatcttcttccggtttagccccaattttttattttttttttccgatcccgttgactctcatttctagggtttattggaggaggagaaaaccaaattagggttttcgttggccatgttgggaaccggtttacagttcgggggtcgtggacgtggtgaagatcggttttataactctgctaaagcgcgtagagctcaacagaaccaacgcgccgaacaactacggcgagctcagagtgacgtcacgccatctccgtcttcttcttcttcttcttcggtcaaggaaactacggttcaaagggagcccgataaccatgttgaccgggttagctttggggaaccgcagaagccgattgcgatgccggttattgaacctgtctcgccgttgagtaatcttgagcggttcgttcagtcgatcacgccgtccgtacctactcaatacccttctaaggtcttgttcgaattggattcgactcagtttttggctttttttgtttctgtatttcatattttggtcttgataatgtttcttttggatcttttgttttcaaactaatattttgtgggttttttttttttgatatcagacgacgatgaaagggtggagtggtgaagttgaatcccggccattttttgtgttgggtgatctgtgggagtctttcaaggagtggagcgcttatggtgcaggagttcctctagtattgaatgacagtgattgtgtgattcagtactatgttccttacttatccggtattcaaatatatggagactctgccaagttatccgtaaagcaaaggtattaaccgtaccaccggtttagtttcaatttgagtttgccgtcttttttgcattcaatttaatcaattggaagcatttggtgtgtttttatttttagaaattggtccgtttgtggtgtatgtattggtgtaattttgtaactttggttctctggttttgtttgctaattggttctaatccatttattttttctttgggcttcaatggagaataaattcagagtatggggttcttcaattttgattatcggtactcttttactttgtgagttagtcatgttcaattcaacattccatgttccatatctgttcttatatgtgattttttagctgcgccaatatgatgtgtagatggggagctggtggtgtagctgtatttcttaattatgtgtagcaggaaccaggaagtgtgaaatctctgaataagtttgattggggccttgtttgctaaactacattgcttagttagagccctttttaaatagatgaaatcatagagtcaatgagattgggtttcattgctggtggtaggaagattgaatattttaattggggccttgatcattgaccaccttgctagtgtcttttcctcagcttgacttgtttttagactgagattcctctatggaaatttagtcaaaattgcatctcccctcctatcctattactctcatccttatgtagtatggagtacatttgttttatatttgatttactttctcatcctttattcatgcttgtgataggcggccagatgaggacagtgacagtgattttagagattcaagtagtgatggaagcagtgattgcgaaactgaaagattaaaatatatgcgggagcaacatagtcaacataatttgtctagtgatgtttccaggaggatagacagattatctttgagagaccatcctagttcgcttcaagatgatttttctagtgatgatggtgaatctgctatttctcagtcttgcttaatatttgagtatcttgaacgggaccctccatatagtcgtgtaccgttggctgataaggtaaggaaagctggaaatctttttgtatagatttagaaaattatgtatcactcctgcttgagctttaatttgttttattttcacagttagcagatcttgcatttcggcttcctgagctgaagtcgctaagaagttgtgatctcttaagatccagctggatttctgttgcctggtactgccagcactgttaaactctatacttgtgatgtttatatctggtcatctatctaattggtttgtgttgctggaattgatgtaggtatccaatatatagaattccaactgggccaactttaaaagatctggatgcttgctttctaacgtaccatcatcttcacacgcctatgggaggtaaactatgtttgaaattgatttgcttacacatttgaatgctccttttttttttgtagataccatgatatgtagaacaccattaactaggtcttttgcactagctgatttaattttgtgaatttttttatagatggtactttttgaccatctaatgttgtctcattccacactagtgcaatgatatttgagctcctttttgtagtcattattgatttttgaggggatttaattgcctattcggctgttcccatctttactatttttggcataaaaatcagaactgtttagctgtatagaggattctaggaataaaataatgtgtgtgcacatgcatgatgtatgagcctaacgggtttggccccatgacgtccggtgtttgattcttcgtgggtctttagcaattgtatctaaagatgatagggttaagtgggaggactggtgcccccattaaattataaatgagaaagaaattcatttattaaaggttttgttaacatttgtcttgggtggaaaaattgttagagggtggacagcttagagggtgcccaagtcataaagacttggccacagacataagtgatggtgtgcaactctgaacatatgaattgcaaaaggcaacacacactttgattttatctataagttgaacacatatcaataagaaactggcaataggtatccatttgtctaattatttggctagggtttgaaccacaagtcttctacacattacacaatagacaatctaaccacttctctgt

SEQ ID NO: 222189 - DNA, 2120 bp, Cannabis indica
atgactattattaaaagcaaatacaattgctaaacaatcaaatttaacaacgtaaatttcaaatactaacgagacaatccaattcacaatcatcacaattatcatacattctgcttatgaaattgaaaaatttgctgcaaaaaataaacaagaaaacctggtcttaataaatagcatgacaaaatgcttaaatttaatcctcataactcaaaaaaaatataaaaacaccattgttaaaatagttatatatacattattaaaaggatgtagtaatgtaaatgaaaaatgtaactagaaccaaagagactcttcccttcagctaacataactttattatataataataaatatatatatatattaaagttaatatcacatgcaaggtatgtactttttaagttaaattcttgtattagaacagtaatattttaaaaaatataatgtataaatatttgtcacatgtaattgaatttttgcttcttgaatgaaatgaaatgaatcttctttggactcaaatattccactactattttttcttaataatttgattataatttagtacataacctttggtccataaattgaaaaaactacttgtggagttattggacaaaaataatatttactattcaaaagtaggatatgtagtctctttcatcaaaatcaatttcattgattatatatatgtcttacactacattaatttttattataatataaatatctattaatattttatttaggggcaaatactatgattttttaatttttttattatttcaaaatattattattttttcaagagaaaatattattttaagtttaagaaagttcataaataaattccctttgcaacttatatacgttatcccaccaaaataagaattaaacaataataacagaaagatttaggcttactgtaaagataattatgttgattttagaacaagcaattacaacttgtcaaaacaaaaaccaatattttttaagtaaggacaaacatgtaaattccacataatacacaattctttctttccttaaactattccaactcttctacctttaatttatttaaagcaaaaattaaattaatgccataaagtattcactaaaatagttcagatattactattaaattagtagcatgaaaatattattaattattataagttagagtgaaagggcaataaagtaatttcaatgtaaattattagtgtttggcgccttgaagactcatcatcattatgattccttgctttggtcaatacataatgcctctcttctttttattcaaactttacttttttattaattaaaaattaattaattattatttttagtttagaccagtcttaaggaccactatctaagctaattattagtatttttttcccaaaaaagacaaattaagagatcaacaacggcaacttttgcacaatagaaaaaaataataatgaagacaaaacatatcaacacaaaaaataaaatacaaaactgcaccaattattgcttaagatactaatgtcgttttttgttaataatttattttaaataataataaatgctaaaagacatttatggtgtctaacatcttcattagttataaatataaagtttcacataatttaatataataacttttaaagaatattactaaggtgatatatctaaaggtgatatatctaaaggtattatactgaacatcattaatgtccaataaaaatactttaataatatttatggttcatgttacttgtgtttcattaatattataaatattttattaagtgtgactatcacttttttctttctttattcactcactaccattattttgtataataaaaatttttgtgaaatattaaaaatggtcactttgttttatttttccacacccaatattgttaaaaaaacgaggtatacttataaaaaattatatatctttatttttttttggaaaatatataatgtttttaatcaaagagattcaaccataataatagaaagtaattcatcaagagcattactcaaactgaaagtgtgacctctagaaaaataagagtcacgaacaatataggtaccgtttggtaacacttttgtttttttaattttttaatcac

SEQ ID NO: 222190 - DNA, 1407 bp, Cannabis indica
attttttatatataatttaaaatgctttatacatcggccgcgaatagtgcaagatgtttactacttatttgatattttatataatattacaggtttatattagtatattgtaagcatatttatattagtattttggcagcatatatactatccaaaacaaattaacaatttatttattatatttacaaattataatttaaatataataagtttatttcttaataaataattatttgatatgtctatttatatgatacttaaacgtatttagaatacttaaaacgaataaatttcttaaaattaataaattaatattatattttgtatttaaatatttgtataatttttttaaagtaaaataaaacttaataattttgtggatatgatataattaaaaacataagaaaatacattcaaaatgtgaaaaaaaataaagtgtctaaatattttaatattcagattcaaaaataacatcttattattcaaatgtggattctgatttagcggtctcaaaaaaaaaaaacaccctttaattaaggttaggaggagcctaaattgtccgttgtgatcatatagtgtcaaatcacttattggtcggaggaaaaatgccaacttaagtatttaaacgtagaacaggatgaagaatcaagttggaactcacggcaaaaatttccactcaacgagttgacattattactatgttttatatttctcgaaccttttgagcgaagtgaatcttttgttttgctttgtttgaaggaatctcagattgtgttgttgaagggattaaggggatcttgacttcaaaagatctaattaaggagatttagatttgtgttcttgaattcttgttcaagagttagggtaaattcatgtatgaatctttaaatgctttatttaatttgtgtggatatgtacaaaaaatggatattgtataatttgagatcaatacacattgaagtacttatttatcctaatgctaggcaattacccgaccaaaatgtgttttcgatacagaaaaaacttgtaaattatgtatcttctctgatttattattagctttatattgtatcgtttaatttcataatatcatgatattgttattgtatgtatgtgaattattacccttggaggtagaatcgtaatttgaagataatttttttaaaaaaacaataattaaatatatattttcactataattattactcataaattacacaccataaatattatattatgtttttaagcataaaaatacagaaaagaagaatgaaaataatacactcaataattaattaaggtgaccttaaatttgtttgtttgtgttttgccttaagagtctcatatatattgtgtgtggatttattgccacttaattatatatttacactgagcaaaacatccaac

SEQ ID NO: 222191 - DNA, 1414 bp, Cannabis indica
ataataataataataataacatccaaatattaaaagaaaataacattttgtttggtaataatgtaaaaataaggactaataccacttaaatgttaagagcattgttaataggcactacaaaaaattttacttttaaccacaacaattataactaaaagtgaaaaaattggaagtaattataaaaaatctatagctaaaggtattaatcacaaaaataacaatttattgtgattaaatattttgtcacaatacttattttgactaaaactaaattagtagcaacttatatctaaatattattagtcacaagtaattttttactataattaaaaatcacatttagttacagaaaaattatattgcgactaaaatattaaccttttttgtagtgaggtcctagagatgtctaattttgccacgaaataacatcttgcgaatggttagcagttttttataataattattaaattaaaatatgtgaaacttattatctaattacacaattatattgatatgacactatgtagtggcgttggacatacaccatgaactatcataccactataaatataattaaaattcaagtctcacatattttaatttaataattattataaaaattactaaacattcgcaaaatgacatttcatgccaatgctatgatgtagttttctaactagaacaaaagatgaaaaaatatatcaatcgttcataataattattaaattaaaacatgtagaacacaatatttaattacaggaacaataatatcgatttgatacttcgtgatggtattagacaccagtggtacactaaatgttgtcataccgatattagtacccttaaatatcgagtctcacatatattaattcagcataataattattataaaaaatcgctaacaatttacagaactcaacctcgggacagtacctaatagcaatgctcttaattttaacctttcataaaatgaaatgaaagaagtaagaacaaaagattaagagaaaaaaggagtcataccacccaatcagtaagagcttttctatcaactcttccattctctgatccaaacattggaaaaacaagatcaacttcttccttaatcatgaatctcagcagatcatcttcatcaatatacctatgaatcacaacaaaagttacaacaaaaaacaattcaaaacacaaaaaagaaacttaaatcattatgcatttcttaactcactttgaaccaggctgagcaacattcctgaaaatatgataagcagcagcagttgcttccatctcactagtaatctccttattctgttctttagcaacagtttccatctcatccaactgattagaaatcgtcgaaagccccgaactcgaaacagcatcaatcaaaaccttcatagtccaagctgaaaccttttct

SEQ ID NO: 222192 - DNA, 2177 bp, Cannabis indica
agaagctgaaatagtggtgactacattaagcggctgtggcggagatctatatgcagtatgttctgaatcagtatcaggtcctaagtttggcagtccatctgaacacactctttttgatgctgttgtgattgacgaagctgctcaagtaaatttatcaaggctttaatctcatgagtactgattaagttatagtgtctgtttctaactgtttgtccttcctgcaggctctggaacctgcaacactgatacctcttcagctgttaaagtcaaatggggtcaaatgtatcatggtatgaaatagtcacaattaagataaaaagtttctgttgtcatgttaggaaggtttttcaattttgaattcatttttgaaggttggcgatcccaagcagcttcctgcaacggtactttcaaatgttgcaagtaaatttctctttgaatgtagcatgtttgaacgtttgcaaaaggctggtcacccggttgttatgctgaccaaacaggtaaagtaattgatttttttttccgactattttatatagaagttgtgtgtaggtcacctctcagattcaacttatgtttagagtcaaagatcattttatagaagagttaattatctttagagtcaaagatcattatttgttaaatagatattccttaatttttcagagaccaccttgttttctgtgattgtctgttaaatagataatttttttttagtttttatttttatgcgcaattgggaagagtccatttagtttatcttgttcaatttatattgttttatgtcctcgaccagtagtacgaagtttgtgttagttttccaagtgacaaatgcgcctaaggtcattatgtaggcctaaggtcattatgtagtgtgtaagatcggtcccagtaatttgaatgaaagtatttttctatattcaaaacattggattcagattcttttcaataactttttgctacttgtatgcttttcctctgttttccctttgaaatccaagactttggtggtgtctggattaaaagcaatctcttattgctactaagtgattatattatgttttttagttgcgtcacttttcaaagttcttcccgattgactttataaaatggccttttaatgatttcaagcatgttttagacaatgcccatccacgctttatagcctgcacgttttttgatgaatttattatctacttagttctcgcaatccatggcccatagtgaaggatttaatgttacaaagttcattcaaactgaggtgtgagatgctgcatgtatgcagaaatatatataatgctcatgcatatgtacagtttttaaatatgtcatgttgaattgtttttcaaagattacatgacttttcctgttgctgtaagtcataggtaccctcttacagttgcctctggattatctttcactaaatataatattactctacactctcaacttattgttagaaataaattctagcttgtgatgctctttaaaatgtagctccaaccatttgtcctatctgggttgggacagtgattgcttgtttttctttgagtttttagtatctttacttttaacatatttactatatacagtatagaatgcacccagagatctgctggtttccttctttgcatttttatgagaggaaattgctgaacggcgaaatgtctagcaaactagcaccatttcatgagaccgaggcccttgggccttatgttttttatgatattgttgatggtcgagagcttcgtggtaagaattctggggctttgtccctttataacgagcacgaggccaatgctgcaattgaagttattaagtttctcaagaataggtacgtaattctttttgttacatattattgattttgtatctttagcaaacaagtatttattgggactgatttgttacaggaagaggacaacttgtctttcagaatgataatttaaaaaagaaaacataatttgagtgccattacaataacacaataacaaaatcacaggcaacataataaacgtaaactcttgagtagaaatcaataattaatgacaatcctaattttttttggggagttttatttgcactcctaaaacttataaatgcacttcattttaataatttttacttttatgtaatatatatttttaattatattagttatttaattttttttaatttat

SEQ ID NO: 222193 - DNA, 3431 bp, Cannabis indica
atccttctcctttcttgttgcacttaccttttttttggatctgatcataaggttttaaaggtgatccttagggatgaccttaatggtaataataagagcaagggttttcattttgagaatcactggctcactgaagctgatttcttccagactgttagcgactcttggaggaatacccaactcagtgataatcgtgagcaagcttgttgtgttgatgatattatttcttggaataggagcagcaatagttcgaagtgtttgatcaataaaatccagaaagagttagatgaattattatcctctattatttctattgatggtgaccatttgggggttatggcccttcaagtttcctttgatgcccttttgtacaaagatgagatttattagaagcaacattctagggctaactggcttaaggttggtgatatgaacacttagttctttcattacaaagcctctgttaggaggaaaattgatttcatcgggtccattactcttgaggatggcacctctgttggtgatactagagtcattattgataactttattagctcttatactagtctttttacatctcaaggagttgattgggatgctatttctggtattttgactaggatctcttgtagactcatttcctctgatcatgtttctttacttgaagccctgaggaagttgaggtgaatgaggctttatttcattgttcttgtgataaggccgcaagcttagatggattaaatgctcgttccaaaaaaattggtctattttaggtcccgagttttgtaaggatgtcctggctatccttaataatgactctgaggtttctttaattaatgatattgtcattgttcttgtccctaagaaaaaaatgcctctaaaatttgtgactttaggcctattagtttttgttctactctttataaagtggttgccaaggttttgtccaatagaattaagcttgtatagaacactctgattgcccaaaatcaaagtgctttcttttcaaacagtctaatttttaataatatttttattgctaatgaggtttttaatgctctctatcataggaagaaggggacaattggttgggctaccttgaaacttgacatggagaaggcctttgacagggtggagtggagcctcattaaagctattctctatcacttaggtttccctcgtagttttgtttccattattattaagtgtatttcttcagtttcctttaaatttctcattaacatgtattttgttttttttgacagttttgtttctactaggggaattaggcaaggtgaccccttgtcccctactattttttgctggtggccaagggtctttcagcagccattcatgtcagagaacaaactaaagattttgctagtattttaacttgtcgaagagcctctgttatctcacatttactttttactaatgatagccttctatttactattgttagctgtcttctattttgttctcccccaacactagttctggggatagagagtttttttgtgatcagttgggtcttggcaatgatggttttgttagtaagtacttaggtgtcccttagtgtgttggtagaattatcaaatctgtctttcattacttggttcaaaatgtttcttccaaaatgaatgcttggaatgacaagtttttctctaaggctggtaaagaaactctggttaaagttatggtataggctattttttcgtatgccatgtcctgtttcaaattacctgtgtccactttgtgaaaatcttgagagtcttatggctagcttctggtggaggcaactaagaagaagggaaaaattcattggaaggggtggtcgaagctttgtgattctaaattctttggggggtctggcgtttagatctattccccatcatagtcaggccatgcttgcaaagcaggcttagagagttatgtccaatccctcttctctcttggctacacttttaaaggctaaatactttaaacgaaatgactttcgcactacttcaaaaggtcattactcctctgctacttgtaggagtcttctttagggaagagatctgcttctcaagggccttttttggaaagtgggcgatggtaaatctattttgcagtcaactcagattgaatcccacatttaaaatcccccaattttttgaatggtcctccctctcctacccttatcgtgtctttttttattgatgagagtggatgttgggatatcactaaacttaatcttttctttcctctagatgttatggaggctatccttcaagtcccaattgatctttgttctgttgatagtctcatttagggacatcattcatcaggtattttcactgtaaattttgcttaccacctagctaagtcctcttcctactcatcttctccctcttttttcaatccctcctgctttaaaagttggtggaaaaatgtctggacattaaagatccccccaatatcaggcattttatttgtaaaacttttaatcatgtcttatcttgtgcttgaaacctctacaagaggaaagtcttagataaccctactttttatttttgctcttataacatggagactatctctcatgcctttttaaagtgttccaatgctaggtccgtgtggaaaaagtcttcttttaaataattttatcttgcaaatgttaattgtgatattaaagagtttctccttagaggttttgagaatttgcagaaggagaagttaggtctattttttgggattatgtggatgatttggactaaaagaaatgttttttgtttcaaaaaagaacaacatgctacacagatgtaaaaaactatatttttggtttgctgaaggattacttggaagcccaaaagcagccttcttgcaataatgactgcttagcaggggaatcataacatcttgagcaatttagtaagaaattgtttgtctattctggacagtcttcctcgggttgttacaaggtaaacacagatgctgccttgaatgaaaagagaaggaaaattggtatgggagttgttattagagactgtaacaacattatggctgcagattttcctctccaaaggtaggagcagtctctcccatttatgcagaagctcaggccctttatcaagcgcttctttggtgctctgtagtgtgtttgttgattactctgatagaggtagactgccttcagttagtcacaaagatcgagcataaatggaaggaccattcctcgcttttagatttggtgttctagattgttgagtccttgtctttattttttaatatgtctctgtatcatgtaccaagatgtgagaatgttttggcacataatttaactagagattcattaggcttagatgaggatctggtttggaggaaaattcttccaagctaacttgtaataattgtaactttgtacctatttacattttttattgttgtaa

SEQ ID NO: 222194 - DNA, 2995 bp, Cannabis indica
aggctaaaagaaagactatttatattaaggatggtccaggatgaaaattgtgtcatgtcttgtgtggctcacacagagagagtaaagactatgtgtttttattttccatgtgagtgatggatgtttaaaagcaatcaaacagtggttggaatggggagtaaaaaatacaacagttgttgaatatattttttgattgtgataataatgatgagttagtagtgtgtaacaaagagatatttgatcataattggtttttaagttattgtttgtcatttatttttatttatttgttgtgaaatcggttctattttaatttatgtattagtgtttttagaactggttcctctttttttttattataactaatttctgagttattgtgtgttatttgttttagtcatattgttatagaacttaatctattttaatctatgtattaatatttgtgaaactaatttcctctttttttcaattataactgatttttgagctattgtgtgttatttgtttttagtcattttgttgtagaaccgattctattttaattaatgtctcatttggttttttatttagtcatttcagaaaacggttcttgaattatttattttagaaatcagtttttgattaattaattaaaggaactggttttgtaatgaccgcatgatttagatagggattagtgagattataaatactaattttattattaatcctatcattattgatgaatatatgcgaatatttatatttattgcaaaatatcatattcttgtgattttagcttggtggcgatggaaaatgcaacggaggatattttagtcacatgggtaaacatagagcttttttgttatggaaaaatgttttgtaggctcaatagtgagtgttggcggggttgtggtattggaccattttacccctaaaccgtttattgagttaggtttagaggtaagggtagtttggtaatttttcttctttggataggtgtcttcaccattgtttgacaattgtcttctttggtttgtataggttatttattatctttttattagataattctgttaaaagcaaaaattatggaaattaggaaaaacgtagaattttcctattcttcttcttgccattttcgaacaagcctagaggatgggggagctggtgttttgcatctttcttttgtggaaactcagcttgattttgaagtgtagcaagtaaaggtaagaccctagaaaccctatccatgttatttttaaagtttggattagtttagggttgtagtttagggattttggttcggttgagaaatcctaattagggttgtgttcagtaggtttcaattgatgatttagggttgtttgtattgttgtggttgtctattttgaggttgagctcaacaatggcatgttaaattttactgtgtttttattgttgttttggtgtggtaactgccttagaatatgtatgcaggtgttctggaaagtttgattgcatttgggaaagtttaggctaacttgcgcaatttttaggatttgctggtgcaaaccggtcgaccgattttataaggtctgtaaaaccggttaaccggtttacaagtaggacccccaaaaattgcaaattgtccaatctatgttattttttgagtttagtttggttttccctgatatttagggtagttgtatgttatgtgtgtcattaagattacccttggttataagttagggttttggaaaagtttattcgagttatttacccaattgtgtaatgtgacttaggacctccattcatctcgagacattcaagtcgactggcacgcttgaatctagaacaatgtaaaataacataaagtatatatatatatttatatatatatatgtgaataaatacatgttattggttgcttgcactactaacactaataaagatgtagttttaagggtattagtacaatgtagagtatttagggtagttatagtgttaccaacacgaggaccgggggtgcggagtgcatgtggtacaacacttagtaactcttggaagtataataatggtcttaacaacacgagttcagagttggtactctagtgcatacggtacagtggtcgtacttccattgagagtgttcttaactaattgatgagtttcgtaattgaactcaggacggcttaaacataaagccggtattgcattactcatatacatatctgtgcatatcttactgagtcggttgactcatcagtttgctaccttgtgtaggtaagggtaaagcaaagctggaggagcagtgagttgggcctaggcaaggtttgtacatatcgcggcagtgcaacctgcagggtttccgttacactgtattttggattatattttgatgttgcctaatggttgtaaaaaaattattattattattatgtaactttatatataatacatgtattttcaatagcatttttttttaaaacttggcatcccgatttacgaagttatattaatataatctaataagattttcttgaattagcaatttttttaatacgggcattacaagtttttaatttagttatttcaggaattgattttagttttagttaattcaagaaactatttttttgatttatttattttatttaactagttcttgtgtgtaaatttttatcttagttgctttatgaaactgatttttttgttttacatttttaactagttgataaataaaaccagattctttatcttatattttgagttattgtatgctatttattttcttattttgttatggaaccggctctgtttagatttatgtctcaatatttttaaaattgatccccattttttttttaaataagaaccgatttatgaggtattatgtgctatttatttttactcattttgttgtggattatttttaatctatgttttagtgttttaggaattaatttcctctttatttttttcaattataaacagtgtgagttattgcatattatttgtttgtattcattat

SEQ ID NO: 222195 - DNA, 1254 bp, Cannabis indica
taattatatatatgtattttatatgtacaataaaaatcaaatgagatatcgtaatgaatcgttgtgtgttaatttaattaattagctaaaaatgattaatgattaattctatctccttttatatcttattatgctcttttaagataagaaaaaaaataataaaaactttgaagataagaaattaaattatgaattcttgcagactaaaataatgtttaattgataaattataatatattatgaggacacaaaagaaggaatatcttgtttaatgtctgcataaacatatatatacattatatatattatttgaaataaataaaaaagaaactataatattattattagacctaagaaaacaatgttaactataaaaaaattaaaacttatatccaattaaattaattgaaaaatcaaaaatcaaacttaaattaaaaaattgttaaaaatatctaccacgttttatgttttaaatttaaatttacttatataaaaatatctaaactaatttttttagatataaatataataatataaaattaattaagagtattttattaagtaattaaatattctgttaaaattaataagaaaattaaaaaataattttaagactaaaaattttattatgtaaatacattttatatagaatagaaatgtaaaataaaaaaaaattaatgtcattattgcttgagccttgaatagaagaacaaaatgatgaaaacttacatcacattaaattttctagttagacatgataaagatttttataaatgctagtggtagggtacttatcaaaaaaaaaaaaaaaagtggtaagtgctggggtgtttattggaccacatccaatatttttaggtctatctagatttaattcaattatatattggatgctagattttattatccgatccgatccaattaattttagtcatccaatcgatccaacatattggatcagttttatccattaaatgcatttcgtatatatttattggtttaatttgggtctatctaatatttcagacctattttttttttggatcggatcggattcaactaatattttaggtccagtatgtattgaattggaatggatccatccaatactaaaaaaaaaaaatagtaaaatttaattgttaattttcataaatacatatagaatttacgtataacaatataaaatctaattactcatccaaactaatgaaaatactaattgatttgattagatgctggatgtattggattttt

SEQ ID NO: 222196 - DNA, 2139 bp, Cannabis indica
acgtaatatatttaccatacagcttacctcataagatctgcagaggtccccaggcagctttactgagattagcggaagttaacagcaaccaactgttggggatttgtagtcaatcaacatagtcagcatgagttggaaatcctaattaaagatggaacactgaaacaaaaaagaaaccgtgaccaaagaaacaaaatacatgagtttagaaaatactcacgcaagtttctggtcattacaaggagtgtatgtctttatatgtggcatttcacgactgaaatgaaaaagggcattagtagatattaattaaaggtagcgttccattctaattccattcaacaaagccaaaacactggaagtgactagttatcccatatgatcattgaaaatgtcaggaaggaagacatatcaaacatacaaaggataagtcaagtttcaccgcccaaatatctgataaagagaagagacattcaccagcagccggtgtggcttgcgttccacttggcccaatactttttctagaatgctttctcgacatttttcagtggacttggaatgtcatttccagctgcatccgtatggaagagtggaaacaataatatcaaaggaacgatttagcaagaataggaagaagacaaccgagcaattagacaggcacactgcacattacaaaggaaatttaatttcaagttgcactaactaaatgaacttgtcaaatgaagtcaactaggaattttttcctaaacagagggaaaaacacagattgcgcgcccttatgtttgtcttgacattccccaacttactgaccccaacacctgataagtgaaactattttatttattattttatttttatttttattttttaattaaccaagctggaaggttgttaaatgtcagtgaccaactcttataacattcaatgggttaaagtgacttcagaatcaattatccacataaaattggattagatagaaaagaacaatatacaaatgaaggggacagcaaccatacgtgtgcactgctgtaatcaaacttcttaaaaaatgatgagttgatagtaaaacttccgagagctggcaaattaacagagtactcaggccactgtaatcatctatttcctgatctcatagatgagctatagtctcaatttacatttgagaatgaagaagcggagtttctatacaagcaataaattcttgaaccctctcccgtaaagttcctcattgtgaattaaataataccaaaatacgtcaagaaacgtatcaaaataagttgcgtcttctcacatatagatgaaataatgatacaaaagattaaaatagctatacaactctccaacactccatttccacaccagtaaacatataccttcaatgccccaagataatcaattaaatcattctcaaaggcgcatcctctgcttagcttgttctgttctttccagggtatatcttgcatccacagaccttgggatttgttatttcaatcaacatggattaagtttcctgtgtgcacagtaatcctcactcctccaggatacacaagaagcatgacctttgagtggtgtgttccaaatgaaatgggtaatggactaatggtggtttgtgcagagtccaacttgcaggcttgcttttctgaacatgacaattaaattttaaaatgaaatttgtaaaaagaaagtataaatgaatggactgagaatactataaattaggttattggccaactttcatatgatccaatgtaacatcacatcaccctcaccatgaactaccaaaacctgaggaacttttgcaagcagtggacatgctacaaagtaattttggaatggcaagtaagaaaatcattaggtaaagagttgagcattagaaaaaaagttggaagtgaactaggagctctaaagagcagtcggccacaacaaatagaaaaaactcgtcagctagcatagcagctcatcgatgtctaccatgtaattagaaaggacaacaaagagaatatacccctattcaaaatttgctttcattaaacgattgtacagacaatcaaatgatctgttagttatagtccattcctccacggagtttacacacagcatatgtgtaatttaagcttgtcgttcagttgattaactactatc

SEQ ID NO: 222197 - DNA, 1671 bp, Cannabis indica
aaaaaaaacatcatacatatttatagattaattaatctttccccaaaggtattttaatacaactagatcaataattgataacaaaatccattatctatatatatgtacatgtgtatacaccaaaagcaaaactttattgagatttaatttgatcatatataatgatgatacatatgagttagtggaatatatatatagctgttctagatgattacataacaaagttataagcaaagtgtcccccttcgagtggaacagagaaatattattgtctcccaaactcaaaggcattaagaggccatgcatgcatatatatatatatatatatatatatacatatatatccgatgttgataatcctctaaacttttttcatgacaagtcagcaaattatttgaaagattgggttgacgtgtacatgcatagcaatgtccacatataccagctggacacttgtgtagactctagaataaactaaaagcaattctatatatatatatatgtagggaatttatatggtaggaccaagtataatgaccctatgctatagggaagtaatatttaaccaatcagagcttaaaaaggaaaatatatatataagtttgattaaaaaaaatgtatcagattatttctctcattcacacccacgggctgggaagagtaggcctgttatttaaatttgggctttatttttttttggctttaagataagtaaaatcattgtttgtatgtgtttacgtcgtccgagttcgggagttcacaatgagttctctgtcgggtcaccgtcgggttgtcatcgggtcgtcctgggatcgttgtggggttatctgggctggttggagagatggcgtgggtttgttgcagagaatgccgttcagatttttggaagaacaatattgtaatggagagtgagaaaattaagggtctcttattttaagttttaatatttttttattttaaaaataaaaatattttttagaaagtataaaatttttattgtatacagttagttgtatgataagaatatgtatcttaaactataataaccatccgatttaaaatcaatggttaaaaaaagtaccctaccggtagggaatttttgctaagtcctatcatagtcttgtcctatatatgtatactataaagggaaagaaaaatgaaaagaagaaaacaaggctttgaattagacacgactttgaaacaataagttcatcattatgatctttctaatatattaaatctttattgctttaatttgtgttctatgcttcaaccaatatgtatgccttgtggttattgccacgtaaccttacttgctggaaacttctttgaagttacattacatatatgtgtatgtatatgtactgtatatgtgtgtatgtattgacttgcatgatgagactcatcgttagatattttcataaggtgttttcgttggctagctagctatacgtagcccacagtactatatatgaatgtatatatatctatatgaacgtattagtttatattatttattaattcaaatttaatacacttaatattaatttacaccaacaacaatatataatcttttatatgtcttttatacatttcttgtgtggtcatttattttggtactgtttgataacacttttgttttttaattttttaatcataaaatgaaagtaa

SEQ ID NO: 222198 - DNA, 1622 bp, Cannabis indica
actaatctgtgaacactcttaatatatttggcaaaaaaaataaaataaattgtaatatatatatataaataaatagatgatatatatttcacctgtttttctgataataattaaggtcaccatccagtcgcaactcgtaattttgcttaaaaaaagttcccatgttattagagttcgaccacgacgtacgtcgacacagcatggacaagtcataactgattcttaactttatcacgaggacttggatgccttataatgataaaactatttctatattggcacaaaactataagatgacttgttaaaagtttttcatgttattattttgacaaatgctattaatatatgatactactatatatcagtctaattcaatatcagtttctactcatttaaatttaattaatagataatgtatgaaaccgttaaccacttatagtattatatattgcatactttaaggtgcctaatagcaatgctctattatatattaattcaaaatgtgtgggatcctatattaaaatacagtaacaatatatagtatgtcacttcttgtagtgtttaacactgttagggctcgtttggaacgtcgtattaggtcgtattgtattgtattatattgaattggattatatatcatatttttatataatactatgttaaactttaatttatactaaaatattatatatttaggtgttcataaaagttaataccacatacagttttatataaaaatattgcataaaatacaaatcaatataatacaatacaatacaatacgacctaatacggcgttccaaacgagcccttaaggtattatttgcattttcctaataataataataatatttatttttttaaaaaaaaaacaaagaaaaagaaaaaacatgttaggtcatcattgtgagtaatacttgttggtgttttatttttaagtaaaattgacatctcgtctagctcatttctaaaaaggatcatatgctgtggattggagattgtgtgatgagtgagtatctatgctgattctataaggtgattgttctccaattaattttgacagaattaattctttatatatagacacatacattcatacagaaaattaaacaaaggaaacgttgtacggatcatattattgatacttttcgtataattcttcatctgttctgtctctactctctagatattgcataaaggacaacaatatcatgtgaatgcagtgaaaaataaaataaaatttatatatatatataaattaacttagaatattactaaatatttttgaccaactatcacattcattatagttattgataaagatcgatctaaggagtaaaacttgtgtattaatatataagtatatatattttgaaaaattgttcttatataaatattggtaatttggggcataatctccttaagtggccatgtttttgcaactaacccccaattctaaaattttgatagtaaaacctcctaaactcaagttctgttagcacttagtcttttccatccatttttagctgttaactgtcatggtggaatgtctatacgtgacacaattttattagtccacgtaaataaatatttaaaaaaataaaaattaaaaaaaaacctaa

SEQ ID NO: 222199 - DNA, 1397 bp, Cannabis indica
tgagtcgatattattaccgctgacacccaatgtaaggttttacaaactttatatgtgtttatttcatcgttttagaaagttcatatttagggtgttaatcaacatactgtgagtagatctaagatcctggtaaaataatttccaacatggatccttcttcgtgttttgaatggcaagtcagagttgaagctgtctagccttagattgagtggcaaaaaggcttgcaaagaccatccaaacatcggcagcggattcacagtaaagaccgcgcccaagcatagcctcagagagagaattcatgagccaactcattaacagagcatcacaacgaatccaatgatcaaaggcagggttaatcgtatttgtacatgcaagaagaggctccggtcgtggagttgtgccaagaaggatgccgttgagtccatgagcacgaatggagggaagaatcagagatcgccagtaggagtaattgtggcgatccagtcgaatatttagaggaagaagattgtttggaatgtgaagttgtggtgcggttgcctgaggtgcgaccagagcttctggttgaggtagaggagcagggtggcgggggtcgtcaggatcggccataggtatgataccatgtaagagcagaaacaagagagagaaacagagaatattgaaagagaagctctgcctaagaattgagcagagttatgtattatatatatattgagaacttgtacagtattactatgccaaatataactgacttaacagaaagtaactaactaaccgaattcctaactaactctaacaatttttaccaaaggtatattttttcacttggtgtttgggataatttagttatttttaatttagatatgttttcaaaatccactcaatgaaaatattgtgtacatacactttaaaaatgtgtatttgtatatccaattgaagacatctgaatttatccaaatacttcaaaagtattttatttaattataaaatccaaagacacttattatatttttttttacacactccaaagtgttgtgaaggaggtagagacagccgaaatggtaacaaaagtaagacagatattacattacttattgggagaaggtgtgtctctaaaagcttatggtgggattggcttcaaagacgggttgaactgggataaggcttcacttgctaaatatatttggaatataatgaaaaaatatgacatgttgtgggtcaaaatgatcaatgcgatttatttgaaggggtcaaatttctgagatcacaacctcaatttagactcaagttggtatttgtcatttgaagaagactttcaacaagcaaagcctagttgcaactcgttgtagaggtcaatttcaagcaggaaaactttataatagctagttacatcaaaatca

SEQ ID NO: 222200 - DNA, 1804 bp, Cannabis indica
gggatttcaatgattatctttcggttgctgatagaagcagtaggtcttctttacctcactatgctatggttaattttcaagcttttgttaataagtattccctagttccaatccattttgttggcaataagtttacttggaaacatggttccacctttgaacgattagattgggggattgctaatgataaatggtttcaccattatcctcaaacactcctccatcatcttagtttttatggttcagatcatagggttttaaagttagttctgtctgatgatagtatgtttaaggttaggaataaaaggtttctttttgaaaaccattggcttacagagccctctttcttcactactgttaataattcctggtcttcgtctaattctggctctaattccaaccccttgtcgagctttcttaataagcaaagcacttgcattaatgctattcagacttggaataaatccttcaatagtttatcgtttaggattaaggatattgataggcagcttaatggcatctcttctttccttcttgcttctcctgagcagttgtctgaagtttctagccttcaatctcagcttgatagccttctttataaacaagagattttttggaaacaaagatccaaagttcattggcttcgggctggggacaaaaataccaaatttttccatcataaggcttcttctcgtaaaaaaactaactttattaggaagcttactcttgatgatggtagtgttatttctaataatgctgccgttgaagctgaaatctgccgttttttctccactctgttccattctcaaggtagtagcagggatgctgttaacctaattctttctgatgttactcttaggctaactgctcaacagtttgcctctctttactcccctttcacttctgaggaagttcggacggctttgtttcagctttctggggataaagctccgcgttctgatggtcttaatgcctatttttaccaaaagaactggagcactttaggaggtgatttgtgcactgcacttcttgatatccttaataataatgccagtatggcttctataaataaaacactaattgtgcttatccctaaaaaatccaatgcttcttccctgaaagaattcagacctattagcatgtgctcaaccttgtataaaattgtttccaaaaccattgctaataggattaagcctattatggaggatattatttctcctactcagagtgcgttcttagctgacaggcttatttttgataatattctcattgctcaggaaatgatccatgccattaaccataggaaatctggtaagattgggtgggtgggccttaagttggatatggagaaagcttttgaccgtgtggagtgggattttctccttgctatccttcatcatgtcaactttcccaacaaacttgtttctcttattcatcaatgtctttcctctgtttccactaagtttagtgttaatgggaatattactaaggaaatctttccctctcgaggcttaagacaaggaggtcctctttctccctatcttttcctcctgtgctctgaaggcctggctgctgctcttcgtattcaagagtgttgcccctaattttgcccaatatatgtggaccaatcagacagggacacgtggatcaagcaattcacaatatttgctaagtctttatgccataaggaaacgtcccggacgtaggtcccggagaaggcacatggaactcaaggtgctcttggaagctcatataacgctaagacgtctccgcgaggtgtcaggtttctcctgagcaatcaagt

SEQ ID NO: 222201 - DNA, 3060 bp, Cannabis indica
aactactacatgacataaaaatgcatctctgaattcaataataacagtataataaattatttaaatagctataaataatttcataattaaacgtaattaactgctaatttccaaattaaactaagcggtctttacaactagcatcatcccaacaattaaattttgccattattgattcataccttgtatttctaagggtgttatagcaaatcccacctatagtgatctagatagtattaaccctcggtattaatacaactaaaagaagagcgggtcattacccgctatcataagggggtcgaacctctataacaaatttatgtgtctatttcttttaattcttatttgtggaaacacgtggcaagtatcagatctatacgaccccattgtcggttaatcactttttgaggtcaaactggctttcattgagagcgtggatattgtaatctaatcaaacgccatggttaacacaagaagaacaccggtcgcaccatctgcatctttgggtctcccttaggatccacagactaccgatccaggtactcagatcacagtcatgattggaatccccatgaacactacagatgtggtgaatccagtcaccacaacaggcgccacaagtctggccactacagttgcgaattgggagccgatattccaggaagctgcgagttgcctactccctgaggaggatttatgactccctgttgtccaggaacgaaaagctctccatgtgcaatttcttgtcccgaataaatgactagagttcttacccaattggtcaagtctctgttccgtaccaacccctctatttcatcgtttaagtagtcacactcattagtagtgtgaccaatatcaacatggtactcacaccttttgtttggatctcgcctatgttttctgcccttatacattggtggaggcttcctataatgcaccatgttacaggttgccttatacacattttctcgagtatcaatgagactcgtgtactcagtgtatcttgattctcgagtcttacccttctttgcggactcactacaatttggtccattcaaacttcttttacttctcgaatgggtcacattggactctggagcttctgctttttggttcatttgtccgggagcagcactgtatccggtttgtataggtccaaacctagagaaactagcttgtacaattggctgtacggaagtacttgatccatatactgtgggagtagtaaaagcagttggtggaggatcaatggagggagtttccatttgtgaaggttgggcattagttgcttcggtggaaggtgcaggaagtactttatatgcttgagcataagcgtcttctaggtttatgaatccctgagctcgtaccaagaattcacttagagtgtccgccctcttacgctgaagatctccccacagtagggatccagttgtaagtcctgatgttagagccaccattttcatatcatcagtgacttttattttggcagccacatcaatcatacgctggatgtatttcttcaaactctctccttgttgctgcttaacgcttgtcaaggagctagcttccaaatcataagctttgactgctataaactatttctggaacatcacctgcaaatctttcaagttgtggatcgatcccgaaataacctcttccaccagtcctctgcgaacttgctcaatgaaaacacaaacatttaacaccatcacttgccttggcaacttgcatgacgcgattgtatttggacagatggtccttgagatccatctgtccttcatacaattccatctggggcatcctgaaatgctccggcaatggtgcatcaataatcattttcacacaaggctctatgtcctcttcctcagagtcagacacgacaccatttcactttctagagatcttttcaatgatcttcatcaactccttaactttgcattcaaggcgtttagttttatcactggaggattctcttccgcgaacatgatcattgatgtgattcctcagatcatttccacggggtcttgctttttcagccttggccttttccttctttgcatccagctttcttcgaagatcgttggtcgacagacttccgccactatcatccgataatgatgtacttcttcaacttactcttcatgattattggaatcactaagagggggcattttccttcgtcaattcgtcttctagattccagtgtctgctttacctttttgcgtgactctacctctataatgggtttggtctccatgccctgaagcgttgtttcctttccttttctgttgaagttggtcagtggccttagacttcttaggcagcatggaaggaaccttctttggctccttagtggcgattcccttactttttatctttacgtacactcgaagttctagggtccttcagattcgcctttcaagtgcatttgttgttggaggggcttgtacgttgggagccgtcttagtcaatgcagtcattacaacctccattctagtcatcttgccaagcaatatctggttgaattgatcttgttgagataacctatgttgcaccagttgtaaatgtcatggcgttatggtcacaggtctgactcgtcaggctggttccttcctccaatagtagtctcggtggctttgtcctaaggggcttcttcttgctcatcctctggtgtactatcattatttacctcgatatcctctgaactactttcttccgtatcttccacgataggagcgtcgtcattctaatctttgttctaacgaccctactagtgactagtcacatctagaggatcattcgcatctcctgctttagcaccaggggtggtgtaacaaaggcctgactggttctggtgagggccatgatttcgtaaacgtaatcggaggatggtcctcactgcttccttcagctctcaatgaaagcactaaaatgtttctcgagattttttagaaacagaacaaaataataagaactaaagaaacaataatcaaccaagaaagtataataagagacaaacagttttttatatggttggggcattaactagccttagtccac

SEQ ID NO: 222202 - DNA, 2372 bp, Cannabis indica
gaagaagtgtagatcaaagaaggatgccctcaagaggcaccgtgaacagaatatgaaacagcatctaggaaaacttaaggccacggaagccgaccaatgcggcacaattctgacacaatcccaagaaatcaggcggcttgtccccatgtgttagactgtaaaaaaggcacacataaatatgaaatcaccttttcggccaacacccattgacattctctttcttaaaactaatgggacatatgcgcctatcattgtcaatagtatgttcgtgtatggatgaagaatacctacaatctgggcctcacctacctagtctaacaaccaatattatattgtatttacctcatcacgtggacttttaacaccaaacggaaatcattattctaggtccaatcgattcactagccaaacgacctactaatatggctttatcccttcatgaaaagggttggaaaatttgtgtatgtaaaaactagtatatactccatagccaaagagcttaataacattgactcgtggactaaggctcgttaattcctaaccacgcaaaaatcccatcttatttatttcctaatcttattttcttcagcgtaatcttcttttaattatgtttatggaaatctcggtaaatattttgatgctttcattgagctgaagaaagatcttaccatttttgtcatctataaaaatagttataacaagaacgacgactggaaaacagtcactcaaactactcacaacaatgccaaaacctctaccacagaggatatgaaccctcctccggtggacgctttggaggctaccgtgggggaaggtgaagcatcagtggtagctggtggtcctctccaaaatggtcaccaaccggaggaacgtcatgatgaaaaccccgtcaaagaagataattgagaaggacattatgaaaacgaagaaggtgattacgatagggaagaggatgaatactatacaaaagaaactttcaaagatctaaaagtcacatggttaaggaaactaatccaagacaaggaagcgaagttggcgtacaaccaagtaaagttggaagaacgttacatgccaaatacaagaggccctcctacaactacaaagctaagcagtaatgaaaagcctcaatcatgaagttcctcctacgaaccaaggttttggagtggggatctaaattaatgacgaagttcttgttgtatttttatgccttaaataaaacctatttttaatacaattttaatttatttatcaataaaagaaaataaattattttactactgtttagtatattacttagtttacatgttactttcatgatcatatgtttgatatatatattaattttattaaattattatcatattattattcataattatagtattgtctacatagtgaaaaataattatgactatatgatataaaccatattagtcatgtgattaatctgtgcaacaaatttacactgatatgataatcagcgatgtagtttacttacacttgtttaagtagaatgtcttttccatgacattagcaaagaaaacttgtattgggtgtatttgctatacatcgaactggatcgatattgataataaaaaaaatatcataaacttactgtaatataatttctaagtcaatatcacttagttaattttagatcaatgatctcaatcctgggatgattatgttttggcctaaattgtactattcgggttctttgacttgttcgctacctgcttactcgtaggactagcccatacttacatcttgggaacatggtagtacaattaattaggagtgctaatcatagatatgaaatatataacttctataaatacttagaagtgaaacaatagtttccttagaccttggctaaatgagtttaaatggtggaatactcatttcattaattatattagtttactaaaatatcatttacaagtagctaaatattttaaagataaaacacattaaagggtaaaacagtaaatttctctctactcgatgtaaactatccatagaggatcattgattatttagattgaaataatggataattcttacatacctatatttgatatatagagagttctatgtaatcgataatgcaattctaaatctatagtggagtagagagaaattaataaattaggaaatttattcataaattctaggaactacttattaggatcttagttacataggcccatcctcacattatctgagataatattgccttgtagactcaattagttggtttgtttaaataactagaattataaataagacatatttatgaattttactaagaaaatgcaaatttgagaagaaaactaaagggaaaagtttatttattaattaagatattttat

SEQ ID NO: 222203 - DNA, 3051 bp, Cannabis indica
gaaaagcttctcaactgtagcccggccactggtcaatgggcaagtgaaggttgtcaacaaaatcctgaaaaccacggttaagaaaaaactttaagacttgcaaggctcattggccaaagaacttccctgagttctcggggcctatcggacaacagaaagaacttacaacggagcacacgtcatgtgtaatggcttatgggtgtgaagcaatgatcctagtagaaaccatggtcccctcttatcgatgagataattacgacccttcccacaatcatgcccttctccaagagtcactagacctaatcgaagtgctccaaaaacagtcacaagtccagctcaaaatgtaccaaggcaaaattgctcgacactttaattcaaaggtgaaaagtcatacatttgatgttggtgatcttattttgagaagagtattcccagcttcacaagaaccaggagtggaggtacttggtccaaactgggaaggcccttatgagatactcgagaacgtgggtcaaggtcttattcagttaaagagaatggatggatcaagagtctctcatgcctagaaagcagaccacctacgtcggtactaccaataggcagaggacatgagaccctaatgaaaccccaaaagttttgtgtgaaggttaatgtaattcacttttgtatgaatggccctcgagcatcatgaaatgaagacaaaaacagtttacatttgaatttacacttaacatttttaggccacaacctatgtttaaaacaagtgaccaagaagttggaaacgtccacacttctcagcacacttggcgggtatcatatgcttagtcgtgtggccccccgaaaaaacatacacaatgtgtcgtgattagttgctttgttattaacattcataattttcgtaatttatatttaagcttagaacaagatgcattttcaaccaaattccttaaaaggaaggtcgcttgaattccttcttaaggctagaataagcacacgttttgaaagtagaagcatttttagcccaaattcctagaaaagggaagcatttgcctgaatcccttcttgaaaactttcaaaaaagagttgtttagagtttaaaatggaaaggcctcgcttgaactcctatagacttcagctttatcttgaccaaaaaatgtcatctaaagtttgtaacataagaaagcggcctcccaaaatgataaaaaggcttaaatagccgaagaatgtcaaggctttttgatcgtatagtaattcgagaacagtccaagagactatttatgttatcagaagcttttagtaagtttaagcctgcaaattttatgaaggattaagaccaaaaccaccctacctaaaaatagggagcaagtaccttttcaatatctcccaagtcaatagaggggtgaggggtcaactgacatcaaaggtttgaagtagtggtcgttggaaccacatgcttataaatagcctaagaagataacccttaaaataattatacaggcccacacataaagctaaaggttgaaaacagaatgaaatatagaagtctaagtgtggtgcctcgcagagaagtaaatcaagttattcctgtacaaaaggcgattgttatatacagccccgcagaccaggcaaaaataaacacaactctgtgacaaaggaaactaaaattgtcttaagataagacaaaggaaactaaacttgtcttaaaaaagagatagacaacgagaaaaaaagtggttcctaatgatctcgagtgggggaatgtactgttgagtcgcctcaggctgagtcatcaaccgacccctgtggagcatctggattaggctcaaccgcatcttggacaagccctctttggtcctcccaaaggacgcctcagcttccacaatctcctgggaacttacgatctcagcatcagtttcctcatcgctctcgatagaacgaagaaactctttaaggtacgtgtcgcgctgtatggcgagcactctcctggtaacatctttgtaaagaccgcacatgattaatactttggattattaaatatttagggtttatatatgagattaaattaatatttatgaaatgcatattttgaaaatatatttaataccatatatgttattatgctattttatgaaaattactcaatttctgtgattgtgttcggaagccgtggaaagcgacgttgggcctttagagaattgtattttatggtttagaatattttttggggtatcattgttaggttttagcggcgttggtattttcggggtttggaaaatgaccattttacccttgagatgttttagttacttttattagtggaggggcaagaaggtctttttgcaagacttcttttgtcttatttgagttattatttggctgagaataagttaagtaatttaaaataaaataagaaagaaaaaggaagaagggttttgcttaagcttgaaggaaaggaaggaaggatagaagaatagttaattctctctctctctcttcgattctcttgggcagcagctgggaagtgagtttgtgagtttgaatcaagaaatattagtagtaattgaaagctttgttcaaggtaacccttcatactttctctcttttgaagttattgaagtttaggttaggtttttggtgtgaatttaggttctaggttgttgtgtgatttgaaatggttcaatttagtattctggtaatggtttgaggttgtttaagcttatttgaatcgaaattataggtagatttgaggtttgagcaaagttagagtttaagaactcaaacctagctctctaatggtgatttgagaaattgtgtggattgttgtgttctgttgcttgggtttgcttcattgcagtgtttacaggtattctgaaagttattggggagtttgggattgaattgaagtgttgggatcaattttaaggttcccagcacagaatcggtcgaccggttttggggaaccagtagaaccggtcgaccagttggtacccaggaactgaggttccggttgggaaccagtctgccggttggggctttttcccgagccctagtttt

SEQ ID NO: 222204 - DNA, 3981 bp, Cannabis indica
aaaaattgaaaaagttatgaattttggaaaaatcggggttcaatggtgtcgagggtggtgccacatgcgcaccagaccctcggacaagacaagtccccgcgcgcccatcaccctgcagctgaccgagttttctcggtcagggatgctgtaaatgccgaggattctcggcatttcctccttcttctgcgcgcgctaaggctgctagcagcctctcctaggctgcaggtgaagcctcctgggcagccaaccccaaattgcgatttttgtggttttttccccaaaaaccagatcgacaaggacttttctgtgtcttctgtacgaagattatccctcagctagttcttcctctaagagcttgtcgggcagctctttgagtgactttgaagtgagaagtagttctccagaacgtgaagtttaacatcaccattactattctggatgaatatgtggtgagatctacgaaagattagtctgggaactgaactaagggtggagacagttccttcccaagtcttggacttatattgtctgtcagggtgtgcttgacacactgcctattggacagacctcttttgtatctagagatcctcctacaacaatggctactgtgactgttgcccagcactctgagcaatatcaaaacctggcaagaactaaataaatgtgccacaaggcacctctaatggatcctcatattgtcgacctcatggcaagaggaatggttcaccaagttgaggatgctaaacagcttgaggctagccaagtagaggagcctctggccggccaagaggaggagccagaagttgatcaggctaagcctaaagcgaagtctagggctacttcgaggcgccttaaggaatgtcatgtgatctagggtaacccttcgggctcttacggtgatgctagaatgcctctaaatagcagggtagtcaaccctcaaagattggagttgaccatattgaggacgaggctgccgagccatggattttacaaatttgagaagaagatagatgggtaacttttcattctacactattgattgccaagcttgacgacatcatcgatagtgggattatcggtcatgcctgatgcattaggcctactcgagatcacttggctcaccatccctagctaaactggatagcgtggtctggccccatgttgagcaaaggtgcaatactccccttacacccatactttaaggacatagtaaacttcttcaagttgtgtccaactcaaactgcaacaaaaaatataaaatacttgttcgtactttttgtcatgtatgatgagttaggttggccgcaaccttcgcctttttaggtgaattactattttgagctaaaattcagtccaggccagaataagattggatacttctactttaaccagtagggctatcaaaggttaggcgacactaatgatacaaccatgttaaaggttgaaggctacgccaagagttactctatggcatataacataaaaggagtccgctaattcttccatcgtgttccaacttacagtcagccactccccacattgagactaagggacagggccaaccatattttttcccttctagctgctcgacgcaatatttgtaccttggcttgttaggagaactttaagaaatatggcttttactcttcggatgagggtgttactgctcaagacaaccctcccgaggaccctgacaatgcccttgttgtaaaggagaagagcaaggaaaagaggcttgttgttgagaagaaattttctagcctagaaatccaaaactaatctcatctcatacagaaatggggttcttctcctttacctttgcaggcgttgaattaattctcatcggtgcatgggaagttttcatttttctttcctcaaacccaaatcaaatctcacttccatcttcacctcttacctcgattcaaacaccctcaccatcttccaaatcaaactctcagataaaaaccccgtctttttcttcctcctacttatcattcatcttcatctccatactctctttcctctttattataaactcattggtttccttatatgacatgattgagttacgcaatcgagttggaacggctctccaatgaaaagttctagcaattatttctcttttcttgctttacggcgtcatggatcttttggaaaatttctcttctttgctcgtcaatttaatcggtctttttgctttcgttgaaaaatttctattgtttaccttaaaagaaaagacccaagtagaattgaaaatcgttactttgatcttttattagttctcataattgtatgacaattctccacaattcttaatttcaaatcacccaaattgattttgcccaaatttgctcgtgggattgggtttattttacaaggaatgtggtttgtacaaatggactttttgttttacactaatttaatcactcatggttgttcattgcatgaaaaaaaagtaaaaggaagctacatgatcaagtgtaaggacaaagggacgcaccctcatgtatgaataaagaatttttcaatatttatatataaattatttaatattcatacatatataaaaaatattcaactcttatttataatcaaaaatatttttataggcttttcgagatataaaccctaacacatgccacaatatttattttgctttatagaaatcttgcttgctcgttggtacaaaggggacaagatgtgatattttctaatttagtgcaaaaagacacatgtgggcctcatgaaccacgtattgcttatttaggatgtatgctcctctaaaaaatacgagttgtccgaaagttagctttcttttggaatatagaatgcatggtccaggatcgagactttcatttaggtcgtagagatcagatcattttaatatctaagaaggaagcatggtttccttatgccttgctacctctaggatccagaagagaagtatgtggcgtatatgcctttgtcttttgcattcggaagagaaattgatcaaggacgtcccgtctttggtaccactttgatgggattgttcaagtggtacgtgactcttcacctcttaggcccatgaaatcagttttccttttgggccctttaataatttttctctcaaaggttaattggtgagagcatttcatggagatgcaaattgataatttgttgctaaaatatagcatatattgtaaaaagttttctccaattgtatgctaaaagtttatccagatttatcacatagtaaattgatttaaatgcatgttgatcacaatatgacatgatgtaaaatttacttcacaatagatacactacttttatatttacctttatgctattttttatattttactattaaatttagttattacattaaattataaataatttacatttattttgtactattttatacaataaaattaatgataaagtcctttaaggagagctcgaaatttcaaattttgggaatgttcgatgctcgaatcaaaggtattaataagagaacgatacactacttttatatttacctttatgctatttttttatattttactattaaatttagttattacattaaattataaataatttacatttattttgtactattttatacaataaaattaatgataaagtcctttaaggagagctcgaaatttcaaattttgggaatattcaatgctcgaatcaaaggtattaataagagaactaaagaagaatgttacacaaaaaattagcatttgttggcctatgaaagttaaggcacctaacagtaggtggtttaaaagtttgtaattagtcattgaattgtatgtaaggggtttagggtgggtaatgtgtatacctgtacatagtttctctttcatagtgtattataggcccaaattggatgctattagtttgtaaaaactaagcaatacaaaattttcttgattcatcaaaaaaaaaaatatgataaagttgttatttttttatacttttaataaa

SEQ ID NO: 222205 - DNA, 2043 bp, Cannabis indica
acatttcattataaagtttgagaggagaactcttattggttagattattttataactccaatatcttcattttacatattgaagatagaaaagaagccagcatatattaaaaagaattgtaaggtaaagaaaggaacatcagctgcttggttagcatttgaagaagagaccttctcttctaagttgcttagtgtcaagtttgtatcttgactcactacatttgttatcgaatctgagggttacaacagccttgaaatggctgagaaacttaattgatgaatcgagatcagtacaagacaatcacaccaagaagacttgcttctgaaattacaaagaaagctcaccaatgaactctttacaaccctccaaaactctataaattttcttctcttttttctaatcttactcataatgaccaagcaacacctaattatagttataaacagtcataactaattaacagaagaaacttatacaagattattaatagaacaacttaaaaaatcaaaacataatttcttgtttcagtaacaattgatgaaagaaacaagtgtactagtattgtactagtattcaattgtatcattctcaaggacattttcatgttcatgatcctcaacgaaaaatttgcaacaatcaagacattttccttgcagggaattgtgagacctcccattggatgagcaaatctatcttctaagattgttggttcggatggcattgagatgatttattgaattgcgtaatgtacgtacatgcatgtcaaagtacaatagaattagttcaaagaaacttacaaatctaccttttctaaatagttttattcaatgaaaataacaagtgagcatctaatagagaaaacaatcaaatacctaattagtacttctcaaatttatgaaaaattgttctctcattcatccacatagtctctcttaattacataacaagaacagaatagaattgacaaattcttgtttctatcatttaattgatgacataaatttgtgaatcttcttcaacttttaatccaaaaactccaaatgacagcaagttaattaaacaataaaagcatacatgaaacaaaacacaaaaacataacaaaaataaaaatcatgctcaaacttcaaattcttctatgaagtagtaatgtaatgctcaacaaaaatagatttgtcattgttaccatcatgatatttcaattcaataatcaaacggatttccagtattgtttttcaaggtgtatttgaagttaagttgatgaaagcatacctcatactaaagaaaatgctctgataattatcatatcatattttagttaaataattagcaattgaggatgatgagtagcttacaaaatggggtggttgcgtagaacataagtggctcagtcaaatgcatcaagttactcatcatccaattcacaatcagcaaattttttaatgatattaagataggcagcaacacttgattgaaccacttcaagagattgtacaagtagctcagttttcttgttcaccacatcttggctggaaggagaccgaaacctcctcacaaaatcttgggtactgggagattgagaatgtgctaagggagtgggtcgcgaagggctagaagaagattgaaactgtgtcgaggaagtagaattggtattgcgagattgagactatgctaaggaagtgggtcgcgaaggaactgtgtcgaataagatgctcttcctaagataatagagtgccacattcagatgttgcacaccataaataaaaacaatgatcagtaaaaattgaaaaaagcaaaaaaactaaacaaaataaaaacagacagaataaaaaataaccagttacataccaaatcgaacaattcttcgccatacgtctataaaatcacaaaccaagacttgtcatcgatttgagctatgctgaaatcaaagggaggatcaatgtcgccaactgttttttattgttcctgaaattacaagaaaaaaatccaaaatgaaaataaaaaaccagttaaaaactatgagcatgtttggtattgttttttgtt

SEQ ID NO: 222206 - DNA, 2441 bp, Cannabis indica
taatgaattttaaatgatcatctggtacatcgccattacctgaatccaagtatgccaccgtctgcatacttggttggatagtaccagcatctagtgaaacattttcctacacgtacaaatatatgtaaaattatgaagagttataaatactgcaattatttattttaaatttacatatatcgattgttgtaagggtaataacctatttattggattgttcatcctagtcatacgagtgactagtgcttgataacggttactgtcaacccctactttgatggcaatcgcactcggatttaaaaattacatatactctgtttaaccaattgatgtctaatagtatttttttctatgtgcctgataaaaggtcataattaacaaccgtcgttgtcaaaagaatattatcaagtttattttttagtagttagaaatcatacttgtaccaaactattataggatgggctcccaagtattggatggtgcacaattcatgaatgtcattttaacaagccaaatagagtcatctcaatttgttcccaaatagatcataagcaacctgaaattggattatggacgactttagccaccttttgacggagttctagaaggtaatgattgagctagttttttgtggttggacataacaaccatgacttgttggcttactcggcctcttagggtgttttggatgctgtgttggaggaccgagtaaatctttataggcttatatgcttctcctcatgggttgcttttgaagttgtttggtgggtagttgtgtctatatatatgagaaaaaaaataacaaagttataaatatcattaatcaataaacacaataagttatgtaaacaaattaaaacataccaagtatattccaacaggtgtagggtagtcttttggccatgttacgtaactttttataccttgacctactattgtgaatgtaatttgggctatgggacatggaagtagtgcattatccacattgacttatgggatgaataccagatgataatctttgtataggtattcatcattgtgaatcgaaaactttccatctttcaaatatttcttcttcacaatatggcctgaagaaaccttcagtaccatcccactgggatccaaccaacagtgcatctaacaccgtaagctctatatatccaaatcaaacaagcaacaattcaatttataaattgaccatatttttaatttttgcattagatcagttcataaaataacattaggattacctcttttgaactattaccagtaggtggtggtgctgctactagatcagaaacctttctgacaagcgatggtgatggagtagagacattggtagcaccaaatagttgtgctatgagatctggtggagtagagacattggtaggacctgattgttgtgccacgggattggaggcaaggtcagcatgggcttgttcattcggtgctcctccaacactggaaccagacgcatgggatgtgcccacaacgctgctatgctgggaactaactagacaaatgagctcatccactttctcctgtagcttgtctcacggatgtgtctctccaaatttgatgatgcatggtttgaaccatccatgtttttccttttagggcgtggtgtgttgaaaaatttggtctggatgacgctaaaagccatggctcgaacccagccaccatgctcatctgtcccagcgccaagcttaacacatccctcttaccttccacttgcgcaactccttcttccacttgcttacgaaagtctttgtacaaacataataaatagagttagaaataaattataaaacataaaaattcaaatgaaattatactttaaacttacaatctgtttaacgatttccatggctgggccctccacctcgcctttcgtgttcatgtgaagtctttttcatatttcagatatatcaaattcaataatttggtggtctgcctctttctctatttgttcttgtaccatccttacaccacctcgtctagtgtgatggttgtaaatattttttgccctgctctattaggcctttttcctcctcacctcaaagtttggactcaatcttatagccacaaactccctccattattgcaaatcaattatgttttcatatagttttaatgtctcaagaagttggggagccacatctttaaatttaaaaataccatctataagtataaatgacaatcaatagtgaagaattcgaatattaaaattaactttacctttatgtcatcccataattagtttttaatgtcctcactcacattaggccacgatatgtctcaaagtggaacattaattcgcacccatgttccaatttgggtaacttttgccgtcggtccctatccttagtttgtccatagttgttgtactcaacctccaacttttttccctcgctaaccatttttattatatcgctatgttt

SEQ ID NO: 222207 - DNA, 2652 bp, Cannabis indica
ttgtagtttgtgttagatgacacatgtgatggtccccaaagatcagtgcggatcaattctagtaccttagaggctcggctagaagacattttgaatggtagagcatgagacttaccaaattgacaagcatcacaaaacttaacattttcatttcttgaaagtgatacatttttgagaagctaggacatgtttcaacactctaaaagaggggtgtccaagcctcttatgccatacatcattcttggaaataaaaagactcaacactacatgactgagatacattatttctgtttaaaatagagacaccagtaaacagttggaattgtatctggttcgagcatttcgactgagatttggctgttgtggcaagctgataaaacccgtctctaagtgtcccttggagcagcaccttccttgttgttttgtccttcacaaagcaaaatgaggagtcaaattcaacaacaacattgttctcagcagttatcttagatacacttattagatttttagcaatctttggaacatgcaacagttcatttaacaccaaggtttttttagtatttgttggcaaattgcttgaaccaacatgaaaaatagcaatttgattcgcatctcccacaatcaacttttccttaccattatagtcgaatttctggtctagatttgacacagttgaagtgatgtggttgctagcaccactatcggcataccaagcatcactgtcaacaaaaactggagtatcaacataggctaaatgaccaccactattaccacttgggttttgagtggtttgagctcgaggatcttgtcccatgtatgattcatcataccgattatagcaataagctgccgaatgaccatacttaccacaaacttggcaagttagtttgggattgttgttggattgaccacgacctccacctctagaaccacccctgctactgtaatgagaggaaccacctctgttgcctcctgaatgtgggttgtagcctcctctacctcgatctgggttggagttgtgactagctttagtacccatgtttgttgtaggatttagccctaaaccagttgaggtactgtcagatttattattgtttatcccctgcaatctctcaagcttgctatcaaaactcaacaacatatcttgaagttcatgccaagagatgttaggttttgcctcaacttgtacaataatagacagatattcaataccaaggccagaagtaacattcaataccagaagagcctcaggataaggatctctgggaagagcaagcatgtcggaccacattttcgtttgtcttaaataatcagtcatgggagttgtaccttttcgtgtggtctgaatgagtgtctgatattcatccattttggctctggagtgtgctccaaatagattttccaatgctcgccaaagtgcagcagaggtagcacaacccatgacctctgtagcgattgtctcagtcatagaactgtagatccagcccatgagcagctggtcactgataatccagtgttcatattctggattgagcatgacttcagtcccttgatctccttctgtagtggctttagctggtaagaactcgggaggacacggcttggtgccattcacgaacccatcaagtctgtgaccacagattatggtggacatcattgtcttccatagggtgaagttgtttctgtcaagtttgagagagaagggttgatttagggtattcaagggctgcgtgcagttgctggttaggttttaggaggaattagcattcactgtgcctgtcgacatttgagcagtagggttacgattggcatgtggtggagtgggggagtttgagaatgtccagttgacattggtggagatctggttcagcggctctgataccaagataaaaaccaataaagaatgaaaattcttagctcaattgatactgagtgcagcagctttattaaatagataaggtgaatacaaatacaaccaatacagaattgccacatggcatcacagaatacaatgcataacaaacttttaacaaaaggaatattctagaataaatgagaggacacctaatcattggcaatgattaggtgctactgcaataatcagtaggctcgtgtcctctgtttatacaccattcctgacatgagagagactcttattcaaaataataataacaataatgaaacacattcaagttatacatacttattattgaaaattatttgagaagaataactaataaaaaacaaagaggtgtagaaaaaaaataggattttattcacttgtaaagtcaaaagtgaagtaacacaattataagaaagtttatataagtaactaacataaaagactagaatgaccctaaataatttatttaatacatacactcaaacgcatgatgttattgcaagaagcatttagagttttcttaaaagaaaacgaaaacgagaaattttatgcgcgatttagtaaaaaagtcagctagttgtaacgaataaggcataaaaggcaaagtaattgcgcccaacttcagttggtgacgaaaaaatagcaatcaatctcaatatatacaacaataatagtttataccaacgccactattaccaacgccaaaaacgtcctcattaaaaatggtaactatcaataacgacacttac

SEQ ID NO: 222208 - DNA, 2674 bp, Cannabis indica
ttttttaggttttaatttttggtttagggaaaaaaaattttgatttctaagtatagaaaatcaaatttcccaaatataaagtggacacacaatttttcattcactaatcaatgaaccggcctatattctatatctatatatatagtatgaacaatcattatttaggaaaattgtggtatagttattgggttgaacggagagagataagaaaatatgatactttgagttaagagaggggaacaaaaataatgttaatataagagaaaagttaaagggtacaagtggtgtcaagcatcctcctacgtgttaatatagctattagtttaatttagtatcgggtcacatatagtttaatataatagtttttagagagtatcgctagccaataataaggtgatacgttttaagggtgctaagcacaactggtgcccaataataatactcgttaatataaatatatttttgatatagttttaaaatagagattttttgtaattaataagtaactaaattaaattaaaaattattggttttttgcttaactataatattattggtactagtttactttaagtagacgcatttaatgagaatataatatactatatatattttgtttatttaagtataataattgacatatccactgtccattataacaatattatttatacattatttttattacaccagttatataataaagttaagtgtcacatgaacatataaattagggtggagctgacggtacctagattcatggcccataatttattcttttattttttgaaaccaaattaagcaaattatatttatttacatatttcataaaatgtaagtgatcatatacaatgggtgaaagtgacttataaactttctaggagtaaggggttttattcctctgcattcaatctttttttgttgtttttccaaaaaaactacaacgtatatgtatttatggaactagaatcagaatagaagaaggtttataaatcactcttaccaattatgtcattttcacctcataatacatgttggcttaaatataaatatgttataacgttatgctttttggccttacatcattaacaaatattttatttttggccccttaaaattatggggccttacgtgtagccttttcagcctgataagtttgtccgcatcattttataaagaatttaaaaaaaaaaaaatccctaagacttgtccattggaaacttcaaaacaacttatgttcgtagttgtaggagtggcaaaatataacatcgttatgttcgtatcatattttatttgacacacttttattttgtgtcagacgtgttgacttgttttaccctgtttctaattttctaaacaataacatgatccataaaaattcatattacgttcttgttgatccaatttgacccgttaaactattattttaaagttggagttatagaagaaataataaatttagaattttattataaaacttatatacaatatatacacatataataattaattttttaacacattaaaattaaattcttttattaaataagttttattgttattaataatgtttctattctatttaaacaacatattaaattcgtattaaatagattatgtcgagcttgatcttttttattccatgttaagtcgtgtcaattcgttttgacttatatctaacttttcttatcataacccataaaatttttattttattcgtgtatcgtgtcgaaacccgttttaaaaacaacttgagtaatgaatataaaccatatagtatagactttttccattttctagtgcgcaaagtgggaactcacgaacgagaggtacctggctctatgtcatacatatggcctatattatatataatatatgtgtatatactatatatatatagatataatatagagatagaattgtagatgcatatgctaacttgggctctacttaattaattaattagctgatcagacaattttctgactaccaccacgaggtcctcgtcagctatcaacacaaagtcgtcctctctccatatatagtaatagttagtgaccttgtagttatttccaaatttttatactataattttctttttgaatttttgtactaattaaataaacaccaacttttgtgtggaccatatataactacagcttttcatgaaattgacacatacctgaatttattggtagggggtcaagagcggagcacctagttgaccatcaatttcaggccccacaaccactactacatcatcattcccataatatatgccgcgcgtctctcccacgcgccacttccgtgctgccgccaccaacacccgagcaaccgttgtcaacgggcttcccgccgcaacccggttacggtaccgccttgttcctagtagaaacagccctagcgccgctgccaacaccgccgccaatattccaaaaccaagtgtccaacttatgttgtcctatttgtatatttagttaaaaataaaaatataagaaaatttatgtgtggtgttgacgtaagttactttcaaagatatactgtgagtgtgtcacataaatacgtatatttataattagtaaattatgtaaagcttccacacttttctagatgtactatcactttaaaaaggaataaaattaaatccctgttcaaacactctctaaaaataaat

SEQ ID NO: 222209 - DNA, 2579 bp, Cannabis indica
tgttaatgttattcggtctctgtggatttgtactgataaatttaaatctaacagtgagttggataggcatcaagcccgtcttgtagctgatgggaaaactcaacaagttggcattgattgtggggaaacttttagtccggttgtcaaaccggaaactattcacaatgttcttagtctttctctgtccaaggcatggccaattcatcaattagatgtcaacaattccttcctccatggtgagcttcgagaaacagtatatatgcatcaaccagtggggtatcgggatcgtacccatcccgattatgtttgcctcttgtgcaagtctttgtatggacttaagcaagctccccgagcttgatataggcgctttgctgattttgttatgtctatcggtttcactaatagtcgctgtgacaactcattgtatatttacagaaaggggtccaacatggcttatattttattatatgttgatgacattattcttactgcttcgtctcatgctctccgatgctctattatggatcttcttagttttgaattttctatgaaggatcttggtccattgaattattttttgggtattgcggtgactggacataagggtggtatgttcctttctcaacgcaaatatgctgaagaaataattgaacgtgctggaatgacctcttgtaaatcatcagccactccaattgacaccaaatccaaggttagtgctacatctagtgctccctttgctgatcctactctgtatcagagtcttccaggggctctacaatatcttactttcacgaggccgaatatttcgtatgttgtccaacagatttgtgtccatatacatgatccaaggatggaccatatgtcagctctcaaacggattattcggtatgttcagggtacgttagatcatggcctacatttgtctccatcttatttttcctctctggtgtcttacactgatgcagattggggcaggtgccctaatacgaggagatctacatctggttattgtgcctttttaggggacaacttggtctcttggtcctctaagcgtcaacccacattatctcgttctagtgccgaggccgaatatcgtggggtggcgaatgtggtttctgaatcatattggctttgaaatcttcccttagagttgcattgttcgatttagaaagctactttggtgtattgcgacaatgtcagtgctatttatttgttgggtaatccagtccaacatcaacgtacaaagcatatagaaatggatatccattttctccgagagaaggttgcacgtggcgatgtccgtgttgtctatgtcccctcccgttatcaaatagtcgatattttcactaaaggtttgccgcaggtgttgtttgaagattttcgagatagtctcagcgtttgtcaacctcccgcttcaactgcaggcgagtgttaaatatagtatatattttgacacgtcaatgtatattgttagccgttcctattctctagcctaaacttagtcaatgtatatcattagtttcctaatttgtagcctaggattatgatacaatcttatgtatatattcaaccatttttaatgggaatggtaatcaaaatattttttcactatcaaactctcgaatcggcttgcgactagaattgatagaatagtttgtgatttttggtggggatccaacaaaggtaaccatgggatccaccttaaggcctgagacaaattttgcctttccaaagctcgaggaggcttgggcttcagaaaaatgaaagaaatgaatcaagcctttttggctaaatggggatgaaatttactgatcaaaagccaatcgctctactgtcagattttggaggccaaatacctcagagggaaggattttctcaattgtcagtataaagagtcggattcttgattttagaaaaatattgtcaaagctaaaactactctcttgaaattggcatgtaaaatgattacagatagtaaggacactaatatttgggaagagccttgggttacccatgggaaagacttaatgcttaaagttgtaggtaggtcgcctcccaatattactaaagtggccgacctccttatggaaaacggggactgggatgctcggaaactgagatgcctatttaataaagaaactatctctgctgtcttaaaacggggcaagccctcagggcaatgaaatgactattggataggacaaaggggagtaatggccaattctccaccaaatctgcctatctaatccaggctctagctcatgctctattatgtgatgttgcccctgccctgtggaacaaatttggaatagtaaaacgctggagcgttacaaaattttttggtggtgtatctttttgaatgctctccttattcggtcttatcctgattaaaagattttcggttgagaatacaaattgtgtatatatatttatctttatatataggctagtgggatgaagaaattactatacataaatatatggaggaggttccaatggttacatttttattgtaaccattatggttacattttttttagccattggatcactattaaatggttgtgattaatttagaa

SEQ ID NO: 222210 - DNA, 1728 bp, Cannabis indica
ttgtaaatggttttgtaatcgggatcccgagtcttttgtataaatattttacaagtttaattaaaaagcaaaaattttaattaatcatgttttccataaacctcgttcattagcaatgagctgcccagtatgtttaaaaatcacgtaatacgcctatgctagttagggtgtttcatggggaattcggttaaagaaatatatagagcttttaaaagttggcaggagatttgccaacccaagcgttgtggtggtttgggtttgagaagatttagtgacattaataaggctatgatggtaaagctgtgctggatggttttaacgggcatggataaggcttgggttaagttgatggaggctagatattgtcatgttgtggatgcttggagagtggagaaaagagctggagattcaagagcttgggtgggaattttagaggctagaaatatatgtactgctggggctggtgttttgattggcggtggggagtcagatctttgggagagaccgtgggtccctgggaaatctatggaggaggttcgagataattttaattactctaggagacatgcttttgtgagggtctcggatcttttcatgaaaggctctagattgtggaatgaagaattgataagggaaagtttcgatgaagaagtggcaatgtccattttacgaattaggcctttggcgactagtgaagacatcattttttggaaaggatcaaagtcagggatgtacactgtcaaaagcgagtattggttaagtcaacacagtagattcaaaaatcctaatcgcgtttgggaaaagctttggcggtctaagattcatcaacgattaagctttttctttggaaaacctggtccgatgctctgccttcgaaacagcgtttaggattggttgacaacacttgttccctctgtcatgtggcttcagaatctgctcttcatctttttggttcctgcagtgtggttcgtgcggcttggtttcagagtcgatggggtattcgtttggaagattttcaatgggaaacaatcatggactttggagattggtggtcacaagtgagcgatgaggaccttcaattgtttgcagcttgtctctgtgaaacggtctggcattggaggaataaggtaatttttaaaggttgcaccttctctttaatgggattgataaaggacattcgaaaaagagttaaggagatggagttgagagatgttcctctaggagtgactgactgagttgatctccatgtcccggttgtggagaacctagatgaaatgcaatgctttcactgtgatgcttctattcttgatgatgctgctggtgtggtggcagtggaagtggctgaaccgaatgtgggtgattcctgggtggcttctgattttcatacggtctcggggattcttgaaggggaattattggccattcttctagcgttgaaagtggctcgtgagcggggtgtaaggaagatcaaaatcctatcggattccaaggtggcaattatggctttgaacaatggctatttgccttatgcttggggcacctatcctgtttttgaatcttgtctatgtgtttgtaagtgttttgatcttgttgtttttgtacattgccctcggtctttgaacggtgtggctgatgcggttgcgggctgggcgagatgtgccaagtcctgcccttcgggtctgctcaaagtcgttgccccttcggtagctttgagtttgttgtagtttc

SEQ ID NO: 222211 - DNA, 1805 bp, Cannabis indica
caatgtcaattttttttttttttgttcagatagctattatatatttgtttctttttttttttttaataaaaagttatttgcgaagttttttgtatattattacaaaaaatatagtaattatcatgtaaattattcaaattttaaaaataactgctcattttttttttaattttttattttttattcaaatacctttattttaattttcttaatcctgctaaaaaatgagagagcatccccacagatgctttgcttttaatttttaaaatacattattaaaatactattttatttattttacctcacaagtatagacatctaatttttctatattttctctacataatttaaatatttttattaattaaaaatagtagaaaaattaaataaaaaaatattgacaaagaaagaataagaaaaataaattaataaatatgaagagtaataaaaataatatttagctcactctctccacttagctaaatgtatagatagattttcttagatcaagtagtttatagttcattattagagtcctattttttagcttttagctgatttttcttttgaaagatacgaggtgtacaattgagtgctaaattgagccaaatgaggtcagttgagtagttttaatttttctccaaaaatttgattacgttaaacaaatattttatcaattagaaataaaaaaatatatatttaaatagataaggagaaacaggtggttggtacgtatcaaaaaattagtacatataaatttataatacatgtagacaaatgtttctgaggtctttaattaattaagtgtatgaactccaaagtggttgagaatgatgatgatgatgatgatgattccatatacaactatataacgacgacgacttttgtaatcttgtctcagaaaatgtactgttttcctgttccacaacatgagaacttaaaagaaaattaaagtattatcaagtattcaagttggaccactttgtatctttctgaaaaaatagaagtgaaacataaaacaaaatcagttaaggtgggggggaccggaatctaacacaaaatgatataagaattactagaatattcagatttttaaatgctatatataatatatctgttcatattatgcaacaactataatgacataacaatagtttggttggatgaagactggtggatatgtatgagtagtcaataccaaaaataaattaaaaagacaaaataaaaaggacaagaaaagagaggttggaatagaaagattgaataggtatgatatttgcacttgcaggatgtacatgtgtcacactaattagaaattttatttttttgaatgacaccacttttgttttcaacatttttcttgtgattccatgcttttctttctatttaattcgttttcatcttatcatttttatttgccaatatataatcccatgagatttcacttgtcctttcaacttttctaggtgtttctctgtggacttttacacacaataataataataagtagcaaaacatttaagtgaaattgtattaaatttgaatggtggctttggctttagtggttcttttggagttttctttataaatagggtgccatttttgggttcttcagttcatttcacagacagcaaaccctgtctactctcctacgagtaactgaagaaaaagtcccagtttatcaaaaggtgggtttgttgaattaagcattttttcataataataaacaaaaacttgaaggaaatattcacataattaaaaagtgttctagcatgtttttttttttttttttttacttaaactaa

SEQ ID NO: 222212 - DNA, 1786 bp, Cannabis indica
gcaaagattagggatcatcttatgaaaaccaaccaagatgaaatctctagtcgctataggtgatttttgcaagaaataactgaggggtaaatgttattttttgcgagaagctgcctggcctgaatctcagaattcaattgatattcctttatcgagacctctgttgttacctccagtcactattactttttcaccaggtgacatagattttgatttcatggccctaaaagcatgaaaatcaaagacccctcaagaccctacagttactttcgaggtagaactaattgagcctaaagtcagatccataggatcttatgttggagaggtattaaaatcgtgtggcatcaagtatggacaaggatgcttagttaggtctgttgccataggagaactcagttgttattctcctgaacgagtgatccgtgaagaaggttgtagtactagcgaaccatctaggataggcacctggggcctcgagcacataagagttggagccgttctccctcttaaagaatatttttaggagttttgcaactacttaggcattgctccctttcaattggtaccgaattcatatagaatattggccagtttaaaggttttgtatcatattttgaagtgagagtgcccaaccccactcaaaattctttactttttctcagtgaagtccgtcctgcaaggaagcgaggagcaggtggtttttactatctcgggacccacaacaatgatcaaaggatcattgtgaggctgcccaataaaaatgaattcaaggacgaattcttttggacattttgtctcgcccccatcaacacaaatgcgttttgcacagtatgtaagtattgtcttatctcaaaaacttggtttcgagttttaaatttaataaatgtaggcttttacttattttatttatgttgtattgacagcggttacgaggaggcctattgtgactcctgatattgaaaggaggcataaaattcttcttggtcttcccttcgggccgcgagcagcagatttcttgttacatgaagataaattgaagacctgaaattttctcggcagtatacaatccattgatgactttaaagtccgaaaatatttggactggcaacaggttccagttcttgctgacgaggaagatagtgtttatgtggctcgcacccactatttgaagaacataactccttgggaagctgaagatgacgcctcccgaggtaataaacttggtgctcgtagatggtctccgattgtacttagggtcaagcgtacctcactagttaaatttagggatagccaatgtaacttttacatttagaattgtgtagatcgcattgccagatttaatagttggtaccctgagcatcacgttcaattaagttgtaatagttcttacttcagaattaccaaacaatatggcaccaacttcgatagggcaagccatccagattgggacatgtctccactaaaccccttttacctttacatgattacctgttctagggagtttcgtaattattttaatcttcatcctcatctgatgactatggtaattttcttaagtgggagattatctctccacatttttgttatttattttaaacaagtgttgacatatttctctgtctcccaagtatggatcttgatcctgaagatatgttgtgcaatcctaccgcccccatcaaaaaatccaagaagcgcacaacttcaataggagatgcctcgggatcaaccaaggaaccttccaaaaggaccaaaatgacttccagaaaaaatgagcctcgacccaact

SEQ ID NO: 222213 - DNA, 5403 bp, Cannabis indica
taaactatcacaaatacaacaaactttgagcaaaacttgtcaaaataccataaggcttgaatataaatatgaaaaaaaaaaaattaagtgtcaacaatacaataattagtagattttgagttgaacattcacatattggatctaaataaatataaaaattggtatttttataatgtgcggtgcggtgcggtttgaaccgcatattaacaattcaaaaccgcaaaccgcaccgcactgcgcggtttagaaaaaattcaaaccgcagccgcaccgcaaagaatttcaaaccacaatttttttgcggtgtggtgccgtgcaggcggtttggacggtttgatgaacacccctatcaaatactatgtctttataagggtatagagatgcagattgggtaagctatgtgatgataggagatctacaaagggtatgtgatgtttttaagaaaccatttagtattgtggtctgctaaaaagcaatagattgttgcttgttcaattactgaaagtaaatttcagctctagcaaatgcagttgctgaaattcgatggatctcttctcttctgtctgaacttcaagtgccactcatacagactccagtcctttgggttgacaactaaagtgctactgcgttagctgccaatttagtgtcacgccaaatctaaacacattgagattgaccttcactttgttcgagatcaaatcattgctaaacaattcagtgtgttatgtgctatcattagatcaagttgttgatgctcttacaaagcctctaattattgatcgttttcactacctcaaaagcaaactcaaaatagctactttgtcatttcgtttgagaatgtaaaccaataaactaattgtatagttagttactaaagtggtagttaaatgcttagttaattcagttagcatttctgttatataattcttgaatcttcgatcagtataaataaagtctctaagctaaccaattggttaagcttctctggcattttttttctaagctctgcttctccacctataaacttctctctgccattgttaagcttccacagttagaaggggaaacggtggaaagacaaattaaaattgaataaatccactggtcattttggaccgttaagtcgcaagtgtttgctctagtaaaagaaaaatcaaaactttttagcacagggatgaaaaagaaaaacacattgagctgttgggtgagttcttatgatcttatcttaaatttagggtcgaaaataaaattctctgaataaatgtggcttttactgctatgcacgatgttttcatatattgaagggttcaagataatgcaatatattcataagctaataaagtagacaaggtaagatattatgtaataatgaatcttaaaaaataactcaatactcatacaaagaattaacagaggatccataaacggtaaacatcatgattgttagtgaagcattgagattagttcaacaaatgcttctcaatcttataactttctctcaagaaaaatgagaagaaaagtcagtgaatgatataggtgagcaagagtgctaccaccattaatccgtacgcaattccttgatccagtgctacccctgaaatttaaaatacaaatccccaaaaacacattagaacttttcctaaccaagaaaagaaaaagagaaataaaatggatatatatttattttttttgaagagaataatcgtcttaaggaatgatctcaatagctctattggggtttttataaaaggaagaagagaaagaaagccatgaccaatcctgagagaatctttgtacagagcaaggccactctgtgtttatgattgcttgcaacaaatgtggggtctgagtcccgaatctacgccgttgatttgtgccacgtgtaggatatataaaggctgcacgttcaaactccagttattgtcgagctgtgtatgaattggtggacctcctccaataaatagtggattcccttatacttcttccccacatgccaggccaccaatatgttttgcttgtattattattattactgacttctctgggttctgctgagttgtggaatatcaccactttatattgttatttttcattttcaaaattttctgttataaatgaaacagaccgttggcttaacgtagagatcaaatttgaaatctcagacaggcttccacgatggcagttcagcagctttgaatagtcaagttctatattttgataatagctgattccagcagtattccttttaccaaaataagtaactaaactgaatttatagactcattgcagttaaaattgagagttaaataggtgaaatgaaagatactaaaatgaaatgctgagtggggtttggtaagtaaaggcatattaagatggatttgtttatgttactctccccatttatcaaattaagaattaattatttggagtgaacctggttttgatttcatttaaacatcaaatatattcagctaccactttatgtcgcattattctacagctgaaacgaatatatgcaaatccaaagcaggtattacaaacaggttgtcttaaaagtgtgaggggctgccaacaactcttggtaaaaacaaaactgcatcacaattggcattacttagtcttcatatgtacgagagttgcatctgatcagctaaagcatgacctgtattgcccttcaagcctctaatcggtcacagagctgactggcattggtgacaactcaaagtagtcaaagtcgtcggttattcctatctgcatttagaggcaaaaaatctaagacaaatgatggaacttgggaatatagacgaatagcttgatgactaagtatgttacaatgtgtgttagtatctggacatgtcaaattcagatatcaaaatctgttagctctaatgattccaaaactcaagaatgggatgctttagcgttggcatacaacaagaaattgtttgagttaaattttacagctttaagaataaaggccttataaaatttggaacataacatatatgaagttagctgatgtacctccttgtacaagttatcaagctcctctttggcctgagggaaattgtttgagacccactgccgcactgtgaagatgttgtctgcagagtcagaagacagtaagcatcaaaaagcgaaaagagtgcctagatattgaattcctcaataaagcatattttcagtgagaaaaactgggcttaagaattgtaaaatagaaacaacgcatgaatggattacctgtccacctattagctgctgcatgggctacttcaattgcattccctgccagtgtaataatcacaattattatgcataaaaccaaagctctgtagcatcaagcacttaatctcaataattataagactcagaagaaagtccgaactcattgcttccaaggcagccggatcattgtctgcatattgttccatttcctcctagaaataataacaaaatacaattagaaaatcaaagcaaagtcagaatccttggctgcactaaggaatgtcaaattattaaacaaccttcagctcggtatgcttttgctgaatggattttaactcgcgtaaagcctcctctctttcatcctggaaaattgtagcatgtcagacaaagaataaccacgagttcatttttataaactagttcaaaccctggtcagtgataggatcttcaaggatgctcacagatgcctctcgccccttctttagagactcacactgctcagaaagttctgcaaaccgcttcttactgctatgaagatcggattcaagtttccgagttacatttcttagctgcccaatatttcaatatcagtacaagtaccataaagttgtcacatgatttataagtcatcaaatttacctgattccctgcacagctaggcagactccaaaaataaacctgggaaaaaaagaaacacccaatataaacaagttgtaaaatagtatcacattcttaagcagcatagaaatctcatttttagtctaccaaacaacaacttcaaggtaaaaaatgtccactatccaaaactttccaaacacatcaaacttacagaggttcctatcttgtcctttgaaacaagatcatcgtccactagactttggagaacatctttcacggactgggttattacacctttctttggtcccagtttctcaagttccttaagctaacaccaacaataaaatcagacaagttttccactttgttatgaaaacaaaaaaaaaatgaaaactcaacacatttaaaatacatttcatatacttcatcgaggagattgtttagaaattcatgaataattcaccgtgctcatgaaaaggaatgctcacaagatagaagtcttgagaatcgtaaaatatctgaagaattttctcacgcttctcttccagcgaaagacctcttttctttgactgtatcaaaaccaaaaattcaaaaaattagaataaaaaatctgaatgagtaaaacaggaaattaatctgtcgatagtttaaattaaattataaacatataagtatgtgtaatacactgaatcaacaatctcaagaatctagaataatatgagtacaataattacggtgaagtcatctaagattcaaagccatgcatttttcatcaacaaaacagagcagagaactaaagatcgagaaatgggagccacgccccaaatcctatttagtttctctcattttcgcacattttctcagcagccaaacacagacaacatccaagcattacaatcagaattaaaatgcatttatgagcaaatgctaaacattaatatcctattataatattcatgattgaaacaagaaacaatccagtgatccactgacataccaaaaaaaaacgaaaacctaaattcaaatatagttgaactaacttttcttaagcaattataatgtacgaagactaatcatcgagagcttcaacaagaatttaaatggattttttaccattggtacgagttcaaacttgaaaatccgcccagagctttgagttttgattttttttattattatttggagaaagaggttagaacttcttaagatcagtgtcgaagaagcctccagactccagacacggttttctttctttggcgggaaatttttacccatggactattttttattaaaagtactaaagtgcccctaatctactatcaaattttcaatgtggccagacgactatcgttttgggggtgttaggacctgtttggcataatttttaaaaaagttcaaaattattttttaaaaaagtgatgataaaaaagtatttagtaaatagttcaaaaataacttattgaagaatttatggagaaactacggctaaaaattaaaattggtgcaactttttttttttgtagaaatttcaatgttattataactggcaatcgtttacaa

SEQ ID NO: 222214 - DNA, 2280 bp, Cannabis indica
ttttaaatattataattatttttaaaaattaaaattacatggacctctaaaagtttgccacgtgtacaagtgcgtacacgtggacagtccaccgtggcacttaactgtgatttttggacggtcagagcaaaacggaaccaggatttaggtagtttagccgccaaaaattcggtttttgtggttaagtgttacaaaccgtaaagttcaggtggtttagccgccattatcccttttatttaattactttcttccaaatatatatactaatacttaaaagaattcaattcatttgtgcagttttatagcagccaatccaatccatgcatcattctatattgtgttcatattatctatttgtgcaattctctccaaattatggattcaagtttcatgatcaactgctagagatgttgccaaacaactcaaggtataatgacaaaaatatcctcatcggttaaaattacgaaattacccttctaagaaagcgcgtactacaatagtgttataaaatgtgtgttttacatatcatttttttgttggctttaattgtaggaacaacaaatgataatgcctggacaccgcgaatcgaacttgcgaaaggagcttaaccgttacattcctaccgctgcagcattcgatggcatgtgcatcggtggtttgacagtgttagctaatttaatgggagctattggttctggaacgggaattttgctcgccgtgacaactatttaccaaaattttgagacattcaagaaggagagagctagtgagcttggcttctttggattctaaattcaagcaaaagctgtaaaaatcatgagatattttacttaacaccataggctatagttttgtaggatagtttaaattttttactttcaatgtttaaattcccaagttcattctttttagatgttaagtacatacactgtttgacaactttatacttttttaccaattaattttccaatattttacacagttaaaataaatttgactatttttttttataactttttaggtaagataatagtttggagtagaaaaaaaatcataataggttctaacttctaactgatgaagaaggccaaaattagagtagaaattctatattaaatcggggtaaattaacacttatcaggaatgaaaaataaaagaggaattgtagtactcgaacgctaaaatcaagtaaataaaaaaaccgaaagtaataaaaactttaactaagtaaagtcacacaaggttttaatgagatttattaccctttttgtggtgactattctacgagaagaactaccatttggccaagctttattaattttttaacagtggtaaagcacagaggtaattacaagaagttcacaaccaactcattttagatagatgtgatcaaatatacacaccctcttaacaacttcttactaaatgttcttctaagtactcccttagatcgtcatttaagaaggtaaaacacaaaaccttatataggcatctaaatgagtgagtttaatttattttttttcatgatcgtgtatattatagttatttaagattatctgaaatttttttaaagtaaaattcacatagtttataattcggaaaataaggtttgaatattttattacatgcacgactgctttttcttatacgcacagtaagtaactatttagaccttattttcggtactgtaaaatattcagaatttttaaaaatttataagtagttctaaatagctataacatatgattatgggaaaaaaattaaatttaaaattttttctaaataccaaaagaaatctactaaaatatctcttaaactttttaaggctacaaaattccaaaaccatgtacatgattacttatataaatgaatcttagctatagctttggaatgatcagataaaaccatattcatgattacattcactataatatatgtatatgttttgtttgaattagtcttttccatttaaagtcaaagttttataaacgcatacactgttattatatcaaacaatatttctacatattaacatgtcataactgtatgttggtgtagaaagttttatattggctagaaatgaaaaagatcttgagtatacaagaatggacattatttctattaaaatgagaccttttagaaaagtgcccaaaaataaatacgtgagtgcttaggcttgttttactagattgtctggtatacctaattttaatttttaatatgaaaaatttggtagacaaatgactgttgggttttgtgccctaaataaaactctttaca

SEQ ID NO: 222215 - DNA, 1750 bp, Cannabis indica
ttcaaaaatgatgcattggatgcatttattcagttcaaggccttggctgaaaacaaattcaacaccaaaataaaaagcctcagaactgattctgaaggcgaatatcagatgttttctgatttagtccgtgcacatggaatagaattccaacatccctgtccacacacctcagcccaaaatggccgagccgagcgtaaacatcgacatattgttgagatgggattgactctccttgctcaagctcacatgccacttaagtactggtgtgatgcttttcatgttgatgtccaattaattaataatctccctacaccagttttgagttataaatccccacatgaagtgctttactccaccaaacctgattatgcattgtttaagacctttggtgtggcatgttttccttgcattcgtccctaccaaagtcataaatttcaatctcattccattaaatgtgttaatcttggtttcaacaatgctcataaaggctatcgatgtctaagtcccacaggaagaatttacatatcttggaatgttgtatttaacgagttggagtttcccttccaaaacggctttcttaataattatcatactccaccaccagtgatcattcatagctcttcttggacatctctcccttctccaagtctctcttattcgcataccagtgaatccagcaacacaaattagtcccaagcactccttgatgcagaaccaacctcacctcatactcctactactgaacccgatcaggtatttggctccacttctcccttaaactctcctttgctgtctgactgtggtagttttgattcaggttcggctgggggacatgtctctcaaattccttcacctgactcactccatcactcaccaccttcctcaatttcccaacctaaaattgtgtctacttatcccatgatcacccgtgccaaggatggaatttttaaactgaaaacttatctaagtcatgcaaaggagttcactgccattactgaaccagtaagtgttgaagctgccttgtctcacaaagggtggaacaaagccatgaatactgaagttattgcacttaaagccaaaaatacatgggttttggttcctccttcaagtgcctacaacctgattgggaacaagtgggtttttcgaatcaaattgaactcagatggtacagttcaaaagctgaaagctcgacttgttgcaaaggggtttcatcaacgacctggcttagattttggggagacttttagtccagttatcaaggcctcaaccgttcgaattattctaaccattgctgtgacaagaggttgggatatcaaacaactggacataaataatgcctttctgaacggtgatttagaggaagatgtttacatggcacaacccgaaggctttgttgatccaagcaaaccagactatgtttgcaaattgaaaaagtcattgtatggcttgaaataagctccaagaccttggtttgacaagttaaagaatacaatgaccgagtggaaattcaagaattcgaagtcagacacatccttgttcttttacagagataaaaatgtaatcatccttgtcctaatctatgtggatgatataattgtcacaggaaatgatgctcaaagaagaggaacttcattagtgagctcaacaaacttttttcattgaaagatcttggagagcttcactacttcttgggaattgaagttcatagggatgaatctggtctttagttaacgcaaaccaagtacataga

SEQ ID NO: 222216 - DNA, 1238 bp, Cannabis indica
gtcattttcttcatggtcgccacagatggtggagaaatccatcgatctcctggtagacctctccttctcaaaggacgagcctttgtatactcctcaacaacatagttctagcgggcctccaagacatcgtttgctttcgacactgcctctccttcatcattatagccaccgaatggcagcacccgagctaccccttcttcctcttcaccttcagcatcacaaggagtagcaggacggacctcgccttggtcctcctcttcttggacttcaatatccctgatagtatcttcctcgtcaattgtagggagagttttttctaccttagccagagtggcacgacgagcaatgatcgtgttagttaatgaagattttctaacaatctgtttggtctgcgccatcatactacgcttgggcataattttatcaaaagtgtgtctagcaatggtcacagcaaaattggcaacaagttttccctcagtagcaaggttcgggtggcgctcgggcaaagtgttgaccaaattcggatgaatatgtacgtctagttataaggaaggtaaaacctctaacgtttcttgagttcccagatgaaacaactgtatccctcacctcaaatttggtcgggacagaaatgatgttgcacctcgggctccggggaaggtgtatgtttgctacttacttctcaatcttcaaagctagaatttgaaagatcgtcactagacgaaggtgggctagcatagagacgaggatggtcctcgtataaaagttgaagcaaatcttggacaacaatgtgtttgcctccccaaaactcatcagggttcatctacaaaaggtaggagacaagaaagtgagagttggtcggagtaatgaatgaaaaataggttgtatataccgaccaagttcgaatgagaaatcaaaagcaaaggtttcacccagaaatagaattttcaaacccaaaagttcaaaacttcgaattggaatctgatttttactaaaaccctatggacgagtagaaatgaacgttgtaaggttaaattcaaagcacagttagataatcagatgttatggttaaatataaatgagattttcaagtcctaaacctaggtattctatggttaacctagaacagttcaagaacatgcgagattcatagcaaaaatccaaaaattgggcatgcatttcattgcaaatatgtacaagaaagaaatgaagaataagctcactgatttgaagcgttcttc

SEQ ID NO: 222217 - DNA, 2950 bp, Cannabis indica
ttcgattattgaacttgaaaaatatttgccaaatagaaacatagatttaatctagtggtactcagtccaatttcctgtggttcgacctcacctgtgtgagcttactacttgattacgtacacttgcgtattatttataaaattcgtaacacgttgcatgtgagaggccttctatgtgacctcaagatggagatttgtgtttggtgtcttgccttgtgtcgaaagtcttctaaacaatgttaatggtcaaacgacgctacaagatggttttgctagagaggagaattgttagggtataaacccgaatcccacatttgaagaatacgcaagaatgctcgtgtgggagcttaggtaattgccagagagatcctacattaatttactttttaaatagacaccacaagtagttacatgattgacattagaggtgtgtataaaatgatctaattcaatagtaattgatcgatccaattataaccgactgccaaaaatattgaatatccaatcgtgattagatccgattggtgttatttttgaatatctaattgaatcgaatcggatgttggataggtgtccaaaaattaaatacatccaacatccaatcaaattaattggtatttttattattttaatttgaatgagtaattagatttaatattattatatgtaaaaatatatatgtatatatgaaaattaatattagaaatttactctattttttcttgaattggatggatctaatccaattcagtacatacttaatttaaaatattggatatatccgatccgatctaaaaaatactagatctaaaatatttaatgaatgttgaattgattagatgactgaaatgaattagattagataggatgataaaatctaacatttaatatatataattgaattaaatttgaatagacctaaaaatattgaataaaaaaaaaaacaactcctaattggtacatgatatatatttactcttactctcccatcaatttttactctacatgatatgcaatatatatattttaataaattaatcttcatatatgttatattataaaccttcctaaaccttatgtatacctatatatgatttctaaaagagaaaaacacataaaactaattttaaaaatgcaatggtcgtcaaataatattaattgactagctttttagacaacctattatttagattaaaagagacattttggataagtttgattgggttcttatatatattatacattatatatataaacaatatccaactaaaatataagtatgtataagccacttaagtagtactgtccaatacatagtataacaatatttaaaaagtaaatttatgatatatacatatatacatgtatttgtttatattaatcatgaaagattcccaagtactactaatatataggaataataattatattcaaaaaagtgcattatatttatataagataatccgtgcattttttttcttgattttatttcttttaagtgaaattgttgttaattaaattgaggattaataaatattatggatcggttattgtttggaatagtggagatgaatggtcacaaccataggaacaagaatttaaaagggtgcagatatggtcagacagagttggatatatattttgtctgcatccatgcttatgaagatgctttttctagctaatctattctatatatataaatatcgatcgatctcatgaccacgtaatggtaattggtaatattggtataatggatacccaaaccccaactcacgtgcacgtgctccctctccttttgcacgtgatgacgtaatttttctcagtactcccaaatcccaatttgcttcccattcaagcatcattactggtcacttcccggattgcaaggaagtatctttgaatcaaagtcacgcctctctgttttcgtttttttctagataattttaactatttatatgttaaccactttttaatttattcggagaagatacaataataataataattgaatatatttccttaattatattgcattaaaaaatagataaataattatttatttatttaggaaatattataaaatttatctatactaatcaataaataaaatgaattattttattcaaaaaaaattaattatttatttataaagattcaataatcatatgaatgcgcattatgtaataaaaaaaaaaaaaaaaaaagaaaactatggtcaagaaaaaagttaaattataaatttaatattatttatataagtattttatcattttttatgttgagccaagttttatatattacacccgaatcagaaccaatctttttttatttgatatttcatttatcgaggttataaataaagataaatgaatcgtgtcatattgtgtgtgtaaaacaaaattgagagagactgaatattagaaaacaaaacacttagctcgtatatacatatagtttgagtctaaattagcttaaatatatgtatttgacaatgttatacagtttcaattcaatgattaattaacttatataatttttgcaaatattatagaagtactaattaattaattaacaaatatagagacatttacattatctctttcttaaattataatttaactacaataagttttctgcatatgaatgtcatgtttaaagttatatatattagaagaaaaaataaaacaaaaacaaaacgcgttctacgcccaatatggaaaaagtatgtttcactgcttttatactacttttcctctgttttcaatttttatttacatcttttaaattcaacaataggctaactttttgttatcatagaatatgatacaataaacaaaagcttaatatatttttctttcgtatatatatatatatatgctatcagttcagtccactccttagaaaaaaaaaaggtataataaaaaagagtagccatcatcggcagtacttga

SEQ ID NO: 222218 - DNA, 3518 bp, Cannabis indica
ggccgacgggatacgatccagaccatccagtagccgcgcaaagactcctgcagccctccaatccggtgtcttccgacttccgagacttaattccatatactaagggttgacaatccacggcaaatgtaacattatgccatccaagagtgatacaccgttgtacagcgtggtgaagagccaaagcctcagcttccagtggcgaaaaggcctgaagctgaacagagaaggcttcaacaaactcggtagcagacttggttacaatgataccagccactgatctgagatctttgcacgccgcatcaacaaagaccacaaaatcattctgcagcaaatcctgcacttcattatgggtagagttgcccataggcatcaccagaggagtggtcaacaccgaattaagctcagccgccaagcacttaatccgattaaatatggtgaagaaggatggttggacatggtcatggtaagcttggttcctaactgtccaaagagtaaagcagagagaaactccaaaatttctaaactcctccacctcaatgtttccttgctgcaacaaagggagaggctcgagcagccacttggttaactgcaaagggttgctgaggttcaactcttcactccggatcccccacggacttgccaaccaaagcgatttagcgagaggacaatgacaaaacaggtgaaccgccgaatcctcttgttcatcacagatagcacacactaattcgttgccaaagatacgttgaagtctttctccaaaaggtagaatgtcatgtccaagtttccaaaggaaaagtttcattcgttctgaaatcttaagtttccatattttaccccaaataggatctttatcaccagttctacctttgatgattgatctataggccacccgactagagaattccccattagtagcatccttccatatcaacctatcgacatggttaatgggaagcatgggtaacaagtggagagaactagccacactagggaccatccaagtagcagtttgttgggaatcccactccctatcctcgttcaagagtgaagaaacaaaagtggttgtcggggctatcataggattgaaggcagctctaaattgatcccaatccaaccaaggaatccatggggcgtgccacatattggttgttctcccattggcgagaaggaaacacgattccttacgaatgaggtctcgcgaggccaggatgctacgagctccaaaggagagggatttgggggattcaggattccaaaacaaattagtaccattttcccaatacttagcacaaaagaccctagtccataaagactcttcccctttagctaatttccacccaagcttagaaaccaaggccaagttcatatcttcaaatttcttgaaatttaggccgccattctccagggggtacacaaggtattccaattggtaagggcaagataacggtctttctcggtgctgcccgtccaccagaatttcctaagagcttgatccatctcatggcacaaggattttgggagaaggaaggtcgacatagagtacacaggggtactagttgccacagaccgaatgagggtggaccttcccgcttgggaaagaagtttacatctccaaccttcgattctagaacagagccgatccttaatgaacttgaagtccttcaccttactcttcgaccaaaggatcggattgcccaagaatttgtcatctctatccatgcaacgaaaacccagcatactaacaatctcagccttacaagcttcatccacattcttagaaaagacataggctgatttcctcacgttcagactttgcccagaccaagaacaataggttcggatacactcttgcactgtctcaacttcctccttattcgctttacagaatataaaagtgtcatccgcatacattaaatgagagataggagggctacaacggctaaccttaaatcccgtgatatgacccgaaccttcctcccgcatcaaaagacgagacaagacttcgctgcacatgatgaacaaatatggcgatagcgggtcgccttgacggagacctctctttggttggaattgcttgagagggcctccattcaaaagaatcgagaatgaaaccgaactcacacatttcattatgagactaataagtttctccccgaatccaaaggcaccaaggacatgttcaaggaatccccactctatgcgatcataggccttcgacatatctagttttaatccaacaaatccgtttctgcccttacatttccggaaggaatccataatttcgtgagccagaatcgaattctccgcaatccatttaccaggggcgaacgccgattgggttggggaaataaagtcagagagcagaggcttaattctgttggccagaagcttagcaataattttataagtaaaattgcataagctaatcggtctatagtcgtcaaagcagttagccccaagcttcttagggatcaacaccataaacgtttggttaattttcccatccaattcgccagtttcaaagaatttacacactacagcaatcacatcccgacccacgatctcccaatgatccttataaaactttcccggcattccatcgggacccggggctttaagcgggtgcatcgaccaaacaacctccttaatttcagaagcagaaggaatgcgggtgagatcagtgttgcattcatgcgagatcaaaggctggattaggggttgtaacaggggagtaggaggagaggagcttgatagcaccgagataaacttgtcacgaaaataattccccacagcgtttctaccagagatccactccagcccatccggagttattgcttctataaaatttcgcttcctcttgatgactgtcgcagcatggaaaaaacgagtatttcgatcaccatctttataccataactcgcgtgatttctgcttccaaatttcagcttgatgggtctctacttcctccatctccaaaataatatcggcttcaagcttaagattaacatccgagggagtacgctgttggacttcaagaaggagacgattcagagctttgagcttctccttacacattccaaaatgtgttctattccatttagataggcttcttcgagtattctccagtttcgaaacaagttggaagctcttgatcccattaacaacaatatcccacgcctccttgattatgactttgcaacttgcatctctcgaccacgcatccagatatcgaaacggggctttgaccctctcacgatcaaatagcaggtccaacataacaggggcgtgatccgattctttgataaccaaagatttgaccccagccttaggataccggataatccattccgggtcacagatagcccgatccaaacgctctttgacaaggtttgggagactacgaccattagaccatgtgaagaaattcccagtacaaccgagatccactccacccgtaacattcatcaactccgtaagatgatgacccccccccgcttcaaccgaacgaccaccaaatt

SEQ ID NO: 222219 - DNA, 1068 bp, Cannabis indica
tatgttcgaatatgagttaataatttatgaatttttaatgtgttagttcggtaaaaatagttaataattacctatgaaatgataattttttttagcggttaatatttaaaatataaatttttagaaattacacagtgaaattacacttaattttcaacaaaatcatgaaaattgaagagtataattaaaaacttttgatgacctcaaattatatagttacagtttaattatatgcaaataaatatatcaaattatataatattaatagaatcaaagtttttgaaagctttctgaattttaccaaactaaattcgatattaataattattacagtatatttaaggtattattatgtgacatggataatattgatatataataactcaatttatacgtacttttacatgtactaacctttttgttgagagtgttcctcttctgggcttcctggtatcatttcattgtaccttaagtaaggttttgagttagttccaatactcagtttattagtattacagctaatttcatggtcttgttctttacttctccatgattgttttgaaactctcaattcttcaatggatttgcctcgttttattactgatatgtcacaattaagcctttccaagaagaatttcttttctctcttcatctccctgcattgccaacccatctcaaagttacttaattatttttttctcaattgaagtacagagaagaacttttaaattaaaatgaaacatttataacttaattataatattacttatcaagtattagccatgtcacttctgactctcttgcttgctccaatgcagccccccttccagcaaccaccctcacatggaaatcaatctgattaatcaacaagctactaatatttaaactcatcatcatcatcatcatcatcatataaaatcataacaattcaccaataaactatacatgacatctctttaaatagtgttatttttagtatttctcaatttaaaaaatgatctatctctctacttggaagttggattaatcaatgataagttttattcagtaataattttttttaaaaaa

SEQ ID NO: 222220 - DNA, 1768 bp, Cannabis indica
aaaggaggtgtacaatatgcctagtcagagtcgactacttcactcagtggacaaaagctaaacccctagtgataataacttctaagaaagatctcaactttgttgtcaagaacgtcgtatgtcagtttggactgtaatagaagattatgtcagacaccaggttacggtttgacagtgacatgttcaatgatttttgcagcaaacacgacatcatcaaaagcttctctaccgtttatcgccctcaaataaatgggcaggtggaagctatgaataagaacctcaaggacaccttgaaaaagcatctagaagaggaaaaaggcaattggcctgaattactcccagaggtactgtggtcataaaggacctctgagaagacagccacctgacaaacaccatttgcattagcctatggctatgaagaaatgttgcctgtagaattggagccaccttctcacaggaggataacctttgaccttgaagtaaacaacaccttgttggtagaatcccttgacaaaatagaagaaagaagaaaccaagccaacctcaagctacatgcctaccaacagaagattgccaggtacttcaacaaacatgtcaaggagaggaaattctttataggagacttagtactctgaagagtgttcctaaataccaaagatcccacagtagaagtgttcgtaacaaactaggaaggcccttatcaagttacaaaaataacgagtatgggtgcgtacaagcttcgctagtacaatgagaacatggagttagttctcctaccaagatattggaatggggaacatctcaaaaagtactatcaatgaccaacttgtaagaatgctactcttgagtattagttttgtcagctcatttataagagtaaatgtacaaagatctaagtatccatcacactttattgatgggccctgcctggtatgtcaggtaggggcagccatacgagttctagaagcagactttttattttgtaagcttttagaatcaataaaggtacgttgcacaacaaaaacatatattcaagaccaaatgatgaataaaaatggtgtttcaatttaatattgtgtcaaacaacttgcaaacaagataactttttaaaattattctttatttttagttccacatgcgtgcaataggtccccacaagaaaaaacacaggtaaggtctataataataaatgaattgtaagtgccccagagaccataagtctgcttgatcacttgggggggcacccacatcgtacaagcatcgaacaagcacagctaaacttatacaaaatttaaagcttttttttaagaaaaaaagtaaaagctaagtatgtgcaaaatgcatacttcagattatatataaaaagtaaatctagatacttacatgtctaacaaaagaagataacaactaggattaaagaccgcttggcctatcatatgtccaaaataaaagcccttaaggccatatacaagtattgttcaaaagtaaaaggcccttaggccacacaagaacatgaaagtaatgcgaaataaaagcatgaacaactaacaaaaagtgtctaatcatctgcaggtgtaggtgagttcaaagtgtcttcgccatagatggtagcatcagcttggacgagcagagcgtgagaggaaggctctacagcctggtctttaaaaggctagtcggctatagcctcagtaggttggcctaccattacctccataggctggctggccacaacctccttcagtttgccagacagtgctccctcagcctg

SEQ ID NO: 222221 - DNA, 3036 bp, Cannabis indica
cctcacacgcgtatcaaattctctagtttgtatctgtaagatattccaaagtaatttccagcacatttttagaaactaggatcccgcttaaccctacaatatttggggaccaaaaaactatagcaattgttatgtaggtaccgaggaggaactcgaacctcagaccttgtgggagtaaaccacatgtttgaccatttgagctaacccctcttgggtgaagtaatttgcagcttttgtagtgatgctttagcaatataaaccatcatctaatcaaattaccaaacacaaaactaaagttgttgaatgtatagctactatgaatgactacttgttatttgatttggttagagtggaacagaaggcttttcgaaaatatagggacactataaaaaatccatgggataaagttatattttttggtagttatttggttacacactaatgtgactagctttcggaattctttaggactgatcacaaaaagcgcagccaccgagagtacttaaagtacagatgtaatattactataccgaggactgttctgcttatggtttttttatttttctctttatacaggagctggaaaagtcgaagcctgtaattttaaccggtgatctaaactgcgctcatcaagaaatagacatttataaccctgcagtaagtgccattttatttctcttgcaactcctttcgttatcgtctggtagataatttaaccttgggaatgggaattgggaagtccacatgctaagaaatttgaaaacttgttaaataaagttaaggacttgagcctttggttgcccacattcacattgctctttgttatttctggagcctcgtttcttctcgtcgaagagaaaaagatgactttttagtatctaaatttgcatttcagactatcatttaatttgatttgtggatcttttctttttgttcttgatgcaatacattagggaaacaaaagaagtgctggatttactattgaagaaagggaatcatttgagaaaaactttttgtctaaaggatttgtggataccttcagaaaacaacaccctggcgttgtcggctatacttactggggttttaggcatggcttgcgcaaaactaacaaaggtatttgatcctcactctttcaccatgaatcgcaaatacataaatgtatcaggtttgcttgtagacatgttattcccggtgattctatcatcatcggtatcacattggcttgcctcagcttgacaagtgtttcattttgttgctatctcaacttgtctttcgatttgattcttcgattctatgttgcttacttgggtaaattaaaacagggtggcggcttgactacttcctcgtctcagaatccattgctgaccaggttcacgattcatacattgtccctgatgttcatggtagcgatcattgtcccattggtcttgtactaaagttgtagcacagaaatcagcatcactggcagcttcaataccgatactcggtgttatgatttcatttttttgtagaaaatttgatcttcggggccaaacatccttatttcttagccattttgctgcgaatgtagatttaagaaggcaaaaattttctttgttattttgagcttttctaagtcaccaccttagttttatacacttcaagatctcccacaatgaaaaaacacatttttgactaaactatgatgatatttaaaccaccaacaagaacataaaatattactaagcaaatatattaacagagctaataaattacttaatccattctttatatatagggtctgtttgtaacttaaaaaataaaaaagtgaacaataatgattttgtttgtttggagatttgaaaatctgcaagaaaaaattttaaatagaaaaaattaggggaatcatttttaattaaaattgaaattttactttccacatttttaattgaggaaaatttgagaaaagtggagaaagtgtatcaggctatgagagcaatagtagtagcgaatcctcttcttcaccgttgctgccatcgacgctttctctaacccaatgtaaccatcaactcaaatttagaacctttcaaagcttcactcaatggcgtttctcactacccaacttccttgttcgtaatgtaatggtaaagacactgcaatgtgcaacaacaacaacactggtggaagaggtggcacgtgcagtgaagttggctttggaaggtgaatgcaatggtaaagaataacactagatgatagcaacaatactaatcatcataactccaccactactaatgtttctcattaagcttaattaaaaaaaaaatactttttaataagcaacaatactttttaatatcatatattgatattaaattggaagataaaaaattaatatgaaaatatggattaaaaaattattatcttataaatagtttatttgaaaaataaaattaaattaaaaattatatcaacattttttcccatataaatcatcagagaaaaaaaaaaatagggattatttcacaaaaacataaaaaacaacaaaaaaattacaaaaatacggtttcacggaattttcaatatttttacaatttttttgattttatttacataaaatacggtatttttatgttgaaatcttgttaatttgttgttgattttttgttatctgtatgttattttttgttgttattttgatgttatttttatgttacttttcttgttaagtttatgttgttttcgtgttattttttggtaaaaccgtaaaaattgttaaaaaaaaaaaacaattctttgaacgtaaaaatataaatattttacaaaaaatgatgtcttatgtaattattccaaaaatatatatcgaaatcaatatgctgtttggctgtatttttaatttttagtttttaaaattgtgtttcaaaagtaaaaatagaaaacagcttttcgtcattttaaaaattcaatggtgtttggctcaagttttttaaaactatttttagacttttttaccaaaaaaaaaaataatattctacaccataccatgacatgaacctatcc

SEQ ID NO: 222222 - DNA, 2696 bp, Cannabis indica
taaggcggttttaaccgaagtcggtttttcggttttcggtttttcggtgtcggtttttttggtgttcggacggtcggtttactcggtttggtcggtttcttggattttttgctcacccctatataacagtcaacaaaatttattccatagtttaaaatagtacatgagacttacaaagaaataataaacccccactaagaccaactctaggaacttttatacattaggaaattgaaatacattgcgaaacttagttatagaatcaggacaaagtttagattccataatgaaaatggcatcgggagaggtttgtgaaatgagcagtcgcaaatgtcggaacgctctcggattgctaaagccccaagcattccagctaacaatattcatggtgattggcaaggctaagtagcagccttcaccaaagaaaggccatcaccaattgcctcatgtgaatgattggacaattcagaagaaggttcaggttgctagtgtagcagagagtttgtagtgtcagctagaggagtggctcttgtacgacatcttttaaggacatttctaacatttcctcctgtagtaaccaattgtcttttggtgaagatggaagacattttgttttcattagttgtggcataagagttattgaaacctggtggagcaaatgggatatccgcagcaatagtttgctcaatagcaacagatgttgagtgagccatctctacttttgatggaggaatttttgtgttgttgtgattcgagaagagatgtgtatgtatgctggaggagtaggaattgacaaagcaacagaactatttgttacttttgaggatgtggcagcatctatattgcagatcttctccttagaggttcgactaagacttagtgatggtagaagactttgatatgttaagtgagaagtggaggtattaccaggcttggccgaagcaattgagaaattggcaacagtattatttaatatatcaatcatcagagagtgagtagaggatggagcaagttgtccttaagaagccagatcaatgataacttttgaagaacaatctttctcttgtgaaaattgcgaatgcagatgttgaataacattttcatttgagtccataattcctttacccttttcccaattagtgatcaatggtggcaaagcacaaggctatcgtatttgatgagtgactgggttaattgtgttacgggccaggcgggtaatgaaaggtcaaggtccagatttggagaaatcttgcctgtaacgattgtatcctgagttaggtaaagtagaacctttgatccaaggcccataaaggagatcagggtctccaccttcatcaatcttttccaagaaaacagggcatttgtcaaaaacatggcctataataccacattcataacaaaatcaggtagtctttcgtaacggtattctagccataattcgccagccatccatgggaaagtaacagtgttccctctaagcagaggtttgaacacgtctatggaaactctaatccttaagaagggaccccaaccttcattgagagagtcttcatgaacttcaatgaacgatccaatctgattgccaataacttgtgcaagaaattctaatttgcttaaaaatggcagacgatagacttgtatccagaaaggagtaatagagtatgtctccattgatgcattaaagaatcatatgttgattgtagaaatgccatggttctttagatagaactcgtcttaggtctccttcacagccgaaagataccatgtaagaatcaaattcgtagctagacatggtgacttcagatctttctttccaatgagtagtgatgaaattgttgaattgcttcaggttgtaacctttttttgagaaaaatttacatattagctggtgagatgtagggcgtggcggaggaatagcgatgttggtaaggttgataacttcacgctctctaatagatagagcatttgataggtcggggttgaaggaatccataaggcaattaaatttgaaaataaaaaaaccagatagaaaatcaaagatagaggggatcgtagacagttgtaaatagtggaggatggtgacaaaagcagatatagatggtggtaggagaggttaagggtgatggaagtggagataaattgttaaaagacagttaaaaagataaaaaataatcaactgccacagagcaaattgaagggcagacaatgctcaatcttcattcaaaaaaaaaaaggaataatgtaaggagatttttttagagaaataatgtaagtggattcaaaagaataatgtgatatgtgactcaaatatatttttataaaattgtcacccttttatatggacaaattgattatgtatatatcaattgacatataaaattaaatttaatattgacttcacttatgtgagagatttttctcttaaaaagaaattatgtgagaactttatcaaattaactttaagagagaacatttattaatacccaaacaaattatttaggaaaaagagtttggaatggaaatgtataaaaataaaaaataaaataagttgtacatattgttggtgattttatactgatgggaaaccaaatggcaagttttattaagaaaattttatatatattttttaggtaaggaatgtttctagttaatgttggttgcttggaggctttatggtgatagtttttttttttttt

SEQ ID NO: 222223 - DNA, 3316 bp, Cannabis indica
tattttattgtattatttacaggttattgtttattcatgttttcaaaattaatacccagaaaaacattaataacttgattgcagcagttacagagctctcaaaaattcttctcgttttgtttcgttcctaaattatatatcatgcatatgttgttatatattgtaattattacttatggtgatcaggaatattaagtggagagatagcaatgttttcttgctggtgggcagaaaaattacattggagatagctttgaaaatgcagagacatgcgtacgtacatatatataaatacatacatatatgtttgtatatggccaaaaaaaaaggctatactacctgatttcatgaattaatgttagtagctagagtcaatgtcaacctgtacatgagaataaaagtggctttacgtaatgcttattacttttctttctttttcaatacaattctatgatcataatgatgagatgagaagagatgagatggtgaaccttttcttttataatatacacataacgcttaaagttaaaacaatcattacaactctctttagtgctttttgtgtcattggcccaaactgctatttggtgtgtggttctacattggattccaaaaaccattaacttttgttttgcttgatttgaaatggtggtgtgtgtggtgtggctagctaataataattaacctaaaaaaacaggtttttatattattttttttattatttttgtcgacatctagcaaagtcaatttaatatcttccagatgaatgaatcttattaaaagagactataattatttttcttaaaaatgatatttagttgcgtattatctgtcccaaaaggactggaaaaagcaccataagtttatattactgtcttaccaagaaagaagtcaattgcctgcttttaatacaaataatttttgttcttattttcagattttgttgttcgtcaaataatttgttatattttcagtttttttttattgttaaatttttcggtttaagtttcataagtaatttgagttgtgttcattgaatactattcgatgattttggttttaggcttattggtccaatctgattagtactttcatttattaaatttaattctatttttatttatttatttaactgatatttgttgaatatggagtagtgaaagaaaagaattcattgtattaatttagaagagcagagctctttatatacaagtacacttcaagaagttagttagagaaaagcttaactaacataacagctaagtaatatattaaaataactaactttaactaactacttaacgcccccctcaaactgagctgggataaggaagtcgggcttagtttgtcttgcaacagtttgaatcgagatgcaaaaagagccttagttagtatgtctgcaacttggtcttgatcagggttatgcttcacatgaagttgctgctgcagaattctttcacgaacaaaataaagatccaattcgatgagtttggttcgtgagtgaagcacagggttagcatacatgagaactgtactttgattatcacaccatattgtaggaacaggtagtttagccaaaccgatttctgcaagtaatgactgtaactaaacaacctcggtagtggcattggcaaggcttcgatattcagcctctgtgctagatcttgatactattttttgtttcttagaactcaaagatatcaaatttgagcctaagtagatgcaaaaactagatatggacctcctatcatcaagatctgaggcccaatctgcatcacaaaaccctgtgacagtcaatgcaggatagggttttaataggaggccatagtccaaagtcccttttagataccgaagtacctttttcaccacctttgaatgagactcgagaggattatacatatactgagagaccttgttcacaacatatgcaatttctgacctagttatgactattgcaatgctctaacaatgcttctatattgcatagggtcaacaatggggtcactgtcatatgtagacagtttttctcctccagtcataggtgttgacaaggaatttgtattgtccatcttggctttgcacaacagatctgggatgtactttttttgacacaagtgtaatccagtggagagttgataagaatcagagatgaattgttggagacgatgacctctgatggcagaaagaacttgagaaggccataataggaagttgttatcatcgagttttacagagactaagccatggcagaagaaagaaacgaacagaaaaatagagtatagaagcagcaagctataatggaggaagcgaaaaaaattggtcagataccatgttgaatatcgaatagtaaaagaaaagaattcattgtattgatttagaagagcatagctctttatatacaagtatagttcaagaagttagttagagaaaaacttaactaacataataactaagtaaccaaaataactaactttaactaactacttaacaatttctactaaagtctgagctccaagtaaatcactttcgcatggtgaacatggatatataagtaaggtcttagaagatgtaaataggaattggcaaatattgttgtattccttagagtagtttgcacagtacaatggctatatacgtgaaagaaagaggggccacactggtacgtgtgcaagacaaagaaagaaagaaaaaaagataaagcaggggaaggaaatacaatataaattatttaatttttgatggtttaattaaaattccctgcaaactcatcaggctaggatggacggtgagtttggcgcgcaattcctaaaagggagttgtatgcaaagggcatcgttaatcagtcagtgacttgatcgaaagatggagtataaacgagagcatatggcgattaaaccatttacgtacaaaatgataatctatttcaaaatatttagtgcgagagtggagaacaggattaaaagccaagtgaatggtgctaacattgtcatggtgcatggtgcgagctaaatgaagaggaaggactcaatccaagaaattttagaagcaccattcataagagcacaatactcgaatttgatactagactgagacatggctatctgttttaaggatgatcatgaaagaagattcataccaaggaagatgcagtaagcactcataccgtggctatcattggggaagacacccaatcaacatcaatataacaataaacttgcaaggtggtgtcagttgtattagtaagtcaaggaagaccgagcctttgacatactagagcacacgtctggcagcttgaagatgttgggttttgtgccct

SEQ ID NO: 222224 - DNA, 1663 bp, Cannabis indica
attgtcaacttctaatggcaacgagacaccagcttttcttctctcttctaaatttaccaaaacattcttcccacggcctttcctcgattcaccgcctatgttgtcatcgaaaatatatatgtatgaacatttgaattaacaaattaaatacttaaatagaaaaacaacaaaaataccagaagtctcgcacgcagcaggtaccccagtagaatctaacgggtcatccccaccgccatctccaccatgataattagcaacatttgctgacatttttatgctaaaaaaggaataataaaatcatatgagcccttacttaagagaatacgaacaacccattaattattaaataataatacaatgataatttcttaaatcaaaatgaaagaaaaataattagtcatcaatacaaacaatactaaaatccattattcacaatcatcatcactaatgaaatgtaaatttgttgcgggcacatcttaaatttcatcttcaagatgatcagtaagcaaatcatcatccacgtcttctaaaatttcttcatctttgtcatccctaatatcatcaacatttgcaaccatctcggaactttgagggacatctacaattcttggtggttcattagtttgttgctcaatcaactcccccaaatctactgatagtgtaaaatttgatgagtttgtgtcacgtacaacatcaatatcatccgtctcatttgaagcatccaaaatattttcccaaatttggcggtgatggatattatgaacaactctccaatttttacctctaactagatcattcacaaagaaaacttgtttagcttgattagcaagaatgtacagatcatctttgtaccatacaccactaacatttatgctagtgatattatttttggtaatgatttttttctttctcggatctgtgttgaaccacttacatcgaaataatactactggatatgcaccactaaaggacaaatgtaatatttcttcaagtttcccataatagtgaaaacattctgtccttgcaacagacaccccactattttgagtatagtaatctttatctcgactgtgtacaacaaattaaactccattaactaacatgccggatatgaatacacaacaagatcagagctagatgctaaagctagcaattcatcactatgttctaatgactcgcgcttatacaaatcaaaaaatttgaaaaaagacgcataacaatcaagatttgagagatttgataatttagattaagtaaataatatggaaagaaatacttgcacacaaatcaaattttttgaaaaaagacgcataacgatcaagatttgagagatttgataatttagattaagtaaataatatggagagaaatacttgcacaccttcttatgaaaccacgaaggaaattcttttttgtgtaaaagattatggttagcattcgggtccttttgtccgattacttctaggtgctctctattaaaagagaaaaaattattacaaatttagctaaatagaataatacaatgttattcattaagcattatgtaataatttgattaacttatgtcatataaggttcgatctcgatacaattctgtaatatgtaccacttagttcttttgcgagtcttcttgtcgagaattgttattgtttgcttaccaagt

SEQ ID NO: 222225 - DNA, 2111 bp, Cannabis indica
aaagtaaaaaaaaaaaaaacggagtggaatcatttcataaacatgcaaagaaataatttgatacaatgatgacaatcttcaatagatgatgtaatatttatattaaatttgactgaaaaataattaatatttcttttctgaaccaaaaaataactattattttatttatcttaaattttataattatgttccaatacatacaatatgtaaattaatttaataggtgatcaacaaaaatatttagttttcattaaaagcatataaagataaataaatgaaagttatgaattacattaattagaaaaaaaaacaataaatgaattttgtgatatttttattatggtgtaaatttaatttattctatattttacatcaaatttgatacaaatgttaatatatattgaagttagcacacattttaatattaccaataaaatattattttgctattatacaaaaaacttttatatgacattatatatatatattgattttttaaatataatttaatttaaatttgccatattaaactacttgaactaagggggactcgtccttattttattttttatatgatataacatgttaaaaatcaatacaaataaatatttttatagtattaaataaaatttaaaataaaaaaaataacaataaaaataaaaatgaaaatactacctaaaatttttttgggttagagattcaaaaaataagcttaaaatattaataaataaaaatactattattgaaatttaaattcttgaccttcaatatatataaatgtaaaataacttaacaattagacaaaagctaatactatattagtatataaatacctttaattacacatatatattgtaactaacaaaatagttgtcccctctcggctctatatgggttcgccagtctatacgatttatgatacttaacctcacaaactaattttttgatggtaaataaaatcctccaaaacccatttcagttatgctatttattatttcgtctaacagagtgccaagttggatatactatagtgtactcaggtatacatgtagcaaattttaagtgatccacataatattaattatttaaatattataaaaataataaaaatcatttaattttttttaaaaaaaacataaaaactgaatcaattctttttcttctttcttttggttgtctttcttatttttttttattctttcttcttcttcttccttctaccacaattatcaccataactacaacaccactaccattctactgttaaattatagtactaaattaggtacacagtggaagagttttgtattgtctgattatcattgtattaaattacaatggatctctagatgtgttgtatcccttaatccagatgatacaatttgaactcacaccaatgtctttcaaatcgatccaccacacacaaagaatagtgtgggctattagaataaagtatatatgcatgttcttgttgagttcttaatttcaaaaatcatagttcagatttctcaaatcaaaattctatttatagtagttaaatctcattaattaaatcataaataaggctacttgtacacaagatgcaaatggacacatttttcacttagctttttctgttgtggattcaaaaaataacaactcatgacaatagttttttataaaattaagggaagcatatggggtcagagaagaacagtgattgatctcagacatgagagcataattaaggcagctgctcatgtatttctacaaataactcacgactactgtgtataccacctattaagcaaccttcaagaaaaatacaagcaaactcgataaaccattctttccagcaacaaaagcatacataaagaggaaatttggataccatgtgagcgagcttgaaagcttgtacaagcgtgttaaaccctacttacaacaagttggataccacaaatgatcaaggtaccacatcaaacacgacaggtatacaaaaaaacataaacaaaaaaagttaacagaatgggaaaaaataagaataaaacagttaagaaactacaaattacatgctttaaaggtaaatcaaatatcttatctttaaaatcttaaaagttggatttttggtccaa

SEQ ID NO: 222226 - DNA, 2461 bp, Cannabis indica
aaagtttagagaagtaataaatagtactgagctttatgcttctgccagaagaagagtacagagatttaatgaagatgatgatgatgatgaagaagaagaagaatatggttatcatgaagaaattgcaatgttggaattgtatagtcaaaatgttagagatgaagcacttctactacaaattttgctcgatggccaagaaatccaaatccttatctttaaggtcacttgtactacttttcctttcatactatatttatttatatttatattactcttctctctatactctttccactaaactaaatatcatctttgcatgtatcactataattgtcatttttcaaaattcaaaaattttaatttataaacatataattagaattcatgtttctaaaaattgattcttttcaaaattcaaagctgttattctcattttgtatattttgaaacaattcatgacttctttttaacaaaaaagaaaagttttttttttttttaattttgaaaaattgtcacaattgtagatatattttgaaaagattaatttgtgacttaaatagttaagtttaattctcggataaatacttaagtttaatttttaaggtaataatatttatgttatatttttggaatttttataaatacttggccgttaaatgtttaattattatttatgtatcatttttttattggtatattttaattaatttttaaataaaaataaaaatttaatgacatggatcaatcaaaaatcggtacgtggttattggttaacacttaatgctcttgtgaaagtttcgaaagtataaattaaatattttttactgttaaaaattaaatttaattatatatgtacaacccggaattaaactaaaatatttatacttaattattcttttgaaaaatggcatatttatctctttattaaaaacttttgatattatttgtgaaattattctgcatattatacacttcttccagaacaaagaatctaatttttagaaacatgaattgtaattattctacaaagctattttattaacttttaatttaaccattttttttttctttttttttctaaatgaaatttgacagggattctcttcctgcttaagccacagtacatcagcagacccatcaaagagcatagttccagccagagctgtgataaagtccatagacagaattaaaggtccttttgacccatctaatattcactacattcaaaaagccctatcatggcaacaatttaagaccactctcctatccaaatatgataatacctaactctacaaaattactctttttattcatttatttaatatcacttcactcctacattcttactctcccaccaaattctattattgccttgtgttgtgcccattatgaggaaatattcaaagaagaagaaaaaatgttataaaatttgtggaaagagtagaatgttaggttacttaggttaattagtgacccaactctatgtattgtgattgctaggtaagagactaataatatactactcctagtaaattaggaccttgaaactattaagctattaaatgattgtaaaatatacgctacactcaaaaaaaaagatcaactatgtaatgtaactcactaaatatactgttgtataaattgctaatgggtgatcaacatccaatccaatccaattgaaccgaactgatccaattcaatccaattacaaaaaattggatatccaattacaattggattggatgctaaaagttgaattctaattgaattagaccagttattggatatcaatctcaaaatccaattaaaaatcgatcaaattcaattacatttatttgttaaaaaattatttatattcatctatataataaaaaatataatatatatattaattagatttttaatttttttgtgttaaatttataaaagttggttgttttgtgtatttattttcatgatattttgttcttttttattttttagaaatattgttgttttaattatttaaaacttttagctgcattatattgtaagatggtatgtttatggagtattaaacttgagtaaaggataatatttaatttttacgtatttttttttatacttttatgctaatattaaaatttagttgtgtaattggatatccaattaagaaaccgatccaatccaattagtaattggatgaattgaattttgagatctaattagattggatcggatgatgatttttcaaatccaattactaattagattaaattggatgaaaagaacaaatttagattagatcgaatgcccacccctaattggtatcacctaaacataaatgggaataaagcaactttaacattgaaataaaagtggagatttattgattatggttacaagaaacaattagtaggaccttacatgtattaatatgttgcattagattagcaaatccgatcaatttaatatcatacag

SEQ ID NO: 222227 - DNA, 1507 bp, Cannabis indica
atctgatccacgtgtcccctcttgactggtccacgtattttgggcgaattttggagcaacactttgaattccactatcgagtcaagttaacgggcttgactaacccttacaaccgagaatttttcaccaaggtatttctaaacctcttacaatagttttacaccgccaaggactaacaacctcaatctcgaattgttaaagttccaatctcactctaaccgatttatttacaatataggtgccaacttcacctcaataataatataaatgtgtgtttttaattagaagccaactcactctacaaaagtgaagagcctagagtgattagcaagcacacttagataaaataaatacaaattttggctcaaagtgtgtgaaaaatgttttgttggattttaaacatgggagcctgtaaaattacttaaatatgtttggtatatggattaaatgctcaatcaacctcaacttttgagtgaaaaatgagtttatatagtgttggagtgaaatataatcgcttatagctgttagcacaattttctaggtgtaatctatcgtgatccaaaataccggatgggaatcgaaattctagagtggttacaaccagaattccagaaggcttataggggcaaattttccattttttgcatatttttttttctcgtttatccaattgcaaaaagtctaattacattatcttattttaatgaaatgtgatcttaaaaatcaatttaaaaaatttatatatcatttttatgaaataacttgtcgcacaaattagtgagccaaatttatacttaaaaaatgttaagtgttgacatgtaaatcactgtacgagactatgaaaggtgaacaatgttcatggagtcttgtcttgagttccttgagtcttagaatccacttcgggccactttcaagaattttagtaaaattaccattttgcccttggaattaattttgccttaaaaagcttaattatctttaatttttgttacaaaatcatcaactcattagtgacaaataataataataataatatatttgttaatcattaaaataaggagacttaagagtttgggtcaacattggccagtccaaaattaatgtatcgcctctagacaaatgtataaaagaccaaagctaagatcagaaaggccacttgaagcttcaaatgattttccaaatctcagagctggtctagtgagagagtagaaagcagagagagagagagagagagaagtccattcaagagtttcattggtgcatgtatagaaaaaaagaaagagaggaagtcatacagagagaaaatcaaaagaaacaaagagagaaaacgaaaacataaccaatcaacttgtgatttggtatctgtggtgaatttaaacattgtaatacctggatttgttagaaatgaagaccagactactatgaggtagcttgacggagacgtagccattgttaggtgaactctgagattattgtggacattgtcccacatgaaataaatggtaaa

SEQ ID NO: 222228 - DNA, 2618 bp, Cannabis indica
tggtaaaatattcccaacattgacttagtttaattaacaacttaagtagtcgttcagaggtattgggcttggccaatacttattgaagaggataattagttaatatctcaatcatgtgggcttggaaataaggtcacagcttttgcaaagccacaagtaaagcaaatgccaagtgttccatctatagatagcgtgcttagcatctagtaagcatttttttcacttaatagatagggtgttgtctaccttggtcttcgcggatgagcactgagctaatcatatactcagacaccacaaagtagattgagagtacttctccaggcaatgacttggagtgtattgagggctgccgtaggtgcttttttagagcctgaaaagcctttttgcattttttagtccattaaatttttttattaacctttaggatttgaaagaattctttacatttatcaaaggagaatgaaacaatgcgatttaaggtagcaaccttacatatgaaactctgtacttctttgggtttagtaggagatcgcatctcaaataaggctttgatttttgcggggttggcttcaattccttgctggttgaccatgaagccaagaaactttcctgatcctacaccaaagatgcactttaacagattgatctgcatcttatattggcgtagaattttgaacattgaattcagatgggcaacatggtctgtcacaagttaagattttacgagcatattgtcaacatacacttccatcatttttcctaacaaatctatgaacatcatgttaactagtcattggtatattgcacctgcatttataagcacaaatgatcactttataacaatacaaaccatgatctgtgataaaggaggtatgctcttggtttggctcgtacatcgggatttgattgtatctcaagtacgcatccataaagctaaggagatcaatgctaggtaaagggaaattatccttaggaaaggctttatctaaatttgtaaagtcaacatatatgcggcaagagccatttggatttggtactaagataggattagctaaccagtttaagtaaaatgactcctttatgaagttgcatgctagtaggcagtctactttaagcgcttagtacctcgcggagcccattttacgatgcttctatcatactcatcgcacgtcaggatctatgtttaagcagtgacacatgacctcaagcagaattccaaccatgtttgaatgtttccacgcaaagacatccaggttttgtttgagtaaagttactaaccttcctcgttcttgtagagttaatttagaaccaatttttaatactttagaattgtcaaatgaatcgattggtacctcaaatgtttcttccatagcttgtgcggtgtttgcatagttgaggactctaggttccagattgggcttttccacatgtggtacttcttcaattctaaatgatttgtgtcaaggcggaggtgctttgagcatatatattacattcactgatttcttcttctttgtgattttcaacgcagtattgtagcactccctcgagtttgcctaaacaccgcttactgatcctatacctattggtataggaaattttatagtaagatgataaattgaggttactatcttcatttccttcagaatgggatgacatatcaccgtattatatgcaaaatgatgatcgtttactgcaaagtctgccatagactttgcgataacaagtgttgtccctaatgttattagtattttaatcataccattcagttcaatcgtatctctagtaaaactttagatactcaaagttattgggtcttagtatttttcatgtaacccatttgtttgaaggcttaaaaattctagaggttaactgagctaccattgtcaacaagtacacaatggattttcgccacctatattagcgaccaataccaacgcatcagcatgaggatggtatacccatcttacatcactttccatgaaagtgatatcatcacattccttcttaaaaagttttttcggtgtttcacttaaattgtttagatttgtcaatggtttctctttggcttcctttgcgtaatgttcctatactttcttggagttgttaggttatttttagtattaaaattaggttaattttagcacatttttctatttagtttaaatcatgtttggagcatttttacatttttatcttttaattttgcagatttaaaatagatgaagagttgggaaatatcaatagaaaaaaaggataaaatatcgcataaaactatcccggtggaaaatatcaaattcagattcgaaaaagataaaaacatgcggaatttggagcagaggatcacacgggtcgcgacatggtattagcatgccacagccccctacatggaagaaatctaaggaaacctcattttggccacacgggccgcggcatgggtttagcatgccgcggcccgcctcttctcagcagaagaaaaatatctggcgtgagatttcccaaaattcaaatctgaatggaatttaaacttgtgtggttttcccatctttttaggacctgaatgcctatataaagagcagaagagagttgatttcatcaagcaatttcatagagaaaaa

SEQ ID NO: 222229 - DNA, 3855 bp, Cannabis indica
attgactgtatgcttactataaacaatactagttttcatttatcttgctattatggatctccctatgttgctgataaacaaacttcctggacattattgcatcgtcttttcgatactgcccctctctcaccgtggctcattattggggattttaacgattaccttggctttaatgatcgtaatacccgcggtttaccaccaccacatgccatgcattcttttcaaagttttattggcaaatactctcttttcccgcttgttttctctggcagccgattcacttggaagcatggtaccaccttggagcgtttggattgggccattgttaatcagaaatgggctgatctttatccaatggcctctctccaacacctaggtttttttggttctgatcacagagcgctaaaagtgttgctggaaggcaatcctgttatgtttgctcgcaaccccacttttcgttttgacaaccactggttacttgagcctgatttccctaggcttctcagagaaagttggtgtacggacttaaattcttccgcttccaataaccccattctcactttcctgtccaaacagaataattgttctgtttctttgtcctcttggggtcgaaataaaaatcaattttcaaatcgtatcaaaagtatccaatcggacatggagcgtctcatggtgggtcctactgtctccccttctgatgtcaaaaaggccaatgatctccagaaaaatttagatacccttttagtcaaagaggaaatcttttggaaacaacgctccagagtaaattggctaaaagcgggtgacaagaatactaaatatttccataaccgtgcctctgcgcgaaaacgtaccaacttcattaaatctctaactctggaagacaactctcaagtaaccactatcaatgatattaccacctctttcgtccagttctacactgacctctttacgtcccaaggcactcacactgacgctatgacttttgctacgcaaggtctctctaaacgtctcacccctactcaatcaactttccttacctctcctttcacttttgatgaagtcaaaaatgctctctttcagctggcaggggataaagccccgggttctgacggctttaatcctagttttttccaaaaaaactgggactctgctggccaggatctctgccaggcagctttatatgctctcactactaatgctgacctcagccaggttaatgaaactatcttggtgctcattcccaaaattaaaaacgcttctcgagtcaaggacttccgtcccatcagcctctgttccactctttacaaggtagtttctaaaaccattgccaatcgcctcaaaactattctcccggatcttatttcccataaccagggcgcttttctctcagatcgcattatttttgataacatcattattgccaacgaagtcattcatgcgatcactaaccgtaaacatgggaaagttggttgggctgctctgaaactagatatggaaaaggctttcgacaaagtggaatgggcttacattgagcacatcctccatcactttggcttcccctaccctttcatctcactcattctcaactgcctttcctcagtctcttttcgtctccgcattaataattgtctctctcaccaaattctccccacccgcggaattcgtcagggtgatcctctctcaccctatcttttcctccttgttgctgaaggcctctctgggaccataaacgctaaaacccactctaactctttccacgggatttctatttcgcgctccgctcccactatctcccatcttctttttgctgacgacagtcttctcttcacaaaggtaactccctccgcggccagggaaatcaaggatattcttaacctttataacctcgctactggccaatctgtcaatttccacaaatcctccatccttttctctcccaataccatttcctctgattgtcgttccttcagggatactcttcaccttgacgataagcctttcattgataaatacttgggtgtccctcaatgtttctctaggtcaaaaacctcctctttcctgtttcttcttaaaaaagccagctcaaagctttcagtttggaatcaaaatctcttctctagagcgggaaaagaagtccttctaaaagcggtcattcaagccattccttcgtatgccatgtcctgcttcagactccctgtctctctttgtaagcattacaccaagttaatgtctaaattctggtgggggtcccttggccaaagccataagattcattggaaaaaatgggacaatctctgcacttccaaattttatgggggtttgggtttccgaaacattgttcatcacaatcaagccatgctggccaagcaggcttggcgtatcctcaccacccctgactcccttgttggccaaatccttaaggctaaatacttcaagcgcaatgattttttgcacgcacccactggccactctccttctttctgctggagaagcattctttggggccgggatcttctgatcaagggccttatctggaaaattggggatggtacccttgtcaacatttctgaatccaattggcttccttcccatggtaaagctgttttaaaacctggcctcttccctccctcccaaaatgtttcctttttcatcactgaagaccgtcattgggacctttcaaaactccggtgttattttgatgaggagatgtgtaatgccattcttgctgttcccatagaccctcataacaatgatactctcatctggaatcatcaccattcgggttgtttcacagtaaattctgcctaccatttggctaattcaaacctttcctctcctggtccttcaaatcctgctacctacaagcgttggtggaccacagtctggtcttctaacatccctcccaaaatcaaacattttgtttggaaagctttccaccacattcttccctccaatcttaaccttttccaccgtaagtccactccctcccctttttgctccctttgtctatctcatcatgattccaatactcactcccttatcgaatgttccagggcaggtaaaatatggaaacactcttcattttatcaattttatcttaaaaatagaaattgtgatattaaagaatttatgctaagaggtttcgaaagttatgataaagatcaattttactctttcttgggtttaatttgggccatttggaataacagaaacagaaccattttcaatcctaaccatgtcactgatttctgtgtgtagagttctgtcagttattatttgcaggaatacagggatttgcagaatcggatatccacctcttgtcacacctcccatcatccttcaccgaatgttcatgttccagatgacacatatcggctttctgtggatgcagctctttctcaatcaactaaccaacatgggtacggggcggtagtaactgattctaaaggaacagtgattgcaactcttatggctacttcacatacagctctttcccctatttttgccgaggccgaagccctccaccgagggctcctttggtgtcaagcagtccgttttccaattgctgtcatcacttctaactgccaaactttggtgcatcgtatccagaaattttctccagatcgttcagcgctctcaggtctagtagccctcatagtttcctctttgtcgtcttttccaggcgctgttgtccaccacattcccagatctaccaacaccacagctcatgaccttgccagatcatccctcgaaacggacaaagagataattcgaaactttttcagttcctctccttgaagatcttagccctgctttagcttttggtttagatcttactttttcaaaaaaaaaaaa

SEQ ID NO: 222230 - DNA, 2198 bp, Cannabis indica
aatcttaccataaatgaaaaaattaattttgtcacctaacttgccaaaaaaggactttacatagatgatttagtaaattgtattaggaacttgttatctccctgcccaaacctcaaagtggtccatgttagtaggagttttaatgtcttggcgcataatgttgctaaatggggtattggacttgatagtgagttcgtttggaatggctctttgccttctttgtagtcttgtggttttggtctttgttctccatgagattttctttcaaaaaaaaaaaatcacaggactataatccattcaaatcatatattatcatcaaagttcagtaatagtattacaaagtttttctctagtaaacctagagactgacgataatattaagattaaataattttagatcacaaatataattatcatcatcatcttaaaagatggatacataaatagaaaaaaaatttggatctctaaaaaagcactttaaattgttagagcacgttgcaaggattcaccatccaaaatttaaactaaaatatatgagaattaaccatttaatctttaagttaaagtgccaaaaccccactttctttctctagctttcatcttctctttttctttcttttttttttcttcttgttgctcacgacacacaactcctttctctttcttttttttttccctcttttaattatttcaattaattgggaaattgggttgatgcccttatttttggtccaagcccataaactgtagtggacccaacaaatttctccttcctagtgggctcttctaagctcgttcttcgcgtacaagttttaagcttctctttaggcaaaatctttgtcaatatattagaactattttcactagtatgcacattttctaagtgcaactctttcatctcaagcacatcacgaatctaatgatatctagcattaaaatatacttggatcttgaatgaaatattgaattcttggagaggtgaatgacactttgactgtcatattagacaatgtatctttcttgatgcaagcccaattcttgtagaaactttttcattcataaagcttccttacaagcttcagttacagctatgtattcaacttctgtagtaaataaagcaacacatttctgtaattttgattgctatgaaatagctccccctataaatatcatcaaaaatcatgaagtagatttcctagaattacaatcactagccatgtctgcatttttgtacccatcaagcataggttcaccattgtcaaagtacaagtacaacctggaagtacctcgtagatatctcaatatctatttcactgcttcccagtgatccttaccaggaggaattagctaactccaactgcatgagcaatatccaaagtctctttataatagagattctctaaatttttagctaaatgtgaaaaaaagaaaaaaaaaaaaaaaaaaaaaaaaaaaaaaaaaccttcaatgctcctttaaatcacatatgtataatagagattcactcaaaccaatgcaacttgctttacatgtagagaatacacagtgcattctctaaatttattttaataatatataaataattgtttatttatatatgtttaaaaaatattattttagtaggggtagaaaataagaataatattaattgaatgatgtaaaagaaatataaagaaaatgatgtatgatgtaatgtaaaagtaagatataaaatagaaaaaataaagttttagaaatttattttaaatgatagagtagaaaagttattgagagtgctctgaatcgtaaaaaataattagaatcgaaaatttattattagagagaaattgaaatcttgatattttgttttaattttaatttttcttaacttatttgggttattttgttttcacaatattattttaattattatgaaataattcaaaattgagttcttgaataaattagattttattatttaatataattaattactttaaatctctgtagtacgtacactataaaaaaaattctttccataatacaaaaagaatattataaatttttatcattatacttttttgaaacaataaaaaatgttgtgttattaaaaatcatgaagatgtgtttaaataatactaactaaaaaaaaaaaaataaaaaaaagtgaatgcatggtatcataactaaaaaattgttttttgtttttaaaaacagaa

SEQ ID NO: 222231 - DNA, 1082 bp, Cannabis indica
aagagatccaaaaaaaccactgccaataagtagcgagccttgcgacccttaagtcttaagtcctcttaagatcaagttcaaatctacactccaaccgtgtacaaatcaaggaaccttcttccctttgcccatcgaggcagggaaaactggctaagagtactactcgcagtttgccacttcctgctggcaccatttcaaatccttccaatctggtgactagaatttgattaacagtggtagccccgaggagatgcttgagagaagcctcaattttaacctctcggttagttccctttttccttctcattgtttttgacaattctttcagattttcataaaaattcatacgtatatttttccttgtaggtctcccttttatcacacattgcccaacgtcgggttctccaaaaggttaagcaatcaaaaatgaccttcgcaaatccattaaacaatgcgaggttgttgcaaaatcatggaatgatgctcaaaaggagaacacccaactcaccaaggaagctgaggaggtaaagaggaatcataaggcagaacttgaagcagcccaaaaggaggccaaggacaaacgcgaggcttgccaaaaacttcaggaggaactcgatgcagccaacgcgaaccttgagggagccgaggctaatgccaaggaaagttgcaacattgttgcacaacggtccatctatcgagcatggatggaaaaccctagcatggacttgagcttcctcagtgaaagtgctgaagaagttttggcctactgcgagcggccaaagaaggaggaagaggctacagactttgaagaagaagaagaagatccatctaagtctcctacaatgtagagttggttttcattttattattttttttctttagaaaaatggccttatggccaagacaatggtttgccccttgtggaaatattattttgtaaagataattttgcattgttggatttttagctttatttttattgtctcatatattatgtttgaacttaacatgtttgctcatttgcatttaaattcataacctaaacaattatttttgatccaaattgagataccttttagaaa

SEQ ID NO: 222232 - DNA, 3291 bp, Cannabis indica
catactagccgagtagccaatgaaacgcacaacgcccaagactctcaggtaaaaatttatgccttgagcgtgtccaagatggaagcataggcaaggcaaccaagatacggagatttgcgtaagaaggtaacctgttatacaacaaactcaaaaagagaatttaaagtagaagtaaaacagatggtgtgtagttcattaaatatacaacaactgaataaacaactccaatatcctagagataaacgagattgaaaagctagagaacgagggacattcaatatatgttgattgttttctttcaaaaacagaattttgttgaggtctttcaacacatgagtgataaggaagaatgcctttggttgtaaagaaagaggacaagttcagttcttttgcattatcacatcgtatccctttaatagagatatgatagtgttgacatcagatttatttttaagcatgtaaacttaagtaaatctagtgtgatcatcaacaatagttaaaaaatattgataaccttctatgcattgtgccccaaatatgcaaatgaattaagtcaaaagtagtaggagccatgttatcagccgaattaaagggtaaccttttttatttagctaagtgacatacatgctaaggaaacaaatatgagtaggaatcattaaaatgaaaaattttattcaaggatttagtaatccgtaaagagggatgtccagccatttgtgtacatcattacaagacctactagtttgaacaaaattacatgatgaatttttttcttgttagagctaaaagagttgtccaacgcgattagtaatcttaatttgtagattctgattcgtgtcctgaatagaacaactagaatgtgagaataatacagaatatttttcattttgaacaatagaggtaaccgacaagaggttaaactaaaaatcaggtacaaaaagcacattagttaaacaaaagtcagcattaatgtggacaacaccagatttattaacagggatttttataccagtaggtaatgtaatgtgcaaagcactaggtatagtatcaaaagaagtaaaacatattttgtcaaagcaaacatggtgggtagccccactataaacaatctagagattatttgagaaatatacatatgtaccattgagatgagatgctaattgaatgttgacatcaattattgattaagcctgttgagcatgttgaatctgttgagtaagctgagaatcatttcttgcagcgaagcaagtttgtctgagatagaatggaaagcggaagcttgattattagtcggacctttgacgaagagaaaccccgatctgaagtggagcactgtgaagagtcacatttgcgcttgtcaaaataactgggagaaaaaccatagagaacatagcatttctcttcaagtgtcctggtttctggcagtgagtaaaaaaggttgcattatctattgcgaggaggatttaaggtctgagtggcagcgatgaggttcgggaggatgtgaagtttcttttgttgctcatgctgaatgatagtagaaaacactttcaaaagagatgggaagggttctatgattaacacttgatcacgaactgcttggtacgattcattgaggccagtgagaaaccgaaaaaccttttcttagctctgaaatttggcgttatcagtggaggcttgacaagtgcaaaggagacgaggtcagagctcattgatctcatcccatatagcctgaagtttggtgaaatacgcagtgatagattcatctccttgtcgtaaatctgtaagagattcttgaagatcaaaaagatgagggccgttcccttgactaaaatagttagtgagctcagtccacatctcatgaactgtgttaagaaacatatactgctcttaatatccaaagaaacacaatgaatatccaagacattactatttggctactgcggatccgagaatggaagagatgactagtaggaacgggttgtggaagagttccatcaataaaacttgttttgttcttaactccaagggctaagtgaaagtcctgactccattgttgaaagttatggcggacaagggtggagtcacaagaatcaaactgggatggtcaccagagtcaacgaaatagggattatctttgttggctggatgatcgtgagaagatggttgtaaagaaccgagatcagcaatgtttgaaccaggatttgtgagaggaacattaccaatattcacggggggaatggatcttgaagacacaggcagagcagccatggaagtggctccgatcggaggtggaatggctaaagaggaccaaatgccctaagataaagacaaaacgatgtgctggagatccgaagcttcagcaacgtgctcgattggagcatcaacagtaggtggaaatgtttcttggacaggaggagacaccatgggagcagtggtggaatcagccacaacattactgatatgacggaaatagaggcatgggaagagctgaaggaagatcgggtgtagcagagattcggtgagtgcgtgccatggaatccggtgagatccgtgaaaactggatgtggaagcgtgaaaagtggatcttggtctcctaaaggagaaagtttgataccatgatagaaaagaatatgtttttcttattgtgattatcattgattaatgttacaataaaagagactttatataggggagatattcaatcctagagtatacagctaacccaactagaaatagtcttatctctataaccaaacattaaatataattatttaatacttaataagatttgtatgggttgtttgattttggtcattttttggtgttgctacaagaaaccaaatctgttacaattttttttgggtgtgtgggttcaaaaccaacgagtataaatgtagtgtttgtttacaacagttgcctatttttagcggccctttaaaacggtcgcatattggtcattagtgaccttttagaaccaatacctattccatcatgttttgtgacggtagtacaggcgttagtcttacaaaccgataataatacaatattatactattgttaaaaacagtttcctaaaccccttttttggaactgatatgataaaattgtcttagcgagaacaaattatttgtgagtttgttaaaaatatttaatgaagtactattctattagagacttaggcttagttagttaagttagttatggtttgttataactgttatactttcagttgggttgttatctcacaaccgactttactttagtttattttactctgctatatatagcaga

SEQ ID NO: 222233 - DNA, 1636 bp, Cannabis indica
ctatataacataataaacacaaaccatagtttagaagtgatccacaaatcctcacgcttcaccacaccttcttcaaacagttttttcagagctaagccaatctattagaaaatagaatcagaaaaccagaagagttctttaacaaacttgacaaacttcatttttttttttttgatgaaacaaacttcattttttaaaagaacaacatgaatacaaaatataaattttaaaagacatttgatcatgacatatagaacagattagcaaatagcagaatccaatctgcaatgacaagcttagataatgacacagattagcaaagacatttgacatttgatcatgatactgagccacatctaacacttatatatccatggccataacattaccgtctaaagaatcacaactgtttaaattaaataagtgaaaaatatagacataatccaaacaaatattgtatcttaaggcagtttaattccttatagcacaacaggacttgaatagagtgacaattaaagctagggaacccttattaaaaagaaaaagaaaaaaagacaaggtgcatttacctcagcctcattaccataaatttgagcacaatcgatatggcgatatccaatctgcaatgacaagttcacaaaatgacacaaagttaattgccaatgatcagcatgaaaatttggcttacctatcaaaatatatataatgtcaaaactgccttacgagataaccctaaagtgattttcactttacagaatcatccaaaagatgacccgaaatgaggttataatttgaaaataacgtccttaatcttctgtatagtgaatgaattaagctgatgggtggaggtaataaaatagaatggaaaataaataatttttattttattcccttatttagttgcattttaaagtattgggatgtatttctaccattttagtggaatgactattccatttaagaaaaaaaaaagaaccatcccaaattaactaagtggaaaaattttaatgatttttttattaattttttttatgaattttaaattttatatcattccattcttatttccattcatattcctatattttcattccctaaatcaaaccacctaagttccttcatagacagaagttctaaaatgtatttctaacatcattcaaccccatacactatgttgcttacatacaaacccaaagcctgtcaattacgtcacaccacgccatttttcatttctaaaccatcaaaatcaagagtacatatatatatatatatactatacagaacggaaacatacaaaattactttctcagaatcacagtagcttgtcgaatatcattcttacatttacaatcaatataaattagataaagtaggaaaagttaaaaggaccttaatggcagcagtgacagcatcggctaccaaaccaggactagactgccaagtccccaagcctacagaaggtattttagctccagtgttaagctcaaaatacaaaatatcattctccgccatagtcactgtcgctaatcgagctctcggtattcttctccctctttctctcgatgggtatgatctctaccgttgtatggatgaatcgaggaagatagtagaaagaagaagacagtggccgtctatt

SEQ ID NO: 222234 - DNA, 3829 bp, Cannabis indica
agcactggggtatggaagagaaaaaattgcaaatttatttggtggatttttgatagaggaagaaaattttgctctcaagagttttttatatggccaagcttacactacaccttttgggtcgttagaaaaatggggcaaagaaagcatttgattttaattaatagtcactattaccgatacgtgtcattctttagttctccaatggtgactcatcatgtttatcggataaggccaattcttgctaatcctctattttcactttggttatatgatgataaagggggttatccatcaggaattttgagacaaatcatccaacatttaattttaagtgttgatgctattgttgtgcttggtactattccttcactgatgatgtttccaggacttgatgttctcatctggagggtcaacaaggcttctcctattcttcttattcttcttcaacagtggcttcagctttcatgggcttacgataatgatataaaaagtggcaaaaccacttttccctcggcagaaaaagaatttagaaaatgctcagcagagttggagtattttgttaagaagaaaactgcagtaggcaagctcatcaacatcacttttcaggggcataacaaggagttgaagagcaaaatgcatttgttggactggtttttcgagagaggtcgacttgctaaaacttggcgcttctctcacagcttgctcaaaatgagatttctgctgggttcttggactaagaatgagcaaggttggcagttgaagcttcacgttcttcaccttgaggacaaggtgaatttcgggcggccggtattgttaggccttagggtataaataaagagggtaattgggtaattgtaatgggagggattgatgctatatatatgagtgagtaaggagggtagtaggggagagaattattttgctaaagtgagcgttagcgcttgggagagagctgggtctctcgaatacccagcaacttgttctctttgtcactctaatatcaatatacttgctatttcctattgtttctactgtttggctctattttcttttatcttgctactgattatacccaaaatgataggaaattcctatcagtatcctcataccgacaagcaagaataaaaatgattgcagcaatgaaaaaaaaggtcaatggagtgcaatgactacctgagcaaactgatatgccaattgttagtgtttgttatttgttgttctggtccagttaggttgttaagagttagcagatatgttgccgaggtttatatataggagtcagtaaggagagtaaaggaaaaaaacaaaaacaatttggctagttaggggagaggggtggcctcttcaatcaacacactactttcagggggtgagtctaagaccagtactttgttacagcagtaaataggaatttcgttcatcttacaattcatttcagtggtcagaatctggatacttggtaattggtacctatcaactggtttcagagccactgttttggggaaaaagagaagcaagaaaattgagagaagcatggacaaatgtatatgaaacaagaggcagtttgtgtgaatttgcagagattacagataataaacaagcatctggaaattatatgagagaatttggcaaatattggtgtcctatggaaaagttggaccttatttcttccatctaatcaaaatataaaaagatgaacgcgtggttgcaatttcatgaaacaagaatgaccataacatgcataagttgagaatcacaacaatatgcaaaacaaacttatagaactaaacagcatctctgtcccaccttgtgaaattaaataaagaatgaaaacaaaaaaacgtgttaataaaattcattagaaattaaagacattaaattataaatctggagaaaaccccttcaatgtgaagattcaataggccaaatgaatgtaatccgatgatcatccgctagtagaaagaattgataaatagaaacatgagtcactttctattcaaaattggagctgataaaatcatcaaaatcatttaaaagatagttcagacgaaaaaaaaaatgtttttgaataaagtaagaaactaaatttcatttaatttttcaattagcagaacaataaaattttgtaagacatgttggccatttcttttgggttattttccccctctctttgagttgtaactattattaggtttggtgtatctttaacaggaacagaaatgaatcaattttctgtgctttttcataatatatattcagacatacacaaataggtttttatattatgtcattgcctatgcactcactaaaatctatacaattttaactgccttgtcattgctttttatatgaactgagagcaaaaagctttcaacagcaacgtaaaaagcaccaaaaccgaactaaattttacaaaaaaaaaatatatgatttcatttggtaattggtatcattgtaccataacacaaggaggaaactatgttcaatgtcaatgtataatctattcagtaagaaaacccaacactgaaacaggcagcattataagaaatttagttcaggaatccaatttagaaaaaaccccatgagctgtagaaactttaagtatcaatagatgaaactcatacaaaaagctcagcatatattttaagtcctggcaatagcacatgagttcaggcataagttattaaggtttatataaccttcaaatcaagaactctatattagcgattctaatcacagtttcataatttccagaacaataaaaacaaaaactatatgaaaacatagcaaatcttaactaagataagccggaattttgatgcgaatgaagagcatactcatgatataagcaatgacgacggaggagatcccggcggaggcataggagaccttcacgctcttcgctcgattgcgatcgagagcgagatccatgagaacaatccccactccaccaagcacaaacatgaaacccgaagacaaaccctcgattatgtactggccgttaactcgcccagggaggaacaccacgggtcggaccgcccctgtggccctgtcctgggtggagccaatccctgggggctcgacaatgacgtcgtagacaatgccggagaccaccataaagtacgtcagaaggactagggcgtagacagtcatgggagaaggtaaggtgaaggtaggaagcttgaggcgtagacgcggcgtccggagaaagctgtacgggatcagacggagtgcgtgaaagaggggatcgacagaggtggaggatgagtcgccggcggcggtaacagaagaatgggtatcggattttggagccattttggtcggtccgattctctcgggtttggagagcagtcaacttaattaattacagaagtagcatctacttacttcttaccaaaaagtcccacatcgaaactagactaccgcctaagcatatacaaattgaaagcccaagttttgtttagtacaattttgggagtgctgtgggtggagagtggtccacgtgatcatataaccctaaaccctagcatattggttctgatatgtgaatgtaaggtggggttttttatccgactagtttcccccaagtgatccataaagaaacgtcgatgccctcgcgtgtttgaccattctcctgtggtttgctcctcgaaagatttgaaggtagtgccgctacacatgcctgtggcttgcggttactcattatcctcatctttcgaacactcctatttttgctacttagaatgggaaaagtaaaaaatatcatatttatgtgtccttaaaaaaaaaaaaaattaacttattactattaactatcaaattatttttt

SEQ ID NO: 222235 - DNA, 1894 bp, Cannabis indica
gagacagtgttaagtagagtaatttaccaacaatttgtcggtatgaggatggatcagtgagggcctctccttgttgatcatctagctttagccgtgggtccatgtgagtctttgttggcttgctgccagaatacccagtttcttcaaggagttgcatagtatattttctttgagagaggaccaatccttctgtagcacgagcaatttcaaaaccaataaaatatttgagagtaccaagaattttgagagagaacttgctgtgcaaagtggattgaagttgattcagcaaggatagatttggccccgtgatgataatgtcgtcaacatatactaatagagtaatgaaattgttgtcaaatcctctggtgaacaatgtatagtcagcttgagattgaacgaagccttctcggattaaggcatccggaagttagcgataccattgtcttgaagattatttgagcccgtaaatagatttatttaatttgcaaatgatatctatttggccagcgagttcagtgggtaaatcaaggcccttggggattttcatatacacctcctcatgaagatccacattcaaaaatgcgttgttgacatcgagttgtaatgtatgccattgtttgatagtgggaatggcaagaagtaatttgaaggtcaccatttttgcaactggagagaaagtatcgaggaaatccaatccttcttgttaagtgtagccttgtgcaacgagccgtgctttatgcctttcaattgatctgtcactgttgagcttgattttgtatacccaacggcatctgatagctttcttgttggctggaagtttcacatatgtccaagttttatttttgagcaaagcaaacaattcattgttcatggcttgattccaaactttgtattgagatgcttggttgtaattgactggttcgtacaaggctgtaatgagagaaataaaattcttatgagagtcagacaagttgtcatatgaaataaactttgaaaaactgtgaggagttgaggatttgtcttgaagtactgagtgacattcatagtcacgtaaatatgctggggttttagaaactctgctggtgcgtcttggaacatgatcaggtgcattcggagatgatgcattgttgttttctggtgtagaactttcttgagaaaaagagtcatcttgcatattagtttcttgctgagtgacatccagctcagaaggtgtgttagtaccagaaatattgtccatattagtaggaaaatcttggacattagtttctaaaatgtgtttagatggtaaaaccagttgagagaaagggtcagttttatcataggtagtgttgaggcgatgaaagggatagatcctttcatgaaagatgacatttctggagacaaagaattctttgttatttaaatcatataatttgtaccctttgataccttgagggtaccccatgaacacacaggttcggtcacgaggagtaaatttgtttctgtgggctgtgagagtgctagcaaatgcaaggcagccgaaattccttaaagcttcatattttggcctttcattatacattaattcatatggacttttgttgttgagattgggtgtaggagtgcgattaatgagatatgcagcggtcattatgcaatcacttcagaactgaatgggaagtttagcctgaaaataagaactccagcaacatttaaaaggtgttgatgcttcctttcagctatagcattttgttcagggatttcaacacaagtaaattcatgtacaataccaaatttagcaaataaatctttaaaaactaactcgggtgcattgtcagatcgaaagcatttgatgttgcatttaaattgattgtgcacataggataaaaaatcagggattatatgagcaacatca

SEQ ID NO: 222236 - DNA, 2443 bp, Cannabis indica
tgattctaatataaaatctaaaacgtgaatatttgttatgctataattaaatagtcataggttttgacacaaaataaaagtatttgtgtgatttttgtagtaattagattattatttaatactgattatatgtgtattatacttccaaaatataatatagtaccaaaattaaaatttttatatcttaaaataagaatatagattaatttataaatccactaacacattaaattaaaagaagaagattacttgtattattgaatattaaaaagtggaagtaattgaaattgaattccttaattttctaaatcgttgttatttgttaatttgtttaattgattaatttcagctattgttagcaatttaaaatatcaagtatttgtttaataaataaaattaaaaattaaattaattagtaattaattatagtcctttggaattaacctcacttacatggattattgtttagaaaacaataagtatacttacatattgaaattttttgcaacaatatttaatataatatttatatacttcaataaaaattcaatgtttgtactacgctaattttcaaaaaaataaaataaaattttaatgtttttattgattttttatatatttttttttattaaaatgttaattttaccctaatatattagagtaatattataaaattgggtattgatttattttttaaaccaaatttaacttaaattatataccatcaattcgagatggtcctagaagcaacacgattatacaacttcttatcaataataataatagcagacaaaccataaataccaaccacaaagcttccattacttgaattacataaatgctaaagacaatgagccactctttcattattaatgttgataccttaaaaatgttcataatatagttgtgaaatctctcaaagatataagctaaagtttataaaaagaaaactagactaaaacaaagagcaagcaagccactcacaagtcacaaccagtagctaatctccccaattttcaccaagttaattactttgataactaaacaccttgttccgccattaaagtaaagctttctccttttacttaaacaacctaccctcaacccaaatggccaaaactcatttgtttagcattactattaaaaagcttaatcaaaattttaattcatttgtaactgtaatataaagtacagatacattagtattataggagttataagttagtaacggtaatattgatcacatcaccattgagtagttcttctttagcttctcattgtcattaataagttacaaacacaagtaaactttccaagtgaaattggggacttttcaatggggacaagcatcatcataaatgctaaaagaaaaaaacacacacacgaagaactcgcttgacttgacttacatgacatcaacaacctaaaacctattttattatatttaattagtgagtcgaaatagtcacaacaaaaccaattcttactgttacttacaatcatgacttcatattcttctttatcatcgtattacagtaacaagactaaacacataaccaagagtgcatgacatcatatgtaaagaagtaatatataatctctataagactataaccttattatcaccaccttgcactactctttgacttgttacccccatacaaacggaacagattgaaagcagagatgcaagagatcaccacagtactcaagctgaccacaacagcactggcaattccttctcctacttggttgcagaatttcccatacatgttgcatatcttcatccactgcaactctggctgccccagcttggcgaacatcgctgactgtgcggccgctgccactgcagccattgtcacataagccatcacctatgcaaaaaacaagggagttaggccaatatgaaaacatgactcctgtactgatcaatataggactcaatgcattcatatttcatgaacttgtttcattgtactgaccctgttatagaaaattattctatggtatagtggtccctatacaatcatgatcccaagtagaagacaatagaagaggtcacttgaaaaatacagtacaagataatcatcaagatgactttttacagccaatctttgatcaaaattattgtgaattttcttgtgacttcatacaataatgaaaaatcattaacaacatgagggaaaacacaaactgtattaaaataatttaaagccactactggtttgattttagactgatgcattagtactaaagacaacaattcaacagatataattataaactgttactgacacttaaatatatgctgcatattatatataggaaagatagagtttgaaaatggactagtatggtttgattaagatggaaattccaattgtacaatgcttatctattaattacatttctgccttcaacttttcaaaccataaatactaaa

SEQ ID NO: 222237 - DNA, 2515 bp, Cannabis indica
agagtacagaatacaatatctgactattaataataatggttctctatcaaatttgttgtccctttttttcatggagtatgcccctatttataggaatataggttggtagttatcttttttgagattgattcatggataactgttcatgaaacgtggacaatcctcacgtttcatttaaattacatgtgggataatactaaataactgaccagtcattttttagttttatattagatggttattgctgacgtggaaggtctctgattcgagttatcttccttatccatcttgataagaaaaaacgctaagtgttgagaaggtttccatctcgatatgttctctttgtggttttcgtaatgcgaggtgccttctcactatatgcaatacgaggcagttcatgttaatacattcatcttgctcgggtggatgaatatccacttcttgtttatatattccgaggcatacatatgtctcgttaatctcgaatcaatagttgttattcttgtctcgcttttgactataagccaaagagttttgaatattatctatttaacctttatttaataataaagagttattaaatatgcatttatataaataatattgaatagattacttataattgattcatattctttctagtggacacgtctcgacttttgaagtgtagccaattttcgggtgtaataattgccccttaaaagtactttttgattaaaaaagaagtttttaaatgattgccaaggtattttcgtcttaactcaattttgaaaagatgcatgccttggttttttggcggttcaaaacttcgaggcacatcattagcattaaatgtcccgacttttcaaatttgcaggattcccatccgttagatcaatcctcttttgatctaacggtgttttacaatatggtataaaacacaagaacattactctatttcaccatttttgaattttaagctttcaaatttcctctgtatccttcgattttcttctctttctctttgcatgccctcactgtccttaacttttttcttgcgcatctcatcagattacatttccattctcagagaatttcaaaacgcattgttgtagccattgaactctcaatcgcaaagttcttcattacccagaaacttacaacgaaacaataaatggttcatctcctctttctttatacctttctttttaatatttgcagtctaattttcgtgattgattgttttctttatctacgttgtttggttatttctcttttaggtaatttttattctattagtttggaaaattttaggattaagtaaaatttctaggttattaggctcttaaatttctgggttaagttgaatttatcttttccagaaattgggattatacaagtctgcaagtatgacccaatttatttctgaaactacaatcccaaaattccttgaaactatatgtcctgaaaatctagcccttccatttgaatccaaaacttacgttcctgaatctaaaattgggataaacgatgccaaaattaaggatcatctaataaaaaccaatcaatatgagatttcaagtcgatataagcgatttttgcaagaaataatcgagggtaaacgtcattttcttcgagatgtagcttggcctgaaactcaaactttatcttctattcctctagcgagacctttattttcacctcgagtcactgttgctttttcactgggtgacttaaatttcgaaatcatgaccactcaagctcgaaaatcaaagactcatcaaaatccaacagttacattcgaggcaaaacttattgaatctagggtcagatccattgcttcctatgtttgtaatatattaaaagcttatggcatcaaatatgagaaaggatgtcgagttaggttcgtcgccccaggggaatttagttaatttctccctgaaagagtaattcgagaagagtgtggtggtgctagtactagtggctcgtctggaataggctcttagagcctcgagcacatcagaactggagtaatactccctctgagagagtactacaaggatttctgtaattatctcataattgctcctttttagttaattccgagttcttatagaatcctggcctgtttaaaggacttgtaccaaattatgggatgggagtgtccaactccccttttaaattttgtagttttactctataaaggccgttccctgaaggaagcgaggatcaagtggtttttactacctcgggacccacacgaatgatcgaaggatcattgtgaggttgcctaataaaactgaattcaaggacgaattcttctggacatctggtctctcccccatcaacacgacatttcgcattatacataagtattaccttttctcaaaagcttggttttgagtttttaatttataaattgaaggcatttatttattttacttattgtattgacagcgatcacgaaaaggccaattccaactcctgagatggtagaatggcataactttttaaggtcttccgtttggattgcgat

SEQ ID NO: 222238 - DNA, 4499 bp, Cannabis indica
ccgtgaagctcttggttggtggggtcctgaaggagattaccagggtaagtttatattttagagctctttgttcaggctatgccactcaaacacttctaacttgtttctttttgcagtctaatttgaagctgttttatgcagatttctgagccaagtcaacaactctcaaaactagcacaaccaccaatgacctaaagaagactttggaggaagcccaaaatgatgttgagttgaaaggcagacaactgggtgaggtgaacaagcaacttattgctaggaacaagcttatcaatgacttaaagcagcaaatagaagacatgatgtccacaactaagcttaatggaggcctggaacatgaatccaagagggtgcaggaacttactgacgagagggaaggactctgaacactcctccaaagaggccaaaatcaaggaattgaccgaggctcttcagcaaaaagaggactcccttcttaaggagaaaattgcacttaaggaggcttttatccacttgcatcagttaaaatcatcataactagaaagaatcaaaagcttgtaggcagaagaattataattaaaagattattcttcataatatttaaaatcaaaataattaacttttatgctataaaacataattcggcacatgtacattaacttaatatattaataaagaaattgtttaacaaacaacaaagacaaaaagcgtcattaaatcatgaaaagtaaaattagaatcacaaacataatcacaatcacaatagagaggtgaaaaaatacaatctcaacacctccgtcgtggaccctttttttctactttctttttatcatttcttttctacacttacatctgatgcctgattttacaaggaaatttccggaccaattaattgccttgaaactaattaatgtacatacaaatcctacattacgataaagcactagtacactacccgctgagtgtgtcgtcatcagctataatcttcgtctctcacgacctactcaaacatcaggtcatgccttagattccccttctctcagtaattcctgcaaagtgcaacttagataaatactgtatactatctttcctggatggttgtctctgctgttattatgataaccgtgtttgataacgattatcttaagcttacacagtactacagtatgaacgatctaatagaataaaaaatgattcttcaaaattaaaaaagagaggaaaaaaatgctatactgtttttcaccaacccatgaaccataaaaggcgatgacacactcatagatacatatgtgaagacatttatcctgtttgagctcctattttggttatagctagaagtataaaataagtataaattttttaacttatttttaccatttgaaatttttttaataaaaagtatttttaaactattttaatatcagtaaaaaaaattgtgagtaaattaagaaatatgtatattattttaattttaaaaatatctttacaaaaagttattttgagagaatctacaaatcctaacttcctccaaaaagactttttattttttatgcaaataaatactcctagaaggactattttatttctaaaagctaaaaaagagcttataaaagctaagccacacgggaccttagagtcctctagaaaaggagtattctagagtatgtaaagcttactcaaatcataattttaagaacaatacaaaatgctgatcaaaagcagtaatgacttctaaggatgatggtaggttccaaataccttggtgattttcacatattattaatgctagttgaaatggttcactaggttagctacagatgcatcttattacagttgggtttatgcacaatctatattttcaaaaaattatattttagaacctatgttaggccttcacactcatttttaccaaaatattcatgaatatgaccaaatattttctcggattttgagattctcaactttttcttcagctgatgggcttcttgaatctagttatattaaaaatattttgataaaaattggctctaacagctgaattaaaaccgatgtacaaaatcaactatccaaaaattaattctttaaaacactagatctaaataagtaatggtatgtccaaaaatgtataaatcctttatgaaatagcatgctcagatttaaaaacttgcatatatatacactaaaaagttacataccaatttagtagcagcaattgaagtgcgttgcctctctttcttctcacgcaagcattccccacaccagtttgagaaatccttttggtacttcttcatctctctgaagaccgaactgtaggtagattactaaaaatgagaaaccagttgcatcatccttaaatctcatatctattgctagttgctacacaaaaactgcttgaaatagcattgccaaaacagtatatgaacagagctcattcaaccagctacactaatgaaacacgattaatgatggggatggctccgtggattgcaaaggttcacacaagctccagacacaaacaatgaatctctctaaatggtaatcaacgaagctacgtcttcagcattaaggtaagccaccaattcactacacctatgctagaggacctcgcactaattgagatgagtaatttatggaagtttatgatttattttgaattatttgtttctatttatggtatcagctttgtttggaaggtttatggaattaaaatagagaggagagtgtgaggaggggtcatgttttgatttgtaattgagcagcagctcttggagagaaaccaagtctctcaaatatcttgggcaatttcctattttcaataaaatatctgtatttcccccaataatttactttgtatttttctattttgactcactacatagttggtgtgtatcaaatagcttatatatatataggtaagtaagatagaaataggtatgcaatttattgagtaaaattctttgcatcaatgttgttgctggtttgggtgtttggcagcagggtctcatcaattggtatcagagcaccgactgcggtagatgtcgataacaaggatggaggataaatttgaggatcaatggaaatctcagtcttatcattatcaatatgaatctaatatattggaggaccttgctccgcttttggatcaagtaattctcaggaaagtaaggttatatcgcctcgcctagatctccaaagtcatgtcacaacagtcccggaggacgatgatctcactgagtggatggaccaagtcgtgcaatcagtttgggtttgcaacttggagcgcctccgtagtcacaacgcaccgagcttgatttatgttctatctccaacactagctacggatgttgaaggtgataaagagatggaaatggcaataagagaacacaaatgagcgttcgctagactcgccagcttcagagaaacagctacagccagcgacttcacggagtagaaccactgtttcaaggagcgactgagtggaattcacgtgttttggaaggtagggagaagcacactaaactttggatgcctttacggtactcaaagaagccacatctaaagtccattgagtttgctcgttggtgaagttgcctgagcagcacaatctgatggagacaacggcttagaagacagagtttcgtggggggtcgtcctttccctccaatctatcaagagagtccgactgattggagttgctgccttaatactcgcacaacctgagaaggttgaaagtgatgaggggtcacctgagaagaatgaaaaaatcttgcagcaaatagacaaagagaacttaaatgactaggttcttcagctagcgtcatcacctgagaataatgataaaagtcactagcagtgacgcagacaagaaagagtcgctagaatgggttccatcaccgtcgtcgaggttaatcacggtgctggagcggtcggcagtcgcacacgacaatcgcttccatgttgtcaattaagagttgtgatcaactgataaactccaagggtacattaaaaccctattattttagacccaagcccaacctattaattaatatttcaaatatggcccattcatcttttattgtataactaattctagtgagccccaatccatttactaataattcaaatatgagcccaattcatgggtctctagcttctttacttactccaatttgggctcaactaaacacaaaaatgagcccatttgtcgtctacgatcaaggaccaaccatttgggatccaggtcctaggctggaactcaattgttccaaaccacaggaagttgacaacccactttccaatctcgagttcgtcagccaccacagatgttctccttctaggcttcactttaattttgtctattgtgaatgggcaaagtgttctagactttttcttggacaaggatgtgactaagaaatcagtccaatgtcgcgtctttcattgaggtaaaaagcttagtgcatgtttggcatcataactaaaaaactattttttgtttttaaaaa

SEQ ID NO: 222239 - DNA, 3487 bp, Cannabis indica
aagcttttaaatatgtttgaattaaaagtgtttaagtgaaaaaataagctaaagtttgatacatacctgacttgtagccaaagggccaccttcgaagagtctaccatgcgatcttaaaccataaaaagagatgtaatcatttgctttagatccaagcaaagcagtaagattatccattattgatgttttttcccagctgatggttctatactgccaatgcattaaagctctaacagttgctgcatcaccatcatccaatcccccctgttacaaattatatcatcacttagaaaaatcaattttagatgatctcaattctcatatgtttgttcataatgatgataatgtatgtgcctacctgaaagccaggtaagagtggtatcactacaataactcgaaagcacttttgttctttgtgtgctcttagaattcgtctgtaaattgcttctaggacccggttttgtataatatcatcctctgagagacctgaaatgaagaactgattctgcaaaccaaaaacatattgttgggattagactcacctaacttgtcaagtcagtatgtccatctatttgttcatcagataaatatgaagaaagctgttgctagttataacagttggctttaatactaacttaaagaggacccaccaagaactatatataggtgttcctctattcacattaagagttctgagttctaatctccaaaagctcatactttagattcagtttagagagagagtccaagatcatggtgagtgtgtgtggagggatgtaatgggagtatcactcttgaggtgatttccctcaatgtgagggtatttctttgtaatactttattgtgttgagttgtaatcttggattcattctattgtgtactactaactattcctattcaatacagatccatcattcattcattatcaagctaagttttctttgtttatatttcaattaagttcaagttttgattttatgattgattttagttttgaattgtgtttttttggacattgttactgctgtaatacaacttagaaagaaagaaagagagatcagaaagtggttttatagttagttacctcaatgtaaacaaagtgctctgctctctcaataagagaacaataagccttatgaatgctttcttctgtttgacttgttccagctgaccactggcttacacttctaataacctataacaattttgtaacgtgcttaagcactacaagaggtggcgtcttatgaatggttttatagaaatattccttacttgacaacgacatgtcgttcggggaccaacttgtccagagtcatcattagcagaagaaggcctttgattggtttcctgatctggattttgccaccactcctttgaattatctaaagacatttcactatggagattgctgtcattatgagaatccagtaaaccatcactttcttgaggcaaaagcaatgggatatcttgcaatgctgagagtgaggaaaatgagttatgttgggcgaaatcgtttctcttatcttctgctgtcttgttctcaatatcaatttctctgcttattcccatgtaatgagggatcaccatgtggtggtgaggcataagtagtggaatggtttgttcatttggggccttgtttctctaataagagtaagagttaggaacatgaaacaaacaaaagagattgcaaacatcatcaccaaccttggcatggttccaacgctgaacaaaatgcctagctatgtcacgacatggaggtccccataccgcgcaatggacatcatgccatggcatacgagggtattttccgcgatccaattcatctttcattgtgtcttcccaagaatttggttcagattctctatcacataccaataaaaaaaatggtttgagtacaacaataacactttcataacagacacattagttagaattcactctcaaaagactaatcgaaggtaggagagggtgcccaagtacttataaaccattgatcaatctcatacttagtcgatgtgggatcctaacataaatacctggggttgtagtagtccttgcctggccatataatagagggagaatcacccactttgtgttctgttgtgtcataacgaccaaagcataagtctaatcctccaatgaagcaaatttgatagtcaacaatgacaagtttttcatggtgagacctgtaaagagtagtagtagaaaaacatggtacatcaaaacgatttgttttgttatttttgtatagaaaagcaatgattgtctttactaaatgcttaccacaaatatacaccagtagataaatggtctggataacgcaaaactttcacattctcatgaatgttgagaagctttctttgactgtatgaactatttattttcaaagcaatagaaacctctttgtatagaagaatgtatatctgaacaccttgcttggctttcaattctagcaatgcatctagacgagacgagaagttcgaatcaaaagggcgtctcagatacaattctgggcaaacccaccagccagtaatgaaaatctacatgaaaaagcaatattcaagcatttcataacactttattattaattattaggataaatataagtagctaaagttttatgtttgtaagcggcataaacttaatgtttatttttagcagcataagtacctaatgtgtgtaaaattgtaattttcttccgatttcgtcagtacagactctgttttgaatttattaactgatgctacatatttctatctagatccaatgatcaagaatttagaccttatatgtgccctgtttaaagaaaataactgtactcaacaaaattaagaaaaaaatttatgccgttaaaaataaatattaagtttatgccgcttaccctatttattattaatgtgttaataaaaagagagagcaagctacctctgattttgcatcttctattgctgaagcaatagcttcaaaggctgcctttccatctacaaccactgggcttgactcccatcttcaatcaaacccctctgcggagcataggactcgaatcggtgagcatgacaccaacttctggaggctttaaaccagcatcattgattgcagacacccattgtctaactttagcattgcttgtggttctatccttatgctttgatttccattgctaacctttggaaagtttttcaaaattggaatgaataataagattttatgacattgtcatttagagcagagaaattaagaaaaaagatttaccttgaatgtgtaacgtagaggatttctttcctttatttgatctgctaaattgattggtgatcctccatttacttttgaatgtggaagtacattgaaaattattatgtctaagagtttaatgtcaaaaggatcatccaataaggctatgaaaccaggttttaaaacagcccaaacctgtaatattacaatatgctcaagtaaaacaacatagacaactgatatagaagcttaatta

SEQ ID NO: 222240 - DNA, 2541 bp, Cannabis indica
gcaaaatttatctaagaaaatacaaaggcagtgttatttttggccaacaatgattgaagattcaaaggcctatgtgaagaagtgtgacaaatgccaaaaattttttaaagtcccccgagcaccgcccaatgagttgatacaaatgtgcaaagtccatgaccctttgctatatggggaatagacctgatcggacagctacccaaaagaaagggtggagtgcaatatgcattctggttggtgattattttacaaagtggacggaagtcgaaccacttgcaactatcatatccaagaaagttttggattttgtggtaaaaaacattatatagcggtacggacttccccaaaaaattgtttctagaaaatgggaaataatttgacaaccaaatgttcactgacttctgcatgacacgtcacacgtgagaatataaaaggggcaagtgttatcccaaatctccgcacagggtgatgtagcatccagttgagtgacatctgaagaatatttcgtgatttggatgggtcgtacgctccatgacgcatcgtcctaagtaatgtgtcattcgtagacaattgatttaaagaagaagctggaatacaccgtccaaccaacctccatatcacgatcagtacgcatacaccaactagagtaaatgtggctagaatatcttcagagatattttccataaatgttcaagcagtcacattcctaattttgtgggatagaattgcacgacagggaaaaagataaaaatatcttagttttctcttttatttctctcgatttaggaaagtaattgaatttgcttatttatttcttatttgtttgggaagccaatatgatgtttataatagagtcgtttcactatttagggattcaaaatattttattcaaaaaagtgttcaagctgctataaattctttgtaaagtgttagataaagatcaagaacttctcgcttcttttctcacaaattaatataaataaaatataagtagactattaccattatcacaagactcatgaacttctataataaaatcatattcttattacttaattatttttattaattgtttctaatcgctttaattaatttattatcgctggctaaaaatgataaaaagttaaaaaaatataaatattattaaaagtttataatctaaataaattagaaaaaaaaaaatatgtcataaatttgtaaaagtaacatttcctttccgtaacgtaatgaacttgtaaaaatgaattgacataaaagaaggatataaagctaatacagaaaactttaagtgtccagtgtgtgagtgttggaggtcctgagttcgagtccgaggtaaaacatgatgtaatatataaacgcttgaataaaacaaaaaaaagaaaacttcgagttttcagtaacgagcaatggctatggtccggtcactcctgagtcactggtacagaccaacgccgccaccagcagctgccatagcttcactactgcctcacctctcaaaacccacttccactactctctctaccctctttcaaccttcaaattccaaacccatctcctctaaaacccctaaaccaaaacaaccccatctcactaccactccaactcacttattcatctctcctcttaaaccgggcgaccgggcttccactgattgctcaaagcctcgcctggatgacggcggttccgccactattgccgccgtagtgacgcccactgggggtccctcaggtgctgttggcatagttcggttgtcgggttcctctgcggtggatattgtggggcgtgtgttccgtagaaaagtgaagaggaagaatgggagttctggctcgtggcgacccaccagccacgttgtggagtatggtgttgttgtggattctgggggcaatgtagtcgatgaggtatgtatatatatttatcagttctatgttcaattcaagtattaagcttttcatttaacatgtttggggcacagtccttgcagttgtaaactgtaagcgtttgtgatttgtagttataacgaagaaatatttatcagcttgatatttatgcttaggttgttaaatttgttattttgaactgggtttttgtggttcaagtgggcttttgtgagtcttcttttaagtgtttgtggtacccattttggcgtcaaggcaagttcacttgtagaattcattgaatttccaaagttataagcttttaactgaaattttaggattcaagcatctactttaaaaaattgaaagttattgttagtagttagttgttcattcatatgagaaactgtttactttattaggtttgtatctttttgctcgggatggaaaattctttcgtgaaccaggttgaggttgttatggttcaagtgtgcttttgttatttctttaggtgttagctgtacccatgttggccccaagatcctacactcgtgaagatgtggttgagcttcagtgtcacggaagtgaagtttgtctaaatcgtgttctgagagcttgcttagatgctggggcgaggttagcagagccaggttgttcacaacttcaa

SEQ ID NO: 222241 - DNA, 3168 bp, Cannabis indica
cttaagtatttatttacaattgaaaattaaagttaaatatttataccgcaaattactcgtatatatatcaagtgaaacgtactatgacaagtaagcaaatgacatagagcatccaagaaaagagtttgagagaaaaatgaaagggaattgtaatggccatgaagaaaccagttagaacaaaaaacgcaccgattctttcgagcacatgggccgatcgaggaaacttggaagctatgaatttgctaacaacaaaacaagcaaaagccgatatgattgtagcatagaccaagttcaaagcaagagagagttccgattcaacctgattaaatgacactcttaaccattaacaatctgcacaagtaatcaccatataaacacttcttccctatagatacaagaagatagtaacaaaggatcttcttagtgatgatggcatcgaatttgaccaccttcatatacaatttcttcagaaacaaatgagtaatgaaaagaatcaaagtgttcacatacacaatatttaagcttagttataacaacataatgacaaagatagatgagagtattctaatagctgaaagtgaaaaaaaacagaacaatctttactctctctaatgaaagtttttgttaggccctatgattaggatggtgtgcttgcatatagaaagtgagagggtatgcaatatgcaatgtattgagtaaaatctttgcatcaaaggggtctaagggctcccatcaattgtaattggtttactattgcagctgtttgtgtgtgtgttttgctactggtttggttgatcaaaacagggtctcatcagttttccatttgcaaagaagagtgatatgtaaaattaacatcattaaagactttcaatgtaacaaaagaaacattttacattgagtgatcattatgcatacttttcaatcctaagctgttggtaccccaatttgattctacagaaaaacattccgaattcgctaccttatacctcttattatagctcaaagtaaacaaaagaaatttaaataatttaacaaacaacaacagcaacagcaaatttctttatgaactaactaaccttgtctgatcatatttctatacacaaacaaagcaagttttaaatcaaaatttgttaaacaatgaactttcattgaagatcatccatccaaattagctcctcatccactctgagtgcacaaactgctaatttatgtacggtcattggacatggtaagcatatatgagagagcttaatgggtagtactgagttttttcagtttcaaatcaaaattagtggcaaacccagaaaaattaaggacatgttaagcatacatatcagagagcttaatgggtattattactgagttttttcagtttcaaatcaacattagtggcaaacccagaaaaattaaggacatgttaagcatacatatcagagagcttaatgggtattattactgagtttttccccttcaactatgggagtaaagttacaaatataccataaaacataaatatataagtgggtttaaacataaatacatacaccattagaaagatgaatactttgttggattggaagaagaagaagaagaagaacttaccatcttattctttagttgtttctttcaattttccattcccaaaaccataatacctaaacaagaaaatcataacaccagtaagagaagattgaagtgggtgatgagaaatatctaagaataaaagagaagagaaccatgggaatcattagatatacttttatgattatgaactgaaacaaaaaatcaaatcttgaattccaagaaaaaaaagaatcatacctaaatcgaagtaagataagagatatctaatataaaattattattttttaatattatctaaatactctttttaattacttaatatatatttgtttaatggaattcttgtcgtttcatagaaattatgttattttattttgtctcacatgactaggcttatattctttgagtttttgagatggttaaaattttttttttaaaaattattgagatggttagatttatcttttttttattaacagaaatctaatatggacaaaagttcaatgagcgtgattttgtaccagttaaagtttaggagaaataatttggtaaatatcaaaatttggaggacacgatttagtaaatgaacaatcaccattacgttagtaaaattaaacggaattggatagaaatctttgaatgtaacagcctcaatagtttaaggagaatttttaacaacctaaaaaatttagagaataaaatcctaattaatctttttttaacaaaataaataaataattcaaaattatggcttgacaagaaaatcattaatatattacatagtgtaaaatgaaaaatgaaaaaaattattgaaattctactaatatatcaagtaataagaatttacggtataaaatatgcactaaaatactactgaataacgctacaatattttaaaagaaacaattgcaaactatgataatagttaaagaaatgatgtagacaaaccaagtgagtgcaacaagaggtttagtaagcgaaacagtaatggcgacgaagaaggctgtgatggtaaaccacactccgagttgctcaagcactagggctgttttcggaaacttggaggcaatgtatttactgataaaaatcgaagtgaatgagaataaaatggctagagagaccaaaaccaagtttggagacaacttggattgaagttgggattgtagagttgctatttgcaaggccgatgcaaagcaaaaccccataatagtctctggccacgccctctcaatgggcctcggtcgccttagttgttgattggcttcagcttcgggttcgactttggtttcatcttcgacttcatttgacttttggagaataatatggctaagcttgcccccaaatgttgctactaattttttagtgttgattataaacttactcatgtttttttaaaatatatatgtataactaatttctcctaataggagtaaaacaaagaaaaaactatgaattactaccatgcatataatacatctagtgttacattttatttataatagttttaatttaaaggtttcaaagacaaaagctggtgactcctccacaatcacaatccaacaataattaattaattaaaaaaat

SEQ ID NO: 222242 - DNA, 4140 bp, Cannabis indica
aaatagaagtaaaaactcaaatacaaatgcttgggtcggccctgctcgcgctgaaccatttactttgtcataatatatataggtcaagcatatattgatcctcaatataagcatccaacaagcttctctatttagttattgtctctctatcgaccagacgataatttgtccttaagggaaatatctttctgtacaatcttaatgcatcgacgagattcaatcttataataacctatcttaaccaatcttgtttgaacattttttgaaaatatcttatatgaatatatacagtttatcttaaggaaggctattacattgtatttttagtagatattttaggctagtttattttttattgaattatttaggttcgtttttttttcctttcagcagcttatatatagctggctcttccatctttgtatttatttaattttttctttttaattttctttctgtattaactaacattatttcttcaaagtctattaataatttatcccatcttttgtattaatattacttttaaaactttcttcagtaaaagaaagtgagaaatacaaacataagcattagtggtcaacaaccaattgattaggaagctgagacaagagaagtttgaacaaattaattaagtaattaaagatgtctctgtcccaaatctaaagtttagtttacctcttcctcaattgattggcccttgtctttctcttattaaggtcttaaccttcatggctaagaattttgaccctatgaaatcattcattcaaaatttcaaccactaagccaaaccaaaatatcttggtcccaatgggcccaactgtcaccacactcaactacagtacactaacagtctcactctctctctctctctccatcaaggtcggcgctttctctctctaaagaaccttttagccccacaccacatttcccctgagaacccttttcaaatctcatggctcggaacgatcaacgatggttctactactactgttacagcactcgagtttcaccgccttttccattctctggagatttttatcgaacactttgtcggcaacccatttggaccccatccccgtctttatatactcatttaccaatccccatttctcaccgacctaaactttccttttcgtgttttttttctttgggtgttgatatattcaatccatgaatccgaatgatgaaagttcttctcctgactcttcttcgaagatgtctgagactttagaaactcaaccatttttatctgattctttctttgtggaggagggtgttggattttctgggtctcattctccggcttcctttgccttttctccattgccaattccattttcatcttcccctgttttcgagtttcaatcgggaatcccagttggtgaaagagcccaaactgtaccttcttcttctactggaggagaggctggagctctggttactgttactgggacggagtttgttgaagtccctcggcctcttgaatgtttacaaggtaatccaattccgccatttctgtcgaaaacttatgatcttgtggacgacccagctctcgacccgattatctcgtggggttctactggtgggagcttcgtcgtctgggaccctgtggaattttccagaatcattctgccacggaatttcaaacacaacaatttctccagttttgttcggcagctcaatacttatgtgggtaatttaataacacagtctgtaatggccgctatgatctgtttgtaaacttgttttgtttttcatttattttttcttttattctgtaactttcaattgtttctcttttggtattcttctttgtttatctgtaattgggtttgacaaagattcattcgaaagatgtaattaacttgtaaatgtgtatggcttgatatccatggtcagatgatgatgaacttctgatgtatccttttaacactataatttttcagtaaaacattttttaattgaaggaatttatttgtatctaatggcttgctggctagttatgtaatgttcattatgatttctgtagctatactttaacaggtatttgtaaatgtaccatctctctcttttctctgttattattgttatttagaggcttgtttcctcatgtatcacattaatgtaattgtaaattgtaaaacttgtcatgttttccccatataccataagaattgtattatgagttttaagacaaaggtaggagaaggagctgcatttttcattatcgccaagaaaggaacagcttcccctatgagtactaggaaagggaagttcatcatctgcaggtagattttcaggttcctatgaaatatttattggctgtctatcgacgccaacgcaatttcaagtttagattagcttgtctctgatttgcagattatataatgtggtcagctcattgtatgcttttgttttgttgaaatcattgtaaattatgatattttgaacaaatgatttcattaccattcattctcactcttgaaactattttgggtatcttatttcaggggtttcgtaagattgatactgataaatgggagtttgcaaatgaagctttccagcgagggaagaaacatcttttgaaaagcatccaacgacgcaaatcacatcaatcccagcaacagataggaagctatatcggaccttcttctgaagcagggaaatctggactcgaagatgaggtagagaagttgaggaatgagaagagtacattgatgcaggaggttgttgaattgcagcagcagcagaggggtactgttcattttatggaagcagtgaataagaggatccagtcagctgagcaaagacagaagcagatggtttctttcttctcgaagatgcttcagaacccatcattcattggtagacttaagcagaaggaaccacagaaagagataagctcctcaaggacacagaggaaattcgtgacacagaagcagcatcaaattggagagccagattcttctatggaaggaaagttagtgaaatacagtcctggttggagagaccttggcatgcctttagaagggcgagatttgaatccattccgtatggaacaaggtataggagagaacctggttttagatgacgaaaacctgtcatttcagtttgaggatttcatacctgataaattaattttatcagatgatataacagcaatgcagggatttagtgaaatgccagaccagatcgaggaaggggcggcttctagcatgcaaactgaagatcattttttcaaaggaaagggtattctgagcccaaaacaagagcttaatcctgattattatgtctcttttccagaggatttaatgaaggagaaaagttttccagaactctcatctacaggaatggaaagcatcataaaacaagaggacatatggagcatgggtcttgataccagtgctggtatgtcaagtggtggcagtgatttgttgttggctactccagtcagctatgaaatgccagagctgccattagatatctgggatttaggttcattgcaagtaggaggatcagaacttaacaagtggtcatcagctgatgaaacaccatatattgatccacagagtcaatctagtcaccaaaagataatttacctaaaaatatggatccttagggcctcatttgcttttgtcatttgatgcccttatggattctagttattctagtttttccagggttccattgactggggattatttattaataaatattattttaatattacctaccaagttcatttcattctttattgttcttaaagattctcttttttcatttctttattaagatatataacttgtgaatatagtttagttgtttatgaactgcagtgcataggtttctccttgcttacaaatatttgttttgagatgtggaaactgcaggactgtaatccttggaatggggcagctgggagtggctttgctgatactatattcacccttttttgcaggtatatatgttttgttctgagacttagttatacattgccaaatagttcattccttcatgaccttggaattcagcaatgtctccatgaaatctttttagagggcttttgaccttacctcaggcaagcctctcatggtgggaaacagggaatttcatgttggaaaatggaatagcttttgg

SEQ ID NO: 222243 - DNA, 2590 bp, Cannabis indica
taagaggagtactatatatatattcttccatacacacattacacatttacataaaagcatctataaatctgtaatttgagttttgtgatcactctaaagatttttttcttaataaaataaaggtaatttttatttttatatttcaaaatatatatatattttttttttgtatttttacagatttctacacaaaattacatatagcaactaacgaaataacttaaatcacaacctaaattcaaataataactcatatagaaactacaaaagtaactcaaaccgtaaatattaaaataatagaacgtatttaggattcaaataatttactttacaattctacaactgtacaatgcgtgcaaataattcttatctaaactatataatttaaaataatgtaaattattgaaataatttaaataatgtaaattattgaaattaaaaattgataaaatatttatcatttttgaattttatgtgaaaaatataaaattattataaacattttactttttctcacaacaaaacttctaaataaaagtaaaaaaaattgtgactaattataattgatcatcaatcttatgttatgatttaaaggtgtgtagctaaaagtattagtcacaaaaatcacaatttgttgtgactaaattagtttttagtcatagtaattgttatgacaactaaaaataaattattgacaattttgtatctaaatactatattatattttagtcacaagtaattttttattgtgattaaaagtcacatttaattccaataaatttatgtggtatttaatcacaaaaaaattatgttataattaaaaaattctcacttaagttagttattttttagtaaatattgtgtatttttttttaaaaaaaaataaacattaattgatgtgtaatttagtgatgttttatattattgtttgggccgagtacattgttaacatcttgtctgttctttattttcatgaagttatgtattttttaatttatataagtgcattgttattaagtacattaagctgtttaatattatattaagggtaaatagtgatataagtacccaaagttttaagttggtataatctcaatatttatttttagcggtttaagtacctaatgtttgtaaaactgtaaattttttctaattttgtcagtacaagctctattattttcttaaactggctacatataaagtccagattcttgatcattgggtctggacataaacatgtagtgtcagttaattctaaatgttcctttaatatattcaaaacagagtctgtactgacaaaactggaggaaaattacagttttacaaacattgggtacttatgccgctaaaaataaacattagatttatgccgcttataaacttaaaactttgggtacttataccgctatttacccttatattaacgtatagtgcattatgaattgttaacggttttttatattatttatcaaataaaaatatgtgaaacccgatattaaattatacatagtagaccacttcttatggtgtcggacaacttaagagtgcccattagtttttgtatttatataatggtttcctgacagtactatatatatagataagtgtaggttttgacatatcatggttcatgttcttgggtagcctaattaatacatattgatagataaggatctttagcaataagcgggacacaaatcgatagtttcctgctacttaagtagtgtctcatgtatagaccctttcctgccatgacagaaaggtaggtttctctacctgattagaaataaccaaccactaaaacaaccatcacactacgtacccaattaatttatttgttttaatttacaaaaatgaaatcattaataaataccattctctctttctagtgatatgaaatacatcagtgtaaaaacaatatgacaaaagatgtgttgcgttggcgcagtacagtccattaaagtggatcagatcagcacatatgaatgtgttgttgtttacgacctttccttgatttgtcattatgttgtttaataacttcaatttgatcattttaatgtaaatgatctgtgttctgcacactccattattattctaattttgccctttttttataacgattttattaatgcataaactttttttttttcagaaaaaatattatagtaaattatggtaagtgcggattaattatttaggctaaataaattaaaaattgatttctcttttgaaaggtaatagaagagaaaaatgttaaaaaggtactcatgtggccttttaataataagtcaactgcacaaaatccaatacaaagagataatactcgtaaattccgtcccaaaaaaaaaaagagagataatgctcatagagtataattataatccaccaatctaaaagaaagtcttaacagtttcttcaattaaatgatctagtatggcacaagcaatcaagctaccattaaaacaaataagtttattcacaataaaattaattataaattattatttttatattgtgattaaaatattttttttaattaaaattaattaatcataaaaattataaattattgtaactaaatatattttta

SEQ ID NO: 222244 - DNA, 1503 bp, Cannabis indica
atacacatcaatgattaaaaaaatattcatatactataagaacaaaataaaggtatgtaccatagaattattctatatatatttatatagttttgtttgtttgtcttcttcatctctattttctttttggtttttaacaaactcttcataagtttccactaatatatatttgtgataaataaatgagcaagtagtgtcttaaaaagggaattacaagtttggatacccaatataaatatatatatatatatatattatgattgtttatattatgagcaagtagttgtaagagatatttcgttaatgttttaaatattatgaataaattaaggtgtcgaggttaagattcataaatttttactttaaaaatttttatttttagtcacaacaaaatttgtgactaaaaacaaaaacaaaaaattgtaattaattataaatcatcgatcgagcagcaaaaattctaaatagtctaatttattactatctaaaagttttttttatttataacttgcctaaattaagatttctttttgacaagtatcacttaagaatatacgatgatgacatcactaacggcgcatgattctcttcaaccagaatagctcattgtttagccaaagtgcacgcttgtcgacccatgggctataatataaaagccacgtacaataaaacaacccttagaaatttacacaattaataaagctatagcgaaaaccaatgaccttttgagctcgtaaaaaaatacataaaacacttacatacataaattaaattaaaaaacgaattaacacactaaataataaaaaaaaattatagactaaagtattaagagcactcccatctcatatctcatgaactaaaataattaaaaaaggtaaaaatatataaaaaaaaatattgttaaaaataggctccatcaagtgagctaaaatagctcaatattttagatcatgaatagagagaagcactatttattcttcaaatattattttaatagtttctctatattttttaattcttttgcatttaatatttttggtttatataataaatatattaaaaaattaaatatataaatgatatatagaaaaataaaaaatttgatgtatgatattgttgacactgtttcttgtcaatagatctagcaagatcgtacacgagcaagatgaacacaagtaattatcaatcaaagtaaatcggtttgtagaaaacaaaattaacgagatgaacacaatgttttataatggttcacccctttcagcgataataggttagtcaactttgagttttattaatctcaatgtttaagaacaattctccagagttatgttctctaaaaattcagttttcaaatgagattttagagtgaaggaaggagtgaatgtcaatgtaaatattttttagtttgttatgaaaccaattttataattatttgtatatttgtaacaacattttggtgtttttaattttaaattaaaccagttactgacacacatatatttt

SEQ ID NO: 222245 - DNA, 1971 bp, Cannabis indica
tatttattaaattaaattgtatataacttgatattaatttgtactaataatgacaagcaacctcttatagtgccaaggtgcttgacagttggcaccataaggtattccttagcatttttttatttgagatatttttacaatatagatagcagagtttaaatagcctattgtacttgcacaaatgtaaaataaaagggacacgagtataatagacagtttaaattttatttttaaggtgttaatttttttttatatagttttatagaattttacaaaatattttaaataactacaacataatcataccataaaaaaactaaaaaaaatcaacacaaataaactcactaaataatttttaaaatatatgtatattattgatttattattatatgggtgatgataattatgtaaaaggtaaaaactaaaaagtgtaaaacataaggagtggtgttgaattagaatcgtgagatgaggcgtcaattgagcaaaattataatacaagaaatttgtaaagcattctatgcactcaaacaatcaatacactacaccttcacaccccgccctttttaacatttctctttttttttttagataaatgttaaaaggtattagtggtgcctaatatttttttatgtgttaatattagtattggtctaattaattatttgatttaatataataatttttaagaagtatcgctaaccaatggtaagacaacatatataaacgtgctaagtaccattaatacccaataacaatgctcttttttaaatgtcttcctctatatattttaatgaagagtaaatagggggcaaaacgcttttatattttaatttttatgcacatgtaatttttatcttttttattgtggtaaaatatctttaagtttatttttctttgcaaatttcagacgtcatttaaatattacttttaaatagcaagtagatgactattgtgtacatctgacctatgtatatgtgaaagtaaaacttcgaagccaatacaataataatctagttagtatttaacaataatatctagttgtaatagagtgtctcacattgataatgtgttgaaattaaatatcatatataagatgcatggactactcctctcattgttaattggttttcggtccaaaaagatgagccaaaagagtcacttgtgattcgagtatagtgagccaaaagaaccacttgtgatcgagtcgtgcaagattggtgagccaaaaaaaaaaaatatagacactatcttgagggggaatattaaagagtcccacattgataatgtgttgaaattaaataccatatataagatgcatgagctactcttcttattaccaattagttttgagataaaatttcatgattctcatcaatctcaaatttaaaattctgtacaactatattttatatatatatattttttttttggttatttttatggtttttttttttaaaataatcccaatttataattgtatttaactttctttttacctactttgggggaataaaatcctttcttttcaccttttattattactctagtctagactagtgtctaaagctttagcatttctctttaattataggaattttaactacgtaatttttgataaatataatgattgaaatcaaagcatcaaataataaaccctcttgtttaaaaaagcattgggtttgaatgattacactttgactcgtattgaagtttttcaaaaataaacttgcctaacaatttttgtttttagtctttaattgacaagtgaaaaccaaacagttaagaatagggaagtataagaccaataattggcaacatgtttaaattgagacagacagtcttgtttcagtataaactatgcgaagcaaccaagcaatgaggtccacttttagccttttaatcaaagactgtcaacttttgttatataccctctcaaatgttaatttatttttcattagacgattagca

SEQ ID NO: 222246 - DNA, 2041 bp, Cannabis indica
attagacctcgcggtcattacaacaaatattctgaggaataagaacaacatcaatacaatcatataagttataggtaaaagcccaattggccacgttatgagccataaaattacacattctagccgtaaaacaaaataaacaagtaatgaaggaaggaacgattcttttacaaaataaagagtagtttttagtttcccatcggggatccgaatcgttgagagtattgatcactatctttaaatcactttccaccaagataaactggtgtcctttgtcctttgcgacttcaagcgccaagcaaaccgtagcagcttctccacacaaggcatcggaaaagtccaatttggtcgtaagttgtttagttgttgctaagtagtgtgttattcagtagttgttggaataaatatattcttcctttgttccaaaaaaaattattgagtcttaatatattttaatttaataattatcataaaataccataaattaattgtaaggtgtcacataaatggagttattatataataaagaaaaatttacggcaaaatcctttttattttttgtgttttaatttttatatacttaacctccagtttatttttctttgtaaatttaagatgtcagttaaataggttccatctcaaaaccaattggcaatgagtggagtagcccatgttcttatatatggctcaattctctaccatttattccatgtggaacattgtccacaatattccccctcaagatgatggctcaatattctcaaccatttattccatgttcttatatcacttgcccgcaagggatatggctctgataccatgttgagaatcatgggattccatctcaaaaccaattggcaataagtggagtagcccatgttcttatatatgactcaattctctaccatttattctatgtgggacattgtccacaataaatactaactagattactactgtatcgactttgaaatttttcttttacatatacataggtgtatacaataatcattcaattgatatttagtagtattatttaactggcatgtcaaattttcaaaaaaaataaaattaaattaaagaggtttcactaaaaaaataaataagaggattaaatataaaaagcccaaagcttggaaaagactagttagaaatacgatggatgctttgatgacttacaaatgtatgttgataattatatatataatatagttagaagattttgtcgctgccacctattaaacagcttgtgaggaattgaataatggtaatgatagtgacttaatcacttgcatttgcacttgcacatgctttttctaagacctttactgaagtatatatataatatgactttactactttacattcctactcaacttttctatcaaataattacgtgtctgatttgggagaaagaattaaagaaataaccaagaaaacaaagtagacatcttacaattacaagttggttaagataaaagtaaaagaattattaaaagaatttggtaaaatttgacataaagtccattttcaattgagggtgtaaaatttgtggaaaattattctaagaaaatgagttaatactatacttaatttaaatattataattgagttccgatatatttacgtaatcatttaatttaggattatttattataatttctttaaattaaaatacaaatataataagtacgtaaaatacaaatgttataattttttttttacaatatcaataaaaaaaagcccaaagtttataaaactattctacatattttgtgatagtcaaaatcatgtgatccgcaataggaaataggaaagatcgagagttgtgcaatcccacattgtttaaaaaatattacgtatgataattttgagattgcttaggtatgtgattacacagttgaaaatgatttaaatttggattgaatggtactacctatatcaataagatgtattttcggtatcatatcttgaaagaactccaaaattaagagtgtttgacctggaataatttcagtatgggtgacctcttgaaagtttt

SEQ ID NO: 222247 - DNA, 2397 bp, Cannabis indica
tatgcttttattttgtatattttattttttgttcttgtatggcctatatgccctttacttttaaacaatgttcgtgtatggcttgagggcctttatttttgaatagatgattgatcaggcggtctttaattctagctttaacttcttttgttagacatgtaggtgtcgggacttacgctttttatgtctaatctgaaggatgccatttgcacttacttaactttcaattttttgcttatcaaagctttaaattttgcttaagtttagatgcacttgtttcatgttgtacgatgcgggtgtgccccaagtgatcgagtagacttatggtctcttggtcacttacaattcaccaagtactatagacctttgcctgtgtattttttggaggaacttgtttgcacacatgtggaattaaaaaataaagattaactttaagaagttatcttgttagaaagttgcttaacacaacattgaaatgaaacaacatttttatccattaattggtcttacatatgtgtttttgttgtgcaacataaatttttttggttctaaaagcttgcaaatataaagtttacttctaaaaataattctatggctacccctgcacgacatgtcagataggggccatcactgaatagtgatgaaaacttaactcttttacactaattcctatacagtgagccgcacgcgaactactactaaagagtagtatttttaaaaggttgtcattggtagtagtttctgagatgttctccattccagtaccttggtaggagaactaattccatgttctcattgtacctgctaagcttgtatgcaccttaacctattatctttctaacttggtacgaacctttccagcttagtccaaacactcttgctgcaaaatctttggtattcagcaattaatactcttcgaaacactaagtctcctacaaagtatttcctttccttgacttgttgattgaagtacctggcaaccttttgctggaaggcatgcagatttaggtcggtttggtctcttcgttcttctattttgttaagggattattccagtaaggtgtggtttacttcttggtcataggatatccttctatgggatggtggttccagttcaacggacaacattgatttatagataggctaatgcaaagggtgtctatctggtggccatcttctcggtggtcctgtgtgatcagagtacctctgggagtaaataaggccaattgccttttggctggatatatgcccttggctggctagccccccacagctggacagatgcccttggtcggccagccccccttccttgaccggccaaattagccagactcccttggccggccaggccaatctatgggttgacatgcggttggtcataccattagcttggttttggtgggtccacctacctaaaattatagttcaaaggtggaacaaaataattctagttctcgctccttgagttattattgtcttatgggttttcacttatcctaggatccagcctatcaaaaataaggtccctaggccttagagcaatatattcacaagtattttggaggagacaattactatgttggccagtaagggcttgatcagttggtaatgtcccctctttggagttgttttttttgtcctccaacacctcccactgctaggaaatggctattcctgccatatgacctgtctggcaagatttggccgtctttaagtagaggaaggtctgtcctcgtgttcaagtgacctggttggctatatgtccattgtctacctgcctgtagaccatggctggcctgtcgatgaccctttcttacaaaggatctctttttagatcctgacctcttcctgcagttctctcattgaactgccatattaggtcactggcctccctattacagcagtttagctttgcttgatgggcttggacgatggcctcctaatcgtccatgcaccctaggaattcatgtctttggtgggtaaaagcatcacaactagtagcgcatagatcttcttatattgtcttagtgacctgccctacaacttctctgatattaaccagctcaacatcatccccaaggtccaagtgaggctcactaatagatggttcaccaattcttggccttgtctctcctgcttagtaccatggagcagacctagttgtgttctatggaggttgttccatgctaataaggctttctattcgaggcgctgctagtggattttgttgggttttatgccctaaataaaacccatttcaatataatcagatttacttattaataaagatcagcaataatattttatgttgcatggttcacatgatttatttcatgattatatataatgtatgaattctatttaagtccaaaacatatgaatttcttaatgattata

SEQ ID NO: 222248 - DNA, 2410 bp, Cannabis indica
tataggacaccaccttagagtgatagcactttagtaccctatagtaatgctctaaaaaatatgttttttctattatgtattttttctttttaggaaaaagtctcaaccaccaagcatcaagagtaataagcattttaaaaaagtaggggcgatgatttattcaaaaatagcatcaactattaattaattatagatacaactagtatcttctagccaccaaatcatattacgtaaaaatcatctttctttacattttaaaatataatctaccaaaatagtagaaaaactattccattaggtcgtgttcaatagttgtaccaaattggtgtatatatatatatatatattgtttactaatttggtataaaatatagagtaatttaaagcataaatattctttttttttttttgaataaaaaacataaatatctaagtttaactcccagttgcaaatagatatctaagtttaatttttagcggtaataatacttaagttatatttttaaaacttctgtaggaatctggctgttaagtattaagtaaattggcacgtgacaatccctgattggttcacgtcatttttttattttttttaaaaaaaatagtttaaatataccaataataaaatgacatgtggataatgatttgacatttaaggaccaggtacctacatagttccagaaatataacttaggtattattaacgccaaaaattaaaattagatatttatttacaactggagttaaacttaagtatttatgtcgcaaattactctaaaatatactacttttaatgcaacaattttcatgattcaacacccaatataataccaatatgacacgtaataaaaatattttgtttaaaagatctcacatttttattatttacattcattaatataataataattaatttataatataattgtcattgttatctaaatttctacacaaggtggcgtgacatctacttaggtgatacgtaacagatttcatgacctggacggaagattctacttttgatgaactatgcagggagattacatactcaaagttagtagaagttggaatgtccaagtaagtcgtgtgagaacacccaactagcttcaacatgtgagcagctcgcatgagccgaccagagggtgcgagttgagtattttcagaggaggtatcttacatatcttcatgtttatccctaattttacgggatggatatgcagtatcaaggaagaaaagggcaatctgccttgttttccattttgctcattgtaattatagaaagtaaaaagttttctcattttattgcctattagttttgggaaactaatttatatatttaatccctataaatagtagagtcatctcactatttgggagaggaggaatttcactcagaaaaaatacacgagagaaatctagatttaagagtaaaatactcaaagattattgtaagagctttcgagagagatcaatgcattcttgttcatctactcacaagttaatacaattaaatgggagtaagctattaccattatcaaggggtagaacctctataattctggtattttctttaatttatattatttatatttgttattttaattaattcttaattgctttaatttgactcaccgtcgttggctaaaagcgatgtcgatattttggtgctttcattgagagcaaagaaaacaagtctttgttttaagtctttacaggatacaagatggttgtaacaatacaaaggggaaattagactgaaattacgaattcaatgtctacaaatcctaatgtgcagatgcctgcaaacctcagagatccaatcaagatgtacggaccccgatctgattaatcctcagccaccaacaagcctgcaaacagtaggccaaggagtgactatcccctagctgggttcactcagggcgtgtaagaaactggaaccactagtactcggaccgagtaaactgaccacggtactggaatcccatctgctacaaattctcaaaagtcaatcagtgatgacactgagctacaaaacttgcgagctgcactagagaaaatacaaggccacaataacactcttcattacgatcaacaagatactatagcaggtataaattttacttttgaagaacaaatacgctagttcgaagagtggagggatcgagagataaaatcatgagagcccaacaagaagtaattataactgttccaggcaggttgtcgtactgatcaagagagcctatcgagtaattataactattcttcactataagcttgttcaacttccgataatcgatacacatccgaagggatccatccttcttcttgacaaataatacctccagattacaccactatcgtacccaccatcagaccactatcgtaccccatcgtaccatatacaaaaaaa

SEQ ID NO: 222249 - DNA, 1984 bp, Cannabis indica
ttgctttattattttaaaaaataaacattaactatcagtagaattagaaataaagtcatttacttacaattctctttaaattataaaaatctttcaaaatattaaagaagttcttagagacaagtagcttcatacaattgccttaataaaaaatacatgttgatacatatcagtaaacatagtaacatacttttacaatcttgccctcccaagaagaaaaattaatttaaaaaatattacatatactgagtaggtagcatttgtaaaacattatttttacatatctatctaaacacagtcatacaaacaaccgctcattggaactaaaatgaaagtgtataataacttattgatacaatattacaattcataaattttgtcttatttcaggtgtcaaatccctcaaatgataggaggtgtaacataagacccaaaaaaacggttatagttttgagctagtaaacttaatttcccctttcttttaagccggatttccctttaattttaattgctgataaattcgaaaattgctaaaaagtatcagtggtgttagtacatttctatgtgttaatatcactattagtctaactaagtatcagattttttatagtttaatgtaataatttttaaaaaatatagttaatcaattacaagacgacacgtttagaaactattaagcaccattggtacccaataacaatcctctttctatataaatatagattgctcttgactccaaatacggtattattctcttatttgattagaataattaattagattacgtcaaaaaaaaaattaggtttaattagcaaaagctaagaccagggcctatactggctgcaaagatagatagggcctaggggttagcatgttacgtgtacaagtggcaactggcaaccctttcacaaacatatggaattaggggtggtaaaatgagttttgacacgacttgacacgaaataaaaatgggtcaaacacaatacgatccgcttaatacgaatttgacgtgtttgatatgtatttttttttaaaatatagtaaaataaaaattattaataataatataattatataaaaatatatatttagtaattcaatgttaagttaaaaaaatttaaatgtaattttctttaacgtgaaactaaaatattttaaaatttttaatttttattatatataactaattatttacacatatataagttttctaatggaatttaaatttattatttttctctacagttccagtttcaataatagaaaaacgggtcacaatagatcaacacgaacacgacacaattttttacgggtcgggttagagctgagaaaattagacacgagtcaaaaaataggtcgacatgccggacacgaaatataaaagcgaatcatattaaatatgatacgaacacgatacgatgacacgttttgccactcttatatagaatggatggatggatggaacttagcacctacctttagcttcacaataaacataaaatgagtgaacaaggctaccaaaattatattatggaccacagtttgggtgaggatgagaaaagaaatagtactccacgtgtgaatttataacaaactaagaaaattaggataagttaagaaatacttcttttttatatttattaatcaaaaatacttttatattatattttaataaaatgtacttatttttgtgagtgggttgcccaatataccttcaccctctacttaaatctaaaacataatttacattaacctaaggggtataatggaaacatcatctataaaagtgagtacagtttaaagaatatggaaataaagataaacattaaaacaaataaagtaaagtgggtatacaatgtaatttcctttaaaaaaaatttcaagtaaagcctattaaaaatgttttttctcttttagtttgtgatagccacggttttcccacactaaggaaactataaaacctttttttcactttttattatta

SEQ ID NO: 222250 - DNA, 2615 bp, Cannabis indica
tctaatttgttgaatggaaaattccatatttttgaggatcaagagcttgattgtgacacaaggtctaccaatatgatcaatttcttttcaaagattaattactcttggaatattataagcctacaagttcacacagataaggtaataatatgctttatttttatttgattttgcatattttatttatttcgagttattattatgtttatacctttatacattttaatgaaggctctcatcttgtcggaaaagttgaagaacatgaacgattctcccttgtttaagtggaagcatctcaaactagttattactgaatatgatcctgaaagattgtcagagttgaaggattcattatcatggatttcaccttctttagaaacattatctattaatggagatgtgatattttagttttgcttaataacatttgaactacttattagagtagggatgactattttttgtctcttttcttttttgctgacactttttgaggttatttgctttagtagttttgcaatgatgaatatttgcttttttgcgctaatgaaattgatttttttatgctcaaacttgagattacattagctgcacttactacagaataactaaagttcatttccatgtcatattccataaatttatatagataaatataaataaatatataaatatttatatatatatataaaaatattccaagagtgcattcttttcactctgtttttctttaattattatattacgagtttcttgaacattatcatcaaactattgtgctcttcaaaataaaatagctagaaacattcaataataatatatacaattacactgagacataagaggatataatgccttctaacttgacacatgagaaacccttttgatttatgatctcttttcttggtcttaatttagctaaaaaacttaacatgacctttggctacaaatttttggcggtgacataatgtggtgacgtggtattccgtcacgaaaagtctaattttttgctgtcatgatatgtcaaaaatgtttcatgtattaagaggatttaagaagaataagaactctgattgcttccaaagttaggaccaattaagagagcaaagaaaatggcatgtaaaaagtatcagtggagactaaagtttttcttttgcttaattatattagtttaatacttcgaggaaaaccttagactgtacctaattataggcatgtataataatataagtttacgagctttgttatggttttgataccctttctgatttctgtgctaaaatatgtgtactactctactaattaagttggtttacactcttctattatagatcctgtgactggtcctactccaaggccaaaggcagtgccttgaatcgaattcactaagcagaaatgcgttacaccctgataaacaatgtgtacaacgtatttgatgagagaaaagtgggcaattgtgatatatatggaaaatggtttatacaatagctatatttagccttacaagtggacaagtactgtccaaagaagcatttgtacactcaatttgtttaactctaagttgattaggcttagaagcatttatagtgttagaagtacaaaacagtcttggggtagaatggtcataacagagccaatggattctgttgtaattgagctgagttcttgtaatcttgaagttagtttataaccgataactaactagcttgagtactgttgaggtgtccaatccgagtgaagctctctcattggacacaagaaagtatgagccaatacttcactctgtctctgtgtatctctgttggagtgaaggaaggtgtaataaacttgaatataatattggattcgactcgaaaaatagactgtttgccttgccttggatttgatgtactgcattgacttgaacccagaaaagttctggagtgaaggaactttataatgcagaaaacgtaagtattttaaaacactttttgagcatacttttaaattagtgtacattcttaaggacctaagaatgtacctactacatagcatcatctaatgttctatgattgaataacgatactcactaataatttttacattaaattatataagactcgatacttaattattgcagtaataataatgtgacacttaagatagtactaagtgttatatcagtgccttttaacatttctctttaaaattcggttaattaattgacatatatagataaatctacatacgtggtggtgaatatttaagaaagattggtaagggacacccctaaaatttggataaaaattctacacttgacaaattattcactatatatgtttttacacttataacaaaatactattaaaatatccaaatcttaatatattattgtggattttaaatattgaaataatgttgaattgtatcattattgttgggtggtgtggggcttgtaaacattggtcactttcatggtcctttctcatggttggattcttgcccactgattactttaaggtagtattttaatgtcacaaatgttagactatatatatagtgtatgtaatatagcatatacaaatgatatgaaatgcggaaaataaaatgtaatcatatcaataatatatgcaatg

SEQ ID NO: 222251 - DNA, 2062 bp, Cannabis indica
gatgacgtaagagacgaccaagataagaggtccctactactgcagctttgaacttgactctactatcgtaccaaataccacccaggaaactgacacaaaaaagaatgcctcatagagaaaatcattaaacacctagtactattggtagtcgtccggatggaaccagtaatgctagagggaccaatgatggtagtggtcctagtgttgctagagggaccaatgagactggatttagcgatccattttcttcttcaacaagttacgataaattcaaggagaagatgtgtacaagagaagacatcaaggatcatagtcattatatatttatgggtggcacaccatgcggagagttacatctagcaaagcttttcagagacaaaaagtatttaaagatggttgttggcttatatgcaatgaagaaatggtttgaccactttattaggaagttcgatactgttgtttggtacgttacatgtaaggatacagattgtgggtggagactaagaacgaagaagaacatactttctaacaagtttgaggtgactacatctttgaggaaaagataaccgccaaccatcatctttgatagtttctagtttaattaaggataagttcccaactgattgcttagataatttggcctctgatataaggaaatatatgtacaaggattacaggattcaaatgagttatgaaaaaggcttagaggtgcaaagagaagacaatacacctagttcggggtacaccatgcaggcagccatatttttctgatagatttcgctgtagttgacagcaaaaaccacaattcttggacctattttatgataaaatagaaagaagcgattggtgatgttgagaacttagccttcatgttggataggcatcaaagcattgttcatgctttggagatcgtcttccctgattcacaccacggtgcacgctaccaccacattattatgaacgtcaactacaagttccagactgacgtcttcacgaatcatatttacgaatgtgcctacatgtattcaaaaaagagagtttcacagagcatttaagaatattcgggcaataaatgttgtggttgcacaatatcttgaggaaattggatttgagaaatgggttcggtcctacttcccaggggtatgttacaatgtaatgacgagtaactgggttgagagcttaaacaacacaactaaggatgcaagaggctttcaatcactgctgctataccattcctagggtccaaagtccaacattggtttgctacgcgaaaagaaaaagctgacaattggacgaagaccctagcacaaaaaatggaggaggacttggcattgtagtttgagaaatctcggtatttgaacattgacacatgtagaccttaaaagttgcaggttcaccctgaggatcagttgagaccggtgcgtagtggacttgcaagaacagacttgcacttgtggcttgttccaaatcatgaagtttccttgtcctcatgcatgtgttgcagctcagcaacgaagtattagcatgtacgcactatgctcaccatattatacaacaaaatattggaggagcacatatgaaggcacaattatgccagtttgtgacgaggatgattgggaattgcctgatgacgtaaagaacatgagagttggagtatctattgagaaacagccaatagggcgacccaagaagcaaaaggttagaagaattaagtcaaatcgaactgcttgtaatggtgaaaggattgtgataccacgaaattgtagcaagtatggtgccaaggggcacaacaacagaaatacttacacctaccgaggttaaaaatgaatgttgaatttagatgtattgtgatgtgttgtactattatctattgttattgaattcatgttggactttgttaaacattaaaatttgtggtgttttattttttgataattattataatttgtagcatgaacaggttattttactaattgcaaaaatccctttgtaaaaaaaccactagtctgatgcaggtctgatgctagtctgatgggggctcgatgcttgcatgatgtatata

SEQ ID NO: 222252 - DNA, 3196 bp, Cannabis indica
cgaatacacaagagataactcaacttacttacctgaataagaacataaataagattatatatctatacttcaaagcttctaaggtgtatttatgttctactaacctcatctggcttacgacttgtctctctaacctctgcaacgataacatcagtatcaatattcctgttaactattggatctcccttgattccaacgaggcaatgctccttgctatgattcagccaatgaccagttctccctgttctaataattcgctggagttgattagtcttcacccaaataatctcctcgacacgcttgtatccccagaggtccaaactgaagaagtataaagatattcagattcttctgataaataagcaccaaaaggattgtcaaaagagtttataaaccggttaattaaatgataaaacatgataaatcataccattcacgcccaagctccattgcacgcccagtgacccaagaaaaatcagaccatcagtttgtagtgcaggaacattaagatttcgcatttcatcatcagccatagtcccatatggtagttccatatgaatatcccatggtgggtctgccataataactccaaattgtcctaaaatgtccattctgaagttacgaatgtcacaattgatccattgtggttcaccaagctccacttgtgaacaatattctgcacgctgaggctttaacggtttggaaggtgcaagaactgaagcgcccattatcatgggtgacacatctggtgttggatcgagctcataatgaacatacttgcatgtctataaattgaaagacggtcattactccacgtagagatcataacatcaataatgataaccaatacataaccgggtgaaattgatcacaaaagaagtaaaaaattatataccttcatgtgacggcaagtatccaagaaagaacaatctcctaaattgatgtcggtatgtggagcaattattcgtcgaaaatgaacctaaaaagaagtttttcaaaaaaacaatattaagaaaggacatttactgaatataaacgaataactcattctcggagggttgctaacaataatggcacactgtatggctcactaaccttctcacatgccacaaaggaaccacattgtcgtcgacagtcttcttttgttagggatgagcagtactctttaagttgggaaccacctttagttttgaactgaatacaataagagcattagtgtaaaatttaaagaaaactttaaacaggagaaccgaaataaactataaaaatgtctgaaatcataagaaaaacacaaaggaagcacattcaagagatcaaacttggttttttacaaacattagcaaaatctcaataactttaactagtaacagaaaatttgaaagttacatcagttctcatgtccaacaatatcataacaaggcatcagtgatttctaattgttaaggtaagtttgaatatgctaagcaagaccaaaaaagttaagatacatcatccaagtaccttttacatggacttgagtactcttcacttacttatctagctctcttgactatcaaagcaaagccaaaaatacaaaggctaatttaattaggatttgtctgccccaactttgacatttggtacccccaaacttcacagttaaaaattccctcgaattattgagattgttgaatttgagaactttccgttcaattttacttaagggtgtctaacgtggaaaaaagttcaggaaacacgatttggtacatgaacaattgcctacattaagcatctgtcagtaaaactaaacggaattgcacggaaatccttaaatctttcaataatagatgttcatgagtcaatttggtacatgtcaaagttcgggcgggataaaaaatcataagcctattttgtatatacaattacttctatcagttacactatacaacacataaatatgcatgcttccaaatcaaactaaagtctttcttcacaatatgccaatacaagaggctacaaaagaacaaaccttagcagcaacagcagtttccttagcagtaggccgatgaataaggtccaaaagctcctcaccagttttagatttctgcaattctttaaaagactttttattcaaaagtgcctcaagatccttcaaatcatcatcttcactcctaagtcccttctgtggcattccattagagccagaagcattaggacccaatggaggtctatgaaatggaggaacactcattctaggcactcccatcatccccataagtctaggaggaccaccaccaccacccctaggacccatcattcctcccggaccgcccccgggaaacattgggggaaacccggataaatgtggatcatttggagccatccacatgtctggcattggtctcccaaaaactccaccactaacatcaaccatctgattcccattcccattcccatcaaccgaattcgattcgggtggctggtactggcaactctcaggcaattccttcaataaccgagttctatcaatagccaaaaccataaccctagatttcccactaacaacaaactcctccaattcaaccccaccattctcctcagccattgatctcagagccatttccacagcaagtatagccccagactcacctcccaactcacgcaacgccgccttctccgacggcgtagcagactggtcattctccaattttctcaacacagtcgaagaatcaattggggaaaaaggaaccctttcaatcaaacaaaccgccaccatcgaacgaaccacagacaacggactaccgctctcatcaatggggctactgctgctaaacttctcgttctccgaattcgaacccaacgagggtttatcattattagggttttgggtcttggaaacagggcgagttgattcgagggtttttctggggtttggtttaggttgagggagttgaggagtgggaataaagggacgattttcgaataagatacaacctttagagaaagatcaatggtggaaacgatgttgggttggatatgagcttgaagagatgagagaagctcgagatgagtggcgtggtgggtgtttatgcgagtttctaaggtttgacggagttctttaatggtgggtagagcgttttcgtcgtttccatcggattgggtttccattactgggctctctgatctgatcaagctcactcttgtttttttttttttt

SEQ ID NO: 222253 - DNA, 2689 bp, Cannabis indica
tttaattttaaatattgtttatttattcattaacaaaattaaaaaaaaaactaaaatatttaagaaaaagaagaagaagaaagagaatgtttgacaagtttatcatcattatttaaaaaaatttactctatatatcacgagtcacataaagacaaaaaaaaaaaagtaaacaacaaataaaaaacgtgtaggcactaaagtctagaaaagagccactaaagtatattgatatatgtgttagcctattttaataaaaccaccgggtttcaaaacaaaccaccagtacgtgtgtgtaactgtaacataatagccgctattttaataaccaacaataattccctaaataatttgatatttacatgttgggatgtaattaattttaaaaaatatagaataacttgtgatgttgattgttgtattgaattttaaaatactatgtcatttttatatatttattttaggaacatatcaaaattattacaaaataaactatgtgtataagcatattagttacttataaaattggttgatatattaaattttatttaagttgaaagttttgattatttttaagaaacttaaaaattattctttcgggtcatttgtttttgtaccagcaaaaaaatacatccttcccacatattaaaatgatcatcataaaaaatagattacaatagtataattttttagtcaaaataataaatggtgtgactaaaaaaacttttttaacttttgggaaagaaaaaaaaaataatagtgctgccacctttattcatacgcaaaaaatgagatttttttcattttttatacctcaaaactaactttttattatttattattttttatagaaattttacataaaaacccctattgcaattaacggagcaacctaaatcgtaaccaaaagaaaccactttagaaacccaaatcgtaaatttgaaaaaaaaattaaaaaatagtatatagggtaattttaaaaaaaaaaaaaaaaaactaaattttagctactagttaagagagagagagcatttttaatattaaagaaactcatcaatgttcatttacatatttaataaaataaaaaatggaagcaaaaaaaagaaaaagaaaataaacttacagtacaaagtgattgaaattgattaatgtctcaattgattatactgtttacaaaataattcaacaatataacggtaattagagtaataaaattttgaaccacatctttgtaattgatataaaattgacgtgactctacataaatttctcttttaattttattttaagtgttttttctaataataatatgccaaatgccgttttagattttgtgttttgcaaaaattactggttaaacattttattttattaaatgataaatagaccttgtattttttaaaatggtaaaaatatgacattgggctcaattttagataatttttttaatataactaattttatcatacacccatggattgggttattattaaattttattttaacaaaaaatcaattcaggatctcatttatacagttatctgcgttttcgcaacattgacacgtgggtattaattaaaagccttaaatttaaaaaaaaaattatggtagaactattgtatatataaataaattggtcgcaaaaatacttaagtaattaattttgccatagttaactattactattagtataaaaaaattgaacacaaaatttttaagtaaaattatttttttctaaagaaaataaataaataactatataaaaataattcaaattaacttaaaaaaaaataatataacaaataaaaaattaaaattttttaattattaatattatttattttttaaaataaatatataattaaatattattataatatgaataaagtttttattatatacaagcagtcttatcgtaagagtatacaccttatatcgtaataaccacatgatctaaaatcaatggtcaaaaaaagttccctatcggtagggaacttttgctaggtcctaccatagtcttgcccattaattatatattgacaaaagtaaaattatatcaattcaattcaattccaaacataaaacggctgcgcactaagttgtcatcatatattctttctttggaagctattctctattctctacaaatatatacatcatatataatatatatatatatataaatatatatttatagtgtggtctaatcatggctgggctgtaagtttacaaacatgactatggaggatccatttatctcatgcatgtgtatatattcggattcacattcattcatgtttctcattctctctctcaacattttggattggactatataaatatatatgtatatttatatcaacttgatatatatttatatatatatatatttaaaagggtgtttcagtatattctgttttggtacataggtaaatttttttaatctagttatatcatcgtatatattatagttatttaagattatttataaattttaaaaaaattttgaatagcttccaatatcaaaaataaaatttacatattttattataagtgtaactgtttttttatgcatatgataatttgtaattgtttaagtcttatttttagtattgtaaattattaaaaatcttctaaaaatttataaataatcttaaatagtttcaatatatacgatcataaaaaaattaaa

SEQ ID NO: 222254 - DNA, 2038 bp, Cannabis indica
ttatgagagttcaggtaacaaacattccttgctgtatttagtggagaccatattcatcatttagatagttgggttttttccgttatatttggttgattattgttaatgagaatgatataaaatactaagttaatttttggccgtaataatactttaagttacaattttagaatttatgtaagtaccttattacaaagtgttaaaaaattacttcataacaattcttgattggtccagcttattaaatttttattttttattttaaaaaagaattagtttaaatgtaccaataaaaaaatgatacctaaataacacttaggtattattaccacaaaaaattaaaattaagtatttatttttaactaggtgaattactctttaatatataagaatccatgagggtgcctttgtaatcattgtcctgagatgagatgaggatacatatggttcacataagtttcaagagaaggtgaaaaggaaaagaaacagttttacctctttctgttattaaataacttattttcaagaatgctcaaggattgtctaaagaaattgagatgtgataaattattgttattgcagaaagactaggaaatcctatgctatatttgctctacttttggaattaatatattattaagtgcttccaattttccctcaggtttcagtattttgcttctgataaattgaaccgattcctctgaagtctgaacccaaggagttcttcaactccaagctaattttcttgggcatttatttaattgcttatcgattgataatttataagctaggggggcttgtattatattgtgttgtatcctgttatatgttataaaaatatggtatacaatataggcaatggattttgatccctttttgtaaaagatggaatctaatcccattatctgcaaattttgttttaatgtattatgatcaaagtttaatatactagaaatttagtttgatgcactatggatacccaaatgagatatacatacaatataactcaatgttgtagcatatttatatatatacagctagagtttaattgtacaaaaatggaggagatgatgtcgtttagtgaactgagaaaaattaaatttaattgttagaatgccaaatcttatacactgagcaaatcttgtcaataacaagaaactgagcatcaatatatgcagatgaagacacaacaagcaaatcacgttaaatataagaaggaacctttttgttattttatttatttttattacttttacatgtttatttataataaaactaaaaaaaaaataaaggaatattatgtctaatgatttttaacaagacccagtttggtattgttctcaaatcagatattctatatattctctgatccatttcatctctctccatctggatcttgctaggctgtccatacaacaacaatcgtattttaggtgttgataaaaaaaaaaaaagaaagaaaaaaagaaaaaaaacaatcatattttaggtgattagaagatcttgaccattgtttagcacattcacactgactttgacttcaccttaatttgtgtcacctattcatttcaataaacaattatacaagtacagctgatttgtttgaaaaattaaaataaaaccattatggttttgtttggggtcaatatttaataactaaattatagttttaatttctcaaaagaaagaaaagcagaacttttttcttctgaaaagccaatttaaagtatcaatattttatacaaaggtcatgtgagaaatctgcatttggttttaatttgtaaaagtgattcctctttcagcaatttcaaagtattggttttgtcattttgttttgttatttccatattatccaaaccaagagttctacaatgaattctgtgaaaactcttttctattcataaaaagtaacttttgttacaaaaagggatctcctttatatgatagataagatatagatagctttgaaactataccatatatgagtttccaattttccataatagtggtttgagtcatatatatttatatatatata

SEQ ID NO: 222255 - DNA, 2057 bp, Cannabis indica
ccactattgtataacatgttcccaactactcatgttattaagctgtaaaagtagaagttgaaagaatcaatttctctgagaaactttaacgagtgaatcaaagaactcagtgaacacaaacatgagttcatcatatactcaggatgatctactaattatgatcatcattgtaatatgataaactcttctcatggtaaacgataaattaatgaaagatgtttattatatattggttcattcatgcataatctaattatacacagtacatttactacatatccatctacatatgtgatgcgaatcgaaatcacacacactagaagtatagtgtatagtaaatagtacttagcattttcatattaaagattctcaatactttaatatactactgacttattttatccatatcgtataatcttaattctctcgtatatctttacaaaattataccttctttatataaataagaaattttcaaatatttaataattatctcttataattaatctatcatttatattataattatatttaatatattttctaatttattatccattaattgtttacttttatggcataaatcctaacattaagcaccttaaagtgtctaataacaatactctttcttcattgttgggtcatactcgtacctatcggatcgacccgtgttcttttgttgttagttagagatagtcttaattagcgccatttatcatgttttgcagcttccctaagaatggggtcaacgttttctaataaagatttttttttttaaaaaaaaaatatatatatattgacaataattattgtatgcttatatttttaggtaatttttgtttgtactttatgatcataatgttagttagagcattgttattagataatagtggtgtttagacttctagacgtgtcattctataatttgttagcgatattttataaaaattattacattaaattatttaagacaatatttaattatactaataataagatataagagaatgaaagacaccttgtgccttttaacatttctctgttataggtattgtgaccgttgatcaacaacacacaagaaaaagaatatatcctcatcaatacaaaatccatatgaaccacatggaacccatatgagtctctcatctcatattcattacatagtaatgacaaacaatatcacatggacgtatgtgctcataaaagtgtggctcaaataaaaaactttctaattaacttttttcttcatattttccatattcctttatctcaatatataaaatgtgtttactaaaagggtttggaaatgaaaatagagaatgggtatatgattactcatgttacttaataatttaaattattatgaaatgagaacaaatattagtggactttagtacaaatttgaaattatgaaatattacattgaccattgttattaaacattaaaagtgtctagcaccacttaaaagtaacacattacaattatttagcaccagtaatatcccttaatatatatttatagattagctctatcagttgggtgattgtcgatctcaacgtgatggcaaatcatggtaaatatcaaaagtttaaattagaatttatctcttgcatgtattaattttatttgagggtatatttttataactcaaattaatggtttattattccggttttaaagtaaacatatatgaatgaataagaatgttactaagttcaattagttactatatgattctagtaaatttgattactagtgaatctacctagctataagtcatttggatttttagctaggtagttatttttgttgctgatcatgacaaataaaagagtacccgaaacttgagacttccaatttattttaattcttcttagaagataatacatggataaatggtgcggtcaccaatacacaagcactctttatatatattactacttttttcggtatcatctttcttcataataagagctccttacgatctctataactactacatctatctctgaaaatccaataataaatattaatatttgccaatggaaaattccaa

SEQ ID NO: 222256 - DNA, 3858 bp, Cannabis indica
gtaaccaaaatgaacaatgtaaattgacacaattattggatttttaactttcaggcatgatcagatccaaatcaaaaagttcaagaataatataaaggttctttaattttttttttttttttttcaaaatcacaaatgaattgaattgtcaaaatcaattctaatactgaatttagattactaggaccttttttaatgaaaaattaccctaacaggtatagggcatgcataggattaaaattctaaaatgatttaggacaatattaaaatttatttaaacacataattatatataaaaaataaaggagttttttttttaatattatacctaaaattagtaattttttcctccgaactttgacttgtactaaattatgctcctaaacttttaaggtcgttaaaaattcccctaaattatacctactgaattttattgggtttttaatatttaccaaattgttgtggatatatgcataataaagttttaaaaataccataaaagcaatctttcaactaatttgtataagtgttaggagctgtagattctaacagaggtataagaattggtttttcgcaagattaagatacaaattgattcaagtgacaagcaagactggaaaaaatcaataatcaagaacaagaagcgatcaggaggaggttgatactcaagtatcaggaagattggatcaagaagatggccttgatctatgtgatctggtaaatgtgccactgaatgatcagaaccctaattctgatttgaattttgaaagattcaatatgagtagtattaaaactgacattgataaatttgatggttcaggttactacagaatatggaggaagaagatcaggtcattgttagcacaacataaactattaaggatgctagaggaacccattgaatggcccgagaatacaactctgattcaaccagaagaatacgtagaaattgtaagtggaatcctcattttcaatctaagtgatgcaatcattagattggtggataaagagactccagcaagaatttggagaaaattggaaacgcgattccagtagaagtctctaactaataatatttttctcaatgagagaatctttggattcaagatgaatagatccaagaatcttgaacagaaccttgatgaattactaaggatgcatattgagttggccaattatggagagaatgaatctttaagtgataaaaaccaagcaatcatcatcttaaattctttgttagattcttacggagaggttaaaataactattatgtatgtgtttattgaggttttcataaaacgaattatttaatattggaactaaagaaaatgcgataaaacaaatcaaatatgaagagaacactcagaatttttatgtggttgaggtattagtgagtcttaatttttgagtctgtattattatgagataggctaaaaaagtctaagggattacaatgaatacgagcaccctattctcttctcaagcttgtgagttaagaaattctaaccctttgcatgaaggattcaatgcgtatttatagagtaatagacgtcatacttagttaccatttccctctaatggggagtgtacagataatacatcacttcgggctaatggtaaagtcatttcatgcatctaaaggaggtcatgagttctaatctcaataaaatcatgtttttactttagtatttttattttactttttgaacctctaccaataatacttatattcaatgtcttaatattgaaccaaatatattttattattacttttttttttttactttatagtacatttaatactaaaatataaatttgtattaatttttaacatgttatgcaatgtagaaaaaaaaaaaaatgcactccctcacttataaaaaaaaaaagtgttgcccccctcaacttagattctgagtccgccactgcttataacgcgatacatcagtattgaacactttaaaatacatacataataacaatgctcgttttggattggtgttattcttattcaattaattagtgttgccatgtctctcttagaggccaaaacaacaacaataataataactaattatgcaatcatctagactttatattcttagatataaaaaaattattttattttactttttgagaaaaataaaagcattaatatttaaatgaccaacattaaacatatgatttaaattttaatttaaatattcattggtatgtattatagccgtacccaaaaataaaaataaaaaaaataataatattatataaaactaaaacatgaagcaacaaatgatcacttgcaagaaacaataacagttctagtaagtagtaaccattgccacaagttggaaatacaatacattatactccatctgttttgtcctcaaactaataaattaaatattaagtttcacatattttaatataatatttattataaaaaaataactatttataactaataacaatgtttgtattttaaggaaaactatgcttctaagttagagattaatgttacctataaaaacaagattatttcaccccattaatatgaacaaatcatctaataataaaagcttaattattacatatttgtctttccaaactaattaattactcccttctcaatccaagaaattaaattttggttgttaataattaagaagtggtattttagttgtgctggatggatcaaagtggagaaattttcattggtgattgtcagaaaatgaagaacaagaaatcttaagcaaacgagttaaagcgattctatttcgagaagagaagaagaagaagatgatgttaatactcttgctgaagctttcataaagaactttcgtaaccagctaaagattcagcgtgaagaatcattcaaacgttttcatgaaatgataggtcgaggtgtttaacaaagaaaaattatttgattattggattttcttgataatatgatcaataatttctatatttctttttctagtaatcaaaagtgttgaaaaatatatgtaagtatgcttatcaatttaatctgtttgaaaaagcaactctcaatatcttatattaacaattatcaatttgttaatatttgttgggaaaataatatacattaatttaatataaaagtggaatattttttatgggagaaatactaaaggttgtctagtaatcttatgaagtgtaatattgttattgatgtaatttaatattgggtttcacttattttagtttagtaaaaatattgctatcgagtaccagtacctaacactttttttagtattaggtggtgccctattagttagtaatattccctaaaagctattttcttaagttatatgagacccgatacttaattacatcagtagtatgataccgaagaggatactaggcttcagcgatatcttttagcaattctcatttaataaaaattacaaagaaccgctaatcaattataaaacgtcatatcgtataagtataggcactttagtaccccatagccagactcccactatctttttggggattatttgtatctaacatatgattacattaatgaagtattaatttgctcaaaatgattatgttgtttattttttttaagaaaatgattatgttgtcaaatgagacattgtgacttaaaaatggctaaagattattaggagaaaatggccttgtgggatttgttttagtctcacgtggacaatgcatgtgggaatttattttaacaatttctatctaaatccgatcatatgcactgttttgatgttgtcttagttgtttgagagtcttagctcgaatccattaggagtttaaccaacttgtgtatatccccaataagcttaagcaaagcttaaacttatt

SEQ ID NO: 222257 - DNA, 2880 bp, Cannabis indica
tttatgttttgactttctccaaaatctgatcagataatagttgaatttagacttgaagttttagctttatttttgcacaattttctctattttatagttcatctttttgtgagatctttttatcttttttccatcttattcttttgatattttttaatcttcttctaattttaaatcttcaaaaataaaagataaaaatcataaaattgttccaaacaatagtagaactaaattaaaaacacactaaaaattaacttaaaaataatactaaaaacaacctaacatgcatcaatactcagagcatagttgatgacatctgtaaaaccaaatctctctggtggtcttgttgccctttctttctatccatagtcaactgtaatcttgagtgtcatcttctgcatctggttcttcttcagattcaaccctttcttccatttcttcttcttcatctggttcaattgatctgtccacaacatgttccctgttattggactccacctcaatttgaatagtgtcacttgagtctttttttggtatgtcactcttttgtttattggaaagatccttgtagatggttttctcatcaaagacaacatctctgctcagaaagttcttttgatggttgtcttcttctatgctccacaccttgtaaccctttactccttctggatatcccaaaaaatgcacttccttgctctgggatctagttttccttcttcgatatgagcatacagaaggcagccaaaaattttgaggtgatcataccttgcaggcttacctttccacacctcaataggtgtcttgaactcaattgcagatgaaggacatttgttgatcagatagaaggttgtgacagctgcttttgcccaaaaagtttttggcaaaccagcatagattagcatgcatcttaaccctctcaagtattgttctattcattctctcagcaagtccattttgctgagggtttttgggcactgttagatgcttgctaatccttacttggttgtagtattctttgaattcatctgcacaaaactcaagcccattgtctgttctcaacttcttcattttcttaccagtttgagtttccaacatgattctcagttccttaaacttgttcaatgactcatttttatgttttagaatgaaaatccaaacatatcttgaaaaatcatcaacaaagatcaggaaatacctagcacttcctcttgattttgttctagatggtctccacagatttgagtgtagataatccacaattctcttggtagtatgcttcccagttccaaacttcactttggtagtttttccaagtatgcattgttcacacagctcaattggttgtattagatccttgccaaatactccatgtttactcaaaatcttcaaaccaccatagttgatatggcccattctcctgtgccaaattagtgtttgttcttcacctgtaagagccactgtatttacctgatctctgaaggtattgtcctacagtacatatatgccattcatcacagtagccctcataaccaccattgatccttttgtcacttttaatgagccattctctactttaattgagtatccatcctgatctaacattgccattgagattagatttctctttatttctgaaacatgtctcacatgttttaacattgtaactccacctctagtcatttgtagcttgactgatccaattccaataattggacatgaatgattgtctcccaatttgacagtaccactgctgatagttctataattagtgaattgtttcttgttaggagagatatggaaggaacaccctaaattgatgatccaaccagtctctgttctagcctttgaaatcaccaacacactagcactatcataaccatcgctatctcctccatcagacactacatctgcatttccacttttcttggagatatagtctttcaggattgggcaatcttttctcaaatgacttgttttgttacaaagaaaatatcttctcttgaacttggcatttgacttgcctttgtttgcatttctttgttccctgttctctttctttgaaccctttcctcatacaaagagcccttcaccagcaatgtcatcttgcttgtctgcctttctcttcatctcctttgacattaaagctctatggacctcctctaatgtcaaagattctctatcatacatcatggtgtcaatgaaatgctcatagcattttgttggaagagagttcaacacgatgattgcttggtcttcatcctccaccttgatcccaatattctctaaatctagaatcactttattgaaatcatccaagtgatcctggtgtcattttaaaagagtacagtttctgattgaggaacaacctatttgccagcgattttgtcatatacaaactctccaatttcttccaaacaccagctgcagattcttcttttgaaatttctctgagaaccttatcaccaaggcttagtatgatggcactgtgtgccttatcgagaagctctgttttctctttttttctttttttgttaaaccttcaggcaggttcttctctccgaaaagagcatcttgcaagccatgttgaaccaggagagctctcatcttgacacgccacaatccaaagtcattcttgcctgtaaacttttttagattgaatttagcattccccatcttcttgctcgattgatcacctggttctaaaactatcttcactgatcagatcctcttcttgactaacaagattctacttcgaagtttcaagatccatctttgatcaatcacagctctgataccacttgttggagattcaagactcaatctcacacaccagtaggttcacaacataaacaagaacaatcttcaaagcacaaaaaaaaa

SEQ ID NO: 222258 - DNA, 1748 bp, Cannabis indica
cattgagcagcgaatgaacaagatataagtgcatggaaaatagtttcctcatttttttgacaaacgggaaacataatttgaattgggaccctcttaccacttaattgagtcaaggtgggcaaacaatttgaagcagcctgccataccaaattgagagctttcggtggtacctttgaattccaaagcttgcgctagaacccaagagaatcagttgcaatccaatttcctttctgagcttgtatcaacttgtatgcactacgcacagtgtagaaaccgtgatgctccttacactagaaaaaatgatcatcagctacattcagactcaatggaactgctaaaatatgttgttgatcacactcgttaaaaagatctttgataatatctaaattgcattccctcttatcagtacacatcaacgacctccccttatggcccaccaaacattgggcatctaaagtaacaaaaggacacacatcatccagaagccatggttaatgcaaaatatcaaccttcgcaccaaaacctattgcccaatgaaccccaaacttgagaagctcttgtgatttgaatactctcttccacataaaacttggattattcccaagggatgctaaaataaaattactcttgggaaaatagcgagccttatacaacctactcagcaaagagttcagttttgttagtaaacaccacccttactttcccaacattcccaaattaaagtcacgaagattacaaaagcccattccacccatagttttatatttactcattctttcccaaatcatccaatgaataccgccatcgtgagaagaacttgaatgccaccaaaacttactcataattctttccaaatctttagacacatcaattgggagcaagaaaacactcatggaatacgtaggcaatgactgagcaaccgttttaattagaacctctttcctagcataagaaagaagcttcccatcctaatcttgaacccttttccaaattctatccttcaagaagcccagaatcacagacttagactaacccaaggtattaggcaaaccaagataagtcttgtgctcagaagctttttccatttgtagaacattacaaagatccaatcgactcgactctcccacattggcactaaaaaagaaattagattttgccaaattaacttgctaacatgatgcctcctcaaacttatgaagcaactcaaaaagtctcgtagcatctttaagggaagctttgcaaaagatataactatcatcagtaaaaaaactttagcccaagatatgttttccaagaaggggtgaattggaaatttaagctaacttcagaaatttaaaaagcccaaagaaaattcatgcaaatactcaagtttaatgcaataacaaagataatcacaagtataaacaaataacaagcttgaaatgtaaagagtttagggatagaaattgtaaactctcgatttttacaaggttcggtagaactaagccacctatgtccttgttcttcaaagctatggacctagctttgagttcaactatggagccaagttaatgagcttgactaacccttacaactgtggaatttttcaccaaattattttccaaacctctcacaatagctttcttccaaggactatcaacctcacctaattgttgaagtgccaatctcaacaaccgagttgtttttccactggtgccaacttcacctcaaccaatagttttttaaaggactatcaacctcttcgaatt

SEQ ID NO: 222259 - DNA, 3109 bp, Cannabis indica
tacatttgcttgcatcgaaggagtatcagttggtgtagttacaccagtaaagctcttgtcaaaacgatagaaacagtcaatgactgtgtgtcctagcttatggcacagctggcattgaggccgattttgggtttgtgacatccttccacctctggtattcatatatgatcctcttgtggcattgaaaggcataggtgatcctcgagaaaaggtgccagaataagagtttcgattaggattcatgaaatttgagagaggagaaggaaagttatggtaggttggatagtactgacctcttgaagtgccaggacttctaaaatttctgttaaagtgagcgatgttggcttcagattgatgcagatgctcagattgagaggccgtgtccacctttgctgtgttagcacttaaatcaaaatccttatcagtcttctcgatcctcgattctgaagctagcaacaaggctttaatttctgctacagtatactcttcgatccgagtattggatgaaataacaaacgtatcatactcgcttggcaatcctttaaaaattgcagcaatgtggtcacgagctgagagagattcaccaactgaagcaagtaaatccacatgttgtttgaccttgagcaagtatgcatccaaggatgacgatcctttctttaaattctggagttttgttcgaaactctaggatttttgatgacacttgaagagtatagtgtttctccagggtacaccagatctgtcttgccgaattgcacccaaccattctgatgagaaggctctcattcatggaagacagcaaccatgaaacaaggagttgatcttgaatctcccaattcaagaactctggattgaatctttgagcagttcgatctgtgtctgaaaggaattgaggtggaggtgcaacatcttgaatgaatctctgaagctgatgtcctctaatggcagccattacttgttgtttccaaaggaggaagttatgatcattaagcttcacggataaggtgtgactgaagtaaattggactgcgattgttctctgattcacgagtcctattccacggagttgcagatggattggaagtcgattgagggacctgtggattggagccattaccagaaccattaacagcaacgtttgctgtcaatggtggaaaaggctctgataccatgtttgatctggtattgtatctggccattgaagaagaaacagagcagagaaaacagaaagagaaagagcgatgaagaagatgaaaaccagagaaagaaagagaaagaagaagactgaaagagaagccttatccattaatgagagaagcaaggaatatatacaaagttgttacagtagagaacagctggaaataacaaacttgtaacaacctaactgctaactaccaaaacagaaatgtaacaactaataacggtaataaccgaattaacagactcagcttcctttacagtgtgaggatattcaatataaataagaacatttaattaaaaaagtctgagtactcacttaacataaggagtagtcaatttattagctactaaataaacgaaataaaaacaaaaaataataagaatacaaggaaattatagtggttcagacagagctcaatctgcttagttcacttttgcaaagcttttcagcttagtttatttgatttgaatcacttttttatataaaaagcaagtgtctttaaggattacacagctgatcgattttagaatagttttaatctgttctttcaacgtatgtgacttgttgagcacgagttgcatgttcacagtctcacacaagctcacaggctttaggtgtgtctcgtattcgcagggtggcctacgagcctatcgatcgtttggatgtttacgttcagctttgatcgcatagatggacatctcatgtgttgacaacgtggaatgtgcgagcctctaacgagttatcgaacacattagtcacccagaccacccctatgtaaaggattaatctttactagtcgcatgagaggtatacttggtcactgtatataatcagtatatatacgcgactaatatcaaatcttcttggtccttcttatttctttaactatgcgaggcatgtacactacaaaaaaatagctacttttagtgataaccttttataagtcacaacataaacttttagtgactaaatgtgactttagtcacatcaaaatattacttgtgactaaaatatagtatttagtttcaagttgtcactaatttagttttagctacaacaagtattgtgactaaaaacacatttagtcacaacaaattgtaatttttgtaactaatacctttagccacggaccttttagttacaacataagaatgttgttttataataagtcacaacttttttacttttagtcacaaattttgttgtgactaaaagtaagattttttgtagtgatagtatgcgatcactagacactgtcatagtcacattatctcgcaagtttagataaagcaagactaactctatgggagtacggattaatacgtcatcttttccacgaaaattgaattcacgtatcaattttatacaagatcgctattgtatttctaggcaagaaattcgcactataataataatatcaatatcaagattaggagagagactcttgtaatatcaagtgttttaagtgaaactttttagtagggtgtggatctatttgtcttctctcatttctagctattgattcatcaattgtaaagtttaatctcttctcttctttcactcaatttttttttgttttttgaaaaggtcaatttctttattttaaacaataattaattgaattgccttacctacccgcatttaactctttcctctttctctctgctccatcatttattatttttgcaattgtgttttttttatcttaaagcttatagagaagcaaataagtggtaaaaagttaaagaaaattattgttcagcacctctctggtgccggaagaggcgtcgagtacctccctacgtggcttgcatatgtgttatttcttttatattattaaattaatattttttatttattaaatataacctcgagatgctagacttcgtcccccttatggatggttattc

SEQ ID NO: 222260 - DNA, 1977 bp, Cannabis indica
aaatgcaccatcgatgcctagcagtcacttcggtgtgataccgctattagtgtaattatcgagtctttaaatttaagaaaaattttaaagagtattgctaactaatcatgaagccccacctataaaaggtactgaacaccactagtgccataaagcaaagttctaaagttatagagaaatgctaaagagcaccagtggtgcctaacaccgtcctatatgtcaatatcgctattggtccaactaaatatcaggttccatataatttaatataataaattttagggagtatcgctagccaatcgcaacgcgacatatcgagaaagtgctaggcagcactagtgcctaataacaatgctcaaagttaaacaccaaattagaaagcaaatttgaaagaccaataaccaatggccaccacaaggatttaacgcgatcctaattttcttatcctgtatacggttgcatcctatagctgcccaattcgcgcgcattggctctggggcgtaatgcgcacccccgcctctgtggtcggaccatatataataatttacaccttaagcttttagggttttgtctgagagagaaagactctcttctctactcgttcgctctgtttggttaatcgatttggaagccatgactgacggtcatctcttcaacaatatctccttcggaggccgaggaggcactgtgagttcttttttttattttattattattattattagaatttctaatttctggaatttcgttcaaaggttcatttcttttctcagtgatggttcgaaaccctagttttgtaatactgattcagttttgtcgttctatttagttttttcggaaagtatgccggtcttgatatttttctgtagaaatgaattggcatttgggggagttctaatgttggttgcttttagtcttgcgttaataatttggcttgcgtgttgagattgtcgctgttgagtgagtagttgtaattgtgaatgtatgaattgaacaaaatgtgattttggaaattttaatggtttacgaaatttaagtggagtctatttgattgctgcgagtacagattaggtgtatagattttgtttagaactccgaacccaagcctattattggtgtagttttctggtgcaatgtgtgtgttttggggtgtagagctttggttctgtttgtgtcatagattaaggaaacgataaaaacagttcttatattctttttataactgaatttttcgcttgcagaatccaggccagctgaaaatatattctgggggaattttgtggaagaaacaaggtggtggtaaagctgttgaagttgataaagctgacattgtaggggtaacatggatgaaggtcccaagaacaaatcaacttggtgttcggatcaaagatgggttgtactacaagttcactggatttcgtgaccaggtcagaattcatcgtatgtctagttatcacctaattgcatttgcttatatatttggtgaatattatgtgaagatttttcttttctcatttggggttgaatgctataatttttactcttcattgtatggcatcaaacaccctattaagttttgtgtacattgaggttgcataaaattaaaatgttaattcttgtccactgtatatcatgattatcattggaagctttaaattataaattattataaagtctttctgaatttgtagtgttgatggaaaagcgcgctagcctaaccctatttgttttcttctattgtaggatgtctctagtttatccacttattttcaaagtacttgcggacttactccagaggaaaagcagctttctgtaagtggccgtaactggggtgaagttgatttaaatggttagtaactttcttttatatttagatttgttgtcacaactaatagatttattatattttcttttcttttattgtgtgtaaaaaactgtaattagcaatgaaaaattattttaaggcaacacctttgc

SEQ ID NO: 222261 - DNA, 1215 bp, Cannabis indica
tttgttagtgtattggtccatctcctatttagatgaattgtaccctacttgaggtgttgataccttttcgagttccataatctctaccttgtcagcttggattgcatcgaccatgacagaagctgaaaaagaataagaaaatccaagcagttaatacctacactaacgaatatagaaatggtacgggagagtccttccctgaaactgctttaagatgtccccactggcccctacatctgtgagtaagattctcagggaacattgcctcaagatgatcagattgggaacacaggagattaatttaaagttcacaaaatacttcatccaaaaccgtaaggataccaaaaaaatgggttaagctcaataaaatttgaagacactttgcaaaatgtaaggtattttacaagcaatatagggataaatcaacattcctatttcgagtaatgttcaaattgctcaaataagcctaatcctaattataacctatcacgttagacatgcaaatataaaaaagaaaatcaaaattgacaagatacactagcatgcaacttatttgtcttacacaaatcaaaccatatttcaaaaaatccaaaaaaatcaagaaatgcaaaaaagtacttacgtgttgaaagagaaggtattgggttaggaattaggatgtcgtgtgttgactgaattgaaggtatggaagtaggggtttggtcgagatgcccaactctagattgaattacaatgatctcaatggttttgaggggtcaattgtaaggtctgggtgtgatgcttctaggttcaatcgttagagaattcaaagaagaagacaaagacactcgtcaaaataaatgaacattcaccaaaacgagtttgggtttttttctatctccctcttcgagtagaaaattcaaactcagaatgcaaaatgatcaaaagtcgtaaatggtttgggtttttttctctcttcttctttgtgtagaaaatttgaactcagaatgcaaaatgagcgaaaatagtaaaggttgattttcgccttatttataaagaaaataggtgaccacgcgctcctaaatcaattatttagactgcatctcaggaaacataactatatcgaacaatctaggaatcgaaggttagcattaatggatgtgtggaaatcgaggtaattgatatgatgatattcgccttcgaggtacttgctgacatgatcaattgccatttcac

SEQ ID NO: 222262 - DNA, 2995 bp, Cannabis indica
aactttatttggagtgttttgcaaaaataacgtttgaaattttttatttagcaaaataactttataaaaaattttattagcaaaataaatttgtataatcgcaaaaacgattatgaataatattgtgtgactataaacaactattatggttgtaaaacgatcatagatttacactgtgcaatcatcatagtcgcatagagtaaaggagattttacataaatactggatttgggggtaaatattacaattatactaccacacggcaggaattacaaaaatactgccatgactcatttttatttcttttatactgtacggacggaaaagtgaattagacgcctccaccttctaaaacgacgaacaaaaccatagaaaaataaaaaaaaaaccatttattgtttgcatgtgtaggtatgggcaaagctaaggttgagcaaccatgagatcgagcagatgagaattgtacatgtcggggcggttaggcctagagcgtacggtctttgggacagctggccatattttgtatagttgttgggcgataaacttttgtattatgcattgtaaaacttttgtaaatattttgtaacgggatctcggtttagtataagtaatttatcttggtatttataattagttaaataaagttttaattattcacgattttcaataaactcgttgattagcaacgagctgcacaattaagttaaaaatcacgttaacacgcctaaactagtagggtgttacaatttggtatcagagccgccgggttgtcttccaaaaatcgtcaagacatgtacaatcatcatcagtgatcagttcgactcacggttcaataagcctttattgttttagtagtttattttaatagtatattttaagaaaagcctggtaggaagcatgttagtagcctgatagttgaataggcgcatgttttaaaatttccaaaataagcgataataagtaagttattcttgatcgtagtctgaccaggctagctcttggtaaaacactaggagctagggtaacttggttgggtctagtggcagtcaaagagctcaatttcccccaaatgtacgtggttgaggcagaggccctagaggcagggcacgctgttggggatatgttaacccgctgtaggctgcccaggaatgggaaaacaggtttgcaacaatgcaagccagaatcaatgaacaagaggaaaaaatcagacgcttgaggcagcagggtgctcctacaatgcctgctccaaaaatgcaggtggctcctgcccttgctgtgcaggcaggaccgattgctgcagtgaactgaatggaaccactatatgaaaggtttcacaagcacgcacctccagtttttctggaaagttcccgatgtaatgaaagccaagcagtggctcacggtaattacaagaattctgaattttatgggtgttaccggcaatgacagagtgacttgtgccacattccaattttaggaggatgccctggtttggtgggacatggtgtccctgactcatgatgttactactgtgatctgggaagagttccaagagttgttcaacacaaaatagtacaatgaggcagttagaagtgcaaaaagaaagaaatttactcagctgacccagaaggagaatgagtattacagaatacacgactgagtttgaccgattagctaggttggccttggggattgtaccaactatttcagcaagaaagaaaagtaactagaaggtttgaatccaaaaataaaacatgatcttatgattaccactgacgacaacaccacctatgctgacatggtgggaaaggcactgcgagctaagggtgcagttgagtgcactcaagagtctgaagggactcaggtttctggtgaagcccttactcctcctacccctagttatggaaggggtggtagtactggctcgaccaccgatcaaaaacgaaaggcaccatttgcacccagtggctcaagtcagaataagatgttcctagagaaccagggtcgaggtaaccgtcagggtggtttcgaaatttgatacacttacccggagtgtcctagttgtaagaagcatcatctgggtgagtgtagagggcaaggatgtttccagtgtgggtttccaggacactataaaagaggtcgctcgcaacttaagaaagaggaacattagtcaacagcaaaacccgctctagtaagggtgttttctttaactcaggctaacgcaaaagctagcccctcagttgtaacatgttagctctcggtcaacaactcttacttctctttattgtttgactatggggccactcactcttatgtggcagccaagatttttagtaaatttgatagactaaatgatagttatgataaagggtttcaaacctactatatgacggaggactagtcctctccaaaaggtagattaggtctatgctgatcaaaattgagtatcaggagttgagtgctgacttaatagaaatggttttagcgggtttcgacattatacttggaatggatttcttatccaagtactcaactagtattgattgtaatcggaagatgggaatcttccaacccgagggcgaggaaccgtttgtttttgtgggatcagttcaaggatcccagattctagtgacttcattattaacagcaagagatttgttacaagaagggtgttcagggtttctagcagtggtattggatacaacacgacttgagaaaactcgcccagaagatataaggtggttcaggaatttctagatgtttttcttgatgaacttttaggtttaccaccacagagagaaattgatttcgttattgatttggcaccaagagcagaaccaatttctaaggcaccgtacagaatggctccggcagaatttaaagaattgaaaattcagcttcagtggttgcttgacctaggattttcacgacctattgtgtcaccctggggagctaccgtattgtttgttaagaacaaagatggatccttacgcatgtg

SEQ ID NO: 222263 - DNA, 1752 bp, Cannabis indica
cagagatactattgtgctataagaaaaggaacctttctgcttgttcttaagtcaatacaaataacgaggattagctattaccaaagtactcggggctgaacctctataaaattctcgtgtctttatattgctttattatatatcgcttactaaatcagactcgttgtcgttggctaaaagcgaggtcaacaacgaccatttttccatgtggcagcttgatatggcaaccatagtggatatctactcacgtcacaatttttgttttacaaaattgctttaccggagtaaccgccccttgtattcttctgactcgctccctctcgagataattgaggtgtcccttcctcctacagaggaggtccataatccctagtagttcgagttattgggcatatcaagttgattatggacatcgtcctacctctttacatattattataaatgtccttgcgatatgagaccttctatctcatcttccagctgacgacactctttcgtggtatgacaaatatccccatgatattcacacggtttagttggatcgcttttacgcctcgcatgtttcataggttttggctcactaaaaatgacttcccgtacatgtgcgaggtaaaaattttctcgagtttcactaagctcgatatattcagcataaagatgaatattatttttttgtgtttcttatccttgggcagccttttggaatcgtcttttctctttgatcctgaggcttctgattcaatttctccaacagagtcatgccccggttgtctcctgagtttcgtgacttgatgccttctaaacttattctccatctcgtctatttgcaaatggagtgaatccattggttttggacctagttattaacgaagatcaggctgcttcaagtttagatgctctcgtagatcactcttgtcatgactgcggtcggaccttgctcttcctcttaaggtttgatttgccttattctccctataagggtttgcgcaagtttctttctgatgaacctgaatagagggctggaaatttccgtccgacgttccacatatcccaagctgtatccccagattttccttagtttccttaggttgcacctcttgagagttctgagtatatctctggtttgtctcatgtcccttattttgcaagttgtgaggtttgcctcgtgaatctcttcttccaagttcaggttgattttgggtaccattcttctgcgctgcccttactacggttatttgacgctctaatttggcattacgctagtttgcttcctccaatcgatgcctaagatggtgattttttaattccacgattgttatgtacttggttgggtcgtaggcgccatcctcatcaacttagttaggaagtgaccggttgttgtttacccaaggtccatcaagccagggaccccaatatcgggttttcccgggtgttccactctgttcatgcgatgactcaatagatccttgaggattcaatggctcttttccaaggcgatgattgattccttcttgaggattattatcttcggcatcatccattaattttatgttaggaggctttttttgagattgttaacagaggctctcaatgaaagcaccaaactgttaatggagattttcgttaactaaatttaagcctcacagtagtcattttacacagaaaaaaaaacctatagacataaaaatatgaacacagggttttttttacgtggttttgtagttaaaattctacatagtccacaagtcaatc

SEQ ID NO: 222264 - DNA, 1595 bp, Cannabis indica
gggtaagattataatcttacttaagctaattgttagttaattagtgtaaatctagtaaataaataattaagcgcaatttattaattacagagattttattagattatgggagtattgtaaataccattgttgaaataaaatattttaggtttggaggggtttggatttttttttttgtcttatttgacttttctaggctaaaaaagaggttatatttcaggattaattcttttggttttattagttaggttatattagaattaagttaaaaattaaaaaaacctaaaacctagataatcctctctctctccttccctccttcaaactctagaaacccaatagaagcaagaggttttcttcatcaatttcacctcttttcctagctgaataatctggtttaggagctgttaagccttgaggtaattaagatctccttattctctttattttcctaggttttgatttaggttttgtggtgttctcatatgtttttggggctatggtgttgagctaagttcagagtatatttctaagttgaaaattaaattatttaaatgtgtatgtgatattcttgtgagctgtgaggtttgaaattggagaatttagttcaaggatccaattttgattcaagcatggtgattttgtaaattttgtaaattgaatgtatatttttgggtattggatgttagaatatgttgttttcatgttatggaactgttttgaaaggtttgagctggttggttgaggttgtggttaggttttggttcgaaaaactagggttcccattttgcagtactaaagaaaccggttagctgattttataggtgctgtaaaaccggtcaaccggtttgccaacaggggaaaccctagtttttggctttgaaaccggttttgtttggggtgtttttcaaagcttggattagggtattttagtgatgtttaagttattttgaaccagtgggggagttacagttgttcagatatggaattagggtttattccggtgtttggataagttgtttaccgaattttattgtcgtgacataggacccgaaattatcgagcatagttccattcaggtcggcacgcacacctgatattagattaaggtaagaaaagttatttgcaccactaaacatgttaagtgagaaacgattatcatcgtttgtgactcgattatgatcgaggtaaagatacggtcattaccgtttattgtgaaagagtaattacttgcttgaaatttcagataggtttcttacttatcgcttactttatcgggcaacgatagtgacatatggagctcgtcgatggtgagtggtaaggatgttttatgaggcatcaaagtcggttcgtcttataagacgcataattgtttatgcattggatgatgaacttgtttgttatgccatgttgtgatttctcgtattaaacaatgtttgtattttaattacttttattgttgagtctctgtgactcacgggtgcttcgtggtacaggtaaagggaaagtgggccggtcacaagtcagatgtctctcggcatatcaaccgatgtctcagcttccagtggacaggatccatccttttgattatattt

SEQ ID NO: 222265 - DNA, 1116 bp, Cannabis indica
aagtaaaaaagtaaaaaattccgcttgacaatatttttgtaaaaaaataacaaaagttagtatactatgtaaatttcctattaaaatatacctatttagttccgtaaggtctcctagccaaagagagcctaataagagcattttgaatgggtatatgtttttttttgaagaaacaaaaaatagaaaagaaaaagccgccttgggtatgccttggaaggggtcacatcatatatttgaaaacgtatttatatataaatcaaatttcccctcgccaatagaagttagttgatctgaaaggtgttatcaacaccgccaagcaccatcactttgactctgccgctctctctctgactctctctccattcgtcgcagcattggctgattcatgaagtgtttccatttcaccagcggagataggcgcgacgacgatgacgctagcgtcactggcgccggctccaacgtcgtttcaaaggtcgcctccaaggtgtcttgggctcgctcgctcagtgttgcctccagcagcctcgacagtactcgccgctccgagttcgattccgactccagggacctttctgactccatcgggtgttacgacttcctcagtctgcgtagagccaatgatctgagggtgttcacgttctccgagctcaaatcggccaccagagggttcagtagggccttgttgattggggagggaggttttggctgcgtttacagaggagttgttagggtttcggggtcggatgttgagattgaagacgaggacgacgaagacgcccttccctgtaagattgatgttgcgatcaaacagttgaatcgtagcggcttccaggcatgtctttcttcattccttttctcttttctttttggcacgatatatgtacgaatccatttatgtttgtattgtttttatagtttggtctgttttaagaatcttggatttgcagtagcttgttcacaaatctgaatatcgcgttgagttcgggtgttttatagtcataagaggaagttttattgaaaaaaaaaacgttcacttgtttgcaatcctataactgatcaagttgttcaagtgttcaatttagaaggaacgcattctgtacatgttcaaccggtaga

SEQ ID NO: 222266 - DNA, 1405 bp, Cannabis indica
attctttctcctcagaacttcgatttgaacctgtttaattattccaagaatcaatcaatcagaaactagcaaatgtacaacccaacccaggtaaaataaggtccaacaccaacatttagttttttacttttcaagaatgatgagttctaagataaaactaagcaataattacacccatgaaattaataaataatatacggggtgaatataaatgttggcaaacagagcaataaataccgttttgttagttgaaccgtcaataagaggatgaacagtgcccttagtaaagatcaaggccttgaaaatctccatgatctcagttggagttttgaacagtttccacagcctcctgtaactctctgcctcatctgtatataattaatacaaaattaataatcctccttaattaataaagctcgacacttcaaactacaagtaattaatagaacaactcacagttatgctagtctcaagagctagttaactataaaagcattcatagcatagataagcattcaaacctatttgctttctgcagaatataagctgtatcttgatcttgttgaggatgtaatgcactttctgagaatacggtgctagatcctgtggcttctccctaggtaaaaaaattaaccatgcacttaattttaatatgactgttgagatagataactattattaatactatagaaattagttgagcaaataaataagcagccttactcttcacttatgagggtgcagatctttgtcgagcaagccacaatagtgacaatgcaccagtagacatcgacaggaaggtggtccaaggcaacagccaaaccagtaacgtctttagggtcataagtattagagagcttctcaaactcgtcaaacaggccaatgacttgcatggtggttttgatcagattgttgagctcaagaatagcttgacgacgcttttgaagctcagctggcttgatgagcaccggcactttcctgagtatagccaaagatttggcgagttgatctgtttgctggtgctgggccaggagccaaaagtccccaaactctaaggcaaaggcagccagcgttagcactgccttggcttcccacgagtagttcgaaagcttgccgagaatagccagtgttgcttcgtgggcaactttctcaccaggagccttgcacgaaagctgaaaaataccccataaacaaattacaaacatatatataaattacattcatacatacacacaactaacgagtagtataaaagttacctcagagccgatacttttaagtgtgcacaagggcacagtgaaattagcattgctggggaatctgtcctctaagttctccacatgaacttggctaccctgtaatacatcaatcgcaatgttacatatataaatatatgtataaatac

SEQ ID NO: 222267 - DNA, 1494 bp, Cannabis indica
tgttagtaaatctagatcctggtgaaatatattttaacagagaccctcaatgatcgacgaggcccacagacattccagatccagtctccgatcatcttcctcacctctgtccacaacaccaacttcgaaccaggtttgtttttttctttagtttctactttaaattcgcaatttgtgattaaattgaaatgtggtgatcgatttacaaaatttggtgtttggggaagaatctgggtttcaagatatagcatttttggggattttctttgtttgtgcaatattatgtgatgtttatgcgattaatctttcaattttaaacggttttcaattctcatgttggttcgtattgttgtgtaattttgtgcgataaatcatgaaaatctaaagtgtttttgtattcctgttggtttgcattttttgggagacatttgtgtaatttcatttaaatgtttactctaaacaacgcttgaacgattttaagtcaggtatttgcgatctttgtgtgattcatgcttgttgttttgcaatttttacgtgtttttttgtgactatgtgcgatttataaccaattgataatcatctttagtttgtaaatgcaaatggctcaagaactcattctctcattggttgagaatttttagggcatatcacttatagaaagaacgtgtactttacttcaataaaggctaagtttgaagcctttaagttgactgagaaggtcaaaaaaactccctttggagttttttggaatgctagtgatttgaaattctccgacgtgattgtacatcaactattattgaggaaaaagaaagtcggtaaggtaaaagatgatgaagtgtgattttacgtgggtaaaacaaagccagatttgggcggtctgagttcaatttgatcacagacctaaagatgagtcatggccccttgtatgaattaaatataaaatgtgattctgatcggatattgtaggactattttaacagtgcaaaaggggtgacctttaaaaccctttggctagcttttgaggcgtgtgatgttacagacgatgtgtacaagctggggttatgtgcatttttttgaaggtattttgttgtcacgggctgagtgtgtgtgtatctagatagatatgctaaagttagtaaaaaaaatgtagacaattgctttaagtatccttggggcctccttttccataactcaaaatatgcagcagcttaggtaaaactacatggataaggtcttaagtaagaaagataagatgaagaagaaatccaagaaggaggaaaaagttactcaaccagaagcgaagtataatatgtacggatatgcaccaaccctagaggtcatgcaagatgtggggaaaaagtatggccagtgcaaaggaactagattccctctaatgttgaactggagcatccccgattcagttacaaaacacgatgtgaggcaatctgatgtggttgtgctgtttgagaacatggtatgtgaatctttctctat

SEQ ID NO: 222268 - DNA, 1389 bp, Cannabis indica
tgttcatcttcttcttcttaatttttttttcattttttcaggcaattatgtgttgtaggttggtttattttttttttcaaatttatttagttattctattattattattatttataatactaaatttatcaagattcagtatatgttttagtcaaacaaccttaaaagctatatcgttctgttctcacttataaacaaactgattattctaaatcctaaagtgttcaacctcactattatactctttgccaaatccatgtaactccttacaattattatcaattcacccttctaatgtctcttgatccaataagcttgaagtatttgaggtaaataattttaagtttacacatctatagttcacaatagggaaagattcgtaggtcttgtttttttattttatttttcaaatttatgtctaagtaaaactgtcatatctctctaagtactaagtactaattcgattccagtgatcttggtaccgttgcaaagctaatttggtgatctaaaatttgtatgaagaaactatttaccaattcggtgctattttatgtcaaaatttatcatctttctgatgctattatcatctttttcttaattttaaaaagattactttcacttaaaatataataactccctcaattttaatctatttttaatgatctatatattattataaatcttattcgatttctcataagtttcatgaaaaaatcttttgttaattcggagtcataccatgtcaaaaagtttgttttcttctatattatgtgattcgtgtcttgaatattatttttgaaaaactaatttagtaaaattataacatctctctgaatataagcctggttctaaaaattttagtatcatttaaaggtaattaaatattcttaaactttcatgaggagagcattccctagttcagtatatttctatatcaaaactttatatgtttgttgtctcctgtaattcactactctattctttctcagaatttatttagtaaaactataataactctctcagttttaatgaagactaacttgtactaaatccatgtaattcttggttaaaattaatttttcctgatgtattgtaactgtacaaattttaatattaggaattctacatgtgtcttactaggaagtagtaatgggataataaaggctttagcatcgggatttcaggtaaagaaattagataattttgtatgtgttgaattgcataatttaattatttgtgtattagaatatgatttacgatttattattatggatgtatgtatgatactgagaatgtataattttggagacaatatgaattatgtgaattgatatatattatggtttttatagcttgtatatgttgtatctgtatgttgcatgttgtatg

SEQ ID NO: 222269 - DNA, 1851 bp, Cannabis indica
ttgagtaattttaacctaaaatagaaaaaaccacaaaactaagagcatctccaacctatacactaaattaggtgtcacactatcactaaatatattgtcaaaaactatttccactccaaccataacatcaaaaattacactaatattccttaatattactttttcaacaatatttttctaaaaatattatctaaaatcactacaattgtaatatataaataataatttaaataatactactaattaatttaaagataataatactatgaaattggtataactcgataaattaaatattatattacaataacataataataatttatggtattcacatttaaatttatacacaacaaattaaaaagtatctctataatgcacccctccaaataaaagagttatgcatgcagccgacagtttgaactttattttttgcgtgttaatttttttaaatttctcaaaattttatagaatatcttcaataattataataaatacaaccatgaaaaaaatagactaaaaaagtcttttagataccaaaaaaagatatggcacattttaattttcatacaataaattaaatattaatttataattgtgaacgagatttggagttggtatggctgacattgacgaccacgatattgtagagagagatgagacggttaagcttcatatggaaggagagtggctgacctataatgccgccagtacgagaatgactactgcatgttttgatactgatttgaatgggaaacagcggtggagtggtgatggaagaagccaagtttgggccttacagacgaatctcaacagaataacttcatctttcttttatggatagagaaatgagtttagtttcttgttggcattatatgatgatgacattgaagaaattactatgcaagtactagattaaaatcttatatttatgtaggtttcatgagctcttccactactaattctgctttatggattcatcaaaatgtgtctatgtgggaaaaggacgtattaatatcaggtttgatttttttattctctttctagtcttttccactggagttcttaggcctcttcaatgggtttcacgacagatttggcacctggtgaccgaaggcaaaaataaaacccagatctgagatcacaacgtgaaatctacaaattaataattattcatggcaatgtacagttcacggttgttcgtactcgatgatagcagtggtttgttcgtactcaacaatagtggttgctcaatctgaattatcggagatactattggtcttgttagctttaacactttttcagtggaggtggagattgcagggcatagaaagaccatggttatacacgatagactagcgagacgaattccatgcaggtgatagccttgaatggtagagaaaattaagctaagtaattgccttctatatttctatttattaacatttgtatttatttcaaagtaatttacattaaattaacctatttattttttaattagatttttttagtaattgacaggttgatttgtacatcaattaagattttgtaattatattaatttcattcaccttttcaaaatcttaaattattttaagtcaatcttactgttgctcctaaattcgcccaatatacgtggaccagtcaagaggggacacgtggatcagataacttggaaagatttgctaagtctttttatgccaccaggaagcgctattcgcatgggtcccggaggatatacccggagtacaaggtactcccggaagctagcatagcatgaaggcactccgggatgtgtcaggtctctcccgagaaatcaagtcgcatttaatgctgcatgggaggaagcgt

SEQ ID NO: 222270 - DNA, 4252 bp, Cannabis indica
agtggatctctgagtaattctctcttagatcactatttgtctcttaagtgttctctttgattttattcacatcccccaatggtgagttgaggccaccattttataagggctcattacgtaggaatggtttcccttaatatataagaaataaaataaggcattaatatatttccataattacaatagatgaattgggcaagtctaggctaattgcctttattctctgaaggtacgaatcaatcccataaaaataaggattgcttcgtgtcatgcaagcttggatatatcgtcgatcactgttgaaatgtccacctcacatttcctgaccggtgcatgcaagttgataacatgatcaaactggtcaaatgacctttgatgactctgtctgaacatcctgccatgtatgtacagtttggacattcatattaatccttgtggactgctaggggtagaaccatccgcccaaggtggaaaatgcaagacacgtgtcatctagctaaatgccatgtcatagtgcaaaaataggatcaaacataggcagccatcctttcaccttttggtctaatattcccctaatagttgatttaccactaaatgggagtcactgtgcacttcaatacactgggctctaactcacttacccaatcacaatcccactagcatggcttcgtgttcatctttgaagcagagagcactttggagctgatgtcattgcagagagatcagtatgattgttgctctaactcccttttcattagatgctctgtcaacatagactttccaggttggtgactctgagactggatcatccagggggtcatttaatctggaacattccaccacaaagttagataggacttgacctttgatggacatccttgctgatactcgatgccaaacttaagttccaatgcccacatcaacaacctaccgaatgcctttggcttttaaagtactttgtgaggaggatgattcgttagtaccttgatggcatgggcttgaaagctgggtctaagcttcctggaggcgactagtgagggaaaggtcaatttttcaatcaagggatacttggattcttcacacagtagtctttttttgatgtagtacaccggtaggtggacccttccttctttttggactaatacgacaattatggcatgatctgacactgtcaaataaaggtacaaatcctcaccttccaccagctttgataagataggagctttgatcaagtgctccttcagtttttggaaggcctcttcacattccttagtccattaaaatttcttgtttgctcgcaccatacacgctttaatcttatttcactgtgtaactcaatctgaagatgacatccacctactcacgtgccaagtctggagtcttgaaagttacaaccatcatcaacaattttaagaatgaggtggaggagaccaagaagaaaattgagctaaagagtgttcaattaggtgaagttaataagtaactcattgctgctaacaagcttattgaagacttgaagaaggagaacattggcatgccatccacagctcagcttgaggcaaataatgaggctctggcaaaagacgtgaatctctcaaggatgagtaaaaacctccacactcttctcagaattctagagactaaggtcaatgatttgactaaggagaagtggggcttgcagaagacccttgattctgagcggatatcttctagtgctgaacgggaggttctttaaaaggaggtggacagtttggagtcagctgctttggacatcttctatgaattttggaaggctaatcaagaggctaactttgattacctcaatgagaacaaggaggcttatctttgtttttgcgaggcccaaaaagccaaagaagatgctaaagcatctaatgacaacatttcgaccgactaagagactgtgaaccatgttgttgaagactcattcgaccaatataaggaacttagaactccagcaatttgatgtttcaaaacttttttcactagttcggcctacaggcctatttttaagtataatatggccgaccaagtgccttttaaacttagaaaatattttcattttagtttaagacaactagctggttggacagcttttaatccctgagttatcatgctttgtatctttaaaaataaatattttctcttaattccaaatgatttcatatatatatatatatatctatatatatttcgagcttgttatttacccatgctttgtacgggtgtatagttgcccccaagtgaccgagcagcttatgactcttggtcacttgtatttcaaatgttcaatttgtctgtttggctactaggttcagtcaaaccctttgtacatattttgttggtaattacataacttgctataccaaaaaagatataatggatgtaattagaatgataattaatatcgctatttatttattggtcgatatgtgttgtaccgtggtaatgtacatttattgcattataaaagctattacatgatctattagctaattaaaacataaaaaatgaacggtatattccacccaaaagacattactcaagagcaatgattcttgatcatactgtactttgaaggtggtcatccggcctgactaccagttgttttccaatcccttgagcgaggctcgctcaaaaggccacctacttaagagtaagtattcgagcattgtgcactttgtggggtcatttaaccttgtacacttattggtagtattttcttgggtgttcaccttaccagtatcttagtacttgaacgagttccatgttttcatcataccaaccaagtttgtatgctccaaagtttgtaactttagttacttgatatggtccttcccaattaggtctgagcacaccagctaaactatctttttggtttaggaacactcttctgagaaccatatctctcacaaattttttcctgccctcacttgttcgttgaagtaccgagctaccttttgctgatgagccagtagctatagttttgttgaagctcttttctcttcaatttaatcaagtgatttttccaggagggcatggttagtcttctggtcgtaagttaatcttttgtgagaaggggtttctaattccatggacagcattgcctcatatccataggccatggcaaaaggtatctgcctggttaaagttctttcagttgttttgtacaaccacaatacttctggtaactgtttcggctagttccccttggcttcctcaagttgttttttaattgtttcctttaatatcttattgactgctttaactttcccatttatttggggatgtgccactattgagaaacttttgatgatcccatgtgtcgtacagaaatttgtgaacatcgagctatcgaatttttcccaatgtttgaaacaattttttgtggaagtctgtaccggcatatgatgtttttcactacaaaatccaaaactttcttggatgttattattgccagtggctcagcttctgtccattttatgaagtaatccactattaccactgcgtattgtactccacctttgcctttaggcaactgtccgatcaagtctatcccccatatggcaaagggtcatggactttgaaattgtattagcttatttggtggtgctcaagggatcatggaaaatctctggaatttgtcacactttttcacatgggccttgaatcttcaatcattgttggctagaagtaaccttgccttagtattttcttagatagactttgcccccagcatgattaccataaaatcctttgtgagctttggatatgagctgtgcagtttcttcatttgttacacaccttaacagtggcatggagaaacctcttctatacattacaccttctactataatgtactatgaagcctttttcatcatttttgagcctcattcctatttcttagaagttctccatagttgagataggctactatgggagtcatctagtttggtgtgatgtttataatctcgatttcctccatgcaggtaatactaggttctttctgaaattgaatggtattaggttggacttattagtcaccatgttgctcgcaagccgtgctagggaaccaacaattacattttcttctcttggaattttcttgagagtataacccttcaattgtgcaagcagatcatggatcttactgagataagccaccatctttctccacgagccatgtattcccctaagacatgattcaccaccaactgtgagtcactatagacct

SEQ ID NO: 222271 - DNA, 5615 bp, Cannabis indica
tgacgagtaccgatatttgatttcgatttgtattcggatatgaaattcttgttttagaagggctctggggttttcttgtgaagtgaaaaaagattagcgtttatgaatttgatggtcaaattggttataatttattgtttaatttaaattatggatatgggatgttgtttagatttaagtttctacttttaatgttttaatgttagggttaaattgatatataagactgcatatttgagtcaggaagaaattaataactgtttatcacatgagataatcgatcaaagtgactcctgtaacaatttttgaaaccaggctctctttcttaaccatacaatatttgggtaccagaaaactatatatatatttttcttaaccatacaatatttgggtaccagaaaactatatatatattttttttttggaaaagagacagaggtcacttgtcttagactgacccgcccaagattattgtagagcctcacttatggctgaggaaaactgtggtaaccgtggtaccagaaaacaatatctattgctatgttatttatcagaagaaactagaacatcagacaataatgtggggaggaaatcacatacctgtccctttgagtttcccttcttcggttgtcccgtaacaacttttagacctgcactctgtgatttctgtgttgtttgtttggaactagactttgcagcctgataggttgtaagttgaggattaggaggtttgtttaagtttgatgtggaattatatggattgacaactttcaactcgggcgtgcctaagcttttgagtttaattttaaaatgtctattggaagagcgaaagaacatcatggttgctgcagattgtcattttgatattgacacgttattccattggttgaatgcatgctgtttaatttatttagtatctttgatcttacaatatcaaagaaaagaatttttctaaacagacatatggaagtcacacaacttttgttttgataaaagatgatagggttagctatcatctgtattatagcctagacactagcgaaaagtctaaatctaaaacattgtactagagtatgaattattttattattgttaccgactaacttctataaagcttttcgttataatttttttcttaaatgattctacttgaaacaatgtcagattcaagatttactcaacaagaacttccagcatgcaagcccattcttactccaagatgggtaagaaacacttttgttgttgctctagatatatgtgtacatctatgatgtttctagttgctttctacaatccagaggaattgacttatgtgtgtataattatgttgctgcaggtgatttctgcctttatgcttgttagcattgtattcatccccattggagttgcgtcactctatgcatcacgcgatgtatatttactaatcctcaactcttcatcctttcataaaattacattttagaatatctagttgcatagttgttaatcaggaaagacctttctggcaggtggttgaaattgttgaccgatatgaaactgagtgcatacctgagccttttagaaagagtaaagttgaattcattcagggccctggaactaaattgtgcaacagaacaataacggtaggactattcttttcttattgtctttttataccactgcaacaatgtaaatgttagtgcaccatcagaagaggtttcatatgtgcactgagattttattgctaacatataaataatgaagtctagttgctaaaagtgtatgatgttatcctttttttcttctttgaaggttccgaagcgtatgaagaaacctatatatatctattatcaacttgacaatttctatcagaatcaccgcaggtataatacttctttctattttattcctaaatttttcctttttttatatgattgtgctgaccttgagagctatttgagtactcatgcatgtagaatttaagagtgaattctcggcctgctatgaataaccgctactttcattcccacctgccatgtgggttctaagatcttagaatgtaaatagagtttaactgtgcaagaaaatgaaaggaaatcaaacaggtctatcatagagcaaaattttgattctagctttattgtgagcattttgtttgtgctgggtaggtgcataatttgacctaatcatttgtgtgtgtgtgtgttttttttaactgaaaggaacgaagcatgagtttgctctcttgttcttgaatccattgtatggaatgatgaatctattccttctctttgcaagtaaaaataaacagattttttatggagtatagaagcaaatattacaatgcaatgatacaaatgagtgaactacaggtgtaggacatgaatataggtaggtgtaatgtgctgtgtcgcgactcacaagggtccatgtgacccaaagatggtctcttagtgtcagcattttgtatttgacttcataatggtatcaatctggattttaaaacatggctctgttttctttacaaaaattgtcccgttcgtcgaaatgtctaaattaacagattgattaatatggaaattattttattttcccctttcatctataatgattgaaaaggctcaaataaattcttaaaaatgttaaaaagagaagaacaaaattctcttatgtcatcgctctatcttttgagtgtcagtgggattggagctaatttgccaccagaatgctgctgacaaatctaacattatttttcttccatccactgcatttccatcttgatggcttattgtttcagtagttccattggcccaagttgtgactccctttatatagaggttcaaagaacttgaatataaatctcagttatattaccaattataatattttctatttacaatttaggtatgtcaagagccgaagtgataaacagctgagagataatagtgcgactgatgtaagctcttgtaagcctgaagatattgcaaatggtcagcagattgtgccttgcggtctaattgcttggagtttgtttaacgatacctatagtttttcccgtggaaaccagcagttggcagtgaacaaaaagggtatctcgtggaagagtgatagggaacacaagtttggtaaagatgtctttccaaagaactttcagaatggaactattaaaggtggcaaaactcttaatgatacgataccggtaagcattttaccacgttttagaaataaaatattcccttctcttttcagtgctgtccatggggtaagacgtgaaacaaaagaagtaattttgtgtatcattaaataacaattccatttttatataagtgcttttttttcctcgtctattatttaaaagttgaattataaaacttgtatgaatataaaaaatatacaagtaaatcatttttgatgaaccaattcttttacaaatgtcatgtttacttgagaaatgaagtaatttgttagtgtggtttctcctttctctgcatgtcgtcgtttctctgtttgtctttactgattgtggtcggctaatctggtcaaaacatattttattctacagttgagtgagcaagaagaccttattgtttggatgcgaactgctgctctgccaaccttcagaaaactgtatgggagaatagagacagatctggaggctaatgaagtcattcaggtggtactggaaaacaactacaatacttacagttttgatggaaagaagaagcttgtgctttccactactagttggcttggtggcaaaaatgacttcatgggtattgcatacctcactgttggtgggctgtgcttctttttggctatggctttcaccattgtatatcttattaaaccaaggtaaatccattgtttgttcacgagtaaatagtaagaaatgaatactctggttaatcttattgatttgttggttaattgttctgtgcagacaactaggggatccttcgtatttatcatggaacagaaatccaggaggacactaaggttgtggaaccacctaacatgtttggcttggcgtggctcaaacaaaacatggtattttatatgtaatatgtaaagtgacccttgatgaatatgcaatcaagaatcattttgctctctctggcgctggaattgattatttttaatttttttttctcttgttttgtatgaaatgataatgacagacattaaaagcttccatgtataaatccagaaatagtattaattaattacttccaatgtactgtgttcaagcagcaagcagtgatgatgaacatttttatatatttatatttatatatattatagtaaaagaagggtgttagaaaaggtaagtgccttccgggtaagctgggtcaataggatggtcacacatgcataatatggatgtgttgtatataaaaaagtgtaacaaatgcatatggatttgataaaaaaaattgtagtagacatattatattcagttaatatatgcattccttacatcttatacattttataacggtgtatttaattacaaaattattcccttcaaaattgttggtctatttgagtttagcctttggttgaacataccgaaattgtttttcatttgaatggaccataagatattgaatttgttgtgtataagtttgttaacaaaatatgaaagcatagtaaattagcaaaagtcaatgttttctgtatgcgagaagctttaaagaaactggtttgaaattgattcaaaataaagaaaaacaatgttacctaaagaatctttaatctttaaacaatgttaccactttgtgtcatggcccagaacgaacaaatagttatcataagaagactacttctctttgtcaatttcactgttaagcaatttaaatttctatacatggaagtggttctttgtagaacttgggttcagaaccaattggttatgtggtgaaaatggataacagcataaggttaccagtaccacttttgacattgcattataaaactatacatatttttagtgagaattattattattatgtataattacgcaagacactattttgaaaaaattacatttttacgtttgaatattttttattttatatttttacggttttttataaaacaatacgaaaactacataaaaataacatgaaaataatatctaaataacatcaaaacaataataaaaaatcaacaacagataaacaagagtataacataaacaaattgtatttttttgtaaataaaatcacaaaaatcgtaaaattatttaaaatttcgtgaaactgtatttttataattttttttattatatttgtatatttgtgaaataatccctaaaataaacttaaaaccctatatttttgataacagccattagaacactagagtcgagtgtttctgtaatacatacaattgcagaggaaagatagatcatagataaaggaagaggagcttacttaattcaagtagtgttggtaaaagaggcatcttcaccaccaactataccagccgccattgctttccattcactcctaaggtgttagtgttaggtacctctcaaaaactacttttccttttctttaacatattgcgatatgagattttgcaaagatattatttcattaaacccatatgtgttattgttgttgtttttaatt

SEQ ID NO: 222272 - DNA, 1684 bp, Cannabis indica
tggatagtctcacccaactggttaaaagaaagctgccgacaaggaagatttataggtgagtctcgggacttggtagtttttagtttcaaatgctcaaaatattgattttagcaccactaaaaagcatcttaacttgcagatgaagtgccttacatattaaacgacgaagaatatgtactgaaatacagaaccgaattgaaaagtgcagttcttagagcaaaagctaacccgggaagcttgcttaaggggtatgacgtatgcatggctacccatgttgaaccctcagctaaatgcctatccaccattgtcaggtctgctggcgcaaatgtatgttcaaattctcatactcaaccttgctctgattacttcagctgagatggttgttacatttatcattataagtttgtgaaaaatacaggttattagtaggttgagccaagtaaagggaacttcgaaaacgatattcgtggcatgtgaagaagacatggaagagacaatattagctgcaaagaaaggtttgaggacattcagtagtgattggctaatgaactgtattatgagacaagagctggacttggaggctccccagtttgcagagtccttgtaagaaaagattttaaggttattaatttataaatgtaatattcattttgagaatgatacaatgttagctaagctgcacataaccattttactacaatttgtatatgtttataaatattctaattaagaaactttctcaaggaaaagttgttgccatcatactatgatggatttataatcaaaatactaatgtgaaatttattttgggcaaagcattaaattattatcgaattttgagtaaactatcgaactaaattccatcaaagttaacttagaaacacaatttgtgtaaaccatggaaaattggaaacaacctctaattaacatcgattgaattaaacatgcatgtaatcatttgtctttccaacaaatgcatctaaccccaactctcgaccaagactttgtcttggacttggattgcggcctcgatccataattggaccacgacattggacaccgtttggctctttgctagtacgggtgttcataaaatatccaatctccacaatctaatccaattaaatttgcaaagtgcggatatttgtacttgtgtagattggatgttaattgacgtgtaaaagtaaccgatttaatttaattaaattttgaacttcgacccatatcttggaccttggaccttagtccccaaatcctagactttagaccccaatctacattagaatcgtgtaaaccttggaaaacttctaacattaattgaaattttgctattttatttttaaaatggtacaaaatagtattgagtttaaaatggtaccggacaagttccataaatataaattaagtattattacacaaaaaattaaacttagtacttgtaaatagttattacataaaaataaaaaaaatgaatttatcgaattaaaatctgagttgagtcgcggattaggtcgctctttaagatgtttgtagcactgtctagaattgtgcaaacagactattagcctcgtcgtccccaagataaaatagcccagtcgaaaacacggtatcagagctctattacacgatagagaaccgttgaaataccacactcaataaccgtactactacctgaaatacatat

SEQ ID NO: 222273 - DNA, 3334 bp, Cannabis indica
ttctgaactaccaccagtaggtgaaggtgctgttgttagagcaatttgctctctaaaacgtggtggtgatggagtagagacattagcagcacccgacgactatgctatgggatctggtagaaagtagacattggccggacccaatggttgtgctacctgatcggaggcaaggtcaacatgggattgttcatttgatgctcattgaacaccagaaccagatgcaacgctgctatgttgggaactaataagacgaatgagctcatccactatatcctgcagctttctgttgctttcctctgtctaacgcacgcatctctccagattagatgatgcttggttcgacccataggcattttttcttttagggtgtggtgtgttaaaatatttagtttgggtgataccgaaacccatggctcgaacccagccaccatgctcatctgtccccagcgccatggttaacacgtcccttttaccttccacttgtacaggaccctcttccacttgcttacgtaattcgtcctataaacaaaacatatagagttagaaataacttatgaagcataacaattaatacaaatgaaattgaactttaaacatacaattcgtttaacgatttttgcagctagggcccccacctcacctttcgtgttcacgtgaagtcttttccaaatttcagatctatcaaattcagtaatttttctctatttgttcttgaaccatccttacaccacctcgttcggtgcgatggttgtaaatattacaagccttactcttttaggccttcttcctcttcacgccaaattttggacttaatctcgaagccacaagctctctctattgttgcaaatcaattattttttcataaagtttcagtggcttctcgagaagatggggagccacatctttgaatgtaaaaatactttttgttagggtatttttccaatctttctacctctctccacctttagaaattgttaatttcctatcaatgtcctgtacatcgaacgtggcctgtcaaattgaaagtcgtaatcataattacaaattataatcaatagtaaagaactcgaataatagaattaattttacctttatgtaatcccataattagttttaatgttctgactcactctaggccacaaaatgtctcaaagtggaacattagttcacacccatgctccaattcaagtaacttttgtcgtcaattcctttcccaattttgtctgtagttgttgtactcaacctctaatttttttttctcgcgaaccatttttgctatatcgtttcgtttgcttctcatgcgagtatttttctgtgttggttgtttaggatcaccactaccttcttcttccatggatggttgttcaggatcaacactagatccttctggcacggatggaccatcatcaccatcataatctaatcgagcactccactcatcgttcctacatggttccatgatataaagtcccacataaatttaaaattatacattagaatatacaaaaatatgcaaattaatagctaaatgtaaatatatcaaaaagactaaataccaatgcgtgtttgatatatgactcatgtattgatagaatcgttcaattataatctttcaccatcatcacaagatgatatgatatcgtccccaacagtgacatcaacaggtggtggagtgatttgatgaatttgtttactaagcatgagatcatcgccattagactcttgattatcataatctttagttgtatcgtcaagacaactgactagcgtgcatctaatggatcgctcatgcaaaacacttgactggcttgggacgccattataaacctatcgaacttgtgcccgattcgatttatgtccccatggggtggacagtggatgatgcatgacaaacataattttgtagatattttggtttggccaaaattcgaccagttcgagtgatgtgtggaacaacttctatagtaggtggctattttgatgtatgtgcgtccactacaagaaaaaaaatctattgacactacaaaaattatacctaaaagctttatttttcgtgccaatatatttttagacgtgacatgttgtacttattctgtcgtgcctatagattcgtgcctaaaaggagtctattggcaccacatttaattgtcaggcctcacagtaatttttaaataaaaagatattaatatatattatatataaaaacaaatatataatatatattatttttcaatatatctataaaaataaaattatataatataatgtgttatttatatgaatttgaaacatttgatgtaaaaatttatttattcaataaattgtatgccatacaacaaatattgaaagtatatacacgtaaattatatacaaataataattaagaaaaaattatatgcaaatatctactaaaaataaaaaatattattacaaaaaaaaaaatagtttatgaagatgttttgaaccactgatcggaacacaaaccatgtcaaagcttgaacctgtgggtgcctcgttgaaaacccatgtgccaccatcagaggtgccttgaacaccgatctaccaatgtgatatcgcatcaccgtacacccaccgccacagagcagttcttgtcgaactatacaccgctccacaaccacggagtgtacaagatctgcttaaatcgcttgagagattacaacagagaggtgtgacgtctctacagtagctggcatgtatagaagtgatgagtgtataaaagacataatgactatacagatttgtaaaaaatttaaaaattaatgtaggggaaaaaattacagcaaatctattttttccatattttccaatgtaatgactgaaaaaaattgttgctgaaaaaactttaaaaacgtaactaggcctataaggcacggtttaaaactgtcgcctataacagggtatagttgacgattttaaaccatgccctatactataggcgacggttaaaccgtcgcctaaccctgttataggcatcagtttaaaaccgttgggaagtctacattagcgacggttttgaacagtcacctattctgtccggtttgcgacggtcgtatacgcgacggttattgaaaccgacgggaatactttaaacgactatttaaaagtgtctaaaaaaaatatttttgtagtagtgatttgtttattatgaaataggtttttcaatttaaggtttctagatctccaactgcggtaaaatccgttcgatcctttaatgttttggtggtggagatctcggattcagagttcgtttgagtcgtcggttgccgattgctaaatgtgtcgctagtaggtgaggtattgaggagtgagatag

SEQ ID NO: 222274 - DNA, 1728 bp, Cannabis indica
acaatacaccactttatatattttctctaatttgctttagctaggttgtatcaaaatcctagctatcttatttgacaattgatctatcttttttttaatagaaatagaatttaatttaagaaaacaaatctatcgtctaacaaacaagacataagctcagtatgaatagtacttctattgaagattcgatttgaaaaaaataagaagttctaacaaaattatgaaccatgtcgttagcagaacaataaaaaaaaaaaaaagaagactaatccaatatttacagtcattacaagtaaatcaaaataagaggtcatcaataactactcgcgaatggcctcaactgccactaaatagtctgtaagaatcacagtcgaccatgccttatccttaatccaattgagagcttccctaatatccataacctcagccaacttaagttccacatcatgaccatataacaaaaagtacgagcttcaataagcccaccttgatgatctgaagctattagagcaaatctaaattaatgagtcgcagtgaataatgaaacattattatttatcttgatttgattctcttgaggctttacttaaatcctgacaccaccttgtgccacaccactaggcagtggtgtatggttagcctttatttgagcactctttcattgttcaaagtacaacattgctgaagtaactgcatcattcacacgaagaattttctaattccaaacaaactcattttgagcccaaaaaatagcccaactaacatcacctaccatttcttgcttctccttacccacccaagctccaacctgttggaatcaaataaagaaatcattcccaacattagataataacccgacgtcaatattagctctatctagacactatgcagaaaacagacaaaagataagactatgaacaatagtctcatcattacgcaaaaaaagagggcaatgtctttgaattagaaaatgttttagactgatttgatacattgtgggaagacaccaagtgctattacgccatataagatttcttacctacaagagttgtcataagtcacaccacactataagagttgtaacttttatcagtatatttggtcaaatacgccagcaaaaggggtggcttccaatccctaatttaaccacattgactttttgtcagtgcttatttgtgtcgaaaaaatagattttcgcaacgcattttgtaaattttgtcaaaaaaaggctaagagggaaccaccaaaaggcgcgtataatttttggcggtttaatataattttgccagtaagcgccgacaaaagttccaaatgtttggtgtggaatttctcgcaattgaataggttttagcagggactaaaatattttatcgacgcatttaccaaaaaatttatggaaaaattcccatgtgggaattggttttggagctgggggcaataaagttttattggtgcatatatgcactggcaaaagtgaaccatttaataaaatctatcgtttcaatttagggtttcagtcaaatcttttgccggtgcaaccaaatgtgccagcaaagataacatacctaaatacgatatgcacccttcttctttgtcattcttcttcttctctccttctctctacactctctctctctatatatcccagccccatcgccaccaccgtctgagcagcccggtcaccaccaccgcattaccaccacagcctaaggccaaccgccaccacta

SEQ ID NO: 222275 - DNA, 1615 bp, Cannabis indica
aatcaccgtatacaaggtgattcgatccccgtgattttaattgattttctcgaaataaataacttaatatttatgtattttcgttttacttatattttattaaaataaatgtcctaaactttttcttccactatttgttttttaattgatattttggaaccgtacacattttcaatgaaagctttgttcattgttatagaaaaaatgaagaaaaaaaaattggacttttacggtttgcataattgtagacttctactattttatcggccatttaaaatataataaataaaaaattaatttcaatatataaaaagaaaaatatataagtccgttttaaatgaaaattgattctttttaattaattaatttattttcaaaataataattggaaaggtgattgaattttaaattataaaagatgagaaaataaatttagaatatttatttttatttattaattaattaatataaaataagaaatgtaaacaaaaatagaaaatagatgtgattgtttagaatgtttttagactcgctatcaccgtcaaattaaaaaaatgaaaaattagtttatattaataattattaattgattaaaatagattaaaaaatgatagaaaagataaataaaaaaatatagatttagtgagagcaatttcatttattattttttaacaaaaattcttattacaaaaaatacccctaattattttatactattttatcctaataattttcactttacccaaaaaaaacatccttcctatatttcaaaacctaaaaaaatactctctctatatttcccttctcatcagataccaccttccctcctctccctatttctccgcccaaaggagtcgttgtcgtcctccattgaagcccagacccctacctcccgtctgttgtcccttcgtttcctgaccgtcgaagacctgatccgcaccaccttctaattgaaagtcggagctcttgagttaatgagtaagtattttttaaactattttattaaaaaattgtaaaagtatagatctatgtagttgttgtttgtattaatttagttttgatatattttttgttgaaatcgtgatatctaatttttaggagtattctatgtgttcgtatttttgttgacgcttttttaatacgttctcgacgggttctcgatgcaaatgtcccaaggtcagagaagacctctcctgacagttttttgatgggttctccattatttatcgaaatggtgaatgattttgcattagcaaccattcttgacatgttatctacgtgttctcgattatttgtcgatagttttttgatggtgtatatatttgtcttttcaaacttccttgcccatgttatcgacgatttctcgactgtgtatcgattgtttctcgacgattgactgtttattatttcaacagttatcaattacttttcgacaggttttcgattggttctcgactgtttgtcgacactattttccattataattttttttgttatttttgtttttctaatttagtagtttctggtttgtattgaattgtaagatcgcccgtctttttgttgtattgtatgatagtgtttggagtgttgagggattttattgggtgtataaaag

SEQ ID NO: 222276 - DNA, 1344 bp, Cannabis indica
tactctgatcatgatctctctcttattctctattctctattctctattctctctattctctctattctccattctctttcactttatctgctatatatctaatacttgcttatatgtattcatcatttcatttgtctgaacctgaataatgcaacgtcgtacgtgtactgattaatatacctgactatactaaatgccatgtgcccttatcttattgacgacttgttataattacaacaaacattatcattaaagaaaataataataataataatcatatagctcattaattttacttacaaggtcctaagtcctaacccttgcccacatatctcaagcgatttgaagacattaagccaggattttctattgagagcaagcaacccgtaaggtccactcgacctgtatggataccccggcgtggctctaccacaatagattccgaacttatatcaaatcaaaagtaagcagagtactctaaagtttcagatatcaaacccaggcagaaactctaggctttgaaaaacaattgcataccgctctacagtttgtgtgcttagtattctcatcgatttatgaatgagattatttcagaaataatcaaaaatttatgtttttacagaattgtatttttagggactattttttacatgccgttgttagtgtaacattgtcgcaacatgaaataaggtaattttccctctaaaaatcacctgtaaaaatataatttaaaaaaatctgtaaaaaagtacaattttagatactttgtctaaattttttgttgcattaaagaagagagagaaaggtactacagaagagcccaaattcggccattttgttgaggccggcagttcatgtggcccacacgcaatgtttactttttgggctgcaaataagtttaaaagcccagcccaagaaataactttgcatatcggctctctaggagccaaattacctgtccccagttcttgtcccactcctgtcccaaccagtaatattttgccacctcaactaaattacacctacacatttaacaaatctctctaaaaactaactgagtttccttgtttttaatttaataatttttttttaataaaaaaaatatcacgactttatctctctttctctgctatcaatacatttcctttctttttttttcaacaatgggaacaaattataagaggaaaaaaaaaacaaaaaacatacaaaaatggtttgcaaaaggcatgaacgatcaatgaaaatctattcatctacattttctctgaggatatatcgaacagagaaatggagccgtctcagaaagcttcttcgacagtgaaagttttacaaggatttgaggac

SEQ ID NO: 222277 - DNA, 5459 bp, Cannabis indica
ggctgagttaatagcttccatatcatccccctcattcaaaattctaagagtaatttgagtaaccaatggcccaactatatcccaatgatgctgaaaaaatatggcagacataccatcaacttctggagacttgtctagagccatagaattgagagcagatttaacttcagtagcagtataaggctgaagcagaaattgattcatctttggtgtgatggcagtattaattgtagcaagaacagaatgcaaagcatcatcatcaacgccattagaagagaacaaattagagaaataattgtcaatttcaacaacaatttcctccttagtttgcaccataccaccactgctggtttgtatttttatgatcttgtttgtagcatttctagatttagctcgagagtggaaaaatttggtgttggagtctccactttggagccaatacacacgagcacgttgatgccaataatgctcttctttttctagtaattcatccaaaattttgtcaacattctccaccttttggatatgttcagatgagatgtccctactgttatgcaaagttgcagaaattttatgtgcttcagcaatgtctcggctcatgctaccatacttagaagtgtgccagttttgtaaagcaatagagcatgctgcaatattttgcagcagggataccgatggttggcaatgagaagggacataccaattcgattggataatgtctcgacattccgagtctttgagccagaatcgctcaaaacaaaatctagtttgtctcttgtgattagaaacaagcagattaggagtagagacgacatattcaatcgctctatgatctgagtgataaaaatcaaggtgagtaacacgagcttcgatgaaaaactcaaaccatatatcattgaagaagcctctatcaagcctttcccgaacaaaattcccattatgattcatattagtccaagtaaatttgtcaccattgaatggaatggcccgaagtttacaagtatctatggttttccgaaaattccccataagaatatcactttgtggaggcccccctctttgtcctcatttgaaagcaactcattaaaatcaccaagaaccaaccatggtatgctaggatcatttgagacaagactactcaataagttccaagtattgattcttaaatgagttttagaagcgtcataaaaggctgtgaaatgaaattggtggcaattatccgacgaaacaaaaatatcaaagtggttcattgagtaagaattaagagttacatctacattcaccatccataacagcaacaatccaccctttaaacccatcctagggacttcaaatctattactaaatttaagagattagcagcttagatgcctgaatgccgaaggtttcccaaggccctgttattccaacttattattttcattggatgagggcggggttgcgttaagtgcaacctccgctgaacaagatgaattcacatcagttgaatctgtggacacaccagaaacatgttgaaaagaaggatcatcaacacttgaactctcttttttgttgctgcaacatctcttgagaacacttcgagaattatcagggtccacttgcctcttaaaatatttgcaagtatcattaatatcttcacttgcctcagaaaaagcgactgcttttcctttcttttgtgcagcagcagtataggcatcaatgttattggtgagtggatcatgaagggtaggattaatgggaggatggatagtttcttgggtatgagatgctggtaggggtgggcatccgatccgatccaaccttttttacctcatccaatccaatccaattagtaattggatttagaaaatcatcatccgatccaatccaattagacctcaatatccaatccaatccaatccaattactaattggattggatcggttttctaattggatgtccaattacatacctgatttttcaaattgacataaaacatgattttttttgcataaaaactataaaaacacccttcattcaagtttaaaaatccataaaaagttctatccagccaacaggtccatgaaaactaaaaaactccattcattcaagcttaaacctccataaaaagttatatctaggcaggtccataaaaacttaaaactccataactaaaagtctaaaacaacaacataagcaagtaataaaatagatccaacatcatgaaaaattgaaaactaatttaaattcaacacaaaacagccagcaggtccatgaagcttcatttactcaattgtaagatcttcaattccaaccaaaatctctgtaaaaataagaaaaaaaaagtttagctagtaatataagcaaatcatgaaagataaaactaagtaaaagaatattgatatagtataatagtatattaccttcagcaattgactcaacctcttcaggtgtctcggaaagctcacttgatggctggttacgaaaccaattttgagtacaaatgagagcttggacagttttaggattcaatgtatttctaaaagagtctatgatacgaccaccggtagagaaagctgactctgatgccacagttgaaataggaacagccaacacatcacgtgctatcaaagagagaatcttgtatctactaaagttgatcttccaccagtttaaaatatcaaagttctgagtatccatatcttcacaagcctccattagatacttatcaacttcagttttaggttccttgttgtcaactgccctaagcctcattttagcacgagtttgaaacatcttataagcatcaacatctccaccgtcaatctccatatcatcttggttttgagaactagttgaacaatgtgaggttaaatgtgagtatacaagacaatactcctcatacatcttgttcaaaatacctataatcttttttgtttgtttttgagcctcctctacatccccattagacaatgtctctaagcagatattgacataagcttccttgtagcgtggatcaagtaggacagcaacaattaacaaaggatttatcttttccacacttccccaatacttgttaaattttatcttcattgtttgagccataatactcattctcatatcagtactagcaccccaaacatctaattgatttccaataaaacaaatttgctcaagaaatatgtttgaagtaacatggagagtacgagagaaccgcaatgtagcatcataaaatattttcaaaaacttaacaaagtaccttgcattgtcccaatcatcagaactaggagacttgcttccagaactgccacaaaactctttaacatatgccacatcatgtgtctccattcgttcaaatgccttctggtattgaatagcagcttctagcataatataagttgaattccagcgagtaggaacatcaaggcatactgttttctttgaggtaatcttagcttgttctgcacatgacttcaattttaacattcttgcaccagatcctctcacaaatcgaactacatttctaatctttgtgatgacacctccatgttctttcaatccatccatgacaaccaaatttagtatatgtgcacaacaacgaatgtgcatgtgcatcccttgcaaaattgcaccaccccaatcacacacagacccaacaaggtaagagattgctacatcattgctggctgcattatccacagtaacagtaaaaatattttcaattccccattcaagcaaacattgttctataccctttctaagtgtttcacccctatggttaggaaccacacaataattaagaatctttttctgcaaacaccaattctcatctacataatgggaagtcaaaaccatatagtttaaattttggcaagaagtccaagtatcagtagttaagcaaactcgtagcttcttaccaataaaatattctttcagcctcttcttctctttcatataaagattaaaacagtcacgagtcacagttctacgtgaaggaaccacaaatctaggctccactaatctcataagatccttgaaaccttgtcgatccacaaaactaaatgggagttcatccataaccaacatcctagcaatattctctttaaccaattcagcattataagttttagccactaggcctccatcttctccatgctttttagcctcaaagaccaaagtcttctgccttttttcatctctattagtaaactttttgcattgtattgacagatgagtgagtagattggatgttccattttttttactcccacatgcatatgaaacaccacagtaattgcatctagctttaggatttttggcatcatcaattaccttagtgaaatgtgtccacacttttgatggaggccttgtaggctttctttttggagcacaagaggtaggactaggactttcatcaccacccgcgcttggttgagaactcagttgagtgcttggttgagattgaggctccaaagatccttgagaattattgacatcaatgaaaatgtcctcaggtattgatgttccctcattattacaattttcctcaagagaatgattttggattttaggagtcatctgcaaaaaaaaccaccaaaatattattgtactaaactaagtatactgtgatagagaaatgtgatatccattagtgaataaaaatgtcatcgacatcttttttaaaaattgatacaatatagcttcttacaaaagtctttcggtcaaacaagctagtctttcagtcaaacaagctagtatatagattatactaaaagtctttcagtaaaaaaaaatgtcattgtgctatatatgcaactagatcttattaatcatactgtatatagattatactatagagtactttttcaagtcatttagtttatgcaaatgatgtatatatattcaggattcaatttcaactactaaaaaaatacataccgagcaagaagactgagtagaagccgttgtcttagcttggagtcaccttaatcttcccaaaatcaaacactaacaaaatccataaaagccaatatttctatatttcagattcaaaataaaaataactaaattaatacctgaacaaaagaagggaaaagaggtatacctgatgagaaggaggtttaagttatatgattttgaaatggtccctaactctcacaaagcttgaaggagaaggtctgtctcgcagcttcttgaaggtctaagtctgattgtctcggatgggggaagcttataagagcagagaatgtaatggaaggaggtggctgaatagaaaacgttagctctagagatttaagaccctcagcatgcacgcgtctttggaaagcatgaagaatccaagcgtgctatttttaggtggactaaatttaattattagtagagattaaatgtattaggaataaaaaggcaagctaaaaatatataatatatttttttaattattttttattatataaataaatataaatatttttaatat

SEQ ID NO: 222278 - DNA, 1531 bp, Cannabis indica
gtaaaatatttccaacaggtgctttgtgtttcagagattaccaatggaagtgcttccttgaatcttaacaacaccattttttagatgagcttgtagattacattacacgagctaattggaaggaaatcacccataccacagagtgatttgatctttggaattagagtaataattgacatgttgatcaaatccatgctgtgaccattcaagacacctaaaacgacttcggtaatcgttgaacccacaatatgctaataattcggataaaacatggctgacatgccatcattgcttgggcttttattagggttcagactttagtgccgtaagaacttcagctacagaaaaaggtagggtgaggaactcattaattctgttgtaatggtacttggaattgttgttgtgactaactccaaagcctctaaatccactgtagaagcagagaaaagatcaacaaaatactcagaaataatggtagtcataccattcttcgaagtaactttgatgccattattatccgtgatatgaagcgtgagcgtgaaagaacttggtgttttgatcaccacttcgaagccaattcacatgagatctctgctaccaatacatctcctcttatgtcaagagaccatcaagaatactctgattttttcaactcatccatgattggagcaattctagcagtagcattgttcaaccttgtgacttgttgctgcatatttgagatctcttttctgaaattactaaattttgagatattccattgttgtaaagatgaagcacaggcctctaatttgttcaaaaaactctccatcactgaacttgaaccagcaaacagtcattattgctaaataatgttggcagtttcttcatgttgtaaccaaatttgctcagatttgaacatggttcgacttctctgttgctatatatctgcatctttcgggtttacattgaccaataaagctctatggttggagttgtagtagtccaaattttgagtggtgataggatcaaactttgaactccaatggccattaataaagtaccaatctaatctctctttaatggtgtccaccgagtgtttcctttgacccaagtgaaggggtctccctcacacggttgttcgtttaaatggcagttatcaagagtatttctaaaatgctccatttgtgtttcgttgcacaaagcatcttctaatttgttttgatttgatatgatttcattgaagtctcctataacaaccatggagatagaggtgcaacatccttaaatcttttcaaaagagtccaagtatgaattctttgctagagagagggagctccataaaaagcagtaaagcaccatcttgtgtcatttgcaaaggtaatataataattaaaaatatttgcattaaaatttaaaagagatacatctatatcatctttctaaagcaacatcaactcctctcctaaacctattctaaggacaagtctattattgaaatttaaaccttgacaaaagcaaaaaattatattaggacctaacttagtttcta

SEQ ID NO: 222279 - DNA, 917 bp, Cannabis indica
ttgatactcaccattcctatctctccttctaactcggtggatacttggtattggagtaaggaagtttcgggtgactattcagtgaagtcggcatacagcttaatccaagatttaaaggtttctcctacttcttctaatagtttgggtctttggcgtgatgtttggagcttaaagattcccccgagagtgaaggaaatgttatggagaacattgtccaattgtcttcctactcgagcacaactaattcatagacatgtccccattgattcatcttgtccccggtgtaatcgagaagcagaatcaattgcccattgcattgtaggttgcaattttacctctgcctgctggcggttttctggtctgtcacatgacagcattggcaactcatcctttggtgattggtttcaacaacagttccaacgatggaacaatggagataggcaaatgggtgccatgctttgttgggctatttggcaagacagaaataataaagtttggaatgataagtctgggtcggtcaaaaatgttgtggctttagcaagaactaatcttgaacagtggctatttgctcaagagaaaaacttttcgcccttgtctttctcggttgggaatgatgaaggggatgagcaatggtgtgcccctcatgttgattattataagattaatgttgatgctgcaacctttagtgacaaacacagatttggctttggttgggttcttcgtgatgctaaaggctatgtcattcaagctagatcgggttcaaggcatggggatgtggagccgggtttcgccgaggctcttggattgaaggaggttcttagttggataaagacctcaaacttctctaatgttacggtggagacggacagccttgtcacggtccaagctcttcggagttcagtgattatggcctctcc

SEQ ID NO: 222280 - DNA, 2402 bp, Cannabis indica
aaaccgaccaatttcattgacgggttactattttcttttttcttaggcgggttgcacttaaatttttgtaacccaatctttgttgtgactaaaagtaagaatttttatagtgaaagcatataaaatatacatgtagtttagtaattgtaaaataaaaaatgaaaaagtaaagtttagatataaaaatggactgacctgtttatgaaatacgggctaacactttcaaagtatgacacgaatccaagcacgacacgaaatacaaggtgtaccctttcaaaatattggcacaacacgatatgacctaccaacacgataacatgacataacacaacctctattttgaaaagcacgaattaatacgagtcaggttagtatgaaaactctaaactgtgcttgtacacatttttaagcttaattttcgcaattggcatatttgggattggtttttattttttgaaataatatttgggattggttagttacataattttcttatacgtatcatataattgatttctagcttcttctttttttttattaattttgtcgtttcatgcatcagtcatattaaagaaatttatatttcttaattaattttctttccaagcacgtagaacaacatatatggtgatgtaattagtattgggggcaaaggaaactgacgaagtttggtgtcataatttggtaattaacaatttctaatatatttagtagttaaataaattaaggatatatattatatatactaatcagtggttaaatacatgataattaaataacattaatttagttgatacatcaccattatatcaacttctgctactctgtcggtgacaggaaatctcaccaattatcctattaccttcctatatatattattgaataattatagtcgtgattcttcgtttttaatttatttgtatttattcatttagattattaaagagaataaatttgtgtatgatcagtagagaggagggaaagaatttcaaaccatatatataattgacacccatattgatcgctagctaattagctaaataaaaaccatcacgtactatccactattttctagcctcttatatatgattaataatccttttatagtccaaattaaaaacatgacagttgacctcatatactgtaaatttcacgaaataatagaaagaaatatatatagagagaataaaaggctagctagctacatattggtgtaacatacatgtatataaaatttggttttcggagagatgtttagaggaagaaaaagctttaatttcatgtaggtaggtcaaattaataacacaactggaggaaataatattaaataataataataataatttattttaatgaatatcaatgattaattagttggttagagaaaaaaaaatattaaacaattgaatgcaatgacaaaaccgaattctctaaacaatgactattataaagattaatgaaattgaaagagagattaatataatcttccatttccattcatcatcatttgcattctccaaaaatgtccacacctgtagagagagctaactataagctataactatattaacattaacaaagtaggcttttaatttggagtagaaatatataataaaatgaagcttctagctcctttgtcatcatcatcatcttcttcttcttcttcctcagctctaaaaaagcctcatcggcaactgtctcaataccttttctctttactagctttcattgtcttcgtcaccattctctacagtgaagacttcttatgcatatttcgccagcaactcaaactcgagtctgccgactcggaccgagtcctctctcgacccggtgagtcatcctataatttttttattatgcatggttacatatagtatatataatatgtgtatattgtttggtaactcttcaattctcacaacaccaatcatcgctttcatcttctccacctttgtttattgattttttttttcttccttaagtaactttatacatagtaattaagggttttgatacgataaatatatctctatttctttcacattttcattattattattataattattggcgtgttagtctcttttacaaaattatcttacacaaaatatataataatataatacgttcaagccaataagtacgtgcaaaaataaaaataaaaatataggctcaagccattataaatgtgtagtactactattcattctctatttataatatacaaatatattttattaatttaataaattttattgcaaatatatagttatgattaaatgtccgtagctaaaacagtggcgaagccaaaaatttagctgagtgagggcttaaataattattaagtcaaaactataaaaataattgagaaatgtatcattttaaattttcatcttcaacaa

SEQ ID NO: 222281 - DNA, 3300 bp, Cannabis indica
acaaaaaaggccggacttacggctgctgccgccgccattgtcggtcggtagtagaatgatgaatgactttgcagcaaaggttttttttatctgagccactcaatctttcaaaaaaaatcttccttttgtttttgttatgaacattgcttgtacttggtgcaattttaatagaataaatagatatttttgtccgaaaaccccaaattatagccactattatattttgacaactaccaaattgtgctccttttatttaatagttcttagatgtaaaagtggtaaaagtttggggacaaaatatgatattggtcatactttcaaggtaaaattgctaattgtttaacaaagtctaacaaaaatctcataacctactaagttttatagttgagagagaatatttaacattgctaataattcgaggatagtggtcatacttcggggataaaattgctaatcatttaactaagtctaacaaaagactcataacttactaacttttatagttgagagagagtagttaatattggtgataatttgaggagtatgattttattaagtgacaaaattcaaggggaagattcctatttattcattttaatatgtgggttgctcttttgttttgattttgttgggtctgacagtgtttaaatgtgtgataatgatttgtgaatttcttctttaatgtatgtatgtttgttggatttgtgttgtgtgatgattttgcagattgtttctgcacaataaagatagttgatggatcgtatgagaaacccgggcttcctgttaatatgtttgctgagcatttcggaatgcttcctcatgtagcctcatttggagatataattcagctttccaatgttatggtattactttgtttgtagtagtaattattttttgttttgcttattatcataaatgtgcgtagcttataaccactaaagtacttgaattgctgataaaaaaaggcgaaaaagaagagtgaagaacatattttatagatattcgaatgtgtttttcaacagactagtttaaaatatgcatttgttgtactatttgatacactattgatctaatcctatacttgaaacagttagagaataggtattttattgatatcaaagagaaattacaaagttccaaacttttcgagacagtttggtgtctccccgagtaaatgttttactcactttgtaacaaaacaattcccccacccttacaattgatcaaccctttatttatactcgtttaactgttttaacaccttaggactataggatagctcacttaaaggaacttagaatttaacaacttagccactaaaatcatagtcaactatactaatgagactaatcaactttattggcatcattcattgcttgggttaagggttcgaatctcacccaacccttcattgggagggataatgcttggccttttgggaggctaacttgttgtggcggcgccatcctaaatggaatgagaaccctcgagatgcataccgatgacccaactaaggaaggatgaggtataagacctttatagttggcatgtggtccccagaattgtcaaagctaccgaaagggtggggaagggatctgcaccatgtgttcccctttattttcaacaaaaaaaaaactatactgatgagactgatattaaggtgtaacaccatttcaaaaggattcttatgttttaaataattaaattttcattagagtaattatgatacatttacttgcatttctatttgacttagtggaacaaaagaaacagaacttgagagaagacattcatccataggataaaaacttttccgatatgaatagatggttttgtttaaagtgtggtgtatttgaacatgaagttatattcttacagatgaaaactcatggtggagaagtatatgctgtctttaataagaagtcctctacctttgctatatacgatagaaatgacagtgaagggtttcttccttatcaaacttacccaatatttatccagagagatgtagacaagaagctcataacacgcatgcgaaaatggtttattgatcttcagtttgatgaaggtagctcaattttgtggtacacaactataaaattagccatctttatttataagtatctaaattatttaactttcttatgaaaaattcatgatagaggcacattaacagttgaaattgaattctgaacttgtaatattatagaagttagtagaataagaacttgaaggagttggcttccttaggagctttctttaaattttgcattaaggagaaacatggattcaaggtaaacttgttaacttggcatttttcttttagttatgtagaaggggcaaatgtgtggttgaatctcttaaacaaaccacacatgcacgtacataagtctagtagtctactagattcctgggggtgtgcaagaggtatctgaatatgtttacatataaagtaaagttcttatacggcatcgaagaaccttcatattagctaccttttttatttgtagatgttcaagcttagctttgctaacaaaagtataacaaaaattatgggatgatatgaaaatagtagaaaagaaaaattatgtaggtatctaaaactatgtattctaaatttttgtacctattatgtgattttactaattatataatagatattcaaaactgcgatattcataaatgtgtcgtacacatgatagattcaaataacttctcattgatgagggaactgaaggaaggtaaatttgctgatttggcttgcaaggtaatttgttttactatgtttaaaactatactttacttaatactctttgctttaacttattattatcaaatttgtatgtaactaagtttttgatcaactttcacccttcatattctctctcaaaggtaattcacgtccaagagtttaaaggcgaatggatgggcttcctctgggatggaactgatgcccatccaagtagtatttcttcgaggttagtgagtgttacttaacttctgttgttgttgctcttaaattcgggtcatagttggctatattatcatgtgtgttgaatcgtttttttttctttcttcatttattgtatatatatatataaataataactacttaccattcacctctccactttctaaatacatatcataaaaatgagtttataaaagggagaagcaaatcaaacgagggaaaaataatagagaagaaaactttagacaaaattatatagaaaaaaaagtacgatatgttctcatcttacaaaaaattactacaaagtacacttactcaattatccaaat

SEQ ID NO: 222282 - DNA, 2460 bp, Cannabis indica
  modified_base (2311)..(2311): a, c, t, g, unknown or other
atctaatatttaaaaattttatacattatatatttttgcatcgaaaaaaaatggtatttttaaaattttttataaaaaaaggcttgataatactcacattttactttagataaaacatacccttaacaaatttcttgggcccattattactcagggtcgaccctggttcaggtatcttatttcaggcatgggaaaagcattatcgaatcccgcagatggaacctggacatgcggaactcagatgagtatggaacacggctggacatggcctaaattcaacactcaaacctgatcatctatgtaaccaagtacacccaaacctacccttttattttgcctttgtttttttttttttttcgagtttctccaagcgggtgctagggctgggcagatataacgagcttcgggcaatatgtgtagtcctattttacatttcatcaagaaagaattaaaacattttgtttagaatacatcactaattattgtaaactccacatttattttactatattgttaatgccgactttgaaatatagtgggtcataagagaaaagatatttttaggctcttatttagagaaaaatatagtattttataaaattagtaaaaaaaaaatgtataattttaaaagaaaattttttataggcccttaaactaggtggactctaggcacaagcctaattcgcggaacattgtcattgccataattgtacttaccatttatattaataaataatattaaatgaatattaataaatattaaatgaatattataattgttattaacttttgattttgtacttatatatacattggagcacaaattcaactacaatttacaccattgattgaaaacaatcttgctctatatagcaaaacgtatacaaaatctcaactgaaaaaaaccacttcatttccaataccttattttactcaacaaacacaaagcatgaaaccttacattcacggaaggttatacacaaaacatgtcacataattattattttctcttcaaaatttttaaatttaaatctatatataataagatcattaaccaaaccaaaatttaagtaccacattttcatataaaccattctagctatcaaattaatgaagatgacaatgaagaaagtttcacaaacactacacttagcattgctcattttggccatagccaacattatggcctcattagagggcatcaagagttgtgacatgacaagtttccaaccatgtgccctagagattatgggcatgatactctctaatgcaccaataagctcatcttgttgtgaagccatgattggcatggttaataccacttgtgataccattgttccttctaattggtttgctcaagccctacaattttgctctagcgccccaatagtgccaccgttcccaccgttgccaccatcctcacaccatccttctggcaattgtcgtagaggaatagttcatctctttccttgttataggcaaattgaggctaattttcatggattaggtcagataagctcgagttgttgtcatactattgttcgagtgtctcaagcatgtaacactacaatatcttcatcttcgtcttcacattcttatgttgatcgtcttgttaagtattgtaagacttaatagtaactattatgttataatttttaggttggcaattttttagtatggaataaactgtccacaatgctagtgaggcttttgtttttgttttttttataattttttcttttattaatgatgtttctaattattattatcttcaatcaattactcattatgctaatatatatatatctataatattttttaatattccaaataattgatacttaagaattatttggtattattgtcacaaatagaaaataattacttaagcttgaaaattttgcactccaaaaatttttagcattttttttttaatttagtgaaatctttatgcttttttgataacaaaatagttatggtttttttttacactcatattatatttatgagaattgttattgggtatatcagctcaatagcactttctatagatagtgccttacgattagttagtgtatattttcttaaaagttattttaataatttatatgtgacatgaatacttaattatactaatagtaatatgacacagatgaaggtattagataccagtagtatcttttagtcatttttcttatttgtagtattattattagtacactaatagtactcaacattttttataagtaacaatcattcacgtataattatgaaatgatattcactgaaactctaatagtagtattgattntagtaaatgtaatgtttaacttataattttgtgtatataagatgcacatggcaaaatgtacataaaagctaaatatataaagtccttgattatctatgatcatttttaagtttactaggtaataaaactaaaaactttttaagtttaaa

SEQ ID NO: 222283 - DNA, 1982 bp, Cannabis indica
gaagtgatgaagaggatgaaccatcaggttggcacccacttcaagaagaccccaattatgactcagactacaatgctgatcacgagccacttatcgaccgctaataagaagtacaaaaagatcccatatctcttatttgtgtaagatagcaataagtgaaaaaattcctaatagtcatgatgtttgtaggaattttttcttatcgtttggcgttttctatgtttgtcagtttgtccatttgttgtcagactgtcattttctccgtttgtcattttgttggtttgtcctcttgttgtcagagtgtccttttgtgtgtttgtttgcttgtaggaaatttctaggaagtttcctattttgtatcctacctcatgtaaatggctatatatagagccatccttttcattgtaaggacatcagaaagctttctactaaataaatttctagtgttcttctctcaaaatgttattctaaattttctttaagagatttctgaagtagtaatagtgtgcattatggatcgtactgaatagatattactgttatgagttaggttaaaaaaaacaacagcaaaaagacacataggtaatgagaaagcaagaaacaaactaaaattttacaagtgtcaacaaactaaaatttataatagggggttttcataactaatattgtcgtattaaaatttaaatttatttatatgtacacttattacgaagtctattcatactaaagataattctaaaagatgcatactattctatttatattgtattaaaatgtaacaccatcaaataaatatttatcacacttatgccccagtattctgctatagtatatgtgataataataaagtcataagaaagtatttaattattgctaaaaataatgtatttccaacatggagtgcaatttagttataatctttcatgactatttaagaagttgggatatgaccttacaagttacaaaaagaaaaaaaagttagtgtatgacaaggaaagcgtgctcaacaaaaatttgctcgcccaagctcaaaaaagaaggttgattcatccagagctactacgattggaccaccttctggttgcctgaattcattttctaaaactagatttgatgtggtggttcagagattttaagggcaaggtggttagcttagctatttcagaacatggtaatctgaattcaattttttattaaatttgagaaaagaaaaaataataaccccaaccacatttctagtttctataagtggcattattacaatcttgaacactttgtgccgcaagggaaaatggaagtagcatgtatctataactcaacttttcaagatgctaaaagcagaaaaacaccatcccaaatcaaaagatgagattttaacgggaggccaacttcaaaacatcgaactgttcatttttcttattttgatattcttttttaaaatctttgagggctcagggaaactgaattggttcaggctgcacagctttctgcacaagctcggattgttctttcacatgaactgaatagaaaccagtagcagtagaagctgatggagcacgaccaacatattttatgtcctcgacagtgcctctgttcagtgctttcatggctgtgtagagccgaggtgcaatgtaatagtatgcccccatgttcattggctcttcctggcaccacacgacctcagcatctgaaaacaatattcattcaaatgaaatgttagcttcaaaatgtcaaatttgtatcagtactactttgaaaaaaaacatacttgataatttattaaagaagctgctagttttcaataaacatacttggatatcgcttcagttctcgctgcacaaggtcatatgggaacgggcaaagctgctccaccctacatattgcaacatcagatgcactcttctttttcctctcctcatcaagctcgtaataaacctgcaaaattggacgtcttgtcaacaaaaaattatctttttcactct

SEQ ID NO: 222284 - DNA, 3796 bp, Cannabis indica
cagatatcgaggaaatccttgaataccctattcatcaaatccataaatgttgctggagtgttggttagtccaaaatacataaccaaaaattcatagtgcccatacctagtgcggaaagcagtctttggaatgtcctcctatcgaatgctcaactgatgataacttgatcgaagatcaatctttgagaacaccgttttctcctaaagcttatcgaataagtcatcgatcctaggtaacagatatttgttcatgacagtcagtttatttagatcctagtaatcaatacacatgcgtaggaatccgtctttcttcttaacaaaaaaacgggagctccccaaggtgacacgctaggccatgagaaccctaggtcaagcaacccctgaagctgaatttttcattctttaagttcagctagagccattctgtacggtgccttagaaatggattctgcttcaggtgctagatcgataacgaaatcgatttctctctacagtggtaaacttagaagttcatcacgaaaaacatctaaaaattcctgaaccaccctaatgtcttctgactgaactgtctcaaaccgtgtggtatccaataccactgccaaaaatcttaaacatctgtcttgtcacaaatctctagctgttaatactgaaatcactggaatttgggatccctaaaatgatcccacaaaaacgaacggttcctcgccctctggttggaagatcaccatcttccatttacagtcaatactagctgagtacttagataaaaaatccattccaagtataattctatcaagttagcacttaactccatatcctcaattctaattgacatagacctaatccaccatttggagataactaattccccgccaggcagcagggttccaaaccctttatcataactatcatgcggtctatccaacttgctaaaaatcctggctgccatataagagtgagtggccccaaatttaaataatatagagaaataagaattgttgaccgagagctgacctattacaattgaggggctagcttctgcatttgcctgagttaaagtaaacacccttgctagagcgtgttttgcagctgtcttctgttcccctttcttaagctgtgggcaatcacttttatagtttcctggcaaccaacactagaaacatgccttccctctacactcacccagatgatgcttcttacaactgggacacttcgtgtaagtgtatcggattttggaaaaacccttatggttggctcgacctggttccctcgaaacctcttgttctgacctgagccactgggtgcaaatggtgtctttcgtttctgattggtggtcgagccactacaaccactaccataactagaggtaggaggagtatgggctctaccaacaacctgagtccctcgagactcctaggtgcactcaactgtacccttagcttgcagtgcctttcctaccatgttagaataggtggtgttgtcgtcagtagtaatcataagatcatgttttatctttgaatttaatccatccatgtacttttctttcttgctgaaattggttggcacaattcccgaggccaacctagccaatcaatcaaactgcattgtgtattcagtaacactcatattctccttctggttcagctgggtaaattcatttcttgttccacttctaaccaccgtgttgtaatacttcgcgttaaacaattcttggaactcttcccagctcacagtagtaacatcaagagtcagggacaccatgtcccaccaaaccaggcctagaactggaatgtggcataagccactctatcattgcgggtgacgcccataaaattcaaaattcttgtaataaccatcagccattgctcgactttcatcaaatcgagacctcccaaaaaaactataggtgcctacttacggaacctttcatacagtggttccattcggttcactgcagtaaccaatcctgcttgcacagcaggggtaggagccacctacatttctggagtaggcattgtaagagcaccctgatgcctcaagcatctgttttcctcttcttattttttgattctagcttccattgcaacaaccgatttttctattcctgggcaacctgcagcgggttaacatgtcctcgactacatgccctgcctcagccacgaacatctgggggaatcagagctccgtgacgcccactagatctgattgagttaccctgactcctagaatttcgcctagcatccattctattataacagcctgtgaaaccaagagctagcatggtcagatccgcgagcaagaaaacttactaattatcgcttattttggaaatttaaaatatgagcctatttagttatcatactactagcatgcttcctatcaggcttttactatagcatactagtcagataagctactaaagttataaatgcttactgaattgtgagtcgagctgattgttgatgatgattttacatgccgtgacgatcttcggaagacaacctggcggctctgctaccaaaatgtaacaccctactagtttaggcgtattaacgtgatttttaacttaattgtgcagcttgttgctaatcaacaagtttattgaaaatcgtaaataattaaaactttatttacctatctataaatatcgaaataacttacttatgttaaagcaggatcccatttacaaaatatttacaacagtttcacagtacatattacaaaagttgtcgcctagcgactatacacccacatgtctcaaagattgtacgctccaggcctaaccgccccgacatgttcaatcttaatctgctcgctttcatggctgctcaaccttagccttgcctttacctacacatgcaaacaatatttatgagtcgaaaaactcagtaagagaagcataaataaataaatagcaataatttggattataatcaggcacccatacacccaactataaccctagtcccgtgtccaacacgctgctgagtcaagaacgttcgtacgattgtactattgaccataatatcagcctatactctgtatactagtcgtaccgatatgatactgtcaagtagcacttaagccaacatacatttatcgatatccaatataacactaaatatactgataccgctattataatgtaatctaacaggcttaactaacatgcatgctaaacatgtaagtgcatatgtatatcattatactttcttacctcgttaccgaattcacgtgtgccagccaacctgagtggaacagctgcttgacgatttatggacccttaaataacattattcgtaaaattagttagtgacatggtaaagcacttttcagggactgaaaattgaaactaaaagtttctctattgatggacaacagggcaataccttaaatattgcaaaaatgggaaaaactagggttccctaaaatgccccaaccggtagaccgggtccccaaccagaattccagttctgtggggtttcctagggaccgactggtcgaccggttcctacaagcccccctgaatcgaaattccggttcagtgcaggaatcacacaaaatcatcccacaatctcaaattgaccccaaatcacaccaaaccttccaaacctgcttattaaaccataatgaacataatccatgcaataaaacacctaaacacaactagaatcacaaaccaccattgtagattaaagcttgagttcataaactcaaacctttctctaccaccaaagaaacacataaaacctgcttaattcaagataaataactttaatccaacctcagaagggaaa

SEQ ID NO: 222285 - DNA, 2257 bp, Cannabis indica
tgataccgtttggggtgaattgtgttagacacatcctgaaataagcagcaatgtcacgaaagtacaaatgaagaggtagtacgacaccttgatcaatatagcattctgaccacaccatccatttgagagccaacttatgcactagttgatttggggaaggtatcttacaacaaataccctttactagcccagcagcctgcattctcttaaaactgtccttcgagagagctgaaacaggggaaatccacctatccctttgtgaacttgcatcaagaatctcagacttaagggattcgttctagacatggtctaagccgagtacggaaggctcactgggcttgttcaacagtttatcgtcgttatcataacaacctaaaggataattggttaggatgacgcaaggcttgtgtctcttcctcctaacctgtacatcctccacacaattgaatttagccccagaactcccattctcatgacccgttccaaatctaatatcagcatgaggcaggggaaccccttctacaatcttgatgtgaccccgtatagctattctggtcgtgtgggggtcgtacaaggtcaccctgtcatttctctgttttgtatcaaccataacaacaaagaaaacaagggacctacacaattgtcacctccccaattcaacaccaggcactaccttcacggaagaaataagagaaggtgagcaacctgataaagctacaaatatattcaagtcaatgatacctaagggtatcttccaagtaaaacaaagggtacaaggtcgaccaacgatcaagtaccgtcataggtacaattaccaagacatacagtaagttctaagttgcacaattaaatataatggactcatcatctagccttatagagtttctaagggaaactacgaataaggccacagttgtatatgcctttaaggccgctacaaaacccgagctgaggataaaagagggagaaaactggctacccgcttggagccttgaccttggccggctagggttcaaggtcctagtggccggcgagaccccaagtcccagcttagtggccaactaggaaccctagttccaggaaaaggtcggccagcctagggacacggtccctatggccggccagaccccatgaaagccacccatgaccggtcaggcttcaaacaaagcctccttggccagccagcatgtgcatggatcaaaacacatgatttttcaagaactcaaacatgttctttgtgttcttcgtgactcaaacagccaagaatcacaataaaggtaagattcagatctttttgtctagaaatcacacattatctatcctaaggctatcatgcggataaaaatatcaaatggactacaatctaatgtaagaatcaaagcatgttcaaaacaagaaataatagtcatgcatttatggcaaaattaatcaaatcaagtgaaaaagcatggatggaaagcttacctagtataatatttcgatgaagatgaaggtgggaagcttagatcgttgaaatatcacaaaaatctcgtggagaatgaagcttcaaggttcgaccacctagagagaaggaagagcttttctaagagcaaatttctagtgagagaaagtaaaagtgaaaaacgaaaggaaaaaaaggtttccccccaaaactcacttatgtaatacatgtgggccccctttttctcacttacttcaccaaccgccataaaggcacttaaagtagttatttctccactgcaatgagatcaaatagtcaagataaattcaaaaaatgcatcactttttattcaacaaaggtaacaatagtcacgttgccaatttagttggcaaagtccctatttgaatagatgtccgcataggcacttggggggaaatgttatccaaatttttatccccatgacatgatatgcttatgtagacaaaacaagtgtcatatgacagtacagctcaccgaaaggaagcccaagtcagcacctaaacaaagacattagcactcaaatgaggatcaagtgacagaccagctccctctcagaagctggccagccacccctggccggccagcctaaggacagcaccatggccgactagcctggccaccacaagggcctagtcagccaaggagtactctacaggtctcactagacactcttacacatggctaggagcaatgggatgggaattgggccccaaaagctcaacagaatggctgaataatatctagaatgaagggcatttcggtcttttgtaaatatct

SEQ ID NO: 222286 - DNA, 1611 bp, Cannabis indica
gctatgatggctgcttcatttgtggcactagtagaggtacctttgttaagtttgttaagcctttcgaatttcgatttcccaaacgactcacttcttaatgagtaaactgatcaatccttgtttatttttcttatgttaacagtccactggtgtattcattgccgtgtcaaggtatgccagcgcgacaccattgccaccttctatacttagccgtggaattggttggcaggtaaagaaactcaaaaatcttgattacttgcactacaattaatctttgatatacaataaatgaattctttcttgttttagggggttggcattctcttctcgggtatttttggaactggaaatggcccatcagtatcagtgtatgattcttcccaccttctcataaccatacatttatttttcgatttgcttaatcacaatcttccccggctagcatgaggaacatttttttgatactcttgcagtgaaaatgccggtctattagcattgacacgagttggtagccgaagagttgttcagatttcagctggattcatgatcttcttttccatactcggtaactgattattttccaaatcttaacttctcttccgaacaacaattatgccactaaaccattctggttcaacaggaaaatttggagcagttttcgcctcaattccagcacctataattgcagcattatactgtcttttctttgcctatgtcggtaagagttacgaaacaattgagcatatttctgtcacacctcgaaattatgttgtttaacgaatataattcttcatgactctgaatgagcaggctctgcaggtctcagcttacttcaattttgcaatctaaacagtttcagaaccaaatttattcttggtttctcattcttcatgggcttgtcaatccctcaatacttcaacgagtacaccgtcgtaaacggttatggtccagtccacaccggagcaagatgggtatcaaccaaaacctcttatctaacattctttaaaaaaaaaaaccaactccatgtttcatatctctttacacttgtccattttttcttttccagttcaacgacatgatcaacgtgcccttctcatccgaaccctttgtcgcgggcgttttggcaatgttcctcgacgtcaccttgcataaaaaagacaatgcaacaagaaaagaccgaggaatgcattggtgggacagattccgatcattcaaaaccgacacaagaagtgaagagttttactcattgcctttcaatctcaacaagttcttcccctcggtgtgataaatcatttaagtacgacgacaaatgtaagtttttcgatgtcgtttaggacatgttccttcgaatatatcactcattttgagtctctttgacactgaaattgaaaatggttcacaaatcattttgtcaactcccagagaaaaatgtcattagtacttagtagtataaaggagaatggtttttgtttttttttaacacatagttttttaatattattattgctttattttattttttggtttaaatattataaagtaaaatactttgagattgttgtatcatctttgagtcttgaccaattgatattttattgcattgtaacagct

SEQ ID NO: 222287 - DNA, 2289 bp, Cannabis indica
aatagcaaatggttttatagtacaaatgtgactaaaagatgatatataaataataaattgcaacagtactcagaaaactacacaccaggagcaactgctaatgaaaatttttacccccatggcatgtcatgtattattgttagcccctatagctattattttcatctatattctccatctttatattattagtggttctgaattttattagtcaacacctcaattataatttacgttagattgtattccatcctctacatgattcttccaaaattggaagaacaaaagattgtgacataaacagtgatttcaaatctctaccctgatctatataattctttttgaaccttttcaagacactctttcctcacactttctctcctaaaaaaagaagatgtttattattatggacgaaaatataacccaatcattccatccacgtaaaactcagagtttacaaaccttttcttggcgccatttgttttcccactgagcatccaaaatcttatcagcaagttctctttgggcattaagaaggatggtcatctcataaaacttttcaggatctttaaggtcctccttgctccacgaagaggcattcaaaggaaggtccagctcctgcgactgttatacaatcagtttagaaggcttatgcatcttttccctgacatgtcatatataatataaatcgaatgtattgcataagacccttgtatctatcaaagctagaaatatgtagataagaacaacaaacacctatccaaagggataaaaaaaattgataaacaattagaaatgcatgcagaagagggacttatttatgtactgaaaaaggaaaagaatacgaacactgaaaatttagggctcaaactacagttagcattttacgagacagttttttctaattaaattatatttttttagccatctaaaaactcttacgtaatcaccaagtacaacgtatcactaaccacaacccccaaaagaaaaaatagcagagtattcatgacgtttatttttaacaaaattgacgggctaaagcctgtggaaatgttgaaaacaagacatataagaacaataacaaatccaggaaatgcataccccccaattttttggcctttgtggaggtatgaaattcattacttctgcttcaagtgtcttcttggctttgtagtatggaacatttttcactataacaggatcctccctggcacgagcaggatctatggagattaatgcctgtcataaattaatgactttgttacttatttatttccagaaaaactgaatatcaaattcatctgcacaaagacagaggagttgcaatggcagggaaaatttacacaacatcttaatgctgaattagcattccttaccaaaagctttttattcaacttaagcatttgaacataacagttttcacctacaaagtatctataaaatcatatggtctgcatgagaagcacactctatcgactgcaaaaaattcacacattgtactgatgcactgcatagttcttacctcctgcaagtactcccatccaggctttctcttagccacaacatcacgaagttgatcatatcgcatggattcctgattcacaatatgatatggttaaagcactatggaaaatacaagtacaaacagcactatcattgtttgattaattaaataaataaaagtatactaaaataattttcatttggacgaagtaacaattttgaactagaaagggaggaggcataataaaccagcaacaccttgtattgccaccaaattttcttcttgatattctcatcatactcaaaaccacccacgacctcaggcaaggtaaacaaccaaaatgcagcaatactgggatctttcatgctatgaactatatgctgaaacaaaggaaagaaaaaaaaaatattacataaaaacaagagatttgatcttaaccaaagtagtaagaaaaaggaaacagaacaagctctgatacttgcctcaaagggatagtccatctttttcataacattgtaggctttccaaggaggttccattatctgcagaaaatataaaattagtcaggatgactgaaatacaactgttaagtgcaaacagataaagttgaatggatgatataagacactaggtccaactccaataaatgaactgtcagtgcctacaatttttagctaatagtataaccatgaaatgcagaaggttatcttaaattcttactaaccaatagtataaccatgcaattctgaatgaagcataaactatatttgatttagttgcatttg

SEQ ID NO: 222288 - DNA, 1497 bp, Cannabis indica
tattgtatcaagcgcttggcaaattcaagcatggagactaggtgacctattccaggagatgggatgaacaacaactctgttcttttcatttttagcttcttgatgatgatgatgatgtacgactacgtttcttcttcttctttttcctatctttttgttacttctgaattgattttataatgtcttatctcgcccattaatatgggaacatgttctgtttttcattatataccttggatgaaatccaatggctgaaaacaaaactacattttctgattggtaatgaacgtatactgctacgtgggttaggttcaaacatgtgtatgtgtgtagactgtggctattttacagagaaaacaaaaacaataatactcaaacagcatcactcttcatattttgtacaactaaacaatatttgtttatgcatgtgaccccatcccgttctctgatgtatgaattgaatttaagggctttcattgttattattatcatctcacctaaccaaagtatagcctgtcaactgccaaccattaaaatattgacattacatcaaaccaataattgattgctctcgaattatcatcaaactaattaactttcagtctgtctatgtggggaaataatacaatgtttaagaacaatatcaactgcaagcatcaagggttcagatagttgatagcataattcactatgcgatacaaaaccaaatgcaaaggttccttttctgaataagaaattactttattcccatttcactttgacaacaacaaacttacctgaccttagaatgaaattagaataggtcgaaattttatagtagactaatactaattgcttccaatgataccatcgatcaattttccaatagcagtaaatgatgatccgccgtcctcaacagcttttctggccaattgcagtaaatgtcattttgcaacgcgacatgtcagagaaagtgttaggcactggtacctaatagcaatgttctatataaagtgattaaaaaagcgtaaattcattaattactcaaaactttatgctaatagtcagtggaatttacctaaattcccttgtttaacagctatatcaatgtcatagtctggggccaaactaggattagatgtcaacggggcaaaaatactctttgattttcttcaagatcttaaattatttaatccacataaaatatcacatttttcatactactaccaaataaataaaaaacattatcatctcattattatgatttacattccaaaatgtatcagagaatatataatataataatgataaaattttaaattttgagataaaataatttcacaagagtcgaggactacataattttgatacccgagtagtgttctaaaatgacgataaaactttcattaagtaaaaataatcaacttaataaattaatggatcattttaaaaactagttaatatacctgtttttcgcgcgactaatttaattttttttagtattataataaatactta

SEQ ID NO: 222289 - DNA, 1120 bp, Cannabis indica
ttcaaagtttatgtcccacgattacactagatttacactgacgtgattatcaatgataaagtttacttataccttggataagtgttatgtcctctctagggtattggtaaagtatgctagtatcggatgtatggagtatacattggactagaccaatattaaacttggataagatatccagagcatgaaactcaggatgataaggctctagaacatgcctttatctattccgtatatactctctggcaacataataaatcggtaagagacctcctcgatgctgaagataaggaagagatttttcccaagattttggcactagaggaggtagacaaagctaagggtgcatctcaggaatctggagcagtcaatcccagaactaccgttcctgttggtgagaatatggatggctctactcttccagcttctgaagtgcctatctcaaccgagtctgcgatcccgaaggccctatttgaggttcaaatgcaagatgtgcaatcattgaataaatctgcttagccttgattactcttgcctatgacattatctttattttcttttctttttaaggggacaagggtcccccttttgagtgtgcagagacaatatattacacccttaccgcaggattttcaagtactcggtactatcttattaattccttagatttctacgttttatatcatagaatttgctaagttttaatgtttccagcctcgtgaggttctggttctaaaggcctgaacctttagttttttcgattaaattcttagacttaaatatttttcttgtgaaaatgttcttacagaaaggtttatttgaaacctcgaataactaattaacctgggcaaattaattatttgagaattgaaccttttcttggcatttatcacttattctcaagattttttgaacttaactctttaattaacctgaatcaattaatttaaataacctgaatactatggccgcgttaacctgagttaaccatgaagcctaaacttctattttaagttaacctaaattgactgtttaatgtacgaaacttgattcaaagcataataaggtagtgttgggttttatgccctaaataaaactctttacaatctgattagttatc

SEQ ID NO: 222290 - DNA, 2888 bp, Cannabis indica
tttctttgaacgcccaaaacattgagggactccaagatacttactgatgaaaggcctcggttcaagtcctaaggaatcaaaaaaataagtagaaatattcgtaggagtattgggcgaaaaaagaatggaagatttagtgtagttcactttttgaccagtggctaagtgataagctttaatggcctccttaagggcattacaagatgagggggacgctaccgtgaacagaagagtgtcatctacgaaaagcaaatgagaaataggaggggcattgcgagccactgagatgcccttgaaagacccattcagttcctgaagacgaagagcagcagtaaggcctgagcagagaaggaaaagatatggcgataagggatccccttgccgaataccacgagaaggatgtatggagcttttgatgtgaccattaatactaaaacggattttagcagaggatatgcattgatggatcaaactaatgaattttataggaaacttaaacttattaagaatggccaaaaggaaatcccactccactcgatcaaacgccttttccatatctagtttgaggcccacccagccaaacttgccatgtttgcgatggtttatagcatggacaacttcctgagcaataaaaatattgtcaaagataatccactcagacaaaaaggcactttggaaaggggaaataaggcttcccagaacactcttaaggcggttggaaagccttttagagatgattttatagattgttgagcagaggctgataggacgaaagtccttcaaagaagaggcattggatttcttagggatcaggacaatgagagtctcgttgacagaggaaaaatcagccacatgattaagagtgtcgagaatcacagctgtgagatcagtccccataatatgctagttcttttgataaaaggttggattaagtccatcaatcccaggagccttatcactcgaaagttggaataaggcttgcctgacttcatgagcttcaaaaggtgagttaagaaactgaatttgttgactgtccaaagatttattaatggcagaaaggaggtactgagtagcttcgctattagactcctgagacttaaaaagatcattgaaataggaagacacctccctagagatatcatcaacagaagtgaccactcttccatcatcacatttaagctttcgaataaaattagtctttctcctagcagtatctttactgtgaaagtacttagtatttttatcaccagcctgcagccaatgaattttagaacgctgcttccagagaatctcatttttataaagaagggagtccagctgagattgcaaggcagatgcctcatgaatcttatctctggaaaggggcaggttggaatgaatggcattaatagaattttctaaagcattaattctacgagaaagactgttaaaaccagcattccagcttttgatatcatccacacacatttgctgcttaagaaggaaagtgttgagggttaagggagtgtgactagaagggcaacgcttccaactatccttaacagtttcgtaaaaagacggttccgtgagccaaaagttttcgaacaagaatcttttatgtctcagatacatcatactagcatcattaagagttatcttgatagctctatgatccgagccataaaaaccaagatgaaaaagagtggtgttggggaaggtatgctgccatttgtgattaactacaccccaatcaagcctctcacagacactaccatgtttccaagtatacttggaaccaatcggattaagaggcaaaagggaaaatttgctaacaaaattttggaaatgagtcatagcataagaagggggattagagctactagacttgtcgtttaaagataagtaatcattaaagtctcctatgatcagccaaggaagtaaaggagcattatcaaaaagtctttctaacaacaaccaagagtgtattttgtcaaaactataaggggagccataatagcatgaaacatgagtagtaatattgtcattaaaagttataatacaatcaacatgattagtagaggaattcaaaatattcacaaatacatccgaagtccacagaatcaaaagaccccccccccccaaaccatattctaggcacctcaaacacattatcaaaaggaagactatgacataaactatttccacggccagcagcagctttagtctccatgatgaagagaaaatttggtttgtgcttcttaacaaaaagggagaggtttctgaatgcccgagagctccccaaacctcgggcattccaactcatgagactcatttttttgggcggggttgccctgcaacacccgcctgttccaaagagagattaatggcagtagaaacatcggcaatagtaggaccagctcgagcacgcttgagaatattcctgagagagtcaccaaccacaaccgtttgagggaggaaagcagtccttttagccccagcaacagctttccccttagctttatcagtggtccttggaataacaccctccacagcagtgccttcactggccatgaccgtagcatgttgggtagttgtgaagggaaggtcacaaataacagcagagtgaaaactctcatggctcaagggtgaactctcatgagacagactaatagagctttggatatggtcaactcccaaagatcccagggtagtagcattaccacgagaagcagcacctgaagagccaaagccaatatcttcagtggtaaggaattggctcacagcagctgcaagggactggtcaatattttcatgttgagcaggaggttcatccaaaggtaaagaatttgaaagatcaaacgggtttcttttaaaagtcgatttggcaggggctttgagaggtattttat

SEQ ID NO: 222291 - DNA, 3595 bp, Cannabis indica
ttgtcattaatttagttttagtcacaacaaatattgtgactaaaaacacatttagttacaacaaattataatttttgtaactaatacttttagccacagatcttttagttacaacataagaatgatattttataattaatcgcaatttttttacttttagtcacaaattttgttgtgattaaaactaaaagtaaaaaattttgtagtgtcatttataataatagagtatataggcggaggaataatctctaaccaagaggcgcaatttttatctaactctagagcataccgagctaagccttgagtagccatattggcactacgtttgacatgagtaatagtaactctagagaaaaagaataaaagactagaaatatctacaattaaatcatgaaaagatgaaattttaaaagaaggtgcattcaaagcatattcgaaaccaccaacacatccgtctttatttgtgcaattggcaactgcaactggagaacctaaattcaactgtgaaagatggccttagcccccatctcattcgattcaaagttgtcagtggtcgactttgaaagagcagccactacaaagccacgagcatcttgaataatagcaccaataccaattatattcttgttagcatctaaagcagcatctacattcaatttatagtctcccaaatttggtggctgccacgacaattgagatgttgacggtggagtaatattcggagttgcaatagcagcagattgaacttgagttcggaaaatttagaatgttgtaaataaattgcagcaaagtcagcaagctgtctagctgacttagcatgtcctccatgtattacatagttcatctcagtccaagtacacaaaagagtacatatggtgagttccatttcaacattggtgtaaaaagtaaaaagatgaacaagatagtttagaatgattccaatctaaaactacgccaaacggaacgagcatacttacatccaaatatggcatgtcctattgactcccaagccacatgatagaccgagcatgttgcataagtaataaccctccttcttactagatttgtagccatgggcagagcatcatgaacaatacgccaaacaaaaagtttaggtttttttttggcaaattgagagactagaaatagttccaccatgatgaagatgaagtagatgagatttcaacatccgcaagtgtagtgacccgagttgtgtgatgatgataattaagaatatccatattgagaaagaaactcaaaggcaaagtcagaatcctttccacattcaatgggaaaaaaattgttgcaacagagaaatattccatcaacactcctctacaatcaaatttgctgccacaccattaacaagcccaacataacaaagtgggaggaaagaagtgtggcccaaaattcatggatcgaaaccacacctaactgatctcccttccccaattttccactttgaaccaattttcaacaactcacgaccccacataatccctttccaagtcatagatggagagtgcccaacttgctaagaagagagttcaaattttacaatattctccaagcttgctttgccaataaagcttgattaaaatgcacaaaagatcagaattccataccacttgaagcttaagttttacaaagtaaattctatttgcgccaatgtatcttagttccaatttcattggatccccacaaaaaattagatatcatggattcaagttgtttacaaaatgtcgcaggaaattggaagcaactcatggtatatgaatagattgcaccatagcttttaaaagcacttccttaccccctgcatcttctaactccaagtatgcataagacaccaaatcctttctttgatcccaataaaaattttatttttaaacctttcggagtagatgacaagccaaggtacgtctcatgatactcacatattggcattgcaagctgtctatggaagaatattggtgtcgcttaagttgtgttgggtgcaaaagacataataaatttattaggattgagaacttgacctgaagcacaatggtaagtatctaccaccgtcttaatggcaagacgagttttcatttgtttgatagaatagaaggttgtcacttgcaaagaacaagtgagaaatcgaagcaacccatctagtaatagataaaccgtaaaccattcaggtttccagcatgctcctcatgttggagaagccgtgagaacccctcaaagtaaataaagaacaaataaggagagagatggcagctttgacgagaccccttgtgggaagcaaagaaccaataatctttcaaaagaaaagagaaactatttgttgtcaagtaagccaaaattaatgaatttcaattttcatcaaactccatttttctcataactattttgagaaaaccccattccgcacgatcaaaagatttgctcatatctaactttaaagttgcaatgccattcgggtccttatctgtatgataaccatactagtcatcatttataggtagtgatggaaattcgacccgcgggaacgggcacccacagatacccactctaaatggggtgggattacccgccttaatgggtaatcgggtgggggtagggtgtaattttatgtacctaatcaaatttatacttttgcaaattagattagattgaattttagttattatgcggattggattggattcaaaatataaaatatgtacttagtgcagatcgaatgcactatgaaaaaaatagtatgaattggatcgaatgaacactcctactacctgttacccgaattgaatatagtcaataagccatcgaaggttcctctagctatcttggctacccaaaccaaattgatcaatgccaaaccaattcagcaagtattgatacagtggttcttgagctcacttgaggatgctacttaggaagatttgatatctcaccttgaggagaaggtggttattgaggatgggagtaatgttagcaaatctcatgagaaagactcaattccaattcacccaaagttggtggaccaaaagataagaaagtagttagagaattcagctcaacaccaagagggggaagggctattcacccaaaacaatgttgttattcatcatgccaagtcctatcgatctaatctaaaaagaaatcaaattatatatatgaaccaataaccatgtcaagaaaggcaagataggataactatacttcatgctctaacaacttctctatacatgaataacattcacatgaacatcacaaacagatcagaaaaaataaaaaactgtaaagaatttaagtaatgatttggtataattaaaaatgataattaacattcaaaataacatataaagtagtcaagaagttgtaaagagaacactagaacagtggcaataatatttgaagttttgtactaatgtaggcatacacagattctaattaactttatccataaaaaaccaaaaaatttggatacaagtaaaagaaaaactcttatggttaaaaagtattatgagaagtgaagagtccctaaaacctagacctctttctttcttttctattgagggattacagttacatacaaactacagca

SEQ ID NO: 222292 - DNA, 1957 bp, Cannabis indica
ccacaccattacgtcgatgagtctttggaactgaagtctcaagcttgattccatggagtctataatagtattaaaatggaccctatattgactgacattatctgctcgaacacacttcaactttcttccagtttctctttcaattttggtatgaagttctttgaaagcatagagcacctggctttagattcaaaaaaataaccaaataaagtgcacctccaagagttctagtttgcataatccagacatcagtatgaaccaaattaataacattagatctcctagatggtggatgtgtatgaaaagaaactctatgtatttttcttgctaagcaatggtcacaagttttaagaagtgtaccttgcaaatttagtaagaattactttctagcaagattttaaagtcttttctcgttgatatggccaagcctctggtgccaaagatcaatgcttgcatctttttaaactgcattaatctctcctttgtgtagcttagcttccatgacataaagagtatttactttgttttctctcgccattacaagagaaccattggtgagtttccatttactttcaccaaaccagtttataaacccatcatcgtcaagtcttctagtagatatcaagttaaggcaaatatttgtaacatgcctaacatatttgagaatcaatttgctaccaacactggtttctaagcaaatatctccaatacccacaatctttgatgcattctgacattgccaaaatcaccagtagtataagaagtgaaaaaattactatgagcagtaacatgcaatgaagcaccagaatcaatcactcaactgcaatcttgggttgcaagactaacacaccattatcacatacaatgacaacatcacttttagtggcaactgtattagtctctttctcatttttcttccattgattttgctctctttttaatattcgacaatcctttattaaatggcatggcttgttacaatgttaacacttgatatattttcgagacttggatcttcttctagaaccatgatgatttctagcttgacttcattctcacctttcatgctttttgaaaacaagaaccccaaaagaaaaagaagattcaccttatactttccttcatgtctctttattaagaaaaatatctttaaccaaatccatagtcaaagtcccttcttgcgtggaattagaagttatcacaaaagtttcccaactgtcaggtagagaactgaggagtaacggcgcttgcatcttatcgtccatattcatcttcatgggaactatctactttgcaagactttgaaattgacttgtatgctcaaccatattaccacgatccttgtacttaaaatttacaagtcttctaagtagaaaaattttattgctagccattcttttcgcaaagagattttctagctttttccaaacaatatcatctttggtttcattagagatatgctcatgacgatttatatccatccatcgtctaatgtaggcaatgaattttccatgttgaacttctcattcctcgtcatctaatttagatagtttctcactacctttaataggcttgtataaatctttataatagagcaaatcttccattaattgcttccaagcagaataatttgataagttcaatttcatctcattctatctaattcatccatttttcaacacacaagaatataacaccaaatataattcggctctgataccatttattagaaaatcctattgcaattcatcacaatactttctctctttgtatgtcaaaaatggaacacttattaaatacccaaataagcaatattaaatacacaaccaaagcactagaaaatacacaaagcatgcaccacaagcactagaaaatacaaaaatcaagcataaaagtgagacaccaagatttttacgtggaaactcaatgtaggaaaaaactgttggaatatgtttta

SEQ ID NO: 222293 - DNA, 4976 bp, Cannabis indica
  modified_base (4912)..(4912): a, c, t, g, unknown or other
atattctgttaaaccaaaaaataccgttatatagaaacttttaatatataaagatataattattatattatattaatacccgatataaagattttactgcactaaacaaacattttagtccaagccaatctaattttagtacagtccaatccaattgtaacaatacaacgcactccaatacaataccaaacaaccttttaccgatttacagtgaaattttttcttcccatttgaaagaaacaaaattacactgcactcgtggtggtgactagtgactactgtatctctataagagacatcatcatgtgaaagtttgtcgtttctctgctgctgggaatacaccacgcgctaagctctagagtagcggctgttctccacttttctttttctcactcactccaatcacttctacactccaaaatggtcttatttataattaattaactttaatgtcctcataagcaaaaccacaaaaataaaacaacactaacaaattacaaaaatttgaaaaaggcatagtacacgtggagatcaaacgtctcttagtctgacaacgctttaaagaaagaaatgaaaaatattaccaaactcatgacacgtggcttcaccttaaccgcttatgtctttattaaattattttttttccaactttaattaaaaaaataattactgtcgtctcgtcgttgctatttcattttctgtttggtggaggaactaagactattacgaattttccattgctttcccaacaattgacggcctaatctcacttatgagtttccactgtatatgtttatgtttataatataaaatattatatatatatatatattaattcattgtcttaagaaagaaaaaagggaaaagagaaaaacgtcgtagcgggtggcgcacgatagtcgtaaagagttgaggtggtgtcgtataaaccttcataaacaaaactgtagtacttttaatacagtaccttttctccagaaatttcttagctcacctcctccaagatctggtccatgatcggcgctgtaacaagaggtcagcatattagaattcgtttttaatgtcttctcctttttgttgattgattcatatatattattgctcatgttatcgtcttgttttttggattttcatttcgaaatctttttgaactaaaatagatagaagaatataagtagtgttgcatttgatttgaaatcgttagtgagctggttgctgatcctgtcttttttttttggagagagagagtatttggagttagctactgtcacccaagaacaccgactctcgccattgaaacttgtttattgtgtatttagagatctagtaacgttgggtatattaccgaacttagatatttgagatgaaacaaaagtgatgctgattttatggccataatatctgaaacaaagccagaataatggagaaatcagtttaaaattaattagcagattttttttcttctcaatttaataaactaacattacttgatattttatacttgctagtacagtgtaattactatgatgttggaaggcaggtgatcttattgtaacttggtgatatctttgggttttggaaatgggaaattgattttttttttattctttaatgggtgcagtaaaatagtgaaacattgaggtttccaaatctgggagtgagttaggcttgattgtggtatgtgggcacgccaacgtgaaacttcctcgatgtacaagcgtacgacgtcgagagattattctgattctcttgatgtggaatcaagagattatatgaatactatggaggaagctaaatctggtatatgcatccctttgatcatatagagttcatttattgttggtttacatagtgatcatctggttagccatggatttgcattagctttatttaatcattatgtcatttcaactgctatttctcaattgctccatttttaactattcctggtttgagatttcttcgtggatttgaatttgtttttcctttcagcttttatttgttctcatttgattaagaatagtattcatgattgagacactgctatttcttttagctcttttacaggacgatgtgggtatagaaacttcaaatccttcatggaagctttcttttccacatgttgtggtggcaaccatatcttcattcttatttggctatcatcttgggttggtttcttcgttttgaacttgcacttcccttcatttataagaaatggattatattgactcttttcatgcttatattgcgcagagtagtaaatgaaccacttgaaagcatctctgttgaccttggtttcagtggtaatacattggcagaaggtgagctacattattcatccctccttccgtaccccccccccccccccccctccctcttcctcctcctcccagacgttctagctaactttgcttcctcttctataacgttttattcttcatatacaggtctggtggtgagtacatgtttgggcggagcctttattggatctttgttcagtggttggattgctgatggacttggacgtcgtagagcatttcagctgtgtgcactgcctatgattatgggcgctgctatgaggtgatgagaatcatgtaatttttccataaagcaattgccatcacaatcgtttctttcttaaaaaaagacattctttgaaagaccatagaggtttgagtttgagattggctttgagctattcatgtacctttctgaaactatttctttatgatatgtatgtgcatttgtcatcaccccagctcatgaagtttgtggcaggtatattctttgatactagctatgatatctcttcatttctcctttcctcgctggaaagaaatgcagtagtttttggcttttcacctgcttcactgactgaaaatttgacacactaggtagtgaacaaattgatcagtcagtgaaattatcctattacatttaaaaagggaaaaaatcattattaataagctggttttgcacgatcaacataaattttagtttgccaagttttaaggttttttaaggtgtttgcatcaattaaattcgttgttgccttttcatatgtaaacacaagttcactttaaaattattataaatatgggaacattgttcccaataattatattactctctttcatcactttcttataattgatacacctccattgaaaacttccattctgaagataaatcctacattttcagcgcaacaagcaaaacccttgccggcatgcttttaggaaggttatttgttggggctggtatgggtttgggacctcctgttgctgctctctatgtaactgaggtacaaatactattgtatctttctcgtagatgctagcatgtgttttcccactatctcaaagatgtagttttatatgatccaatttttacccgtagttcactctcttgttttatcgctataactctattcacagcttaggttcctgttactgtttattgttggcaggtttcaccttcttttgtaaggggcacttatggaagcttaatccaaattgctacatgccttgggatcatgggggctctttttgttggaatccctgtcaaagatgttgctggctggtaagaatgaactccagattgacctgtctcttgttttagcttttatctttaatcgtttgaaggtacattatagtttctattctcaggtggcgcgtttgtttttggttatctacaattccagcaataatacttgctattgccatgattttctgtgcggagagtccatcttggctttacaaggtatgcatgcactcatctttgcatcctgtggtgtctaattcagtaaatctatgccctattttttggtagagaagatcacagctttatgttggtctgattggcaaaaataacagtcttcagattttatttatgatgtttatcttttcattaagagagttagttccatttggttatgtattcatttcatttctctcttgaacaatgataaattcctgggattttgcttactttggactgagaccatcttccttagtttgtcgtagcttcttacctattcttaaacatcacatacatgaaggcgtcttaattatctactttgcccccataataaagaaagcacatgaaactattttaaaaaaaagtattttgcataatctgaagtttatgctagtggctctggttctattgaataagttgacattctcactatcatttgacagcaaggaagaactgctgaagcggaagttgaatttgagaggctttttggagcatcacatgtaaatgtagcaatgacagagttggccaagttggacaggggagatgaggcagagtctgttaagatttcagaattgctatctggtccccattttagaggtagataagctactgtcatgtatgattgataatatatgtacagttttttttttctatgaaatttataatactatacttccattcatctctattattttaaaaaatatgtcctatttcttgttttcaaaacctataatgctacactttcttccattcatctgttttctttgttccttctccaaaaatctttgttattcacgcattccttttgcagttgtttttattgggtcaaccctatttgctttacaacagctatctggtataaatgctgtgttttatttctcttcggctgtttttaagaaggcgggagtatcatcaagccttgcaaacgtcttcatagggattgtgaacttaacaggtataatttgcttcttgatataaggtttacatgtgttgaattgttttaatccgtctttttaaaaattagtttctacttattttcaggatcagtcattgcaacagcattgatggataagctaggaaggaaaattcttcttcaatggagctctttgggatggtaatttctctgtaatttgtttttataaaatctatatanatttttttctctcagtgtgtttgtattgtattgtgctaataatgtatatccataatatttacgt

SEQ ID NO: 222294 - DNA, 1229 bp, Cannabis indica
tatacacagataaaatatatatacaaagatatatacatttaaataatttatatatataatacacaaaaaatatattacacttcaaaaatatgcatatacaaaagttaatactattatcatttaatttttttcccacaaattttttcccagacaaactagatctaaagaaagatgaacgcaactcacccaaccgccaaatcaataatcataaaaaattaatacaaagccgcacagaaaaattagatctaaagaaacacatgaatgcgttaccaaatcacaaacaagccaaaaaaataaatcaaaaacaaataaaaagtcgcacagaaaaatgcatcaaaaataaaaggaatagaggaagaagggttttggtccatacctgtttggagtagccgcacgcaaaaagaagggtctgatggtcgcttatgagaggaaaagggggtctgatggtcgaaaatgaagaaatgaagaaggaggtattagggttagggatttgtagaggaaaaagggaaaatgggagttgagggtctgttggggtatatatagaccaattagcggcagtaactgttttttcttaattattattagcgacggggtctgccgctaataatgttcgaactgaatgggcgggatttttcccgcccacttattagaggtagggtattagcggcggattttgtctgtcgctaataattctgtcgctaattgggaaatttaatgtagtgtttcccaaaaaatactcgtgttgatttataaggtcattcgtgttgatgtttgagttatcctgcttgtattctagaacactgttggatgatgccaattattaataaatctttgtcctccaccccttttcttacagagaataattatattgatataaacttacttacatataagtgtcgtttggtaacacttttattttttaattttttaatcacaaaatgaaagtaaaatttttgtatttaaaaattttgtttttgaaaaataaaaatgtgttctgtaaccactttgttttttaatttaaaaacagaaaacaaaagtgtattctgtcaaattcatttcatttttattttttgattttatttaagtcgggtctaggtctgaagtcggattcgggttcgggtttgagttcgaggccgggttcagcaccagggccgtgggggaggatttgtgttcgggtctcgtcggagtctaaaatattgattaagaaaagaaatatttaaaaaaatatt

SEQ ID NO: 222295 - DNA, 2013 bp, Cannabis indica
tataaaaaaatacaaacgcatattataaaatatgaaatattaataaaaaataataaaaatattaattaagttataagtctctgtccgggcaaggggtgcattcccgtctccgccccttcccatttatagggagaattctcgccccattaggagcgagtcccgcagggcccatccccatggagaaaatatgcatccctagttacaagtataattgtaatgcaatggcttatttaataactttaggctacctaaaatccaatctattggtattaaacgtataaacaatagccttaagaatgcaatacatactctcataatttatcattagaccgctaattatgtatttattttttatctcaactcttgaattaagttaaattaacgctatattaatgctatatcaacaaattatttaaataaatgaccaaaatgcaattataggaggaaatttataaagtttttatagtttagggagaatttttgcaacagataaaaatttagaggacaaaactctacaataatcgtagttcaatggtaaatactatttattagtagtctccaacaccattataaaataacatcttatgagttattagtagatgggttttttttaatatatggttattaaatttaaatgtgtggaacttaatatcaaattgtaccaacaatgaaatgacgaaatgtatcttagaggtgtgtataaatcgatacaatctaattataattaaccactaaatattggaattcgaatgagaggtgttcgaaaattcactacatctaatatttaatcgaactaattattttcttttagtttgaataagtaattaaattttatgttactatacttaatatatataaatacatgtatagaattcaaattttatttttttattggataatgaatattatgtctaaaatattagttaaatctaaactaattcaatagatatacataaaatatatatagaaataatctataattcaacattcgaatgattgaaattaattggatcgaatcggaaagaaccaataaacatcattgtaccctttaagatttctcacatgtatacaaaaggacaaaaagctagctatctagggaaagagtcaaacacaagaagagggagagaccttaataaccatcccatatatatattatatgccttgcattctttccattcttaattaattaattatatagttaaggtacacgtgaattggaagtatatatatttgtataaatatatatatatataattagaataaaagtacttttttgatggtatataaatatttgtatgtgttttcattgtcttgttttgcatgctttgggttgtttaattcttttattgcatggaacaattatttaagacaacaaccgatcccaacatgcttctttaccacattaccttctcataatacaaaccatattccatatcaaaagcatgttaattaatttttaatatttcaagatttatataggtactattctattatatgtgttgtttaaaaatcaatgtatccataaatttcttttatgttttaatagttatatgttataattatttaagataattttacgaatttttgagaaattaatataatttattatataaattaaagttcaaatattatatttcaaatacgaataaaataaaatacgtatacatacaaaagattagactgtttcaatttcaaaccttattttcgacactaaatttcttaaaaaaattgcactatatcctcactataagcaaaaaaaaatgtgactaattataaatcatcattcatatgttgtaactaaaatgtccgtgactaaatgtactagttataaaaattacaatttgttataactaaatgtatttttagtcacaatacttgttatgactaaaactaaatttgtgataacttgtatataaatactatattttaatcacgagtaattgtcacatttagtcattacaaaagatttatgttgtaactaaaaaattatcactaaagatttttttttttttt

SEQ ID NO: 222296 - DNA, 1311 bp, Cannabis indica
ggtaaatttcatgcaatcatacatcagctacaacagttcttttcactcaaaactctcagttttattaactattttctcggttttgaaatcactcgggaggactatggaatccatctctctcaagcaaagtacacgactgatttactcaaaagaaccaacatgctgcactgcaagccaagcccaacaccaatctctcaaggtgtcaagttaagcattgatgatagcaaaccatttggtcaatcattattttatcgaagtgttattggtggcctgcaatatctcactcttagccgacccgatattgcattcacagtcaacaaattaagtcagtttatgcacaaatcaactcaacgtcagtggaacatttgcaaaaggctattgcgatacctaaagggcacaatcagccaaggcctcatctttaaaccatctcaccaatggtccattgaattttactgacgctgattaggttgactccatcgaagataggaaatccactaccagttactatgtatatctaggtggtaacttgatacatggtgctccaaaaaacaaaacattgttgcaaggtcctctacagaagcggagtaccgcgccttatctcaggcagccacagatatgttgggctacactcattgtttacagaattcaacatgtttcacaaaactcctgctgtaatctggtgtgataatgttcgagcaaaacagctatcctcaaatctggtttttcacagcaggacaaaacacatagaagttgatgttcattacatcagagacatgatcaatggagtgctggtcgaagtatgctttattccaacatctgaacagagagcaaatgtattcactaaggccaccttaataagccaattcaactatttgaaaaaaaagcttgttgtaatctctcccgccacgccaagcttgagggatcctgttaaaaatagtagagcagtgcacacctgattatttcccacattcacagatgtcctcctacattctacatttatctagaattctataatttttaatctttaaggagtcaatcatattgcaagagaatcttttctgttacagatatttttattccttttgtattatatgtgtaccataatatacgctattgtattaatcaattaagaaaattaatacaatcttcattcttttttatatattcctctgtttcttgtttccttaagctttttatctatttataaagtcgcaagagaaatttttatagaagttgtctcacataatggggtggattgattagaagggtaacaaactataagtcgtctcttaagaatgcttttaaaacatg

SEQ ID NO: 222297 - DNA, 1564 bp, Cannabis indica
aaaattggtatttaaataattagatgagataagtggtacataaaaaaaaaaaacaacttttgttttattagttgaaataaggcgacaaaaatctaaccctaaagtcgatcatgtgattttggccctaagagttgatttcagccaaaggtattttatttaagtccacttcatctaacctaaccctaagtgaaagcctatacaaagaaaccgatgagaagggagatctaacctaacgtaattcaaagtcagacaactctcttctcttctttctcatatatttcaaattcaccatgaaaacagtctctcaaatttgttccaaagtttattttagtatcagcccgtactatttaaggtaacactgtgatgattgaaggaggaaaagatccagattcagatcttgattatactttgtgacagaaatgatcaagggttagaattctaaacgaaatgagacaatttattctgttgtagccacaataaggatttactaatctctatatgtgtttatttattgtcttaataatttctatatttaggatgttagattagtcaaaatccaatatacatgagtagtaaataggatcctagtcaaagattttccaacagctaatgacatatgtagcatgctgaaaggaatgccaccaataagagatctaaactagattgtgccaagagtgtcattcttgtttcattgatgtgcttgtgtttgcgtttaactctaccatttttgtcatgatcatgtggacaagagtgttgaaattgaactccattggcaccaagaaatgaaacaaagattctatactcacttcccaatccaattgaatctttttatgggaagacaaaactgtttttcaaccaattttttgaattgaagaaatgttgggaaggcttgagacttcagtgtcattagaaagatccaagtaaaacgaataaagtcatcaacaaacagtatgtaatatcgaaagcgttctttggagcgcacatgagatggtccccacagtctgtgtggaccgattctaatggcataaaggccctgctatgggatagggactattgtagctcatgatttttaacaagtttgtagggatcacaaaatttaatgtattttaatgaactactaaggtttacttttgtgagaactttggcaagaacattaagggctgggtgtcccaacctttgagtaccaaatattaatatcttgactgaaattaacatgaagaacctcattcaaagatttggatggactagaaacaaaaaattctttattataaataaaatttgtacatgagggggaggctgttaaagcaacctctttattacaatgagaggtacaaacagggaaactatgtgaacttggaaccttagttgctagatgacactcaatctagactggtgcagaggaagcaaaggtgttggtcaacacgtatagtctattcttaaccctccctttgagcaaaactttccttgttattgtgtccttaacaaaataacaagtagagtgaaattttaagaaaactgttggaatttattttaccaggatcttagatctactcacaagtatgtt

SEQ ID NO: 222298 - DNA, 1385 bp, Cannabis indica
attgcctttactaatccacattactagagcggtcattacacttgtattacgaccagctacaagatccttgtattacgaccaattacaaggtccttgttgcgagatgttaagtatttatcaaaataacatccaaaaaatgctaaaatacctcagttcatgaaccttgtgatccttatttagatgaggtcacctcacaggttgagtcttgagttttttcaacctgtcctacattgtatttgttgcgagaatttattatttaggtcacatggcatacacttcaactttttcattaaattgtccaaaaaatgggtataactattgtcccctaagttttttgaggtttgaacaaagttgacgtactgtacattgtcttctcattctttttgttacctctccaaacaactctttttataacacgatttgggtgttacttattctaagccatttgtgacaaaaacttacagattctcacgtttatgctcgggcaaaaatcgttgagcaatgaagctttaatcttatgtgtttctcatgattgatgcattgtggagtaggtactacaatggattaagagtatgtactatgaccagaggcataggagtatgtgctatgaccaaaagcatgagagtatgtattacgtcaagatgcatgggagtatatactacaactagatgcatgagattatatactatgaacaaaaacatgggagtatgacctatgactagatgcatcttactaggatctaaatttactaacacatatgtttgattattaattctataatctaacaatgtaaatatgaatttcctaatatgatgaaataaacacgtacaacttatgcaaagaaaattcaacgcttagaataagctactaaacttgcccctaagtcaagtgcagacatactttggcttgacataaagaaaagtaaattttgatatacttacatgtcaaggccataagaagatagctaggacgatcatatgtccatgataaaaggctttaaggctaaataatagtggtgtttgaaaataaagtgtctataggccaaaagcaagaacatgaaaatcttgagcccgaataatgaataaaaaatcttttcacatgcataaggccaaggccctgaaagaaccttataactagagaagaactggatagagctcctataagagccatgtaccaggataaggctaaggtagagttcctagcagtttccaagccaaaaggcagagttctttgtaggtttcaagccatagaaaaaattttgggcaatcgtacccaagactacttgcaagataaagtcattgtacagagctgggtgtaagcgaagtacagtctcaagtgtaacaacatggataaatgttgagtcttaagttgagtattcgactata

SEQ ID NO: 222299 - DNA, 2489 bp, Cannabis indica
attcatttaaaataatatattaatctaaaaaaatgaaaaagaatgtaacaaactatgttgtgaagatcagttttcactgtagagtagagacattaaataactgacattatttaaaaatagaatagaacaaaataatatgattaaaattattgtcactaacctatgtccattaattaattgtccaaataaaactttttcatactctgtttgggagagaaaacaaaggagagagcacaataatatttttactccatgttttctatgattataaaccaacatataattaattcgattaatataattattattactaccactacatgagtgattaattattagttaaataaactaacccttggtaataagttcctaacaagatcagcaacattggtactaagcaagcagcgttgaccaaacaagctctcccgttgaccaaacaagtctttattctcactgttgtgttttccctccattactctgtttgtcaaacacaaaaatcaaaatactgaaacatttaagtaagggaacgaagatgaacttcaataccactattcattcttatgcagaagaaagctaaacaaagtgcttttttggccctctattcaacttcattcttgactattattctttttctctgcttgccaattctattttgagttggagatttattgtctttgattgtttgttaatgtaattttgaagaatcttttcactttatggtcaagtaagtatccacgattctatcttattcttcttcttttcttgctttattcttttggttagaaatgattttgattaatgttcagatcaaacttatagagctcaagttttgctaacacccataataaatatttcatacatattaaattcttactaattttcttgattgtattttttttgtgtcttctttaattattaattgtataaactctttatttcattgatttggtttcctgcaatgattcttcttcttcttttttcttcttttaagaaattaagattcaactattactacttagaataatttcacaagaaatgtgtacattctttcctttctctcttcattgcatattttatgtgtaattctttctggttgttcttcattccaagaatcgatttattttgttttcaaagaaagttaactcacgattcctctgttttttgctgtcatatgttacctatggctgaaaaaagagctaagacgacattgatgatgatgggtgaggaggaagacagaatttcgaaactacctgattcactcattctacatattctatcctttctttccactaaggatgtcgtttcaacatgcctcgtttccaagtgctggaaactcatgtggtattgtgtccccaaactctctttctccgattctaatttgaaaaatgacccaaaaagttttacaattatgttgataattatttggaataccacaacagaggcatgtcttttatccccaattcagtcataactagttttaagcttcgtatagcttattcttatagattaagtgatgtttgtcacctagataaatggttaggttttgtagctgagaataaagtcaaggaaatagatatttggtgaagagattaaggaataacaatggtgatatttactactacaccatacttaaaacactcatagtcaactcatgatatttgactaaatagaatttgatttggtggagttggattctcgttactcgtttagctttccatctttgaaaacattgtcattatcttatgttgggcttgtagataatgatgtaatagataagctattgttgggtttcccttcccttgagaaattacaattgtataagtgttgtttatctagtcatcttcgtgatgagctccacatcaacatacaacatagtttaagcctcaaggtttcggacattatactcactaatgatttggtggaaaaaattggtgtcataaatcttctttaatgctaataggtgtttcctttgacaaaataaaacactctgcatgcaaggcaattagaattctcacattaaattgttgttggggtatggaacagtcttcatcattagaatatttcacttctaaccttcctcttcttgagaaattgactttgtgcagcttgcttaagtggaagttataacatgttgaaatctcgaatcaacacttggaagaactcattgttactaacagtttcgataatgatttggcctttataattaaattaacttcaaaattaaaggcattttcttatagaggtaatatcaaattgaatgtatcaatggagtcgtccaaattgttgtcttgagaatttgtaatgttaaggagcaagagaactatgatgccggttggtctatcaatttgatgatttttcttttgaatctcaagtgttcttggagaagcatagagattcatgttgaagcagatgaggtatgtttattatttgattttttttatttaaagtttatattattagtatatcttttgatgtatatttatttgaca

SEQ ID NO: 222300 - DNA, 6648 bp, Cannabis indica
aaaataatttccaacatattcttgctttggagatcctcatcagcaatcttttttttttggataaaaaacaacctttataaaaccagcaaaaaaacaaaaacagaaaacaacactgctacatggcagagttcacaacagaaggatcaaaaaaaccacagaaattctgggacgcagcccaggcagcaagcttatgggctgcaccattgttcacacgggaaatccaagaaacattacaagaactactaagatcacacaaatggaaaagttgcagaaaggtaggatacaacagccaagaagggacatgtctcgcaagaatagcatccaccgccaccttgcaatccgaaaagatcattgccgtcggccaaccacaagaaaggcatctcgagaaagcgttgaggatagctcgcacctcagcatccaggggcgagacaacaacttccttccccgcatacgcctccaaaaccttacccgagctatcgatagcaagaatagcatagaaccccatattgcctctcaccgcagcatccacaaacaggttgactcgattgaccgagccaagatcaaacaaagcaggagggtcacacgctaccgggagaggaaactcgcaatccttgggatcaaaagaactcacagaatgaagaatccccttgaagataccctcgggggtatcacgcaccccttcatggaagcacttattccgggtggaccacatatgataacaaagatgagcagcaaagatagagaacctatctaaatccacattgtcaggaaaatgagggaagagaatccattcaacaatatccctcgaggagttgaattggagaagatcacttcgaatgctgcacaaactcctaaaccaacaaaaccgagccacatgacaatggataaacaagtggactaaagagtcgaagtcaccatcacatagaacacaagaggaggcattcccaaacagggactaaagcctctgcccacaagggagaatatctctcccaaccttccagagaaagagtttaactcttccaccaaagggagatttccacagggttttgtaaagacgatcaaccccaccatgcctattcttagtaatcgagcgatacgcagccctgatagagaacttcccatcctgagagtctttccaaaataggatatcttgctgagtaggggggagacggggcagagacttcaaccgatccaagaaagagggtctcagccaacaagacaaggaatagatattcagctccccattccccaacaagaactgtgccaaagagatcggctgcttgggacagatcattggattgaaggtagctagaaactcgtcccactcaatccacggaacccacggagaactccaaagatcaatacttaagccattcctaacatctaacaactttccttacgaataagatcacgggaagcaaagattcccctagcaccccaagaagccaagggagggaccggggcattccaaaaggaaaggtctctcttacaatacttagccaagaaaagcttacaccacggagacgaatcccccttagccaaagcccatcccaacttagcaataaaggccaaattcaggtcatgggattttttcaaaccgagaccacccacctctttgggattacaaatctcgtcccaactcaagagggaaagataccgttgtttatcactatttccaatccaccaaaacttgcgagataatttatccaagagattgcaaattgagaccggcaacaagtacgaggacatggtatacataggaatgctagagatgacagaattaatcaaagttgtacgcccagcttgggaaagcaatttgctacgccacccctctaaccgatttacaaccttctctatcacaaaactgaaatcccggatcttgcttttagtaaagaacaaaggattgcccagaaatttatcctccgaagtcatcaaacgaaacccaagggcatcggtaatatcattcctgctagccagatcagtattctttgaaaacaccaaagccgatttagaagcattaatcatttggccagaccaggaacaatacagattcaaacattcacgcagattttccacttcacacatattagctttacaaaaaagaaaggtatcatccgcaaacattaaatgggaaacagaatgactttggggacaaaccttaaagccatgaatcagcccactatcttccttctgagccaaaagacgagccagaacatcgctaccaagaatgaataagaatggggaaagcggatccccttgacgcaacccacaggatggcttgaattgttttaaaggacccccattgagtaagatcgaaaaactaacagattggatgcacttcgccaccagtcttttgaaaaaagaatcaaacccgaaagcttctaaaaccttgtccagaaaactccattccattctatcataggctttggacatgtcaagttttacaccaacgaaagccgcctttcccgtcttcttttggaaagaatccataatttcatgagccataatgccattttcagcgatccaccggcccagaacgaaagccgattggaaaggagaaatcaagtcggggagaatgattttaaaccgattagcaagaatcttggagatgaccttatagacgaaattacacagagaaataggcctaaaatcatcaaagcccaccgcgttcaccttcttgggaatcaaaactatgaacgttctattcagactttgcacaaaatcccccgtcatgaaaaattctctaaccgtatcaacaacagactctcccacagtatcccaatgaaaccgataaaagcatcccggcataccatccggacccggggatttcagcggacccatcgaccaaaccacaaggcgaacctcctccggggaagggaccctagacaaatcagaattcatatcaccagaaatacaaggaacaataaggttagatagagcattaccaaaggaagggttggaagagcaaaagacatcaccaaagtgattgataaagtaatctccaatctgtcttctacccgagatccaatcgatcccattattcgtgatggctccaataaaattcctctttcttcgaattacagtcgaggcatgaaaaaatctagtattacgatcaccctcctttagccaaatttccctcgatttttgacgccaaatggagcactgccgtttggaaacttcatcaatttccaacaaaatatcagcttccaaaagagaattttctggggagggacatctagcttgcacttcaagaagtaagctatcaagtagctttaatttactctcacacataccaaagtaatctctattccactttgctaacatcttccgggtattcccaagcttggacaccaattgaaagcttttacacccccccaccgtaatattccaagcttctttcactacatccttacacgcaagatcccgattccaggcttccaaataccgaaacgggcgataggaaccttctctcaccagcaagagatctaacaagacaggcgcgtgatcagaatccttaatgggaaggaccttgaccccaaccttaggaaagtcaataatccaatccgagctactaaccacacgatcgagacgttccttgacgagattagagaatttcctcttattggaccaggtaaaaaattccccaccgaacccagatcaattccaccagagatcataaggaaatcagacaaatcagagaagtcaccttgagagcacaccactcccccaaatttctcctgagaattagccaaggaattgagatcaccaatcagtgcccacggtccctgagaagaactaaccgaaagagcaagctcttcccagaagattttcctatccggttttgaagggggaccataaacaaagaaacccaaccatttagcacatctcagaatgttcgaaaaagacacagaaatcagatgttgttgaatgtcaaccacctcaatatcaatacccgccttccagcataaacaaagaccaccagccgaccccagaggatcaaacacaacagcattgaaaaaacccaagcgtctccaaataccaccattttagaactattaaccttagtttccatcaagaacaacacatcaggatcctccctgataaccaaaccccgcagggcattaactgcccggacttgccccaagccccgacagttccaagacaaaagcttcatggggatttggggggcatgataaggcccgcctcctcggccgtctgaaaatcctcattccgaaccacactatagtgtgtcactcgtcccttctgaacattagcatcggagataagagaggtggaacccgagatttccaccaggacctcccctgtgacttgatcagaattttgcataaaggatttgtcattagacacccccactgaaacctcatagagaccatcatcatgttccaaggccaataagctctctgatttaccagcgttcttcttgattttcctcggacgagcaagttattggaactttatactatcatcactttttctttcctaactcttctcgccaagatccctcgagccataagaggtgggatcagcagtacccccttgattactaggattcccaatagtactcacttcggcaaaagcatccgggacgcccacctggttcaccaccgcaatatcagatggagcaatagaattgtctcctaaaaacggataacctccatccgaagtcccagatttcttgtgtttagatccaacctgctcaatgagttgttccgaattaaccccaaaaataggatttttaggaataccccggggccccgtcatctttagaggaccaaatctagtcttgttgcgggtctgaaaagacccagacaaacgtttacgcttatccccctttgcccgagaatggcccataatcgaagcccccttagattcagattgaacattagacaaaggcccattaccaaacaacccaaacaatctctcatcccccgtggaaacacaagcatgattactactaacattaggaggcccattaccattcagaatactataggaattatcaccaccatgtatgaccaaagtcggagcatcagacgacccaccagaaccctctccatgctcaacaccagcaactacttcctctttttccatttgaatacgtttctggaagtcttcagctttcaaaacatcaaacccgttctctaagcgggatctgactttaagccatggaccaaaaagaggcacacttctaccatcatccagaatcatcattcgtttcttagcagaacacccctcctcagcatgaccaataagaccacacttatagcaaaataggggaagccattcatatttcagataactccaaacctttttcccattttcatcttccaatcccaccccagcaagaagaggtttagcaaggtccaaacacacccgaaaacgcaagaaattgtttctaataacaccattaactcgtaccttattagcttccaggaaagagcccacccgattggcaatcttgaccacgttctcatctgtgaaataacgataagggacactcatgatacgggcccagatattaacatggagcaagtccgccgatttccattttccgtccttcggcatcggagcaagaaggaggaacccaccgcaaggagcccaaggacccttgttcaccaccttgagagcatcagattccttcgagaagcgaaagatgaaaatctttggttgaatctcctgcatacaccaaccaggagagacattccacatctcagccaacacagaccgcagtcgaccattccccactttgcgtttagcaaagtatttacccaccagcgacctgttgatagtacccatagcagcctcatcgcccgccaccaaatccaaggaaaaatcatccaccgatacattttcaaccatactcatcacctcctctaacggagactcacgaacaccagagctcaaaggttgagaagaagacaggggtggaaaagaatccatacaaaagcttgcaagcacactcacagaagaagtagagtacccttcacccagaaaaacgtttttcaaaatatctctgtcaaaggggaaactactatgattcaaaaccctaaaatggaacaaaaggctgagcctttccggacaaagggtaacattcccttgccgtactgacgcaaacccttgccacacattacccatggcaaggacgcagaccgccaccaccaggcgtacgagccacccgcaccaccactagtacgaaaatcaaatttcactgtacggagagaatttcattttcactgagttcactatagcaatgttctcctcatcagcaatcttaaaactgtaaattcaataaatttgtctactattattataaaattctaaaattatattaaaaaaatattctcaataattatatatataaacattctcaataatgaatcaaaaataattttaactaatttacataaatattagaacaaagcatagataaaaaatattattatacctttgtcaatatgatcacaaacgcctcacccaaaacctaagaaaggaggtacaacatttagtcttggaactaacctcttcaccttgaaagagagccttgattgtgtttgtacaattttatttaggatatatgtagagagaatgaatgatataagaagtccaatttctaaattaattgcacac

SEQ ID NO: 222301 - DNA, 1878 bp, Cannabis indica
ttccaggtcttgttattgctcactggtgtattactaggaaaacaagtagttgttgtgtgtccaaacttggtaagtttaactttctttaggctaaataatattttcgaccctatattttgtgaaagttaattcgatcctatatttttcagaatagtacatatagtactctaaggtcattttttcgtcatttttttctttaatataacaaacttgaaaacagtttctagtacgaataaatgcagaaaatgtaatcagtttagtcataacacctctctatagggatgtcattaagttttattttgataataaatcagctgaaggttcaatttgtcatttaataaaagagaaggtcggattgataatttttgcaaaacacaacgtccaaaatagtgtttacccctttattgtaatggtaaggtcacaaaattattctgttcagctaacctttttcgagcttcaactaatgcagggattgctatcagctacagttttatccatcattcccatgattcttccatttcagtggcagagtttgattcttcctgtaagtcaaaataactctttcaagccaaattattcaagtgcctatacttttgtactgtcacaaactaattaaacaccgaaattactctccaagatgatcctttttcgaaccttttcaggtcttaccgggaagaatggctgaatttctcgatgcaccggtcccctttattgtgagtttttaccttgtaacttttcgtgttacatataaatgatctgcatattcacttctgaacagtcaaggacttagctgctctttataatcattttcaggttggattgctaaacaaacccaatgagttgaaaatgaaaacatctaatcttgttcatgtcgatgtattaaaggatcaggtttgtttaaatctgctttagcctcttttcaataagaatttcaaaaaatgcatttcttttagtattacctacacatttgcttaaacaggtcaaaacttgtagcttgccaacactgccaagacagaaagagctcgccaatgctttagcgccatttcatgctaaattgtcacgagaaacttcaatggctaagaagcatcctgtacataagtgcagcgaaacacaggtttttatttctcgtatgcctgactttactcgcaagttactaacgagtgagttaagggtcggtttttttttcactaattgtttattccttcggtttgatttccaggcttatgctgctgacaagtttctaaaagtaacaaggggctacttggaatcactctgttcagatctaaggttgcatacaatcacaagtgtgcaatcaaacaatgatagggtagaaaaaattgttaaactcataatctcatttgagtgtcattaagctaattcacatactaattacatttaaatttctgcttgattttcaggtttctttacttctcaaggacagctttatcgattccttttctagtcgcgaccagccatttatcaaggtacttactttttcttcctttctttcttcaacttcttatgttatatagttgagaaagaaaacaatgcaatatatgaaagtttctaatctttcttttttgtatatgtttttacagcattttgtggacactcaaatgttctctgttctatcagattctcgtttattaagatttgagaatggtcaattgtaacttagtgattatagtttagttcatatgattggatttgcttatgaatgtagcataaaagatttgactagatattgcaatggagaaaaaaccttgcttcaaatgttgtaacatattaagttcttgcaaattccaacacccttttctgattagagcccaaattatcataatcccaatcttttaggggagatatgatgtgaaatttagg

SEQ ID NO: 222302 - DNA, 7784 bp, Cannabis indica
aagcatgcacaaccaaatattttaacaaagtcatagtctggttgtttatgaaacaagcattgatatggtgtgtagtaatcaatcaatggtgatggaagcctgttaataatataagtagcatgttggaaggcataccaccagtaggagagatccagactagattgagctagcaatgtcatgcccgtttcatttatatgtttgtgctttcattcagctctaccattttgctcatgatcatgtggacaagaatgctgaaactgaattccattagcagcaaggaaagtggaaaaggttctgtactccaccccccccccccaactcagattgaactttttaatggaaaaattgaactgtttttcaacaagtttcttaaactgtagaaatgtggggaaggcttgggacttaagtgtcatgggaaaaatctatgtaaaatgactaaagtcatcaacagaatgtatgtagtacctaaattctccttggaaggaacatgagaaggtccccacacatctgtatgaaccgattccaaaggcatagatgctctactgctagacaaaggatagggtagtttgtgtatttttcctaacttgcaggcatcacagaatcttagtttcttaagtgatcctttaaaattaagtttgtttagaacttctgcaagaatattaggggcagtgtgtcctagttttgaataccaaatattgatatcttgattaaaattagcatgaaaaacctcatttaaggattctgaaggattgaaaacaaggaaatttttattaatgacatgattgttacatgatgaaaagattattgaaacaatctcattattacatgatggaagagacttgttgaaatagtctcattattacaatcagaattataagcaggagaacaacatgaactagaatccttagttgctaggtgacactcaagttgaactggagcaggtggggcaattgatttggtcaacacatagagctcattttttaacccaccctttgagcaagactctccctattatcttgtcctcgacaaaacagcaagtagagtgaaattgtaagaaaacttaattatctttagtaagttgagacacactaacaagattttttgttaattttagaactttgatgacagaatttaattgaacatgagtaaaagtggaggataaagaaagattaccaatgtgagtaatatggagtttcttgccatcacctactgcaagagactcattgccatggtaaggcattttgaaatcaagatgctccattcatgttgctacatgtttgttagcactagtatcggcataccagtctagatcattagcaaattatgtgatcatttgggccggagttgtatggggatgctacttcctcatcaatacctgtcaagaaagcatgtgattttccaattttgggggtaacaaatgatttatcaaattaatagtggcacactactgctgtgtggccactcgtgaaacagacttggcacaaaagttttaaagcgagtgctccacggctagagtacctacagaagatcgagggatttgtccttgaccataaccacgaccattatagccagatgatcttgaaggcgagtacgagccaggaccagatcttgaagagcttgtggagatgttagccatcaactttgaggaggtattactgacagtataatgtcattctaaacgactttcatgggttaaaagtaatgattgaatggattcaaaggagagatcgtcaacaagactcgtcatatgagcaacaacagggtcatactctagtccaaggtcgttgagaagatgcatgatcaaatcgctctcatccataggatgtcttgctgtggataaagaatcatcaagagtcttaactttgtcatagtaatcggtgatagaaagattacctttctgaatcgtggaaagttaagatttgatttgcaggatcctggccttcgattgagatgcaaatcattgcttcaatgctttccatgccatgtaagacgtgttgtactgaaccaaagatcccaaaacagtttcaaacattgatgaacggagccacctgagtgagagagtcctttctttccaggtgacaaattcttgattgacatcgtcgttgacgagttgagccggtggagcaactctggtgagtaagatattgtctagactgtgtccaattacttttggaatcacttgagatttctaggccaataagttcgattgatcaagtttgacaacaagcgaagaactgagagagttttgaaacggattctgtgattgttgttgaacaatcgaaggtggctgaggaacaagttgaggtggttgctcgcgagctgaagtagtggtgtgcggtggattttcaatgcttggaggatccatagatgacttttgtcaatggctttttgataccatgtaagaacttattaatataaactgtaatagagtatgttgaatgcaacaatctcatcagtctataaaaattacaaactgaaagagaaaagacctttatttatagagaggagattacatggaaaacatactagaaagttagttaactaaaacagttaacttacaactaaaaaacagctagagaatgaaaacaaactaactaatattttaacagttaataattgtattagaaaagatgatagaagatataaaatttatgaggtacttcttttttctcaattaattttgagatgcaatcccccacgcatcttaataacacactaaaaatagcttgcagggtgagtataagagcatctttaatggtaaaactttagagaatgcttggtgaagtggacatactatgtagtaaaatattgatatgttatactattggagagaaaaaaaaatgtcattctagaaatttgaatggatgttatgttgtaacattgagtatttttaataataaattgaaactaaaaagttattgtagctaaaaattaaaatatatattaaataataacgtgtaatattatatttataatattttaaaagaatattatgtattggagtatttttaatagtaaaagtactaaaaataagataaaaaaagataaaataaaatattatatttttaaataatatgtaaatatttaatatttttaaattatgttactattaaagatgctttaaagatatcaaatttaatggtgtccaaatttattagtaatattttataatagttattcactctatgacacctggtggtaggtcgtagcgtgaggatttcgctaatgtattgtggacaaaaacatattgtggagataagaaaatggatatatttctacaaaacgacaagttaataaaacgacacaatgcacatcagaacgacatattatataatttttttatatataaatatgcaataagccacgtgtatggtggggatttcgactccatgtactgctttaaaccactccgactgtgtggataagagtctcggacaatatagagaaggggactcactcggcgaacaatcaaaaaactaaggaaaagtcagccaaaaatgtccctgaacgccgttctccggcttccattgtcaaacttcaggacccttgaagatgggttggtgagacactccctcgtctcttccaaccggacgagtctaaagcaacaccccgaactgaggcaacagcagcagcagcaacgccaccaaacacttgtggttcaggccaagggcaagaagggaatgcaagaacgacagtttcagagacctcctcccatgcccaagattgaagacgatggaaacccacgttttgttatcttcatacgtatggccgaggttcgtttctgtaattctcatgtctttctttttttgaactcaaaagtttaatctttttaagctttttagttgaacttgttggtgggtttctgcagtttaaaaagaaaaattctgctttatagctttctaagcactaaatttaaataattgctatatgatcataatattgtacagtagttttcaattgggtcacctataataatataattgatactgtagatataatgatttatatatgctgttcaggttggtttctggtacccgcttagtgtagtaacaggaggtaccactgctaaaatcatggttgcagccaaagataattttctgggaaaatacatatacaaagacacattggctagaaatcttgctgcagttatctaccgtgtaagtttttatgcttgttatgattttgtcaactatatttctcttacatgtgctgatatatcactcattaggagaagtaatttgaagatcatgagctacaaccttaaactaattttaggccagaaatattgctgtgctaaatgatcacattctctcttctggacatttcattgttctgattcaattttgaaataacaaacactattttttgttatgataagccttactaatagcttgttattatctaaataggatgagaaggagatacagaaatcagcacttaagcagtttaaagtgctgcggtcagctaagaatttcagatatggatacaaaattgtcgtaatgatcttaaattctctactttccatgaaaagattattccttttctctgagatattctgtcatgtactcaatgtgatttatttcaaatatgggattagttgagtttctgttgctctgaacttacaggaaaatgggaatataaaagctgcactttctacctcagatgttattgaggtataaattaaattattaagttgcaaatatgtaattcttttatctcttgagcttctgatctttcccatttaacatctttttatttgctcctgaacttagcttccaacaccagataagctcaagacagtagtagacaaggtgaaagatttttttggtgatgcaaaggactcttttgggaagatttcctcgttaaatgccccaactgaggagtcccagcaaaacatccaagaaaaggaaaagtgagttacatatgtaacattctctgaactaatttatctcctttccaagaagctttagttgttgaagttaagaggttttgttttctttgtctggtaatccaaacctaagctacctccatcaccttttaacatttgaaagtctcatattgatttcaactctcttagctaaaatggtttgttggttcatctaccagggttaaaagctgaagttaaagcacccaattgcttgattcacagtggccactgattaagggagatagagatcttctgtagtacatacaacgctgctcggaaagttcgtgcacaagtctcttcctcagttttgttcatacatcttctgctcatttacaaagtttcatgttatttttcactgatgtcaatatacagattttaacaagttccgggcttgtatattatttttgtaacaaattaaactcctggaattcagtagagtacatcctttggaagaagggaatatcatttgaagtttttccttatgtttaaaccaagcttcatagagaattcttattcaaagttcagtagcatagaaacgattacaatataaggtccaaacttagcatgaacttattaacaaactatttagaacactactcactaatgcctccaacgacaacagcagcaaatatagaaacaaatggcaactcttaattaacaaacaacaattgagaagcaagggtcttacttaggcagaaaggacttcgcatcagtacttattatcactcattttgacacaaatgcatcaatacacttccattcataatcctttttcacagttgggactacaataagaggagtcttctttcttgtagcgagcccaaaaatctcttcaaggtctacatcatcagcaccaacaccctcaggcaatctccaatcaaaatgacacaacagcagagctagtccaagctcaactgttgccaagccaaagttatatccagggcaccctcttcttcctcccccaaatggtagaaacttgaaatctgtacctttaacatccatgttataaccctcaaatctctcaggattaaactccaggggattttcccatgatttagggtcccttcctatagcataggagttgatcaaaacccgagttttcgcaggtatgtcatagccatccaaagtacaatccgccatggattctcgaggaacaagtagagggactggggggtgcagccgcattgtctccttaacaacagctttcatgtaatgaagatacttgagttggctctcgtcaacttttccggcagctgaagcgatttttcgaacttcttgttgtgctttcttcaacacttttggatgcctaactagctctgtcattgtccattctaaagtggctgatgttgtatctgttccagctacaaacatgtcctgtagtacaagctctttcaaattctcaagttaaattagtcattcaaaaaaaccaaacatgtcttaactcagtaacttgttttaccagaacaagagctttaagattgtcatctgtaatgggaacctccaagtcatctcgccgctgcacccgaagaagcacgtcaacgaaatcttctctgctatccaatgacgacgtcgttttcaccgctaacgaatgatcttctattatttcatcgcaaaccgctctcagatcatccaagttcttctccactctccttttgaacccactcaacgagttgacccatttccactccgggtaaaaatccccaatgcaaaacccaccaagcaactcctgcgtctccgccaaaaccctcaccaaatgacgcttctgcccttcgccggccgacccaacttcatccccaagaaacctcctcccaaaagccactcggcacagaatatcattcgctaaggtaaacaacaccttgcttaagtcaaccacctccgacgacaaacaccgattcgtgatgtgactcagcatacggttcatctcctcgactcggacgattccgaacgagttgactcgcttggggcttagcaactcggtgacgcatatctttcgtgcttggcgccagtagggcccgtagcgggagaaggtgacgtctgagcagccgaatgagaggtactgagcggccactagctggggtcggctggcgaagacgtggtcgtgagttttgaggacgagtccggcgagtcgggcggaggagatgactagagtgggaactcggccgagtcgtaggaggaagactgggccgagtcgatcggcgagtcgtgcgaaggagtggtgaggcatgtccgttaggaggtgaagatggccgattacgggaatgcatggcggtgaaggtgggtcccttcctgtctgccacgtcgacttattagtgagccacgtgggtagtcgaatgacgtggaggaacaaggaggtgccaagtaggatagcaaaggtaagaaagagaagaataaaatagtccattcgattattttccaagtgtagctggagagctagtgaagagaattgactagtttttgtagttacaactaacgagtttgtttttcataggacaacttatgtacatttttttttcttattttcttttcgtaaatattagataagtatattataaaatttatataattttattttgagagaaaaataattttttttaataataagtaaatcagaccagagtccattacaaaataatatattattcaaataattcaaatagtagaattaataagatacgtaaaatatatcgtttataaaaataggaatgaaataagtcgacaatgttgaagcataaaaaaaggagccaaattacctatctccagttcctgtcccactctctgacccaaccaataatattttaccacctcaattaaaattacacttatacatttaacggtcccctctaaaaacttaactctg

SEQ ID NO: 222303 - DNA, 11308 bp, Cannabis indica
ggtaaaatatttccaacaacaatgaggactactctacttctcttgagagagagctttcttggaatttcagcagagtgactgtaagtaaaaaaaattctctctctacctgaagaaagataggactatttataggcacacatggggtaaagggcataccctttacccacctagggtttcgtaccccatacgctactaaggttagtactgtgagatgacgatctgacaattggctggtaagaaccttcttcattatgtggtgtacaacagcttgtgagggcttttgtacgaacctggacacgcattgcgcaaaggtctttccttacaaaatactccctaaccaagtcgttgggcaaaaagcatatttgagggtgcatacgctcactatcatgacctgacacgggggacaaaatctgatcctttgttacaaaaaggtgtaatcgtctatggagtgatatttgcaagatgctgacgtggccaatgtctctaagaccctcaacgccttctgggttctttactaagggaagttacttccgaaggccatcgcctctcgttgccttccaggtccgtaaaatcgttccttttcttggttacctcaaataattcttgttgtggctgtatccttccctctgatcatggctaatgaaaacttggataacaggccccatgcgtattaaagagttgtcacttcattattttgccaccagttgagtttcccagcaacaaacgcacttaacataggcacgtatgactcacgggtttgtgaaatatttgacacgcatgtaccattaaatagttcacgaaggcccttagacttttcaactgccaagtgtcaaagagatacttccgcatctccagagttcatccacgtatcctagagcatgtcctaacaattcaaagggaggttgcaaacttccaccactcaagagtcctgaaaagcttgggggctaaattttatccgcatttcgagatgaaggacacgtggtgaacaatagaagggagtctccagataatgctgattaagtatccttaatcacggaaggtcatggagagttcgtagagagtcgccacaaagaaaatgaccattcgggacccagaagctttaccattgcttagggatccagaaaagagaaacttacctataagtgcagacagatgccaaagagccatgctaagagtctaagacagataccctctgcggacggagaaccagaagccactcacgaggtaaaagtcagatgacttaatgacaattattcttttctaatacatgataaaatcttgtcccctgtgtcagaccatggtagtgcgcacaacaccatctaaatactcttctttgtctgacggtgcctccaggtattttttccacccaatgcaggcctttccccaacacatgccctgcaccaacaatggtcctcactgtatggatgactcaccacacgagaaagaaccatctcgggggtccaatagtcaattatttaatgtattttaccctaatagtgggccttttttgtagaaaccctggacgggtcatgggtatgctcatgcacgtactttagcctataaatacccttttattcccacacaaaagggggatgataaatgtaatagtcgaagctctgccaaaatctctctaagctttcttcttcaggagagagaccaatagtacatagggttttccactgtaaacaccactgtaatccatcatataagtcttctaaggccaatatactgattcgtggactagggttcattaatgctcgaaccacgtaaaaattcttgtctattttctttattggttcattaatttcttaagctctaattaaatttgtttataaaaatctcagtaaacaatgcctaataaaaccataatgagcacaatcataccgaaaataaattgtaatttatttctgtattaaccacattgtatggtgtaatgattgagatgtctttgttggcatccttcatcctctttgctttgcttgagtcaagggtttaaatcgcactatagcccctcttggcagaaattatacttgagcatttgaaaagttagcttgttgtagcaaggattaaaacctttaagtgacgtttggttggaggtaatgatgaaatggaatagaattgaatggaaataatttttattccattcctttgtttggttgcatataatagtattggaatgtcatttcaatggaatgacattttcactattttagtggaatggctattctattttgaaatggaaggaaagatcattctaatgcatgataagaaaaaatttaataattttttaacaaattttttaaacattttaaatttattccattcctattttattctcattcacattcttatttttatattttcattcctcccaaggctttaagatgcattattacgagtctcttaataaagaaaacaacacgtaaagaaaaccaagaaggtatattttacacgtgtgcgatggatagcgccaaaagctaacgaaagatgtttcaatcgttgcaaaactctaatgtttaattttcttatctcatcatctcctccaacaacactaaggaaatactactatttccgtagccatctccaaaacttgattaaatacgtacttgtttatccagttttctcagccaatttcaacaatggcgtgttctcgaaacccaatctccgcactttctttcaccaacacgtcactgcccaaaagagtttcttcactttctattctaaacccaaaggcaatggccaaagaagtctactttaatcatgacggttcaacgagaaaaaagcttcaggtaaattcaaaagacacttaactattttctgtaaattcttttatctgggttttaatggaaaatcaaatataatcgactagttttggttctctgcttcaggcaggggtggacatggtggctgagttgcttggggttacattgggccccaaaggaaggaatgtagtgctgcagaataagtatggacccccaaagattgtcaatgatggagagactgttctcaaagaggtcctattactacttactcataatagcatcgagttcttttattattatgatggctagctcaaattttgcatatgagttgcgtttgctttttgcaatctacagtacgaaagctttcataatttagaaaaaaggattttacaaatgaaagtaattaccataacgtgttgtgaattttgtttattaattttgaagattgagttggaagatcctttggagaatgttggagtaaaattggtaaggcaagctggggccaagacaaatgaccttgctggtgacggttctaccacatccataattcttgctcaaggccttatttctgaaggcatgaaggtatgaaaattgtagaaaattcaatcctagttaccacgatcaaacactcactctctggcctcaagaacaatggcagttatgccaattacacacacaacacagatcacacactctagctcacataaattaataagtaactctctttattgatctgaaaatgtttacaagaggttagttttacactgaactagattggtcctatttatagacataggccttagagtacatcctagaggaagtggttacgttggttgtttaactaactaaaccgccactatacaatagataatgtacacgtgtaaactaacacaatacattgggagccaacacctgacctatatactatgaaaacacatagtttgcctctttaagtatagagaagaaatcttgtatcttttaatttcatgtgttctatcagagaagcgcttgtactggacttataaaaaaccatgaaccacagactaaaagtagagatgagagacagaaacaagaatctgagattttttaaaattaattctcaaatgagctactgaaatctcattgaactaaatagaagctgaaatgaaaataataaaacactagaaacttgtctagcaataatcttactaactgagaacaggtagcatacgattgggtataatgcaggatttcaagtaggatgttatcttattgtgctatgaaaaactttcatttttcataattgaatgctgattaagtatacaagcgttgcataggttatttcagctggcatgaatccagttcagatcgctcgtggaatcgaaaagactgcaaaagcccttgtttctgaacttaaaataatgtccagagaggtaagaagtttgtcattctttcttaatcttgttttgaggaataaaattactagatatgtattggaagtaaaagtcaagctgagccaaactatttgataaaatagtagtaaatttcacatttaacaaattttaatgtttcaggttgaggatcatgagcttgcacatgtcgctgcggttagcgcagggaatgattatacagttgggaacatggtttctgatgcccttcatcaagtaggaaaaagaggtgttgtcacaattgaaaaagggaagtctacagagaacagtctacaagttgtcgaaggaatgcaatttgatcgtgggtacttatctccttattttgtcaccgatagacggaagatgatggttgaatttcataattgtaaggtaaggactgaggttttatttagcctgaatgtgcctgctgtatagagtgattagaggtctttaaattctttggctgcagttgcttctggttgataaaaaaattacagacccaaaggagatgtttaaaatattggacaatgcagtaaaagaaaagtatcccattgtaatagttgcagagggcattgagcaggaagctctggctccagttatcagaaataaactcaagggtgtgctgaaggcagctgctgttaaggcccctgcctttggtgagcgtaagagccattacttagatgacattgccatcttaactggaggtagtatatttaatgagaacttggattttaagtttatttcctttttttcctaattctattttgtcaaaccttacatttaagtttattttaagattgtgactatttggagcaatacgtatttataacaatttaagcattgataacatttgaaaatgtatgattaattgggaaaaatggatataactagtactcagatgttatgtacctaatattgagaacattgttctgtttgttttggccgaatgaacacttacttcactgtcactcctgaatgaagtggtctttcatgtattgtgcagcaactgtaatcagagatgagatgggttttactcttgataaggctgggatagaggtattgggcactgctacaaaggttgtgataagtaaggattctacattaattgtgactgacgggagcactcgggatgcagtcaataagagagttactcagatccagagacttgttgaggttcagttaacatcctaaatctatgccatgttgaatgtcatgcctcattccagctccattttacataacaaatgcaacacttgtctcaatacatggttttgtattctcttaatgtgtagaacactgaagaaaattttcaaaagaagatactgaatgaaagaatagctagactatcaggaggaattgctattattcaggtaaggaatttttttttaacatatctactagagatgtaaactttgtgactgccctctaaccttatggtgttgtttatgtcaattaaatcacaggttggggcccaaacacaggttgagttaaaggataaacaacttagaattgaagatgcactgaatgctgctaaggtagcttctgccttctctttatcaactccgatatcgatatctcaattaccaaagtctttttcaagctatgtttatcataggcttcaattaaggaaggagtcgtagttggcggtggctgtagccttttaaggttatcaaccaaggtggatggtatcaaacaagacttggataatgatgaacaacgggtacttcttgtttcaaattttactgaccactggccaactggctctgaatatttacattgtttcctttatatattggtgcagattggagctgagatcttcaaaagagctttaagttatccagtgaaactgattgcaaaaaatgcaggtgttaatggcaatgttgttgtggagaaggtttgtgcaattactgcatccttgctctatgaatacgcaactgaaatttttcatgtcttccatggcttccatgtatattttcatctagatttccatggctttcaaacatatttgtgaattgtgctctattatatatcatgaatctaacaaactaccagcttatcattgcctacagattctacaagatgataatacaatgtttgggtacaatgccgcaaaagattgctatgaagatcttatgaaatctgggattatggatccaacaaaggtaaatcacattatcattttttgtttagatatattatcaacatagactttcgactttggtggtaggaaaacatatatttaattccaattcacataagagtaagtaacagatgatgaaacgataacttttggagagtttccatgaaaatatctcgcaagaatttcaattaaagaaaaacatttaaagaataattagccttttgtcccttaaacttataatattatcagattgtgccctctaaaatatataatttttttataaatatgcctctatatttaacacttatagaaatgttgtccttctattagttttatatacattttgtcattatctcaaacgacaagtatccacctatttattggtccaaaaaaagatattttcaaattatttaattcattaaaaatataaactttaattaaaaaatacataaaatattatataatataaattaatttaaaataaaatatataaacattaaaaattaaccatttttttgagtatcaaccacgttttgtttactgttttcttccctttccactcttttgtacttcctcaataacaaaaaaacaagttattctacctcccaaaaatatattagatctcgtcgcaagaacaccctaactgcttgagcttccattgaatccctcactgagccccacccattctctgtcgttcacaccttaacaagtagagggcgagattgggagacaaagaggggaggagagagacgagagattaagagtttgagcaaatctaacgggatcaggactgactacttatatttctctttcataattttctcatcttttcattagagttttatgtgaactccatgtgaatctttcatatatatgggggcattgatgggaatgatggattcttcgggtttggggggtttttgttttttgttatccgtatttttagcaagcaacacgtggattctatatagaagtcaaggtccattagtaggcccaaacgatatgaattgggctgagcccaatgccaacctggccttccaggaagacaatcacacttctcgttcaaacgagtctccgccaaggcttgttcgtgtctgggaagatcctagctctgtgtaactagaagaaccctccagtgtgtacctggaagccatctgtagtttcctatttattgttcgtgcagaattagaaaatcactttcctaagatctctaacagagaataaatatcaagctagaataggaaactatataattgaagattaagtaattgatattacattaattatccacaatcagaagacacagtataaatagttgtaaccgtgatcaacataccaagtcagcatacagtcactgcctcatgagctaggcttcacttgataagtccaaagaaatgtattatctataaacaccccattagaggaaaagggtaactaagtacaacctccatactcataaatacgcattgaatccttcatgcaaaggattagaatttcttacctcacaagcttgagaagagaatagagggttcatattcattgtaatcctttaggcttttgtagcctatctgataataatgatgactcgtggattaagactcattactaccccaaccacgtaaaatcttgagtgttctcatatttgattcttttaatcgtattttctttagtcctaatattgaataattcgtttttcaaaaatatcagtaaacattttaattttggatttaattgatcttagatttaatataattatttgtatttaaggggcacaatcttatagtatcataaattaaaagggtaaaaatactcattattctttaaagaaaactcaaaatgaaatgagatcttgaaagaatatgcaagtatggtatactttccacattgaagaacgtaaccagaaagtgtgttaataagaagtttagatctagacacctatgttgtttaatatttagttcagtgataacactaatgacagcaaaacattcggatatatatttgaattccaatttgcaaatttcatattctcttcctgtaaaaaattatgggatgaaatcacattttgcaacatatatttaatgtattgactattgagcaggtagttagatgttgtttggagaatgcagcctcagtagccaaaacctttctgacgtccgatgctgttgtagttgacattaaagaaccacttccgtttccaaggagaacgccaatgcccatgccagtttctacaagaacaccaattccattgcccacaagggcaccaataccaatgcccacgagattgccaagacaagcaccgatgccgatgccaatgccaccaccaggtaatttcttacttattattttctaattattatcttacttattgaactgttaatctatttggtcatcacatacctaaccaaatgagtttacttccaaattattcaggttttggaccaactggtttgtagaatgacagattaataaatggatattactcgataagagctcaaaatacccttattcaaattttgttcatccacggtaaatgtcaaagggattcatacatacaaaaggatctagtattgaatataagacttctgtttattggttcctatgaaagtttaattttttcattgagttgtcattcgagcaatgtaaatatgtcaagagcccgttggtggcaggtaatataagtggcttgttaccactatcgctaagtgtaaagaatttgattggtcatgaaaatgatcagaattaaggctccacactgattttatttaaaaggaatgaaaatttattgtatggtattcattcccaggagaattttgtgggtacatatagattaaagaaaaaagtgaaataaaataatccgccaatattttacaaagaatgacattctatttcatgatttattttattttaatttaacttttaattaataaaaattgaaaacatatgttaagtaagaaccatcaatttgtaaaacatacggtagtcatgaagttgaactgcattttatttgatgttttaaaatatcaaattgttaacttccttacccaaaatgaaaaaaagagcaaagtacagaaaaggaagacaggggctggtggaagttactcgtatagtttttccattgtacttttcaagagttgggcgtcagctcctattacttcggctgccttcttcccattttggaagaattgaaatgttggctggcataaaatgcatgattcagaattagtatcttttgtgaagttaaaatgattaaacacattccattctcttgtacagtatccctaaccctattttctaatcaaagtatgtgtcttaacctcttaaaagataataagtgagatttgcaaagctagtttctgcttgtgaaatttgagtaagacgtgtaaattgactaaaatataataagtataacaaggtaacatcttgataaaattctatgcaagtaaaagatcacccagaaatataaaagaaataacgtacacaattgcaaaaagtcaaaaagaaacatcaaccaaaataaatgtccaggaaaaatgcttgtccctgtatatccttgtgatctattaaagaaaccaataaaagctcctatttacttgagatcctacaattctatattttaataatcaattgaaattaaattaaagaaatcaataaaagctccttgtgatctattagaagaaacatcaggttttttttcacacacatacacccatcatttattcccagttatcaatgatctactggtcaagatgtttataatattggtaaaaggtcaagaattgacaatggatcacaacgtctggaaaggaaaattaaattttttaagagaattagaggggattgggctagtctttactcaaaagaatcaagtattgggtggctctttggggtgtttgataccatacgatttcaaagatgatatcattttccgaatttattagggattggtgtaccttttataagccctaagacatgacatctaatcatttatcatttatagcttgtgctaaattatattaaacttttggcactcgcctattatcacgtatttcagctagctttttaagatttatggaaatttctatttgcttctgaaagattctttactagcagcttgggttaagtattctatcacttcagttagttgcttgcaaataatgcaatgacacaaacacagcaatataagtaagcatgtaaaaaacaaaacaagtaatttaccacagaggtaatattcaactcgctcaaagtctttcccagatctttctgcataaagaaataaacaaatattagatcgtaactaagattatggcttgcattccctcaaaaaaaaaaacatttgaaaaatttccaaattagttcactatgaaattgtacaaagaaaaatcgtacaaggctatacacaaccaataatttaagcatattttaataccacgtttacagagtctatcaatattccaataataacagatggtttctttaaactgattaaccttttgcactgcagatatatactagttgcttcttacacaaatgttctagtctaggttgttcaagaattccttctaaaaagcaaaataaaattatgttacagccattagaacaaacaatggtttaagttccgaaagaaagaacaaacacaattttaagtctcaaagcaagagtagagctgtgataaataatgacaaatttcttgcaccaataaaaaaaaggtcattatattagagtcctcaatactatcccttccttctcctaaatcacaaaacgctgtaaaagtcaagtttgatagcttgaatgcttccttacaatttcaatttttcagagaacaaaaaatctatcacatagagtaattgaatagtaaggtaaggaaacaaaacagtaattcagatgatttaaccttaagtactaacaacaataatggaaaatacttatcctaaaatctagtgattgttaacagaccaccatttcataaaaccacagaaccttcatacctcatcaatgtcaat

SEQ ID NO: 222304 - DNA, 1418 bp, Cannabis indica
aagaagattgtaaaatttacctattacaaattattaacttgaccaagggagtcagatcattggatctgtcaacaaggttttttttttgagagaaaggttcaatgcattaaaagaggtagttgggtatacacaaaaggggatccctccctattaataaagtcattacagtgcccatcgattctagccgtctttgccactacatcatcagcttcattatctacccttctaataaaaacaaagctgcaagaattaaataatttaaccaacttcctaatttcaaagaaaactgctatggctttccaacacggaggaaagctatcttgaacgatcgccttgaccaccagcagtgcatccgaagccactgcaattgattgaatcccagcctcaacagccaattgaagagcccatacaatcgccaaggactccgcttctatcgccgacgcagcccgagaccatttcgcagaccaccaactccgactggaagctcgatctaccataccgaccgccaagcctgccgacccctgtttccaagacgcatccgtgaagcacacaaatgccgtcgattgagggatcttccaagaaaggtaagtctctgctctttttatgttagtgtcaaatactggttgttcttcctgtatagagtagaactcttcaagtctcttagaaatagaaactctcgacagcaatatatccattctgttacttttgaataatactgcatttctcatcctccaaacctcttcgaacaaacaatcaacaaatgtcagaaatcgccacttatcattcattggaatcccttgcagaaagaaatgtataagttccatcaaatctgagcctgtcgatctcgcatttactactggaaacatacctgaaaaccaaagagcccttgcaaaaggacaatcccaaaacacatgctttagggactctttgccttcttcacacagaacacaacccttatcctttataaatgcaatgttctccttgactggaatacatcccgctaatactctccagagcataactgcaactctagggtgtattttcgggttccagatcgctttccaaacatcttggtctctgcaatcttagaattggcaacattcttggtaggctcttttagtcgtgaataatccatcatttgcctttttccacataacagagtcttcacaatcatggggaagccttttgatattactgattttccaccccatttcccttccaaaagcttgctcaagtaagtgaggatcccattcattcccattccttgaaagatcggccacatatgccagattcggcaatctggttctgacctcttccatcagcaatctgaattccgagaaggtaagccagggaatccagggttgcatccagatgtctatgccatcccccttgccaggaatggtaacagagcctgatct

SEQ ID NO: 222305 - DNA, 4304 bp, Cannabis indica
taaaaaattctctcggatgtcgagacaagtaaacgtgcatcagtgtattccttttagggatgaattgtagaattttccattaaataatagactcttaggacccaaaaatattacaatacaacatacattcatggatcgtattaaaattaagttatcacttatgctccaaacataatagtgactaactttagaaatatttataattttatattcattatataattttattaaatatataatacaaaataatttatttacatttgattatagattttattaaatacattaatataattatacttttttatacaatataataattatttttaagtgttatataaataaatattaaacatatatacaaaacaaacaataaacatattttctttataaaattatatataacattttaataaatatattgttgatcgagatttttgacaaatactaaattttagttacttattagctacaaaataatttttagagatggattttaacgtggttggaacattaacgagatttagtccaccagtcacttgtattaatatttttaatcaagttcttaccctaatttttttttttttttgcaaggattgttttaaagctattttccctttaatattttccatccttttttcaatggttcgacccattattaacaggcactattagagagtacaacacagtctcaatacattttccccatcagttgtagcctatatggcaatttttctatacagagaaatgtttctttacattgggtttgttgagtaggtcaaaagtaggcttttggtgagacaagattggacctatctgcgactgatggtactacagagaaacatgtctttgccaagcgtcttgggaggatgcatgttagaaaaatgcagtgaatattttaaaatatatctcatttttaatataaactcgttttgtcggttgtacaaagggagttagcaacaatattttttgttgaaagttttgttgtgaatggagtacaagcataaaccttgtgggctcccgaaggccttgtccctttcggaggcttgtactattattttagtctttccaggttctcaaggcccatgtcaccttcccagatgcttttacttctcccagagtgatgcctaattatggtccaatgataatttctccattcccattaatcggggtcgcacaagccacgcggctttgttctagtaggccacatacattggtaaaaattggtgaaaatatttacccccaaaccctaacttgcattgttataagttgggacttgctataggatgccttttcattttcctctgggagagttttaatcatgcatcatggctagaggggatatgtaacacccatcttcgaaaccacttggatttaaactttaatcatacaaatcaaatataaacatatatatatatatacgtatatagttttacaagccgagatcccaaattcaaaatcaattctgataacataacatatttttataatatgtcacatggtgattgcaaaagttaaacccaaaatactttaagactgaaaccctccaggttgtactgccacgacatacacaatcattatcaagctttaaactcattgttcctctgccttagcttttcctttacctacacatggtagcacattggtgagtcaacagactcagtaagatatgcataaaatatacaatgtaatatcgacttgtacttaggccctcttgtgcctacttacaaggctcaacaaataatcaagaacattcttaatagaagtacgacctctataccacatgcattgaagtacatctctcgtactagtgttggtaggactaaactgtactcccaggtactaccgggtgttgtaccacatgcactatgtactcacttgtactagtgttggtaacaccttaacatacccttaaatatttattatacactgtattaatgcaatatgcatcacaactattccggtgttggtagtgtaaaataatataattagcgtgcattcatatacatacacacatacatatacatactttatgatcatcttaccttatttctagatttaagtgtgccagccaactggaatggaaaatttacgagctgaatggaggttttatgtcacatttacataaacaggaaaataactcggataaaccttctcatgaacctaaaattaaaatatgaggtaaccctgttgaataacagcatactaacgctctaatttctgagaaaatatgaaaatttggattctggttctgcccaaaccggcaaaccagattccccaaccagtgaaccggttccccgggccctccctagggaaacgattaaccaaatatcaacaaaatcttcccctaaactaaaccaaactcttcagaatacctataatattatctcaaaataaaatccaagccatcaatccaaccacagctcaatccaacctaaaccatcaatttatatctattgaaaacatccctaatcgaaatttaactaatagtaacaaaatctccaaattataatcctaaacctaacaattcaaccacaatacaaagagtagagtttctagggcatacctctacttgtatcacttcaaaccctagctaaagctccaaaaactttgatgattgcagctggttttccttaaggtttgcatagggtcgaatgaaaaagaagaagggaagaaggtgattctaaacttttcttcaatttttcatcttttgtaattatgtcatattattattatttattaaaaggaaagggtctagctgccataagtagaaaaagacactcatcctcactaattaaaatgaccaaatcgctcttgctttaaatgcataaataaatgaattgcttggggtaaaatggtctgataccataaccccgactaaactcaaaattcaaacttaacatactataactctctataataaaaggtttcccgctcacccatgtgacttaaataacccttcgttgtatttttcatcgccaccgagctagaatcacaaaaataacatattttgcatttaacataaatattcacatataatgatcaataataatagtaattaatgtttatagcctcactaatctatatttaaatcatgcggtcattacaattattcccccattataaggaccctcaaaatctaacctaaataactctagatattgagtcctcatgttggactccaactcctaggtggcttcttccaccttactattcttttagagcactttgaccaacactatggttttgttttgaagaactttttcttttctatccaggatttgtactgactgttcttcataagatagatcttactgtaattccagggctttataactcaggatatgagtcgggtctgatacatatatcctcaacattgaaatatagaatacattatgcacagctgataatactagtggcaaggctaaccgatatgccacttgcccaaacttctcaagtattttgaaaggccttatgaaccacgggaatgtatgattcagtatgggtcatagtgggttgtttcacgaagtcagatcattctctgccagtaaagactacctatacagtggatcagtatgcagagttatatgtgaaggagataatttgtctctttggagctcctaaatccattatttcaatagggatctaaaatttacgtcaaaattctagataagtcttcagagagctatgggtacggaactgaaattcattacaactttccaccctcagactgatgcagtcagaaagaaccaataaagtataaataagatcaaggctctgatgcttgctttgcaaagcaggcggaaaagtattaggcgctttggatagaggaacaagttgagccctaagttctttgggccatttgagatactccaaaaggtcgggtaggtagcgtatcggctagccttaccactagcgatatcaactgttcataatgtatttcatatttcaatattgagggaatagtttcagatttatgtcttgagttatgaggccctagaactgcagtcagacttgtcctatgaggaacaaccagttcagatcttcaataagaaagaaaagattcttcgaaacaagaccatagctttggccaaagtgctctggaagaataacaaggtgggggaagccacctgggaattagagtctggcatgaggactcaatatccaaagctagtcaggttctccctgaaatccttttaacggtgggataattgtagtgaccgcgtgttaaaatatggattaggaaagacaatcaacattaattgttaacatttttttataattatttatgattttattatgtt

SEQ ID NO: 222306 - DNA, 3704 bp, Cannabis indica
aaaaaattattctaataattttttttctaatccacatttagttgcttatattgatcagttactttaaaattataattttatttttttaacatttaggctatattattttatttaattatttaagatacattgaggttacctttcgtttttagcaattttaaattatattttaagttgtgaaaaatatatacattctgatatatgaaaagataaaaagataaacaagataaaagtaacattttcttttctttttataaattattaacaaagaagtaattaaaatttatatttgaataaaattaatataccaactaattttatgggttactattatatttaaaaatgattttatttataaaaattgaaaggtattataaaagaaatttgtgagaatataatttattatttaataacttttaaaaaaaaatggtaaaactataaatttagttgttatatattgaatcttagttaattaaattttaattaacttcatacattaaggtagagaggatataatggtaatttcatagtttttttttgtttttggtaagtcatggttggcaccaataaaattgtgatggtgtggaagtgagaagtgtgtgttatgtgtaagctacaaaattaaaataatagcacacaagcactccatgcatgagttggagtactgacacacaaagaaaaagaaacaaaagaacaattaaaatgtataaccaaataatcggcataggtgtcaaactttcttcaaaaaagaaaaataagcggtatattatgcattaatataaacaaagctaaaactgcaaataaaatgaaattaatgttgtttggcctaaatttctctaaaaaaatatgtatttatttaatttaataatgtattaatataaaactatttaaaattaatacaaaataaataaataaaatattatcatttaagagtgatgattttaagtttccaagaaaatagtagttaccaatttgctaaaaaaaaataagatttgaagaccaacttgctaaaacttatataatttggagaccaatttaccaaaaaaaaaaaaaaaactaacttgccaatctatataggctaattaggatttttgccctctaaactttgatatgtaccaaatcatgtcctctgaacttttaaggtcattaaaaatgctccctgaactattgagattgttggatttaaggatttttgtctaatttcattcaattttactatttcagtgattgtttatgtactaaaccatgctccccagactttgatatcaaccaaatcgtgcccctcgaactttaacatgtactaaattatgtcacttgaactttcatccatgttagatttttttactaaaatcggaaaaccgtccttaaatccaataattataatagttcagaggatatttttaaagatcttaaaagttcaggaggtataatttgatacatgtcaaaattcaagggataaaaatctaaattaaccatctatatataatttggggacttatggtgcaaataaactttatttttattattagaaaaataattgaggacactcacgttttgttttgttggtgtggacccaaaatggaaggaaaggagcgcatggttgagatttgttcttactttgcatgcctcgtgagtcgtggaaaatctctcaaatatatagactatatataacgcacgccagtaacctataataattatcaaataaaattcaggtttattgcaactaatatcctgagcctataatttgtcaatatatatatatatatcaacatcctataaaaatctaattgtctagagattaagaaatatctaatcagaactctaatttagaatcgtcctggtttggtatgcatggcgagtgacgaagttgagtgttggattgttccaccaattaatatcatcaaggtcaatatagatgcaataatttttgaaaaaaatcatagttatgggacaaaggtcttttttagaagggcgttctttgttcaaccatgatatcattgaccttgttcttgtcgagttcttaagatcagtcaaggaaggtccttagttggatcaagaaaaagagctggaagcgtctaagcatggagattgactgtcttacggttgtataagttttgtatagttctattgttatgcttttctttgtttagttgtattattcaagattgtaaaattttattgagtgagttgtgtaatgtttcaattttttataataaacgatcagtaaatatggttgttcataattttgttagaacctctattttttattctggtcatcattttagcttgaagtatgttccaactgatttattacctagtttgataataacagaatttaatggttaatatagataatttttccattaaaaaaaaaaaagaaatatgaaatgtttccctaaaaaaagaaatgagaaatagaactttgtttattttgatttgtcttctattgaagtggactacttaatattattgatgtttttactgggagcgtttttaaagagttacagtactcacaaaaagcttctctaaaatagataaattttaaaaatttaaagaactttaccaaaaatatgctacacctttatactttttatttttatttttattttaaaacttctttaatctttataatttattattcatactctacatttatagaatattattcattgttataaacatattttattaattattttatgttttaataattatttttgtatagggatattttcttaaattatatgagactcaacatttaattacaccaatcgtaatataacaacaaaaaaaaaaaatagctaatcaataatactttttaacaattctcataatttatattagtacaagagcaaaaggctgcctccctccctagtgctctttgaagattaacaattttatataattttcacattctcaatcaatgtgcatcattaactgaaaacttttgactctcatatcttaaaccatttcagatctcccactattatatggatagttaatgctctaatatttaattgagaatgttaggccactcaacatttgaactgaatgtagtatttttttttttcttcctacatgattaatttttgtaaaatttaatttgtaaaatcatccattttataaatatatgttaaaattagttttttaattaaaaaaattaagttaacataacatgtcttcataacaccttctccaataaaaaatgtaaaacttatgttatatttagtaaaaaaaaaaaattgtgatatatttacattaatttttagtaagaataaacgtgatacaaaagggcgaagaaaatataaaaattttaaccaacccacgaaatgtgaattttttttattaaaagaggaatatcattaacttatttaacggaacaaagcctaaaagatcaggcgaaaacaaaactgcatagatctccaaggagatgaccaaaaaatgaccaaactaagctaataataaagatggcctaaaacctaacgctacaaaagacaagggtgataaacaccaaaatacagtgaaaagaaaaaccaaaaagaataaaagatgatttggacaaagaaaatttacaaacacccaagtaaaataaattagacaaagcaaactaccaaatggaaactactcactactacaaaaatactttataaaggtgggtttttttttttttttttctagaacattaattaaaaagggaagctaaa

SEQ ID NO: 222307 - DNA, 1693 bp, Cannabis indica
agattgtaaagggttttatttagggcacaaaacccaacactcacttcatatactcgagcgaaaacacttacctatagtcatagtgtaagtgttcctcttttttcaaatatggaattacgtattgttctatctgtctacgacctgacataaatctattcgtattaaccgaccaagagaggcacccaactaagaaaagatctaggtatcttcctttgttacataaattacaatttcatatagggcagttctagtcaaagggtggggtaagcttgaccagctcagtaattggtggcccttccttgacttagtggcttctgtaatcctaagtctagtgcttgtagaaaattcactacctcaagacaaataccttcacaactggaggatcttgttgaaataaagcaaagacaagatgagcctttgaaaggctacattcaaaggttcatggctgaggccacgaaggtcaaaggcctaacagaaaaggtcgatatgtggccataatcagaggcatcttgttgttgagtgaattctaggatgatatcacaaggatctcaacaagcaacatgaaggatttccttaagctagctgatggcttcataaagttggaagactgttcaggaagcccaaacaggagggtaggtcaatgttgaacaaacacagggtatcatactaccctaagtgttgtttgacatgccggccagtgcagacaatatctgccaatcttccaacaatgagaatatttgaggcaagcacaagaacaatggctctggcaaaaataatggcaaaaaagtgaaaatcaacgattcccttatgtcatgaaatctaagggagaagcaggagcagtgcacatgcttcactctcctaccaaaactcccaaagcaatgcatgccaaccggccatggtgacaggtgtcaccgaaacctgaagcatcagggtcattgagctcaactaatataagaccacctgtcaacctagcatggccataaaaggccaagctcttgctagcttcatggctaaatataaaagcatatctccttaaatctctcaagatttgggagaaaaacaagagccagagaagacgcaagagcaagagcaagacaactcaacctagaaggtgcattgaccacctgcctgatggaggcgtggtcctcaggacaactgggggtaatggatgtacgaggcaataaaggtcagttgtaaagcttctaacaatgaggttaaatatgaagctccgattgctggcctcaagctaccacacgaagcacgggctaaatatctagacatacactacgactcttaactagtcgtaggtcatgtcctaggtgaatacgcaactaaaagcaaaaagatgatagcctatttgagctaatttcaagacttgttaagttagctcaagggttgtactaaaaggcaagtccccaaagacgatgcaacaaccgactcgctcgactagccagtagtgccttgatagccaaggcaaacttggcacccactcagttctttaaagaactaagcatccctatttcaaaagaaatagacatgctatacaaccatccaatatggatgacacccacagcagcatacctccaaacaaaaccttgttagaaagcagggataaggggaatagctgctgggtatccaatcctggacaacgtaactcactgacgtgctatcctaattgttggaaatattttac

SEQ ID NO: 222308 - DNA, 1423 bp, Cannabis indica
atttttccttacctgagcggtaggcctttgtatttgagtacttggcttatcgtcccacgtaactctgccgtatagattaatcagatggctttgctatggagcattggccacatttttttcagtaaaggttggtgtgtagtatccgtattattccatggagtagtgggagcaatttctttttttcaacctctcccatgacacattttccttacaagattagaagtttcagggtcttttggatttattttctttgtagcattattttcttaaggagcaaggtcatcaaaaatattttcatcgcgagccatttcgcctaattcaattatggcatctaatcttgttagagcttctcatatttgacaggagaattcctcttgatcaacttcttttggtttcaagaagttttttagccattcaaatgacctcaggatctggctcatagtaatactcctcttctttgtcttttccatcatcttcaagatcatcgtcctcaggatcatcctctggatcttctgggttatcttcattgatggggttttcatcaacatatttttagtatgttgagtcttcttggcaggacgactgttacttctgacgaatctcatacaacacctgctttttcttgtgtagtgggaggattcacgtcatccattggagtgtccccatcacaggcaccaggtttgctgatagtggtccttgttgctacaattgttgaagtatacaactttgttaccaattctttcttcagctctcaattaaatcaccaaaatatttactgagatttttgaaatcaataaaatataaggaagctaaaaatatataataaacaaaaaaataaaactagagttttgcatggttaaaggattaatgacctctagtctgtgagtcaatattattatgataagattggaaaatcttattgatttacacaagtattttgccaagtgttttaaccctcgaatttgcctgagcactccacgaatgagattctaaccccttgtatgaatatattttcttatatttatagtgatatggttctagtatgtacacattgcccactgatagggtaaatacagattatacatattaacttcaagcttatttagtgaaacccggcccatgaggcattgatcttctactgacgtggacgccacatcaagttgatagttgtcaaattgtgtcctacttttgtggataataaatacataaatacttgattgataattaaattattttcttattcagaagatatgattcttgggcatgatcttaagaattaagccctgatattatgggatctggtaattaatgaatgtgatactgagctggatatatgcatacttgtgaactattaccgtggaagctttgttaatgttatccaaacgcacactgtggtaaaggtttatctcgcccaaatgagtcg

SEQ ID NO: 222309 - DNA, 3684 bp, Cannabis indica
ctaaaaaaaaaaaaaaaaaatcgcaaactgaaaaaaaaaaaaaattcaaggaagttaattgtacagttattagatggggggtgtattaattttccttttaagagaagtcctatagtaaatacaaagaggtgtgattataaaaaatattagtcaaataaataaaatggagtgtatttataatttattggggtgtaaatataagcactcatatctttattatttattattattttttactattttggggttagtcttttacttagtgttgtaattataggccgattttttgacacgagtccggaaggtacgagtacgattaggcacaaaaaagtacgatttgagcatgatatggtatgatgctacaaattagcatgacatggtacgaaaaatatatctttaagcacgacacgacacaaaaaacatgaaagatacgacacgtaagtacaaataaactaacctaaaaggcacgacacgcaataagctcgaaaaatacgaaacgacatattaaaaaatcttataatttattattaataataataagataaaaattacatagaagttaagatattataattaaaattattataataagttaagattatatattataaaaaattaagattatatattaatttatgtataggatgtgatatagaaatttgagtattataagtaaatattagttttaatgatgttaataatttttttatatcatcatctgtaaaatattgttaaaaaattatataaatataaatgaaactataaaatatacattaattataaaattgaccttccccaggcgatgtaagattgaaccatctaaagaatagctggcttaatttcaaaaattttagcatcgacaacgggttgtttgatacaagactggacccttgtcattgttggtacgtagcacatactcccgaaggcttctattaggcaaattttgaatattagcctagtcaattgcccccattaccgttttgagccatatcttttttttaactgaacctctttagtagcagttttttctaacctcttgttttgtctattttgtcgacaagttttctgtatttcaagatcaacaagcactcttacggttggtccttgacgtcacacaaactatgtattcttgagaaaagagaaaaaatgacacgaatagagttagtaaaaagttgcatagaataccaaattagaataaaatttaattattttaatattaactaaaacaatccccgacaccggcgccgaaaatatgttatgaatttttttatgcaagtatacatatcaatttcaagtaatataatgttaagtagagtactatcattccctcgaagattataattaagtactaataatgaaattctttatactatttggcaataaaaatttaaggaagaatattataatctaaagcaaataaaaacaattaatttagaatgaaaattaacaataattagagtttagggtgattaacttcaattgtatctatcttatatggcttaatatactttattctcaaatattaatttctatgcaatagcgggtttactaaataacttatatttggactaggatatataagtctcaacctatatgaaaattttctactctcgtgataaatttaaacatataagaggcattaagtaaagaactttaaattctatccaaaccacatagatactctcgtcctatgtcaaaatttgtccctatttcactataacataattgacacccacttttcaaattttgtatcgaaattataaataattaattaatagacagacaattaaaaaaaattaagaaggaataaaatagatgcacataaaaaattaggagaaaaattaaattatattaaaaccataataagatgtcaaataatctctattaataccctaaataaaagtctagctactcatgtttattgtaagcgattgacacaaattaaataagaacataagcagaaagtagaagaaaagaaaccatcgaaaaaacgttattagaaagtctctaggttgcttctgttctttaatttcgtcctctctaattacttgccaaaaaatattgaagaagacctctttatatagctaaaaaaaagatagaaaatatctatttttcaaaattctgataggcgggccgcgacactacaaatgtagtgtggcggcccatgtcttctaggcaagcattccctttgcaatttttcccatacgggtcgcgaaaatacaagccagtgttgcggcccttgaagctgtttttcaggtagagagcgattaaggtttcaacgcctcaacattgaaccccaatgttgaggcgcgcctatagacttgttaaaaactgaccttgctgccgaatttcatccttttaacaccatgatattgaattcttgtgttgaggcgctactctatatttttcaatgcctttgcataaaaagctccaaatgcaccaaatcttttggatttctttcttagatggatttcatggtgctctagcagcaagactttatttcaatgacctgtttacacatttttctcgatattgctatatttttcttcaatactaaagctgcaaaatattatcaacaaaaattgtaaaattgcacaaaacacatttaaaactattaaaaaaaaacactttaaaaacctacccaaatatagtactaataaagtcctaataagatcttctcgtatgcatcttcatccaacacttgatagatgagatagagagctttcttgtctctatttcttgaatccctcaaggcatgaaaagagcacatcatcttgctccttatgagccttttcaacaatatcccactcatcttatgcttctactagagcattttcatcgtaacactctaattgccatagttgcttttggtgagcattggaacttgaaaggggattattcctccatttcttatttttcttcacaaacttgactctagtaccactttgttaggaaataaaagggtaggagagaatactacattggaagaggctatattttataactcaacttgtgtaatttttaacttggtataaaatggtggggagacacctctatttataggacttatggattattttaaaaacataactaaaagactaactactagtgtaatctaggtcatccctattactaactagaaagaaatatttctagaaattcaagatttttaaaggaattttactaaatatttgaagactctaaaaactttagcaattgtaagaaaactctagtataacaacaagaaaaatttagaaattatttatattaaatcaaatttaatatttcaacaactgatagataaatattgtagtaaggttgagattgaaatcggtttgaaattgaggttgggatggaaatcacatatgacataatttgaatgcagatatattttatttttttaaatttttttttaaggaaacttaattaatacaatacaatacaatacaacattattgtgaactaaatattgtataatttaacacaataagggctggcaggggcggagacagaataaaattgtaggggggccaatattaaatgttgtatgcaacaatgtgaatttttggtaattttttttaagtggtgcctcaattgaaaaaaaaatatcatatttatatatattaatattttaggttgattcgctagctgcaataggaatttctatgtataattctgtaaaaa

SEQ ID NO: 222310 - DNA, 2093 bp, Cannabis indica
gaccaaacgggtttttaggtgatcggtttttttggcggcgggtagtcgggttttccaggtttacgggtctaaatgtgcacccctaccagattgtggtcaggtgcccatacacctaatcacaatcctttctcgtgtccaatgcgtactaagtttggaatgttcgtacgacaatacgattgaccataatatcaacctctactcagtattctagtcgtaacgatgggataacttcaatccatgctttactaaacatatatatttatctgtatttagtgcaactctatgtatactaatactgctcttaatgatatgttatctcccaggcaatcatgaaacatgtacgcttaatatgtaaacaggcatattagtatactaatcttatctcagttctgaattcaagtgtattcatcaacctaattaagtagaaattgttgctcgatgatttaaggtcctaagtcgcaattcgcataaactggcaagtgacccactaaaacactttttcggggacttaaactcaaaactaaaaaaaattctatcgataaatagcatggcaataccctaaatattgataaaacataaaaaactaggctttgaaatctaaaaaatccagtgaatcaaaaccccaaatggcttaccttttttgggattctactaggaaaaccggtacactgtttctagaaaagaggaaaaccccaaactttgaaaacctgttcaaaactatcccaaattcaactaaactttccaaaacacttaattaagacaaacaacatattccaacaaaagaacaacatttataactctctaaccctttgaatctaatttcaccattaaaggcctaagtttgagctcaaaatctcaaacattgatatttctcaccaataaccaacaaactagcttaaaacaacatatataactcaaaaataacttctgaaaacaacctcaactcatcccaatttgtatagaaacaaaacctaacaattgcatcaaaacctaattccttacttgaaatttcaaaggaaaggagaatcttaccttaaccttggttaacaaaattcttgaaattctatgctagaaacccccttgaattaggttggctgaacacaaagagagagaaagggagaatttggtttgatttctttgctttttggataagtgtccagtaactatttcatctatatcttcctaataattcttaggaattaatttactagaatcccaaaattccactaaaaaaaggggtaaaggacttatttacccttacatcattaagaagtaatctacacacctaggggtaaaatggtccaagaccataaccctaaatattttttatattctaaatgtctaactaagttaccccactaatttaagatactcaatcgtatctatgtgacttaaattcggtcaaattattgcattccactaatacttggcataaattataaaaaacgtgaaatttaatatataacttacataatacacctagaatttaaatatatctccataaatgagaaaataactagggctacacacgggtcaaatttttggattttcgagtggttgggtttaggtttttgggtgtcaggtgtttaaaatacctaaccgaacctagtttctcagtttttgagttcatgcgggtttcaagtcgggtgcaccgggttctgcagggcgggttcagattttaatgggccagatccgattgaaggatttttggatccaaatgatattttgtttttaaaaatgccatttaatatcattccatcaagatttacctaaaattaaatgcacgaaaattaaagttgtgtgatcaaaatggaacatctaaagacctaccaaatcaaattggctcataataaaatgggaaaagcttgttaggaatagaccaccttgaaaataggtttcaaaccttcggtcatatacaatacatataaaatcttttttttagaaggaaatttcattaaaacaatttgaaagaaacagagccttttacaaccatcaaagcagaaaatgaagagaagaagaactcgtcaaactgagtcggccgctgggatgagaagaactcgccaccaaaggagaggagacgagggtcgacgagg

SEQ ID NO: 222311 - DNA, 2565 bp, Cannabis indica
gattcagatcatctgcagcaataagggagttatcatgagtactggtagctttcactctagacttgctctcgcgtgttcctttctttctgcgcttgcgtttttaactgacgaggacgaggcaccagaacccatcttgaatggagtattcggtgctggggagaaaccagggagatcagggacatcggtggaaaattccatcgtattctcctctgtatgctgaacatatggaaccaacgtgagactggccttccttttacgaggttgaggacatggatggaccaattcagtaacatcaattgggtcatgaaaaagtgttggtataggttcgtatttgtcaactggtgctggacccatcaattcttcagccagcccaatctcttcagcgtaaatgggccaagggaaatgggtgggctcagggtgtttgtggggttgtctagattgacataactcaacatgggccttgtccaccatttggttataagtgggcccaatgttggccataatggtggtaagtataccattatctgctgggtttggggggggccttgaggagtatttatttagaatttctacatcagacaaagggtttttattacctttaatgtgcctttgtagagctctaggcgagactgatcttgtcctcctttccctcccaggatgctcagagctttgcaccctttcatacataagtttcttgcctttatccataggattaacctcctccctctcaactactttcaaattctttcccaaaacagcacctgaatcatttgagttgaccctgatcactttcttagcaggcttcttacttgctggtttgtgttggctcagttttccattgctgtccacgacatgtctctttcccggagctttggagaacgtgtcaaccgttgctgggggtctcgccggaggaattatccgatctgcttcttctctgaaaaactcaagctggttgcgagtattaaagcaactgaaaatcgctgattcggccttcatccaaggtccgtacgctggaaccgcctcaccttgaggaggataagcatacgcggttgaacggaagcaggatttcttatcatgcccaagaaacccacaattgaaacatagcttaggtaacttgaaatatctgaactgtatccactcttttcgccccctcttaatgtccaggaagaatcatgatattaattgatgggaagtgtctaactccacttgaaactttaggaatccccttcttgaaatggtacgttgatttgcaaggtcactccccacaaaacgccctgctttggaagcaattgtgcgtgtgttaacggcgttgaggtagggcgtgggtaggcctgatgccattacccaaaacacagagattcccatattcaaatgataccagtccccgtcttcaggccactcccttatgataaggagttttccgttgatggtccatggtctattccggagaatggccaagcagtcttcagatttgtcaaaaaagataccccacacacctggtttcatagttttgaatttccacttccctttcagtttccatatcagattaagtatctcttttaggcgagatttggatactccatttcctcccagaaaacttactaacactccagtgcggaccacttcagctgtgagctcaaaatccggttctaactcaagggtcatggactccaagaagttgtttcgaaggacttcaatgtcctctgctggtttggttgcattgaggatattaggagaatccaccccatcctctgtatggacattattaggctcagacatagtaatatcgggcggatgaggtggttgagagttatcagcagccgtcattacttcaggggtcccatcattaggtacagtatcttcaatagtgggttcacgtggggggtcattattgttattgacccccgaggttccaccgatatcccccataccagacataagggaaaggcaacaaactttatcaatggaacagtgaaaatatgactaagcacccacagaacagagcacaaaaaagacttaaaatttggagtagaaaggtaactcaatgaataaaataagatgcaccagacaagagcaaatgaccctttcagagataggtaatggggaagcaggaatagtgaacgaagaagtgatttactgaatggacacaaggtcaagttggactcccaacactctcatttgagagaagattttaaggccttcctgaagtaattttctctttttttttcctttttttttaaaataatttccaaaaaacaattagcatttttttttctgaacttttaatagtagggtttatgaaaaaaaattcttaaaatataacacttacataattatgtttcttttgtttcatttttttacttttaaaaattaatatttttattctctaaactttgacaaatagaaatcttgccttgttttagtaaaaaaattaattttaaaaattataatagtatattaatttagaaaaaaataatcaaaaaatattaaaaaattgataagaatattaaattagttaaaaaatattaaatttacttaaaaaaatataaattattcctaaaaaaa

SEQ ID NO: 222312 - DNA, 1109 bp, Cannabis indica
ttcttccctggctttccatggcgcaagtcaatgctctagctgaaccaacggctccagctgtgatttttcatcccgtgttcttctctcacaagctctatgtcaagctcgataactataactttcttctctggagacctcaagtgctctccgccattcgaggttataatcttcaagattacatcttagatcagcctcctccaactaaattcctctcatatcaagatcgagttatggatattgttaatcctttgtttacttagtgggagcaacaagatcagtttctctactcttggctcctttcatccatgactgaaagaattcttacttgtgttgttggaagtcacacatctgcacaagtttggaacaatcatcaggtatacttctctactcaaatgtatgcattgccaattcactaatcaattatagactatcaagaaaggagctctgcatatcaaagattatttgttgagaatcaagactgttgcggatcgtcttagttcaattagtcaccgtgtcactgtgaaagaacatattgttgtcatcttcaaaggtcttcctggagagtacgatacctttgtaatctctgtaaattctagaaatcaaccttacagtgtagctaaattgagtctcttcttctctctcaagaacactgtatggataatcatcatcgcgatcttaactctacaaatgttgctatgaatcaaaattctcgcaacagaccctcttatcttgttcctactgattctcgatccaactttaatcctcaccctatgcctcctagttttgggcgtggccattctgtatggaatccctatgctactcctcttcgtggaggttccttctcttctcctcctccttcttcagttggtaggggtaacactcaaaattcttcctcaaatgctgctactatcaccactggctcacgtcccatatgtcagctttgttcgaatcatagtcatttggaaacacactgttatcaacattttaatatggaattccctagaattggagctgccaatatggatcatcttacagccaacataactacattagatactattcttgatccatcttggtatccatcttggtattcggatgtatggagtata

SEQ ID NO: 222313 - DNA, 2136 bp, Cannabis indica
tttctctacaatctgacgtactctttctcattccggtgagcgaggtttgaccgtggatcaccacataaccataaacacaggaagtatttatttacatttcttgttttcttttctacttcgcactataaatttactgacttgaccgtcggagtgccttcggccggcaccaccccggtgtcccaaggtttcacggtcatcctttgtctttgttccgcaggttgtcggtgcccacaaacgctcattccgatcattgtagattttagcatctacatgcatcactctccaagaaaaatgacactcgatgaataagtgttcatgagactctagatcccattcacaaaccggacaataggcactaacaatgggaacatgtttcttaacaaaattgtccctagtgtgaaggttagagtgtaccatttgccacattataaaacgatattttgaggtcgagagcttgcaccaaactgctttcttactatcaaaacttgtttcttttgaaatgagatagtcataagcttgcctaatcgtaaagctgccattagtttcagctttcatgatagcttcacaagtgaatgaatctcttaatctcaaaattttcatttaataccaactaacatccacttagcccaagagaccacacctcttaatcttttatgtacaagttgttcacccattttacccaaagtacatctttctttgtagtaattaatagcccataaatactttgccaaagctgctttgttctatttaggaccttctcgaaatcctaaacctcgaagttctctcgatagacacaccaagttcctaggggccatatgaagcctactccgattatcctttttcccccaaaaaaagtttctacacattcaatcaatctctttggctattttttgaggtaattgaaatatgctcatccaataacttctaattccaattaagacaatgtttattataagagctctacctgcagaggataggtgatgacttgcccaagaatgtaattttagctttagtttctttaagagatgatatcacaattctcatacttccacttagttggcctcaaagatacccccacgatatttcaaagaaaatgtactgtcttgaaggaaacctcctgttgaatgaaagttaccgtatcatctagtatacctgcaaagtagatgttagacttctccgaattagctttgagacccagaaagagcctccaaaatacatttgaccgagtccctattcccttacaaaataggatttgatcatcagcaaaacatggactagagagctttagctttttgcacattgggtgataagagaaggctttgtccctggctttctattttagtgttcgagtaaggtagtccatgactagcacaaagagaaggggtgacataggatccccttttcataagtcttttgcaccctcaaactatccttgtattcttccattcattacaagtaaatagcatgagctccgaacacaaaccattatccactctacaaatattcttgggaacctgtaggcttttaaaaggctttccagaaactgccagtcaattgtatcataggccttgctcaagtctattttcattagacatcgcggggagagttgttttctgtggtaccctttgattaaatattgaaggatcaaaacattgtgcgcaagggagtgaatgctccacggttattactaactagccaagaaagaacctttatgaaattctataataatttgttaatgtaacattaactcgaccttaatctaaattcagtttaaaagtttaacaaaataaataaataaataaataacaatcaataaattgtgaaaatatgtatatatacatttttgaagctaattatgtagaattttaagtaaactttcgtatgcaataattagaagagaaggagatattatatttgctgatttctatagttcttgagagaaaactttaaaaaaaaaaaaaagaaagctgtgagggtgttcattggatcacatccaatggatttggacccatccgatccaatccaattatttattggatattggagttttccatccgattcaatccaattgaattgagtcatccgatccgatccgatccaatgcatgtattggattggatcggttccatccattgg

SEQ ID NO: 222314 - DNA, 1378 bp, Cannabis indica
  modified_base (1364)..(1364): a, c, t, g, unknown or other
tgttcaaagggtacgatccgatggtaccaacacttgtacgatcaagtttgtagtgcatgtagtacttggggtacggttcaagccctaccaatagtagcggtacgtaatgcatgtggtacagaggtcgtacctttgtataagccttgtggaaaggtgtatgggcgcctaaatacaaatcggtaatatattatatgttatatgcttttcttattgagtctgttgactcacagatattactttcgtgtataggtaaagggaaggccaaagctgaataatagtgtgtctagagctcggggataattatacatgtcaaaacggtgcaacctagagagttcggtctcgggacaactgtggcctcattttgtagtcactgtacgacatgtttgtaaagtttattttgaatatggatataaattttaaaagtgggatcctgactttttgtatgaatatatatatatatatatttataaaagttaaattaaaaatttgaatttatcacaattttcgagaaaactctttaattagcacaggtgtggactataattagaaagtcactgtagcgtgcctaatcattagggtgttacactaagcgtggctcttagagagttgaagacaaaagaattttcatgtggcagtttgtgattggaagaagaataaggaaaatatgatatatatttacttgcttcttgagcattgctattgggtaccagtggtgcctagcacccttaagacgtgtcgtcttacgattggccagcgatacttcctaaaagctattatattaaactataggggacccgatactaaattacactaatagcgatattgacacataggagagtacttgacaccacttgtgtcttttagcatttctcttgtttcttcctttctttgagcatagcaggtggcacatgcaacaaaataaaagttctcaagtgatatataattatatattgcaattaatgttaactccatgcatgtacatatggacacagggaaagagggtggcatgatgagctgcaaccaagcacggacccttttttttaattagtgactaagttaaaacacataatatgttacaatgttgaaaatatagaaatgttatcaaaatgtgtttattcttagatactagactaagtatatgaagctcatccttaaatgtatatttagaatttctctaagtatttatgtgagggaggaagcggtagacaaaggttgtgaatcttgcttaatcattgagtattcttctcttttattattctatcttctagttcatagtgtcttgtatttttattgtaaacaattttaatatttctcttcttcttcctatgtcttgaatatatattatattcccttcaaaaaaaaanaaaaaaataatata

SEQ ID NO: 222315 - DNA, 1939 bp, Cannabis indica
ctcttcaactgcgtagtcccatacctacacagcttcagaatcatctcacttgaccttcccaagcgatgtgggattgtacagcttacctggtatttccccttacggatcacgggactactgactgtcacaaaacccacccgacttgaaacccaaaaccccccaaaaaaagcgggtttaaaaaattataggccgggttttgaattttattgatttaacacctgaaaaaattgggttacaccagaacctgtatgaaacccaacagtctattatttttatttttttatacattttctattcagttaaaaaatacttaattctaaataatgatatattatttttattttcttcttcttttattttctttcttgtataaaaaaaatgatattttcataaaaaacaacaggtaacccaactcaaatctagtcaaaactcactcagactcgatccaactgccgctcgacccacctgcacccaaaacgcagtcatacacaaatagacgcaagtttggtattctacacacatgaactcgaaaacccgaaactcatcaaaacccatttgatgtgcactcctacatccaacaaccaatcgaactaattagtatttttatttagtttggatgaataattagattttatattgttatatgtaaaatgtatatgtatatatgaaaattaacgttgaaattttactttatatttttcggattggatggatccaatccactccaatacatactagatctaaaatattagatggatccgatcagatcaaaaaaaattattaggtctaaaatattggataaacccaaattaaaccaatagataaaaataaaatacatccaataaataaaatcgatagatgttagattgattggatgacgcaaattaattagattgaatcagataagaaaatttaacatccaatatataattagattggatttgaataaaccttaaataattagatgtgatacaatagatatacgaaattattatgatccatatgtatagtttggaatttccaaagtgcgtggtttttgtaggatttttatcaaattgccctacaccaacaagaattttgaatatcagtatcaaaggtcaaaaatgacctttcctagtttaatttaaccttagactaatacccaccgtttaaaccccccacgacaccaatcttgatgtcgtattgaacccttggttcaaagactcagtagaagagtctagaaccctaaacactcagacacaactcacacacagcctcccaaactcgaaaccctagcagagcaagttctgctcaagaacttgctcggatccaagccagaaaacccagattcacacccacacacaaacacaaattagtttaaacgaatgaaaatgaaaaataaggagagaaaacatcatagatttgtttcagagttcacccagatctgggctacgtctctgtcaagctcttctcagagatagaagcttgatatccactataacaatgttgagttacaagattttggagtttcctgtcacagagatcgaccaggtaaactcgatttctctcctttacactttatatttctgttgttttcacttgtttaatctcgatctaactccttctttgttttcttgtgcatgtacttctcccttcgagctcctcaccatgagaactggtttctcatctctggatcttggagctgaagcctcaaactagggtttatttcttctctctctctgattcttctctgatctgtttctgttgtgttagatctaggtttatttgctttgatccatgtatttatactgttgtagagtcggttgatcaaaggcttaggagttagttacaatttcagttgtaactaactactaagtcttgatccactagaggcgaagccaccctaggatttgagtccatttacttgttttgttttgtgtatttgctgatgtggatatat

SEQ ID NO: 222316 - DNA, 1215 bp, Cannabis indica
aaaaaaaaaaaaaactcctattctaaatttaatgccaaaataagcttaccctatactaaaagaaaaagtatactccttttgtcgaccaaatggtagaaaaaaatgtattctcttctaacttattttcctaataatacatatatatattgaaagcaataatgaacaaattcattgaatcctaataatataaactatttataaatattttttttttgtgtttctttgtccgtttctttccggcatcataatatttttttggctagtggtagaaaatttagagaaatgcaaaatatattagtaacgtctagtattattttaaatgttatattgttattaatgtaattaaatattatgtcatatataatttactttaataatttttaaaaaatatggtgaaccaatcctacaataggtatcactagttttcaatgaattaattattaatttattatactagtaagattggaacataataaggtatattatatttcaatatatgtgtcagtatcgttattggtttaactaagtatcgggtcccacataatttaatataataatttttaggaagtatcactagccaatcgcaatgtgacatgtcgagaaggtgctatgcaccacaggtgcctgtggtgcctaatagcaatgctcttcctatatatatatatgcgcttctagctggtatctagtattttttgaaatttcccagaaaaagtcataaatacactacactgcacaaaacaaaagaaagcattaataattgatggaatattgattattacttgatcatagatggaacttgttaattctgagaggacactactgtcactgtgaagcatgatcatatatgtacacgtgagaaatgcttagacgcataggtgccaattatcattatatgtaagaaatactattataatttaatattaaattttacacattttaatttagagtacatttaagtaattgtgtaattactatatgcagtataactacatagtaattatattgtattttaaaatagaaagtatatttatatataaagtgataattacatgtgaatttataaaaagaaaaaatacttttagtaacaatcttttagttatataacatcgattttttgtgactaaatagtcacaataaaaacaaaaaattacttgtaactaaaatatatagtattttgatacaatataacgcattttagatcgtggcctatactac

SEQ ID NO: 222317 - DNA, 2288 bp, Cannabis indica
ggaattgttgggattaaactcacacaatctgtcaaaatcagtagatctatcttttcactcatcaaatgaatctgaaaaaaaagatattgttagttataacagttggctttgtcaccaacttaaagagaatttcgccaacatctataaatagatgtgtctttactccctcaagtaatctccaatgctcatacttcagtttcagagtcaagtttagaaagagagagggtccaagatcatagtgagtgcgtgtgtggagggatgcaatagaagtatcactcttgaagtgatttctctcattgtgagacatttctttataattgttcattgtgttggagttgtattcttaggcatatctcatggtgtactattaattatttctaatcaataaagatccatgatttattcattctcaagctaattttatttttgtctaatttcatctaaattctaatttttattttgtgattggttttagtttgaattgtattttcttgaacattgttactgaactaacaatcaggttttgaggatgatcattcattcaacacaacaactaacttatatatgaatctaaatttttagtagcaaaatttgtcaaaccattgtaatgttagcaaatcaatcaaaattttactcttaaaatttgaaatttagaaatagttagtgattttacagtaaattattgtataaataaacatatatattatgtttgttttgatcaactaattgatgatcttgattcaaaaaataagatatgaaaatagtggtttaaagtatatttattgagagtaaaaacaagataatactaatataaataaaaattatattaacaataaaccctattatttatgaattcttatcatgttcccttaatgacttacatttctactcttgtcatgtcaatttgtctttttgtactatatgttatttttctgtgaaaatctaactttgttttttaatagctacttgtcaacaattccatatatattgcttatctaattctatatagttttgtttttcaaccaaaaagaaaagaaaaagctatgtgattttttttattattattaaaatattgaaagagcaataagggtgtatttataaattagtattatactataggctagctaaagaagttaagaataagtgaataactttcaaccagatagtgagagatgagtctttccagtctttaatttatgatggctttgttgtcaacattttatttataggctttttgttttgatttgaaaagaaggaaataacaaacaaataaaaagataatttagtcacatatctacaattttagaatcatcgcaattgacttttttcaagcaatatagagttgcacaacttaggagcttaccaggtctggtctatatccttgtggatcacgagattctgactgtcacaatcatccccttacggggttcgacgacctcaatatcgaccacacttcctgttggcttaaggttctgatactatttgtaatgcccccacttcacctctgtagtcaaatacctacacagtcttagaaacatcactcttaacttttctcaagcgatgtaaaattgcacaacttatttggtttatatctttttacagattatggtcgactctaactttcacacaatattaaaaaaataatagagtatgaatatttaatcctaataataataaattctattgaaaattataattcttcatgaatttgtatacaaacttggtttgctttctgtttctaataattttaagtacaattaatagatgagcatttattatcatgttcagcataaataaactagtgtaaatatatttatttgatatatttaaacggttatgaataaacaattattttatatattgttatgtataatatttttagtaaatatgtatagtgtactatcaattattgtttcaagaaatatgtattatatatatttatgtatatactatttctatatcacgattatattgttataaataaagaaaaagaaaaggatgaatagaatctcattaataattattatcatatacataataacacactatatttggaggtacaaaaaaagtatttttcaagtctaaaaatggcattattaattaattataatgcaatatagctagctagataatgattcaatcaaaagattttgattatatatatcttgttattgttaatgatcaattaaacatattcatatgcatatgcctatataaatctaaaattatatgaaagaaatcagacatatgggttccaccaaaagatctaattaataataataaaaaaa

SEQ ID NO: 222318 - DNA, 2468 bp, Cannabis indica
catttataaatatagaatatagtttgatggtagcctgatggtactattttttatgtacaaaaacataaaagaagagggatagtatcgagccaccattgaaccaccattagatccttatcggactaccatcggtatggatgagaaagaggagtatggattgtgaagttagaagagaaaaaaagagagaagagtattatatattattataaaatatgcccatttttttattttggtaaacttgtattaaaaaatttaatatacactaaatgtatgcatataaatttaaatttttatatattttcaatgtgcatgataatgatcattatttaaggaggaaattacattaactatgagactttaaaagttcttatgttaaatatgatacttttaagcttgaccaatttatatggtattttttttaggtctttctatggtatttgatatgccatatatatatgtaaattaggtttttaaattccatatttaatgtttttatttgttactggtgccgaaaaaggtaccggagtttactgccgatgatagaaaaatcactatagtagcagtcgctgccagaaaagtcgtcggaattgttgtcgacgctggaaaatttgtcgaaattggcattgtctccgaaaaaatcactgaaaaaattactaagaaactgggttcttgatgaagaaactactttcttggtgattttttttgtgacgatgccaattctgataacttttcagacactggcagctactccgacgacttttccagcaccgacaacaaactttggaaaagtcatcaaaattggcatatagtcgccgaaaaaattaccaagaaattggtttcttgatgaagaaaccagttttttggaaattttttcgacgacaatgccaattctgatgacttttatggcgtcagcagcaactccgacaacttttccggtaccgacaacaaactctaaaaaattcatcggagttggcattgtcgccgaaaaaattatcgaaaaaatcaccaagaaattataaaaattggaaacaccgcacgaagcgcgacttagttctctagtttattaataaaataactatatttaagtatataatgagagttacacatcttatcttaaatatagttttttttttcctatcacaaagattattctatgagaaaaattcaaaaaatataagttaaactacaaccggttactcctttttttttttgaatgaacaatcggttacttcttaggttaactagttacttattttgtctttctcatattttcttaactattttttttttttttttgaattttttccataaagcaaattttaaaaaaactcaaacttttgtaaatttttaccttaaaaactataaaagtgaaaatttccctttgttttatatagttgttgaaaatttggtgttccaataactgcttggatgttatcaaataacattggagaagattattttgaagcattttggtgacttgtgaccaacattgaaaaatgacataattggcttaactctttgatggcttggccttggtgagtgctttgagcgtggcaataccccaaataacttgcaaattatctcattagttaatcccataaaactctcctaatgaaggagttgatatcatttgaaattcagagaaagtgatccagaactctaaatgtagacccataatgtttctcacttgatataagttgtacataatataagaaaactttgtaataatatgctcatccttagtgcacagtaggctgagggctgaggggagcacatatgtagggcttgataaataatttttagaactctattgttgagtgaaagaagaagtagcttttatatatgacaaatatattagaactttgtttgagcctctttctttatttcatttcttttttgatatttttcattgtattattttgtaaagtagtgctgtaatcttcacaacttgttaatttcaaacattctcttcatgtgtaatcgtttatatatatatatatatatataaatttatatatttgatgtataaattatgatcaatgataaaattttaaaatatatatggtatctttattcctaaaactaatgtttatatgtttaatttaaataaattattagactaacttcagttacttaagaagacatgttctatattatgtacaacttctatcaatatattgtataggcacatcaaaatttaaactgtgtttaaaaagggaattatttcataaatatacaaaaataacataatttttacatttttccagatttgctgttttttttcttaaaagtttttatgattttttttaatattttttacaaaagtacagagtgttgtttttttgttattttcagaaaaatattgttttgacgttgctggtatgaaaaagtaacatatataatttgtttttacaattatacaatgttattttttggttgtttcaaaacaatgttgttttgatgttttt

SEQ ID NO: 222319 - DNA, 2272 bp, Cannabis indica
gcacgcatgcaacacactatttgaaactattttttcggcgttattaaattttttttcaatttcttaaaattttacatgatgtcctatattaaataattataacaacgtacatgatcataaaaaaaaatttaagttttttttttaaattaccaaaataaatatttgtgcatcgatgaccctttaaggaggtatattataaaatttttcacaatatatatgtataaaaaaaatgaattgataatttatagtcaagttgtgttgattacttataatatacggagatagaaagaagatattcatgcactatatattgttggtagaagaatatatatcactttataaagtctctctataaattatataataatatatataattagtaattacgaatatatatatataaccacatatgatcacaaagtaaaagagggggctaagaaaattaataaagttgggctaataatattccctagaacccttataaggtgaatcaaaaaaattaattcttaaattgtttgattcacaaattaaaataaaatcaaataaaaaaaattacatagttaactttaagaatacttatattctatatcatcgacttctcaaaagacacaacaacagaaactgttaaaacaggttcaatctcgtagtttgaacacttaactattatgtaaagtatgtactaattaataagtagcaactatttcagtcgcaaatgaccaacaatttaatgacaaactattaaagagcaaagaagagctaacaatgaaacaaaacaaaacaaaatcatattacatatacaagactaaaacatattcaaaaccatttcacacaaacaaggctaaaatactcaaaaagaagtcacagagacaagactaattgcagtagcaaaaatcgaatggtagtaacaatatacaatcccgactaaattgcacctagatccaaaaaagctaacaggcctggacagaaaaaaaaaaaacgcaacatttaatagttataaattttggagggagaaattgttgagaatcacggggttccatttgctcacttatttttgtttggatctcaggcatctttgcaccatctggatctctcgggtgttgatcgaaagcccgctagggatatggctctaataccatgttgagaatcatgggattccatctcaaaaccaattggtaatgaatggagttgcccatattcttatatatggctcaatacttttacatttaattcatgtgggacaatattctcaaaatgaaacctaattttctttttcttttatgtatattaatctcattataaagcttatgatgatggtgaggaatgaagcaattaagatgctaagccaagttttttcccctttatatccaaacaccatgcaccatgtgattcgatctctatctctatattatatatatgtgtgtgaattaaaatgaaagtattaaatatatatatatatatatataacaaagctatgtataatattagctaggtaggtagagaggtagggggtgatcgaataaggaagatgaataatgatcaaatggccggagaacccataaatattgaaataggattccaattaactatgtgccattaaaataaatataagtatatatctttcgatcggcatatacattcatatagcattatagcataggcaccacacaagagatagaaaaagagaaaatggttattacatatgcattgcatatacatttggaaaatttttaaagtacgtagggacttcatttttatttttacttagcatctacaccataccatgacattaacctatccaactacagactggaccccggaaccagacgcagatcccggcccgaacccagacccagaatcagactcagactcgaactcgaagccggacccaatttcggggttcagggtccaactccaagtctgggtccgaagtccggggacggggtttggggtctgaggtctggactctaagttccatagtccgggtctaaggtccggatatatgaacaaaaatgtaaaatataatatgttaaacaaaaaaaaaatatttttgaaaattgaaaactacattttgatgttttttattttctaattttttaaaattttgtttttaaaaaatcaagatatatacttaggaattttctttagtattatctaattaattattagaattacaaaaagacactaataaaattcaagtacaccatacgaaatctatgtcaatattatttgggaaatttacatagtataccaacttttgctatttttttacaaa

SEQ ID NO: 222320 - DNA, 1843 bp, Cannabis indica
ttaaattcaaaattgattattttgttagtatttctacttaaaatatttatatagttttattttgaaaagagaattgtcatttggtagtgtacaaacaccatactaaagtggcatactataattgttttagtaattttttatatatggttcattaaataaaaatgtgacattcatatattaagatgcacatataattatttgccactttctgtagtgtttggtatacgtaccctcttaacatttttcttttgaaatttagtagtgtgttaaagattgtgccaaatttacatcaaatttcacaatcccaaccttaggcatagaagaactatgtctctgcctaatgactcaaaaaatattttacccttttaaaattacacatttttttgttgattttaaaaaatatctcattttgcctaaccaagtataatttgttgtggtatgtatgtattattacagctaactctatctggattgctgaactttatcgatggattgtggtcgaactgtggggatgagagaataatagtattcacaacgaaccacaaggagagacttgatcctgcattgttgagaccaggccgcatggacatgcacattaacatgtcttactgtacttactctgcattcaagactcttgctctaaactatcttcacattcaaaatcattatcttttccaacaaatccaaaacaagatcaaccatgtgaatgttactccagctgaggttgccgaggagctcatgcgtactcatcatgatgatgttgatcaagctcttcaacgactacttctcacactcaactccaaaccaacatcatcatcatccaataattaatcatcctcaagttgatttatctatgttttttgtcaatttaatattatttgatatcctatgaacctttctatttttcttttgattttttattgtttaagtaatatattaagttgatttatctaattacatatgttgtaagtaatcatggaattttattaatgacaatcaactaaaataatagcttacaatctaattaggatattttttcattaaagacacgattaagattaaaattaaaaaaagagataaataatcagtcatctcattctcagatcgtttgaaaaaaattaaactaaaatcaaatgaaaaagattgcagcatcacaattaacttcaagaacacttatattctattgttccaaaggtacaatagtagtaattgttacagttcattcaacctcgtagtttgagcactcaacttttgtgtaaaataagtaactacactactataccaaccccttcaagtcgtagaacacttgttattaccaaccactaacaatgatttgatggcaacccatagaagaataaaaaagaaccaacaataaaacagaacaaaaaaaaaccatgtgacagagacaagacaaacactcaaaactatctcataaagacaagaccaaaacactaaaaactatgtcacaaaaacaagattaattgctatagcaaaaattttattgtagtagaaaaacacagcctcgaccaagccgcacctaaacccaagaaaagtcggcggacctaacgagagaaaaaagacaatgacctctgatagctatagatttaagaacaaaaaatctttacttggttaacaaataagtagtatacatttattattaattagtaaaatttaatattggtacccatatatttttatttgatacataatctagaaaattactaaccactcacaacacgcacatgagtatggtgttaggtattttttttggacatagtattagaatcactcatgaaattataatgcgaaaatcttcaatcagcacaggacccttctcgaatca

SEQ ID NO: 222321 - DNA, 1514 bp, Cannabis indica
ttatcacaagtgtccttcctaggacacattgtcgggaaagacagtattatggttaattcggggaaaattgaatcagttatgatttggttgaggccaaagacagctattgaggttcgaacttttcttgaattggcgggatattactgatgtttcgttgaaggattttttaagatttctttgccgttaacataattgaccaagaagaattaatggtttatgtggtcagacaagtgtgaaaataagcttccaagagttaaagtagtggttgattacatcaccagtgttagcattgccctcagataaagaaaagtttgtggtattctgtgatgcattcagacaaggtctagggtgcgttctgatacaagctgacaggttattgcctatgcttctcgacagttaaaggagtatgagcaatgttatccgacacatgatttagaacttgtggctattgtgtttgccctaaagatatggcggcattacttgtatggagaaaagtgtgagatctatactaaccacaagaatcttaagtatttctttacttagaaagagttaaatatgagacaaagatggtggttggagttagtcaaagattaagattatgagattttgtatcatcacgagaaagccaatgtagtggcaaatgcgttgagcagaaaaggtcctagtcagatttttagtacgacaacgatttttcctcacttggctttagatatggttagggctggtattgaattcgtggttggaggacttcataacgtaacactttagtcaaacttattagaaagaatcagaagggtataattggaagattctgagttgatcaagatttcagaggaggtattagcttgtcaggctaaagatttttcaatctagaatcatggaatgttactttataaggctcgagtttgtgtcccaagcaatggtgagctcgaaaaagagatattggaggaggctcatagtggaccttttttattacacccagataccaccaaaatgtaccaaaatctaaaaccatattattggtggtgcaaaatgaagaaagatgtagtggactatgtgtccaagtgtttgacatgtcaacaaattaaagtagaatatcagaaactggcagggttactacagccattaagacttcccgagtgaaagtgggaggatgttataatggattttgtggttattttacctagaaccataggagcgtatgatttgttattgttatagtggatcgtttcacaaagtcaatacactttctatcagtaaagacaacctatacagtggacctgtatgcagagttgtatgttaaagagatagtttgtcttcatggaactccaaaatccattatttcatatagagattcaaagtttacttcaaagttttgggtaagtctacagagggctataggtacaaagcttaaacttagtacaacgtttttatcctcagactaatggacagtctgagaggatgatacagatactagaagatttgttacagccctgtgttatggactttgaggg

SEQ ID NO: 222322 - DNA, 1606 bp, Cannabis indica
tttttttttgccaaaatttaaaaaaaatgtggctgttttctggaaaaaaatattttatcgaaaaattaaataaaaaactaaaaaatatttgaaaaacagtttagagtaattaactggttacctttgttacatataaatatttaagtgttaaagttacttatattatttttttcatattttttaacctttatttttcccataaataattaaataccttatttttgcataaaaaaatcagaaaatgtgtaatttccactttaaactatgctaaagtgcaaattatttttttcaaaattgccattttgctgacaaataatcaatttcaaacacaaaaatacttgattaataaatatctcaagaataatattaagagattgatggaaatagatccttccattagagtataaatttgcatttcaatcttatatattgtgataattccttcctttccaaaaaaataataacaaatgtctggaaaacctaatcgactgtatgaaatatgtacgatgggttgtttggaggtgttcaccaggtcaacgcaaaatattaaaaaaaaatattaatacagtgactgtattaatcccaaatattaattatgcatacattaaaaaaaatacgattttaaccaagtatataattaagtttaattgcttgttaaattaatgtttatgcaatatgatgattgtaataaaaaaccttctatttcaaatataaatacaagtactagagatcagaagagaatcagagaataatcccataaaattattaattaattacaaccaaacgatgaaataaatcatatcaaatagtacgtacatgcatgcatgcctctcgtaaatttaattattattattattaaattattagggttaatgcaaaagcttagagaatttggttttgaaccatcgaaagcctttccttactttgctttcaatagcataagtcttgtaccttgcaacccttcgtcgtctcttcaattctcgtatgatcatatcatcatcgccatcgtgacgatgacaatgatgatcatctctggctgttgaaccccgtcgccacggatagttccccggcggcttccgccacgaaaccgccgctgaattatttacaactactattgatgatctgcgacgacctgagttctttgccatatataatgattaattataccatcattatagatctttctaatatgaaaaaataattatatatatatttagtttgtctattttagggagtgacgataaattatacagcaagatatgatgtggcgttctccagcaaattaatctatttatatgttaagctaattatgccacctactcgtaccactttttttttttttttttttttacaatataagacagatcaatgataattagtacgcagtataagccaattgttatgaaattatctctataatattatatgatgagaattgactaaaaatcacactgttagactatgaaaatgctatatggatttattagtaattttgaaagtgttaaagcctataaatatgtaattgtataactattgttagaaagaaatagaaaatagacctttggttcatgattagttgtgccaggaagatcaagattcaattaaa

SEQ ID NO: 222323 - DNA, 2953 bp, Cannabis indica
ctgtaaataaaatcaaaaaaactttaaaaatatttaagattccgtgaaaccgtatttttgtatttttttttattatttttgtgtttgtgaaataatccctttaagttttttaaaatcatattcgtcaatcaaaatctaatgatttaatagtttcaaaattaatatttatagttaaatttatttagtaataagtattccatacatataattataaatttggatatatgatgcacattgttaattttattacacacttactattaataattattttatatggtcagggttatcaattttggagcaaaacagacaaggacggctatttttcaatcaatgatataagagtgggtaactataatatatatgcatgggttcctgggtttattggtgattaccgatatgatggtgttattacaatcacaacaggtataatttttataagttaatgaaagtgttattaggttattatataatattattttttataaatgtagttattatataaaatattgttattagacactaataattacttagcactaatactattactatagtattagccactaataccataagagtattacttgtaaattgttagcgatattttttaataactattaattattaaattaaattttgtaagttcagatacttcattccaccaataccaatatgaaacatcaaattggtatattgcagattgttataaagagatgggagaacttgtttatatgcccccaagaaatggagcaacattgtgggaaattgggattcctgatcgctctgctgctgagttttatgttcctgatcctaatcctgattatgtaaacaaactctatgtcaatcaccctgataagtaatttctccaaattattattattaaatgaattaacatgtatgatacttattaataagttgattattattattggttatatggcttcttctaataatttttgcaggtttaggcaatatggactttgggaaagatatgctgaactttatcctgataatgatttggtttacactgttggtgaaagtgactacaccaaagattggttttttgctcaagttactaggtgcaatactaaatattcttccactttttttttagtttggattacatattgatgtttcactttttactcatgaataattttcattgaaacaattatctgctttttgtttttggtctcctaataatatataggaagaaagaaggtactaaagcatcatatcaaggaactacttggcaaatccaattcaagcttgatgaagtggacaagagcaccaactatacactaagaatagcattggcatcagctactttttctgaattacaggtatgtataaatctcctagtaaagagttcttactagttatttattaagtagaatttagcatatacaaataaaggaactaacatgtgtgagtgttttaatgttatatatatatataggttcgagtaaatgatccaaaggtgggaaatgctcctctattcacaagtggattaataggaagagacaattcaatagccagacatggaatccacggcctttactggctctacaatgtgagtgtaccaacaactaggcttgttcaaggagataatacaatctttttaacacaaccaagaagcacaagtccatttcagggaattatgtatgattatatacgcctagaaggacccccttcttctccatctccaacttcataataaaacctctcttgttttgtactttcttttgttatatagcttgtacgagttctttttatttatattgaaatcattcattccaagtaaagtcattttttttctttcaagctgtggttgtactgttgtagaaatcatgttaaattttgaagtaaattgtcgtataaatacttaatgtttcagattttattaacttaaatactctatatattattttttaaggtaaaaatacttaatgttacaatttttttacatctattactaccacttctgttaactcataaatatggacacatggagggtctagatgcattacatttattttttttgattttaaaacttaatattcttaatatcagaaactaaatgttacttattttcttaagttctcataataatgcactggttcactcagttatgttaatttagttttgcatctcttttatttatctttgggtatttttgcctccaaaataaagataaagtatttaaatgtataaaatgcaatttcccctaaatttttttacacatatagtccttccaatttaaaattttaagtttaggcctatcaaagtttattttatttaagtgggaaatgaaattgtgttaagtgttaaactgatggcaagcggcttctcgttacatcagtgactaataaaagttttgattttatttttgtttgtttcgtttaaattttacttgaaaatggtcaccactagagacagataaacgtacaaatacccacaaaacaagaacacacctcaaatccgccggctaaagtttcttttggacagtttgtgtgcgtgtctatgtatccaaccttcacatataatatcgcatataatatacataatctcaaacatagttcattccgcgagctagctaagtaactaatcataacaaaaaaccgtgatcacattatcaattattctctgttgtgagatcaaaatatggaaatcctgagcagattcagtagtagcagtagtagtaatcaatcttcatcaaataagaagaaggtggttatgggtggtggtacagcagatcatcaatctcgacgtaataaagcccaaatagcagagcctgtaccggacctcactgatttcatgaacgatatgttttttggtaccatcaaaactactactagtactgatcataatcatcataacattgtttataacttgacgggtactactactactactactattgataccgttattgtaacggatcaggaaa

SEQ ID NO: 222324 - DNA, 2292 bp, Cannabis indica
ttaatttttttaagaaaaataaaaaattcattaattatctggaccaattagagattgtcacgtgacaatttacttaaaatttaacaatcaggtacttacagagttccagaaatataacttaactattattgccgctaaaaattaaacttaggtatttatttacaattaaagataaacttaaatatttataccacaaattattttatttcattttaaaaaaaagtattagtaaaatatttctttcaaaaagtaatgattattcataatttatataaacatactattacgatttcaaacacgcaagtacacgtggtcaaagtaagaaataaactcacaaaagtgaggtcgatcgatctcacaaagactatagttaattactaaacaattaaatttctaagttgtatttggtaaaagtaataattgagagaaaggatttccaaatctatttgaaaaaataaataaataattaaagtgagattaatgatgggctcaacttaaggttattaattttaattgaatctactttatctggtttaacataatttaattttcaattttcaattttcacatgataacaaatttactaaagaaatttatatttggattaggacatataaatctcaacctatatgcaaattttctactctcataaaaaatttaaacatatataggaggcattaagcataaaaatcttaaatgctacataaactatttaggtactctcgtcctatattgaaatctatgtctatttcactatagcataatcaatacacaattctcaaattttgtgttgaaatcactaaacaatcaattggtgatccgacattaaaaataattaaataagaatgaaattggtacacatagaaaattgagggaagaattaaatcacattaaaaccaaaataaaatgttaaacaatctccattaataagcctaatggaaaatctagcaattcaagttcattgtaaatagctgacaacaattactcaagaacattagaaaagaaattacaataaaagaactcgttgaaaaatccttgattgataaaagttttcatccttccaaagtcgtcttcttaaaaagagacctttatatatcttaaaaagataaaatcctaatttttaaaaaatttaaggtgggtcgcgacactcttgtagtgtcgcggcccgtgacttcaaaacacgaaaattccttcaacattttatatagcgggtcgcgacactcccttgtagtgtcgcggtccttgaagactgattttggacaacaaagaattaatttctccatgcctcaacattgaatcctaatgtgaaagctcgcctattaacttactaaacatgaccttactgcaaaatttttgcctcttagcgccctaacattgaagttcaatgttgtggcactactccacactttccaaccttttaatattagaagttcaacattgaattcttttaaatttctttcttgaattgacttaatggtgctctagcgacaaaattttatttaattaattcttcttgtacatttttttctcaaatttggtctattcttctccaatattaaacctaaaaatattatcaaccaaaagcgtaaaattacacaaaatacaactaaaactaattaaattctttagaaacctatttaaattagtactaataaagtcctaacacatatattgagttttgagtttaattagtcacagtatacacatctcccactaaaagatgcttaaagtggacacatcttcatgtgtaattaatggaagaataaaaaaaatgaattagaaaatacatctataaaaatggataaaatgagtttacaatatctacatcaagaataaagattggtgtatgtgcctcctcgcagagatttgaggttgagttttaggaatgagctatgtgaggaggtgaagccttggacattttcttagattttgatgggagacttaagtagcattgttaagccagatgagaaagttggagggagagacttttctgcagcggagggacacaacttaagagattttatttttaatataagaggggttgatttggaggccaccgcggtctggtatacctggactaatagccaaaatatcaagtctttgattaaggaaaggctcgatagggtggttgggtcatagacttttctaaagcgggtgtgaagaatttgccttctcagatttgagtcattccctgttgttcttgatactgaaatggacagagaatagactaaggctcaatttttttttattgatgcttggactctagatgcttcttgtaagaatgttattgag

SEQ ID NO: 222325 - DNA, 2821 bp, Cannabis indica
ttttttttttatgaatcaattagttgtattgctcataaaaccgatttgtacaaacacatagcatcctcatgagatgacctataaaagactgtgtaatatgcatacaattatttacatctattcaatcctcctatatcttataacttggaaaaccaatcattgtccttcctattgatccctttcggccatagcaccattactcttgtcttgactatctctttagtgttctgcataatctcttgtgctctcaccatcttcatgttccacatatgatcatttcttgctttcctaatgttgtataacaagcatgttattgcagctgagattacttttttcctaaacttggacagtttggttcttcctatccaacgcaccagttgcttcactgatatggcctgagcaccccattgcagccatctttttatttccagcaggcattcagcagacacaaagcattcaaaaaacaaacgctcgacagtttcttgctgcatattacacaatatacatccatcttcctacactatgctataaacttttagtcttgcctttgttctcaatcggttctgaattgctaaccaaaaaatgtagcaatgtttaggtacattgagccttccccatacctccttatcccaattgactttctgttgtatagggcaaagaagcttgtacccttcttcaatggtatatcgggtcctaacaaagacctgaatatccattttgcttctgatttgatccttagcagctaccacctgtttccagtaccagctgccattttgtgggaatttaaattcccaccaatcactctgtttaaaatacacactatgtacccatcgaacccacagattatcttctttgtttgctattacccacacatacttgaagagggcagcttggttccattctagtatccttctaaagccaactcccccttccttttttgataaacacacttgatcccatgctataagtcatgccccttgcatcatactttgacccttccataggaaagcttgacagattgctttcaattatgcaattactttccttggtaacttcataatttgactccaataagtgtgtatagaaagcaataatgagttgattagaacaactctccctgcaaaagagatgtttctagaactctaggtcttaattctggctgccatcttcattgctagtaaaacacattctttcccagatatctttttagcacatattggtatgcccaagtatttaaaaggaaggtgttgtctgctgtacccagttgcatccattattctctgattttcagcctcttgcataccactgcaataaaatgcagattttgttgggtttggttgaagcctagaagtgttagaaaatagttttaagccttgaatcatgagatacacactcttgaaatcaccatgacagaagacgagtacatcatctgcaaagctcaagtgattgagttgtatgctttcacgtctgtcatggaattggaattcctgcttttgcccaatcttgttcatgatccttgagaggtactccattccaagcacaaaaaggagaggggatagtggatcccctgccttaaacctctcttagactcaaaaaacccgtgcattgttccattgaacatcagtgagagccataataagttttatgaattgtgtgggaaacttaaaggccatcaacatctcttctaaaaactcccaatcaatggtatcatacgtcttttgtaaatccaatttgatcatgcaactaggctttgcatttttcctcccatagtgcctgattaaatcttggcaaatcataatattatgtgctataaatctcccttgtacaaatccaccttgattctgagccactaactcagggggcacatgttttaatcttgaatatatcaacttagttgcaatttggtaaatcacattgcaacaagcaataggtctgaaatcacttacagtgtttgggcatttaacttttggaatgagagtaagcatagtggagttaatctcctttagaatccgaatgcaaagagttctgaacagcagcacacacatctccttgaatgagctcccaattatcttaaaaaaagtagcttgaatacccattaggtcctggtgccttgattccaggtattgcaaatacaacaacttttatttcctcacacgaataattctgacagagccaaatagcatgctgatctaaaatcacagcccctgattacacaaagtttgataatactgttcttcttccctgcattttggtgcccagcagacccttatagtatgttaaaaaagctttagaattttttgattcctcttctagcctctccccatcttggttctgaattgataacaccctgttttgtctccttctggctttaatactcgcatggaataaggccgtgttttcatctccatttttaatccgtgtaatcttagctttttgttgcagataagattggtaatttttcagcaagactgtatacttcttcctagcttcaagttcatcattttgcagcaagtgatttaaaggatcctactgcaacttttcctgcatctctgatagtgcatccttagcctgctgtgtagacatctgaatgtctaaaaatgcctgcttgttcagctcctttagtaccccttttaatcttttaagtttggtcaccacttgaaacactttatgaccctgtgttttttgattccaggattctataacttgggctgcatattctgggtgtgtattccacattcaaaagtacctaaatggcttcttgccactaggaactgcagaatgtcaaaacaactatttgttggaagttattttaccaggaact

SEQ ID NO: 222326 - DNA, 6901 bp, Cannabis indica
acccaaaaactggggccagacctaggacccaagaagcaaactcaaacctgggacctgaaatccagacccaaactgggatgaggacccgaactcagaccggaacccaaatcggaacctggagtcagaccaggactcgtgacccaaaccagaaccgaaacacgaacttggacatggaccaggacctgggacttgaacatagatgggggacttaacccaggaattgggccctagaaaaaggccagaacttggcccacagaactcgtattgagatccgtgacccaaccccagacccaaacttggaccttggatccacctcgggacttgggattcgggactcaatgcttggaaccgacccgtaccccgtgacttaaaactggaactgaaaccaaaagcagatcgggacctaggaccacgaccaggacctggacccagacccaaaactgtaaccggacgagaacatagactcagacacaaatccacactcagattctgtgtctaaagtcggtttcaggtctgggtcggggtctgagtcttggtgcgagtttgggtctgggtctgggtttgggttcgggtctaggtcctagttcaggtcccaagtgcgagtctaggtctgggtctggcttaggatctcggtcctaatataggtcccaggattttatccaggtctaggtcagggtcggtattcggttccgggtctaggttcgtgtccatgtccaggtttgaatcccagtcttagtcaagggcttggtctaggcctaggattgagtcacgagtttgggttcgggttcgggctctagtcttagtcctagtctgggtgcaggactggtctgagcttgagtttagaggcttggttatggtctagttctgcgtgccgatctaggtggaggtcctggtcatagtcccggtcctgttccagggtatcggtcacgttcttgtcaagtttcggtgttgggtcccatgtttgagtctacgtccaggtcctggtctagctttgggtccttgtttgagacccagattaggacactgactatgggtcttgtctaagctccgattgtcaaatcccgagactggatctggatcgcaatcacgggtcccagtcagggtctcggtctaggtctgggagcgagactaaggtgtagttctaggtatcgattccaattcagggtcgtgagtcctgctccatgtttgggtctgagtttaggtctgggtttgggtcccgagtccctgtacaggtttatattcaggtttgggacccaatcccaaggttgttctgtgtcgtagtctgggtccttgtctggttacagtttttggtctgggtccaggtcctggtcatggtcctggtcgtggacttgttcctgggtccagattcgcttctggtttttgttccagattcaagtcacgtggtacgggttcgggtcgagtttaggtctgagtttgggtttgggtcctgatttgggtctggggcgaggttcaggatcgattttcaatctcggttagggtccaaggttgggtttggttttggttttggatctgggtccaagtctcggtctagttcgagttcaaatttcggttttggttcccgagtgtgggtctaagtctaggtatgtgtctgagtcctcatttgagtttgagtttgggtttgggttctggtctaagtgccagatccaacactgactacaggtcaggtccaagcatcgagtcccggatcccaggtcccgaggtgggtcctaggtccagctttgggtatggggtcaggtctcggatcctgatccaagttctgagacccaagtactggtcccgattaaggcgccctcttcttgggcctaggtcccccatatatgttcaggtcctaggtcccggcctaggtccaagttcgtgttccggtacgggttgggtcttaggtcccggtctgcgtcaaggtcccagtttgggttcgggtttgagttttggtcccactcccaatgtggatccgagtttctggtttgggtcttggtttgggtccggccccaatttttggttctaagtctgggtctaggttcgggtcccaatttgggtccaggtctcggtcttcgtttaggtgcgaagtcataggtcccggtctgggtccaagtcctggtatggattctggtctaaatttgggtttagatttgggtcctattactgtcttagatctgggttatagttcaaaacgtggtccgattctgattttgggtccgagatagggtctggatccaggtttgggtctgggtctgggtttgggtacggattcaggtccgggtcctggattcaaacactaactataggtcaggtcaaagcctcatgtccagattcagatcttggtctcacatctcagtcttgttccagttcgggtcctaggtcttgggccgggtcctaagtttgagtttgggtccgtgttttgggttgtgtcccagtagtcaggtcctgggtttcaggtctatggtcgggtcttgtgtctcgagtctggggtcgagtttttggtttcagtcccggttctgtggcctaatttcgtgtccatgtccccgatctaggtctggatccttagtccaggtctgggtcgaggttcgggtttggagcctaggtcccccttctaggtctggatcctaggtctcgctctaggtccaagtacaggttcgggtttggatcccgagtttgggttcgagtctaagtcccagtattggttcaggtttgagtctgttctgtgtcccgttctgattccaggtcactgttcggtctaagtcaaggtctcgatttgggtcccagtcaaggtctaggtcccagaccaagttttggtctgagtttgggtccgagttcaggtcctgagtctgggtcgaggtttgggtctgcatcaaagtctgggtctgggtcctgggtttcgatctcggtatgggtatgggtctaggccagtatccaggttagggttttgggtttagtgtttagggatttagggtttagggtttagggcttagggtttaggggtaattgtaaagagttaaggatttagggtttaagatttagggtttagggtttaagggtccgcttctagtttcggttcgaattttgggtcacagggtatgattaaacgtttagatgtgggtctaggtccacgtttgggttcaggtccaagtcttggtctcaaatccatacaccaaccacatgtcgagtctagtttgagtttttgtacaggttcgggttttggtctgggtatgggtctggggcaaagtctaattcccaaatttagataccgactatgcattgggtccaagcctcaggtcttgggtcctgggtcccatgtccaaatccagatcctggtgaagttctaactcatttctttggtccttgttcgggtctcaagtctaggtttgggtctaggtttggatcttaagtttttagtcatgggtccgagtccccgattcaggtcagggtcctaggtcctagttttggttagggtcgcagtcagagtgtaggtcccggtccgtgttagttactggtcttggcctggcctaggtctaggtcaccgctcagttctcaggtccaaagttcgagtatcgggtcctgggtcacggtcctggtcccgggtcctggtcccagtcaaaaattttgtctcagtcaaggttctggtctcggtcctggttcaggtctgggccctagtcctgatctcggtctaggtctgagtaccgagttcgagtccgaagtctaatacgattttgggtcttggtccaggtctgggtcttggtctgggtttgggttcgggttttagtccgtgtctaggtctgactctgggtctggctctaggtctgggtttcggtcttggtccggattatggtatgggtctcggttctggtccaggtcctgggtcacgagtcctggtttctgggttctaggccgtagatcctagcgcaagtctgggtttttgttcgtgtctgggtccaggtatcgatcctagtatgggtcggggtccgtcttcagttccacgtctagattcggtttcgggtccaggttcaatctctgttctagggtcctaattcttaatcttgttccgatttttggtctcgagtcggagtctgggtttgggtcctagtctggaaattgttccaagttcgggtcttggtacgattcaaagatctagacacctactacgggttgggtcaaagcccttggtcattggtcaagattcggatcccaatcttgggtcccggtctcatttcaattcggatcctagtcctgatccatgtccatgtttgggtccgagtctaggactgagattgggatcgagtattgggtcccagtcccagtcctgggtcccaattttggttctaatttagagtttgggtccccaatataagtttgggtcttgggtctaggtttgagtctccaatctcggtctgcgtccagggtccggttgtaggtctaagtccgtgtgtgggttcaagttcatctctcgagtcccgatccgagttttgattcagctccgagtcctagttcgggtctgggtctggatctgggtcctaaatcagattcaagttcctgaattgaaacccaaacgtcagactcagaccggggtctagggtacgggtttgggtctgggtctggctccgagtcagagtttatgtttgagtctgggtatgggtctgagtttggatcacggtcttgggtccctgtctagttccacttcgagtcccaggtcctggtatgggtcctaggttagggtccaggtctgaggtctggtcgtgggactcggtcttagttctaatgcttgtgtgccgggtccaagtctgagtcctaggtcccagttcgagtctaggaccgaattggggttcaagtcttggtccgagtccaggttcgggtttcgatctcagctttggtccagatttgggttcgagactcgatccaagttctggtctgagtctcgagttctaattcaggtctgggttccgaggcccaggtccaggtcccccatctaggtctcggtctgggtcaatttttgggtttaggtcctaggcccagttttgatttcgattcactatctaggttcaggtttgggtttgggtttgggtcagggtctgagtcttagtccgagtcttggtccgggtctagtccaagtttggatctcggtctgggtctgggttcgggtctaggtctgagttaggatcctgggtgcgggtgaaggtctgggtctgggtcagtgtctcaaaccacatctaggtcctgaggttcgatcccggtctggctaaaggtctgggttcgagtcaaggttcgtatccggatccctatctaggttcgagtctgggtctgggattaggtcccaagtgtaggtccgggtctgggttcgggtccgggtctcagtcccagtctgggtagacgaccgtgtctcaacctgagttctggtcttgattttggtctaggtttaggtctgagttcagttctcggtctggttcgagtcttggtaacggtcctagtattgtttgagggtcctggtctggcggttcttgttcatgttctatttttgggtctcgggtcgaggtctaggtccgggtcatggtaacggtcctagtattgtttgagggtcctggtctggcggttcttgttcatgttctagtttcgagtcctgggtcaaggtcagggacaaggtttgggtccttgtccaagtttgggtcctagtcttagtcccagatctggatccctgtcacgtgtctcggtctggttctggtttagagagtgggtcccaggttcgtgttttggttggggaccgggactggggtgtggttctacgtccccgcccaagttctgtgtcccgagtctggttccatgtttcggtccgagttcaggaccatgttcggatcctgagtccaggtcttggttgggatccaggtctgggtcccgatttgggtctaggtctgggttggatttcagaacctggtctagttacggttttgagtctagttccagttactgttccaagtttaggtccaagtcctggtttcggtcctgttcccaggtctcagtctacttcttgttccaattccaattttaggtcacacagtatgggtttgcttctaggtttggatctaggactaggttcgggtcctggtctgggttcaagtctggtgttgggtcccaaatccagacaccgactactcgttcagtccaagcctcgggtccagatcttgatcccaaaaatcaagacattgactatggatcttatccaagccccgattctcaaatcccaggagaagatctggatcccaatcatgggtcccaatctggttttggttcatgtcccagttctcgatctgggtctaggtctaggagcgagaattgggtcctgtcttggtctcgatcccagttcttggtctcgagtcctgtttaatgttcgggtctgagttcaggtctgagtttggctcccgagccccggttcaagtttggatcaagttccggacccaatcctagggtgggtctgtgtttgagtccgggttttggtccggttatagttttgggtctttctctaggacctgttcttgggtcttgatccatgcttttgattctaatttcaagtcacggactacgtgttcaggttgagttttggaccaagtttgggttcggaacctgattttagtccaggtccgggtttcagtctcagttagggtcagaggtttggtccagttccaggtttgggtccaggtcgtggtcacggtccttgttcggttccagttcaagcttcggtttttgttcatgagtgtgggtcttggtcttgctatgtgtctgggtcctggtttgagttcgagtttgggtttgggttttggtatatgtcatagatatagacagggactacgggtcgggtccaagcatcgagtctcggatctcaaggtttgtcctaggtcta

SEQ ID NO: 222327 - DNA, 2959 bp, Cannabis indica
taatcaccttgtggatagtatctagccttgaaaactttactcacaagagaatcatgtctgaataagagcctccacccttgttttccgagcatagcgagattaaaatccctcaagtttctaaaccccattccaccaacaactttagaccttgtcattctgtcccaactcatccaaacaatgccactcccattattatgagctctctttgatttccaccagaaacttgccatcatcctctcaagttcattacatgtaccaataggaaaaaggaagacattcatggcatacgaaggaagagattggaccaccgattttataaggacctccttgccagcacgggataaaaatttgccctcccaactgcttattcgcttcttcattttctattttagaaaacccaacactgcgtttttattacgcccaaccgtgcttgggagacctaggtacatgctatctgccccagcttcttgaacttgcatcaagccacagattctgcttcggatatccgcccttgtgtttgaactgaagaatgctgacgatttattgagattaaccttttgtcccgaagctctctcaaagatttgaagaagtgtaagaacatgattagcttcctcctccgatgcttgacaatacacataactatcgtccgcaaagagtaaatgggagataggaggtgcacttctagcaaccttacaacccgtgataagtttctgagcttcaaaatgtttgatcaaggaagagagaccctcggcgcacacaatgaacaaatatggggacaaagggcaaccttggcggatccctctagtaggaattataggtcccatcttctgtccactattaatcacgtgatatcgaaccgaattaacacatccaagaatgaggccaatccaccgttcgcaaaatcccatcacacgaagaatggcttccaaaaaaccccactcaacacgatcgtaggctttgctcatatccagcttgagagccatgtatccctttcttccatttgttttcctctttaaatagtgcataacttcaaaagtcaccataacattgtctgaaatcaatcttcctgaaacaaaagcactctgagtgtctgagatagcatagtccaagattcctttcattcaattagccacaaccttagaggcaattttatataaaacattgcaaagcgagatcggcctcatatcgctcacttgagacgagtttttcttcttgggaattaaaacaatgtaagtatcattaatatcagtcgggaagataccattattgaagaaatcccgaacaaagttgaccacatccaagccgactatgttccaatgcttttaggaaaaatgccgggtcattccgtcaagtccgggggatttgtccggatgcatttggaataaagcatttcggacttcatcctctgcaataggcatcaaaagctgtgcattttgttcactagagacagtcagccgaacaccattgagaatattacccaagtcaatgtttgatgaatgaaacagatcactaaaatagcttgtaatgactgcctctaaacccgatccccaattcacccatctgccactttcatctttaagttgcccaataccattattcctcttcctagtacttgcaacagaatgaaaatattttgtatttttatcactagagtttagccaaaattgtttcgatctttatttccaaaagacttctcgctgagccaaaacctcaaaacgattggctttcgcttgctggtgttgttgaattgagctctggtcccttccccatttagagtttctaatctgcttcttgcatttatcaatgcgatttctaaagtccccagtgatatcccttccccacttccccaacacctccccacatctttttattttttcttgaatgttgctagtacccgaaccctcccaacacccctgtactaactgcttgcataatggctctctaatccaggcattttcaaagcaaaaagaattaaaagaaccaggaggagacacacctttaaacaccaagagaatgggacagtggtccgatgttgaaacttccaggttgtagagagtcgcctgtgggaataaggacaaccaagtgtgcgtcactagcgctttgtcaagtctttcttcaacccagttatcaccattccttcctttctcccaagtaaatgagtaaccaaccaagggcagttcggttaagttgcaatcatccaaagcttcgataaatccgtcaatgagtcggtccgggtacggcctgcctcctcttttttcatcatgagaacttaagttgttcatgtctcccatgagacaccaagggagagagcttgcatttttaatagaacgaaagagattccaagtgttagaccgaaactctcttttaggctccccataaacccctgtaaatttccattgaacacagtgttgaaattggacagtagcatcaatatgattaaaggaatacccttgaattgccacatcactagactccttccataacaaggccaaaccaccactatgcccacgggcctcaactacaaaacaactatcaaagcccaattggactctaataaactccatacttgtcttattacacaaagtctcgcaaagaaataacaaattgggcttcttttggaacacaaggtccgctaagaattgtttggcccgcgggttcccaagcccacggcaattccagcttaagcaactcatggctctgggcgggcctggaaaccagagcctgccaaagatccattttttggaaactctccaatgtcatggtccataacatccatagcattattaacttgcttttccagggagcccacatgtcccataatgctatcaggccttcttcttttagagtcaattacgttggtgatagaggaatcaaagaagtttcctctattagtaacattcaatgtttaatcttctccatttacttccatattctccttgatattaccatatccctcatt

SEQ ID NO: 222328 - DNA, 2477 bp, Cannabis indica
ctcttaaggccaaatccgatgctctagctgcctttattcatttcaaagccttagttgaaaattagtttgataggaagatcaaagagttacatacggattggggaggagaataccaatcgttcagcaacttagttgctgagaatggaattctcttcaaccattcgtgtcctcacacatctgagcaaaatggtcgtgctgaacgaaagcaccgacacatcgttgaaatgggcttgacacttcttgctcaggctaatatgcctctgaagtattggtgcgatgccttccaaacttctgtgtacttaatcaataggttacctactcccgtgccttaagggaaaatcaccctttgagactctttccaaaaaaaaaaaccagattataacttcttaaaggtcttcggctctgcttgctacccatgcttaaggtcctaccaaagtcacaagttccaattccattctaccaagtgtgtcaaccttggttatagtgaatctcataaaggctataaatgtttaagttcaaatagaagactatacatctctagacacgttgtgttcaatgagaatgagtttccgtttaaaagaggctttctaaacaattaccacaaggaacccgaagtcactgtccaaactcccaatagctggttttatcttcctgtacagccacctgcttctcaaaatactactgcttgtactgaagatgaaacaacaaatgtctctcacagtgaccctcaacaaagcacaccacaacctggacatttttcgactgatataaaccatccagaattttcccctgctatgtcacagtctgctttgccaggctcttcacaacagtcacaacatcaggtagatctcactaacaactcttttgtcgagttagatattggcacaccttctgctacagatccagaactcacctccaaccgtgctgagtctgtaccagaaacaactgagcagcaaccacaaacagttcagcaacctggccatccaatgattactcgatcaaaggttggcacctttaaacccaagatgtactctgctcaaacaaaatggccaggtaacacaacagaaccaaaaaccctcaatgaagctcttgcacacaaaggttggaacaaggccatgtcagatgagaatatggctttaaagaaaaataaaacttggatactggttccaaggaagaaagggatgaacattgttggcaatacatgggtgtacaaggaaaaatataatgcagatggaacttttcagcgctttaaagctcgactagtggcaaaggggtttcatcaaagacctggtttagactttggtgaaacttttagtcccgttattaaagcctctaccataagaattgtcctcacgattgctgttacaaaaggctgggaggtccgacaacttgacattaataatgcctttttgaatggaaaacttgaggaagatgtgtacatgtgtcaaccacctggttttgaagacaaggacaaacccgattatgtgtgcaaattggaaaaatctctctatggcttgaagcaggcccctcgggcctggtatgattcactgaaacgaactctcatcaaatggggttttgttaattcacgggcagatacttctttattcctgctgaaggcttccaagtttgtcatcatggttcttatctatgttgacgacattgtggttacaggtaatgacactcgagaactcaatatgttcattgatagactgaattctacttttgcattgaaagatttgggagatcttaatttctttcttggaattgaagtctttcgagatgtaactggcatgtatctttctcaagggaaatatgttatggagcttctcactcgccttgatatgactaacattaaaccatgcacaacacccatgaccggggggaaaccattgtctctgcaagatggtgaagaattggccgatcatacccaatataggagtgtcataggggcacttcagtatctcactcacacacgccccgacattgctttcgctgtcaataaactcagccaattcctcaaatgccctaccacaactcattggagcgctgccaagagaatcctacgatatctaaagggcactattcaccatggaattcatataaaatacagtgaacacttgtcgatcacgggatattgtgatgctgattgggcatgttgtcccgatgataggaaatccatagcagggtattgtgtgtatttcggtgaatctcttgttgcttggtcatctaaaaaacaagctgtggttgctcgctcaagcactgaatccgaatatcgagcattggctcaagttgcagctgaaatcatttggattgagtccttacttgacgaaatgcaattcaagctgccctctacaccaatcatttggtgtgacaatatgagtgccaaagccttggcatcgaatcctgtttttcatgctcgcacaaaacacattgaacttgatgttcattttgttcgtgatcgtgtgcttcagaaaaag

SEQ ID NO: 222329 - DNA, 1810 bp, Cannabis indica
agtatgcctgtgttgtcttttcaggtgtgttctaataggttggcacggtatagtcacaaccgggtatttcgggccaaaccgggttcgggcccaaaatacaaattggattgtttatttggcattattgtttattggtgataatctaaattttatttggaatttattatgcataaatgtcatttttgcccttgtatgcatgcctaagtgtaggttatttggccctaagggcatttttgtaatttggcctttatgtgaatattgagttatgaaatggaatttggggaaatgataaagaaatttctggtgtattctccctcaaacccgaccctctcgccctttttcactctcttgacctttttttcaacttgatttggtgagaaataagcttgaattgaagcttgattgttgagaaaattttgttggaagcttgaagcttgattgtgcaaggaattgaggtagtatttacagttattaattttgaattccttgttaaaattttttatgaaaagagcatgttaatgtgttggtgttcttgagcttgcatgttttgtgatttggggttggttttggtgattttgaatatgagagtgctggttgttgttatgttctatgctattgagcttggattatgattataaggtattttctagcttggaataatgtgttcttaagaggtttttgctgctggaaaattgtttgatttgttggagatgaagctcttgctcaacagcttgaagttgcttagttaagcatgaaatttgtgttgtttgagcaatttgaaattttgagattattgcaggaaattagtgtttggaacatgaattttaattccctagtgaaattgctagcaactttatttgttaatttgagagtttgatcaagatttgggatgaatttgaagtgtttaggttgctgaaattcgtgttgttcatggttgatttctgggttttcaacccaagtgccgcggaatggtctgagcatgttgcggcccgtctcttgttggtggaacctgggattcgtcccaggtgccacgacatgattgtggcatgccgcggctcgccattgtgtttttgggcagttttcggtttgaactttgaaactccatatcttttgattctgaactccgtttttagagttctttatttcgttggaaagctcattccgagctctgtgtgagttttaaattccatgaaattattttatgagtttgaaattaggggttaaccttagttgtgaaaatcctggatttgtgtgactaggattaccggcagctgatcaggagcacccggggattcataatctttgcctttttgggacaataggtaagacagtggttagcacgtagggtatgcgcactggcgcttatgttgaaaatgatatgtatgattgtttagaaactgagattagggttattaccctaataggaatggtctaatagcctagggttattaccctagtgatatatgtgtgtaattaccatgccatgttaaatgtaatgagattcaaggattatgcgcttaaggcataatcaggttagactcggtaaccataaccgagatgaaccattctaaggcgttattgtatgtagacgtgcaagagcaacacgtaggtctacgccacgtagatataaatagatgtgtgagcgcaacacataggtctacgccacgtagacataaatgggcatgtgaatgcaatatgcaggtctgtgtcacgcagacatacatgaatgacatttttaattaaatagcgtgatgagcttattattgttattgtttatactgtcttgctgggcttggctcacgggtgctct

SEQ ID NO: 222330 - DNA, 1974 bp, Cannabis indica
tcctagtgaatctactactttaaacgatacgtacacttgcgtgtgcaaaaatatcgcaacagagccttagattgtgatgccattctggataatcttcacaaaaagcttaacaattagggtagtagatatctttattttactggaagagcgcaactctgttctgcttggagttagaaacttttggatgagcattttacctcaaaaagttgttgcaaccattgataagtgtcgttgggatttcttatgggattcgaatggtaactgtagcaagcttcatcttgcatcttgggacacagtttgtctcccgaagaaatttggaggaattggttttggtgaaggtagaaaatgaaatcgagctttaatggctaaatttatttaggcggtttcgagtaagcaagaatctatgggttaaatggattaactccatgtatcttaaaggaagagatttttgggatgttcctgataaatgtgatgtaagctagtatttcaagaaacttttgaagcttagatgttcgattgacaaaaaggagtttatccaagcgggtaagtttggtaaatttaaaactaaaatcttttatttgtctttatctccaacaattgctgatatagtgccttatgatattgctatttgggacaaattgtgtgttccgaagcattgtttcattgcttggcaagcaataaacaatcaacaacttactcaagatcaaattgggcattttttaaagcttctatctcttctctaccctgtttgtgaatctaaattggagacaaaccaacatttattttttgattgttgttttaccaaaaaggtgatgaatgagatttctttgtggatgagtatgaccgattggcctaggaacctagaagagtggaaaaatctctgttcgaaagtcattttctctttgaaagaggccttgtgaatacagttttctcagttgctatatatgcagcttggcgcaatcaaaatgactgtatttttaaacttgcttgtagatcaactagaactttgagtcttgatgtaaagatagctattaaagctagagtgatgaatttggctttccatagaattaaaaaaggtgatgttcgtgcaattgagttatttaagtcaatttgagtttagatggtagctgctgccatgttggtggtagtttggttgtgtgttttgtcttgttttgtttgaataaaattgtcctccagctccaaaaattataatacaactataaatatagcataaaacaaccaaagcaaaatagtttattattttactaaaatctgtatttttgtaaacaaaaaaatctaaagcgtaaaataaaatttgttccgtgttaacatatttttgtattttttttttaaattttggccgattatgtaaatttaaaatcttagaaaaaattacataatataccaaaaattagaaaaaaaaaattacaaaaataagtcaatacgatttttttttttatttttacgttttgcacttttttatttacaaaaatacctctccagtaaaaacaataaactctttgatattcatttttggttttttatagtttatttatataaggagtatattttttaaaatttaagaatacccattataaaacaacaaaaaatatcaacctcatgacaactataaatacatcttcagtagaacctctatccaagaatactatatttaagaataatctataatttattattaaaaaaattaagtcccaatttgagttagttataaataagaataatctctaaattataattagttatactttttctaagttccgtattaagaaatccttaggtaaaacttcactttagtatgtataatttatttttattacattaaactcttaataattaacttctttaatttttaacttattttttatgcttatattatttaagtaccgatttttatagttttattttgtttataacttaattctctaacgttacactattttttttttttttttt

SEQ ID NO: 222331 - DNA, 1409 bp, Cannabis indica
tgttattataaaaataaataaatatgatgattcatggaaaaaattgagtttccttaatatattattttttatattctaattatccaacttcttgtcattattgtattttatatatatgttgtctcatcatatcttacccgttattattactgtatctcacacggttattaattatcatagtagtttactcgtttcagacaaaaaaacagatattaatttcttttttattattatttgaagaaaaaatatcttttgaatttaaataccaatatcattagatatttatctattttctcttttttcttaatattgtttacaaataagtagatctaagaaaattaattattattttgctaaaacccaatcaatattcaatatatagtgatatatttttatagatagatatcaatcgaaatggtatcatttattaatatttacatatatctctctctttttttcttttttctttttcttaatttaaggacatatatatccctcttaaaaaatagtaaaattggaaagaaaaaaaaaaaactaattgattatttaaaactaaaattatattatataatagatatcaactatatttctcattttttatccctcatatactagttagagatattaattagaaattaattaattaatttaaagcaaaaatatactttcttatctcttaattttatcccttaaaactatattcccttaaacataaactatcaactttttaaaataaacatagtttattatcaaatcgttttctatttctcatataacttttgtgaattatcaataattataataatcagacatagatatatgtatgtgtatatctggtattttttgtatttccttgatgataattcattagaaagagatattacatattcctccatacgtacatattgatgcctctctcctaaagtataattaaagacccatacaacttaatcacttatatacgccgttagatatgcagtttagggttagtcattagataaatattttagtatattaaatataaaaattgttatgccatttagggttaaaaattcaatagatattttttggtttttttatttatttattaatttttcttttaaaatcaagttattatataatttataaaattttagatagatagatattttatttatttaattattaattatatgatttagaaaattttgattaaaagattagaaaaaatattatttataaaatttgaattagataggtaggttttttttttttattatataaatataaatattttttcatgaaatgaataaattaatgatgatattaataaatgatttagacatatatttaattaactagaagacaaaataataatggggcaaaatgaccaatttgcccctctacactaaaatcacataaataacact

SEQ ID NO: 222332 - DNA, 1869 bp, Cannabis indica
ttttaaatttttttaaaacttctatcttagagaagaagctgttactgtgctctaagttattattaaacttttgttcaatatcaggtatttttaattgaggaaattggaccttataccctttttatattgttctctttcattcttactctcttttttaaaacctatcatttttatctctttttctaaacactttaccgattttactcctgtcacatcaatatactctccatgtgactctcttatatcagggtattttgggtacaatacatataaaaaaaaggtatgtttcaattaaatataaaattagaagtagttttagttaattgataaataaaaaaaatacctctttctaatttttgatggtgcatctcaaaaaggaagaaggtatttttaatgggccaaaggaccaggcccattggggctacaacagtagccggcccttgtgtctttagggctgagctcatacgggtttggagaggaaccaaatgttacctaatccaattatctataaatactgccctaatctcatacttacccttacccttcgctcggagctgcggcctcagcactcattaactcatcctctgtttttcaagttcttctctagacctagtttgatattctttatattattatagcaatcatctttgtagttttgagtattggctatctgtttctttgcctccaataatggataatccttgtgctagctctagggttaaagatcccaatgaggaagcactcccctaaaattgataggaagtgccgtatgacactttaaacagcagagggttcacaatcgtacccattagtctctcccagttcaccactcacaaaaccctttcgacttcgtttcctctgtggaaacgttgtcgttttccggggctcttgctgattggttgggattgagttttgagtacggtgctcactctgtgtgtgtgattttaaacgggtctctgagggtttggcaattttgtttgaaatttaaaataacgttttactgcatttgattttgtacggatcgatgccacgtctacggtagctctatgctctgaccggcgatgctatgattggtccaagaacaaattttttcgcatcttgataggaatctgttgatcttattttttcattgatctacggagccgttttgtgcgattacatcttcgtatacataaattatattacttgatttttgaacaaaaaaatatcaattttatgaggccgatgatgattagtttacaattggaattaccgtctgaaattctttgatgtgaatttactggctttcctgaggcttcttatttttaaatttaattatttatttttatttataataaattttaacatgtttcaattcaattagataaaaggaaatgtttctgtgtggaccgatgccacgtcgacagtagctcttgaagagttttgaccggcgatgctacgattatttaacatgttggaattaccgactgatttcttttgatgtcaatttactggcttactgaggcaaaaatcaaaatgatgatttttcataatatgtaggcaagttttattaatatcaaaaatactagaattcaagtgagtcaaagtgaacatttgaacaaagtttagtctcacggaactacttatcctttaccgaatgtgtattttagcccgacaaagaaaatctatggagatcattgagggattttgtaattttgtcagtgaagattgtattgggctctcactctcagtattcttcgttaaaacgctttcataagcgtgatatgcagtctcactcccaagcattcctagcttttgctaaacaagacaacaacgatgtttccattgaaactactttgataacctcaattcagggactaaatttaaatc

SEQ ID NO: 222333 - DNA, 2094 bp, Cannabis indica
ttgatagaaaacttcatctcaatgagcacattagactcctttatatagtgtttagatgatcactcttaggattcaaaataccacctcatttctctcccataaatgagtattacattttgtaacaactatatcatcataattttgaaatccttaaaccaaattgtgtaacaacccttttattacactaataatgtgtgatcaacacaagagttacaaatgacaacaaattgtaactcctctccaagttactatgtaggttacaaaagtgtaggttaaattataggttacacatttatttaccatacacttaatatatattattcacataatattatatattaccacattttaatctacatattattatattaaaaataatataacagcatttggctccctttgatgtatttttatattatacacttgttaatttgatgttgattttttattattggtatgctatttttatattattttcctattatcttgttattttcatgtttttatagaaaattgaaaaaatatataataaaaaatctttaaatataaaaatataaaaaaatttcaaaagaaaatattattatgtaattatcaaaaaaaaaaagatttgtgggaggaggctaaatataattataaattattgtatataatattttgaattagaaaaataaaataaaataaaaattgagagagctatagggcctacatttttaagtgccaatatacatagccaaattgggaaattaagagtccaaactacttcgaatgcaaaacataaagctctttagttaaagggtctttaaaggaaagtctttaaagttttcttgagtaagagtgatgaagtagtctttttttttttcattaatgcaattaaacacatgcatattaattggtaataaaattaattattttgcataagataaggaaagatataaaggctctttatatgtgtgcagtaaataaaaaagtagttttttttttataaataaaaataaaaaagtagttaggatataataaataaaataaaaatgatctttatagctattttatttaaaactagttagaaattacgtgccgaggcacgtaaatattagttttatttagagtttagttctttgttgttttgtttaaattgtatctaaatgtatgatcatgtgaatgatttgttttattaaactaatatgtgtgctatcgtatttggttagtaaaatataattaggtatatttaagtcataacaaaataatacttattatttacttatagagaatttagaggaacaagatataagttttgcaaaatttaaaacaaacattatgtaactaaaattaaagaaaatgttcgatcttaaaatagaagaaaaaattattaaaaaagccttaatatatggaatattatttgaaaaactaaaaagagtatatagtgaaacttctccctactcttccatgtgaatgaaatatttgttatcagacactagtaatactcgatattattatttcttttggagaaaacggaaaaattttattcaaaacagtcactgagcaatacacatggtaaagtagcaactaaccaacttaaaaattaaaaattaaggctaataaatctttctctctttttgttagttttgaaaaattataaaacgacactatagttttaatgttgattttaattttgttgctaagggtagtaaccgagttacaaattcactataaaattttttacttttagttacaataaaagttgtaactaaatgtaaattataattcatatgttgtgactaaaggtttgtgactaaatgtattagtcaaatctataaattttgatattattagataaattaaaatatgtaaaatttaatattaagtataattaagtaaataacttaaccaaaagtataatttatcctaatttcattgacatgtttgttgaatttttttaattaaatttttggccttcttttagggttacatatatatatatttatatatttttgttgaaatttaatagggttatatatatttatattgatagtatagaacacagactatatagtacagagtatagaccaccaactgtgatttttttttattttttta

SEQ ID NO: 222334 - DNA, 3442 bp, Cannabis indica
tgtctatctttctctgaaattttctttggcccaaatagctcaatcatttgtgttacccccaatttcagctctttaaacatcttgacagggtctggttctttgttgttccactggcatttgtttttcatcctccatatgctgtaagcaaggctggcaatagcagcagccattaccttttgatctttgttgttccgcaggcatttgctctcccaatccatttgattaaattggaaagagagatatgagcagattttcaattcagccaagctttcaagttttgtatgcagctcctggtagtagaacactcaaagaataagtgctctacattttcttggttatcacagcacaataaacaggtctgatcctctattattcccatcttgaataacctatccctagttttcaatctctggtgcattgctaaccatagcacaaagttgtgttttggtgagttcaaactgctccatacctatttacactagtgtatgtttgctcctgctggtttcagcaaacaataaccctgtgaaactgagtatttttgctgtagcattgctcctcccattgcctccttgtattggtctttgagcctaaccaaacacttcaagtactaactactttgacttgaaggtttgtgggcccaccattctgcatcatgcaaatatacactattggcccatttcagccataatgtatcttctttgtttacaatcgcccacacatatttgcccattacagctttattccatgtagccacattcttaaaactgattccaccagctaattgaggttgacaaatggattcccatgagatagcaccaagtccttgatatactgctttcccattccacaagtaattcatgcatattgcttcaatagcattcaccactttctttggcaaaatgagtacttgacaccaataggcatgtatggccatcaacacagaatttattaccaccacccttccagcaaatgaaaggttccttgaactccatgtcttaattctagcagttattttctctgccaatacttcacaatcttttcctgaaatcttctttgctccaattggaaaactcctaggtaactaagaggcagagacaagcttgtaaacccaaaaatttgcaacagcttccttaactaatcatcagacatgttgcttgagtatattgctgattttgtggcatttggatacaatcctgatgtcattgaaaacaacttaagcccctgtaataagtagtgaacacttctaaaatcacctttgcaaaacaatagtacatcatcagcaaaagcaaggtggttaagctttatttctgtacatctgtgatggaaataaaagtcaggtttttccctaactttccctattattcagaataagtattccatacctaacacaaataataagggtgacattagatctccctgtctaagtcctctcttagactcaaagaagccatgcaaagttccattaaacattagtgaaaaccttggtgttctagcacaggtcatcacaatgttaatgaaacttggggagaattgtaaacccttcaatatttcctcaatgaagtcccattctatagtgtcataggcctttcgcaaatacaacttgatcatgcaaccaagcttattgtttttcctcccataatgcctaatatgtcctataaaccttcccctaataaagcttccttggttctgagagactaaattaggaaaaatgtttttgattctagagcacaacagcttggttgcaattttgtaaagaacattgcaacaagcaattggtctaaaatccttgaatgtattaggaaattttaatttgggcactaatgtcagaacaatagcttttatttccttgagcagttttcctgtttctacgaatgatgtcacagcctcatacaggtcctctccaacaaaatcccaattgtcttgataaaagaaacttgagaagccatctgaaccaggtgccttgttgccaggtatatcaaataaagcttgtttcacctctctttagtgaacttttgagtcacatttcaacttgctgagaattcactacaagccctcttgtaataattctatgcttgactctcttcctgccttccattcgagtgcccaaaagttccttgtaatactcaacaaaagcctctgaaacctgatttggttcagttactctagtgtcattttgctgctcaatcgaaaaaatttgattttgccttattctttgctttatgcttgcatggaagagggcagtgttactgtctccattctgaatctagcaagccttagctttttgttgcaggaaagatgtataatctttctacacttgcatcagtttatttctagcttgcaactcctcaccaattaaaatatcattaagagaacactgctgcaactccgtctgagctctttctaactcatttttagcttgtagtactgatgtgtggatatcagaaaattaacccttgttaatttccttaaagacaggctttagggcttttagcctagtaaccacctagtacatctttgatcctgcaatctgcttcctccaaactttagatatattcttttcataatcagcatggctcttccacattctgaaatatctaaaaggctttttctcactggtccacctaggatacagagagaatatgccaggtgagtgatcaaacaaaccctcatttaggaagtttccctcagcattctgatagtgatctaaccatgcttgattagccatgatcctgtctattttggaaaaaattctgtcattcccctgttgcttatttcaccaagtaaagaaatttcttgtcgccttgacatcttcaatttggcaatagttcacacaatcagcaaagtctgtgtcaggatagtatttaactttttgccccactctctcttctttggccaatatatcattcaaatctcccatcagtagccaattagctttagtggccaactccctcgggtctttccataattttgtcttccaattttgtcattaaaggaatatattatagtaacaaagctactataagtgtttaccaaaaaaaatttggttacggtaattatttattgtatatattataccttcaaaaaatcatataagagcaatattttttattcatatagaaaggtaaacttattaaatatatatatatatattaccaaaagaaaccttactatagtttattttttaaatattagtcacaaaaaaaatatgtttttttatttttggctctaggtactgtaatgaaatcttgaaagttaacttatcatttgaatttcaaaatttttcagttagcctatctatgggtcaataattgttacactgtctgtcctaaaaatctttatccattcgagtatcaagtaatatatctttccaaccctaagagtgacaactctttctcttttcaaatattttaatgcctgtgagaattttgagttaagacttttt

SEQ ID NO: 222335 - DNA, 1845 bp, Cannabis indica
acatttgacaatatgattttgttgaactcttattatttgtcacaaattatcaataaaaaaacattatattattaaaataacatgacaaagggcttccctccattgttttcgctccactccggtcaagcattagaaagtcttcgttcaaaaacatatttagtaagtataaacacataatttcaaagtatgatgaaagacagttttggtgaattaatagtcaaagtttgttacttttggagtgattctacagctccaactctcttcattacttttatttattatttcacttttgtatttcattattataaattgttgaggtatatcaactcaaatctcacatcaaaagaataaacaaaaattgcctaaatttaagtgtttcacctactctactaatataaaatctttctcatactaatataaaatattttgagaaggtgtcgaaaataaaaactggaaggacttaggatagcgggcagaaattataatacaaaatatggagaattcatttgtcaaaagaattaggcttagtagtgtggcgataggcacgtcattagtttggcacaagctattttataaataataattggtaaagacaaaaaatgcaagatatagattgaacaaacattgagataacaagtactaaataaataaataaagtgatagctccttccaaccgataaattagatgagaatttaaaacttctacacgatggccactggaaaagttggcagttggtactaacatatcaacaattgtttgtatgcatcttcatttgaatgcatatatttccaaagcaaaagaatgtgctaaggctactacagtaaaaagacacttcccttttcaccttgaaacatttacaacactattgttttctttcaaggaaccccatacacgaatcaacagaacattctaacaaaagaatgagattcatctatttggcttgttcaggcaaattagtctcattttaattgtgatcaaatgttaagaatatcttcatgcatactaggtttacgtaccttggaaaatggagaccctatgatatctgcaaaaaaagtgtcatactccttaacatatatgcatgaagtacaatgtcagtacatgttcataatctgttgctagacagtgtcaatggggctctgctcatcatcatacccgcgaataaactaggttggcccttaagggcgaaaacttgaatctgcttatgtataataacacatacacttcagttacaatgtggcataacgtagtacaccaaccttacagagactgctatccagaaagaaacatgcgtgaccctaataggtcttcttctatctatgaataagaatctttatatagaaaactttacaactattacaaaagagtatagctaataaaatacacctctaaaggtggacgagcttaactagaaatgacaaacaagtctttatgagggagagaaaaaggacccaatttttcttgttttgggtggctagggactcctcaccaaaagaaaagaattagaagctgaatcaataccttaaagtcatcatgaatgcataccccccttgaatatcaacatagttcgtagttttctctttcgccttagcaatcattagtattgacaagtaggattgagaagcctcgcggactggcaaggtagcagggatcaaatttcttttggtaacaaccatgggcaaaaacaatatcatccatctagttccaaatactcatcatatactctaccgctagcacactctaatagagctttagcattgagttctctaccgaatctccagatgtaattcagaccaacaagaagctcggtaatcattgcttcagttttttcctgatttgcaaagtaa

SEQ ID NO: 222336 - DNA, 2285 bp, Cannabis indica
gcaaggaacttcaacaagcaagtgaagaacatgaaattattcataggagacctagtgctgtaaagattcctaaacaaagattcagcagcaggagtgtttggacctagctagaaagggcgctatcaagttacaaagatagctagtaagggagcctacaagctaggaaggtaaaacaagaacacggagctcattctcctaccaagatattggagtggagagcaccttcgcaaatactatcagtaacaagcttacagttatctactccgatgtagcagctctgcctactcaacattaaagtacaaaagagctagtacctatggcctttttggcgtggtctcccaccgttcttcaacggtggcctccgctatgcaaggaaagcaggggtagccatttaacatctaaaagctaaatctatgtaatgtaaacttgtagattcaattaatgtaagttgcacaacaacaaagaccaattaatgattaaaaaacaatgtttatattttatttattatgtctaaaccacttgttcacaagattgaattcttaaagttactctttcagttctacatgtttactatggatagcaccccaagaaagaacccaagcaaggtctgcaaaacttggtgaatagcaagtgaccaagagacatatctacatggtcactttggagacacccataccgtacaatgcattcaactagcataaagaacctatacaaagaaattttaatgcctagaataagctactaaacttacatctaagtcgtcgaggcatacttcagctggaccaagtaaatctggacccttacttgtcaaggccataagaagatagccaagatgaaagaccgccaggtctgccacacaatccatgataaaaaagcaacaaggccaaacaatagtagtgttaaaaaacaaagggcctataggctaaagatacgaacatgaaggccctggggctgaaaatagtagtgttctaaaaaggccacaagccacatggaacatgaaaacaagtagtgttctaaaaacaaaaggccatgagtcattcagaacatgaaaatattgtttatactacacaaccatgatgcaaaatactacaaatgagaaatactatctatgtgtgtaggggcaggtggagtcaagtttgaagccgcaagatcaggatcgccagagtcgaggccgggcacaccatcaccaagctggccaacctaggggttagtgtcattgccaaccacctcctcagcaagtgggcttgccagcccctcatcatggttccctgatgatgacccctctcgatatgcagcgggctagtctacttccaactggctctcaaagagcactcttcctcgtgcaagtgtgcgctttacaaaagcctcaccacccatgtatgacagattagctctagggttatgtaacttgaacttataagtgagttcagaggacaagtcatcattttcctcccttatggcctgctagccctcaagagtcactcttagtctctcctcctgctctaagaattcaaactgtagtctagagataaaggcatcttgtgaggtgttctccttgttcttggcaccgagcatggtctccaagccagaaatcatgctctgtctctcaatgaggagggcctccatgtcagacatggctttatcctttgccatagggaagcctccagggtcttcacctgctcccgttgaggatctgaggacccccaggaactatcacgtactgagctcaactttattaaggtctaaaagaaaaacaagacaacatcactgtaaaattagaacacttgccagccagactctctttcggactgctatggctggcctcccctcacaggtgaatccatggctgaccagccacatgcaaacaaccccttggatggccagcttacacagtgccagaaaaatcaccaaagctgaaaaatacaccttataagagaatggtcccaaaggccagtaaaatagagcctctctgtttgagctcttcatccatgaaaggaaaagctctctatatttgtctatgggctgcctccatagccctctgtcctacagttgaccctgctcctataccgggcctttgagcaccctggcctgtaggccgtacctcaggctgcccagtaggtgtaggccatggtagaggaaaaggtagagacaacccagtagcatctatgccacaagaagtctgggccattttggcctttcactcgtcctgtgggctcatatgaaggtcccccattgagacctataagcctggaagacatatctgcaaaaagaaagtagcaaagtca

SEQ ID NO: 222337 - DNA, 1133 bp, Cannabis indica
tgtgtaagtatgtgagttatgggcattaattatataaatgcctcaaacgtaaatagttatatattactagtaagaaaaatacaaaagaaaattatagaattgccactatggaaaattaaaaataaataaataaataaataatgacagctttccatatgcaccaaaattgttataaagaaaaaaaaaagtccagaaagtatattaagccattaaaataataaaaatatattaatagaatattagttgccgctaatcactaattaccctttatgcatatatgattaataacgtctctcgccgacacaattgtttaaaacggccacccatttaggagaaagagaagagagagaaactgtctattaaattttcaggaacagtgttgtaatgtttttgtttggttacgttttttatttttattgttattaattttactattagtcctaatattctatttcttttatagtttagtccttccaatctttattcttacaattatatatcccaattaataatttatattttcttgtcatatttaatttatatatattgaattcttttatggataaatatcatttattaattggacttcatgttttattaaatgataaaataaactctgtattttttaaaatggtaaaaataggacgctgagcttaatttttgataatttttttaatataaaaaatttgaagacaattcttaacacgaatagatacacaaaatataaacaactttgtcataacacctctagatcatattattattaaattttattttgataaaaaatcaattagtatcctatttgtaatatttttgaaaatacaatgtttattttatcatttaataaaacaaatagtttaattagtaacttttgcaaaacacaaggtacaaaatagtatttacccttttttataccaaagaattgaaaaaaattcacaccattccacatcacattccactttaaaaatcttataaagagatggtacaattagtaacttttgtaaactatagagtttaaaatagtatttaccctttttttataccaaagaactgaagaaaaaaaaatcacaccatttcacatttcaccttaaaaaatttatggaattttcctttttaaaattaaataaataaat

SEQ ID NO: 222338 - DNA, 1637 bp, Cannabis indica
aaaatacattcatgtttcctataattaagtctcagatagaaaatgcatttattaaagctttacgcaataccctaaatatgattgtataggattcattagaaattgatgtagcattagcacaatcaagtcatattatgtcttcaagaaatagcaggataagaagaagaaaccaacagctatatgttttaaaaagggtgggagggagaagacatgattggccatttaactgtatataaaaaaaatacatatccgatcttaaagtaagcttctgagaaaccatatacttttaacactgaagctacggaagaatgtaggattcagcaagagaaaaaagaattggcttattgacaaataagcaaggacatatgtgtattttagattatcttcttttttcacaactaataatgtatttttctttctatttatctagcataagaagctttcaaaagtaaaatgagatattttgtcaaaaaaatcacctgaggttcagaactggcttctagtgactttgatacaattgaagcaatttcttgttcatacaagttgtcaaaaaggccgtctgttgcagtaacaattacatctccctcatccaagtcgatttcgtagtcctgaaacacatacatgtccatgttaaagacatacttatcactcacaatagaaatggataatctacaaaagggagttgcaagatcaaattaaccacattattgaaaaaacttttagctatttttttcatctctattgcaaaattattgttcatagcattacaaatttggttgaacatgtaattttgtgtttgatacctcaatgagatcggtgggattatcaccactttcaatatgtaatggaaaattaaactcgtgaaccatcgaagaagcccgcttaaagacaactccatttctgattatgataaatcctgagtcacctatgttggccacatggaaagtctgtgaaaagatagatccaattttcaatacatgtgttgaggaaaaagctacccaaaacattatatttaaagatttttttaataacagctttggaattggaaacagaaggaaaatctccatatggattttcatgtacatttttttgcttttctatgtctaaaatgtttgtttttcagttaaactttaccataaattctccaatttcaaggtgtcttctggtttttcttttcttccaccaccataattatcattaagttacaaccactcaactaaaactaagtaaatctcactccaaaaggactagcttatgagagaagagtatccgagtggtaataaactaccaacaaatctcatacttgtttgatgttgattccatttgttacaaccacttgaaaagaacttaatctgaaaatactatccaatgggaggagggtgtcaaaaaagttataaaccactaaccaatcccattattagttcatgtgggatcctaacagttatcatcaagatttgtttatcgttataattctcttttcttcatggtactaatgtattcatattcaaacatcttagtaatttctctgagaggttcaaataatcataatggaatagtaagcaaccaaacatgatggggattggggagacttgggatatactacaaattaagtcagctacattttcacgataaatgtt

SEQ ID NO: 222339 - DNA, 2565 bp, Cannabis indica
ctaactcatgttcttaaaagcaagtcacccttggaaattttgtttaatcaaacacctgactagccaaacccttagaacctttgggtgtgcttgctttctcaacatacgaccttacaataaatataagttggattttagatgaaccacttgcacttttcttgggtatatccttacaaaggatacaagtgtatagattctaatgacatgctttacatatcagagatgtcgcatttaatgaaaagttttttccatttgccaaaacttctcaatatgatcaaacccctattacctattcctatgattgcctacctcctggtattattcttaccagtaatggtcatttctctcatatgcctatgtccaatgatgttgctcctataccagataatgaagcttcttcttcctcatctgttggtttaggttttgaacacactcattctcttccaaacatgcttgaccaatatgcttctgttgacaattctcattatttatatagcagtggtgctcctactcaaacttctaaattctgttgatgtagttgttgcacaagaatttggccttacaaatgttacaattgcacaacctcctacagttgatgttgtagttaatcatccatgctcttctttgaggtttcaaggtactctaagcactacaagctcatcagccactcctgatttgtctccaactactacttttgtcgtcaataccagggtagtaaattctcactccatgcagaccaaagggaagtcttgtattaatttctaagccaaagttgttcatgacctcttgttaacctgagtctcttgttgatgccttactcaatgagcattagaattctactatgacggatgaaatacttgcattggccagaaacaagacctacattttggttaagctacctgaaagaagaaaagtcatagcctgtaaatgggtttacaaagttaaactcaatccatatggaaccataaccaggtacaaagctaggctagtggcctaaggattccactagcaactagggttcaatttcactgagacttccagtctagtggtcaagcctataactattagagtagtcctaacttttgccttagctcaagggtggaatgttaggaaatttgatgtacataattcttttccaaatggtacactacaagaggaagtttacatgaaacaaaaacatggttttgaggttgctacaactcctaacttggtttgtaaacttcaaaaggcactgtatggcttaaaataagcccccataaattggtttgatagattgcatcaatgtctactaagccttggttttttttcttcaaagttaggacagtctctctttattagcctaactcctcactccacaactttcatacttgtctatgttgatgatatcttaatcagagggagtgatcaaaaagttgtatctcaactgatcactgatctcaatgacagattctctctcagagacctagtagaactaagctatgttctgggaatagaagtcaaacactctagtgaggcaattcatctatcacaataaaaatattttaaagacctactctacaaggtcaagatgcagggtgcaactcttcttctcccatgacacatgagctgagactctcaacttatgggggagatcccattcatagtgtgctggaatacatgtctatagtaggagtcttacaagatcttactatgactagacctgaaatagtttttagtgtgaacaaagtgtgccaatttatgcaaaattctcttgaatctcattgggttgctatgaaaaaagaaattgaggtatgttagtgggattgtgacacatggattgcatctcaaaaaaccttcttttatggattttgttgttttctgtgatgctaactgggcaattgatccaaatgatagaagttccactttagggtttgccatcttccttggtagaaacttagtcagatggcaatgtaaaaagtaacatattgtgtctcggtctagcattgagacagagtataagagtctagccattgtggtagttgcgctaacttggatgcacaatttgtttcatgagctaaatatcaccttgcctatagttctcacagtgtggagtgataataacttgagtattatcctgctcactttcaatctagttcttctttcaaggacaaaacacattaagttaggtctctattttgttaagagaaaaagttcaacacaagtttgtagaagtaaatcatgttcttgcagctgatcagatagttgatggtctaaccaaagctatctcaagttagagacttctttcatttcgtgacacttgcaattgaggatgactcaattctaagtttgagaagaactattaagataactactaggagttagttaatattgttagtttagggtttctgttaagagccaattagttaagctcaagttagttgtctcaattgaattttgttatacattttcagttgtcatttgttatggatgtcttcctctctgacttgtatataatgataattgttgcatcacattcaataagatcatttttttttctcatatcttcgttctctttcttctaccatt

SEQ ID NO: 222340 - DNA, 2352 bp, Cannabis indica
ttagagggtaaacttgaaggctgagaatacacaagctactgaaactagagcaaaagctttatgcctttgataatatttttttagttagttttttgctattttaatcaaaaaaaaaataaaaaatattgtataaaattgcttttactttctaattttttaattgagaatcaatattttaaaaaacttttttttttaaaaaaaaaagtcacattcaaaatatttttaaacaatttttttaattaatattttggacttctactctaatttggactttgcgacccaagcccgaacatcgaaccctaaccttagcctaaacctgggtcatggacccagagacccagactcaaaccccaaacctaaaccctgactcaaactcgacttagaccctggactaggcctcagccctagggcgggccctgagggtaggcgagccaggcatgcggcttgagccctcgaacgcccagggccccaatattgtgaaaaaaaaatgttagtatgtagttaaaatattaaataataagaaaataaaataaaaattatttagtgtagcggtaaagagtcttattttaagctaagatgccaatagatcaataatcaacttctaattttctagttttttagaaatattttatgtgtagcgatgaaagattgaatattgaagctcttaagagattttaacagctttaccattacactaaagtgtttaaactattattttgattatagggtctcaaaatttaattttaccttaggctccatatgccttaagattggcccccctcggtcctgaaccttgacatggacccgacccagacctagaccccaacttggaccacaaccccaaactcatacccagacttagattccaacctcgggcccagagcccgaccccagaccttgggcccccgaccccgaacccaaacctaaatcttggaccccgatcccaaaaccagaccatgaactccagtagtcctagacttaaaccccgactccaaaactcaaacctaacttaaatataattaataaaatggttatatataaaacacatctttattttttaaaatcaaaattttaaaaataaaaaatttactatcatttttgtaaaccatacaccacagtttcttccaaaaataacaattaataaatatatatgtcataaaaaaactttttgatgacaagaaatatttgctcttttctaatcaatcccacttctttttttgttacttcatgacgtgcttataaatccatgtatttgattccctattggataaacagagacttattagcaaactcatccactaacaatattttatatatttttattaaggaaaaaaaaataatacgaaaaatgtattatgtccattttcattaaacttaataagcaccaacgactttttgagtgcactgatgtaagttaaaagtttttatttttttttgaaacaagatatatttaataagaattgaaacacttacatttaacaaataatttctctatagtggttaatgacacatgttttaagatttcatatggtgtccaaaaaaataataattgtaatttacagtgctaaaaagtatataatgcattatttaaagagaaatgctaaatgacactagtattggtgtacgtctagtaccttcttatgtgttaatatcgctattagtcaaactaagtatcagatcccatataatttaatataataacttttagggagtattgctagctaatcgcaacatgacatatcgaaaaaatactaaatatcactgtacttaataacaatactttaatttaaatgtaatatatatatatatatgggaacaagtgtatcataattaataaataaagaagaatatatatttttgagatgtgtcattgtaattgtataaataatattattgatcattacaaacaatatcatcaatttcgtaccctaccacgtaattttcttataatttttagggctaaaataaattatatttaaataattttatttaatttgtagagaatgtttgggaattagaaccaatttattattatgagtagtggtgctccattttctacttgtctgcttccaaagaaagagacaggaccttttgtataggaaagaaatagttaacatcacctctaattttttttattcttttttttttggtaaataataagttccctaattttgttttcctttgtgtttaaattggcaaaaattccctttaattctttaattattatttttacaaaaattcttccgaattatattattacatttgatcatagattgttgtttatgctattagatattagggccagtccaagtattaagtagcttagaccattataaaaaaaaatcttttttt

SEQ ID NO: 222341 - DNA, 3079 bp, Cannabis indica
tacgatggggctatttaaacctccttttcttatcattcttttacataatctcacattgatagtgtgtgggaacataataatgtatgagctacttttagctatgagttttgaaatggaactccatgcgttttaccatactcgcattcattttaaattctaacacagtattagagcaaaataaaaatctaatgagcagtcgatttaaatccaataactagtccaaaaagacaactaaaatagccgcttagattattgagcggaaaagagtcgttttgagctaagtgttgccggtctttaaagatgagccaaaacagtcatgatttgatgagccaaatgtaaagttgtgtattgtaggcttttttaaaagctcatgcttttatgtatgcctgacacaaatcatattgttaaacgggcctgactcatttcaaaggctaggcccagcccgacccacaagcacgaattattcgtacaaagatgggcctaaacgatctagcccatttttggaaaattgatcagttcatatttatagtataagccataaacgacccatccatatttatagaaaaatagtaattttttgatatcttttaaattaatttctaaattttaagacaaatagattgttgcaaaaaatgaattttttattattattttttaaaaaataacttttaccaacaaaaaaccattggaataggaatttaggatattactttataaataacgtaaaccttttagaaaatatacatataattttaaaatattttagaaaatatttgtacaatttttttttttttttttttttattaaaagatagatgaattactaaataaaaaatttgattttgtggatttaattcgtgcctttattttatgtttaagtgtcgtgctttcatgttgtgcttttgtgcttgtcgtgtcgtgcttaacgccttatattttgtgtcgtgccgagtcccatatttatttgtgttgtgcagtgcaacatccccctttgggtgatatgtatcatgtcatcaagactagggcgaggaaaatgttcttttaagtgtctacaaagatatataacatgccagatgcaataataactaaacaaggtaaagcttgccgtacaggatgggcgaatttgacttggtcagagagatttaatcaacacctcacgcgacccgattagaggaaaacgcgtgagatagattcattttaattacttttccattttatatgtaatcaaattccaatttcagagaattcccatatatatttctcacggtttagaaaagtcatttattttctatttttgtagtttccctataaataatggaaccattccattatgaaaggatccaaaatcatattttcaagagagctattacgctgttcaaattcatataaatgctttcgagagagatcaagttcttctttcttttcttctcacaagttgaatacaacaaaaagggaagcaagctatgggctgaacctctatacaatctcttgttcttagtttatgcttgatattaaacatattctcatttaatttaattgatttttcatatcgctctcaagactctatgtcgttggccaaaagtgagattaacattttggtactttcattgagagcattaaactcaagaacacaagcgaattgatcttgttcaattcaaatcacaaatggctgtgacaactcaaatgaattagactactaattctacagatctatggtgactgatccgaatgtccaaactcttgcaaatctgagaaattctcatgcgaatgattcaaacaacacttctcttggaattggtattactgtaggcactcaaaatactgaaactaccagtacccatggtgttggagagactagcccaattgcgggagggccaccagttggtgaacctgaggtgatagtcgatgatgataccaaattgcataatttgagggaagcagtgtcccaaatttggaatcacactaacacccttcatcacgatcaggcagaaacccgagcaaccgtgaatgaagattttgcacaacaaaagaggcttttccacgagtggatggatagataggtagaaagcctaagggctcaacaggaggcaattaacaaccgatcatgcaaaatcacatagttgataagacaatttaatcaatgaaccagatagaaattgcaagaggatatccccctcgttagggatcctaacagaggaaaaaatatgtatgttctgcttgagaattagcatgggtcgaatgttcccccaacgacttacacccaaaaccccctgcaacccggaccgtcaattcctaggccacatataaatgtgggccccacggtagatggccagatattactagggagacaccttggaaaaaatagccagaacttccgtccccatgtagaaacacccaaccaacctcatgaaaggtttcgagatcctatagccatttatgatcaaaatgggcaagttcagtatttctaatatgtcctgtacacaaccccacaacaagaatagacttcaactgcttgtagtcaatcattctcaattaataattaagataagacggacagtgcaacccaatttttctcaatcattctcaagctgatagaaaccaatttttctcttattattttacataggatttgactttacttggtaaaagtaaataatttcttacgggtataggacttccaccttattagctctacaaagaatgatctaagtcgccagcaatttataaactttggggatttctagaagggggcaatgcctacttccccacagaaacgtgcggagtaacatcaaagtggaagatgagctcccatttttgtatgagcccagctccaaaagccaaagtcgaccgtgcatctacacggtgattcccacaaaatagaaagcttgttccaaaacatgccaagaatgttcttgaggccttgattttcttcgtatgttcgaagtgcctcataatttttcaatttgtttgtgtattgatcaatcttccatggagatgaattataccaaacttatggagctttgacttcgtctagctccaaaatctccacctcgtcgacttgagaaccaatggaagaaatt

SEQ ID NO: 222342 - DNA, 2251 bp, Cannabis indica
gtgataagctccagtagaatagataacatgaaacttttgttgaggtcaccgttcgtacgaaggacttattttgaggtgggtgggagtgggacttatatttcagtctcttctttaataaatcagacttttctttccatggaactttcaaaacaaacttctaaaatatctttttcaatagtcaatttgtaaagaaaaatgtttaaggacaccaatgtgtctacctcacaataatatcgctatttaactgggtttgtggttgtactgtatgatgagccttgggcagttgaaagttcaactcgatatttaataacaaaaaaagcaagatgctaatgtttgaggttgacattactttacataagatgcgtgcaattttgtctaaagagttggatatagaccctcttgtgtatgaactgaaagtagatatgtgttacatgtatatgaaagacaatatgatattgctggaggttttagtgaagatagtcaagtaagattgttcttacgaatgaaggtacaaatgagtgtgaagaacttgctgccacaatttgtgactaaggtaaaaatgcaggaaaataaaaaaattaaaaaaaaaaacaaaaaatgtcaataaacattagaaacgtcagacttggctgacgtggcatgttagtaatagtagtaatgttattattataaattagatgcaaaaaatgtattttattgtaaaactaatagaagttaatataagaccaaataaaattctaatattattttgataaaaaatcaggtcggtataattttaagttattttgaaaaatacattatttaatttgtcatttaacaaaattgatggtctagtcaataacattttcaaaacacagtctaaaatagtatttaccgaaaacaaattaagatttatttattaaataacttcatgaattggtgtagaaaagcaagtctctcacaaatagaaaagggaacaataatattttccatggctgcccattgttttactttattattactgttccttagtgctgtcttcttttcttttgactgatattcttagaaagtttagaaagaaggaaatttctctacaacacaggatgatggtcccatataccttatctttttcagatttatttagagagaggtcattcaaatttagatagtgaggaaaaccaattatgtacctaaacttataatctactctactttgactattctttgatattattgtgagtgattgtaacatgtctgaatagtataacaatcattaaattgtcttatttttatattttatgatataaaccaaaatttgattatatcattttaggagaagattttccatggctatccttgttaataatcattctataatcatcatcttcttcttcttatcgttgtttcatattagaactagctctgcaaaaccatcaaatcctcattattgtccaccctcttcttgtgataattatatcatcaacgtaaccagtcctttccgactcaacacagatccaaaatactgtggctacccagaatatgagctttcttgcgacaacaatcttactgtaatacactccaaaaatgatgtcaaattcttggtgaggtcaatcaattacggaaactacaccattagaattgcagactccaaacttgacaagaacaactattgctccttcccaaataactttctacaggtagaagatagtttcaatggtttgagttcttacagctttcattcgggagaggatgtcaaactcacaaagcaaatagtattcttgaaatgtgaaaatccaccaatagaagtgaatactaattatatagacactgcttcttactgcaatggttctaattattatgtggtggatggtgggtttagtgtttacgatatggcgatagggtgccaaacagagctaagcagttgcatatcaaatcaggtagtggtgaataagaggaatacatcttattccgacattcacaaccactttacttatggctttgagctttcatggttgaaaatacaattctataacggaaaaggttattactgctccatcgattattccaatgagatgcgatgtcgtaagtagctcttatcttgggtctagctttgtaattatattgaatcaactttgttctgatccgctaatgtcaaaattatcttcgatcactgcagataggagctttcgaagcattgatgacatacgtaataattctatcttataaaccaccatatgtatattattagtattttcaaacttttttttttttt

SEQ ID NO: 222343 - DNA, 1792 bp, Cannabis indica
gtttaagaagttccatattgtcctcatgtgtgatagaacaaggaatgcagctgatcactttagaccaatcataatgagaagtgctaaaaagctcttaaaataaactattataagatcagacaaaccattatcccaatctatccacttacctcgatgatctttaagtttatgaatatggtttgtacgcttacaagcactggcgttgacatgaaaaaatttactattttgatcacccgcagtaagccaaagttgcttcgaccattgtctccaaaaatttcacattgatcaagaatggagaataaattcttcttcacttcctggaacttttcaaccgaagcactatctctcttatttttcaattgcttcaactcttccttgcaatttttaatgcggctcccaaaatttccagttatttcctttccccatgttgccaacatttcactacacgcatgaattttggattgaatatccatggccgagtttgcatctcaacagtcctttatcaattgaaaacataaaggtttagttagccatgcattttcaaacctgaattgccttcgcccatggaactatgattgctttttttggctccataaatagagggctatgatctgacagcgctcccttcagattatatagtttagccaaagagaagagtttaagccaagagtgtgtagttaacactctatcaatacgacattctatccaattagatgtaccacgacctctttcccaagtaaactgatggccaactaattccatatcaataagctgcgcttcatgaaaagcttaattaaacccatcgatcaaccattagggatatggggctcctcctctcttattttcttaggcctttacattgtttaagtcccccataacacaccaaggcatatttgaatccatagccaaagtagtcaacaactcccaagtcttcatacgttgattcctgttgggctcaccataaattcccgtaagacgccaagtaccaaagttgtccactaaaacttcaacatcaatataatttttagaaaaaccaaggagctttgcttgatccttttctttccaaaataatgctaaaccgtcactatgtccatctggttcgacaacaaatattccttcaaaattataaatataactaattatatgtgaaagtaatattttgaacttcaattattaataaagttgaattattttcaagtaatcacaaagttttattctttaaaattacttgaggggcatatatatgtgtgtgtatgattaatcggaatccatatagaaatacatgatatattacaaacccactccactttaaattttttaaacttttttcagataattgattaaagaacctttctcgcaagaaagaaaagtcaaaagtagtagttgtaaatgagatttaactcgtaaaaataacattaagctacatgtgaggctaaatgtcaaacgactcgcattttttaggaaagtattaaatgagacaccaagatgccttgagaaaatacttaaacctaaaatatgaatagaaagcccaactattcatataagcaataaaaaatgtacaaggtaattcgcgaaatgaattatgtaaagtatatttaagtttgcttaaaacagattataactgtttatgtgaagcataattaataaactgctcgcaaattgaaagcatggcagacaataactgcttgtgcacatagtagatagctaactacttaagcaagatcaaaggaaaataagagcgatagaaatgattcaagtgttttaaatttaatcaaggtataattgtttaatt

SEQ ID NO: 222344 - DNA, 1740 bp, Cannabis indica
gacccgaaacttaggctaaaaatagcctaacatccatacaatctaaattggtattaaaaaccaataggatatcatgtttgaagtttggtatgaatttgtgcatgtttggagttgaaatttggatttttatgggttctcaagcccagtcgccgtgaccagacttatggaatcacgacccgagttatgacagatatgtaacatctataatttgggtggtcaaaagtcacactttgaccgctattgaaaaataatacttacaaatgatcatttaatttatattacaaaattaaatgaaatacatatttaaaataatagaataactcctataataaaaaaattatttaataaaataggatcacccgttaatatacatatatatgtagaacaataatattctcatgagttctgtaagtagttaccaaataattaaatttgataatttgaaaaacactaaaataatactaagcatcaatcatattcttcatccctaatcgttaatagctatttaaataatacaaaccacccattaataattagctacatactcaatcattaaaaaaatagttgattaatatctaagatagaactaagctaatcacactgttctccatcaacaattctctctcatccacaagtactaatctgagttcttagaagagggaatataaggggcgagcttataaagcctagtaggaaaacaactaatatcaaatgaccagtagtttaataaaaaaatattcatgcatggttagcttttaaaacaaaacttttcatcatcatcatgtacaaacaaaatagaaagaccacaaataatcacaagagacaagctactcgtgcatatcacaccgtccactagacccctaactctcaataaaatcataaaaaacaacatccaaaactggatagttgcccttgataaccactataatactggggctcaaattcaatttactttctgtacaaattctacatctttcacttacaggtgagtatacacttgatctacatatgatgataaagagactaggtcatgaaacaataatatacacaaatcatgatcacatggctctcatcaatattaagtataaacaaaaccagacaaataaataacataacaaaagaacaaattccttttttattttagaaaattcaactacataacgaatgtaatttgaataaacctaaaaagttataacctagataaataattatataaaaatatatttggcactcagtttcccaaaaattatactagaaaaaatattccttattattataatattatttttttttaaaaaaatagaatattatttctaatattatatattaatttactaaaatcactacaattattatatctaattaatgatatttagtgcgtttaattttaattttaatgtgtgtttaaatttataatatttgtaatattgtgtaatttaaaaaaaaataacaagaatttaataattttttacttaaattataattaaaaaaataatttatgtcatttatattttatttatacacaatatattaaattctaatcttataaacataaataatactacaaatataatttaaaaaatgaaaagaaaaataaaaaggaatgttataattacaataaacatgatgtaaattatgctgctaacaacttggagataataaattatgcattgctctacaataggaaatgaatcaattctatttgttgtagacttgaaacaaagtaatggaaattgaata

SEQ ID NO: 222345 - DNA, 1538 bp, Cannabis indica
ttttttaatacaagcaataaagaacttttggcatgtcgttgtatctgagtccctgagactagctatgagtggtgggattaaaagaatcaaatcagtcaatcagctagatatgaagaaaagaaaactgttaagtcaaaatatctgacttgtcagatagaatacatatattaactctattattggtacaataatttaaagtagtacaaatttggaggtgaaaatacaaatttaaagtagtactcacgtgcgtaattgtttttcaagtctctctacaataatggagagttattattaattagagctaactagtagttaatttggaataatataaatatataatgagattcatggatgcaggccggcaagtggaggttcaatgaacccagttcggacactaggccctgctgtggctgcaggtaactacaaagcactgtgggtattcttggtggcaccaacacttggggccttggctggtgctgctacctacaccgccgttaagctccgtgacgatgaggttgacgctctccaacgtgaagttcgacccgtcagcttccgccgttagttagccactatcaataacatgaacgagtaatattacaatatgttcctccagcaaaaaaatattacaatatgttcatgacaaagctaataaaaaaataatgcaagtgacatatgatgcgaagggaccctaagtctactctactctactctatctctatctatatattatatatattttatgaattgatggtgtgttttgattgttgcaaagttaggctctgctctctctcattccatatataggctttttcttggcttgttgtgaacaatgtgattctatactatatagtacagacaagtagtgcgtgacaacacaatactgtttgctttatgtattatacattgttcaatgttcagttgtttggtttaaatcaaaataaaaactgtatgcatattcatttgcattttgcactattcgagttcggttcttatttgatcttattaaatatatactattccacctaattatttccttttgttgttgttattgttaaattatagtaccaaccaatacattcaaataaaaaagggtttaatattgctgagaatgcgatcaataaaagaaaaactacaagtcctggtaaggaatattaatttaaaacactatgatacaaatcattctatttttattagagtacaaaatgtattttatattattctcctaattgaaaaagtctatacaaataaatatagatatacggcaaaccaaagagaaaagcccaataacttaggcccattacacaaaatagtccaatttaatacacctccctcaagataaagtgtataaactatgaacattcatggatacaacagttttgaattgattgggaaagagaggtttggttaataggtctacaatattattctttgtagagacttgaagaatttgaggcacccttgttggatctatcttctcccaaaaaatgtgataatcaatgttaatgtgctttgtccgctcataaaaaaaaaaaaaaaaa

SEQ ID NO: 222346 - DNA, 1835 bp, Cannabis indica
caaaaatttatataatttaatttttaagtgaatatattttagttcatttactttttataatttatatcattattgatttaacaaaagaataaaaaaaaattgaatacctccaacaaattatttatggtatcaatcaaacatatgactatttttatgatttgtaattagcacataaataacaatgtatactaatataaaataaattaaataattaaattttaaataagaaattattttaatagctaagagctttaagaaaaacaactacattatcattaatggtcaaaataattaaaaattatgcttttaatacaatgtttttattgggaatagtatatattattgataagtttttacaactttattatttttttatttaatatatatttttcttaaaaaatgaaaattgttcatcaatgacttcaaaacatctatacaaggaaaaagcaagtcgagtcgtaaagtagggaagcaatttaggtcatgatacgcaagtttgacaagaaccgactcaatcttttacgggtttgacatgacgatacgaaaattttgctacttatgtttgtgttttatcaattttttatgttacgagtcgtgttcgtgtctgccatctaaaataaattttaaaattcaacataacatgaacatgacataatgacattaaaatcaacaatttagcttacaacccgccaacacgacatgcgattttgtgggttcgacacaacactaatttattcagtcgtgtacgtgttcgtgttttataaatttttcgtgtcacgtgtcgtgctcgtgttagcaactttttaataaatctaagacctcagcataacatgaacacaagacaccaacactaattgctaccccaactataaagcatgacaagcacaagaaaattcaatcccaatccaagtagcacatgtaacattatttattaatgcatgattggctaccgtatgtgctacttaattagcatccctacaaataaaattcaaaccaattacacaatcatgtgtaatattaatttattttcatatgaattaaaaaatatttattaatttattttgagtaatttgcggcgtaaatacccaagtttacctctttattgcagataaatacctaagtttaattttttacggtaataatacctaagttatattcctgaaactttcctaattacttggtcattaagtgtcaagtcattatctacgtgtcatttttttattattattatatttaattaatttttaaataaaaaataacttttaatgatctagactaattaggttctgccatgtgctattaacttgacacttaatggtcaggtaccttaggaagttccaaaattttagcttagttattattactgtaaaaaattaaacttaaatatttatctgctataacaattctttttttattttcttctttattttttcttctcttttttcattgcttccgaactaataatatatcataaaacattagatttcacatattttaatttaataattattatataaaaaaattctaaatcatttctaaagcactatcacctagtagtgttgtacattattagtgtctaataataacattttttttaatttttttatcaagaattcgaaatgaataaacaataaataaattgagtaccaataaaggagggagataaactccaactataaaaactcattattcagctaaagaagatgaataacaacaccctatttgttttttctaagttatacattctttgacaaatatataattcataaaataatcaagtaaaattaaatctattggtcaaacttcatttgcaacacataaaaacaaaagaaaaa

SEQ ID NO: 222347 - DNA, 1316 bp, Cannabis indica
ttatcaagatggtgaggtgtagagtttttgccctggagaacagaatgacattggtagtcacgcaaatatgcaggttgtttgatgattctgctggtgcgtcttggtggaggaggtggttcttcctgttgtatgggagaagaatcattgttgtttgaggatggatctgtttctgtaggtaactcttgtgcagaagagtgatcaggaacatgattgttgtgttcaagtgtattatcctgcatagaaatattagaactaggcacaggaactggaaaatcagcaacataagtttcagatatatgtgtgtggggaagaaccatgttggaaaaaggatcattatagtcactgttagtattgagccgatggaaaggatatatagtctcatgaaaaataacatttctggatataagaaattccttggtattaatatcatataatttgtatcctttaataccttggggatatcccataaagacacaagtcctagctcttggagtgaatttgttcctatgagcagtgagagtacttgcaaatgcaagacacccaaaatttctcatgtgatcatatttaggaaattcattgtaaagaatctcataaggacttttatttgcaagattaggagtgggagtgcgatttattaagtaagctgcagtgaggatacattcagtccaaaaatgaataggcaacttagcttgaaaataaagagcgcgagcaacattcaaaagatgttggtgcttcctttcggctatggcattttgttcaggagtttcgacacaagtaaactcgtgtaagataccaaatttggcaaaaagatctttaaatgtcagttcgggggcattatcagatctgaagcatttgaaggtgcaattgaactgtgtctgaacataagtcaaaaaatcaggaacaatttgcaatacatcagatttttgcttcatgagaaagatccaagtgaatctagatttatcatcaactaaggttagaaaatacttgtgatttgtgtgtgaagggatatgatatggtccccaagtgtcacaatggattaaatcaaacttagatttagcaaaactagtatgctttgaaaagggaattttcttttgtttggccataggacaaacataacaaggagattgcttgtgaacattgtcaatgttacattgaaatttattacaaagcaaagctagacgtttgtaggaaggatgtcccaaacgtgaatgccaaacatcagcagtcacaacattgttacaaatgtctgtgtgagtctcatctaaaacatatagcccattgcattctctacctcttccaatcactttcttggattg

SEQ ID NO: 222348 - DNA, 1204 bp, Cannabis indica
tttttagcacaaaataaaaaaaagagcattttcatcattgatctacgtcttggttcttaggaacattatttgcaaggatacacgtagattgttggactccccgaccattggatgaagacttgtgtttctggaagtgggatcatggtcttctgtatcctttcacgttgattgccttttgggtataaatacctcttataacttccaattaccactttttttcatttttcaaatttcaacccttcgaagatcataaccttttctgcagtttccagaactacaaactgaattcaaaatagagtcttctttttcaatctggaaaatgctatagacttccatcttcctttgtttttgaggattagggcacaagagttcacacatcatcaaccctcagtgattagaacttttacggcgcgagtctggattttgatgcagagattgatttgttcatcgttctagcatcttgtcttcgtgaaaggtgcgatcaacttccccagccagatccaacgacgatcagctaaacatctccattatcaatatcaggtatgttgtttctttatctatggattgtgttttttgaattcatcactattaatgtagattttcattaaccaaatatatagcatttttttacaataaatacactacagagtttaataataataataaacaccagatattttacgtggttttgtagttaaatctacatactccacaagtctgtattgttaggaatatcttttgaatacagagtataaatatcagtataataaatagcaaaattttctctctatattttaccatcccttttcccataaagtctgcccctatttataagtgtataggctggcaattattcttattgggatcgattcatttataactattgatgaaacgtggacattccccatgtttcatttatttacacatgggataatatctaataacttcccaactgctttttgtctttatcctttaaacggttatgcttcttatccgttgaatatgagtagtttctcgttgaatatgagttatccttcttatccgttttgagaggaaaaaatactaagtgttattttgcttcatcttgcagtactcttatatcgtagtgatgacacgagatgactactacattatgttgtcgagtgaatttcgcaacaccaaaatatattatttgattaatacaaaagagaattttcagagaaac

SEQ ID NO: 222349 - DNA, 12920 bp, Cannabis indica
gttgcaatgtggtgtgaaatctgctagttagggttagatttaagttgggattaatcggatctgtattttaggaaaatttgggttttttaacgggtccgatgcccgtccgatggtcccatgatttttttggctagaggttgaagacatcgggtccaatggttcgtccaatgcagcccgatggtctgttcgatacagtctgagaaaaagaagaaagaatagaaagagagagggaattgatgtaaatgggaagagtattttgagaataatactaaagttatcatatcctataaatattggtaaatataagtttagggaagataatgtaagcatatttaatcaaatttccttttatatttcaattctcattcttattcctatatttttaatccgacaaaatctttttaaatttatttttctttacaaatttgaaacatcagttaaatattccgctaaataacaactgaatgactactatttacactttcgaatttaagggtctaaagtaaacatatgtgaattttcccaaaaaaaaaaaaaaaagactgaaaataacccttattattaaggaatagaagaaagagacattaatgatttgcagaatccaaattatatctaaagtaaacacaaatgcataatagttttaacaagaaagattgtaaatgatgagaatataaacaacatgcatatttatggatcaaactgacaatttgtgtctcaccacatgttgaaagttttaataacaaagattcaaatttcttcgcagaataaattgattggggtttttaactaaacagtaaaaccaaccatagaggcagcctctcccatcattaatatggttctctattgaatcttttaacaatggccattattcaaaactttagctacttccatagactactccaactcacaaacacactgcccaccgaagagtagcgtgtcggttagaaagagagcatttacgaaaggcaagagtaagccaacgccttctcctcggacagttcatctgctgtcaagtccaacttcttccttgagtactcgtcaattgcaagtcctgagaagataaaagaacgacgataaatatgatatcaagacccgaaaattacaatcccagaaaggaaaatgtatgttttgaggtataaatacaccaaatatcacaatgcacccaactagacaccagttaaaattgcttattcggttggatctgaaacaattgggattttttggagattggatcgagttactaattcatgatttgtcatgcacagaatgaaaacgattctacgagaatttttagggtacactttttggagaatgatgtaaaacccttaccttgaacaattgtccattcaccatttttgcaagtgacagggaaagaatagataagaccagcaggtacattgtatgagccatcggagtacacacccatggaaacaaaagttccctgatatcaaacagtgaaaaactttagcacaacacagcagcatagatatcgataaggaaacagattaattgaaaagaaaaaacaagtactgacctcaggagttccaagaacccagtcacggatgtgatcacaagcagagctggcagcagataaagcacttgatagcttacgagctttgataattgcagcgccacgttgttgaacagtggagatgaattctccattcaacctatagagcaagacaatcatcagacttattatattttatgaggaaaaatggcactgtcgatcaagtattgcattaactatcataccatgcatcatcagcgacaagctcacggacaggcttctccccagcgggtgttttgacagttgcgtggttaacatcaggatactgagttgatgagtgatttccccagatgatgacatttttaacatcactaacttgaacattcaatctctctgaaatctgtcccaatgccctgttgtggtccaatcttgtcaaacaagagatgtttttctcgggaattgatggtgcgaattccttcaaaatcaatgcattggtgtttgcagggttagcaacaaccaatacctgcaaaagaaacattaataaaacgttagatcaatccaaataatacaaaagctctcactcccatacattataaaacaaaataaaaaattgattagagaaaagaagtgaccttgcagtttgcagcagcatgcttctcaagggctgaggcttgagccttgtaaattgagacattctttgacatcacatcctttctttccataccttctttccttgggaatccaccaaccatgacagcaacattcactccagtgcacccctcaacaacatcagtcgttgcaacaacacctgatacaaacaaatatcacacacatcaaatcttaatcacacaactaagtatgacaaaactcaaatcaagatcaaataatggagttatatatacctttaagcagagggaaggcagcatccaccaattccatctttacaccgttcaaggcctcagctgcaggtgggatatcaagcatgtggagaatcacaggctggtcagctccaagcatgactcccctagcaatcataggaacaagagcatatccaatttgtcctacaaaaccaaacacagtaaaaatgcttaatttttaaacgaaacaaaagcaaacaaatcaaatagtgcatacttttattataaaaaataatcaactttgtttaaatgaacacaaactattttcccagtgaagaaccacataaaaatacgaactcaaatatctttgatctcattctcatttctcattcactaatagtgtatatatgcacagatcttctcatatacaaacttcaataaaatagatcatgaaaatgaaaaaaattgaatcaaagatataaacaatcatattcaatacaaagcacgatcttgattcttcaccaaaataatcaacatttaaaaaaaaaaaattaaaaaacagatctttaaacaatttcacgaaaatgattttagtcctaccatttatcataacatactacatcaaaacaatgcttaaacaagaaaaacgaagccataatctgctaaatctagcgacaaaaatccaaaaacagcagtgatagattagatctaaagccatataattatatatacctgcagctccggtaacgagaacgcgaattggttccttggaggccatagctaaggatcgagaagagaaatcgatagaaacaaagagagattgagagtgagagagagagtgagctttttggcgatggtggtgaagaagataggatcgaagaaaggtaatatatataccaaacagaaagtgatcttaagaagaatataattaccgttttagaccctcaattttattaagtgatacattgaaccctatatttttagaaaataatataaaatagtaatttgagtttttttttttacaattaaaccttaataataatacaatttagagatactatagcaaaatttgatacaatttttatatcaattcgtgctataaattattagttgcattaaataattgagtttagagtattattttaaaccattttaaataatgtactttgtaaaatttatcaattgaacttctaagtttgattttatattttttaaaatagtataagctaatttttagtaaaataaaatttaatgataacacgttctataagtagagttattcgtggtgcgagtggtgcagtttttgactatttttttaaatcaaatcgtacatgcgaatttttttatttcccaaaccgcatccgcaccgcaaactaaaaaactgtagaaaccgcactgcaaaaaatagtactgtgcagttcgatttttgcggtttctacagtttggactatcaccaaataactaaactatcacatatacaacaaaatttgagcaacacttgtcaaaaatatcataaggcttgaaaataaatatgaaaaaaatttaagtttcaaacatacaataattagtgggctttgggctagaccttcccatgttagacctaaataaatataaaaaattagtatttttataatgtgcacggtgcggtttgaacagtatattaacaatttaaaaccgtaaacggtaccacaccgcgcggtttaagaagaattcaaactgtgaccgtactacaaagaatttcaaactatatttttttgcggtgcgggcagtttgagcgatttgatgaacaatcctatctataagtgttaagacaagattgagtatattttctgtatttgttgatgctatagagagtatatctaataacttttacaaaatatatattttgttaaatgatgaaatagtacttgagataattttttttaaaaacaaaacttaacaataattagagatattatgataaaattaggtatctaattatactaaaaattatccttaaattagttatattttaaaatattatggataattaaatttagagtattatttttaatttattatttagtaaaatagagaaagattcggtaaattttacaaaatttaggactcaataatagcattaatccataattcttgcaaatagcaaacttggtatccaaaatggcatcatatgattgtaactgaagatgacgatatggggtgtagtgtaaacggcgttacgtttggggattcggaaaagaggattagttaaacggagttagaatattctgttacgattctcattgagattgatgctttaacgacaagcgtcacggttcatgcgtggttttagttcattcataataaaagaattaaagttttttttttttaaaataaatatataaaaagttgtgtttttaatatgagttaagatcttttgtcaactattggcccaacacaagagttggccttcatcataccaacaaacaaactagtggttcaaaaataatgtcattaaaataaataaaatttggtttttttgagataaattgttaggtcgaatcttagtggtggcatttttatgataaattttgttattaactatttgaaattaaataataaattaatttttgtgcactttaattggtgctaagatggcgtggaatttgccttcaagtttgtttaatttttgagtttataattgaaaaaataaaatcatgaaaataactcttgtgcataaaggaatgattttagtttattattttttaaaagtatacgtaaaatttaaaattaagcctattaaagttttggataatattacgacttaaagagctgactcactctatttattctccttttggtgcatgttccatgtcattgtaggagattttttattttcaaaaatatatgttaaaaatcaaaataaaagttgataaagcttttatatttgatttgaaatagattggctttcatgttaatttggtatttttcatattcaaatatattagtaaatttcagaaaataactaatcaagtggtattgaattttgttaggttataaatacctcttttggttacttatttttaagtttttttattaattatgttttacttgattgaatatgaggtagaatttgagaatttagtatttcattgatacattattattttatttgtagattgttaaattaatataatttattttgaaatatttcagtattataagttgaaactctaactcttttagtgtattgtttgagtatgttataattttattgtctaaattttttagaacaattttatcctatacatagctcattttcttaaaaaaaaaaaaagtaaattcttcacaatgaactatcctaattggaggtggttacattttgagagattatttttcaaacgacatggaatttaggtaaaaaaaaagtaaaaacgacatcacgttcgtacacatcaacacaataagaaacgacgtgtcgtttacatgcagacaaaatctagaaggcgcgagactcaactatacttcacttccaacatctctgcaacataaaaacatcccaaagattcgattattacgtttgcccaaacacaaagattcaaactttggcgcaagagaaaacacttctccactcccagttatcatcatcgtctccaacaatcatctgcaactaatctgaatcgtatattatttgttcaattatggctactgcttcaggtacgtacattctttttcattatttcccacaaagcaacattctgggcaactgtctttagtggacttgcaatgtaagaactcaatttatggggaaactgtttgagttttgagtgatgttattctgcacttacagttttgttatttgcccaatttttattcttttcttgtgtggaagattcatagtgatttgggtttgaatggtatgttctgtttgtaaagttatgttcttttccccattttttaacctttggtggggaaaaatattcattctttagcagatttgtaatgtgagaatacaaagaaattgattgggttttgaatgattttatagctttggctgcttcgacaatccacccttaaaagaaaggtcaatctaaaaggtttctaatcagttttaaaaattttggaataatttataatataaaaagtagtgttaaagagattattttacaggcctataaaataaaatagttattcgtgcaacatactatttgaatcttgttttcaacatgtaaattttttttataagttgcataatcatgaaaaaaaatttaactaaaaaatgatttcagataccaaaacagatagagctgcatcggtacatccatttgaagaaagagagttcgttgtagaattttcttataatttttatgtgctctcattgttatgttggcttttcagttgcattcaaatcaagggaggatcataggaagaaacttgaattggaggaagctcgtaaagctggacttgcaccagcagaggttgatgaagatgggaaagagattaatcctcatattcctcagtatatgtcatctgcaccttggtatattaactctcagagaccggtaaagctttagacttctgagattgctaagttaaattgtttttgagaatctaatgttgacactggacatttatgcagaattgttcctttgtttctttctttctgttttagactttaaaacatcagaagaaatggaaatcggatccaaattatactaagtcttggtatgatagaggagctaagatatttcaagctgagaaatacagaaaaggtgcttgtgagaagtaagttgaattattgctgattctccattattaactttgagttttagttgaatttttgcaagcacataatttgtactgatttccattgatttggcaaacttgatgtcatttcttgaagagcaagtcatgttatatcatatgtcttaagtttgattcgattgtgaacttccttgacagttgcggggctatgacccacgaagcaaagttttgtgtggaaaggccgcgaataaaaggagcaaaatggactaacatgcatatagcacccgatgagaagattgagacgttcgagttggattatgatgggaaacgtgacagatggaatggttatgatgcatcagcctatgctcgtgttattgagaaatatgaggcaagagatgaagcccggaggaaatatttgaaagaacaacaactgaaaaagttggaggagaaaaataataagtcggatgaagagggtgcaagcagtgatgatgaatttgaagatggtctgaaagttgatgaggcgaaaattgatgagtccaaacaaatggactttgctaaagtggagaagcgtagacgtacaactggtggtggaagcactggaacggttaggtatgcttttcacattccatgtcctcgttatttgttgatgaagttgatttactccgaaagctaatatacatttgttccactgtgcaggaatttgcgaattcgtgaggatgtcgctaaatatcttttaaatctcgatgtaaattctgcttattatgatcctaaaacacggtccatgagagaggatcctcttcctgatgctgacccgaatgagaagttttatggagtgagtattctttagatgattgtgtaactttaatttatactgtatatgttgttaaaattcatgattttgatgtgttattgtgctattgacacagggtgataaccggtatagatcgagtggacaagcgttggagttcaaacaacttaatttacatgcatgggaagcatttgaaaagggccaagatatccacatgcaagctgctccatctcaagctgaacttctgtataagaactataaggccattaaggagaagttgaagtcacaaatgaaaaacaccataatggagaagtatggtaatgctgcaagcgaagaagaacttccgagggagcttctcttgggacaaagtgagaaagaagtagaatatgatcggacaggaagaattgtaaaaggcatggtatgtctacactccctttaaataatttatgctcttaacaatgctgcattatgagaagtaaatttaaattgggatttggtcaaatggttttatttaaaggcggatatttgtgtatctaagatgtggtcaaatggctttcctgtagatgatgaacaaggtggaagaaattagttattacatggagaagattgtgcttgagctcttgatactgatttttgtacctataaccattaaaatacagtactttttggattgtcttagcatggttttcgatatatattacaactactgcagttgtatagatttgagtacctttgctgaaaagtaaaagttcaatgcagaaaatctacatgttgaggtgctaattgcttacattttgcatttttgtaatatttcatgaaatgggaatatggccatcaaaactattccgagttttttacttatcgcgttctttcttcccttgcattatctttttggcttttgaaggaagcatttgttcccagaagcaaatacgaagaagatgtttatatcaataaccacaccagtgtttggggttcttggtggaaagatcaccaatggggctataaatgctgtaaacaaacagtaaagaacagctattgcaccggctcagctggaattgaggctgctgaagcagtagcagacttgatgaaagccaacattgatcggaaagcggcttctgaaggtaagtaattctgtcattattactaatgttattagtacattttatcatgttctgattcaatttttgaatatgatgcattgcagagacaactgctccaactgatgagaaaaatcttgctacatggggaagtgatgtacctaatgacttgatcttaaaccaggaaaaacttgctgaagctcttaagaaggtgaaaaattgatcttaacccttcttcacttattgattctcatgtcataacagcttagatatttcattattcccttttgtattcttacatgtttgacttgtgctatgttatgtatgttgatcaggaggatgaaagaaagaaggaagagaaagatgaaagaaaacgcaagtataatgttagctggaacgacgaggtagtcagtcaacccgaacaaattagctaagccctgaacagtttgtattcttcttcggttttttctaataatatgtcatgcaatggctgtctttttcaggttactggagaggaaatggaggcataccgaatgaagaaggttcatcacgacgatcccatgaaggattttctgcactgatatgttggcaaccaatattgtctgctcattcttatcaatatggtttttcataccttattggcatttgttaatatacattattgttactgtaaatttgtggtaataaaaactttatttatttatttttttcatgtatactgttacaatttttgtagagaaatgagtataaacaaatcaaattaatcattccctgataattaaccaggaaaaggaaaaatcaaaacttacacacaataacaaaatctcacatgaaacaaatgtcatcacacaatatacaattcaaccttttcattcctataactctaataaaattcaagccaaataaatagaccaaaaactgaaataaaacataccctttttggccttttggagatacttcaacctcctagaataaatcaatgtaatatgtatgtatatctataaactatagatgtttttaagcactacgtttcaacatctcttgaaactcaagaagagacttttctttctgaagcttcatatcttccctgaaattgctaatgaattcctctgctctctcatccactcctcttagttgcggcgatgcagccaccaccgccatccacgcctcttctacgctataaatactctgtttattattactactactaactctttttatatccttgtctccaaccgctacttttttacccttatcattctccttactattatcattaccgctcgttccagcttcatcacgatgcatagtaatattattactagtgtttctactaacaatattactcttcttaatacccgaggcagaggtcgtggcagaggcagaataaggaaagagctcgtctatgtgtatagcagagaagttgttatagatcgcctgattatgatgatggtgagagtagttgtgatagaaacgtcgatgagaggaggcggccgaggaggagatggttcggaatttggtggggagaaaggagtggaggatgtaaaggaggtgatgacatgaagttttgatattggaagagtgtttgttgatgagattaatgaagtgaatgatgttgggttggagtttttttgtgaaatttttccatgctctcttagccggagaaagcttcctccttatgttccacctagacataattagagagtactaatttgtttttggttgatttttgaagattgttatgtatgtatactagtgatttatatatgaatatatttatgtaagaaggtttggtattggtttgaatatttggttaggtttgttgccacttggggtattgtaaaaagaaaagtagaatgaaattgaaattatgaggtgtttttgtgtgtgtgtgtggtcaatgggggaaatcactcattactttcggcagcattatattaagaggcccctctttaattagctggagccaccaaaacttggctcctaagtttgagattattgacaaaatgtatataatataatgtatttatttttggtaattatgaaattaatcatatagaaaagactcatatattattgaatggtggtggtggtttgaggtggggtgcgattgattcccttgttagctctagtaatcaaaatgtccttttcttgtaccttgtgcataacatgttacatgtttattccataagagtgctaattagaatactttgttacaacctcttaattaattttcgtgctcaaaattacatattagagtattagagtattcgttatagtataatattatctatgtaaatttttgaaatttttgaaataaattatagtatcgaaaataaaattcctgatattctaatttaagtgtctaaaaaaaccacaaacttatatatatttagataaatatatagtaagctagctagatagtagttagtttagtttggcattagaaatatgaaataactaaattaaggtgctttatattataacacaaaaaggaaggtacttttcttagggcggatggctaagccattcaaataatttaaatacttttatttgggatgtgaatgtgataaatagttggcaaatgaaagaagttggctttccaagttgtaaagatgactaaattaaaaaaaaaaaaagtaataactttggttaggacttgggagtgtgtaaaaggagagaagaacaaaagcaaaaatggtgcttttgttgaatcacttcctttccaagtcattctaaaccatatatgcatggtttcgattaagtctcatgcattatttcaaggtgaaataaaaatgcatcacctttttaattagttgtgttttacatataatataattatataaagtagtgtaatattttaaattttaatatataattaaattagtcaatgcatgggttaaatgtaagctaatccaatatatatatatatattatttgcataaaaatcattagccgccgtgtgtgtgtgacaccttattagtcatatcaattgatacatgcatggttttaattttaattttagttaaataaacattgttgggagtattaaattatgtaggctaatcgattcatcgacaactacctcaagttcccatcacagaaatttttttatttgtggggtattgaattgaatgcttttgcttgtttatttgggagcattaatcaatttcagatttaataagttgtgatcatataattaataaaactctatcatatcttattctccttgttcttatccattttagatgtaggccgaaaaacccaattataaatgcattttatttaatttgatatactttgaccaacaatatatatataaaaataaatacaagtgttttaatttacaatacattttctaaaaaaagatgtagttatttatttcattttagagaatttttcagtcaaaattattttatagactttaatacatgtgcatattacaagtttaatttattatgtcatatataagcataattatgtgaaggaatcatgttttcaatttataatttagaaaaaaaataattacaagatgtttatttgaacttgtttaattggttctacaagagttgtacatcctaattatgaggctgatgcaagtgttagagttagactatctaattagcaatatacatatcttaattaaactagttgtggttatgacacctgatgggtaaagagattaactttatcaagaattgatgattcctcgctacaacgtaatttttttatgattaaatgtgattgttagtaacaataaaaagttacttatgctgactaaaatatattattcaaatacaaattgtcactaatttagttttaatcacaataagtttgttacaataaattgttatttttgtaactaataccttcaaccacaaatcacaatataaaaataaaaattt

SEQ ID NO: 222350 - DNA, 3708 bp, Cannabis indica
tccaattcatcttgcaccaaaatgatttgtaattcaggagatttacattgatgtccccttgtccatggtccatcacacttgaaacaaactcccttagcttttttttcttgcacctcagtttcagtaagtctcttgaatcctcttcccaactccatttctcttctctggtttactggagttgaagcacgataggtgttattttgtgcaaatgggcttttattaattgtcccccactgccccattaaatttctttgagtgagcccacttgaattaaaagataaatttctagttgggcttatcaatttactcggcccacctccaaaagcccgaaccaccttaggattggcttccactatctcagccaactccattgtcttctccaacccaaccggttcaaggagacggagtgtcccctgtatctccgaattcagccccttcaagaatgccgattccaacagcggctccgccactgtccccaacgacgcagtcaacgcttcgaattgctgcctgtattcctgaaccgtggacgtttgctgcaacgccaagaaccggtcgtacgccgatccttcatgggcagggagaaatcgccggagaaggaggcctttcaattccgtccaggtgcgaatttcacgtctccggttctcccatctgaaccagcgaagtgccggaccttccaaacacagcacggcagcttccagttgctcctctgccgtaagcctctgcaaaccgaagtatcgctctgcccgatacgtccaatcgtcgggatccgaaccagtgaagagaggtaattcaatgtttctcgggcgaaactcagatcgtcttcccccataaccactcatctcctctcgattctggtttcccgatccactagacccgatcggaggttgaacggatctcccaactggacttcgtggaccatcggtgagctccgtagccattctcgcctgtccgcggaggagtaagtccaacttctcactgattacggcaatgccgcgttcatgggattccaccctctctttcatcgtatcccaatccccatgaattggtgactgtgattcctcttctcccgactgaaccgattccaccaccttcttcgagcttctcgtgttcgtcatcaccttcccggactactcgctctgataccaaattgatatgccctgcaacctcaattaccaatagagcatatagacagtaaaataatgaagaaacatccagtgagtgttattgaattaaatggcaaaaagattacagaatgagtcctatagaactcttgctgcagagaaaagaattctcaataccagcataaacctctaaaaccccacaacagtgctatatcaagcttgcaacaaactcactcacaattacaaaaatacccaaacagtaaaagaccaaactacccttacgctttagcattcttacctctcctagcataagtgaaacgcaccttggttctaacagtatctgttgagcccctttttggtgccaagagaaggatgagacacaaatacataagctgtatacaataagccaccttgttgatgcgtgcttacacttttgtaatggccatcaaggtgaaacttacgaaattgatctttgatgttgtagtaatctttccaagtacatcacaaagacctagggtatttgttgagcttgtttttggatgttgtagaactggggtgaacatccaacgtgtgatttggttccactttccattccaagacctagggaattgatatgccctgcaacctcaattaccaatagagcatatagacagtaaaataatgaagaaacatccagtgagtgttattgaattaaatggcaaaaagattacagaatgagtcctatagaactcttgctgcagagaaaagaattctcaataccagcataaacctctaaaaccccacaacagtgctatatcaagcttgcaacaaactcactcacaattacaaaaatacccaaacagtaaaagaccaaactacccttacgctttagcattcttacctctcctagcataagtgaaacgcaccttggttctaacattacccccccctatatctcgaaccttgtcctcaaggttgaaagcaggaaattgttggcggatggtctcaaatttctcccacgaagcttcgaataagggcaaattcttccaacgaatcaacacatcaacctcatcaccgggaccattggtgccatggcgcacattcagtacttcctcgggctctacttgaagttccaactctggagtaagttgggaaggaaaggtagaggaagaggaggctgccccaataacagctcggagctgagaaacatggaagacggggtgcaccgctgcactaggaggaaggtcaagcttgtaagccacttcgccaactcggctcaacacccgaaatggcccatagtagcgggctgccaacttttcattacgacggacagccaaagtcttctgtcggtagggacggagtttgacaaacaccaagtcaccaacctcaaaacggacctcacgacggtgggaatcagccgtggtcttcatgcggtgttgggctcgaaggaggtgcatcttgaggtcatcaaggaaggagtccctatcttccaacatttgatccacagtcaagaccgctgaaccgcccacaggatagcgcaccaagggtggaggatcacggccatagagcaccttgaaaggtgtacatcccaaagatgaatggaagctagtgttataccaatattccgcccatgacaaccacttagcccacactcgaggcttctccgaggcaaaacaacgcaaataggtctcaaggcaacggttaacgacctctgtttgaccatcggtttgcgggtggtatgccgtactacgcttcagaagcgttccttgctgcttaaacaattcagcccaaaagtgactaaggaaaacacgatcccggtcagaaacaatggaactcggaattccatggagcttgacaacgttgtcaatgaaggcttccgccacagttttggcagtaaatgggtggcggagaggaataaagtggctatatttgcttaaacgatcaaccactaccaagatcgtatccaccccttcggaacgaggcaagccttcgatgaaatccatggtgatatcatcccacacctgggcaggtagaggtaacggttgtagcaacccagctggagacatcgccatagacttattgcgttgacacacctcacaacgcctaacaaagtcaacaacatgttgcttcatccctgtccaaaacacatcagcccgaatccgttggtaagtgcgtgtttccccggagtgccccccaatgggagtctcatgatattccttcaaaaactgggataaaagggaagaagtggcagcaagcacaactcggcccttgtacctcaactgtccatgatcaaaggagaacccgggaacctccttgtgttgctccaaatcagcacaaatcttagccaataggggatcagctagcacttcttggtggatcatctcccaatcaagccaagaggatgtagtaaggacggcacaagctgcgggaagaacccttgacaaggcatcagcagccttgttagcaatgctcggtcgatattgtatctcaaaatcaaagccaagtaacttcaccaaccacttttggtgttccggagataccagacgttgttccaaaaggaacttcaagctttgttggtcggtgcgcaccaaaaacctccgacccaaca

SEQ ID NO: 222351 - DNA, 2607 bp, Cannabis indica
atttaataatttggaccaatcagaaactgccacgtggtcattaacttaacacataaatattttgggtaagttttagatatatatttaagtattattattaccgtaaaaaattatattagatatttatgtgtaaccgaaattaaacttaaatatttatatcataaattattactaccacgtagtcattgacttgacacatgaatacttaaggaagttttagatatgtaactttaagtattattatcgttaaaaattaaatttaaatatttacatgtaactaaaaattaaatttaaatatttaaataataaattatttaaatattttttttccaaaataataataataataaatttaatttaaggacattttagccgacatatagtcacaacttcacttcacattaattattacaaaccgacgacggtgattgaattaataaatcaataatgtcataatcataattattttatctgttttttttttccatacaatattatgaaaataatatcttaaaaaaaaataaaaactataagaccttgacgattttttttatcttctctagttttattccttttatttttatttttctatatatgtaatttgattttgattgaaggtgatatgagtgtatttttcttatagatataataaatatatcatattattcccacttgttataaaaaaaaaagtaaatacatttataaagatagatcatcgtaacaaagtttataaattaaattatgtcacattacaccttgagaaaaaaaaaaataattcaattattttcttgtggtttttttttttctttctttttagttattttattttatttttccatttgcgtgttgaaaaaaaatttgacctttttattcttacaacaagaaaatcattagatttacctactatattctttcttcttaatttttttttttttatttttcactttttgtttcaacatttttttccttgattgacaacgaaaactactaaaaaaaaatacccaagcttggattaataataatagaaattaaagaaagaaatatatatatatttagagccttctttgtcatttcttaattatcattattatttttgtcacaaggcatctttgtccttaaaaatagttaattgactttttaaaatcaaaattattatgtggatctaataagaaaagatttaaaaagatattaaatagctgagctttatcttcttgttatttatacagataagcatagatatttttatattcacattattatatcatcttatgtatggattcttcacaagaattattagtgtgtgtggattctgtttttttttcttttcttgataaaaatacaaacaaaaaacttctatgaatttcctctataataatcagacaaattgtactcatctttttgtggcagctttaaaccattgttcaaactttaaattgagaactagttttacttctcaaaagcctaatagttttgtctttctcaccaagtgtgtacatagaaaaataacagatattattggataaatctatagtggatttaggagtattttgatacattctctatctgtttcggtatctaagagagttttttaatttaattttcttcatgatcgtatacgttgtaactatttaagttcaactgtaaatttttagaaaattttaaataattttactaaaaataagaattaaatatttccttgcacttctatttttcttatatgtatagtaaatagctatttaagctttattttcaatactgtaaattatttaaaaaaatttaaatatatagtcttaaataactacaacatatgcaattataaaaaatagactaaaaaactctcttgaatgttaaaacaagtataagatctactcgaaggactatttaaaaatgtttactacaaaaatttatgatattattaaccagatttttttaaatatatttatttgataaaaaaatttccacaagcaaatttagtaccgtatatttttaataatattcatacatatttagtaccacaaaattaaatttctcagtttagagtactaaatcaacaatttcaaaatacagaatatcaagtaataatattcatataagtacacacttcattattattattattattattattattattattattattattattatgtgataaaacaaaaatcacggtttgattgatatgactatggagctaagctaaagcaaccattttggaccaatgcatggttactactaggcctgcacatgggttgggttgggcggtttttgggcggtttggcggtttttttatttggcggttttttaaaatcacaacccatacctgcccaataaaagtttgggttgggcggttttttagggggcggttttatgcggttttttgggcggtttgggttgcttaaaaatcaaaacttccaaagtatattgtcacaagaaaaaaaaatatttaactataagataacatggtatttaataaaaattcatagtataaatttagatgtaagagcagtgaaaatgagagacactataaaaggcagaaaaagtattctactgatatatgcataccgtcaaggtattagccatgcccgactccaacaactcatctcg

SEQ ID NO: 222352 - DNA, 1749 bp, Cannabis indica
ctacatagtaatacaacgttggacttgcaatttggatgattttgtaaaattgtgtggtgatgaaaacaacaaagatgatcctaaaagaaatctatttggagatgatgatattaaaccactcaccaaacatggtcgaccaactcagttcttattaacattgttgaggtaataataattaaagatattaatttcttcttcaaaacccatatcatttataattaattaatcatcatgtaatattatgtttaattgttatgagattgtatatacatataatacttctttatatcactattacttttaattaactagtaatatcaactttaaaaatattaaataattagatttttatctaataaataataatgaaaaaagaaaaatgtgactttcaattaataattaattgataaaaactatcttttaaattatatcaaaaatattttttatataaaaaaacataataactttaatattttgcataattttttaaattttgagatttttacactaaatattgaaatttttaacttttttcctttttaatgtggagcggaatatttttaaaaagactatgctttctttttaaaaatactgtagaagttttatactgtgtactgtgttaagttttcactgttgctccacaattggtttttagttgttctactgttgtttttaattgttttattttgttattttacggttgttttagattgttttataaaaagataatatttttgtaaaaaatttcgcgtggcagtacaattgtaaatttttatccaaaattcagtattttaataaaaacctaacaaatgatattttacataatttaagtacatgtagaataatattgtgaaatttaaataaaaaactatttttgttaaaaaaaattatacttttacaaaaaagattttttatattatatatttttacgatgttctatacaaacaacacgaaaacaacagtactataacataaaaatacatcaaaagaccgtattttttataaataaaataattaaaaaaccgtaaaaaaaaaaaattaccgtacaaccatattttttatatttttttttcaaaataatctaaataatattatataatggacttatatatattactatatgcagtgatattgttgaaggagttaaatatttacacaagttgaatataatacatcgaaatttgaagcctgaagacattttgatatttaaagggcctggacgtgttcgtgcaaagatttctgatatggccataaccaaattacttcctcataatatttattctataaccaatagttcaacaggcaagtactctttcaatttttactttacaataatttttttaaacaagtgattataataagtaaagctctcgtttattttagagtaatttcttgcataaatacttaaatttaattttgattacaaataaatatctaagttatatttttagaatttcgtaagtacatggtcattaaatgtcaagtcattattcacgtgttatctttttattggtatatttaaactatttttttgagaaaaaataaatattttatgacctagaccaatcagaaattgtcacgtgtcaatttataacttaacaaggtacttagagaagttccagaattataacttaaatattacaatcgtcaaaaattaaatttaagtatttatttgcaactgagagttaaatttaggtatttatgttgttactctttattttaacaattacctaatataaatatatattt

SEQ ID NO: 222353 - DNA, 3514 bp, Cannabis indica
tatgggaatagcctcctcgacagcgacgcaaaatgattagaagaactgatagccgctttaacaaaattggtctgaaagtagagtgggactctcactgatttagaagatgaggacccgaagccttgtatcaaggggatcacaaaggctcctctcttggagaactttaaaatgcttcaaatcgagttgtacgacaccgctcaaatcccaaaacccatttagctatgtataataagatgatgcaattggcaagggttagcaatgataccaaatgtttgtgcttcttgttgaccctcaccaagtttgtagaagattagtgaaaaaggctaactcctgaatcagtctgctcctaaaaggacttacaatctatgtttcagtttcaatttgtggttgcttgggaatatgatttggaaatgggttctacgaccactatcaagaaacaagcaggagaaatcctaaaaagttttaccgagtgaatgatagccgccaaaactaaagtaaccaatgatacgaagcttgcagccttatagtctggacttgcaaactaggtccctattatggggagaaatgcaaaggaaaagggatgaatccctctccaaattcttggccaaggctcaaggcttcattagcttagaggatgcttaccagcaagcctttggggtccctattgcaccaaccccagtaacctctgttctagtcttgacttcatctaccgctgttttggaacactatacactcccatgatttgtagaccttctgtagttgttcccgcacctatgcaaacccatttctcttggtacagaacggtgcaaaccagatgtagtgtggcacatggacaattgcaaatggggttactagagcaggaagtgagtaattcctagagcaaaagagggggaagacgtttgggacgaggagaagccttgaagaaatctaaaaaagagtacaatctaaagtacaccaaatactccagtcttgtagacactcgtgaaaatgtatacaaggaaacatgtaacatggttcattataggaagacccctagaatgcctcaagggggaaatttcaaagagaagcaaataagcgttatgaataccacagagacgtgggacataagatgaacgattgtaactcatgaaggataaaattaaaacgttgataagagtaggacatttagagcaatgggtctggaccatcatatatcccggagagggggacattcacagacaagtgattatttccagatagcagggtactaaaaatcctccacatggagtaaccctcaaattcccgaaacatatcctctaacactgtgagctccaccaactttgaatgcagtggctttgatggctccaagacctacatatccccgaaggctagcaccaccaccagttgacgggcatgtagcaataatctcgggtgggccgtgccttgcgagaagttgcaagaatttttagaggaggcacctaagagaactaggtagagaaagaagaatgtgtgtgttggcacgaatgcccgctcagcgctctcggacaatgaacctgccaatcacttttgcagaggcagatgcccaacatgtaaattttcctcatcattgccccttggtcattgaaatttggatagcaagaaacaaggtgccaaaagttctagtggataacgtgaactccgtaaacatcctgtctaaacacgcctttttagcgatcaaactcattgatacagacttgtcaccttgtctagtccaactgcatggttttaatggggattccctaacaccaatagggaggatctagttaccagtcactcttagaggagaaaacaatgatggtacccataggtattgtacatttatggtagtggattgtcccacattgtaccacacaatactaaggtgcctagccttggcaaatttctgagtggtaactttaatatgtcatttgtgtatgaagtttcccacgaaatgtacatttggtgactcttctgggaagtttttaggcttcattgttagttcttaagggatcaaagcaaacccaaagaaaacctaggctttcatcgacatgccttcccctcgaaagcataaggaggtgtagagtgttactggaaggatcgctacctttaactagttcatcttgaaatcgatagacaagtgcattctattgttcaacgtgttacgaggaaacaagaaatttggatggaccaaagaatgtgaggaggcctttcagaaagtaaaggagcatttaactaaggcctttattttgtcaaaactggtggaaggggaagatttgtatctgtacttggcaatgtctaaacatgctataagtgccaccctagtgcgagaataaggaaaggtccaactattagtgcactatgttagcaaaagattattgggtgcagaatctagatattcgttgattgaaaaactaaccttttgattactggtcacctcacaaagggttaggccttactttcaagctcacgtcataaaagtactgacaaatcaccctctttaccaaatgctttagaatctggaagcttctggtagattgttaaaatgggcaatggaacttagccaatttgatatccaatatcaactacaactatcaattaaaggacaagccctagccaactttgtggtagaatgctccgagttaggtgatatcccaaacaaatcagtcccgaagctacctacctaagaaggtatatatgtgacggggcctctagcaaaaagggagtcggagcgggggtcatattaatctccttgcaaggccatcaactacaaagttctctctgctttaagtttcctgcttcttacaaaggagctcagcatgaagccatgctggcaggattacggctagctaaaaaagttggagctcagcacatcgaggtacatagtgactcccaattggtggtaaataaaatatcgagagaatattagactaaaggggaagttggggctctctcttttgtgttatttgtacttatgaagtgtaatttgcaatgtaggtcaccatcaggggaaggtctttgccatgtgaagtttgttgttaaaattttatcattcactcaccaaaaatttaaggaatttgattatgaaaagttcactcaaactccgctgtttctagtacacatttactaacatgtgctcctcttttaacgggatattttgctaacaactattgacattttttctttgtctactaacaagtaataattactgatactctaatatgtcacctatgaaattaaacctacttgaggaagattctagaataagcaccacgaaattaaaggagaaaatagttaaaggtgaagcatatgtattggttgatgttcgtccagaacaccatttcaagattgtttctcaacctgggtccctgaacatccctctctgaagtttggaggccaagttgcctaaaatctctatagctttaaaggaagagagtaataacgcaaggactggttcgggtgcataaatgtgtagaagaagtaatgtctcagagggttgttcagtcccttcacaaattgg

SEQ ID NO: 222354 - DNA, 4228 bp, Cannabis indica
aacctccgcatccaatgacactccctctgccccctccactaggaagcgaacatttcgccaggtcagaactgtcaagttggctcttcagttcgcagtatgttgtaaacgagctcgcgcctctcacttccgacttcgctgtggttccatccatgtccgaacactgaggaaacggcgggtgttgctcagcaaccccgccgaggaaaatgagtctgttaagttggaatgctcgcggtttggggagtcccccgagcattccaaaaacttctccctcatttgcaagcagcaccagccacaacttttctttattatagaaactaagtcttactatgtactctaattttgtttatagggctaaactgtattttccctatgtttttgaaattcctagactcggtttgggaggtggtttgctttttgttttggaaggatgaagtttatgttaatattttgtctagctctctccaccatattgactgtatggttactataaataatataacttttcatttgtcttgtttttatggatctccttatgcttctgacaaacatgattcttggactcttttgcatcgcctttttgatgttgctcctttgcaaccttggcttattttgggtgattttaacgattaccttgggtttaatgaccgtaacactcactgtcttccgccctcccatgctatgcaatctttccaacattttattggcacttactctctctcctcgctttccttttctggaaaccgattcacttggaaacatgtgaccactttagaacgtttagattgggccattgtcaacaactcctggaccaatttgttccccgcttcgtccctctaccatttgggtttttatggttcggaccacagagtcttaaaggttgttctcgaggataatcctaatttgttccgttctaaccaaacttttcgatttgagaaccactggttacttgaaccggacttccatgaccttgtcaacaaaagttgggtttctgaccccactgttgccagctccaccaaccccattctttcttttctttccaagcagcaaaattgctctaaatctctgtcctcttggggtcgtgacaaaaaccaattttctcgcaacgtcaaacgcctacaatctaatattgagctccttctggctggaccaactatttccccttcagctgctaaacaagcaaatgatctccaacgtaacttagacaatattttgctcaaagaagaaattttttggaagcagcgatccagagcaaattggctcaaggctggcgataagaatactcgttacttccacaatcgagccactttcagaaaacgaaccaacttcattaaaaccctcaccttggacgacaattctcaaatcactactcttaatgacatcacgaacctctttcgttaatttttattctaatctcttcacttcccaaggctctaatgctgaggcgatggctttcgctatgaggggtcttcctaaaacacctttctccccaacagcatgtttttctttcctccccctacactttagccgaagtcaaagctgcccttttccaacttgctggagacaaagcccccggacctgacggtttgaaccccacttttttccaaaaaaattgggattcagctagaaatgacctttgccaggttgtcttatcggccctactctactaacaccgacttggctcctgtcaatgaaacctttctggttctcatacctaaaataaaaaatgcgactcgagttaaggattttcgcccgatcagtctttgtaccactttctataaggtcttttccaaaactcttgctaatcgtcttaaatccattctccctgatcttatctcccacaatcaaggcgcttttcttagtgatcgcataatttttgacaacatcttcattgccaatgaggttgttcatgcgatcaatcatcgcaagactggcaaagtgggatgggcggccctcaaacttgatatggagaaggcttttgataaagttgaatgggcttacatccagcacattcttcagaatttcggtttccctgcttctttcatttctctcattctcaattgtctctcctctgtttctttccgtcttcgcattaataactgtctttctcatactattttcccttctcgtggaattcttcagggtgatcctctatcgccatatcttttcctccttgttgctgaaggtctttcggggatcattaatgcgaactctactgccaactcttttcatggcctatccatctctcgctctgctccctctatttctcacctcctgtttgctgatgacagtctttttttcaccaaagtgtcctcttcgtcttgctccgcaatcaaggacattcttctgctctataacaaggccactggacaatccgtgaatttccacaaatcgtcaattcttttctcccccaacacccccccctctgatcgtcaaatgtttagggattcccttaacatggatgacaaaccgttcatagacaaatacctcggtgtccctcaatgtttctcaagatcgaagaattcttccttccttttccttttgcaaaaagcgagctccaagctgtctgtttggaaccaaaatcttttctccaaagccggaaaagaggttctcctaaagtccgtcatacaggccattccctcttatgctatgtcttgcttccgcttacctgtttctctctgcaaacactacagccgtcttatgtctaaattctggtggggatctcttggccaaaaccacaaaattcattggaaaaagtgggacaacctttgttcctcaaaattcttcggagggttgggtttccgcaacattgtgcatcataaccaagccatgctggctaagcaagcttggcgtcttctaacttccccggattctctagttggccaacttctaaaagccaaatattttaagcgaaacgatttcttacacgcggccattggccactccccatctttctgttggcgtagtattctttggggtagggagcttctcttgaaaggcctcacttggaaaattggggatggcaattcggttaagatttctgaatccaagttggcttccatccaacgacaagcctacctttaaacctggtcttctccctccctcccaaactgtctccttttttattaccccggatcggcattgggattgtaacaaacttcagcattattttgacgaggggatgtgtaactccattctatctgtgcctatagatccttctcactctgatgctcttatttggaatcatcatccttctggttgtttcactgtcaactctgcctatcatctggctaattcctccatctctggccctggcccttccaaccctgctaactataaaagttggtgggtctctgtctggtcctccagcactaccccctaaaattaaacattttgtttggaaagccttcaatcatatcctcccttccaaccttaacctctttcaccgtaaatcaattccctccccaatctgctccatttgtcactctcacccagattccaacacccatgccctcctccattgttccagagcaggtaaagtttgtaagcactcttctttttctcatttttactccaataataaaaattgtgatattaaggaatttatgcttagaggttttgattttctttctaaagatcaatttctcacttttttgggtttgctttggtcgatttggaacaaccggaacaaagccattttttattgtaaaagggaacatgattactgtttggagaattctgttagttgttatttgcaggaatacagagaagctcaacatcgcatctccccttgttttgtcacatcccagccttcttcaactcttcaggtgcctcctaacatgtaccaactgaatgtagatgccgccctcttaccctcctcaaacaagcacggttacggagcagtcattaccaacagtcggggccaagtagttgcctctttatcctccccctcaaagtcaaggctcccgccgatttttgcagaagccgaagctctcctccatgctttgagttggtgccaggcagtccgctttccacttgctatcattgcctcagattgccagaatttggttcaccgcattcagaagtttagccacgatcgttccgctctttcaggttacatttccaagatcgtctcctctttgtttccttttccaggtgcctcggttcattacatcccaaggacattaaactccacagcccatgatctcgctcgagcagcccttggaacgga

SEQ ID NO: 222355 - DNA, 2671 bp, Cannabis indica
cttgttattctttgaaaagaaaacaacagtattattctcataataaattagtaatagagagggaatataatcagccacgcgtatctttgaaatcaaattctttaactacaaagcttgcaaagatgtcacataacatgctacaaactcaacatacatagtagaagtccatttaacacttttccaagaaatagttgcaccagccaaagtgaaaaaatagctaaaaaatgactttaatcatgtacacaactaccaaaaatctaaatcttaataatcaacaactcagagattgtcgacatgcttataaataagcataaaattctttgttatttgcaaatatctcatgactttcttggctgcaacccaatgatcatggcgaagataagataaatatctcccaagaacattgaatacgaaagcaatgtcaagtcaagtgcaaacatgggcatacatcaaactccatgctacacttgcatatgggatgttcttcattgcttctctttccaagtcgttcttgcgatattattgctcagtaaacttgtctcattttgaaaaagcaaaactaaactcctcttaaaaatagaaacttagaaggtacttctcaagacaatcttaaccctaaactataattcaagaataaaggtgctaacatagataacgtcaactctaacataagtgcccactttaagctttgactctattttatttggcttttcgagatctcttagctcctagttgtgcttgctttttttccaatttttcctatcctttattaggcttgagttaagaaatattgtgagaaatttcaatcttttccattttagcttgctttcctcaactacacgtcgagaaattaggtcactaaaaatccataatttattataaatattgtagactatcttgataagactgaaagaggcaaaaaatgcatgaaaaacacgatgaataatgtaacaatcaagaagaggaatattataatcttccaatttggactgaatattcctaattttctgaataaaatctcgtactccttttgattcatcatacttaatgattatcattttattcataagatgtcaaacttcagcgtttttcactagtatcatatagtttttctacagaaccaaaaaactctttgacattgtagtgtttgccaaaccagttaatagatgttttgaaatagatctcttcatagcaatgagactaagatgatttgaattttctcattatgcattaagagttctctaggaatcagaactggtatcagtaagatcaatatatctttcttcttggaggcataagtccaaattcattatgcttaaagtaaattccatatcccatttcatttctaatagttagagcatttagaatttagatggaaatgagcaatgcaattagaaaatattgtagaatcaaccggtcattataaactcctcttacacatgatctaccttcacgaagttaacaaataaaaaaaaaacatatcaattaagaatttattacatttgggcaaataaatctcttaaagaatacatattaattcaagccaaaagaacaataataaataaatatgtatatttaaattattatcaaaaaataattaaaatatatacatttaatattaatcatgggatgtaaactaatatatatataactactatatttgggtaagtaattacacatatagtcaactaaaataaataatattttctacaacatatcaaatttggtgataaaataattatttaaattaataacttttcaactaaatttttgaaaagagatatattgcttataatatatcaataattaaaaaataaagtgtccaccataacacattacttttacatcaaacaatcaaagttttataattttagaacaataaataataaaaagatgtaaaagaaagaatattgttggagattacatagtcaagataaatcaaaataaaagagtgactatgtcaaacagaacaagaagaagtccaatttttttttatgatttacagatttcgaaaaatcatcaaaaattacttttaataatttttcaattgcataattatattaaattaataataattaccaaacggagtcaaaaaaattaactaaaaattatagaaaaatctaaaattgaaattctaagcacactggaaaaaagtatcaaaaaaatgatgtcggacggcaatgcacgcgccccacgaactgctatcgagagtgggcatcgctggaaaaggttgtcttcaaccttgaatcaggtctgaagtgggtcacgcaactcagtttctgcagagcgggtctacacataattttggctaaaaaactgacgagaaatcaacggaaaacaaagggattaagatcgggatggatttctaatcgatctatagtattaattttgggtataaacgcatacacttggctagatctgaattagtgcaaccgaaaaaaatgaaaaacaaaaaggtttgaatcaataagtttgaacatattaggttcgaaattatatgtaattaaaatatggataaataacggcataagtacccaaagttttaagtttgtaagtaggataaacccaatgtttatttttagcggcataagtacccaatgtttgtaaaactgtaattttcctctagttttgtcagtacagactccgttttgaatttattaaatgaatattt

SEQ ID NO: 222356 - DNA, 1419 bp, Cannabis indica
tcaataaatgtcttaaaccaaaattccgaaaacaaaaccctaatcctaaaacaaaacataacctatcatccaacaattctaaaataggctataaaacacaaaaaataacctaaaataggtactaggtttcacctcgagcgaaaacagatttcaaagaaaaactcgatattttccccctacaggcaaccggtcgaccgattctggtgcactagaaccaaccgatcgaccgattctagcagtacagaaaatcaagagctttctcccccaaactcgaaccaaaaccaatccatacctgtccaaacattgcagaagaatataatacaacaaattcaactcatcccaagcatcatttaatcacaatttaatcatttactcaaaattacatactcaagtaaaaattaaacttcatccaactcaaaacaagctaaacatcccctaattctaatcaatccaactcaaacaaacttaaaaacaaacctagaagcttactctaaccttaactaacttcacaatccctgaaaaaacctaaaacactaaccaaaattgattcattaccactagaaaacaaggagaagagcaccaagaactcaccttaaaagtctagacagcaactaggattgattcctagcaagatttggattgaaatgaggtgaaattttctgcttccccttagcttcttcttgggccgaaagagaggagagagagagagagagagaactaattgtgagatgaacttagtttataggttattcctttttattcctatttcctacaaaatgaattaattaaataaataacttataaaattaatattacctcagccaaaattaagtaagacaaaattagaaactctacccttaaaatgacattttgccccttataaagcacttaaacttaaaaccaaacctaggggtattatggtaatttaactaacaaccaaaccgacatcttaaaattctaaactagtcctaaatacttccaatacaatccttcatttattttcgtgacatttttgaccactcccctgagctttcacggctgtcgggcccgaaaatattttattttaaaaatagtatctacgatacccacataatctaatataatcttcgtaattaataaattatgctttctttaatcatttattacattcacactaattaacctaagtaagatcataatcttacttcttaccagaataatttgcataaaatatgctcaattaaataccataatattttccgagatattacaactatattcccttcttatagaaattttgtcctcgaaatttacctaaaaagctcaggatactgctcccgcatctgcgaatccaactcccaatttgcctcttcaaccttattgttccaccacaacacttttactagcagaatagtcttgttttacaagaccttttccttc

SEQ ID NO: 222357 - DNA, 1490 bp, Cannabis indica
tgtttaaaatatagcttgtggcctacgaataaaaaacataaatttttaatgaaaatttcttctgttttcatttcattatggatagaggtttacatgtggagaaatttacaaaaatttacatgaagtttaagagagacactaaggcttagtcatctctgcctattggtagtactgacataactaatctgcattctaggcatgagggaccctcaatccattcattctcttaagctgaaatgttccttggcccactttctgcagtattttgtataggccttctagtgtggcccgagtacccccagtccttgttcttgcaaagctgggaatactcttcacaggacaaggtctccaacatcaaatgtacgttcattgacttttgaattaaagtaccaggaaatttttccttggtacattttgagctgaacctatgactattcctggagttccttgattaaatctaacaattcttacagtacagagttgttttgagaaggatcgtaggtatctcgtcggtgagagggtattatggattctattgggattactgctatacacacgtaagtcatcacatatggcgtgtgtcatgttgaagttctctccatggtcctataggcctagagaactcgtggaagctcttctagccaatgagctttgaatgcctagagtttcttcttcaatgttgtgtttagaattttgtttacgactccacttgtccattggcctgcagactggctacagttgagaaactttttacaattctatgctgggaaaagaagttggtgaaatgtttgctgtcaaactatttcttgttatcggagacaatcttgtatagaagtccaaaatggcacacgatatcataatgacaatatctaaggccttcttttaggtgacgatgttcatcttctctgcctcaacccatttagtaaagtagtcaaccgcaattattgcgtacttgacttctccttttctcgtggggagggatcataccaaatcgaagccctaaactgtaaaaatgccaagggctgatcatgagtgtgattttactttgtggtgcgcctggaaccttagcgtacctctaacattattcaaatttccagacatactctatgcaaccttttcactatgggccaaaatacccttggtaaaggatttcctttgtcaggctaggacttgatgtgtggtctccatagaagcctacatgaattttgtggattatatggcaatgatagtcctagatggtaaagatttccgtccatgatcacgtattggggagcataatattagaccttacttgaggtgaatttatttgttgggagctcccttgaattcaaaaagttgtaaataggtaccatccaagaatgagaattgtcaacaatggaatttacccctggaactcaatgctcagcttctctaggtgaaaatctggtactatttcgtgttaaatcatctgaggatcttttgaaaatttggcgatcatatctgcaaatgaa

SEQ ID NO: 222358 - DNA, 1827 bp, Cannabis indica
aagtgttgctcattctgcacggctcgttgagtattccattatggacatgccagctcagcatcctgctcggcatgttgatccgaccaggtgctcttagtagatgccacgtgtcaccattcacgtgatgccacgtcagagtgccaattttgggataacaaaatgtataattagttatttaatgtacccctctttattacttttttttctgagtctatgtaactcacgggtgctctatggtgcaggtaagggcatgaaaaagttacagcagccatgagatgacggtcttctcgagcaacgtaaatatttaccccaccgacatgtgtgtcgagttgccacgaagttttttggactggctgtatctgctgtgtattttaactttgtgttttgcattgttatcgtttatagtattttgtaatctttttataatagggattcccataaacacctttttactgtcgttatgatctccatttttaatgttttgttttagtcaagtttttagtattatcacggttttgaataattagataattcattagtattaaactagttttataaatcacacgtggagtccctatggaatagggcgttacagggagaactctcttacatactttgctcacgcaaacatacaaacatacatcctatgtatctctcaaagaatttacaagtaaacaaattactgaatgaaactgactcgtcgaataaggctaattaatgccccaacacgtaaaattttttggttcttttatactttcttttttaattattatttcttcagtttttattattttcattctattttcgaaaatttcgggaaacaagtagaaaaataattgatatatgcaattcaaaaatattttacaatgaactctagattatatttaaaacttactaccatagaatctcgataacacacatattttcgacatacatataatattctactcaaattcatcagaaatgttaaattaaatatattttctaaatatattaaaggtggaccatttcatgactagaaaactagtagaacatatttattcttgatcatatatatgttctattatctcctacaatagtaatggaaacaactaaattccctaaacataaaatcacagtaccttttcatagtgggatgattttaatgaattcaccctttaattatttggatgacactagtgatgacttacaatgatatgttcaagaaagaaactttaagataaagctaaggaagttattccaaccattcacatggatagttataatctatcagaattatgaggaaaagatgggaaaatcttactatcgatattcaaaagacttaagcacaattcttggtccttatgaattattgtttacaacgaaataattttatggtatctctagttattcttaagaaagtattctacactaatgtaatattacgattctatgttgatgacttagtctagaaagaatttatcgttttcaataaaaagataaatgtcacaacagaatgtctcttagtaccaatggtaagagattaaatgcacacttgtgtatgcgttaaactagactcctactattgagtaggagttatcaaaagtgtaattcaacaagagaacatagggagatagtcaagaaagaatctctagattaaaagtgacatatatgttagatgatatgggtgatgtttctgaatccttcaatttgcatcaactcaaaatttatctgagatggtgattactctgggcgtggaaaaattattctgggggtgtaaaaaccaatctataatatcttagttccaccagtgaaactaattaactaagttgttttttttttaaaaaa

SEQ ID NO: 222359 - DNA, 2479 bp, Cannabis indica
ttgagccctgggatatctaggagacatccttagcctcacgattattgttttagggtcattgcaacctgttttcttgaacttttcgaaggatagcacctagaaatgactttgctagatatctatgccaacttaggtgccccccaaatgtcatttggggcactgccatagttcctagtacacaagttgaccaccttaatctcgagaggtagagcttagggtgtttttcttcatgccacgtgtcaaaaatgatgttcgcatcatacaagtacaaaatttcggggtattcatgtgttttttatagtaaaatctagttcaatattataaagaaaagcctttttttattgctcggatcaacccgaactcaacctttatcctgcccgtatccgttccaacccgagcccaacccacccacacttgaaaatctatagtctgcaatggacaagtttggtatacaattaccacacccccgaaattcaaaatgcataaactccgtccattgcgcacctctaacagatataaattacagtacagtttcatttgttatatatatatatatatttttttttgctaaataacactgaatgtgtataaaccataaagtattgcccagttgatcataaatatataacatattgtaccacgtaaaaagttggtagcccaaagtaatacaatagtaaatgcaaaacataatcatatagacgccgaaatgtaaaacaggaaaattagcagtggttttcctatttgtgtggtccatccccacactaaacagcctccctttggtccaattaaacaaattaaagccagcacaatgagttataattatgttataataagcttcaatatcatcctgtagctaatattaataatataaagagcaaaacccactttgaaaaaccagctcacgtagtccaaccacagccaaaatccaaaataaaatcatgttttactttaataatccacatctcctagttgtgaccaatgacttttttaatatgaatgttctaccgtgacctctgaccgcccatggtttcccaaaattgttacttttcttttctcgaaagatataaagttatatatatttatatagtatgagaacaccttaaaaacccccaaagagacaacaattaactcacacttattcatatcaaacacttccaaaattgtttttttaacctttaagacttaagtgataacatggaagcgacaattaacttgggttccaccgttcgacacaactcggtctgtccatctgccacgagcggcactctaggccgccaccttgctcggaggctcgtcgagatcggcgcctgggatgtcttttccgtgccgggcgacttcaatctgaccctcttggatcacctgatcgccgagccgaagctcaacttggtcggatgctgcaacgagctcaacgctgggtacgctgctgacgggtacgccaggtccaggggcgtgggtgcgtgtgtagtgactttcacagtcggtgggctgagcgttctcaatgccatcgccggagcgtacagtgagaatttgccagtgatctgtatagttggcggcccgaactcaaatgactacgggacgaaccggatcctccatcatacgatcggtttgccggacttcagtcaagaacttaggtgctttcaaaccgttacttgtgctcaggtaagctttgatagttatcattattacaaaaatagcagtttcaagtatttagtggtcctgtgtctctgtcctcattaaaaaaagaaactttctagtagaagaaaggacataagattgttatatttttgttttattttattttttattcttaaataaatcatctttgaggttagtaatctagtggttctttagtgtgattaattatccaaattgaatgtatcagtcggtgatgtgtggtttttccttgcttgcttttaatgtaggttgtggttaataatttggatgatgcacacgagcagatagacactgcgatttcaactgcattgaaagaaagcaagcctatttatatcagcataagctgtaatttgcctgggattccacatcccacttttggcagggaccctgttcctttcttccttgctcccaagtatgtctttttcttttgatactgcctaagatttgtttctctgtataattattttggaagtatttggctgcataatgcactcatcattctacaatttggatcatgtcaactataaattgctcctacgtcaaaacaataatgataattttctaaggttgaatacaggacaagcattagtttttgttcaatttagtgcacagatttataacttgattacactcattacatgacatgttcctttcatacaatcttgtttcataatgctgatcaattaatggtaacgaaaatgatgttatatctcaagttatttactacgaatcctcaaattccatgctctctaatattttgtcatggtgaaaattttgaaactaacttattttctttgggtaattt

SEQ ID NO: 222360 - DNA, 1703 bp, Cannabis indica
gattccaaatccccgggtgctcctgaccaagtgccgttaatcctagtcacaaattccaagatttacacaaatagggttattccctaattccacatttataaaatatatacttggcattcaaaacacagatattcacatagagctcaaaacgagctttccaatggtatatagaactcccaaaacggagtctagataacaaagttatgagtattcgaagtcagcattcgaatctgaccagaaagaaaagggcgggccgcgacgcccaaaaagctgggccgcggcccctgggttccaaaccaagaataaccagctccaacttcaaatttcagccccaaaatcacttacaaatcaacccaaatcttaaccaaaacttaaaaccatcaaatagattttcaaccattaaatagatagtttaaaacaccatttagagcattaaaaatccaacccccaaaattcagattacaacaaacaacatcaaactccccacatgagtataaaccaccaaaatacaagctcaagaacttcaacttcaaactaatttcaaccttgttttatttccagcaacaacacatcaaataaactctgaattaaaacatagaaaacatcctaaaatctcacctaaagctcaacaaacataaatcataacaaaaccaagtttacaacaccaaaataacccatatcttacaaacatacaaacaagagcatctcaacctaattcatgcttctcaacaatagaaatcacagcaaggaaatcaaataaaattcaacaaaaagagctaccttaactccttccaatcataagcacaagagccaccaactctaagtttgaatccaagccaaaataccacaattttaacaaagttcaaagatagatagagagagaaggaaggggtcgtttgggatgtgggaaaaaatgcaaaaaaaaaattcttatttctcaatttttttcttttgttgaatataattcaagggtcaaaatgaccgatttgccccaagggccaaaagcatacacatcaacattcaagggcaaatatgacattccatacacaattatagtcaaataaatttcagattattcacacataattaaaatgccaataacttatcccagaattgtattttgaccccgaacccgattcggtccaaaatactcggttgtgacttaccgcaccaacttgttagaacacacctgaataagacaatacatgcatactatataataatatagttccataagcacttaaataaataaatttcactgtttcacccttctcggttcaaaattactaaaatacccctggctcaccaacaaggtattaacatgtcatatttcatattaattcacattataataaattatatactaatataattttgcagtaatacacaattaactagttagggttttgctaatccattcataaacctagggtattacaattaccccctccttatagaaatttcgtcccgaaatttacttgaacaactctggatatttctgttgcatatccgtctcgagttcccaggttgcctcttctactttagtgttcctccataatacttttaccagtgcaatcgtcttatttctcaaggctttcttccttctgttgttgcgatatttagcacacgcaagtgtacgtaccgtttcaagtagtagactcactaggagtgaggtcgatctcacagggagtgtagttaagtac

SEQ ID NO: 222361 - DNA, 2089 bp, Cannabis indica
atagcagcagcctcaggttcatctagccacaatttttcaaatcagaatcttgttttttttgctggtttttcctgaacagaagtgatgtacaacacattgacagcaatagcccgatggtgtgaagaaaaataatccaaatgtgaggttgtcatgggttggagaatggtattccataagtcgtttgtgaaacaccaatccaagcgctccttgattgcattgacattatgtctacctttgatccaagtataaggatccccctcaaaaggtagctgagaaagggaacaagaatccaacacctcacggaagtcatccatttgtctctcattcctcaatcctcccccaagtttattttgattagaaagaatttcgttaaagtcaccgattaccatccatggaagttgaggggcaacatctttgagtcgttttagaagagtccatgttaaatgcctattgtggacagcaggagcaccataaaaagctgaaaaagtgccatttgggaccatttgcaatagccatataaccatcaaagacatttgtattaaagtattgcaaagttacatctacatcatctttccaaagtaacataagaccaccacttaaacctactctagggacttcaagtccattattgaaatgtaaaagacttcgaaaacgggaaatagaattacttgctaatttagtttctataatgaaaagtacagtggggttttgctcttttacaagcaaacgaagtttgcggatggcactcgggttccccaagccacgagcattccagctaatgaatttcatggctgattgcgggactggtaaccagcctccgcagaattgtccattacaccagtagaatccatgttgtcaacagaaacttgatggtggaaatcatcttcatcttacaaggaagaagttgaggttgttggtggatttgctctgcatcttttcagagtttgccttagtgaaagactctgtattttcctctttgattgcacatttggattgatattttcctgaccattagtagaaccagcagccattgtggatgtatacgtggctaatgccatggaagatgaagttgggtagatcatttgattagtggtattaaggacgggaactggggtagtggcaggagggtaagtggcgaaataattattgttgttggaaatggaagccattggattaaaaatcccggtgagatcattataattctctaagttgccaatggtttgatgtgtagcagacttgagaaaactttttgtggcactggtagaaggaatgatcgatgacttatcaagatgggaaggtgcaaaagtgacaggctaatgtatttggttcaagttgggagtaaaaccaggagtttcatttacgggaggcctattcaatatagtgtcaggattattagcaacgtcctcataagcagtaggagcattagaacgagaggactcatcaaagagcaattttcgtggttgaggtaaacctctatgttctaattggggaattgctgtagtgagaccttttttggcaagcctagtcaacaatggccatgcattcccttttgaaaaatccgtacgatagcgatcgtatccggaagtagggagtgcagatcctttgatgtacggtcggtactcaagatcaggttctaccccattgtcaagtttttcaagatagacaaggcatttgttaaagggatggccaataattccacactccatacaatattcgggaagtctttcatagcgaaaatctacccaaaatttatcccgaacatttgataaagaaatcatccttcccctcttcaaaggcttagaaacatccaatttaactctcacttgcaagaagggtccccaaccttcatttaaagaatcctcaaagacatcaatgaactctccaattatattcccaagtgccacagccagagactttgttttgctgagaaagggtaaatgataaatttgcacccaaaatggtgtaaatttaaggtcttcagaagtgaagtttttaccaatttctggtgtatgcaagactatatgatggttctgaaaatgaaatggctcacgatcaagaacccttattttgtctcattcacagccgaagg

SEQ ID NO: 222362 - DNA, 1395 bp, Cannabis indica
gcgcttttctctctgatcgcatcatttttgacaacattattattgcgaacgaagttattcatgcgatcaataaccgtaagcattggaaagtcggatgggcagctttgaagctggatatggaaaaggcctttgacaaagttgaatgggcttatattgagcacatccttcagcattttggtttcccctatccctttatttccctcattcttaactgtctttcctctgtctcttttcgtctccgcattaataattgcccctctcacaaaattcttcccactcgcagtatccgtcagggtgaccctctctccccttatctttttctcctcgtcgctgaaggtctttctgggattatcaatgctaagatgcattccaactctttccatggcatttccatttctcgttctgctccgtccatttctcaccttctttttgctgacgacagtcttcttttcaccaaggtttctccctcttcgtccactgaaattaaggatattcttaccctatatcaccacgctactggccaatcggtcaatttccacaaatcctctatccttttctctcctaataccacttcccctgactgtcacaatttcagaactaccctcaatttggacgataagcctttcattgataaatacctcggtgtccctcaatgtttctctaggtcaaaaaattcctccttcctgttccttcttcaaaaagctagctctaagctgtcagtttggaatcaaaatcttttctctagagcggacaaagaaattcttttaaaagcagttattcaagctattccctcttatgctatgtcctgctttcgcctccctgtctctctttgcaaacactacaacagattaatgtctaaattctggtgggggtcccttggctagagccataagattcattggaaaaaatgggacaatctttgcacttccaagttttttggagggttgggctttcgtaatattgagcatcataatcaagccatgcttgctaagcaagcttggcgtatcctcacctcccctgattccttagttgcccaaatccttaaagctaaatatttcaagcgaaatgatttcttgcatgctgccactggccactcaccttcgttttgttggcgtagcattctttggggtagggatcttttgatcaagggccttatctggaaaattgggatggcaccctggttaacatttctgaatccaattggcttcctttccacggtaaagctatgttaaagcctggcctgttccctccctcccaaagtgtctcttttttccttactgaagaccgacattgggatcttactaaactccggttttattttgatgaggagatgtgcaatgccattcttactgttcctattgatcctcataaccatgatactctcatctggaatca

SEQ ID NO: 222363 - DNA, 3164 bp, Cannabis indica
aattatacacaatacctttactaaatgtctatctacaaatgtgattcgaatcaaaatcacacacactagaagtatagtgtatagtaaaatgtactttgtagttccatattaaagattcttaatactttaacacaataccaacttatttggttcatcgtataatcttaattctcttgtacatccttacaagattatacattctccatataaataagaaatttttatatatttaataattatactttgacaattaatatatattatcttataattgtatctcatatactctctaatatattatccattaattacatacttttagagcataaatcctaacagtttcaaggaacttacacacgggatggaacctggatggtgaaggaaatacctctagtttgctgttgcatggtggaaagtcgacgatagaacacaggtgaaaactttgggttcttgagatttttcttgagtttttctctctaaaaaattcaagaaataaaaatgaaagtaataagatttgaagaataaaggaggctttatatagggtttccttaattaattcccgccccccccccccctaaaaaattaaataggaaaaagcatttcctataaaattgctatggggaagtaggaagatcaaaaagtgaaattatgaaggagtgcaaccattagcacaatcccccataaatcatgatttaaaactgtcataataatggtagacgtgggagcccgaataatgggtgagccgtcaactctgcacgaaacattcactaaattcgatcatgcgagactcacacgcatatcaacatctgggaaataccaaatgtccccatccagacaagtgttcgcacggggacttgggggcaatgttatcctaatttttttccacctgacgtgataattacatgtggtctattcagctggcccttagtaacatggggcttccaaacaagatcatgccaaacatttcctgcacaaggttgatattaataaattgtgttaccttccaggaagcacctggctggattactaatatgacggacagaagagagacgatcaacataccttgcaagattgcatcataggtaatctcgtaaaaaagacaagtctcaaagaaagcttggctaggctgtcaacacaccagccagggaaaatagaccaagaaagttcacgtaggactaaataggcttcgatttattcctcaacaaactccatgaatatctccaatgcaaatacgagtttgactcttcaacccgaaagtataggtatttcaaacaaattttaactccaccctagaatatagagatatttactttttgttgctacctttaaggagcttattgtaataatcttcccatataaatagttaatgaatttataggggaagggacccagaaaatcattatctcaactctgagagcacttttgtgaataattctctgtaagcatcttgagagctgtagctagaattaactttttcttcttagtgatctgcacgacattatctcaatattaatacaactaaaagggagcaggtcattacaaatatctaaggggatgaacctctataatttatgttgttctttctatttacttattatttctaactctttattggtggttaattaacgtttattagactctaagtctgttggcaaatactccagttaacatctatcaagctgagattgaaggttcctggtcttaatcatatcattataagaaagaagaagtttagagtaataagtattaagagtattgtcaatggtgttaattttggctttgagattgtcaaaagaatttttccaattcttgatagaattaacacaattattttgcttgagaatgaacttattcaaatggttataattactacagtcaaaattattattccaggaattattaacaatatcaataaaagaagatttagtaagccaataattttcaaaaataaaccttttattactaaactacccatacaattattattaaaaactaactttaacaccctatgatcatagccataaaatttcatatgataaagagtagcattcgagaaaatatcaaaccaactttgagtagcaatgccccaatctaagcgttcaaaagaagctccgtgtttccaagtaaaacgattcccaacaacctgcacaggttgaaggtcaaagttgttaacaaaattctgaaaattagtaatggcataggaagggggttagagttcacttcctatcgtgaattgaaagataattgttgatgtcacctataattagccaagaaagaaaaggtgtatcatcaaaaaacctatttagcaagttccaagtatgaacttcctgcaaataaggggagccataaaggcaagagacatgacatttcacattatcatcaaacataataatacactcgatatgatttaaagagaagttcaaaatattaacactgatttcttgattccagaacaacaaaagaccaccccataaacatttcctaagaacctcaaaagtatgatcaaaagaaagcttgaccctaagtttttcacaactacctaacataagcttagattccataacaaaaaaaaacataggcttattcttattgacaataagggagaggttacgaaatgttcggggattccccaatccatgagcattccaacttaaaaggctcatttttctgaatgggattgctcagcaacacccgtcattagaatcagtatcagcagatgtagtcacaacagtaatagagctagctcgagctcttttcagcatcttcctcacagagtcaccaaccagaacataatgagaggtaaaagcagacctctttgccccttaaattgccttatccttggactttgaggggagtttggtggcttgaaccttaggagcaaagataccagaattcagagacagattgacaccagtaacaccagatgagtacacaacaggaagagtacaattagcactcaaaggaatattataagacacacaagatccaaaagtagagtgagaaaagctagtccccctcatagagctactagacattcccaaattaggggtttcaggcctagtctacataccagtcaaaaagaggggtagcagaaggagtaacctctctttggtggtaaggaattgactaataacaacaaccaaggattggtcataattgtaatg

SEQ ID NO: 222364 - DNA, 1740 bp, Cannabis indica
taaaactaacactacgtggcttggcacgtaacaatcacctagtttaataactaagtgcctacgaagttccagaattataatttaaatattattaccgttaaaattaaaattaaatatttagttaataaattaaacttaaatatttatgccgtaaattattttattttaagaaagataataatttgacaattttcaatttataggtgtagtgaagaggaattaattttttataatataagaaaaaaaaaaaagactaacgtggggagaagaggagacatacatgatttagtatttaaaaaagtgaatactaaattaattggagggaagatgtgaaacaagtacttttacagagtttgaagtttttataaaataataaattaaaatattaaaaactttatttaaactaatatttttatgaaaaaaaaatattttaacatgtaattttagacttaaaaaattgtaattggctttttgcttatacatatactatactgattattaatgtgaataaacttaatattttttaagatatataaacaagagtgaacattcatatataatcacatttaagatgatatacatgtaatgaattttgtttgatttacctattaattaatgaatatttcggttagtttaaataaaaataataatataaagaaataaaaaaaataattacctgtgatcggaatctctccggtgtcaacaagacgcggaaagaaaaagaaagaccaaaaacaacaagcagaggctgtcctaaaatgaacacaaggaattccaagctcctcagcaacatctatagtaaactcaccaaataatccatccaaaatcatataagtaatgtaaggactttcacccgatccgagttggccggagacgagcatctctttcaaaaccggcttgatgtttttttgtagatgaaaaataaaatcccaaactgatttaccgtgctccttttctagaccatctgagatggtcttgaaaaggaagcctgggtacttagtacaccgagtttttacatcggtgtactttatgagacgattgtgaatgtggtcggtgtttagaaaggtgacgtggaggcctgacatggcaagaagctctgccaggtttaacatcgggctgacgtgtccttgagctggtatgggaaagatgagaactcgtggaattatttgtggcccttgattattgatctccatgatgagaatagtgaaagaactagctactctttgcatctataacatctacaaatgcatgtatatatagaatagagattaattgtggagaaaatagttagtaaaatattttgttttttattcaattggggaagctaattagctagcacctacgtcacccattttctaattaaattatataatcatataaagagttttaatacttttcgaagtgaaattgcagatgtgccaggctgttgtgttggattaaggatggaaaattgataataatatatttaggatgcttctgcacccattaacatctatcaatctactttgtaattatatgttttatttgtttggatatttgaaaagaatttataattttttaagttgtagttatattgaaggtactttgtaaaattttaaaaatttgaaaatttttaaaggaaaagttaaagaatacatatttttattatacattaatcaatttaatttacatctaaataaaatttaatttaaatatatttttacacatattttttagtgcttttcaaaaaacgacctgtgt

SEQ ID NO: 222365 - DNA, 2057 bp, Cannabis indica
attttttaataaattaataatttatataagatcatttttttaaaaaatatattgtaagggtcacataatttcattttgtcttagccccaaattctctaggaccgaccctatctattcactactccttttgtttggcctttctctttattttgtgaaacataaagttgaagaacttccatggatagctatgggaccactgtatatgctcaaaattaaatggtcaacaaccccaaacagcaatctttgaacatgttgaaaagcaaaaagagaaaaaaaaaaggtgtttgagcaattttagaacatgtacgatgtgaaaatgagtgactatttgtgataagaaagaacaagcgatatatatatctaccttcttgttccaatatttaattccatctgcatgcatgtcgtttcccaatgaaaaatgaaacatcaaatgtgtactccgaggatcatttattttatttaggataaatagtgatataagtatttaaaattttaaattgtattagacataaatctattgtttatttttagtagctcaaagcgaagaactttattaaggcttgacatgccgcaaatcctcttgaaagagaggggtgcctttgggaacgcggacacaggtgatgcatggctgtcgtcagctcgtgccgtaaggtgttgggttaagtaaggatccaatattgatttaaaatttatttgtgtgtatattgatatataaagtttgacctaaataaaataattattttagtaattgtgggtcattggtaattatcaaagtattataaagtagatatttctaatttattgagaagttaaattagaaatactgaaattaataactttatataatggtagtggtccccacaaagcaaagaacaactttattctcatcttcttccgttaagaaattaaagaatcaagttttgtattcttggaagatcattacccaaagatctagctagtctacccatcactaaattaattatctatatcaaagaattgagatatgcttccgctattcatgttttttttttctctttgaattatcaagggttttaaatctatgtttatacatttataataatatgtaatattttgtgtatggaatttaattttgatattgtatattttatgagtgttaaagaattctaaacatgtggtattaagactcacttttgattgattctttgaggatttaagtttatattaaaaaaaaaattggaaaatttgaaaagtaggattttgatttttcatttatgattatgagttgtggttatttgatacaattttttattttagatcgatttgaattcaataaagattattctggttctttattattcagattattatcgttgtgaattttatggtaattaatatatgatatggatttatgtatacaattatttcatattgagataaaattatttattacatccaaattatatatatttttggagtgttgctattataaatgattatatggattaacatatatataatcagtattattttcattacatatatatgtgattacctttatattggttgaatctcatgcattgttttggttttactgagtaaagcaatttcttttagatataatggctttgccattacgttgtcataaacactttatatatagaggtttttcagatgaaagcatatggtatatggcttacataaaatatttcatacatatatgtatatattaaattttggtttttggaatttttggatatggtagacgggtacattaatcatcatattatagttatttcattttttttattcaaaatacaaatttggttatgactttattgggcacatctataatagagttatttaataatttttttggctttacaagtgtatataagtggatacgtatctcgttcatgataaaaataccagttgaaattaaatataggaaaattctaccatgcactccttaaataaatatattaatgtacccttatctatttttagcacccgaataatttttagttcaaatttttcttcatggtcatgtacgattatagttatttaagtatatcctg

SEQ ID NO: 222366 - DNA, 2358 bp, Cannabis indica
taatctggtgttgcgaaattcactcgacaacacatttaattctaaaaatgtatcattatgtcacacgacacagttggcaatgaagtgataaataaggttagttctgaaggcttgggtcatgtgaggctaatggacactaagctaggtaggcccaacaaaagtgatagtgggttggaaaatggtatcatggagattgatttggatgtgtcttttgttaatgatgtggcttcaagtgttaatgggctctcaaaaaataggctcgagatgggttctggtctctaggcccaccggggattatgagtgtcctaagttagaattgccatgggcttaggaacccgcgggccatccaattcttacaaggtcttgtgatccaaaagaagtttgactttatgttcttgtgtgagacactttgttgtaaggatgtcgttgaaagaattcgcatttctttggggttcgatggtgttttggcagtagattcatgtggttgtagtggaggagtagcattgctttggcaaaataaagatgatgttagtttgttatgtctctcgtctaattttgtggatattgaagttgtggctgatgtatctaatccttggcgtttaacaagtttttatggtgaggccaaacagactcttcgtgctaagtcttgggatcaatttgtgagctagctttgattagttctcttccatggtatttgattggagatctcaataatgttcttttgtagaataataaaaaaggtggccatccttatccaaattggcttattaatggttttcaaaataccctccatgcttgtgacttatttgatgttgatctttttggccatcagtttacatgggagaagagtcgtggtacaaataattggattgaagtttgtttaggttgtgctcttgttaatagtgattggcttcaacagtttcttactaccaagctcctaaaccttgaagtttcctcttctgatcattgccctctattatttgatccattcttcaagcctttggtgaccaagaagcgtcattttttattcgaaaattgttggcttcgtgaacctctttgttatcaattggttaaagattgatgggagagcaatggtccagtaaaaattcaagaaaaattttaaaatgtgactcctctcttctcgaatggggtaaagattgttcgggtaattttgcttctcatattaagtattggcagaatgatgttaagagatttaaaaggggtcatgacccagattctattcgcaagtataaggaggctgagatggaattgtttgaggtgatgactcaaaaaaaagtgttttggcggcaacgctcgaaacaattatggcttcaaaaaggttattttcatgcaaaagaatcctctaggcttcgctctaatagtatttagaagccttaacgtcccaatagaagttgggctgaccagaatacggggttgtcagatgttatgttgagctattttaatgatttatttgttccttctaatacattgatggaatcccaagttcaattactggtgctcagaatgaagctttactttggcctgttacggttgaagaggtaaaattcgctttatttcaaatgcatcatgataagtctccaggtcctgatgggatgactccgggtttttaacaaaagtgttggcatattgtgggagccgatgtagtaaggcaagttcgttcttttttcctttttggaactcttccttctggtttgaatcacactaacattgttgttattccaaagaagaagacctgctactatgggtgttttgaggtctattgctcaaagtaatgtcctttacaaagtatgttttaaagtcttggctagctgtttgaaggaagttctttctcttgttatttctgaaaatcaaagcgccttttccaggcgcttgatctcagataatattatgattttcttagaggttatgtattacttaaaaaggaagaatgttggtaaagaaggctatattgctctgaaacttggtatgagtaaagcttgtgactaagttgattgacgagctattttaattaacatggggttccatattcagatagttgaattgatgttgcattttatttttacggttagtttcatgatcattcacgggggtcgtgaattgggcccttttgtccctgggcgtggtattcgtcaaggtcattccctctcaccctatttatctcatatatgtggtgaaggtttttctctcttattaagaaatttattttaaggggtgatctgcatggctgccgagtttataatggtacttctgttattgctaatatactttttgcagattatagctatatttattgtaaagctacagaacgtgaagtaaggaatgtgattcggttgttgc

SEQ ID NO: 222367 - DNA, 2163 bp, Cannabis indica
gaccatggaaagtggtggtcgcgactactgaagcaaatttgacagcttcaacatctttcagtaaaatgtgcataactttcacatacgaattccaaatgagttgattcaagatgcattggaaagaagaaaaagaaatctaaaacttttatgttttaaatttttccaaaatctgattagaacatagtcaaatttaagcttgaaatttcagttttattttcttgcagaattttctctattctatagattgttgttttccgaaatttgatcaattgatatatttcaagtgtgaaacctgaaaccaaagaaaacaagcataatttcattcaaaaaataataataaagacagaaaataactataaaaagtgacccaaaacgtagactaaaaatagactaacaaaaatgtagaatagcattagaagagacaccaccaccaacggctaaataatgaaataacataaaaaatatagactaaaagacaatattattgtggggatgacaaacccatcccacaaccacaaacgaattatatttagatttagatactaaaaccaatccgagacgacatcacgagaccgaaacaaagtgctaatagctctgcaacattaacctgaaactcacccaccgaccccgctattcaatattaggacaaaataattgttatatgttagttataggcttggttagttagttgattgtaatcaactgtctcttgttagctaagtggttagaagttagttattgttagcttcctaaccaccattatatatattgtaatgatcaattgcctaatcaatgatgcaagaggttgttttctcttattctgtatttccttcactttctctctttttcttttccttcttttcttctttgttctctttcaatggaaaacaagttgaatatatctatcatggtatcagagccatttctaccatgaatggcgaacatggcttctaatggtcctggcaacactaccttttaatatgctcctcaaggcacttaatttccagctgctaaaaatcacaacatagatcaagaagacacaactgtgtacttcaatcatactatctcgatcaaacttaacgaccatactttccttttgtagaagcaaaaaatcttagtagctattcacgacaatcaattactaaagttcattaaagatactacgccacctcctcaatttcttcgtcatgcaaatcaagctggacgtaaactcaatcctgtgtttgttgactaagaagtccaagatcagcatttcgtgtcttggtttctcttctcaatgacagagagctttctccctcgtatagttggatgtaatactgtgtggcagattcgaaaggctcttgaacagcacttcactctgaaggtgtccttgaagattcttgaattcagaacaaagctttaaaacttgaagaaagggacgatgagtctcaatgattatctcctcaaggttaaataacatgttgatttgtttgtatctattggagaggtgcttttagattgtgatcacatcgctgccatttttaaaggtttgccaagtgattatgacacattcatcattcctaccaatactcgtattgaatgttacatagttggggagattgaagaatttctgctagcttctactctcaaattgagaaggatgatcaagaagttgaaccaagtgtcaacattgctatcactaagcaagatccgtcaatgaaagcattctttgcttagtccaatttttagatcctctgcctatcctcgacgtcagtacattccaaatggattcaattctgccaatttttctcaattttccaactccaagggaagctttcaaggaaacacatctcgaggaggcaacacaagaaattaatagcttgtttggctgtgttttcagttttcaggtttcaaaattgtatttttaaaagtgagaatagaaaacaattttttgtcattttaaaaatttaatggtgtttggcacaaatttttaaaaactgcttttagattttttcttacgaaaaaaaaattaatattttgcaccataccatgacattaacccttccggaactaggttcgggtatgatttcgggtctaggatccgagtatgtgagcaaaatataaaatataatatgttagaccaaaaaaaattgtttttgaaaattgaaaacaacattttgatgt

SEQ ID NO: 222368 - DNA, 1493 bp, Cannabis indica
tcgaaaataaaagattttaaaaaaaaataggctcaaatggtataaaaatggatatataagaattattaattgtggttggctagggtttttgatcgtgtttctctctggttgtagctattgatatttcatggtgaagaagtcgaaaaatgaagaagaaagctgaacagggttttttatataatcctatggcgtcggtttcaaataatcggcgccacagtattatataagtgacaagtgtcaaaaattataatgggattatttattttcaaataattgacaccatatagcacacatgtcaaaaaaagtttgacacctgtatcggttgttattttcaaataaccaatggtatagggtggttttttttcctctgataaaaaaccacctctaaatgattttaatcaatgttataggtacgattttataaaataatcgcctttaattgttaattttcaatatatatgcatttttacattctttaactttttttttttatatataaaaattgtagagaaaatagcctataaaaaattggtttgtactaatgttaactttattaattagatttaatcaattaaatattatgttattaatcaaaaaaataatctagctttttatataataaagaaaagcaataacaattctctttaattatataaatatatatataatacgacaaatcctagattttttttgacataaatttctttttaaaataaaatatatgtggaataacagctgattaaaattttgaactagtgaatttcctttttgacttttattgtccaagagttgtttcattatcaaaaacataataataattacttctattcatagtactttttatatgataccacttaacttttgctttgatcgctaacccacattaaattattcatgattaagttaaatttctgatatatgatgaacaaattaattaaaaattcacaaaataattgaagaagaacgtacgcctatatacatcattcatgtacgtgtggagtacgtagtctagttttaattttttttggagggcaagttaatagaatttgggataaaatgaatatagtttcatctcaaaactaattggtgttggcagaagcagtgtattcatcttatatattttattatgtttatatatattaacaatgtgggactctctaacattccctcaagatggtagttattttattttctccccatttagacaacttgatcataaggggttatttttttggcttactatccctgatgacaagtggctctttgttctattttttgaatcagtatttttggatgtttggtggctctttccttttggttcactatctctcaattacaagtaaatttttttttatcttttttatttttagcttttggatcaagtttttttttttgaattttggtaactctttttgtttggctctactttgatctttttttttttttaagtttggacagttgttagaggttttttttttttttgtttttgctat

SEQ ID NO: 222369 - DNA, 1836 bp, Cannabis indica
gtatgtttcaaataaatataaaattaaaggtaaatttaataattgatgaataaagaggcatttttcaacttacccctttttttgattgatttgtcttacattttagtttagttcattccacctatcctaggaatatttggtagttttttttttaaatatttcggcaataatatttaattttttcaatttgtttattctttaatacctaaatctttttgttggttgtaataataaaagaagttaatattttattgcagcaaatgaaaagatttgagtattatacttaattataataaaatattaaccttttgtattattaaattataataaaatattaattttttgtattattattactaaaaaaaataaatgttaaaagtgcgaaaaaatgaatattattgcaaatatttcacaaaaattaatagaggatgaaaataagttttaggtgttaataatagttattaattttgtggaatatttgcaataagtttttttttttttatgtaaacaacaatgaagaatgattcttttttccttttttttttaatttgaattctggcttaattttctttcagcatatcatctctatagttcttcattaatttaactatgtttttcattagatattgattttgtaaatacttttttaaactttgtataacaaaagttattaattaatcattctgttttgtcaaataacaattcagattttgtgttttgtaaaatagagcataataataccttaggtccaattttagttaaaaaaaaaaaaattagaattagattcaaaattaaatcacaattgttaaaattaaaaaagagaatttttagggttaggatttgtaacgtcctcgcttcaagtttctattgggcctttctttacggatttatatagctcttatattcgagtaggtcactctatctgctttttgaattgacgactggctctatagaccaatacgagtatttacagtgtgctttgtcctcactcgtacgcttcttgagaactatggagttctcaagagatagactatcagaaaacaagatgcatcttgttgatataaatagtaacaatcaatcatttaagtcatatttaactatgtagtcccttacctacacagtttcaaaattatcacacttgaccttccacatgcaatgtgagattgcacagcttacctggtatttctctttacggatcacaggactactgactgtcacaagattaaaaaaatcttttaatatatttcaaagaaaaagtgaaactagctttgatgatctctctctctttttttagtttaacttgacaaagagagtagtcattctccattatgacaccaagatccaactttttgtaaatgcaagcaagcatttgcaagaacaagattagataaagagaaatatataaagttgatgtctagttctctatttcaatattaaataaatataatttatataaatataggtattatataaacctcaaatggtgagaaatgactttcttatatgtgatgtagattcaaaatcaaatccctccatggacatcactcattaacatatacatttcaatttatttattaattatttaaaattaaagcttttatatattagttcttatcaacctcataatatcttggtaaattaaccattaaaatttcataatcgccgcatatatgtatgttaaatttgtttaaaaacaaatttagatttttatttagaaagaaatatgatatttttaaaattaataaaaaataaattgaaagtatattcctaatttcgcatttattgttaaatttcttatttgtttgttttatttatttttatttagtttatatagtt

SEQ ID NO: 222370 - DNA, 5214 bp, Cannabis indica
atggctcccttggtcaagataataatttgtaacagcggatgatgaacttcctgtcactaaaatgtcatccacataaactagcaaaaagtggaatgagcactagtgtgtctgtagaataaagatggatcaaccttggcacactaaaaaccaaatgacagtagaacaatttttaatttatcgaaccatgcacggggtgcctgccttaagccataaatagatttgtgttatttgcaaactagatgaggactctaagtgtcaacaaacccaggaggttggaccatataaatatcttcttgaagatccccattcaaaaatgcattgttaacatcaagttgtcttataattcatttttaagatagaacaatagttaagataaccttgatagtggctggtttaacaattggactaaaagtctcagtaaaatcaaaaccatattgttgcaaaaaacctcttgcaacaagcctaaccttatacttggcaatggtaccatcaagatccagcttctctttgtaaacccatttacatgtgattgctctttcgctaggggaaaaggaataaggccttttcagagcaaacatttcacagctcatggccttgttccattggggattttgcaaagcaactttgtaggacttaggttcaaatgtaatgagaagaacctttggtttagtgatacttgcctttgcccttgtaaccataggatgtgtattagtagcaacattggttgtaagggctgaagttgttggtgtggtggtagcaacagtgacagaaagccactactatgggagtaggactagggttagtgggatttgagtcaggaccaacagaattaaattctaacatagtaggtgagtggagaggtgaattggtgggagatgaagcagagatggatgaatcagttggggagtgtgtggaggatataggatagacagaggtggattgaggaataaaagtcggcacactagattgggtagaatcagtaggaaaatattgtgaggatatgctaggagagtgtgtagcataaggaaagaaatgttcatgaaagagaacatctctcgaaatatagatcctaccagttggtgagagatatttttaatccttgtgtttgatgttgtaccccaaaaaagtacacataacaaacctatactcaagcttgttcttattatatggtctaatattggggtaaaaagcacacccaaatactctcaattgagaataatctggtgccctgtcatacaaaacagtaagaggatttctattaaggaaaataggtgtgggtagcctgttaatagtaaaaactgatgctctaacagcctcatcccaaaaagacaaatgcatagaggcatgagcaagaagggtaagagaaaattcaattaggtgtctatgttttctttcagcaacactattttgctcatgtgtagtagggcaagacagtctatgtgaaataccattggttaaaagataggactgaaaagcttggtattctcctcctagtcagattgaagggccttaatagagcattcaaactctttttcaacttgggttttgaaattgacaaaggtttgaatggcttcagatttgtttttcaacagaaaaacccaggtgtatctgttgtaagcatcaatgaaatggatataatatctatatccatttgaggggggaataggggaaggtccccatagatcactgtgaataagttggagaggctttgtatattcagtttgagaaatgtgaaaaggaaatttatgtatctttcctttgcaacaagcatcacaaaaatcaacatatgttttattatttcttgaaacattacactaagacatgttctgcttaacaactctagcagagggatgagccaaccgattatgccataaggaaaaattggttggggaattattacaatggctcacttgagaattatttatagaaaaagaaaaaactggttgtaaagattgaaggctgttggactgaagctgatttggaggaatgatatagagtccataactaagatgtccttccattagaggttgcttggagtccagatccttgacaacacaatgatcaggataaaattcaaaaaacgcattattgtcattagtgaactgagctacacttatgagatttttggtaatattaggaacatgaaggagattattgagagtaagagttttagaagtataaggagtgtgaaacaatttcttaccaacatgttgtatatcaaggccagcaccatcccccatgtgaatttgttcaggaccaaaatatggttctttctgagtgaaattggtttcattggcactgcaatgagtagtggctcctgaatctggataccatgcagggtctgaaacagtgtctgaagtagcaatattagcagcatactgatctacattagcagcaccaactccaggaaagtcaaagttaaacctctgataacaacgagatgctatatgaccttgtttagagcacaattgacaggtagatctggagccagttggattaatagcagaggaggagacagaaccctgtgaatgtggtggaggaccacgaataccaactggagatgaaccaacacctctaggattgacaacatagggattccagacagttcgacctccacgagaagcaaatggatcggtattggttttcgaattgaaactagagtgagggaagaaaaaatttccagatccagatctagaaccacgacccttagtattacgatttgtagcgagattgacagaatcaagatcacgatggtgattctccattctgtgttcttgagagagcaacaacgatttaatttcagcgacagtataaggctaattctgagagttaatagagatgacgaacgtgtcatattcagatggaaggctcttgaatatagctgttatatgttctttaacagaaaccagatgtccaatggatccaagacgatccacaacagtcttgatacgaagttgatattcattgatcgaaagagagcctttctttatagtctacaattgattagtaaattgatcaattttagatgaggtttgagtagaaaagtatacctcgagagttttccaaacttgagctgaagtctcactgccaaccactcgagttaagacaccttcggtcatggacgataaaagccaggagtagagaagttgatcttgctgctcccactgagcatattgaggattcatagtcttgagtaatacgattgtgctctgaaagaaattttggaggtggttgagtagtagatgaaatgtaatcaatgagttggtgacctcaaatagccgagaggatttgaggacgccatagcagaaaattgttgttatcaagattaacagagatattgttagaaaaacaataggatgaaacgttgttgctgaagtcgaattggtcgatgcagacgagtttgtcatggtgaagaagaaggagaaagaaaaatatcacttcaagaaacagagaatgcggaagcaaaaaattttgagcatgaacaactctgataccatgtaaggacagaagaatagagagaataacaaagattggattgaaatgattctgtatattcattcaatgagcaaaagctctatttataaatacaatgtacataacagaaaatcaactgtacaactgttataactaacatcctaactgtacaactaacccaataacaaactgtgtaacaaccttacatatcagtacttacagaacccacactattttataatgtgtaccaataaagctatgaatatttattattttacaatacacttaattttacttaaataaaagtctatggaagcctttcattttttattttggccccaaaaagtgtgagccataggcatggatttagcctgcctatgcctagggcaaacccttagttgataaatagatgcaaattaaatacttttcaccctttatactctaatgattaaaaaaaataaaaatacaaatataaatattataacaaagaaaaattcttttattttattatttattaaagtaaaaaatgtgaaagatatttaatttgtatctatttattaattaacatccaccacttcatcgttttatgataaaattgaataaaatgtgatggaaggactatattaccataagggcccgtttggtacgcatgactcgactggattagacatgctaatttctctaatctagtgtttgggcatgttgaaagtttgaataagtaatccagctaatctcatatatctgagattatttatctcatctagtagggtgggataaataatctcatacaggtgagattttttttttatcaatttttttaatttttattttattaatatatattaaatttaataagaattttgttgtcctaagtttttcccaatatacatggtagtcgcaatataggacacgtggcagaagtaggcccatcatccgaaggtgaacaaaacacttaaccaaatcccctctggaagacccaataactatgatccaagggtaagctccaggacatgaggaaatagccccacttcctctccgggaggtgaacggcaaatgaacccctccagactagcaaagttggaggtgaacggtcacttcgcatttaatgcagcatgaaaaaaatgtctggaaatgcccataagaggacgtgtcagacgtcacaaacccaactttgggcgattacacgataatcaagagtgctagttacgactccattatgaataatcacatcaattaagaggggatgaaggctaatctcacctaaaacctaggcagcctactatgcaggttatgcatgccctattttataccttttgggaacttgtgcgtgcccatagatagcacttgaagacaagtaaaccatttcttctttccaccaattgctataagtacccctcaataaaattagggaggggatcgaaaaagaagacacaagaaatattctttgtaagaaacacccacttattaataacagagactcatggactacaactcattaatgcctgaaccacataaaaatatctgcattaattatccctaaactatcattattacattaaatatttggttgtcaaaaatctcagttaatattttagtgcttccattgagagctgtgggaatcattatccaaagaacgacaacaaaagatttaaagtacaatggtggagactcagaaccatacacgtcagcctcgcccccctcatcccataagatctttagaatccaagggacgaagaagca

SEQ ID NO: 222371 - DNA, 3945 bp, Cannabis indica
cttcatcaaactcgaccatattcggggatttatggtctgcttcacatcttacattaacttgcttgtagtgtgcactcattcctttcccagtgagtcattaactttggctttagaaatagcagtcaaattaagctcaatcattttttgttttcttttttgtgcactaaagcatttctgttttactctaataaaatgttttttcaactgtttatccattaatgacttttattttgattgtgaattggcctccccttcctgtaaaataatagtattgttgctggagttattattttcttagatgacaatgtgtttttaaaattgaaatggcacaaaagcatatcaaacattactgattgactttttatttccttagaaagattattacaaattttagttctttctaccacagaaccgtttacttttctatgatgttatctctctagatgtttagttgattatcaagctgtattgtaagcatttttctacatgccttcgtgttattggttagtcaagtttgaaagcttaaaaacatataatcacgtggaacacaggctccacaactttagtgcttattttatgcataatgcaatagtttggtctttgctctgggcatgagagcccaacttttactatgtcttttgatattccagatgccttgagaaccataatgagagaggaaggatggagggctctttataaggggattgttcctgggctttttctggtatgttgtttgatgtatgcttgcatatccttcccattgctcattttttctgctaacagcacaaatggatacctacaatttacaactgataaacatgtgtataaaaggattacgggactctaaggtggaggtcaagaacattttagggatggttttctgtttgagtatgctaattgaatatctatgggctgttccagcaggtttctcatggtgctatacaatttacagcatatgaagaacttcggaaagtcattgttgactttaagtctagaaagagcacagagaagtctggaagttctgatgcagttttggtaggtcgccacttactaaaaagccgtgtataattgtttgatattaggctcatataacaatgtttctgcatggttgtgagaagcttttatacagatttatatgtgtataattaggcttttagttctttttctgggggcgtgaatattttgttgttttgagtgcattgtattcatgaagatgcttgtaaaagtacgtttagcaatttacgcagctgtaccaactgaaagtgagcatttctagcatttaggacaacgggttctatttcatgacatgtaaactatcttataggtccttgagttaagttataacatacatttcattgtcgagcattattcatttttagttttaattatcaaaagttggagaggggaaataagattctacttgaaagaaatctcttttcatttacactttaaatagttctcacaatctagacaatttcttttggcacagaattcaattgattatgctgctttgggagcatcctccaaaattgcagccattcttctgtcatatccatttcaggtcagcattttatcttataaggatgtttgtatggctcgtatttgtaattgatcattaattcttatgctgtcttggtcttttttcaggtcatgcgctctcggttacaggtatgttgttgaatatcaaatgtttgtatcaacttatgatgcattgatatatttgaagtgtgttcctctccattgcagcaacgacctagtagtgagggaattccaaaatatgtggatacttggcatgtcgtcaaggaaactgtgcggtaagaatgaaacaaaaaccttgctgtatgttcttctatgatagtctgaaatttacttttttcttctactttgctgtatgttggattcaaagaaacaaaaccctttattgattgaaaaaaaaaacaaaactactattcttttgtttcttaaaaaactcggaagcctgcaaggcctgctctgggtaaataagttgttaagaaaaaaatgtttcaggtcctttccactggaaaatgcattttgaattttacactcccccgccgcccttctttctttcccctctttgttcaatactgattcaaacttctgtctcgggcttgcaggtttgagggtgttcgaggtttttacaagggcatcacaccaaatcttctgaaaaatgttcctgctgcttcaataacttttattgtatacgaaaatgtccttaaactgctgaagttggcaagaacagactgaaattataagttaatgttctctacattctttttcttagctctgctttgtaattgataaatctaagttcaattttattttaataaagttattatccatacaaaattaagagtatttggatttttgcccatgacacaaaatttatcctttaactaattgcatttttatagatgagatggcattccatattggtaggtacaaatgtagtattatttttcattcaattagccaaactaacaaacatgcttggcaatgtcaagccctcatttaacattttgctaatgtgaaagtacttaaagaaaaggaatgttttctaagctagacaatgaaatttgctgtgctttctcttgctgaatataatggtgaccatctagaataacaacttctgtgtttggaacaagactcctaaaagcttctcctttcacatattcccttgtgccccataccatcaaaaccaatatccttgtcatcacctaccatgaattttgctgggacaactatctttgatcctcccagttcctgttattaaaaatcaaagttaaaaaaaaaattaaatagcggcataagtattcgaaattttgagtttgtaaacggcataaatttaatgattttttggtatccaattttgtaaaattgtaacttttcttcaattttgtaaatacagactccattttgaatttattaaaagaagatttgaaagtaatcgatacatgtttccgtccagagctaataatttagaatttaagtcttatatgtgccatgtttaaaataataacatagtctgtattgaagaaattgaaaaaaaaaattacaattttacaaatattaggtgtttatactgctaaaaaaattattaaatttatgccgtttacaaactcaaaattttaaataactatacttaaaaaaatagttctaaacttggcctagatacatagaaagcaattgtctccactagtgaaagagagattaattaatgagagtgagtttgaattcaatgtcaagatgagaaattttacattatctgatatgatgactagctaggaaagacaaagacactatgattttattttataagaggattgcttgctagccaaactcattatctcttaaggcatactttttttgttggaaaaatttcacttatcgtgtgattttagaacagagaaaatatatatataaaattgtttcttatggtatgaaaatattatggtcattagtttcaaaaagtttattcattgaagatttgttgagctttctcttggtgaataaaatggtggaccatggccatgctctataataaagtcgaaattctaacgaactttctcacccaattgtaatatagtgttcttaaccttcacttgggatctcactttgtgatattacacaaatttcttgagacgagtaaaatatgatgttcaattcgaaagaattacttcactaaacaccaattagtttcaagttaaaacccgattctgttccttaaaaaacttcttctagaacgtagtcctttcgtaccattgaatctcaaaatcaaatctttgttggaaaactaatttttaatccgtacaaaaagcaataaatataagtgctgatgtaggaaacagctggcattccgaaaatgccccctacacacaacaccaacgttcaaaacagaggggcaaaaccgtcctttttattggtgcg

SEQ ID NO: 222372 - DNA, 1201 bp, Cannabis indica
gagtttatttattattgttaaatgagacaatgaatttaatttcgttattgtataggcaatatttgatctttgggtgtaatgaaatgtgacatgacgaattccaattgctgcttcaacagtttcattataatttattttaacaaatcattaataaatagcaaaatatactaatctaaaatccaagtagttgcaaatattgatcgaagcacataaggcaaataacaaaattcaaagcccagtttccttttgttgtaaatatttgtgttggattagttagaaacttgtatttgtttttctttgaatgattatcgccaaatgatgagttaatattccattttctatcttttgtttctgtagctggagattgtacggtcaactccaggtgtgtttgaggttgttaaaattacatcttcccatgctctctgtttagctaacttttctctttcttaaaatttagcttgataatcatttcttactttttaaacttcaggttcttaagcagctggtgaatgactatcccacaacggtcttaggagtaatcattttacctcaccttctgcatttctttacattattgtaatttcttgcaggaatagcctgtttcttgttatttaactcaagcttgtgtcaaacatgcatgatctttctttttccaaaaaaaaaaaaaaaagaaaacaagtgtatgaataacatagattcctctgttttagaacttataatctgctttcccatctaaagagagactaggttcatgagacttttttctgtttagaactttttaagtaatcttaaaaaatactataatgaatgtgaaagtgcattctcacatttagcaaaatgctgactttctgcgaaaaagcctctttgtgtctaagaaaatgtttcttagaattgtttcatgagttttaagtggatgagttcttcaggttggtactgttcttaatatcgaggatgccagaaaggcagttggtgctggagccaaattcctcatgagccctgcaattgtgaaggtaagtttataaatgccttcctaatttatatttaccacttttactatagactttccatgttagaagttaaaggaagcaccagttggattgcttatttgtgtttatttaatgttttcatcgttgcttcaggatgttatcgatatggatggtttccagaacggtgaagttttatacatacctggtgcaatgac

SEQ ID NO: 222373 - DNA, 1621 bp, Cannabis indica
agtataatataacaaatatgatatagaatttcaaattttaatataatacaatacaattataatatgtcgtactaaacgaattccttctagtcttaaatataaccaactaatgtgttttactatttttattagagagattagaccttataattaaacaaataatttattagaagaaaagtaacaataatattattgcattgttaatttgttgatattccaccttcctgaaagggtaaaatatcaaagtgtgaatttatcctatcacaaattgtagctgtcgtttactacaaaaagtagtcggatggtcaagacagaatcaaattctgataagtagattctatcgcaccaggtcacacgtcaacttgggcgctgggtgcttcccaagtgatttctcgaggctcgttttggtacttctaaggcattcaagattgcgagcgaggtctcctaccccattttttttacctaaacaagaagaatacccaaagcagtttttgcacttgaggagcagaatcatggcaaccaggttgcatgtcaacctgtgtgcaaggtccagtgctgatgtcaacctgggcattgggttcctcttttaatccttagaaaatcttgtttgttccccaagatcacttgtatattcgttatttctgaagacaaaaaagatgcatgtaacacatttcaggaaaaaatgactagaaatagcccacagttgacaaaatttcaacctggcgctgggtccagctttttgccactggttgattccatttaattctcggaaatacttgtatcttagttattaataaaatagagaatattcccggaagacttctctaagaaattgattgaaaatagtctaggttgacaaaatatcaacctaggtgctaggcccaacacctaggtcaacatgggcggtgagtcctagttctagatccttgatgactttgtttcttcctcgaaaatatccaaatcttaatccttgatgaaatagaggatatgctcgaaaaacttcttctaaattgctgatggaaatgacccaagttgacaaaatttcaaccttaaaccctaaggcccaaggcgctaggcccctgttctggcctctaggtcgatcaatttctttcctaaaagcacttgatggagacaaataaaattcttgagatacttcttcaatatcgtgattaggtgcctagtgctttaggtgctcaaaaatgaaagtgttccaattctgatttcgatgcctcaaatatttgtaagacaggtcgtattcatgtcaaagtacaaattttggaccatttgcactaagatgaactccaaaattgaaactctagttgggaagtcaacctgggtcctaggttaaagctctaggcgcccgggttgatttttggggtgttgtttcgtctctttcaatttccatgccttggacttgattcttcttgtcttctttatttaaaatactaaaatatggtgagttggaaacaacttgatgggatcaaaacactcattttgaagttctcggagtcaacctaggcgcaaggctaaggacccctcctaggtcgactgctatatgactcggaactactcaaccctgggatatttttttttcttgacacatgtcaaatattgatgtcca

SEQ ID NO: 222374 - DNA, 1405 bp, Cannabis indica
ctctaccactcatccatctatatattgatccttacgatctaaattctccttaaatttctttggccctagtaactcaattcttgaattcatattctccaaaaaaatttatatgggtctcctcaagaaatctgaaattttgcataaatgttctcgtatatatagcatacatacatacactcccccttcatcactcctagcctgtattggaaatatccaaaaaataaagtttggcatttctcctcagtcttcatttcgcttgcgaaggcgttttattgagcatcctattagctctttcggaatgcatgttgacgaattttacagggtcgtcaggggctactcgaacacggttaggcacaaactttcaaactcctcggtacgtggtggtgaataatcagggtccatgattggatattccatattacatgaatctatggaattagaccagccgtggatagagatgggtggaggctttgagggaaaaagagattgtggctagtggaagatggatttaatttgaacctcttgctgggtatataggtatgaactttttaagataattgaatgcacgaatatattctatgatcttacctctaagtttagaaatgcaacagagctaagacaaaatacaactcaacaataaaataagtttacatatctaccctcaaatatatacatattttcaaagtcaaattaaaaagttaaattttaatttattttcctacacaaaatagtgtaacaacaggttaaaatactggctacaacaagttttagaacttgaatgaatagtacttttatttttgtcctacttgaggtattaaaaaccccaatgtcaagtgaggttctacataaaaccccataaatataatttgataattgtttttatgtgaaaatgaaaaaactgtcaacccaaccacatcttaattagtctagtgttgctggcccttagatttgtaactttaagggcataagttataaggaaattttacactagtactaaaatttttaatttcttttcactgtgggatggatttttttttcaaaatactgtatttttttcaaaaatactgtgtaattttatattgtttattgtgttaagtttttatagttattttttagttgttccactgttatttaaattttctgttttgttattttacagttgttttataaaaagacaatatttttataaaaaaaaaaattcatctgatagtaaaatggtaaacttttacccaaaaatctaatatttttataaaacttttacctaaaaaatacgttcaatccaacaacaacgtatatataggccggccctgagagagataggtccttaggaaaaataagttattgagcccttatttataaaccatgtgatatttttaaaaattagtaaaattatgtattttttttt

SEQ ID NO: 222375 - DNA, 2652 bp, Cannabis indica
ttaggcccatatattctcagggctgaccctatagtatactctctaaaaggttaaggttgtttttgtagattctctcttttagtattcagttgaactttgtattccttaaaaatagtacacacgtgattatttttttatacgcgtggtaattgattgtttgaactttaatagtaattgataataattattataattttataaaataatataaattaatgagaatatattgcgtgtgttatttttagagtaatatattcatttttagtatttgtgattttaaaaaaaataaatttagtatcttgtacatgtaataatatttatttggtatgatattatctgttttgggcttaagttctcacgattttatttttgggtatcttaccaaaagacgtcatactgatagaatatgtggaatacttatatttaagataactcttgcctattcttctgatgtaggacttggattgataccccaacaatttataccgcaataatcatcaacgggacacgccacctgactacctcaatatcaggtagactttcgatacaagacaccatacagatcttcatttttgaggtcttcgcccacacatcacatatgcagcccactatcccagcgctcttgaaccattggctctgataccacttgttgtgttttaatcacctcaaaacacaattaagaacagagatgaaaattagtgcaataaaatgctaactaatcatgagaacgataaatataaaatataaaatacaaaataaaaattatattacaccaatttaacgagctttgattagttgcttggcagtggcaactgcttactctccatatagaataatctttagcttcaatttttattgattcacacttggtattacaatagtaaagttctaaaagttatttttgtctgcaaaaaatattggtatttaaaggcattgtccaaaaatattggaaaaacagaattgtccccaactaatttaactaccaagattgagactttaaagaatttacttgtgttaaaagtgaatactaactaaattttaactaacaccataatataatatatgtcattaaatattatttagatttaaatttaaaactcatataattaaatatagttaattataatattaaaattttattgatcatatttgagttgaaaatattaaacaggtacgcccttaaatacaagttgccaaattaacattattgaaaatatacagtacaaaacttgtatttagattacgtaaacactgatctacaagtttgtgagtagtgtagaactaactaactagcttccaaacacatttattaagctttgggtcgtttttacgatcagtagaaaaaaagacagattaaagagagcaacatcccatgtcggatccgcgttctctgggtctgtaacgtaaggtcactgttaataggccaataaggctttggtgttgaaacttgatgaaagcattggggtgcctggtgggactggggaaaatgagtgagataggcatggacatggatatggtcctatggacccctacaataccagatatatacattcatggtttacatttagatatactactcactccttcttggatatgcattattacaaaaccatattctgaaacaaattatggccaaactcttaacaatattgactacacctagcttttgtcttttatcactattctgttaatttgtcttttataaatatatttacttttggaatatagaatagtagtagtataaaaacaactcaaagagagaagaccaacttgaaggaaaaatacaaaaaaaaaaaagaagataaaaagttcattgagggataagacgattaattgacctcgattctaccttgttgatacgttactctttaaattaattagtctgtttaacaaagaaaatgagcatgatattaaatatttggttgatcttggagtaaaatgaaagctatctatggagtttttgggaaaattataactaaaatttaattaaaaaataattagcaatgacaagaattacaaaaactacacagcaataaaacggagataaaacagaaataaacaaaatgttagaacaagaaacaattaaagcaataacaaaaaataaaatcgtccaaatcctataaattaatgtgatttatagactttcgagaacgctcttccagaaaatatctaacatttcataaccaaaataatttttggagatctttacacttgaaggaacttctcagagttccttgatcaagttagtaattaagctacttctcttaaataatcatcactaaaaaacgtaacagtactctacttcaatgcacatcatacaacctaggggacatatcagatttttccaaacaataatccattaaatctacaaatactgtaggaaatcacagcagtcccgaaactgccccctacaccaacacctaacagtcaaaaaaataggggcaatgctgtctttttctctttgtgcggatccaaagagaatattcctttctctaatccgaatatgccccttttgaatatcagatctacttttcaaaaccctattgcatttaattgcaatataaaactaatcttttctctttctatgaaaacctaggtgccatttttccctttcacagccggcctccttcactcctcttctctccttcttct

SEQ ID NO: 222376 - DNA, 1651 bp, Cannabis indica
ggaatatatatttaatcacataatcttgattactttccactgtgctgatgacacaataaacaagaacataaatgtgataagggtttggatgaatttataaatcaaataaataagtaaatgataacatgaactaaatgacacacaaataagtgaaaaatacttctgtttctttattgatatttaaaggataaagattacattgaaatggagatttatttagggcataaaactcaacacttccttccctttgaattcataccccttaagctgcttcactagaatgttttcctccaagtctccatgcagaaaagttgtattgacatctagttgttccaattccagatcattgatagcaacaatactcaacattagccttattgatgtgtgtttcaccacagaagaaaagatctcattgtagtctaccccttttctttgtgagaaacctcttgtaactactcttgccttgaacctagtcttttcaactccaggaatcccatccttgtgtctgtacacccacttgcagcctaactctttgacctttaggccttctaatcagatacaggtcttatttttggttagtgaagtcatttcatcatccatagcattatcccactcaagcttatcatcagattgcatagcttcctcataggttgcacgttcctcatttcccattgcatcaatacttagagcatagttaattacatcagcaaaaccaaatctgacaggtgatcttgttgctcttctatttctatctctagttaactgctaatcttgagtgtcatcttctgtatctggctcttcctcaaattcaactctttctaccatttcttcttctttcttcttcttcttcttcttcttcttcttcttcttcttcttctggttcagttgttctatctacacatgttccctttcatttgactccacctcaaactgtattgagccatttgagtttctgtctggtatgtcattcttctgttacatttgtaagatccttgtacatggtcttctcatcaaagatcacatctctacttacaaaattcttttggtgattaccttcttcaatgctccatactttgtaaccttttactccttctagatatcccaggaagatgcactttcttgccctgggatccagcttccctctttgacatgagcatacacaaggcaaccaaatattctaagatgatcatacctttcgtggcttgcctttccacacctcaacaggtgttttgaattcaattgcagatgatggacatctgttgatcaaataataagctgtaaaagctatttctgcccagaaagattttggcaaaccagcatagattaacatgcatctaactctttcaagtatggttctgttcattctctcagtaagtccattttgctgagggtttctgggcattgttagatgcttgccaatcccaactagtttgcaggtattctttgaactcatctgcacaaaactcaagcccattatttgtcctcaacttctttactttcttaccagtttgagtttctaacacagttctcagttctttaaatttgctcaatgactcatttttatttttcagtatgaaaatccaatcatatctagaaaaatcatcaatgaatataaaaaaaaaacctggcccctcctcttgattttgttcta

SEQ ID NO: 222377 - DNA, 1865 bp, Cannabis indica
atttcactgacttgaataaggcatgtctaaaggactatttctcgcttcaaaggatcgatcagctagtagattctacaactggtcttaaggtcctaagctttatggatgcttatttaggttaaaatcaaataaaaatacacccactagaccaagaacatacaagtttcgtgataggcctaggaatgtactgccataaggtcatacctttcagactgaaaaatgcaggggccatctatcagagacttgtcaataagatgttcaaagatctcattattcataacatggatgtttatgtggacgacatgttgatctaattgaaaaaggttaggggcacgttgaggatctacaagaatgctttaagatcctccgatcttacaatatgaagctcaaccccctcaagtgttggtttggagtaggcttaggcaaatttcttagcttcatagtaaatgccacgagaatagaagcaaactcagacaagatcttagcacttttggatacgaagtcaccaacaaaattaaaagaagtacaaggcctgactggatgcattgtaacgttaagtagattcgtgtcaaaattaacaaataagtgtgtccatttcttcaacatacttagaggaaacaaaacattggaatggatataagagtgtgaaagagcattcgaagagctaaaaaagacaattagctcagccccctctcctatcaaaacctctggacaatgaagaattaggcatatacttggttgtcataaaatatgttgtgagtgcagtcctaataagagaagaagttggcatctagaatctagtttattatgtaagcaaaaggcttattgacactgaaagttgatacccactcatcgagaagaagacatactgcttgctcttaaaatcaagaaagctaaggccagacttccaagctcaccaaataaaggtctacattgactagtcgttacgaccaagtgttagagaaacctgaagcatcctaccgactacttaagttggccttcgagcttggccaatttgagatcacataccaataaagaatggcaataaaagtccaagatctcgccgactttgtggttgaatgtacgggcatatctcctaaaatctctcaagatttaggaaaatgtaagagccaaagaagaagcgagagcaagagtagaagcaagagcacaaagattcaacctagaggttgcatgttggcggaagctacactgaccatctatcgggtgcagggactgccctcactacacttggggacaacaactacacgggccaatcaagttcactttcaaagcctccaacaatgaggctaaatatgaagttttgattgttggcctcaggctagcacacaaagtaggagatgaccacctagacatgtacagtgactcttaactggttataaatcaagtcttcggcgagtataaagcctaaggggaaagaatgatagcctatttgagaaaaattcaagagttattaagtcggtttaaaggctatactataaggcaagttcacagggaagaaaatgcaaaagccgatgcactcgtccatcttgcaagaagcaccttcactgagaaggaaaacttggtgcccatacagttcttaaaagaatgaagaattactattccaaaagaggttggcatgttggatgaccatctaacctcgattacacccatagcatcatacccacaaactagagtcttgcccaaaacataaaaaatgaaaaaaagaaaaataaaggaggaaatgcttcttggtatttaatcctagacggagtaatgtatttctcaatatcgcttctaaggtgtgttgctgagacagaagtcgagaggttatgatcgaagtgcatgaaggcttctgcggcaatcat

SEQ ID NO: 222378 - DNA, 1899 bp, Cannabis indica
tggtgtaatcaactatcaaatacatcatcctcagaagaggaatcatcggaatcttcaacggctaccttgcccttgcctatagatgtagggaaggggcgagtaggccaagcataactctggcctctaggcctaatccatagagtagcatccccaacggtggccccacgagccaagtgctggaagagggccatctctctcttctccaaacccttggctatctgggatagagttacatcattatccatgtcaggagcatgcccaccacctgggctgacttcctcagcagctgaggcttagtctacatcatctgatgggccctcggtctccacaactctagatgtagggggataaaggtcgtatctctaaatatttgccacactagccaaccgtaggatattcctcatctctacagggagggacgggatgtggttcgctctatccctcatatacagactagggatggagtgcttgtaggaaggttattgttgaatgcggtggtatcaaacctccttgacatcccaaacaataaagtaattctaagcatatccgccaactttcgacaaaggtgtactaatggtgtcactcaaccactagtaaccaacctggctaaagtagaagtaccctatcacgttttgttttggagaagacttcaatcaaaataatacccaatcttatagggagtaggctgaggccaacctagctctgcatagagaacaaacatcactaagaggtacttcaaacttattaaggtgatttgtgttggacacatcccaaagtaagcggctatgtctctaaaatatgtgtgcaaagtcagcacaaccctctgctggacatggtgttataaccttgccatccaatcgaaaggcaagccagtgcactagctgatccctcgaaggcacctcacattggatgcctctcactagtccactctctattaatctattgaaagcctcagtagtgataacagatggaggagagacccaccaatctctctgtaacacgacgtcaacaacttgacgctctaaagactgtgccaagacatggtctaaacttatcactaaggtctgaccaagcagttcaatggttgcctaccattattatacgagtgcaaaaggttgttggaaaacatattacaagttttgtgcgtccacctcctaccaggtgtagcctcctcaaccttagactcagtgtctagactctcagcaccctggtcgaccaatggcacctctgcctagctgaccttcagatctatatcatcgagaggttgtgtggcctcctccactacgccaaccatgcccattgtagccaccttggcaacatgaggatcagatggtggtgccttatgatacgaccacttagttctacccatagggactgtacctggtggttggccagccataggatggtcaaagggggctgttattgagcctgagatccctaactggccatgccggttgttgtcgtgatctggcagtttttgtcgtttgacctttgaggaaagtttgtcctccctctagcaagggaatatctgtcctagttcctaaggaactgggttgattgacatgtcgatagaccctcccttatctatcaataagtcttccatgaagtggatctctaatgagatcctagcctcctctattggttctctagttaaaatgccctatcagttcgctggcctctctattacggcaatctaactctgcctaggatatcaaaggatgtactcttgatcatccatccatcttagaaattcgcatctttgttgagcgagaacattgcagttagcagcacgtggttctttaaagaatttgcgtctatcctaagcgagtacatcgcactcggccaaacgtggtcgtttaattaggttggcttggcaagacgacctctttaagtttggct

SEQ ID NO: 222379 - DNA, 2803 bp, Cannabis indica
gccaagatcgacctaattaccccatgtgtgtatacatatatagtgacaaaaatatataaatataaaataatatacctatatatagtactgcaatgcatggtctagctaatattatttattattctctttacgaaatgtgtataagctatagggttcaaactcagcccatatagataatcagtcttcatctaattcatttgatcaatcataaatgagagatcaatgcctcaaaataggtgaccatatatatatataaattgaaataatggaaccatgcattgagcctaattgttattccttgtgtcattattttaccatacataaattgaaatatttttttcttaaggaaaataaattagtcagtgtcatggaaagacaaaaactatacattgattaagggggagttgttaaaaaaaataattaccaatcataatatgtagcgttttctaattggcaaacgaaagaaaaaaaaatattgagacatgtgaccttagtaattattgatgtttgaaagttgtttttttggttattccacaataaaataaataaattaataaaaattattcttatgctaacaatttagtccctgaaaccaaaaaaaaatcttcccgcatttcaaataaattattagaaatcgaattatatatatcaaaagaaatatatttctttattttttctcattagtcaatgccaaacttaaatgtaaataaaatgaaattagcaatgagtggagtagtccatgttcttatatatggctcaatacttttacatttaatccatgtgggacaattactctaaattcgattcgggcttttaatactataaataataatcatcaggcatgcattctataatttaaaaatcaatacagaatagtaaattatattctccataatgatcattaatataaataaaaggtactttgttaattatgagaatatactcatgaatttgtacacaatcttttgatcaaattttaacatgagcactactttacattgattttttttaaaataaataaataaaagaaattacaaagtatgatttcgaacctattaagaaactcaggtgagatttggatgtgtggcttctggtcatatttcgactgttagtccaattggtcggtccttggatgcaccgtagtcagttgagtcacctccaactgaagggatgtggtacaaacttaatattgataatgtgttgcgaccttctaactgttgtatgggtttaaagcgatcattcaagacttaataatttacaggatattgtgtggcgtctacaacgaccctaacgatgggtcttttagttccgtttgtcgttgaaactatggctatatatattgcttgggttgtaattgtgctctcattttagatatcataatatttaggtggagacggattgtcaaattattacgaaactcttgaataaaagagagacttatttgacggattatagttcataagttttacaaaatatttatttagtttgggataagtttaatgtttctaagtttttgttttttaatcactttgtgaactctaatctataaccttgctaaactcgttatttttttttttgatgaggcaagagtttggtggccaggattacgcaagtttgtttatgtctttaatttattttgactttggccaaatgatacttttctttcattcggagaaaaaaaaaagttctttcattaaaatacaaatgtatcaaatatatatattaattcctttgatcaaaagttataacaactaaataaatatgccctatctttaacttacattcatatatagacaagttttttccttttgtttagatggtttttcttataatagctaaaaagttagttcgatcgcatattattattaattatctagatgacaattttctttttctttttctcatgaaaatgatcccttgggttttttctctcattaattctttcttcattttttcaaaagaatatctatatagatacatacaatatagtagacattaattttgaacataaatcaaaagcaataatcaaaggaggtgaatggtgatgatgatgatcaattgaaagttcgtaacaatgagtagcaaattaggaggttgtcaaaatcatctttttattaatttaattaaataattaatgaatattttaaaaagggtagtaataatggtaatggaatggtatagcaatagcaatagcaataggtttgagttttgggtgggcgttgttgatgggagcttgtcatgatttagagttggttggtatggagcaaagccatgagatgacctttacattattggcttagctagctttgtatcaaatcatttcatattcattaattattcaaattcatcatattcatatacatatacaaattcatatggacctcatctatactactactattctattttactactatattatttgtttttgtggacccattttctgatggtctctgcctaccaaatccaacaaagaaacacaattttttaaaaaaaaaaaaataaaataaaaaaaggtacaaagaaaatgatatctcccaacttaaaataatattataaataattataaaagtcccactccccatttattagagaggtttcaaacttgaatacatgaggcaaaaagaaaagaaaaaaagttaacttatatattataggctctattcctttacattgttcaaaaaattaataaagctcatgatcattatatatgttgatatatacatatatgttcatctatatatctaactatctatactagcttcctctttctttctttccttgttcctttcgtcttcttcta

SEQ ID NO: 222380 - DNA, 1421 bp, Cannabis indica
tatactatatacacgatcattgtggggtcaaccaaaacatcttttttgatatgcaagtggtcataaataattataaccgatacaatcaataaattatatagtatattatatttttttttgtgtaacttttggtcttgtagttagaatgaaagagtctataccagtgcaatactaaatttgatatttaaggttggagagatgcccttacatgtaaattatatttaattaattagttaaataagatatatataaacatgctaaattattcataaatgtgtataaaagggttgtaaattaacatgttaattttgttattaaaatgttaatgagttgataatttaactaaaattaaatatgatttctttatataataaacgtgcgggttaaataaatcggagtaggtcaacctgtttataaacaagccgatcgggtttggggttttattttcaagtatataattaataaatgagttgagtttaaattttatatttatttaatacctaaatattaataaaatataaataggacccatacacatgatttgatacacaaatataataagtgaacaaataacaataaatttaacttcaattgtgaaattgctaagaaaagtcttattaataagtgttcaaattttagtacatcttttttaaaaagtaaactgtaaatattaaaaaaaacatattttttttgttgaaatttgaatttatctaagtattacatttaattaaaaatatatactgttaataaataaaatacacctatatattttttttttcttgatttcttttttctaataggacggctgcttaatcctcacttctatgtaggtccgccatgcatgtttcccaacagcaacaacatgacttataattattttattaataattataataaagcattttaatgttaatatatagttcatcatcatgccaataaaatggtatgggtttgtgtggtaacacaaatgaataatatataacactaataatggacttttatctttggttcattttttgcttctcataatatataatacactatatatatatatttatatagatttgataatcccatttcaaccaaacaagttaaactatagtggaatgatgattctcaaacattaatcccaacttgtgattgtctataattaatgatttatgtgtgtgtgaaaaaagagagaaacaaattaaagaaattattggtaaaagagatagaacattcttatcaagtgcatgtcctttggtgcatataatattacaaaccaatgttaccactactacaaacggctccattaattatcatcatcatagctagcctcaacgctaaacgccaataataataataataaaatttctatatatgtataacatatattcttttttttttttttgctggagaaccaatctctattgcagaaa

SEQ ID NO: 222381 - DNA, 2166 bp, Cannabis indica
gctttagtgaaatctgggttgttgaggttgttcttcgatgattgagattagaagaaactagggctttcaatacttgacttagacgcatgcttatggcctttagattcctaaatatcctttgttttccaattatttttgctagaaactatttagactcacttctttgaagcttctgggaattttctaggttcattgtctttctttaaacctttgatgtgggaattttatttttggaataaatttcatcctttttcttttgaatttgtctggttggcatatcagacatattttgttcttgcaaaagaaaattatagctctatccggttcttacctctctatcttccctcttttgtagatgaattttggcaaatactgggaaggtaaccactgaatagataacaatttacttcatcttgtttacgagaaggagccaggactccgtgcagcttcatcttcatcagtgataattcatcgacatcgagcttagaggagtgggaggttacaactggctcatcaaagtcctcaaagcttgtggtacatcatcatcattacttcagccaaatcagtggagaattataaggcttatttatttgggaataaacagaggctagatgcattattcccattacgttgacatacaaggtccgaacggacgtctcagacacgctaccgagaggctatctagagccttcaaagaatagctccgcactagaaaaaatttctatctccatcgcaaagaataccactaaaccaaatgccccatccaaacatagggtgatggccaaaaccaaacaaacctacagaaatacctcgactaaggatccacacttttgccgaatttttgtgatggtcggtgtagaacaagttgagcatcctgaggaggatgtttaaatggttgttggggaggaagaagtccaagaagtcaagtatcaaggcaaggtctgagcaactacttttcttgatggtgaaggagaagtagtggaagatgaagacgaagaggctctctaagttctttcgtttggagggtacagtgaggccgaagaacccctctctgaaataagagttcaagataactcaagatttaggccgatctactattgatcatcattatgatatgaattaggtctttatgataaacgacatcttaataaagataaatttattcatattggccattgtcatatataatctatatcatatacaacaccttcacattgatgtctcactacatcaataatccaaaccaagattactcttaccgtagaatggacatcaaggaactatactagcaaccattgattaattaaaaattccataactttaatatgttgctgactgttttattcataagattactcataccgtagaacatctttttactgtcgttataatgtcccattttagtgttttattttagtcaagtttttattatcctcgtagattttaataataaattaatatattagtattaaattagtttataaaatcaaacatgtggcgctcctatggaatagggcgttacaaaagggctgctcggccacccctggctagccctatggttggccaaccactggatagcataagaccaggcagcctactccctgtggctgcctggctggccacgatttgatctggtaggatatcggtgcacaaccttacacgtggagtacaacctagattgcaaattgggcattaacaacccaataaagtagatcaaaaatacctatatttgaggggcattttaatcttttgtatttaatcaatttaatatgtaaatatctacttactttatttgtaaattacggcctaagctctcctatataaggagccttaactcaaccctagaaaaccctaagcaactaaatctaagcctaagcctctaagtcattaagtctcattcaagccgtcaagctataagcctgatagcattctcactccactctctctcacacgcccactatagcatctctcaacacttgagattttccatcttcgatttcaactttgtaactttcagggagctatattagatcccacttattgagatctaaatagtattatcactcggtatcaatacaactaagaggtgagtaggtcattactcgctaactaaaggagtcaaacctctataaaaatccttattttctttacttttgagttctaatt

SEQ ID NO: 222382 - DNA, 1451 bp, Cannabis indica
aactgatatagaggtacttaacagactctgagtttatctgaaactcaagtctaagaaaaaccaggatcactttgcctagaagaatgtgaatcccaattggttaagcatgaatttttcaacaagactagctaatttagaaaagttggtccaactctaccaattcatacctttaacaaagagactagacttttaagcatgaaaaataaaatccagaaagaataaaatgaaaaatggaaacatcaaggaaaaccttacaaaccccccattttttttccctttggcttaccactacaggtagatgggatattgaatgaaagaagaaacacaaaattgtctaaaacccagataaatcaaggtactcaactcaaaaaactagatgagtattatcccataagaagcaaaaacgaacaagctctgtcagaataaacccaatatatcttgtcctaaacaccaagaaactcactttccactattgggttagcaaccactataaaacagagttcatatatgtttcattaaacagggagaaaataaaactcaagaggaaatagctccaaattctagtcaaaaaggaaaggcatataaaatatatatgtatatatatataaatatttataatatcagataatcgaaatggaaagcatttacgtgttttcgttgatcagtgatagatattccaagacagggacagagagaagagaaccctatgaagttgagaaacaaatgtgaaatatttgaaataataaaccgagggtgggcctgaagctttttacaagtcttttctatgtttatcatattagtttttgtttattagcattataacttttatattttgatgataataaataaaaaagaaaaacaagaaggtggttactttttagagcttcactcctagaacttaacattataatgctaacaaccaaattggtgaatcaatagaaatggaagtctcttccacaagtggctttgaccaatttactttataacattaagacactgttcagagacagttgctgcttttgccttggccctttttaacatacatttctgttcccttgacctctgctatcaatttcaaaatttgctttgaataataaaataaaaaaccaaaaagaaaagcaagcaacttgagagttttcttggtggttaacttctttttgttaagtcagtattaaattttactatgatgacacatgtcaccatattacattagctgccaaatattttaattcaataattataaaaatttattaaaatatattataaatattaaatcattttaaaattaactagtaaacctaaaaattaaacaagataataatatttttaatcttgaaatgcaaaatttaaactaaatgctaaaatagaaatctaaaagttatatctacattaatttttctttattttgattttaagaaaattttagtttaagaatagaaattagcatcagt

SEQ ID NO: 222383 - DNA, 1867 bp, Cannabis indica
tgcatgatcaaattggatctccaaaaagtttatgacacgattgagtggagtttcatcaaagaaatgctcacaggtttgaattttcctagaaagttcacacaattggtaatgaattgtgtcactactcctaaattctctcttagtttcaatggaacattacatgacttctttgaaactaagaggggaattaggcaaggggatcctatgtctccattactatttgttctgggaatggaatatgactctagattgatgagacaggttggagagaaagaggactttcacttccatgatagatgctctgaacttaagctcaaccatctagcttttgctgatgatgtcttgctattttgtcatggagatatcaagagtatcctttatatgctacaggccctgatactgttctctcttacatatggattgcatccaaatgcaagtaaaactgccatcttctgtagcaatatgcataatgaaactgtgaatcacatattgcaactttctggatttactaggcaggatatgccttttacttatctgtggatcccaatttgtgggaagaagatatctggcaaagaatgtgaactattagtagaaagaatgacgactacgatcaagagttggagctccagaaacctcacctttgttgggagaatcacacttataaactctgcattagttgctatccaggcctattagagtcgtatgatgatcatgcctaagaaagtgttgaaagctattgaagaaatatgcagggaattcttatggaaaggtcaggctctctttcatggggctggttttgtagcctggaataatatttgtcagcctaaatcttcaggtggtttgggaattaaaaacctggaacaatggaacaaaactgctatatgcaagtaagtttgggtcatcgctaataaacaggagaacttatggattagatgggttcacagtgtttacatcaagaaataagattagtggaattactctgcctcaattcactcaagctggtattggaagaagatggttgcactcaaagatcagattaagaacttgactaattgcaatgtgttccaaaggcaatcctatactattgcagctggttataagctattttagcctcctcaaaacaagctgaactggagaaatgaagtgtggactaggttcaatacaccaaaacatggtgtcatcttaaggttggctgttctcaataggttgaagaccaaagatagactcctcaaatacaaaatttaggtacaaccgagctgccgcctttgtggttcaaatcttgaaaatggacaacatctattctttgaatgcatggtctttaaccattgtttaacagagattgaataatggctgaactggaatgcacgcaccaacagtttgccacagctgattagatggatcgggaaggccaaaatgttgagttttagaagaaaagtgttggctactgctatagcagctctggtgtacattgtttggaagactagaaatgctgtcatatggcagcaaacacaaatggatacaagtggactaattgaagacataaagtggactctcaagcatcgggttgccatatttttgcctaggagaaataagactattgataaagattagtttgttgctttgtaattgaaatctgtttgtgtatagatttttacgcccttgatagggtgctattagattgtaaatatcgtttgtgcaatacaattcaataatttatcaaaaaaaagtgaaaaagattgaattctcttgggcatttcaccatacacctaacatgtgtacttttatatgtatatatacaaaaactcaacattcagaataacaacaaaattcataaatctatgagcaaaatagaaaaatcaataactaa

SEQ ID NO: 222384 - DNA, 1005 bp, Cannabis indica
ttttttatttttttatttagtaaaatcagtcgagaatctgagaaaatatagtgattgcatatgtgctaaaaacacacaacaaactaaaataattttcatttgttggaatttgtttccttaatagcaaaaccaaaaccaaaactttgtattattattattttgtttgaaagaatattatgtataattaattttatatatatatatatatatatacataaatttaggtcgacccaataatgcaagtgcaaaaaaatctagaggtgatagtttcataatgacctggcaaaaaaacatggttctccaattttgtggctcccaatagttagcttttgtgattggattaaagagcaagacttgtcccaatactagcactagtagtagtactagtactatatcaattattacttcagcattattattgaatattactggtctttagcactcttgacatatcgttttgcgactggctagcgaatatttgttccaatactagcactacaagtaatagtactagtactatatcaattattacttcagcattattattgaacatcagtggtatctagcacctctagatatatatcgtcttgcaagtggctagcgcatacttgtcccaatactagcactacaagtaatagtactagtattatatcaattattactttagcattattattgaacatcagttgtgcctagcacctctagacatatcgtcttgcgattggctagcgaatacttatcccaatactagcactacaagtagtagtactagtactatatcaattatttcttgagcattgctattgggcactagtagtgcaagcacttctagacatgtcttgcaattgactaccgatactccctaaaagctattacattaaactatatgggacctgatacttaattgtactaatagcgatattaacacataggaaggtgttatacactactggtgtcttttagcatttttcttattactcttagagcactcacaataactaatgt

SEQ ID NO: 222385 - DNA, 3208 bp, Cannabis indica
gaggtttatgtcgatgacatgcttgtgaaattgaaaactttatgagtcatcaagggaattcttgggttttatagtgagttctcgaggcattgaggtgaacccaaagaagattaaagctcttctagacatgccttcacccagaaaacacagatatttagaagttaaatggaaaaatagtagcacttagcagatttgtctccaaatccactgataagaacatctaatgaaggctccaatattgtccaaaccagttgatggagagccattagtcctgtacctggcagtgttagatcattctataagtgccgaattattgagagaagaaggaaaggtaaaaattcttgtatattacgtaagcaagagattactgggtttggagtccagatatcctatgattgaaaagctttccttttgcttactattttattcacggaagttaataccatactttaaagctcatgccataagggtactaaccaaccaccttattcgacatgtgttacgaaagccagagtcatcaagaagactcccaaagtgggaaatggagctaagccaatttgatatacagtatcaacccaaaattttgatcaaaagttgtcttagctgacttcattgtggaatgcatgtggatgaatgacgatcctaaaatgctagtctcaaagagagaagtttgcaaaaaatatgtaggcagagtatcaaatgaaaaaggttctagaactggaatcattttaatttatccataacaactttaactccaaagtgcccttcgtttggaagttgaagcctccaaaatgaagctgagtatgaggctatgattgttggcttgcagttagttttgagtgttgttatggacccggtagtcgatacatagacggaggcttgcgtcatgcgactttcgctcctctgacattcattcgagtggctaaagaggttggtgccaagaatgttgagttgtacagtgattcccaactagttatcaactaagtgtctagtgagtgccagatgaaaggagaaaaaatggctagttacgtagtaagaactaggagctattgcaacattttaagcactattctgtgaagcatatcactagggataagaacgcatttgcatgctagctaaattggcaacaaatctagaagtggagaaatacagactagtacccatcatacatctgatcaatctaagcacgaagacactgggggtgtcacccatcgatcactaaacctcctgggtggccctaatactcaagtaactggaaataggcacactcccgaaggaaagagctgctttgtggaagatccaataccaggcccccaaatacgtgatcatggatgggaaattgtacagaagaggatttttaatgtcgtacctaaggtgcatagctggaactaagataagcactgtcatgcatgagatacatgaagcattttgaagagatcacacatccaaacacataaattccaagaaaatcattcgtcaaggttatttttggcctaccataaagaagaatttctactgaatacgttcgcaaatgtgaacaatgccaacattattccaaagttccaagagtcccaccaacgaaaataccctcatgaacagtcgtttgtcctttaccgtttgggatatagattaagtggtatatagaaaaggagaagtcaaatttgccatagtagttgttgactacttcactaaatgggtgtaagctatgaatatagtgacctccaaaaaggccttggacttcgtaatcaagaatattatgtgcaaatatggacttctacaaaagataatgtccggtaatagaaatcagtttgacggtgatcaattcactaatttttttgtcaagcacaaaataataaaaagcttttcaactgtggccaggcctcaagaaaatggacaagtgaaagctgtcataaagattgtaaagataaccttgaaaaagaagcttcaaacttgtaaagtacattgaccggaagaactttcaagagttctttgtgcctagaagattactaaaagaaattcaacatgccacaatccattctccatgacatatgtatgcgaagcagtcatcccagttgaatccacaattccttcacataggagaaaaacctacgaccctactcaaaaccatgctcaacttcaggaatctttggatttaatttaggagctttgagaacagccataggtttaactccagatgtaccaaaacaaattttccgaaaatttcaatccaaagttaaaagtagaagaattgaaattggtgatcttgttttgagaaggttatttccgtcctcctaggagcctggagtgggggtcttaggaccaaactaggaaggtccaaatgaagttcaagacaaaattggggatggaacttatcatttgagaagaccagatggaacaacagttctaagagcatggaacgctaaccacctacattgattctattagtagacttagggtggttagcttctttttaattttttctttttttttttcatgtttatgccttaggacaggaattatttgaataaagaaataaatttcatttcatatttggtttctcaaagttctatcacgtaacaagtgatcaacaatctcaactcttaatcacttgaggtgtagcatacattatatcattataaagttatacccctttcataaaatacaaataaattaagaacaagtataatagtgggaagttttgcctgaaactagaacttcaaggaaccgaaagtaaacgaatgccttaatttagtatcttttgcaattaactcagtataagagtaggaagtaccgcctgaaactagaatcttcaagaaccgaaagtaagccacaaccttattatgcttaaaatcaatctagtgtattttgtagttaacttaggttaacttaacacagatgttcaagcttaatggttaacttaattaaaacattcaggtttcttaaataaattaattaattcaggttagttaaatatttaagttcaaagagtcctagaattaagtaatatttaccaagaaagatttaattctacaataattaattagctcaggttaattaattatttaagttttagaatctctaagtaaaaatacttacctacatttttctacaaaataggttgttaaagtgtcaaggcacatgccattggaactatatttcaagaaatataaacaaattcttaaatagaaaagcaacaaagtctaagaat

SEQ ID NO: 222386 - DNA, 1077 bp, Cannabis indica
gcatcaacagaaagcatattaattcaggtttcatcagaaacattatcaccaattggtaaccatcagtattaaacatgtcgtattcgaaccaaagacattctagaccattttagtagtagagttcaaatgtttatgtattataactttattaatagcaataaacttgttagcctcaatcaaaaacagtatctgtacctccaaatccaggaattagtccaagctgaagttcaggcaagcctaattgtgcagtgggagttgaaattcgtgcatgacatgtctgaaatggcaaaccatgcagaaatattaacaattccagcattcaaacaaggaatattttggtattaaaaaaaaaacagacttaccattgcaatctcaagccccccacctaatgcaagaccatcaatggcagcaaccgatggtttccttgcagctgaaacataaagagaaacgtcaataacaattcttccaggtgattgtaaaaaagaagaaaatagaataacataaagtaccttctacggtatcagtcagaatatccactgctacaaaaccaggcttcgaaaacggacctgcaaaatataataaacttaagtcaaatagaccgtgaaaatgaatttataaaaacatatgaaaaatgagcagacccttttgtcccccttgcagaccaccaaaagcactgatgtcaaagccaccagaaaattttcccctggcacctgcaccagtaatatgtgtaattaacattatatctaaaacaatgtaaacttaaacagggccaaaataaattgagctcagcaaactaaccagtgattacgattgctttcacatcatttctttgtaaagcctgctcgtaattttcttttaagctgaacagcactgaaagagaaagaaagagctttattttatctgccagaactacttaacactttctgagacaactgtatagctaactaatctttcttccacaattttgaaccaaagagattgcaaagcactgatttttatacagtatttgttttgtccatgtttgaatttgagactcattgaacaccttacctaagttcactcaactctaaaacaaga

SEQ ID NO: 222387 - DNA, 1701 bp, Cannabis indica
tgcaggcatgagagagtctgtcaacagggaagaatttgtttttgttgctatatatttcttttcctcttgtccatgattgcttgtttgttctcaagctattttttttcgtatattttaagttataacttgtggcggttcgcaaggtcaacacacgatcaatcattgtaataattttatgccacaatgcttagtacatacatacatggacgctgataaatatcattgtttgccttgataaaagaatacaaacttaaaagatttcaaacataagtagattaatatatatatttatgatcaggggacatcaaatcaataatctaattttatcagctctgataattctcaatattcatcggagctggttctttgtatgtattcacaaagaagatagagaagagataagaaagaaaaataataatacgtggctcaaaacaggtgacaggaataaagcatgggaaagggaatgtataaatagaagaagagatttttgaaagaaaaataaaattatagacaaagactcttaccccaatcaataggaggtgaaataatagaaaacttttcctttcttaggatatctttttcttttttttttcctctagcgactagctgcaagttccacctttgattttccgactagggcttcgccgaccctcgtgctttggtgtggctatggttggggggggggggggggggtcataaagaaatcgtccatcaatatggcagtgtttcaagattgaaggggttggccaaggatttgggttatggatctcctatgttctttatttttttttgttttcaataagagtcccattgttatgggtttatttagtccacctgtttgtgtggagttttcatcatctatctttgatagtatggtggtgttagtttctttgtcacaattggttcatgtcacttggttcatgtcactgatttagtggcctatttatgtgacaaaggttaaatctgagaagcttttaatactataagattgagaatgcgcatattgcaccattaaaaatactgcatgtatattgtttctctttaggtatttgaggtttaacctcttgatcaaggaaattgttctcatgttcaaaaaaaaaaaagtgaaaataattaaagatgttttataaaaattatgtaatataacacacaggttgcaagtagttaacttttggtgacaaatattcatgtatatttttttacctcatttttagattattattaattcattactttagaatttagatagcaatttgatggctctaatatagaaatctaattatttcatggatttttatgtcattaatggtgtttttttatcaactgtcattaatgttgttattatcagtttttctccatttgttaattcatatatattcatatttcctagagataggaaatgctggctgtagctaatttattggtctaattttcataaagcttcaccaccaatttttataaagcttcatcaccaattaaatggttaaatgttacaaaatttagcaaaaggtgcaaatttataactgtattatattagggaaatttcaatttttgaccctaataatacaacctatatcaaaatttatacccctttataatttgtacaaatttagtccattaattacatgaacttcccattttacccttttttttttaaaaaaaaaaaaaaaacgactaaaatctgaaagtgtatttctctct

SEQ ID NO: 222388 - DNA, 3155 bp, Cannabis indica
acacttgccctagtctataagaattctttcaagtattcttgtaaactaagtttggtgtgctttgtctccatcgcttggtcccatggttgttgttgtgggcatttatgtctcgatttctttttaagacactgagtgttggctttataaactatcttgacccattttgtggtgggtacttatcacactaaaggagtgttacctctttgagctttctcaacgtcttctataagttgtcattattttattaagggagccttctgccacttgggctttctcaacatcttcacttatgtaacatttccattaagggagtattgactcttagagtagtctccacctcttcttagtagctcattggatataagggagcttttgatcccttaggtgacactcaatcttttttttgatatatgattttatagggggagctttggccccttaggtagcattcaacccctttcatggtataatatttgattgggggagcttttggactcttaggccttgctcaaccccttctaccacattcatggtgcttagagcgtgtttttgaatattaaaaaaattgtactccttagaaaggcatccctctcatagtcgtactttttttttttcatttttcccttatgtggccattcaacatcgctaggtattgattggtaaacaagttgaatgaacgcgtacagaatgatgaatgccacatgtaaattgaaattttaacatttcattgatatgacaaatacataagtgcctgggtacattttctatttttggaggccaacttaggtgcctttttaatttagtacaatgtattaaagaaagactcgccattatcaggagtgctttcctcaatcgattattggaaatagaaaaactttactttaaagaatctcttggatgtttaatgtttatgggttgtgggatggaggcttcacttgaatgtataagcttataagtgttaggggtaagcagaccttgtaatggtctaacaagcttctcaaagaaatctcacttgtatcgcttctcaagactctattaccctcctccacacggatgtacttctttattctttcatagaagtcatctaggccatctaattctcttttcagcatgttcctcgatagtccacttctagggcatactacaccgactacgacgatcttgagttcatctttagacacttttcctactttggtaactttgatgataaagcactggatgtagcttcacaaaatttcttgttctccttgcttcacattggtgatatttgtgataggcatgatgtaataattgcaacatgatgttgttggaggaactctttcaataattgcttcgaggatgtgattgttcctgatcctaaccttttgaaccacttacatgcaactccgtttcagtgtaattgtgaagcattggcaccatgccttgcttgatacttttttcatcttcattagctcattaaaagcagtgagatggtactacaaatcagttgtatcttcatatggtgtgtcataaacaactccttgaaattgggtggaagtagttcaacttgaatctcccttgataaaggggattcttcatcaaactcatcatcatccaagtctcccttcgaggcggtagctatcttttgacgtagatcttgcatctacgcttccatctgcttcacccttttgcgcaagtcagcgagtggaaattgggtcctatttgtagttttcattaggccggcatgtaagaggtactcctcttgtcccatcaacatgtggtttcccaccaagtttgaaggataaggccttacgtttactttgcttttgagagggggccataggcaaggtgccccctagcacgagaccctttgagtgaagtctcttcataaggttatgggatgtttccctgtctcgcgatggaccccttccaccctgacctttgggggtgctatcaactgatgatgtggagtccactcggccaacatatgtggttgggacccctactcctgtcagtggcttttgtactaaaaatgtgaggcttgggttttgcctttgagtatgctactcaacacctttttcatgccaaccactgtagtttttagcctctgtttcttccagcagaggtcgtttctatccttttcatagtgatgagtttaggagcttgagctcaccaaatacacttgtttctcctttacaggtccacatcttgaagtgttggggtcttgtgacacaaatggtgaagggttcgcaccagagatggcattctcagtgcttgaatgcttccattgacaggattagccatcgttgatgtcatcaagtcatgttgtgttgggggctctttttgagcattgacttggtggttcatactttggttattctccctttggtcttcttcagcgacgggaggtggaggttctcttatgacgatgaccacctagttttcatttgggtgaattccattgtcttggagatattgcgaatgactacgcatagcggttggttaatactaatggaaagacatagctatggacttgccttttccacagacgacgccaaactattgacggtaagagcccgtcaactaaacttttgttagaaaattaaatgcaaaaagataaagataaaaagcttaagagaaactaagaacatttatggagtaaaataatattgtattgaatctctaagctcccttacaaataatatattccaaccccttctttaatggaaggtaagtgtatttatagggagctctaatggcttcaaaatacaagtgatcccgaaagttggaagataaaatttcttttgtacccaaaagatcagcgtgtcagtggggtagtagagaagtggtggtcaggtgtcagcttgtaatagggagctctaatggcttcaaaatacaagtgattccgaaaattgggagataaaatttcttttgtaccatgaagatcatcgtgtcagtggggtagtagataagtggtggtcgggtgtcagtttgtacctcgagtgaaacaaaaaggggtgtctccactacttgtacattcgtacctgtcgtacatccactcccttcttagaggtgtacttattggacttgtcctttattatgtattcatttgatatctctcctatgatagctaaggctcacaaggtggaaacaacactaaggtggcatttggttgg

SEQ ID NO: 222389 - DNA, 2362 bp, Cannabis indica
ctttggacatgcacttgtaacctttgtgagagagactatatcccaaaaagacacaaggagtggatctatactcaagtttatttctattatagggtcttaagtttgggtaacataggcacccaaagactttgagcagttggtaattgggaggagtgtgaaatagtgtttcaataggtgtagagtattgaagaataggtgttggcatcctatttatgagatatgcagcagatcggaaagcctcatcccaatactttaagggaagagaagcttgagcaagtaaagtgagcccagtttcaactatgtgcctgtgttttcgctcgacaaccccattttgttcatgtgtatgtggacatgcaagtttgtgaacaataccagatgtctctaagagtgtggtgaaggacctaaactctcctccccaatcagactgtaaagtcttgattttggttccaagttgaagttcaacttgagttttgaatttgatgaatgtgggaagggcctcatctctggtccttagtagatatagccaggtatatctagagtaagcatcaacgaaactgatgtaatacctataaccatttgaggagtttgtaggtgcaggaccccacaaatccgaatgtaaaagttctaaaggtgcagagtaagttgtggtggaatttggaaatgggagtttgtgtgatttaccaagacaacaagctttgcaaacatcaaagaactttttattggaaacaggtatattacatttggataaggccgttgtgacaattctagcagcagggtggccaagcctgctatgccacaaggagaaaacagagttatttacatcagtttcatgactgttacattgagagacaataggggaaatcgactgagatgaggcaggcacgggtagagtgtttggcgtgtgagtgagctgactggtttgaaacttgtagaggccattatcaaggttcccaaccaacaaggtcttcttggttgcaatgtccttgacacaacaagaaaatgggtaaaactcaaaaaatactgcattatccagagcaaactgagaaacactcaacaagtttttggttatagaagggacatggagtagatttgtaatatgcagctgtttagaagtaaaaggagagtttatggaagagttacctatgttttcgatgtttaaccccatgccattgccaacataaacttgctcattgccagaataagggttgctggtgttcagatttgtcaattctggtgtgagatgatgtgttgcccccgtatctggataccattgttcatctgagaccgattctggtgtagcatagagagcttgaatctctgctatattagccgttggactgaagttggtgaagcattctggccctgtaaaagacttgtcgaatcgataaaaacactgtttgacagtgtggccaagcttatggcaaagctggcattgtaccttttgtccccagttagtgttctgacccctgccataaggtgcagaattgcctctatttggtgcatttgggaagggaccacttgagacacggccactggactgtccatttctagctgctgaattgttgtatgggggaccacttgaggtacgtcctggaccattgtgaaagcctggtggtatagctgggggttgataggatgaacgaccatagttgttttgtccagggtatcgagattgggacagatttgcttcagcttttgatatgtcaagagacttggcgtttttctctattcgaaccgactgagccattaaaagagcttccacttctgctactgtgtatttttcctttcttgttgtaatcgacgtgacaaagacatcatattccggaggtagaccattgaatattgcctcgatatgatcttgagtggtttgtgtttggccaatggttgcaagtcgatccacaatgcccttaatcttgagaagatagtcgccaagagaccctgtcatctttgtgttccgaagctgggttttatatagacctacatttgctgcattcaacgctgtgtagtattcagtcagattctcccagatctgagctgtggtgtcgcatccgatcatccgattggtcgttttctcagacattgaagacaggagccaagaaatgagaagattatcttgttgttcccattcttcaaagtctggattaattctgttggatctttcatcagtttctgtgagaaattttgctggagcacgcgaatcatcaagaaatttctggagtttgcttcctttgattgaagccataacctggtgtttccagggaagaaagttgtgctcatcgagctttatggacaaagaatgattgaagaagatcagttgcgatcttggtaagggaacttgctgattgttgagtgtttgagcatt

SEQ ID NO: 222390 - DNA, 1951 bp, Cannabis indica
catgatatcatcacattgtcattttttttgaataaggaaattgtattgctcaaaactatcaattacactcccagtttatgtacatatccgacttctatatcatatgcatctactaacaaaatattacaaggaaaattataaattactcaaccattgcctatctacatcctttgttttgcttggcattacccctgttagtctatttttgctcccctattttactctatctacaatgacacttacttgccattgcctttgattccacaagacatcattccttgccttccatacctggtatactaaggtagctactattatcttctttatgcttcttctaactgctgacacatttttcatcttgctggaaatttgcagcagcttttgtaagccgattgctggtgtcccccagctcaggttcctcttcacttccatcagacacttcctgctgtactcacagataaaaaataagtgctcaattgtttctttttctttcccagacagtagacagattacatcaacattcagatcatatctactcactctttcttttgtgttcaacctaccccacagcaccagccagagaataaatttatgtttagggatgatcactctatcccacacataatgacaccagtgcttcttcttggggctactataaagtagctgataatttcttacactaaaattctgcaatgtgaaagaagccaagtcagttttaagtttcagttgattcttaacttcaactagctttttccatgcctagctacaatctgtgggagcttcataatcccaccaatgtttgtcctttagatacacattgtgtatccatttaacaaacaaacagtccttcttgttagctatatcccatacatatcttgtcatggctgctatgttccacttttggatgtttcttagtccaagacccccagcccctttaggtaagcagacctactcccaagccaccaatccgggtcctgcaccagcttggatccctttccataggaaagatctacaaattgcctcaatttctttgagaaatttctttggtaatagcagaatctgagcccagtatgcatgtatggatatgagcacaacattaatcagagttactctccccatatagaacaagtttcgggtactccacactcttatcctaccaaccattttttctaggataatctgacattcagaaattgatatcttctttgagcagatttgtattccaagatacctaaatggtagtgtacttcttttaaattgtgaggcctcaagaattcttcccacttcatcatttgacatgcttgagcaatatatggcagttttctgttcatttagcagagaatagcttgagtcctctcaacatcgacatgacttaaacaaagtctccatgactaaacaccaagagatcatctgcaaaacagaggtgattcaatttcaaagatgaacatctatcatgaaacttataaccaggccagtcaccaatcttctgaaaaatccgagacaaatattccattcataatacaaagaggagaggagatatgggatctccttgtctcaaacccctctttgcattaaaaaatccacacatagagccatttaataagagtgagaattttggtgtcctgatgcaaatcagtatcagtttaatgaaatgattagaaaaaccaaactccatgagcatttcttcaagaaatccccattccacagtgtcatatgccttccttagatcaatcttgatcatgcaacttggcttgcaatttttcctcccataaagtctcacaagatcttgacaaaccagcacgttatgagcaatatacctcccatgaacaaacctccttgattctcagcaataagatccggcagaaccctccttaacctattgcaaataaccttcgtagcagtcttgtagaggacattgcagcaagattttggtctgaaatccaccacactc

SEQ ID NO: 222391 - DNA, 2480 bp, Cannabis indica
cctggtaaaatatttctaacaaccacgtcccctcatcttatcactcaaatgatttttgaggtcacccccatgtggccttgccttctcactcttgaatctctcttactttgcatctaatcgtcgctgcaagtctacaatggaccaactatcgcgcggagtgacctgcggggattctctcgtcctagttaacagaatcactaggaggatctcctcatcttctaggcttgggtgcctttgtagttcggcctctcagcacggtttttccttgagggttagaagggcatccaaacttaaaagcatcggtggccttctccatccttgagggctggctggccgacgtgtctttgcgtggaggcttgggagcagatttttgtgggagctcattcaccttgcctttacccttgttcttgcgtgggtttgaaatttcagcttcagtttgtttatgagctcgcctttcggccacgacttccaccgagggttcctcatttgtttcagccaagtcatcaaacttgctctgaagttgttccatcattttcttcatctttgcggtaagttctctttactctgctaactccgcctaagtagcttctgactcttatgttactcataacagattagggtcatggtcgtagtagtaaccatctttggaatacccatcttttaagtattcctcatcatctccttcttcttctccacctcaagggttttggttatcaccaagatcatcgacaacattctcattatcccctcctcggttctcagcagaggttgcaccttctccatcatttcgtgtctggaagtcggcggcatgggagtcggcttcctccataactgtgtccagtggagctttcttgccagggtttttcgtgtacacaccatggttgaagcgtgatgatagttactagactttccttagttctaaatgaaagtaccaaaatatttattgagatttttggaaaaccaattaataagaactcaaggaaataaaagatagtaaacggtagataaacagattttttacgtagttcgggcgtaatgattcttagtccacgagtcaatagtattagcctcctagggcgaatatttgagtattacaagtgtttgcaataaataatctctgtattccatttgtttctctttaagaagaagctctctaggaattttagtagagtttttgtaagtaaaaattttcaccctctacttataaaaaatgagggtatttataggcattcatgtgggcaagggcataccttttacccacctagggcttcgtactctactcactacaagggcctatcctaccgtaggacgatctgaccattggttgataagaaccttcttcatcgtatggcgtacagctacaatgagggatttcgtgcaagccaggacacgtgtcgtgcaaaggtctctcctttgcaaaatactctctaactaggccgttgggaaaaaggcatgtccagagatgcgtatgcgcactaccacgacctagcatgggggacaagatctgatcttgtgtcagaaaaaggtgtagccacctatagagccattttcatatgatgttgatgtggcaattgatcatgagactactaccatgttctgggaccatcacctaagggatttctatccaggagccatctaccttgattacccttcgggttcgggatatgtcaattgtccgcaaatagcctgtttcatcgagtgtctagtgcatgtttctaggattgtcaagatgtccccttcgggagaccttacgagttatttcgattaatcctttcagctaatgcaccttgtcccttaatcatgccacgtgtctcatgtgccaaaatatgaataacaattgtgatatgaataattctttcatggtaaacgacatgttaatgaaatgtgttattaacatgtcctttactataaaagaattattcatatcacaatacatttactacatgtctattcacatatgtaatctgaatcaaaatcatatacattatagtgcaggggtggacccacatagaggcgaggtgggacagtcacccctaaaaaaattggaaaaaaatgtatatgcattttagctagttacaacatatttttctaaataaaagtgatatcaataaacataatacaagttatggtataatggtaaagttatttcatgcacataatagaagtcatgagttctaatcccaataaaatcatatttattttagtatttgaattttactttttgaacttctattaaaaagagttatatatttagtttcttaattattaaactcgatatttttattgttattttattttttttactttatactacatttagtactataatacaaatttgcatcaattttttaacatgttatataatatagaaaaaaaaaagatgcccccctcacttacgaaaaaaaatgtcggcctttcaacttaaatcatgggattgcaactagttttatgttaaagatcttttactttaatatactacc

SEQ ID NO: 222392 - DNA, 3625 bp, Cannabis indica
atctttccaacctgacccccattgagacaaatgttgagagaagtggtggaaatgcattgagagatccaattacggaacttcaaaggagtccctacgcattccatcacatggtcaataaacctcaaactcatcctatcataagctttgacaagatcaattttgattgcaaatagaccttccttgcctttctttctgttgaaagagtgtattatctcttgaactatgacattgttatcatggatgtttcttcccggaacaaatgcagcttgagtaggacaaataagcggaggtaacagaggtttaattctattagccagaatcttagaaataaccttataaaccacattgcaaagggagatgggtctgaaatggtagttcttttcgggttctggacctttggaacgagaaccacattggttgagttgatacctctatgcatattcccattaatgaaaaagtcagacactgcctcacaaaaatcaccacctacagactcccaataatgcttgtagaacagaaccgacattccatcaggaccaggagccttatggctattcatggcaaataaggttcttctgatctcatctgggctagggcacgaaatgagaggctcggattcttccaaggagaatctctctcggaataaatgactacaatcaaatgccatgccaatgtccgctccagagaaaatacctttgaaaaagtcgatgaattctctaccaataagctcacgactagatatccagagattgtttttatctaaaatgctctcaatggcatttcttctacctttaatggcagcagacagaaagaaaaactttgagcatttatccccgtcctttagccaagaaattcttgccctttgtttccagtagatcgcttttctttcctgatattcgttcagctcacgccttaaatcacattctcggttccagtcccgatatccaacaggaagactcttcagaacgttgagcttcttttcaaggtccttaatgaccaaatctagcttgccaaattgggtacggttccaatgtatcagagcgacccttgtggcacccacctttttaaacacacgggctgggggccaaggatggttgactgacttccaagcattagcaactaccaacttgcttctctcatcacgcgtccatccttcttcaaatttaaaccatctccggaaccttggatccttgccccccgaaagaaggcaaagaggcatgtggtcagagttactagtctgaatagaactgagaatcgctctaggaaaaagattgagccaagcgccattgactaaccctttatcaagggctgacttgacatgactccgaccagagcgatgattatcccaagtcatcttatctccttgaataggcaaattgatgagaccacaagagtcaacaagattagagatgaccgggataaagggatctcgacccgagctaccttccctttcagaatcactgagaacaaaattagtatcgcccaagataagccatgggccaccaaacttatctcccaacttcaagaactcagtccaaaacaatttcttggcgttcatatagggaggaccataaacacacgagaggagccacgggtgactaggtacgtaccagaggtttagcatccacttttagctcggaaagaaaaacaaaatccggagagcgagctctgatcagggacttcagttcgagaactgtagaggtctgccccaaccctctacaattccaagcaatgcctctcatggctcctgtggaggagattcgagattctcctccacaggggtatgagagtaagcagaaacactggagccagagtcctccacaataaacgatccaattaacgggtttttcatgattccagatcggcttggggattccgacgagtcctcagacagctcatcatacacctctcttgaatcattatcacgttgattagtatcccaagggaagtcacgaacggcatcaggatgtttccgatgaattttgtgcggcctcgaacaaagggaggcagaggctacaaattttcttttcttgaaaggagtggtcctctcattgatttccgatgaagccgggactccaatatctcctccaatcttacgaatttcatacaagtccaactccccaaaatttttaagatcatgtaataatttttcttgagcatgaaagaattttgttagagccttctcttcatcagagagcactttggcgtcacaaacaccagcaggaacaatagagggaactaagaaagtgggctccccagcttgcccgatcccttcctgattattctctccattattattaactaatgaagacaaatataaatccctctgtttcccacgtccaccttcaaaggatgcaagcccattatcctctttcaactcaggcccgtcagttttaaaagaagcatcaggtaaggtaggcccacttgcaagggaagaaccaccaagtttggcccgctcattagaagacaaacacggcccaagaggagtcggcccaatacccagctcactaaacccagtcgggttgttggccacatcatcatactttaaattaccaggcccacctttatcccccaaactcggccccttagaactaggcccacaagaattattgaattttaccaaatctacccccagctccccacaatggccagtcaacccattcaccaccaagcccggcccaacagaaggcccaccattcactaaagccatattaacggatatattattcaaatcagcttccttccccattgaacggtccacctcatcaactcttaaaacaggtaatagctcagagcctttctctatgtcctggaaatcagtctctttgccattactcaaaatgggaataccattccccaagcctgcagagcgccgtttagggaaccacgccggtcgttgggccttcccaggagcagccactgcacgcgatgtcacattcaaatgacgtctcggacgtcgatgcttcacagctgggttgtccttcaaaacaacaccaccgtcagccgagtttttcaacaacgctgcaaccgcaccaccactattaagcacactcaagggtgctgggaaacgagcaccaccattagaaggtcccgagaacacatcaaggtacgccgaggacgtggaaagccacggtccatacatggggaatgggactccatcattcttcgccaccttaaccggcgacgataacgtacagcccctgcgctggtgacccagacagccacagaagtacagaatataccaatcttaacatacttcacttgtaaccatgtttcacccagaattcaagtcgaaaaaacaacctgaaacaaggggtttatgaacatcaatgtccaccagaatcctaaggaaagaagtccaagtggctgatttgtcctcctccaaatctatcttaaccaccttaccaacccgtccccctagcaaatcgccattatcacgagagaagtattcatgtggaaggttatggatttgaatccatactcagagcaatttgaaagtaataggcccatccacgcttggagaccaagcttgcagcaccagagtataaccgcgaacgcaccaacggccattaccaagagcccagtctctgacttcagcagatttgcatcttagactcttcacacc

SEQ ID NO: 222393 - DNA, 1549 bp, Cannabis indica
acactatttgttaataatactcaattaaagttaatacattaaattataagatctgatatttaattatactaataacaatatgatatattgatatatactaagaagaatatataactatatgagaaatgctaaaagacattagtattgacgagcacccaccatatcatatattggtacaattaagtattattagatcctatatatagcttaaggtaataatttttagaaaaaattgttaaccaatcttaaagcgctacctctaacggtatcattagttgcccaataatatatatcattattgccaacactttacataactcttctagatctctctacatgtatttatgaatatattttatatctttagagaaattcaagcatatattcaatgtaaagccaaatttgaaagaataatagataagagtatctattcaataataatcaaaagaatagatgagtattcgagaggcccatactgtcccataatgcacctaaaaatctaaagttttaaaaataccattttaatttacataaatggaaagtacatatttttcatagagtaccaatcatttcaattcattccataaaattaatttattaaaaagaaaaatgaagagtaatataatggttgattttgagagaatataaatttaagtggatttatttatcttccaaacaaattaattaagcaaagtcattacaaatatcattttttgaaatttaatacaatatattaggcttacgtagtagttaactcgtcttcttattcttccatttttttttctcaattatatttgaacttttatttactagttttctttattgaaatttgcttaattaactatttattaatcaatattttagtaattttattgatttttttgttctagtattactataattataaatttcgaagcttacttatgtagtaaagaagatctcctaaaatgggccagcccattattaaagggcaatagtactggacttattgggcttttcttctacttcatgtactccacacacaaccacctttgacaaatcaacctctttctctttccttgctgctataattctctttgtagacttgtagaacaaaccataaattatcaactgggccagcccaaacattaagcccagcccattgggtatctgcaattgcaagattcatcatttaacaaaaaatgactgaaatgaaacatgatgagttgggtttgttaaggtaaacaattttcattaaataattttttattgaaaaagatcatatttggactttgtaatttgtatattattcattccgtctatatttattaaatgataattcagactctgtgttgcaaaaaatccaatatatgtatataataatatttggaaatttctcttcttaaccctaaccctatcaattgtggcccacaactaatctaattctaatcttacaaaaagtttgaccaaaattgggtttagtatatcgttatatgaataatcaattggtaacttctgtaaaacacagacgaaatgtgaatttgataaataccataattatgggatcgaa

SEQ ID NO: 222394 - DNA, 1972 bp, Cannabis indica
ttagtcacaataaaaaattatttttgactaaaacataacatgtagacacaagttgtcactataatttagttttagctagtcacaacaagtattgtgattaaaaatacatttagttacaacaaattataatttttgtgagtaatacctttagccacaacataagaataataatttataattagtcacaattttttaatttacttttagtcacaagttttgtgactaaaaataagattttttgtagtgataatattaatttttcacgtattatcaatatgagactcactagcggtataaaacaaaaatctaaaatggtacataagtttgtgtggttgatgattttcttaccttgtgttcagctatgtcatccatgagcctacaaataataacagatgctctaataatctttcgatctttggagagccactcaaaaacatctttggttacaatacttgttttcattccaaccaaagaactcactatcaacatatagtaaccacaattaatggttgcaaattccatgtactcttcaaaatttgggacacgtccactattcaaccatccagcttcatcaaaatatgatcggattaactctttaaactgttaattagtaatttaaatggtgagtagtacaatatataaaaaaaaaatcaaatgataagaataatcttaattcatcattattgatataatccaaactataattaagtcattaattaatttattacgtaccacttcttttgcataatgaactctataagtttcttcttttgtaagcacttgctcaaactcttcataacaattcaaaagatccttataaaatgttttcaaatattcttgattgagtgtatcaatacaatttatatcccacctatatataaaacattatatatacacaccaattattaatatatgtataaagagaaagacaatattatagattatttgagtaataataattacaaaaactacaaacctttcaattgcttgagttaggagttctaagttcttcaaatgttccatatgcatcataaatatcatcagcaattgaggaaaaaagctatgattttgactaaaatatttcttgaccaaagagtattggggttcataatagactcctaacatccacagatagagctccacaattctatctcttgcaaaagggaatttttgtacaaagtttgattctttccaccacctaataattatatagatatatataatagagattataactaaaagattttagtaattaataaaaataagatttatactcctgaactatgatacttgtaggatttttctctattaattattatttttattttttgttcgaactatggaggtaattgcaaattttctctttcgatttttaagataatttattaatgtgatctcgagctatatgtataattacagtacaagggtttattcaactaatttaagctagctgaaatcaattataatgattttaaatattgaaacattaactgtaaaattatgagtacaacccttgattttatagttagactagtattataatctatacaattattattttttttaactttcaaattatattaaattagctctagatcattggtcttacattaggaaaatgtggcaaaatgaactaaatattgcaaatgaaaagcgcaaatttataattatgacggaaaaattcctataagtgtcatagtttgagaagtaaaaattctatttattcttaataaaaaaatataactaatcataattaaaatatatatattatacatacctgctgattttactaagctcctttttgtgtagggattgtaatagattaaaatctaactttgcaagttgtagcaatactttgttatgtgaggcatctttttcatatatcgaaatgaaatgcttagtatgaagattcactagggtctttcttaagggcctctctagggcacgatatatttctttcgataatggatca

SEQ ID NO: 222395 - DNA, 3170 bp, Cannabis indica
taaattaaaataaaaaaatttaagagagaatagatataatcatttagagtaattttagaacttcaattctatatatatatagaaaggataatgcttaggtagagtcatgaaaaatatttgttcttacagacattttttccttatgtgtcactgtattgttttataccaacaattaactaatttcttttaaatattgtttttatttttttttgaataatttcatgacccttaataaaaaaagttactatattcaacaaataatacccttaataatttatctttatcttttatttttatttagaaaatgtattataattttgaggatatagagagacgaactctagacctctgactaagtatgggagcatattcttaataaggctttttagtctgattttgttacttaaattgtatttgaatatgtcagaccttaacaaaaaaaaaaaaaaacaaagaatatacctgctgaaaatattttctaggtccgcccatgctgcctgccctacatacaaaggaatcccttaagttgtatgtttaaatatatgaatataagagatttcatattaagctacattatgaaaactgcttaatttaatcgttgtcatattctcacaacatgtagtacattgatattatatatagaatatatatgtaaatcaaacaattggtagatacaattttacctcttcaaccattcataagaaactcatgtgaaaattttaaattcttgtaaatcattcatgtttatttgttttatcatctaatttgtatactatttttttttaaaagaaaataaaattaaattgcgtatgtcttttgagcatgaagataaaatgtctaattcccaaacaattgaagataacatgaaaggatatttataatattttttttttggagttattaggggtactatttgttgaatatagtaactttcttcattagagtcacaaaattattaaaaaaagaaataaaaataatataaaaagaattaattaattattgatataaaacaatagtgtgacacataatgaaaaaaaagtctgtatgtacatttttcgtgactctacttaagcattatccatatagatatagatattaatgataaagctattaattttttttatatatatatatatattttaataaaattattaatcaaatatcaagttttgtaattatgtattgagacacaatattaaaaattgatgtaaatataccataaatttattttttgaactaaatataatataattttatatttttattgaacatggtctaagatgataattgttatttataatgataaatttttggtaattggataaataatttggggagatttaataggaaaaaaataaattaaattagaccacatatataatttgtaccgatatggattgtaaattcaatcaaattagaacctttggataatgtatgcacatcaaagtaattttatcggaaaggtggattctgtcataattgtgtcgttaacggctttgttcactataaaccattttctttcctaaaaagttaaaatgttaaagctagtgaaagagtggggacatttgaccaaaaagccacgctccactttaataagctcttctttctcaaaaagaaaaacactcaagtactttatactataaagctctaaaaagattaaatacaaatgcttcattatatttaattgggaggacttgcttccatttttacaattaaattcaatacaaatgttttcattgcaaccattttttcccttttctttttcattgtcattatatatacaaataaatgaaagaatatctaataaaaagaaaacaaaaattaaaatgaaaagatggaaactgagagagacatatgcaaaatgaatgagcaccacttttgggattcattagttttcactccaagagtataggcatcacaacttttgcaccaataaaaagtatcttatcgtttattgtaagtaaagcaaagcaaaccaaagccaagccgaaaaggacaacaaaagaacatgccttttctcaccgttttctctttaggtttaaaagttaattagctctctccaactccgtagaatacttttcttcttcattccaaattcaaaaatgtcaaacgacatttgtcccacatcgaaacgcagagaaatagtcatcgtttctgatcagaaagaccaagatctcctcccaggcttaccggaccacttagcccaagtctgcctttccctcgtcaacccatccctcctcttttccgtctgtcgttcttggcgtcgtctcatctactccccttccttccctcctttcctctccctctacgctcttttctcttcctcctcccattccaaccaaacccacctcaatttccacgccttcgaccccatctccactaactggcgcgtgcttcccacgccctcatctggctcttccctccgcctactcctccgtcacccttccttcgtctctcgcaatctccctgtacaatctatcgccgtcgccggataccttatcatcgtcgccgcaaccaccgataatctcttcccggctcttccgctgccactcgtattcgacccaatattgtgcgagtggtgtcacgcgccgccgctatctgccccgcgcaggtggtgtgctgcgggttctctacgcggattggtctacgtggcgagcggtattggatcggtcttctcgtatgacgtggctcgctctgttgagaggtgggacccacgtacgggagccgatgggccaggttgggagagggttagcgatctcaaggatggtagattttgtcgagatgccattgaagccgttgggtggagagggaagctttgcatggtgaacgtgaagggggaatcgattaaggacggcgtcgtttatgatgccaatagcgacacgtgggaggatatgccggaggggatgatcggagggtggaggggggccggtggcggccatggatgagtacgagatgttcgtcgtggatgagatgaagggagctctgaagaagtacgatgcggtgagagattcttgggctgatgttattgaatcggagagcctccgaggagccgagcagatcaccgccgggggtggtagagtctgcgtcgtttgctctgggttccggtggaaaagggatttgtagttgtcgatgtgacagctgtgccggcgaagttgtggccggtggaatcg

SEQ ID NO: 222396 - DNA, 1426 bp, Cannabis indica
cactcaccgaaacactaccaaacttattcaaatcactccaaacttcacaggacgcatatataccataaatattaccatccctacgtaatagaaattaaaatcgagcccttaaatgaaaaatgccattaacgtttggactaagctttaaaaagttctaaactcaatttctaacccaaaatcacctcagatttaacaagacaatatcggagctagtcccatgactacctgagaacaatcttataaggtcagaaacttcataattattctaattcacaaagatcctgaggagcctcaagtggagatcaaagaccctaaggaggttgatcctcgggttgctcagctcagccaaactgtggctgacttgcaacaacagatgcaagactctcttgataagtaacatgaacagtttcaacactggttcatagaaaattggaggaacattgaaagccagcgtgttgagcaggaatattggaatattagagagttaacttatctcaacagattagagaagcttatcgctttaatcgcaaaactacttcccatagaggtttattcgagttggtgagagagactccttgtcgaccaattggtcatgtggaaactagtgcccaagtctaaacccttaatgctcgaaacaccactgctacacctggtaatcgagcaggcactaagcaaacaccaggatggagatctcccaaagggaaagtacctttgagcaagagctcgagaggactgaagctcgaggtcaccaaccaatgggccctctacatgatgttgaacaacctcacaataacgagagaaccaataggactcctccacccagtccttctcaacgttcacatgatgtcaggccctaagaccctacaaggggaaagggacgtactactcaaaatgaatgaggtagtaggagacactacttcaaaactggaggctacgagatccagtagataaggaccaatgaactacttcatactcaaaaatacttccgagatgaaaggggcgagttatgccattacattgcctgtggccctgatggccaaaagtgtgagtacttccctcgagtacatggagaagaattaaacctgagcaaccaattcaattctttacacacttgtgatcctactgaagactactttgagggaagtagttgttgagagttatgccctaaaagaaattaattaataaataatatattagagaatatataaaatacaattataagataaatgatatattaattataacagtataattatgaaatatatgaaaattccttattcatatggagaagatataatcttgtaaggatgtacaagagaattaaaattatacgatatgaataaaacaagtcagtagtgtattaaagctttgggaatctttaatatagaactgctaactacagcttactatacaatatacttctagt

SEQ ID NO: 222397 - DNA, 1215 bp, Cannabis indica
taacgagcctcatgttaaggtatttgcgttttgtttgagtcacatatatatggacacctcatacgcattgacaacattatgagatatgagagtccttatcgagtcatcgaatacgctttgtcgtttgaacaagttcattatgtaatgaagcgatctttactcaatcgcaagagaagctacctaatcatcgcatatattttgatatatgtgcgatttgtataaacccctcttagtcctgcttattttattctatgcgagacatagtatgtgactagacgctatcaaagtcacatcatctcgcgaatttgggttaagcaaggtcaactctcgaggagtctttaattaacagctcatccatccctcaaagattgaatacacgtgtcaatttcataagagactgatctcgagtttttaggtgaaaatttcgcagtataacaatacttattttagtcaaagatgtaaacaagggtaattctatttaacctatgattatatatgaagctcgaagagtgagcaatgttaacgttacatttattttattcattcaaaatgcatatgataaaacaatatgtctcttaaaatgaacatgcataaaaataacagaactcgccctaaataaactaattaatttaagatgtttgtaaaattattatgtacattttaagttgatttatcaaaaatgtatcatgtcattattcttatttatttgagaatagtaataaaagttattggaaaaaatttgcaggataagattttggtgaacgttcgagtattgaccatcttggattgtttatattacatgtctccttaattatggatgaagtagcaaacaaaaaagtttgagtgttggacgcaaaagaactaattactactaagcaccctccttgaaaaataaaaagcaaagcaaaagcacttgtcattaatgacttatccttaatacaaaacgagtcgagtcgagtggtggaacgtcccatattggttaacctataaagctcatattgctccacatttagtctaatagacctcatttttccattaaaatttgactcatgacctatttttttattattattattaaaggagaaatgtatttcatttcatgcatagctttacttaagttaatgggtacttagtgttcaattaaagaaaatatattcgaaaattaattaaaattatcatatactatttattttaattaaatttacgttttttttg

SEQ ID NO: 222398 - DNA, 2845 bp, Cannabis indica
gaatatgtcaaaattatgactgctgtagtctggactttgtattaagaatgtttacttgtttagttgtgagcactgaaagatttttcatattgccatttgtcacatgttccttcatcacccttacatcaaatgttttgagccactcgtaggcacttaagtagcatttgccgattgctgtagtttccaactccccaagtattttagggttaggaattgagcctctcctatagtagcttatcgtagctaacagatgatcttcaccaaattgggtcagaatgtagcccgatccgaacgcaattatttgaacttgggcctactgagtgaatatgagggattttttggtatcaaaataagaagaaaataagtttcattattgcattttttttacatttttgtagtttctacttttttcatttgtcatcctattagttaattgtcaatgctgatcacttaaaatatgtcacttaactgttacaaatatccaattttacgtaaccttttttttcccctcgagcaagtatttggtcactttggttacccatctgtacccaattcttaaaaaaaagtagtattggtttaagtgaaaaacatttaactagaattcgctaagcttcatccctcttatttatctatgaaaaggtgataaaatagtgatgtttcaagcaaaaagaatataacaaataagaaggtggtcttatttttggtaatggctttttgcagattcgccctgaccgtcaaacattgtactggagtgctacctggccaaaagaggttgaacaattgtccaggcagttcctttataatccctacaaagtaaaacacttgaatcttattgttttaatttgtttacttaccattataacaagaaaactatgttctgtattgacacttctattggactctctgaaggtaattataggatcacaagatttgaaggcaaatcatgcgattcgccaacatgttgatattgtttctgaaaatcagaaatataacaagtaagattgcatttattttgttcttttccacaataaatctataatgtgatttgaaggatacttgttgatcggttgttttttgttttcaagattagtgaagttgttggaggatattatggatgggagcagaatactaattttcatggacaccaagaaaggatgtgatcagatcacccgacaacttagaatggatggatggcctgccctttctattcatggagataaaagtcaagcagaaagagattgggttctctccgagtttaaagctggcaagagcccgataatgactgcaactgatgttgcagctcgtggtctaggtactgtgctaatgtattaagtgcttacacaatgacttaacaatgttgttttggtatatcatgtcagtccacacactttgtttgtattaaagacaatctcacagtattgaagtggtctttgattccagttactttttccgctcctaggcccctaaaatccattgcatcctatttcacatcccaagtggtctttctgttatggtggtatgtatttttgtttggtttggaaggtatgattctaattcttctgtactttttgatttgttgcagatgtgaaggatgtgaaatatgttataaattatgattttccgggatcccttgaggactatgttcaccgcattggtcgaactggaagagcaggagctaaaggaacagcatacactttctttacagctgctaatgccagatttgcaaaggatcttattaacatacttgaggaagctggacagaagatcagtccagaattagcatcgatggggcgtggtgcacctcctcccctttcaggtcagttgctagaatttgactagtatggttggcgctaacaaaaacacatactgctacatgtataataagtgtggaatgatacaacattttgggtgtgcactgtgaaatggtggattataattttggtccaagtttggaaccaattattttccataacactgtatcgtattggttgtgcgttcaaagtctagacacctaatagtgcactttaagtttgctaatttgtcttcatttcgctaatgcttgtctttattttcttccgttatattgatcatcaggtcatggtggctttcgagatcgtggtagaggttttggtggaagccgcccgtggagctaagagctatggttgctgtgaagaggaattcagaatcaagccaagtcaaggtttgggattaactagagtaaatgccggaaaacatgtatgaatctagagggtaggtctacagatacgtttttcccccattggacatagtgtttatgtgctttgtttttagcttcacaaactgtagaagttgggtagttagtacccaaaatgtgtaagataaaaacatttgttcatactataacagttgcatcaacaattgctaaacaaaaattttcttcacggttgtgtatatagcactccattctattttcaaaagaactcttccctttccaatccccaaattggtacactgaaagttggactaaaaaaacttcaatagtgatatgagatgattacattgcagggcatatgaagctggagttatttttaatataatgtaaatcatgtgggattatagagctcagctatgtattgtattgtatatgtatattttgtatgacccaaccaaagcctacaaattagttactttactaaaagctttctttaatataatatttgggcattttacaaaaatactgcatttgggtaattgttttcaattttactgccacacggcagaattaacatttatattgtcctcccctttttttttcttttatactgtcaacaacaaaacaaaagtatgaggcctccatctttgacaa

SEQ ID NO: 222399 - DNA, 1733 bp, Cannabis indica
actctctctctctctctgtctattgattatttgttaaattgtatccttccattagcatacgtatataatattctatttttaatattaagataataaaaaaaatacagaaacaacaaaaaaaattacaaaaaaatatggttgaacaaaattttaaatatttttaccgttttttaagattttatttacataaaatacggtcttttaatgtatttttatgttgtgtactcttattttgttgtttgatttttcattatttgtatattatttttgtatattattttattattatttaccataaaattataaaagaaaaaaattaaacataaaagtgtaaaaattttatcaaaaattacaatttatatgtaatatttcttaattattattctcaaaaatattattatattttacaaaattaatgttgtatactaccactatacttattatatattaaccataatttaacacctcaaatggaagaatattgatttgatcattttaaatgagatcatttttcatcctcttcgaataacttttacttattcgacttaacaatatattaaaatgtttttactatgataatttacatgtttattattatttttattggacgtaataatatgattatacttatgcttattatgagtatagtttattaaaaagaataagtacgtaccaaacttttggagttaggagctaattattctcaacttattatatattgattttcaaacaaaagttaagaatttacattcattaaaacgtgtgaatattaatgtgtagtgttttttcttattttttttattcaaattaatatagcaaaataaaaagagactattaattaatgtaaataaagggatgttaattaagcatagacatctaaacaccagcttctttaacttgaaaaaccccaaaatgaaaattgaattaattttttttttttgttgaaaaaaatatagttcaaacagtttgttgcacatgcaagtactatttaattttttatacgtgtgaaatagactgtttaaacactgctttctataatttaaactattctgaatcttttaaaattttacaaaatatcttaaataactaaatgtttacaataaaaaatttagacctaattttttttttctagataccaaaataaatattagaactaggggtggacaacatctattccaattcaattgaatcgaacctatccaattacactggattcaatgctaaaagctagattctaattggattagatcagttactggatgtcaatctcaaattttaattaaaaacagattaaatccaattacatttatatataatagaaattatttatataataaaaaatatttaaatataatatatattaattatattttttgtattaaatttgaaatacttggttattttgtgtatttgtttttatgatgttttgttttattatttttatttttatttttgtttgaaaattaacgtttattaatcataaagttagacaggtcattacataaaatattcatagggatagatgccacatcaaagcacccaaagcggttatgggaaaacgcccatctggctacattgtgagccataaaattacaggttctgacagtaatacatagtaaacagctaacaaaagataaaatgattctattacaaaataaggaatagttctcaatttcccatttagagtcgtagccattaagcgaattgatcactactttagaatcgctttcaac

SEQ ID NO: 222400 - DNA, 2363 bp, Cannabis indica
tttttaatatatcgagatagaatataaatgatttttgtttcgtacatcctaaaataactttttttttaaaagctaatggagcatctaaaattttaggacacatacatgaactcctaaaggacaagtaatgaactttgccaatgtatatgctacacctttcaaagagcatatagaatgacataacaagtaccactaccaacaacagctagtaaaataattacttcatcaattaaatgtgtaaagacaatctttctatgaggattattaatccaattacaaaccatattactttgagtattttgccttggaaatattgaagcctaaaagagatgttgtaatacctggaaaacctaattatgaataattaagatttattatatataaatatggattaattagggtgcaatgagtatgattatgattctactaatgtaattcaacttaaattatacaattttgccataagtggattagtaagcctaatttattaattacggagattttattagaaagtatggtatggtgtatgttatttataaaataaaaatattttcaagtttggcggccttggagacctaatcggaggtttaaaacgtcacaatagttttagttagtaatcttagtgagattgttgagataagttagttttaaaattaccgagatattttaaggtactcgtggttgaccaaatgtcctagggttaaagttttattaatggtcaggagatgttttgtgctgcacctgatgtgtattttgacttacttttgtatatagcccttttgtaaaaaatttgtaaaagggatcctcaaaatcaaattttagcaatgtaatcatgttcatagttatggttttatttcgatgaagattttattatcatcacgaattttattaaattgttaatctactattgcaaaactatgttttaaaagcacacatgtggtgtccctacgaattaggacattacaacttggtattagagtagccatggtttaataatcctgaagaatagttggatatgtacatttgttgtgaaggcaggtcgactcgtggtatagtaagtgttatgtgtttatttgttatttgattaattacttacttgttatgagccatgctagaaaagtaacatagcaataattttgatgtgattatatgtgtgggatgtgcttattagcattgatatctggttgagttctaaatggctggaagttgtggattgcatgtgcattaggttatgccacactactacaaaaaggagtttttcttccattttaaagtgacacataaacaatttgtgtcggttgggttaattaacgcaataaccgtagacacaaatagtcatatttttgcttcattttaaaactgatgcaaaatgtaactgaagtaaaaaaaaaaactaaaaaaaaagaaaacaaaaaaaaaaagacttttgctttagttcataactgaagcaaatagtagtgcaccgtcgcaaaagaaatttaaaaaaaataataaaaaaatctatcacaccactaccactaccaccacacttattctccactaagcctatgggaaataatgtcatatttgtttatgcgtgctagcctttaaagaaatatataaactataaagttaatgtaaattttaatatttgtctagttcaacaaaactctttacacactcgctttagaaatataaatcagattatcaatttcaaataaaattgttgatataggaagtgcacacattacacttggctcaagaaaacaaaagtaaaaatgtgtgacatcaaagatattatggctaccaactttagccaaaaaaattcttatatgttcaacctacagaagaacaaaaagtatcatgaacaaagtaaatgttatttgaatcatttaaaacaataaaaatagattaaataaaaacaagataacatacttacatagataaacctataatacattgaaaaagataaaacttttcatagttttagcatgttatatagaaagatcaacataaaataaaaggtttaacaagtaaaattgtaaaatgaaaaaaattagttacgtttctaagtttttaattttttttattaaacacttgattaaagcatataaataacaacacaataaagacatgttctaagagtggctggacaaagattcttagataacctaacaatctaacaaagccaaacactatatgtgattagtagtttttatgaatgaactgatagttacataacaagcatgctcacactaatttaataagaaaaatatcatagctagccaacttaggaatgtcagtcgggccgggcccggcccggcccgccacaaacctggcccggcccgacatcactttggcccggcccggcccggcccgactcc

SEQ ID NO: 222401 - DNA, 2916 bp, Cannabis indica
tactgtagacacaaacatgctgccaacaaatgaaatgagaaatttaattaaaaagatataaatcatacaaagaataacataattaacaagaaattcaccaaagtttaaaatttaagataagataaaatataacagggaatctaatgcagtatattatttccttgttcaaattaaagacaaaaaaacataagaatataattaacaaacataataattactcaataaataagtaaactaaatgcttactgccatgggacatccccaacaagcattctgtctccttcattatcttcataaacaagtgtatattctccacttccatccagtaatccagtaatcgctttcccttcatcttgattgttttgaattccaccagcagtagaggaatctctttgagctaaacataagagaaaacgacaaaaaaaaaaagaataattaaatagaggaaaatagaattaaacaattctgtatcaagtcagcctaacacatgtctgaaaggaaggcaaacgacaattcttaggacttattgtacttttaatatttgttcggtgaaaaagagaaatggattgaccattttgtcacacatatatagtaataaattatatgcttcacaacaaaacaagtctgaccatatggtatatcgtatatgtgaaaatggtctacaatcaaacttacgtcaaaaaaaaaatttaaaaaaaaaatgaaacagtgactcaaaaaatcaagaataattgtactaataagataattaatgatgaaaacaaaaacctgcaagtagtcccctgaagagttcatcaacagcagcagagagcttattatagctgtcataggctttgaggtccactttccttccaatagggacaccatccatgttgatcttcacaaatagaccttttcccggggtctccactggttttgcaccatgaatcttcttgttctggtcaggattttgtgattctgttgtgggttttgaagaagagctattactagcaagattcttcctgaatgaacgaattgggggccacccaacaactggagcaggagcagttctgtgttttttattaataattaaatggtaaattatttcaaattacctttatatggaaagagcaaagaaaggaaatgagacgagaagttgcataaaaacacacaatacttggcttgttggctaggcttgcctttgcgtagttttataaagacaatattaatggaactcttcatgagacagatagaaatgattacaagaaaatttaagacttagcatggaaatgagacgatatagtaaaaaacaagagatttgccaaaataagctaagacttatctatcgtaaatgaccaaagaaaaattgtctaactgcaaaagaaaacatatttatgtaaataatatataattgagtttgatccattaaaatgtaaacaaaaataaaggggagctagttatgcatggaccacacaagacactgtcttacacaacgtggaactgtgtcaagagtgaatatactctgtccaaaagatagaaatagatacaagagcgaacaaaaaaaaaaagaaaaggaaaaaagctgaggtaccttttctgagagctgttggtaacagctgtatttgcaggaatagtagctggtgaaaatgcttttttctctgccttctgcaactctactactgttttagggcaacagggctgtgaggcttcctttgctataacaggcaagcttggaagaaatgacgttggagcttttccttggtaacctgaagaggaaggagtagaagaaggccatggggaagaggatagaacattcccaactcctccgttctctgaggaagtaaacttgtggttttggttatggttcccactactcttgttgttgttgctgatgatggtattagtgttttgaatgaaataaccaagagaaaggagagactcatctctttctctgttatctttccgtggccagtcttgacctggtggaccaagcctaagctctaactttttctcatctgatgtgccatggcttctcttctctttttctttgttcatgaaccactctctgttttgaggaatcaaatctagtaactgaggacaattttcttctcttcttgagtttccttccatgtcaatataatcaatacaacgtcaattttctgaaataacccagatgatgaatcagcactactttcctttcttcttcaacctttttctctttgtacacttaaaaaatcaaagcaagcaaatcgaggaagttcactgtcaaatgaaaaagagtagcgtgagaaaaatacatatatataaatgaaaactaaacttaacagaacttgaacagaaactaaagattgaaaaagtttatataaatgaaaactcaacttaacataaacaaatataaatacctttatttcagatcctcaaccaagtgcaaagctaaacattttgaaaaccaaatttaataagtttaatataaaggagaatagaggacgaaaaggtggttaaggaaacaaagacagagcttctcaaacctcaacccatgaaaatctgtaaaaccaacacacaaacacactcactctccaaagaccatataattattaataagactcccctaaaagaaaccccaccaagaggtatattatgaaatattaagaaaagccaaaatataataagcaaataatgaaaatcaaaaaaacgcaaaagtgaggggctggtactggtattgatgtcctaaaagcccttttctacaaaatatttgagcacgcttagtgagtgggctttgctaactttctttcttctccttttgggatgtgaatgaataatgaaatgagaggacgagaggaggaaggaacaaggttaaagagtaaagaccgaatgttgtttcttttttctttttttatatgtaatataattaattaaggggcaagagaataaaaaaaa

SEQ ID NO: 222402 - DNA, 4418 bp, Cannabis indica
cccaacaccatgcccctggccactccttaaatgagcgacatacaattctccgctacaccaggatataatcaaagcctagccttggctcccgcattatcacattttgggaattccataagtaacccctcagggatgagtggtcaagctccgtctcagtcccctcctagcgcaagcctgacaggaccgcctcaatgctcccggagcaagaggtcctcaaagggtagcaaccggatggaggaaaagcgacaacggagggggtacacccctcaatatactcaatacacggagctcacagacacgtaggaacgggtatattttgccacaaggcaatatacacattaccggaagcctcttcccctgtatagggacagttcccgaagggatcccagcaagagatgcgaataccacaacgacattggccacaataccaatgagtgcaaaaacttgaaggacgagatcgaaaacttaatccgattgagccatttatactaatggattaagaaccggctaccccatctcaacccggttccaatagagggcccgttacctcaaggagcgccaggaagtgtacccggagcaccagcaccccttgcaccccctggaggagcgatccctcagcaggccactgggctcctgccaagacccaatgggagagtggccatgatctcaggtgggccccatattgggggaaccaccaggaaagagcgaaagcactatgctggagctataaaacatgatgaggtgtgggaaatcacccaacttctggcacaaaggccccgacttatggaccatcccattactttcacggaagaggacgtcaaactggtgcgtttccctcaccatcacccgttggtcatagagacccctatcgccaataaaattgtggcaaggatattggtcgaaaatgggagttccgtgaacttgttattcaaagaagccttcacagccataggcctcacggacagggatttgtcgcctagcggctcccaactcacaggattcaatgggaccacccttatcccaatgggaaaagtgagactgccagtcaccctgtgctcggatacccctcagagtacttttaagtactgcaccttcgtggtggtagattgcccaactgcatacaacgccatccttggtcgaccggtcctggtcgattttggtgcaatcacatccattcgacagttgtgccttaaattccctactcaggaagctggagtggggacagtgaggggcaattagggagaggccaggcagtgctataatgttacaacacatttgtcggtgctggtggtccatgagggcattgaaccagggtcgatggaagaagatgagttggatccccgcatgggatccgaaaaaactatagagcctatggaggacatcaaagaagtacgagtgtgcgacctcgaccctaccaaaaaaaaaaacctagagccggaggaaagaaacaagattattgaagcattaagggcagccatagacgttttcgcatggtgccaaggagacatgtccagcataagcccgcatgtgattacccatgtcttgaacgttaacctagacatgccgcaagtacaacagaagcggcatccacttgatcccgtaaaagcggatgccctggaaaaggagagacaagctgctaaccaacggcctaatccgggacgtgtactacccgcaatggctagctaatccgatactggtgccaaagccaaatgggacatggcgagtatgtatagacttcaccgaccttaacaaggcttgcccaaaagactgcttccctttacctcagattgaccacatagtagatgccacctctgggttcaagctactgtctttcatggacgcctacttcggatacaaccagattaagatgcacattgtagatcaagagtgcactagcttcaggatcgacaatgaggtatactgctacttctttatgcccttcggataaaaaatagctggtgcaacatatcagagaatggtgaactggatgtttaaaggcctcctaggaagaaatatggaggtctacgtggatgacatgtaagtcaaatccaaagcatgcatgagccatgcggacgacctcacagaatgctttgaagtagtccggaggtatggaatgaaacttaacccaaagaaatgcactttcagagtcaagtcagggaaatttttaggattcatcgtcagccaaagggggatagaggaaaaccctgaaaaaattcaacctttattgaacatgccttcccccaagaagcacaaagatgtgcaaaacttgaccggaaaaggttgctgccttaagccgattcatttctcgatcaatcgacaagtgcatcctttttttcaacatcttaaagaaatgtcaaaaatttgaatggactgaagaatgcgaggaagaatttaggaaactaaaagaacacatggctaaaccactcattctatcaaagccaattcacggataagacttgttactatacttagttgtctccgagaacgttgtgagcgcagccctagtccgggaagaggataaagtccaacatctggtgtactacatcagcaagcgcatgataggggctgagatacggtatcctttgatctagacgttagttttttgccttctaatggcttcaagaaagttgagaccctacttccaggctcatcccattaaggtacttacaaatacccgcttcggcaagtcttacagaagctggaagcgtcaggaagactcctcaaatgggccatggaattaaggcagttcgacatacactacataccacgcatttccataaaaggacaagccctagcagatttcataacagagtgtaatgaagcagaagatagttcaagcgtgccagtacggcgaagcctagtgcggaaggtattcgttgacgaagcgtcaaatgaaaatggatccagtgctgggatagcaatgatatcgccagatggacttcggctccaggtagccctacgttttgcattcccagcttctaacaacgaagctgagtatgaagctctaattgtggggttgaagttggcaaaagctataggggctgtaagagtagaagtcctcaccgattcacaactggtggtcaaccaagtctcaagagaataccaaacgcgtggagagaaaatggccacgtacgtagctattgtccgggaactgctccatgagttcacagagtacaaagtggaaagaattctcagagagaataatgctcatgcagactgtttggccaagttggcatcagacagcgagatagagaaattgggggtagtgcttgtcgagtacctcatggagtcgagcatcagaattaaagaaatggtggctgcaatcgagcaggaaccaagttggatggatcccatcatcagatacataacaaaaggtgacttgcctcaagaaagggccatatccagaaggctacagtatcaggcacatcgatatgtgatgatggataatattctataccgaagaggactcaacatgccgtacttaaggtgtgtatcggaccctgaagctaaacaaatcatgcaagaggtccatgaggagttctgcggagatcataccagaggtccaagtttctcaaagaaaatactgagacaaggatacttctggccaacaatgaagaaagattgtgtagactatgtcctgaaatgtgactcgtgccaaaggttcacgaacataccaagagccctcccaacgagattaccctaatgactagcccgtggcccttcgcggtatgggggatagatctcattgggtctttgccaacaggaaagggaggggtaaagtatgctatagtagccatggaatactttacaaagtggacagaggccgagcctatgaagaccataactgccaaaaaagcattagactcttatatcaaaaacatagtgtgtcgatatggcttgcctcagaagatagtctcagacaatggaaagcaatttgactgtgaagaattcaccaacttcggcaaccagtacggggtcattaaaagtttcttcgcgatggcaaggccacaaacaaatggacaagcagaagctgtcaataaaatcctaaaggtcacccaaaagaagaggctgctagcctgcaagaacaactggcctgaagaattgccaaaagtgttattggcctaccggaccactctaagaaccacaaccgggcactcgccattttcaatggcatacgattatgaggctatggtaccggtggaaaccttgttcccatcccataggagaacgacttacgatccggtaacaaataaagctttattacaagaagcactggatcaaattgacgagctccgggatgagtctcaagtacggatgccagcttatcaaaagaaggtggctaaacacttcaactccaaagtcaaagacaggaaatttactattggtgatctagtcttaagaagagtcttcccagccac

SEQ ID NO: 222403 - DNA, 4609 bp, Cannabis indica
aataatacccatttatgagtattacccattaagggtgcaccctttaatattttaattatctttaaataatatttattttaattatgtttaattaaataaaattatttttggttttgaatttaaatttgaaaccacttttaattatttaaaatatattatgtcttaaataataaaataaattttattatttgatcaaatataattaaaataaatataaagaaaaattgtcttaaataattttttttaatcaagaagaaaatgacttcattaatctcaagcatagattcaaactgttgtcctgattttctcccaatatatgtgacaatcccacgatgtgaaatgtggaagattaagctcgaagactcgaagataattaaaggaaagtcattacataggcaaaatcccctcaggacaacccaacagctactccgggagccatgactaggtctggagggatccgtcttttattcgcctccgtgagttggatagcgtccaactcctccaaatttaaggtacaggagatgttctgttaaatagaatttaatgcagtatggaggaagcgtctttaaacgtatatgaaaggacatgtcagatgcattaaacacatccttcggcaattacgcgctaatcaaggatgtcagtgacgacttcataatgtgcaatcacatcaatcaaggatgggttaggagctgatctcacataaccctacgcatcctactaagtatggagtgtgtgccctaaatatttgggaacttgtgtacagcaaaggtagatacttaagacaattgtaacctttttctctttacaactgctataaaaacccctaaccaaattaatgaaggggtatcgaaaaaaaaaaagaaagagagttgaatattccttgtaagaaatacccacatattaatattagggactcgtggattaaggctcatcaatgccccaaccacataaaaatatttgtatttactctccttaaaccatttttactacattaacgagttgccaaaaatctcgattttggtgctttcattgagagttgtagaaagctttgttacaaaacgacaacataagaagatctagggtacagtggtggagactagaaaccatacacgtcagcctcgctcccccaaggtcccatggatccgggagacgaggaagcagcctcgcgagtaaaagtagaggtagaagaacaagatgaaacgaatgatgaggaatacgaagaaaactaagaagaatatgacgcctatgatgatggcagttacactgaactactggctctaaggcaaaaaacggttgatcacgaggccgaactagcagcacagaaggagcaaggaaaatacaagaaataatggttgacatgtagaaagccatggagatggggggtatccatgtgcatccaaaagccatgcttcatggactaggcgaaacacgggaataatcttcgccaagtacccaaagacgtaaaaatagggaaccaagccctattcaatatcccttagaaggatgtccaaagaaaaatcctacatctttccctaaaaaacaagaaggctcaagatccgcgataaatccgcttcgatttcccaaaagaaaaaggtccatagaggggtaggctccctagagagagcactgtccctcaggagcggaaggaccaaaaaagcgtatccgtgcatcaagagctcgaagaatgaggttggaaaaatcacaagcatccccctgccaatttaagacaaaaagctcaataatagagacgatgaccttaggaatcacctagagaaaagaaacaggcaatactagtttcggagggcgtctcgaatgaggggatcctgggtgaacttgcaatcctccgaaaagacatagccaaggtctcccgtagacaaaaagggaatgatttagagttcgattgtgaagaatgggagctttgtgctaaaaacattctggaggcagaactcccaaaaaattttaaaatgcccgagatggtgatgtacgcaagagatacagaccccagtgatcacctgtctcgattcaatctgataatgacagtcacgagagtcagtaatgacgcaaaatgtttatgttttccactaacgttgggcggatccactaaagaatggtttaaaaagttagaaccaggatccgtagattgttggaacaaattgcaagttagttttcgaaggcagttcgtggcagctaggaaaattaaccttgaagtgagtgccctgaccaacattaaacaactactaacggagaccgtaaaaaacttcataaaaatattcaaagaagaggcctcaaaaaccaaaaagattgatgatggacaacaactagagctactccaagctgagatacgaactggaactcctttttggaatgagctacagtaggaaggaacttccaaccttcaagactttcaaaagaacgtccaaaaatacattaacttagaggagtcataaataacagcctacggtgggtattttccaactggtgggccagggtacatgtcaggaacgtaacttcttggagctatcctcccagctacatcacagacaagcatagtgtagttttctgcaaccataggatatactcaaaatgtcactcttcctttggcttaatctagttttggggcaccatggaataatcccactttcgggatgactgcacaattcactgctcagtctgctctgccaaccacaagtgtggcgggagctcccaaaaactcacggtgcaagagatccttaaaaggaagcacccgatctgaggataagagacaaatgagaggttatacccccagtatacacaatacatgaaactcgtggatactcaagaacgagtgtacctcgcaacccggcaaaacactcattataggaagcctcctcctttgtactgagatagctctcggagggaccccagcaaaaggtgcgactaccacaatgatattggtcacaccactaacaagtgtaaaaacttgaaagatgaaatcgagagcttaattcgattaggccacatatatgaatggatcaaagataggttaccacacctgaatcccgggcatgttagagtcccaatacctcaggggggaccagcaaccgtaccggaagggctaatacatttcgggggtgttccccatctataaatacccggacaacctccccggacgaatggaaaggttgttatgatctcaagagatcctcacataggaggaaccacgaggaacgaattgaaacattatgccagggctttggactacgacagggagatattggaactcaatcaactctcgatccaaagatcaagattcatggatcaacccatcactttcacgaaggaggatgccaagccagtgcacttcccacatcacaaccccttagtcatagaaaccctaattgaaaataaatttgtggctcgaatattagtagacaatggaagttcaataaacttgttatttaaggaagcttttacgaccatcagactcactaatcgatacctctccccaagaggttcacaactcacaggatttaatgggactacacgtgttcctatgggaaaagtaagactccccattaccctatgtctagacaccccacaaattatgtttaaatactgcacctttatggtagtggattgccccacggcttacaatgccatcttgggctgtctggcattggtcgactttggagcggtaacttccatcaggcacttgtgcttcaaatttcccactcaaacggctgggataggaacagtccgaggaaatcagggagagacaagacagtgttataatattgtagtgcacctgtcatttttcacaatccaaggggttgcgacggcatcctcatcaggccaaggtgagttggatcctcacattggcttcgaaactgcattggaacttgtagaggatattgaagaggtaggaatctatgatcaagactcaaccaaggtcatccgcttaggaaagggtttagatccagaggacgaagcaaaatcatagataccatcaaagaatcgacagacgtatttgcatggtgtcatggagacatgactaggataagtccccatgtcatttctcatgtctgaatgtcaacccgaacatgcctctggtacaacaaaaaaagtgtccgcttgatccgataaagttagacgccctagagaaagaggtggataaaatgatgtcaaacatttttatctgagatgtatattacctagagtggttggcaaaccttgttctggtacccaagccaaatgggacatggctgatatgtatagatttcactgaccttaacaaagcttatccaaaagattacttcccactactgaggatcgactagatggtggatgccacctcaggtttcaaactattgtccttcatggacgtgtattcaggatataaccagatcaaaatgaatgttatagaccaagagtgtactagctttagaaccgacaatgctgtatactgttacctggtcattcccttcagattgaagaatgtaggagctacatatcaatgcatggtcaaccgaatgttcaaaagccttttggggcgaaatgttaggctatttttagcctaggtttcagatctattttgtgtgcgtttttcgctgtgttgggatagaattacgct

SEQ ID NO: 222404 - DNA, 2596 bp, Cannabis indica
aaagaaacataaaaagctacaaaaaccatttttgactaatggtttgatgttaagcaagagaagagaccactttcagaaactatcataatatcaaactataataataataacaaaaacaaaaagaagaataagagtcaaactatcatatcaacctgggagtgttgtacacacaacattacaagtaggacagagaagagaaagagcaatagctctatattttcttccaatcaacagtgatattggggatgtgagcaataattggccagtcctgcccactctccctctggactcgtggtcttagcgattcacaactattgatgcatagatcagaaagagaagcgggtagtttttgtggcaagcacaagaggcttctacagtattcaatttccaacttctcaagggagttgaggtgctgaatgccgtctaattgtagcaagcatcgactatacctaaatgcaatcttctttaatctgatcaagggtgcctgcatgagttgagctcttgggagtaatgatggtactagttccctactgccatgtatttcaagctctgtcaatgacaaaaaataatctcctaacaatatcactttgagtctttcacaagcatcaagactaagattcttaagacgaggaaaaactccaccttcaataaatgaccagtacaaggtatcatatgtagtatatcttctactactactagcttcatcaacttcacatacttatgcatcaaattaataatgcttcagaaagaattagccgatgaccagtctcattttctttagataacacatttttcaatgtaataccccaaagctgcagagatgaaatgaaaggatataattcaatgtttctctccattcaaatgggtttagattaattttttctttttatttttcagatagattaatttcatgtgattatttaaattccaagcagcctctttagctaaggtttttcaaacatattaatcataccacaatgctagccaagcttcttttccatccacacatctctgcagaaaaaatgaaccatacaagctgtcatgttagtaaaattcagaccaacttcttgctcttagttttatttctttaatatttgaaataatatgacttctgaaaggacatcattaacaataaaattcatgcacatcttattatacttctctccacaagtatcgagttaataatttcttaattcagtttcaagaaataaatatgattaactcataatgaaaatgaaaagagtaaatacctataatttctcttcatcgatagtgatatatgggatgtgagcaataattggccagtcctcccctgtctccctctcgactcttggtgttagcaatggacacccactgatatgaagatcacaaagcgaagcgggaagttcttttggcaagcataggagtttaggacagtttataatttccaatttctcaagggaagtgaggtactgaaaggccgcctcgtctaagtgcctcaagtagtaacaatcctcaattataatcttctttaaagtgatcaaaggggcctgcatgagttgaactcttgggagtaataatggcattacttcctcacaaccatcaatttgaagctctgtcaatgacggaaaataatctcctaacaatgtcactttgagtctcttgcattgctgaaaattaagattcttaagacgaggaaaaactcccccttcaataaatgaccactcttccatattatgcataatagtaaaattcaatgtctccaaagatctaaagaatgactttgtctgtattgcaggagaagaagaagagcaacaccagagaataataaaactctgaaccaatctctggacaccaggtaagaaactaatgaaaagttccttgagagaaggcagctgtcccaaggatggcaacaacttgaaattaggaaaattttgcatgttcagacttactaaattagacaagcagcgatgatctctcatccaattggggaagctattgcctttgtaattccgaatcccaagtttcttcaggtttggatgaggctgaagggcactgagtagctctctttctttgtgcaactcatcaacttcagcttcatgattactactccattccaaagataactgactaagaaactttaaactctttaatgatgctgcagcatctgaaacttcctcaaggctatggatattttctagtcccttgatcataagactcccgtgtagatcctgaaactctttcaacaacttaatgccaccacaatctctatttcttcccacaacaaatctattaagggtttgcaaatttcgtagcttacccaattgcaatggcatctctaataactcccaagaaacactaagatgtcgcaacttgattaaatttcctatatcaattggtagtcgagtaatactcatacattcttccaacaacaatgtctccaaattatacaatttacatattgtattaggtatctcttcaatgaaaagagaatctaatttcaaatatcttaaatatttcaaatttcctattgaatcagacaacttggtgatcttattgtcaattatggataatactctcaaccttgggaacgacttgtgcaggtgctcaatcttta

SEQ ID NO: 222405 - DNA, 1226 bp, Cannabis indica
tccatcaaaggccaggctttagcgaactcctagtggaaggaatagactctagagaagactccagaataagaaatgatgataaaatatggaaacagttcattgatggagcttcgaacgagaatggctcgagggcaggagtaatattggtgtcgccctgaaaattttaagtttcattatgcactaagattccattttgaaactttgaatattgaggcagagtacgaagctttgctagctggactacggatcgtagaaactttaaaagtgaagtttgtccaatgttttagtgattcacaactagtcgtaaatttagttttaggagaataccaagcaaaaggtgcaaaaatagacaaatatttagagaaattttgggagaatttggagaagttcaattatttcaaaattgaacaagtttcaagagaacaaaactctaatgcagatgccttggcaaaactggcatcacattttgatttggataaattgaacttagttcaagtggaggtgttaagcgatccaagtatatgtgaaactaaaaagcaagaaatagagatgattgatgcaagctctacatggatgacccctattgtcaaatactttctagatggagaacttccaatggacaaaatcaaggcatgaaaactcttatacacagtcccgaggtacacagtagttgacaaaaattatactggagaggatattccatgcctctactatgatgtgtgctctgtactgtggctaataaaattatcaaagaaattcatgaaggcttctgtggagactatgcaggatggtagagtttatctaagaaaataacccgtgagggttattgtcggccaaccatcaaaaaggtcacacatgaattcattaaaaagcgtgaaaagtgctaacggttcttgcatatatcgaggatacctcctaccaaactaagggctagtttggcacagctgtgctgtgaaaaaaagcagctctaactgtgctgtgagaaaaagcaactatagcaaaattgtggaaaaaagctgaactgagtgtttggtaaattatgaattttaaagtaatgtgagttgttaaaatctattataatgataatgataatgttataatctagtttattataatatgtaaaaacttattttatataatatcttatttttttatatattttcaaatataaatttatatgcatttgataaaaataattcatagtattttttttattatgttttatc

SEQ ID NO: 222406 - DNA, 1829 bp, Cannabis indica
aactgacatttgcaaaaatacggtttttcactaagtatttgatgttgccttctggactgccaataccaagggcatttctaatctcagatttcatcaacgtttttaccttcccccttgtaatttgaaagtcagattctccagaataaaattgaaatttgcatccttgtgtcttgactaaaataaagggagacctaagtatttaatgttgcctttggaccaataccaagggcatttctaatctcagacttcatgctctcggatgtattcttgctaaagaagatggaggttttaagtttattgacatgttgccccgaccaatcacaaaaattaccaagacaattccacattccaatagcttcccccacagtagccttcccaaccaagataagatcatccacaaagaatatatgagaaatactagggccactccgactaattttaatacccttgatctcactctttttcacagactcctcaaatagtttagataaaatttctacaacctagatgaaaagatacggggagagagggtccccttgtcccagaccataagagggtctaatcctgccaactagactcccattcagacaaacattgagagtagtggtagagatgcattaatcaatccattgacaaaatctatccaggaccccaaaacaccctaagacatgatcaagaaactgccagctaagcttgtcataggctttcataagatcaatattgattgcaaagaaaccctctctaccctttttcctattgaaagagtggatgatttcctagactataacattgttgtcttatatatcccttccgggaacgaaggcaacttgagtgggacaaataattttaggcaagataggcttaattctatttgcaacgatcttggaaataactttgtaagaaacattgcagagagaaataggcctaaaatagtgcgtcctttttgggtttcaagtttttgggatgagaactaagttagtagcattgatcccaaggtgcatagtgttagtgtgaaaaaaatcttaaatcatttcacaaaaattaccacccacaatttgccagtagtgcttaaaaaagagaacagacataccgtccgggccaggggctttattgatacccatgctaaaaagagttttacgaatttcttttgagttcgggagtctaagaagctcctcctgatatacttgtgaaatgaaatcaggaattaggtgggcacaattcagcctttgcccatggtggctatcttggaatatccacttgaagaactccacgaattccttaccaatttgattcctggaatgaagccagtttccatttttgtccaagatactttcgataacattccgtcgtcttttgaaagtagcagcaagaaataaatgttttgaacatttatccccctctttaacctacgagattcggggcccattgtttccaataagagtttccttttcaacgccaaacaaatctcgtgttccacttcccaatctccggtccccgtagagagtttttgcatcttttccagtttaatttcaagatcttaataagcgtgtcaactttcccatactgaagcttattccactagatgagggcgacccgagtagctcctattttattaagcaatctggctggggcccaaggaaatataaccgagtcccacacatgagctaccaccaggttacttctttcatcctgagtccaaacctctacgaatttgaaactcttcttgaacttggcataaatacctccaaaatataagtagagaggtctatgatccgagttactagtaagaaaagatcaaaggactactttggggaagagtaagttccatc

SEQ ID NO: 222407 - DNA, 2086 bp, Cannabis indica
tgaggtctgcgctaatcagaattaagagtatggacttaagtgtttatttggtggagctatcactgaccaagtttggcattatactcgaaacataatttttatccaaatacttgaccaatattgactgtaccggaaaaagataacttttcagccagaagatgaggaaccatttgtttatgtcgggtccattcagggttcttggattctgattactatagctcaaaggctagagatttactacacagtgggtgtgtaggatttttagtggttatgattaactccaataaacctgaaacatttgggcctgaggatgtcagagtggtgaaagaatttctagatatatttttcgaagagctacagggattaccaccataatgagaaatagactttatcattgacttagtacctggagcagacgctgtctcaaaagcaccttatccaatggctccatcagaactcaagaagctaaaaatacaactttaggggatgctggatttagggtttacccgacccattgtgtcgccctggggagctttagctttgtttgtgaaaaagaaaagtaggtccccttggaggtttattgattatcgggtgttaaacaaactaacattcaagaacaagtacccattgccttagattgatgacttgtttgatcaactccaaggtaaaattgttttctccaaaaatgatttgcactcgagttaccatcagttgaggattcgggaataagatatcccaaaaatgacattttgaactaggtatggtcattatgagttcctagttatgtcattcaggttaaccaatactctagcagcctttattaaccttatgaatagggtattattgacctcgaaaaagtggccaactgacagcgaagttatattcaatgttgataattgccacatgttacacaataagaataataaaataaataatacaagggtcttatagaggtttggcccccttagttagcgggtaatgacctactccccttttggttgtactaatatcgagagataatactatttagatcactataggtgggatctgataagctctccttaaggttacaaagtatgaatcagtaggcagatctttaatgagagagagatagggccttggaggcgtgtgagaaaggaagagagaaagccctttaggcgtgtataaggaaagagagaagaggattagggttttagacttaaagcttaatggctcaaatgagacctagccttttagggttgagttaaggctctttatataagagagcttaaacaataattagaagataaaataatagatatttacatattaaattggtaaaatacaaatgactaaattttcccttgaaactagatatttttgtagcatctttgtgggctgaaaaggcctaactcgcatcttggctttctatctatggatgaaggctatgcatcaatgtcctgcaggggaaaagctggccagccatacacctgcaggttaaggtctggccggccatgctcctgccaagatctggcaggtcatgtgcttgctaggatcctgcaggtcatgctcccatcagctttaccaagaggaggccagcctttagagatggaggctagccttcagagatggaagctagcttttgtacacattttccttttagatgtcaggctttcttacttgaatgtgccttcctttggtttgaaagttaccttttcgccggccagcttgtgcccagattttggctggccatataagctcatcctggcctgcctatatactccccttggctagccagacatgttagtacagctgcttgatagctcgcttaactgctttttcttattgcttgacagttttgtcatacctggtaaggaggctttgttctgctattggcaaggttgtatttcacatgtactctattttggcttacgttgacatgccatgtcaggtggataaaatttggaataacatttttcccccaagtccatgttcgaacatctggttagatggggactttctagctctcgtcttatttgtagtagtctctgtcgagcagccttatctagcaaggcattgacttttgcatgacatgcttttagatctt

SEQ ID NO: 222408 - DNA, 1905 bp, Cannabis indica
tttcccctgaaacaatttgagaaacatctctatttagaagcaattaaaacaagaaatttctagaatgcttttcttttacttttgaacattgctatgaggcaccaaggcgctttcaaattaattatttatatatatttaacactacatttctacatgtgatgatgaaagggtgagatttgagctgagttagagtgaataacttactttgagcaaagaatagagaggagaaagtgaaccaaaaggcagtgccaatctgatcttttaccgagccagtaaactcagggtttgttggatgctccaggaaccatactataaccatggtgtaaaccaagataacaatggtcatcacccacatttcccaagtgaaaggcttcatgaacatccatgtcgattgtttggacttaattggaattatcattgaaagacctgattcggcaaatggttgagtaaattctaccttctgtgttcgctcatatagaatggtcatgtcacccaccacagcatcaaaggtctttcattaaaattgatcccacatgaacaatcaaacaatctccataagaacaggtgaatgtaacagcagaaaaaataagataaaacttgacatgttctgctatcctatgtaacttgacatttctattttctagctaaaagctaacacccaaaacaatgccaaaggttagccttaaaagtgttttcaatgtgcaggctatagaagagaagctttaaggtaatgaaattcaattgtcaaagttcaaacattcttttttaaggaaaatttgaacaaaattacttgttatctacacaaagttctttagcagtataaaataaatagaaaattatttaacctaaaataaagaagtgagcacatgattttcttttatatattgtgtgtgaagataatcttagaaggacttttaatatgtgagcttaccttgttatatacagcctcaatgagttcgtcatatgaacctgtgaaggctataaatttatattgcaggtcataattcaaatgttgcagtgccattctgaaaattcgtatacagaaaccatcataaccttcatttatgttcttcttggattgattaattgtcacaaactttttaaattgggtatcaccaggaactccaatcttcaatcgttttttaatagtaggtattgaccagccttttggaattctttctgttaagttaccaggccaaactacagaaccatatatgccttgggagccttgacgaacatcagttgttctgttttccattttatctttttctgtgaaaaagcagtttgagaaccaatagtttggcctccaacagtcaagttcttgatatatcccatttggctgagatatttcttggccttcattatcaaccacatttacaatccttaatgttcgatcagacaatagcttgttttcatcaaaacttacagtcccacttaaaccttcaaaactagaagataatatgttttccttttaacaattttggactagtatcagtagctactctctctaaggcttgtgtaatagctctaatgctgtcatatgctcttaaagcataaattcccgggttcaaattgttactttcatttgggttttcttgatggaatgtcctctggaattgcttctgaaaagctttataagaagaagtatctttggagtagtatgtcttgatccctagagttcctttcatggaggaaatgacagatttgtcagcatagtccaacagactagtaacactctcagtcatcaaccaagccgactctttctctaaaagtcctatcttcttagcctctctaaaaaaatgagtaaccataggcaaagaagatcgaagaatgataaaagttcgagattgtacacttaaaagcttcaacagttcatgtaagacaacctctttaggattagagaga

SEQ ID NO: 222409 - DNA, 2842 bp, Cannabis indica
aagatatttttattcaattttttttctcctgaattagttaattataatttttctttattaattttgataaaccggttattattattatttatttattttttttagattttaagacaagaaatttaaggacacgttccactatgtaaaaattaaaaaagaaaaaattctatagtaacatttatttattcagtatttattagtggagtttttgataaaaggtggcttagacattcattttgcaaagagaaaattacacttcatttgtccaatttttttatgggctttagctttcttttatggtatttattatgtcatatttttgttatttttaatttcaaataccatattttattttttgttgtattatttttcggtcaaactctaattctttctaacttgtttctctctcagccaatgcaccctttcttctctctctctctgacgatcgctagttccagcgattgatttaggtccggtatttaatgatgtgaccaaacaataatggagaaccctactccttctctttcggtatcatcaattcaacttctcctctcccttgtttggctatttatgtgataagcccctattcatatttgtttaccattgaaaaaagagggcctaaaaggccacactttaaagtcctttcagttgagttttatccaaattattttaaggaaggcctgagttgtcttgcgtatagtcaattgggttataaaactgctgatgtaaaaagctgattatatatacaagagactagaacttattaaagaagatagagaattaagtattgagagaagtattttgggagagagcagccctcttcaaaggttctgtacttaaagagactagcctctcaaaagttaggtgtaaattgatcattattcacgaataaagaaaattctttgagggatttcatttagggtattctaatacttgatagcagatttctaatataagaaattgtatcaatttggtgcggtgagctgcgaacaatgccaaaaaaatcaccaaaaaagagtcaatcagaatccaccctagaagaggatgctttgaagtcaatgatgcaatcggtccaagaatcaattctggaattggccacgaaaactgtcacaaattctgtcaagacaattattaatgactcggtgagtgaaatgagtcgccaaattgcagcaacaacaatagcttattttggaggctcaagaacactaaagaaaggtctaagaacaaccaagaacgaccaagaaatgatcccagacaatcaagaagcgtccaagatcatgtgggagaagcctttcgcggatccgacactcgagatgcatctaaggacaagagtcctggtgcttcccgcatcttcaatagtagcaaaaatcccataatagtggatgccacaatggaataaaattattacaatccccataattgaaatgattagtgactccgtaaactcaagatgccaccctttgaaggggaaaatcccgacgggtggattatgcaagtagagcgcttttttgcttgttgccattatagcgaggaagaaaaggtcgaggcaacacttatcttatttttgggtgatacactcctttgttatcagtttgagaataaaaagtgggtaatcttgagttgggaggagatgaaacgattggtgttgaggcacttcagagatacacatgctggttctttatatgatcaatttgtggcggtaaggcaagagggtacattaatcgagttcaagaggcagtttattcgacttctggctcctcttgataatgtctcatttgaaatacaacttagtactttcattaatggccttcgtcccactatctgtgcaaaaattcgtgtgcaacgaccaagaaatattaacgaggcaatagaaattgcccaagacattgaggaagaggtgaatgcaaacaccccctatataccaaaagtttttggtttcagctgcactacgacaccaccacttcatacttcctttatctcagggcatatgaaaggcacatacaaaaaactagctgccaaaacacaaaaatatactaacagtcatattcaatataaacgagataagggcctttgctttcactgcgatgataaatggtcagcaggacatcgctgcaaacaaaaagagataaatatggtaattatcgctgataaaattaaagatattaatctagaacaaggtttgaaaaaggctcacgaggctgtggcttgttttgaaatggcaaaactcaagggtacagtgaaggtttctctcaatcagtagcaggtctttcttcaaataagactatgaaattaaaggggttgatcgaacaatgtgaagtggtcatcttaattgatcccgacgccacacataatttcatctctaaagtgttggtggataaactcaagcttcctattattaagaccagtcaatatggttatacaattagaatggagattccatgtgcaatgaagggatataaaaaaatgtccacctacacttccaaggggttaatttttttttgatgatttcctacccttaaagttaaggagtgcttatgttattttgggacttcaattgctggcaactctagggatgacacacacggattggaaacttcaaacgatgtaattctaaattggcagccaataagttactatataaagagatccttcttgagagaagccttgtctcgcttaagaccatgtctaaaacaatgtacgttgaggaaatggtcttttaattgaattcaattttaggggcctagaggagagccaaacaaccagtgatactccggagttcctttaactgattttgctaaaacatgaaggggtttttgctcaaactagtggcttaccaccagtt

SEQ ID NO: 222410 - DNA, 3127 bp, Cannabis indica
tgttattttgacttttgaatgtttttttttttgaaagatgtatattaacaaacaaaataattacacaagtttgggcaagtccgccattaaaccggcagacgcacaaaggggataatctcccaaccacaacttattacaatttgaaaacaatgccactttggccagtaaatgagcagccctgttattctttctcattatatgctttactgcaacacaatggccaaaagcaggggagtctcgaatgtcgtcaagcagcgcgctccagtccgttttggcttgataatcaccattcaaatagctcactgcccgaagacaatcagtttggagaatgagcgggtatgccttcactttggaagcaagatgaatgcccattcttaaagccaaaacctccgccaattccaccgtgcaagagcccctactctgcttgatttcagccgccatcactgcccccgtatggttcctaataacagcccccaagcctagttttgcttctttacaaggaacactagcatcactattaatgcaatatgtcccggggtgaggaggttcccacccaccatctgatgtgggagtcagcttcagctgattgtcccttttagaattgttatgaagcataagatccatctccaatttagcccacctgcaccgaaaattgttaggaagaagatgaaggttgagtctttttttgttcctcctattccaaatgagccaagagagaatgatgaacattaaaaaatctgcttgagttgtttgtttctttatagtcatgagcatgtcctttgtttcacctctccaccttttgatgactttccacatcaaaaaatgctgccatatatcagtaactgacgggcaaaaccatagcccgtgttcgattgtttttccttagccccacaccagcaacacatcagttctatcttcatgccccgagacctaagaaccatgttaaccggtagccagccattacaaatacgccaaacaaaatttcgaactttaggagggacttccaacttctaaatctcagtccaccatttcctagtgctctcatccgaggacgggactacttttatctcaccgaaggctaccactttataacaactactcaccgtgtatataccgttcagggtgtagtgccaaactaaatcatcattagcgttattaaagcaaggggccatacctagaataaggggaacatcatccgggtggaaggtttgatctattatatcttgtttccaataaccttcagtatccttcatttgatccaaagtggccccatgattaactttagctggagtgcgaagagcgaaagtggagggacggggcagccatttgtcttcattagtgtgcacctctctgaccgattgaaccctccgacgaacacccttttcaattattttcctaccccataagatgcttcaccacataaaggagctaaatcctccaagtttagcttctaagaatgtagagttggtgaagtaacatgccttgagaacacgggccagcaatgaattaggatggtttataatcttccacccttgcttcgctaataaggattggttgaatttttctaagtttttgaaccccattcctcctttatcctttggtttgcaaagtttttcccatttcccccaatgaattttattcttagactccgaagaacccccaccacaatcttgccatcattgcatggatgtccttaattagctcctttggaagatgaaaacaactcattacataagttggaatggcctgaattacggctttgatgagtacttccctacccgcttgggagaataagctgactttccaaccttgaagtttatcccgaatcctggtacgaatggactcaaagacttcttttttccttctcccaattgtagccagcagcccaagatatttggtgtggcagtcaaccaatttaacttcaagatcagccgcaatcataattccatctgtttgcttgatcttccttccaacacacagctccgatttcaggagatttatttgttgaccagacagaaacgagtattcttctaatatagacttcatacatctacattcggttggagttgcttcaaggaacacaaagctgtcatcggcgaagaagaggtgagataatttgataccctctcttccaaactttataccgtggattttagtcgctgtttcagcctcttgaatgaggcaagagaagcctttcgagcagaggagaaacatatatggagagaggggatcgccttgacgaaggcaatggtggggttgaataaggccactaacttccccattcacaaggatagagaaggagaccgttgtgatacaattcataattttatccacccatcgcttgtcataacccaaacaaagcatcattgcttctaaaaactaccacccgactctatcataagctttggacatgtctattttaagcgccatctttttcccatttccaaaacgaccttttttcatacaatggagactttcgaaccccagtatggcattatcctgaatgagccgacctcgaataaatgcgctttgattctccgagattacctccttcaaactatctttcattctattggcaagacatttcgcaacaattttatagctgacattgcagagacatatagggcggaagtcagccacttggtggggatttttgatttttcagaatgaggcagaggggcgtcttgtttattgctctgcagtccgtatgattgttgagaatatccaagcaaattctggttacatccaaacctatgactggccaatgatgctcatagaacaaccggggcatcccatctattccaggagccttcaacggattcatttgcttcaatgcttgcaggacatcagcagccgtgaactcagtaaggaggatttcattttgtcttctactaagccgtgaacggaccaaacgttggaggtgagtcattatgtcgcacttggggtccttgactgaaaaaaggtcttgaaaatggtcacaaatggtcttttcaatctcttctttagagctcagccagttcagattttgatcaaaaaagccatggatacgatttttcttcctacaaaaagacgccttttggtgaaaatatcttatgtttcggtcgccatgagcaagccaaatcgccct

SEQ ID NO: 222411 - DNA, 1433 bp, Cannabis indica
aattattatatatttttttatattaatacatattgatttatgtgattaatattgagtattggtttgtttatatgtataaatatataaatcaaaaaaataaaataaaataaaaaagagatttctggtttgagtttcaaatgtatctgaatctgggttttcttgaagtacagattttataaattatgtatttttacttaaattttttttcacttataaaaagcttattaatttttgtcatggttgattggcaggttcaaaatttaattaattattaaaattaataattaaaacatggccactttcttaataaattgttttagttcaaagaaatccatagttcctagactaagatttcatagctatgaagatccaactattcttgcctcagaaactgcttgtaagtacttaatttctcttaatatatatatatataatatgtttcaattaattataattatctctttttaattaattaattaattgtggattgaactggtcattgatttaatgtctctgttttagggaaattttaacattgaaatatttttagaatagtagtcaaaattagctgttattttaaggttattaaataaatattaattattaattttgaaatgatcaaatatgaatagaatgctagtttttttttttttcaaaaaggaaaaaaatagtaactattgcattttaatttaacttaatatattattacattttttttccaaatatactaactttttttaaaatatatatatctggttaaaaataatataagaatataccatacaaaaaatgtagttaattaattaactaattataatataattttgagtattttttttttttcgtaatttctttttattgacagttactgtcaatgaagtggaggccttatatgatttgttcaagaaattaagcagttccttaattgatgatggtttaattcacaaggtatttctttaattaatcactattaatgattattatattattattattattagtgttaagttaagtggcttaactaattaattagaaattaattaataatattatcattgattatgtttgtgcagttgcatttagactctatgatctaagacaaactggatttattgagcctgaagaggttagtgatgataatcattctttacttacaacttccttcattaactcacatctttcttaagctatatttcttatatttcctttattaaatattaaaatgcactagacactagtgttgtttagtaccccttaaggtgtcttatttgtaatgatcctacttcaagcctttattagactcttacattcattgaatgatgactcttatatatgaatacattactctgattgtgtgctttgtgctcactcccacgctctttgggaagttttttcaagagatcacctatcctaaaattatatcagattactag

SEQ ID NO: 222412 - DNA, 1962 bp, Cannabis indica
gaggaaacacaagggaaaaccctactgatattggaacctctgctcttccacaggataagggaaaggcaaaagtaagtgaccccaagaacccgcatcctcctcaacctccttagaaaaacatgaatcaagccatcaggccttctcaagcgttgaaggtgaccgacacctccaggctcagaagccctttagccccaaaaggccctgtagtaccaaaaaagattggtacgaaagtaccaaagcccaagagaaggaaaaaccgccctagcgatttagtaaaacaggatgatgggacagagggatagtactccgatgatagtttgtccacagtcgatctcagaattcatttaaacgccaagtacgagaagtaaaaaacgagaaggcgaggcacgtggtagtaatgacctcaagaatcacttaaacgataaggtctgtggaagagatcttccagacagtgttacaaagagattagaagaacagatagctacattgacgaagctcaaaaaataaagtggggccctcactgattttgaggatgaggatttggagccctacataagaaagatcgatgaagctccactttcagagaacttcaaaatgccccaaatcgagctgtatgatgggcacacttatcctaaaattcatttaactaagtacaacaagatgatgtaggtggaaagagttagtgaggatgccaagtgtttgtgcttctccttaaccttgaccaaatctgttgaggattggtggaagagattggctcccagatcaatccactcctagaaggaactacagtctgccctctaaaaataattcattgctacccgtgattatgacttagaaatgggctccatcattaacattaagcaataggcgggagaaagcctgaagagtttcattcagcgaatgatggaggcggcgtgtccaatgacataaaattggtggccttgtaatctggacttgccgatggttctctcctatggggagaaatacagaggagaagggtcaaaaaattatttgagtttatggctaaggcacaaggctttatcaacttggagacgcttatcagcaagcattcggtgtccctccgacaccaacttatgtggcttccactcccatatttaccttttcgattcttgttcttagagatcaatacatcccgattgtttacagaccatttgcattcgtacaagcacccacacaaacccatttctttaggtacccaaacagattaaaatgaaatctccaaagcataatgtgagccaatcctggaataaaagaggaggaaagggtttgggacggaatgagaattctaaaaaaactaagaaagattatgaatcaaagtataccgagtactttagcctggtggataataaaaaaaatatgtacaaagaaacctacaatatggttcataatagaaaacccccacagacaccacaaggggataattttaagagaaatttgagtaagaggtgtgagtatcatggagaagtgggacactccaccaatgattataagcacctgaaggatgaaatcgagatgctggtcagggggggccatttgggacaatgggtctgtatccccatcatatatcctgaatagggggtcatttatggacatatgattattcctggacaaaagggtactataaatcctctatagggggtaggtcattctcatgtcccaagaacgtaacttttggcactccttactttgccagctctagttgcggtaactattatggctttgggaccgagaaacccatatccctcaggcttagctccgccaccagttgatggatatatggtgacgatctctggtggaccgcaccttgcgagaatcaccaggaactcttaaaaaagggactttagggagttagatggagaaggggaaacatgcgttgtaacacagtactagcccaacatcctcgaacaataaatctacctatcactttcacagaggaggacg

SEQ ID NO: 222413 - DNA, 2290 bp, Cannabis indica
agatcctggtaaaataatatccaacagtaccttcccttgttaacttgaccttgccaccaatatgctcttaacaaggcatccaactccctgcagattgaaattgggactctattcgtagacatcgcgtatattgacatagcagacgcaactgacttgattaaagttagtctccctgcataagacagcaatctcatcttccaacctgcaagcttctgaagcatactctctctcaacttcaaaaaactatccttcttcattctcttgaacacaaagggattgcctagatgtctctcttcgccatccgattgcttgatagtgagcatctgcaaaatggccttcctcttgtctatatccaaattatttaagaaaaggacactagacttagctctactacaaacttgtccagaccatctctcatacagattaagacatcccattaagtttgttgcctcttccgtgtttgctctcgcaaataaaatcgtgtcgtccgcgaacataagatgtgaaattggagtagcagctcttgctattcgaataccatgaatcttccctctattttcttggctttgaataattttggaaaggacttcttgacagaggagaaagatatagggagacaaaggatctccttgtctaagacccctttgaggcttgaatttctttagaggcgtatcgttcatcaagactgagtaggagactcccgttatacacgacattaaaagaccacaagccttatcatcaaatctgtttgcctgtaggaccttcctaacaaaatcccattccatcctatcatatgccttgtgcatatccaatttaattgccattaagcctcccacaccccttttcttcctgatagtatgcactaactcctgggttaaaattgacgattcagcgatccaacgtcccagaataaatgctgattgaagaggagatatcaagctttccatatacggcctcaatctattagctagaatctttgcaatgatcttataaggaaaattacaaaggctaattagcctgaattgttccattcttgtaggattattgactttcggtataaggcagatgaaggtgaaatttaatccctgatgtacaattcctgatctgaacacctcttgaacagccgaacacacactatctccaacaacatcccagtactttcgaaagaaacaacccggaagaccatccggaccaggagattttaagggatgtatactaaagactatatcccgaatgtcttcgattgaagggattttggtcagaccgtggtttattgtctcatttattttgctatcgaacaaatcctccaaatccacaggtattttaggtttatcagacgtaaatcactccttaaagtaagaatttatgatacctgaaatctctctggtgttatccttcatattcccatctttgtcttgaagatgccagacttgatttctcctccttctaaccgaagccgctgtgtgaaagaaccttgtgcttctatcctcgagctttaaccacagctcgcgagatttttgactccacatggactccttctttcgccaagtttcttgaagttgatcttgtataagaaactcctctctacaaaactcttctgtaatttgttgcctttgaatccattgcagcctattttccaatgtactaatacgttgatccagatctcccactttctctttcctccacttctgtaaagcccttctgatgttatcaaaattcttcaagagacttcttgttccaccccgaggcaccttcggccacgccttgcaaatttcatctcgacaagagtcttcccttgaccaagcatcgtaaaatcaaaaaggaatgaagcctttgcttttaaacatgaaggtatcgaacaaaatgggggcatgatctgatatcataattggaaaatttaaaatccctgctgaaggaaaagctgaactccaatcataagacccaatacacctatccagtcttctctaactagacctccagacctccattaaatcttttgttttgccaagtaaattggcatcctttgaaacgcaaatctactcctacctgtatcctgaaggaagtcttctagccaacgagtatctagaagatgttactttcttacctcccatcttttcttcattgttaagaatacaattaaggtctcccataactacccagggcctgtcacaagcacttactttatgggtttactatctcccaaaaattagttttatctctatcataagggggaccataaaccgcaaagagtctccaattgaaatgtccctgggaggtcatgaattgcaac

SEQ ID NO: 222414 - DNA, 2266 bp, Cannabis indica
gtggatatctcccacatcctctatttccacctagaagcttaacaagatcaaggcaggagggctaatggggggatgtcaagtggggtatgcctttaagagaccaacgagcacattagttggccttcaaatagacggcctgatcagaacaccacaaagagcagggagtagtgctgcccctacacccttactttagagatatagccatgtacttcagggtgtgtctggatcagatcaccccaaaaggtataaagtaccttttgatgatgtcattctttatgcagatttaggctcgcctctgcccccctatgagattgggtactatcttaagctaaaatccatttcgaggaagaacaggactacatacttcttcttcagtcagcttggttatcagtggttaggcaacaccaacagcataactttgtcgaaagtgggaggatacaccaggacttatttcattgcctgcgatatcccacaggtccaccacaacttctagagggtgcaaaactactcacgctccatacccactctcatgatgagagatagagaaaattatatcctatttctccctatttagaggaggaatatattaaggttttcttgtgaggccaactttcagaagtatggtcagtaccctcccgagtttggtgttgtgggagttgagggcccatctggaggcccagatgatgtctcgatagtagaggtgacttgcctaagaggtgggcatacacctaatttggatgatgacatcctcctctccaggcttgcgaggaccctggagaagagagagaattccctctgccagcgcttggcatgaggaagcaccaccggtgacgctattcaattgattaggtctagagaccaaggatttgtcagcctacttgtccccttcctacttctagagggaatggaaaggctactgttagtgatagtagttcagatgattcctcgtctgaggatgatggtagttgatagtaccatctttttgctttttattgctttaaatacttgttacttgtattctgactttgttactttctttttgtaaatatggcttgcagattaagggatctcggtgaagagccttctggtggagcttgttcaggtcgtcccaaggccaaggtggcctgaactacaaggtctagtgatgccacaaggtccccactacttccccctcctctagggcctgctctagctagtcaaccaatgatcatagatcctcccacaaggaggacttcatccccatgccgataataaggcaagggggcccaaaagtctagccaagggcttattagccactgaatagaggattgttgaggctgcccgtagttacattagcagatttctacccatcattaacagggagcttaaagagctagaggatgaggagctggagtgtctgacgtctagcaggcttcaagacttgacatttataagttttatatttgattttattgaaattgttgcactgacaggggttggctagtcaaatatgaataactaggaggttggccagccaaggttgcattaataagaagttggctggccaagtcttcttctaccactaacttgctttttccttttaatttttggccatgttgaagttcagccttacccatggtagagcaaagggctaatctggtgctcactgagagaaattgaaggccaatgagactatgctccagacggagagggatgcacatacccagacacgggctcatctaaaaaagacccaagatttgaacaatggcctagagcacttgcatggtattaagaaccaaaaggtgaccaaccatgctacaagggagtctaggtgggaggtggagcttgggaacaaggactgggtgttgcaactttctcttgatggccaacaatccatcaaggattagtatgttagcttgtcctccgatgtcttatatgagatttatctacataaccccaaaggttgacctctcctacatgggatcttctttccatgaaagaacacttgtttaagggagggagctctacgagagcatgatgtggacaaaccaggttgaccagactgttgcccatcctgaggggtcctcatcaagctatcttgatgaggctatagccaacaagcctatggaggaggtggctggccagtctgctgatcacatggtcgtccagtctgcagaggctatggctggccagctccttggcaatcgagatgctacagctctcagctcgactccccttgcacgtgcacatgagtagacacattttattagtatcttatgtttatgat

SEQ ID NO: 222415 - DNA, 3387 bp, Cannabis indica
agaggaggaaataattgggtggaagtgcgcttggatagagatttgatagactcaagttggtttcaaaaattctcaaatgcaaagttatacaatttgcatcacttaacatcagaccatagtccaatcttcctggaaccagaggcacctgtccaaatgggaggcacccgaagcttcaagtttgagaatgcatggctcaaagagaaaatgtgttatgagattattcaaggctgctgggaggggaataatggtgaagatttctggttcaaacaacaactttgtgtggataaaattggtgaatgggggaaaacgcttactggaaacttcaagcagcgaattaatgcgtgtaaaagggacctagacttgttgaagaacagaagggataatgcctcggttcaaagatacaaggagattaagaagcagcttctgaaaattattgataaaaaggagacgttttggaagcaatgagcaaagcaattttggctcaaggagggagatcaaaacacaaagtttttccatgcgactgctaatacaaggcgtagaacaaatatcatacaccaattgaagaatgaaaaaggcgtagatgtcacctggaattcaggtttcgaacttgtgattactgattattttacaaacttgtttagctcttcttcaacattgacccagccagttattgattgtgtggaaagaatagtcacacctgaaatgaatgagactttcctgcttattgttatggaggatgaggtgcgcaatgctatctttggaatgcatcccgataagagccccaatccagacgatttgactccggctttctaccaaaagaattaggcagtagtcggtttggatgttgtgaaggtagtgcagcgttttttcacaagtggacaatttgaaaatgatgtcaataagaccaatgttgtgcttataccgaagacaagaaatcctgagcgcatgacggacttaagacccattgctttgtgtaatgttttatacaagactattaccaaagtaatggcgaattgtttgaaaccggttatggataagattgtctcgcaataccaaagtgctttcatacctgagaggctcattacggataatattatggtgttttttgaagtgcttcattatttgaaaagaaagaggtggggaaaagaaggttttattgcactaaaattagacatgagcaaggcctatgataggatcgaatggagttacttggaagcaattcttgtgaggttgggatttgataatgcttggactactttgatgatggaatgtgtttgatcagcttcgtattccattattcgtgggggcaaaaggatgggtcctatctctcctcaaaggggcattcgacaacatgatccactatcgccttacattttcaccttatgtgcgaaaggtttctcgacattgataaggaaatatgaatcgcagggatggcttcatagttgcaaagtggcaaatggtgctcctcgagtgtcacatatgttatttgtggatgataattatctctattgtaaagccacaatggacgaagcaactaaagttcagcaactcctcactatttttgagcaagctttgggccaacaagttaactttggcaaatcctcaatttttataacaacaacaccgatttggctatcagcaaccgcatctgttccttactccaaatggtggtggctgatgagaatggtatgtatcttggattgccaagcacaatggggaggaataaaaatgttgtattgggatacttgaaggaacgggtcaggaaaaaggttcaaaattgggactctaagtttctgtctaaagcaggaaaagaagtcttaataaaaacagtgggtgtcaagctttgccaagcaatgctatgagcgtgttcctacttcctttagatattagtcatgatatggagcaacacatggcaaaattctggtggaaaacatcaaatacaaaggataaagggattcattggatgtcttgggataagctttgttaacacaaaagcgttggaggcttgagttttcgtaatttgagagatcataatcttgctcttttgggaaagcaagggtggagattacttaccaatactaactcgctggtttcaagaatcttcaaagctcgatactacccgaacggatcttatctctcggctcctattggtaataatccaagctttatttggcatagtatatttgaagctcaaaatgtggttaaaacgggggctcgttggaggattggaatcgatagtaaagttgttgtcaaaggagagttgtggctatcattggaagagaacccgttcattacttctacacacccagctttaaactcagtcgtgtttggtaatctgatggagattggaagtgggagatgggatatggaactgctacacgatctgtgcaacaacagagatgttgcagcaattgttgctgtcccgattctgcagcatacaacagcgagtgggcttgtgtggcaccatgaattaagtggcgtctattcagtcaaaattgcatttaacttgattcaaaaagcaaagggggtctagaatactgttgaagcttcggatttctggaatgaactttggcgtttaaaaatacctcccaaagttaagaacttaatatggagagggggtaccaattgtctttcaacaaaagtccaactgattattaagagggttgatgtcaatagcctatgtcctgtttgtgatctccataacgaaacaatcatgcatgctcttgctttctgtcctcttgcaccacaatgttgggagaaagttgctattatcacactagtgcagcaagaaaccagtttcttggactggtgcgtgactgttttcagcacactaagcacagaaacccggagactattttgcattttatgttgggaaatatggggtacaaggaatgacaaagtttggaaaaacaaagcctccaatgcctcctttatttttgcattctccacttgttatcttgatcaatggaattcggctcaagctccttacttggagacatcacagacaagtttagtggctggggatggataagaccgatggtgtgcacctaatgtcaacgaaatcaaggttaatgtggatgcataaatatttgggagtagccaagactatggttatggaattgtggctagagatgaacatggctttatgttggaaggtgtctctcgactttgtcatggaagtgtatgtccggagctagctgaggcaattggagttcgtgaggccctaagttggataaaagacaaacaatggccgcatgtgattttagagacaaattgtctggtggtggtacaagcaattcctaatccaattcatatgatctctttatttggtgatgtaattaaagaatgtcaaaacttgcttgtgagtttaagtggtgttgctatttc

SEQ ID NO: 222416 - DNA, 1182 bp, Cannabis indica
gggaatagaagtcaaacactctagtgaggcaattcatctgtcacaataaaaatattttaaagacctactctacaaggccaagatatgcagggtgcaactcttcttctcccatgacacatgagctgagactctcagcttatgggggagatcccattcatagtgtgcaagaatacatgtctatagtaggagtcttacaagatcttactatgactagacctgaaatagtttttagtgtgaataaagtgtgccaatttatgcaaaattctcttcaatctcattgggttgctatgaaaaagaaattgaggtatgttagtgggattgtgacacattgattgcttctcaaaaaaccttcttttatggattttgttatcttctgtgatgctaactgggcaattgatccagatgatagaagttccactttagggtttgctatcttccttggcagaaacttagtcatttggcaatgtaaaaagcagcatattgtgtctcgatctagcattgagacagagtataagagtctagtcaatgtggtagttgcgctaacttagatgcacaatttgtttcatgagctaaatatcacattgcctatagttctcacactgtggtgtgatgataacttgagtactgtcatgctcactgtcaatctagttcttctttcaaggacaaaacacattagttaggtctctattttgttagaaaaaaagttcaacacaagtttgtagaagtaaatcactcttgctgctgatcagatagttgatggtctaaccaaagctatctcaagttagagatttctttcatttcgtgacactcacaattgaggatgcctcaattctaagtttgagaagaactattaagacaactactaggagttagttaatactgttagtttagggttttcgttaagagccaattagttaagctcagctaagctcaagttagttgtctcaactgaattttgttattttcggttgtcatttgttatggatgtcttccctctctgacttgtatataatgataattattgtatcacattcaataagatcatttttttctcatatgttcgttctctttcttctaccatttctctctttcagcatttctttcctttcctttactgtgtttgtcaatggccaatagatccaacgagaaccaacatgacagataggaaaatatatatatatt

SEQ ID NO: 222417 - DNA, 3263 bp, Cannabis indica
ggaatggaaattgcagttaaaagatataagtatttcaataattcttaaccgtttgcaataaacaagtagacctcccataaaatcccatttccacaatttattgaagagaacaagcgaagcaatgagaatggtggttcaatcatattcattgatctccaaaaatgtagcatatcttacaacttagccttacaaactatagtgagcagtaatggagagacacatacaaatttttctcaacaagatttcctatgtcttcatagccttagcctcggtcacccttcttttcctcttcctccaaatccccgacacctgcgtcccacactcctccgccaaagcccacctcagatttcccagatcctcctgcgattacccttcgccccgagaaatcgtgacaatcgagaaaaagaataagcgcctctggtccacccggtcttggcaaaacaaagtctcttcctttgtccaattcttccaaccatttcgggatctgggccttcttcataaccactccaaagtcctttgcgtctccgtcggcgccggccacgaggtcatgggcctgacccaattgggcgtcgttgacgtcaccggaaccgagttggtggactcgccgccgctggtgagtcgggccgatcctcataacttgccgttttttgataatttgtttgatttggctttcagtgcccacttggccgaggcgttgttcccgtcgcgattcatttcggagatggaaaggacagttcggcctggtggggcttctgtgattgttgttgacgaatgtggggatgaggaaacaagatcaattgttggtttatttaagaattcgatatttgttaacgccattaatgttactttgactggaatgagaatgaccagaattatgatgaggacccaaaatgttccatcttgaatttttgggttcttgttgtttgatttatatacatgtacagacatattgttttatttgtttcgtgttgcttgtcttcagtttttgctcatgttagagttgaaaatgaagatgtgtaattggatggttataatagattgatggagtttcagaattgcagatattaaaatacatgtcttaatgaacagttaactgatgtttacatcagcatcacagtgctcacattttgagttcattgtaccaataacttaaaattaatttgtggccaatgaatatcttcagctcgagaggatagatttagtagttttgagccattacaaggaatcaactttaattgctagacttttaattttcggtaagatgacctttcaatttttaaatagtgttgttcttattagaatcacctctaaaacaggagtcgttttactgttccccttaacctgttttggccccaaagcctgcttgcaacccttgcatatatgagctacttgagttattctggtttcagaccattttgatacttaaggagttggaacgattttagtatttcactatgcattgccaatagaaaaaggctaaagaagattttatttatttatttttcattcaaagctagacaaaattacattaatccgaactaattgaacaaggaaattaggatcagtaagtatgatctatttctatacaacagcaactaagaacttcgaatctatgtaccaattgcagctacctgatcagcaacctcaaaagctcgagaaatcccatgaacggtgaacttttttgaagtgaaaatgtcgggcgccacaatctcgattccatttatgattagtccacctttgaaacctgctgtccctgcaacctcgagagatagatcacgaaccaatgtcatgagcaaggttccagcaggcaatgcagtaagttctttatacgttaacctctgaggaagtatgtgaaaccatactgttcttttgagtaggggtgaaggagatgtcaaagactgcaaatttggaggagcaaagattgttacagaattcaatcccttgtaatctttaagaatctcttcaagaacagaatttaatcctatagcgaaaggaacgaatccgttcgagctcagcaacctgacaatccacgaccattcaaccatgttggtggatttcacagcatccgaaactagaacagacattgcgttgcaagtgggggcttggatagagttccaaccctgatgaacatcttcaggatccaacgaagaaaagggctcaagaacaccgtggacggaaatggtttctgcaagaaatacatcaggatgagtcactgaaacgttgttgatatcaactgttgtttctttgtagtcgatgttagtgatggcaatgttcttttggcggtgaagggtcggcaagcaactccctcgaggcttctttaagaggtctttcatgggaaggttgagaggagaggtgtgatattgaagaaggtttctcaaaagccatggtgggagtgaagagttggagatggcatcatcttgaatggcaaagatagttgagtttggagatgagaggaagatctcaggggagacttgaagaagggtggccatgacgttgaagccagcttttcttaaggctttggaggcgttgagggagagttcatggaaattgagtttggttgggaggatggttgttcggttttggagtgcattgatgttgagatggctatgaaggccaagattacagacacggtgaagtagaccggtgcacgccacgagccggtgcaacaatgagccattggagatggagtaactagtgaagcttgtttttttagaggcaagaggctcaggcttatgtatatatgggccaaacgactaggctcggccttccttgctcaccgataggaaatgtgaaattatgggcttagagcactctgaatcgttttcctctattctttaaattgaaaactacccctttttcttacacattaaccaaatataactttaaaataattttaattgataaataccctattttataatcaaagtaccaaatataacctcacaaaacttatcaaaattagacttcctaatgcacataatgggaatataacttataaaagtgggtataaattaaagagtagtaaaatgaaagtaaaaattaaaatataaaacaaaaaatgggtaaagagtgtaatttcatcttaaaaatactttataattttttttttttatccttacagcatacttttacatcacatcatacatgagtttatttgtatttttctctacatcattaaattgatattaattttattttctacactattaaaataataattttaaacactatacaatttacatatataaaatattatttatata

SEQ ID NO: 222418 - DNA, 2955 bp, Cannabis indica
ctatttgttttttttgttttttttttttttttctttttttgtttaatttgttgttgttataattatcggacaactagagataagtactaagttattgtaaaaacaaaaagaaagtaaatatagtaagtgataacttttgtaatttctttcttattgattaggtcttagaattctctaggtaaattaattattaattagatttaactaccaaaaagagttttatcatatgtcaatagttaacatcatcattaaatttcaataacatcatgacttcttctatggttgtttttattgccatgtcctatatagagtctatgatctgacagttagtagttttgtgatccctaagaaaaaaaatattaagtaattaagttgtgtaattatactctgcctaaagaatgtaaagtatgataattctaagattgtgtaagtatgagactatgcggttgaaaaaaacttatatgaattaattggtattagaattttatataactcataaaatatacaataacaagattcactttcatagataaacatattgcatattattataagcgtataaacataaattcaaagaatacctttgttgattcaaaaagaagaactcaaatagcgaaagcgtaccttaatcaatagatattgataattttaatccatcttgtagagatgatttttgtggtgattttaggtaataatcttccaagagaacaagatgtaggttttttaattttctctcttaataggggaaaatgagaatagaattggtcttatttcttagggaccactatcaatatataacctcatgggttattaattttaagtatttctaatttagatttcaatatattagaattatcccttaaagtatctacacatttaacctatggcactttaataccagtgacttgtggtgattttggataataatcttccaagaaaacaagacctagaattttctaattttctctcttaataggggaagatgagaatagaatgactcttatttcttaagaaccactaccaatacataacctcatagctaggttattaattttaagtatttctaatatagctcatcaataaattagaaatatttcttgaagtatctacacatttaacccatgacactctaatatctagtgacccacaattactaaaatagtaatacaccaatacatatgagtccatattaagaattttaatctaatagttggtactacctatttcaacaaggtgcatcttattttcggtggcccatcacttgagaagcccaaaattaagcatgcttgacttggagtaatcttgggacgagtgacatattcctgaaatttttcctaagaattaaccgtgtgattgaggcaaaaatatgctaaaaatacttgtattgatttgcatggccaatgatcattctaggaagcaactagaataacgttgtcaagattctagaatgaaaaatattctttgtattattgaaagagaagaatacaagcctataaatagagtgagctagtgtacacgagatctaaccaatactctagcagaatacaactaatttatgttataaatattactaattaaagttagttacaaactactctatcagggtaggctaaaggcttgaagagcctaaacttctctcaacacccccctcaaactgagattggaggagctgtcaatgctaactttagatctcaaggtaggaaaccttaagctggatattgctttggtaattaaggcaatcagtaatctgatctacataggaacatgcctcacttcaagttctttgttcatcattttttctcgaacaaaaagtacaagtctaactctatatgtttagttcgagcatggagggctgaatttgcagcaagaagcactgtggtgagactgtcacaccatagaattagatttgagggtaacgagacatgaatctcagagagaagagaattgatccatgtgatttctacagtcaagcttgccaagctcttgaattcagcttcagtggatgacctggaatattttgctacttcatggatttttaggctataagatttgagccaagatagatgcagtacccactggttgatcttttatcatcattatagatgccaaatttgcatcacagaagcctatcaaatttaatgagggagatttcttcaggtgaatgccatagtcaatggtccctgataaatattttagaattctctttattgtactccaatgtgatgggagagggtatgcatgaattggagaactttatttacacaaaaggagattttaggtctagtgactattagatacccagaccaccaactatagatctgtagacccatttgcagtcactagacctgcaaaccaccaactatagatctgtatacctaagaatttatttatggagctatctacatttttcttgatcctatagatccatttacaaccaacaatagttcttctaacaaggagttcaaccacagtccgtgtcttatttttttttactaaggcatcaatttcttcatgcattgctctgaccactttggatacttaagggcctcaattattgagttcggaatcaagctaacaatgagcacttgtggcttaaaaatccattcttgaatttggtgtgcattgactgagcattaatagtggtaacatatgctggagtaggtgttgcaaatgttggagtaggtgtttcaaatgaagagggggattctgttgatgagacatcagtacctctgtttaaaatagaagcaacactagaagaagtgttaatggtgttagaaatggagacaattggaacattatcttattgatcattagtagaggatggataagtggatggtgaaggaggcagtggtgaaggatttacagggtgatgtaaaggtggggaagcaaagatactgggggaggggacatgatgtggaagtggaacttgagtctaaataatggaaagtatattga

SEQ ID NO: 222419 - DNA, 1431 bp, Cannabis indica
agctggaattacctttgaacaaagggatctgaaacacatccgggttcgggctataccacacatgggctttcctcttcctagtacccagacgatgaataataagctcagataaattaggtggattcgaaataatagaaggttgggctttataaagatccaacacttcagggccaattaattggttatataagttttgcaactcaagttcagtactgggccatctcaggggggtgggctcaggaaagttgtggggttgttgagacctgcaggtccaaatgtggggtatatctaaacattgggtcagagtaaatatcaggaatttgttctccctccaggtccggcccaataggaaaagcaaaatctggagtaggaagcacgtgtaaaacattcctgggggaacattcaaaaattgaggatcctccgaggtaggtaaagaaccttggaccacatcatcctttcccaagggaattttccccctgccatctgtcccttccgtaccgttttcatgcacaccatgcatcgtaccttcatgtacgatgtccttacccttccctgccgaaccggccaagcctcctctgtctccttccccagcagcaaccttccgatcaaggttccttcgcctccaccgtcccttggaactacttccatcttttgcaaaatcttccttggtaccagtagtgatttcccgttgagtacccttgttggtaaagcaattaccatgagctccatccactttgatccatggcccatacattctaacggccgtccccactacaggtgtcacccacgccgtcggggaaagacattcccggttcaggtgggccagttttccacaattaaaacatagataaggcagcttttcgtattttaattgcacccatgactccggattagcaccagccttgagaaaaaaacccgcagggaatggatggatgatccaaacgtcaatccaacatcggagaaaaccccttcgcacaatttcttccttccgttttgatgaagtgacctattttctttgccacaataggagcatttgtctccgataagcatctcgttggcaagccatgaatttccacccaaaaccgtgccacttcgaaatcggacaatcgcgcttcaccttcaataggccaaggctttaggttttgcagtactccattaacgagccagggacgcctattcatgatcagttcacagtcctcctccgattcaaagaaaaaacccaaaacaccttcctcacatttcttcattcaccagccacgttgggtcttccaaattccacttagaatctttcgaaccaccgacgcaggcatagttttgcaccccactgactttccctacgcaagcttcttaactacaatgtcttccaacgttaggtctctaacagctcaagcattcaatttcctactctcactatctcgctcgtgaaagttc

SEQ ID NO: 222420 - DNA, 1140 bp, Cannabis indica
aaaaaaaaaaattgaatgttaaattttacaaaaattattatctattttgtttgaggtcaatttagtttatgtgttttgcaaaatttaatttaataacaattttccaagaattttaaaacaaaataatggagagatattcaatgaaaataataacaatgtattttatacaaaaatcacccaatataactcaactatctaaagtagccaagataaataacacacgtacacaatgaacctaaactattattacattacaaccaatgtagctgtatattcataaacaatctgactctcaatggtgtgagaaataggtcaataaaacaataatctgaaccccaaaagaatctccaaatacaatagaaggaaataattgataacatatgatgaaaattgtaacaatctagtacaattccatcactagaaatcccatggcaaataacaaaacagaagaagaactatataaaggagtggcagctgatggaggcagaactgaacggcttccagtagttgctgttggagcttcagacccaccagttgtagttggaggagttaacaatggtgtggtgtcggattctggcgaaagtgctggcgaaacaggttgggggattgaagagcctgctcaaattagtaaaatatgatttgaatatgtcatttcaggattagtttttgtgattcaaaaattatgtattttaaaatgtgttctagaggcaaaaatttaaattttgtaagtaaaaaattgtttttgaatatgtgattggtcgtagtgtgatttaatattttttagttttgaaaaattgaatatgtgattgattaagaatctcaaaataaaaaaagtacgagaataattggagattttttgaatttcatgatttgaaaacataaaaatagtgttttcattttttagcctaaaactcaaaataatatttaaatttagtttttgaaaacactcaaccaatcaagaattcttattttaattttcaaaaacataaaacaattttcatatcctaaacaaatcttaaatatttgtaaatacacaccctttttcgctgtaccagcacaacgccaaataagtaagacacaaggccaaatagtctcttatgaaacagaaatgttctatagtctcttatgaaagttacctgt

SEQ ID NO: 222421 - DNA, 1234 bp, Cannabis indica
tttctttacttaaaaaaaaaaataaaaaattgtgaaatttttctctaaattttaaatgtgcacttctagaaatatgagatatatcttctattgaccttaaatttggccaaccgacaacggagtcgtatttacaattgatgcttgtcatgtgttatacaataagaacagaaaagtaaatgagacataagattttatagaggttcgacccccttagtcagtcagaatgacctactctcaaatcactcaaatcacaagtgttgtggaatataaagtagccctcttaagactacaacatgagaatcaacttgacaaatctcaagcgagaaagagaatatgcctatggcgtgtgagtgagaagggatagagagttgagttttagacttagagcttgagagcttagagactcagaacttaagacttagggaattagggtttaactaatgccatttgtatagtagagattacatcatgattaaccactaatatcccttagaaatagttaaataaagctatatttacatgattaaataataaacttcaaatgacttaattatccctcaaaaatagggaagttgctaatattttctcctattttcgtgggttgttaaggcccgactcccaacttagcttgcttcccacggatgaagtttgtgcaccaaaggcctgccatgtaatggctggctggccatgcacttgccaggtgtaggcttgtttgttaatttatcgtccctcttaagtacccggacctcgtgttagttgaagtgttgcgtagatgacttggccttcttactaatgagctatacacacatgtggtattgatcttggctacgtggacacgccacgtcaggtctgcaaaaatcatcactgtgtagacgtctatacatagggactttttgcagcttagtttcgagagatgtagtcttaaccaaacaaatcttgcattattatttagcctttgaaatactttctcttgcttgtcttattacattccttggcaaagagctgataacattacatttatgcatgtttttttatgtatgttgcatggcaagtgagaaagggtcccacagaagctatataagcttttgggagtaacttttttctcttttcccacatttcattccctctcttcaagaaaacaagttaggaaagctcttcacttccattgaggtggatgaccctttgtcttccaactcaagagatttttgtgctatatcaatgatccatgctttcc

SEQ ID NO: 222422 - DNA, 1332 bp, Cannabis indica
ggctgattttggtctcaaagagaacaccaaaaccaacttatgaatcctgcaaatgtcaaccacctcaagctgcttctcttttttatgcagccctctaacattccaccccaaaacattgtatctgtccatcattaagacaatcttgaacagtaccaacaacctcctcctctaccttattcaacaccacatatccgttactaatgctagctttagtattcagattcagtatactttttgagccttttttaaggtgtaatccattgatttgcatcattgctcttgtctaaatcagcccccctgttggtctcaatttttccctcttcattcttcttttgcatcacattaatcacattcatagcccctgtagtatttgtatcagccttaagttgctgatcttgattttcctgctgcaagagatcactctgctgctgcctttcatcacccgattccatcatttcagtgtttccctgcctcattttgccttctatcttggatgtttgttgtttcttcttccaaaccaaaggtttgtctttgttacaattagcaacagtgtgccctaagagagcacaagctgtgcattttgatggtaaccattcatattcaacactttgttctattagttgctttctctcatttacaaatgtaatagttttaggagggaagtccgaaatctccacatcaactagaactcttgcaaacttgatcatagacctctcaagtgttactttatccaccatgatgggtttgcctattgtgctcaccaaagcactcaaggaattcttaccccaatactgaagatcatggcctaaggacaaccagttttttttatcaaaatggatcactcccatttcaagaatgatatccctggttggttcatccctgaagctaactagagtgaaaccagaatgcatccttacaatcttctccactcctagtttcccccgtattctcctaataaacccctcgaaaaccttgaacggtggattcgcacctagcacaatatagacagtagaagatttccagtaggaagcctccacttctacttcctctagatcaatttttgccacaatatgatccccaattttaataggttcagtataatcaagctttgaagaaggagttctaacttgattaacattgaaattgctccatatgtccttaggtgaagcttggaagtcagttgcctcagcctcatcagcccagcacgaaggccgattcagtttcagcatagtcaaatcttcatcgtcttccttcaagacgttttccagttcatcgcacgggtcctggagtatctctgcatcttgttcctcttggtgcgcaggccgctcaatc

SEQ ID NO: 222423 - DNA, 1401 bp, Cannabis indica
gggcataaaacccaacatgccaccctttaaaacataaattaatatgcattttttcaaaaaatcctaaaagggccctttattcaaaatccttagcctaactatacctctcacaatcaaacttctgtttctaggagtagaacatgtcatctcaaagatacatctgtttctattgtttcaaatttcgtaaaacgctgatgtcataacagcgtttactattctgttttggagatcatcatgccagccacatcacctgctatatatctcagccaaagagccaggccaacaaaaggaccccagccacttgttaatttcagctcccacctgctttgtgaaggtacagttgcaaaaaaatgatcatgagtttcagtcccttgatcacacacaggacaaagctccacctgaatgtttatgatcctgcttaagaagtctctgacgaggaggtgttcattaatgacctggcagaaataaatcttgtgttttggcaccatcaaattgtccaaaacagcacctgcataatccactttcagctcacccacaagcaagttataatagttttttgccttatattttcctcctgttatagcaagttcagagaaataccagctaaaatcaggctttttttgataattccaaacatcctcgttcttcagataaatggagttaatctatttaacccataagctatcttgcttagtcgccaaggcccaaaggaactttgccataagagctttgttccacttttttccttctcggaacccactcctcctagctttttggggaggcaaaccttttcccaagaaaactcaacccacatctattgaattcgaatctgatcttggtttgtcagaaacagaatatgatttattaaaaatcgtaatgttcttgagcctatggtttattcaaggaagaacatctgcgaaagaagtagagaccattgaatcaccaaatggaagccctgaacaatggttcttcaagtaccccaggcaattcttcttctatccctagttcttctttgtctccaagtaatattttgtcttcacaatctgtttcaagccctacatctgaagctctagatcttcctattgctcgtagagaaggaactcgtgcttgtacaaagcatccaattgccaaatacatctcgtacaatcacctatctgataactatagagcatttattactaatatttttgaacttgttgtgcctagaagtatacaggaggcactagatgaaccgagatggaagttggcagtggatgaagagatgaatgctttgataaagaatgggacttgggagattgtaatgttaccgagggacaagaagattgtagggtgtaaatgggtgttcacagtaaaatttaaagctgatggaagtattgagaggtttaaagcgaggcttgtggc

SEQ ID NO: 222424 - DNA, 1225 bp, Cannabis indica
gcagttcaagtagctaggcagcgcggcattctcataatttgggtacccaattcctttgtttttctttttcctaactttaataaattacttcacttttaataaaccagaacctgttttcgtgtaactctgtatgtttgtgtctactgttactttaaagttggttataaatatgacaagtataattatgtcatttgtgttaaaatatactattttttttgtataggttgttcgtgagcatgacccgaaaggtagagatgttgaactatttcgccggcatctttatggtgatggtaaattgggtccagttattaagggcagtttaggtgcagaattggctgaagggctggtgattaaagaagaagactataagctggtgaagacccgtttcagtgctttctttaatactcatcttcattcagttcttcagggtgcagggattgatagtttagttattactggtatatatgtcaaatactcaatacactaaaacttagcttgagttgtttcttttctttttttaagtttttgggttgtgattttgtgagttaccatctttaggtgttcagactcccgactgcataagacagacagtttttgatgctgtggcgctggattacccgtctcttaaagtcattgtcgatgctacggctgctgctacacctgagatacacacaggtatgagcttgaagaatatacctttcataaatagttgatttattatatgcctaagaacaaaattgcttaatatcaactttatttgccttgccattatatagttggatgtgttcatgttcagggttacatagaaaaagtagacaagttttacaagttacatccatcacccatgcctgcattaagttttcaagttcaaatctcttagtctgatgattaacttgatttgctaaattagtcctgatattttgtttggaaaaaggttataggaatgcccaatttctcacacatactaacacaccatgattgatatggaaatttctctctttttattccctgaaccagccaacatacttgatatgaagaatgttgcagtgactacaccaaccttgaaagaatggtctgagcatgatgcttgacggtctccggatcaacttgggattcagcccactcggcctcggcgacacgcaataaaataaatgcctgttcctttaccctatgtttggaagttgaattttagtggggaaagaaaaatgtaagaaaaaaaaaagtg

SEQ ID NO: 222425 - DNA, 2676 bp, Cannabis indica
tatatagaaaataagtaaagtggaatatttttactcaatggaaaaatagttaaccaatttcattgtgcgagatttttcatttttccaaatatataatatacatttttgggctaatatagggtttttagaaaggaacctaaagatcatttcaaattgtgtagtcttgcacataaaaaagattctcaagtcatgtatatattatacatattttgtcactaaatttgtataactagctctcagaaataaaatgcaatagaaaatagaggcatgcatatgcatattatttaaatggttcgactaataagaagaatgtcatctcatattttttttgttagaaataaaaagctttctctagttttgctttgctagggcattgactttcagcttcgtgttgtttgcaatggcaaattgaggtcacctgaggaagaattctgctcaagaattggtgtcaagaaagctaaagcaaagaaaaatggccctacatttttggataggattattaaaaccagatctatggatgcaatgttaggggtgaaggaaccggagataccagatcgacaatggtaacaaaggatctcatctagtgtggaaaagtctactcgctcgaggaaacagaggagatcttcaatcaacgaagtgaattcgtcaggatttctcagactagcttagtgcaacaaatcaggttactcaagatgtcactgttgggaagcaagctactctcccaatatggttctaatgttgtccgtagcttggagagaagctttgatggtgccaaagtggaggattccccttcaaaaatttcaatggcagctgagaaaatgaattcaaaacagagacctaaagtgaaaattagctttgaggatattgcgaaagaggcaaattactagaaactatctattgtgtgccatgtgattggggctaatccccctatcaatataatagatggttttgctaggggactatggaacgattcaatggtgaaagtgtgaatggtcaatcgtggagtcttcataattcgtttttaatatatagaacagagagataaggtgttgaaagaaggatatgtgtttttcgattaaaaaccagtggtcatgaagccatagaatttgattgacgacttcacgaaagatgagattactactgttccaatttggattaagttgaaaggcctagacatcaagtattgggggaatcttctctgtttaagattgtatctcaactaggtgaacccctccaagtggatacagtcacgaatcctcatcgaggccagtctagctcaaaacttccctgatatagtatcctttacggatgaatttgatcatgatataaatttggaagttaaatacgaatggattctattagtatgctataatttttcaggaataggacacgatatatacgaaattatgcaggaaaaaagagctaatgaaagaaacaaagcaggtatggattcctgaaaagaccacagaggcacctgttgtagataattagatggctttcagatagtttctaaaggaaaaaaaagtaatggttgaagaagctcctacaaaaacaaaaccggttaacaaatttaaggctttggaaaatgatcaagaagtgggagactttttagcagatggtccaatgtttaatatgggagagggtggatccctctacttccatgaatagaatcttatgttggaatgtgaacagccagcaaaaacgtcaaaaaatcaagcaattgattcatttaaaaagagctaggttggttagtctcttggaaacaaaggtgagataagaatttgggaaatctttatgctagtttatttcatggctggtgtttcgcaaatgataatccatggatagataaaggtagaataacgtaaacttacactacaaaaaaatcttagttttagtcacaacaaaactcgtgactaaaagtaaaaaagttatggctaattatgaatcatcattttttatattgtgactaaaaggtccgtgactaaaggtattagtcacaaagattacaatttgttatgactaaatgtacttttagtcacaatacttgtgactagacaacttgtatttgaaaattataatttagtcacaactagcaaatcactattgtccttactaattataggaaatgtctctagttttaatgtttacaatttataattaattttttttatatgtttgtgtacattgtaattatactaaatattctacatttaaaaatttagaataatttgtagtgtcagaaacaaaatttcaaacattcaactgaacgcaatgcaaatttttaataaaaaaagccaataataataaaattactcgtacaaatctttaaattttattttcgatatcgtaaattatttcacaaatagatagaatgcttattataatgggatattggcggctaaactacctgaacttttaatttagcattctatttatttttaataagcgttataagcattctatctattttttaaattaaaaaaagaaaaaagaaaaaaataataatttttttttctgatttttgaattttttttaatatttataattatttttttaatattaatattacgtggaccactaaaactttgccacgtgtacaagtgtgttaacgtggacagtctaccgtggcacttaactgtgatttttggacggaggtgtgcagagcaaaacggaacc

SEQ ID NO: 222426 - DNA, 1376 bp, Cannabis indica
atgatgatgatgatggtgaagaaagatacatatttagtgtcattataattattacttattattattgttaatctcaatggttcatgatcagtattattatttttcaccaatctagttagggtttacaaaattcgtttaagaaaaaaaggaaaaagaaaaagagaaagaagtgtttagttttttgttttttacagtgttattgttattattattattatttttaattggagagggaggtgggttggttggttggtggggttgtggctgatcatatttattttcatttgtgtacactataaagaaaagaaaaaaggttattattgttgaatcccattgtggatttcataacccaaataaggtgtttttgaaagagataaatatatatatagagctttttatattctcttttttctattttgtaataaattgaaaaaagaaaatatattgtattgctcttgcttttatttgattatcaattattcaagatgaaaactgttgctcttgtacgcgttttattaaatgtcacaaatgcatgcatattattggttcagtttgtatattaatatatatagagagagaattctaggttggacattatacatgtattaattctaggaagatataatgtatataatatatattgatttgaaagacagaatatatgaagttgttataatatggttttttaaggagaaatgctaggttttaataaattattattattattattatatataaagttgtttatagctagggctctaaatgtttggtgctggaacattaataagagcctactcactcaatgctaccagttgtatggtacttgggcccaactccaggacaggtatgcttctctgtagctctgataaattttctctattcctctctctattatcattaatttatttgttttaatgttctaactcactttttgctatcaatatttaagtagctttacatatttacatatatgaactctggaaacgtacgtacaatacagtatatagatgaaaaccagttattattatttatttattattagcatgattattaggtaaagtggtattcttttcaacttaacgtacggtcatctatattaattattacttgataatattagggtttagtatatggaccagatattaaattagaccaaatatttacaactattggtgtcttttaacatttttcataatattaatttttaatagtaggatgatattttgtgatgctatttagtatcatcactattgattttcttataaccttttagcatttttctattttgtgtggtggtgccgagaaaagtgtagtgtgacaattctcatttatggaaatccaaatctatttatctggtttaggttataagaaatgtt

SEQ ID NO: 222427 - DNA, 1168 bp, Cannabis indica
tattatagtaccaggaaaaactcctgcaaatccatcagctttttcgatcagatcatcaactggcaaagcagcaattgactcatccttctcttgtcctaataaggcagaggatggatacatgtttgtacccattcctaaacggcgtccagtctcctttgctattgctagttgatcacctaatagagataaaaaataatgaaaaaacaagtgaaaagtttgcaaagaaaacataactcattcataaattcatagccaaagagctgtgatattggtaaaggaacacacctgtgatcattttaacattgaccccgagatataatgcctttcgaattgtttctgcactatcatgtctaggaggatcaaatagaggcatgaggccagcaaatttccatggtcctcctgggctttcctttcttccatctgaaacttcctgtagaaaataatgctcacatgtcaacaacaacagatacatgtctgcactaacccaaataagaacaatattataacctggtaagctactgcaagggatcttaagcctctttctgcaaacttatcaatcacagcatgaaccctcttttctatatcagacttattgtgagcaagattcaaaatctaacaaatgaaatcagaaagttagttactttgaataaaaatcaaacctttagaaaagaaaaaattggattagctaatatacatacctgctcaggtgcacctttgcttacacgatgcattttacctttactgtcaatatatgtcaaggctgttcgcttatcggtgggattgaatggaaggaaatggacttcttcaataccacttcgcgcctattttgtagcaaaaagtaaggagaaaaagccatagacaaacgcaaattatacccgaatacgaaagatgatagagttgaattacatacctcctttggatcagccaacatccccacaatggcagcatctattgcatcttgattttccaaacgcgaagcttgagctgccattagtactatggtatctgcatctactcgtttatcaaacacctgcacaaacaattgaaacaacatcaaaataagcattaagacttatagaaaggcaagtaagaaacaaacaaacctctataagatttttgtcaactgagagtttgtttagtgttaaagttccagttttgtcactgcaaa

SEQ ID NO: 222428 - DNA, 1681 bp, Cannabis indica
actatcattataatcaaaaatattcatccgtgaatgaatgtaacacttgcatagacatataatgccaaaataataagaacaataataataataaggctttcccagttggatctccaactcgccctatcaagatttttcttttggaaggaacctatatatatttgaagattcaaaaagcacaaaaaaccaaactatgtactatttgtacattcgagcttttgatgatcacaccaactaattaggctatcaatggttttttttttttttatgcaaaatctcactttttgttaaaggatttgtgttcgtgtgtaaactatttttatatacaccatgattttatatccaacattttgttagggtgttttttttggtttcttagcaaaattttgtttattattttttttaggggaagaaatttattcaagcaaatagagagccactgcaactgaatagaaagtccaattcaaaaaaaatacaaacaataaaaaagggaaaatccccattgcgacagctgaagctttgatatccaaaccaaatttagttaaactataatgagccaagtaattacgtacgttttctaaaatgaaaacaaaaatcctaataattaaaaagtctgagttgtgtatgacttaaggaacaaatataaaaatatatatatatatatataacgccatcaaaatagagcagattttccctaaaattacactgacctgatggaaacgtcctggtgaaaactcttccagatgaattaatggccactaaaaaatggtatattgcatgcaaagcagctcgagctctcaaattttgttaggttgtgcatagtgatttccaaatatgtaatttgaggctagtactaattaaaaacactattagccgggtttggttagaaaaatgaaaacataacaataaaaattaataacggagtagaaataaaaatagaataaatttaaaatgtatagaaaaattaataaaaaaattattaaaatttttatcatctttcattattagtgatttcaaaataaaataataattttactaaaataataaaaataaaatgacattttaatattttaaaatttaacaaaaaaataaaaatattttattttcattatattccatttcattacttccaacaaaactaaaaatcaaatcacctaaattcttaccaccattataatttatattacacatccgcatctggctgagattcagcggatcacaaatagacaaaaagggtttgtgtgcgtataaaccgggatccattggtcccataagatttagtaaaagaatttatttatttttattttattggtaataatatttttgcaatgagctttattatttttgtataataagcaatatgggtgaattggaaaagccaaagggcgtatgacaagtggagtgtccaagtcatggcggacgtggcgtccttatctgattaccctctcaaacatgtcacattctcacccttctctcttcaacttgcggtctaaactacaaacaaaatttatggcttttttctttattattatttttgaaaataataaatgaaaaaaatgaaagtgagcttggaaagaagaagaagagagagagagagctagaaattgacttggctctgttcctcatccacggggagtcattttcagtagcattaaatttatgagacatttgtaatttcacg

SEQ ID NO: 222429 - DNA, 2870 bp, Cannabis indica
tttctattgggtctatatttttcaaacgaaaaacaatgttgcgtccctgttttcactgttcatcttctctagttctctttccctgtacatattttacggctattgttatacctgcttcagatttgagttaagcattcttctatgtcaaactgaattacctgcatccatgtggttgatgataaatttatgctgctgcccaggtacatagcacatttcgtgatctgggagagtcaaatattctccgttcatttatgagtgatgctataaaggaaattactaaagcctgccaggcttttgaagtgaaggaatcagctcccctagttgctggtatataagctatcaccaagtagctgcaagcatgcaagttattcatttacagacagtaatctaaattgtttgagtttcttatgccacagttactgctctgcagacacttcgatcagagataacaaagatttacattttgaagctttgctcatggatgcgtgcatcaactgaggaaatttcaaaagaagaaatatgggttccagtatcaattattgagaggaacaaatctccttacacaatatcctttctgcctctagctttccgttctcttatggcctcagtgatggatcagatcagtttgtaagtcccttgagattatgatatgatgttcttagagaataaagtatctatccaaattggtacaaagaattataaaatccctcaaagaaaatctctttattaatgatgaaataaaagaataatctaactttcgagatgctagtatctccaattacaatctttcgagagggctgctctctcctagagtctaatctcttctatttcccacctgctttacacaatgaatcagccccctatttatatgtattggacagaataatttaattgccagctaagatctaaaaagaattaataaaacacaaccctctaagacaaaatagccagctagataaaataattgccaactagataaaaaacaaaacaattatagctggaatagaaaataacagccctatctttaaatgtctcgtggcctcctagcgtatactaacttgactggaggcttatcagattattgttacctttgatggagttattgatagatagacaaacttgaattttgtgggtgtcctactgtacatttcataccatgggaatgcaagttcaacgcacatcctaagcagaaggttatcatattaatttcacgggagttgggttggaaaaggaatgggagaaccctctgaaagttaaatcacttggaaatatgaaggtttcatgcccttaacctggaacgaagaaaattgactttaagttcaagaataaactgattttccttccttgaccagactaaatggaaacatatatggattttatccttctgttttgtgctcttttgacagatattcagcatgcctggataaagttttgattggtgaaatgaaattgtctctatttttgtgctatttatttgtagccattaagttattgtttcttatttttcaggatggttcagtctcttaggaatgaagccgcaaaatcggaagatatgttttctcaatttcaagatattcaggaatctgttagactagcatttttgaactgttatctggatttcgctggtatgatattgataagattccaacctaagtaatacttggaagtattcaatgtatccagcatttttacttgtcttccttacattaattaggtcatctggagcgaattgggaatgagctttcacaaaataaaacaaggaaagacgtttcacattttcacgatggacattctcatgaatcagaagacaagtcattgactgatctcccaggaagtgtacaggatccacatcaaagactcttgataattttgagtaatattggctattgcaaagacggacttttgtttgagctgtacaacaaatacaagcacatctggctgcagtctaggtatataacccaaactccattgcttcacctcctcttttaaacaaaataataataataataataataataataataataataataataataataataataataataataataataataataaactaaagacgacccttttactcgacaccaaagcattgaactggatgactaaaatttattttgagaagaaatgaaaccaacatatttattaccagaacaaaaacaaatgcatttccaaaaccctacatgtttataacaagacctcagcaacctctcgcattattgaaaactcactaatgaccaaacattcttaattttatgtcaacaaaagagaagtgacaacattttcacatttgatcttctctgtctcaaaataacatccattatctagaactattctatcatttctttcaatcaatctgtcctagtaacaaccaactccgcacaattccaaagaagttgaatacgaatttgagtgatctgtttctgggcaaacaatgaggtctgagctcataagctctattcagaaagtcgcgaggttgggatccaattatggctctagtagcctaaccagaatctacttgtcattatttatttatttatttattgttatctgtagattatggtgaattgaattgtatgttatattccatagaatagcatatatttatatacaaaataaggagattaaggtggcgtttggttaggaatgagaatgagaataggattaggaatgaaatggaataaaatttaaaatgaaaaaaaaaattgataaaaaaattattaaaattttcaaatcttgcattggaatggtctttccttttattttaaaatggaatagtcattccaccaaaatgatagaaaggtcattccattggaattattccaatggttttaaatgtaactaaacaaaggaatgga

SEQ ID NO: 222430 - DNA, 1340 bp, Cannabis indica
atataatcaaacattaacaaaatctaatgaattttaaagctacgtgagttctacagagaccatgattttagacttgatttattctttggtgctaatttgatattaatgaacaatttaatcttttggtctcgtttctgcctcacacgtccatgtttctgtatttacattctcagctattgtagttaaacttaattcaaagacatattttatcattgagttaagaagtcagtgcttcaaaatctataaagctagaagccatttcgtttatgagaataggacattttgttaagttgaagaatggctttttcttccccccatccatgtttgaactaaggttattcaactttgtccttttgtcttcctaatattggcagttgtatattcaagtttttcaacaaactaaggaaattagattttttcttttctttctttcttatggttttgtttgttaaaaggaaatggttataccaccaccagctaggccaccaagtttgacaaagtatctcaagccttatgtcttgaagatgcacttcacaaacaaattcgtgactgcccaagttattcatacaccaacagctactgtagcctcatctgctagttctcaggaaaaggcattgagaggagcaatggattctactcgcgatgtggctgctgctgcaaagattggcaaattattggctgagaggctgttgctcaagaatattcctgcagttgctgtccagttgaaaagagaacaaaaatatcatggcaaggttaaagctgtggttgattcagtgaaggatgcaggagtaaagctgctctaaacatggtaaggccaagaaaatgaaatcacttttttttttttttatggtttatgtgggaaaatcattttggtcaaatgttgtggggaatgtagttgtgtttgatgaaaatagttgttgtaattgatctactgtgcttgatgagaaattgtactctacaactcctttaaattggaatgaaaataagcaaacgaacaaggtgaaatcattttctttattggcaaatgaaaatcaatttgatgtaattttatcttactaagtacaaaaaactgtatagatggaagtttatgtgataactacaggtgatctactctataatttaaaaaacttcatcaaaatagtatctattttactttatatttttagattaaagtaatttacggcgtaaatacctaagtttaacacccggttacaaataatacttaactttaatgtgtgtggtaataatacataaattatatttttggaatgattgcaagacagtctttaattggtccaagttgttagatttttattttttatttaaaatataattgaagg

SEQ ID NO: 222431 - DNA, 3650 bp, Cannabis indica
ttgagtgatttcgataatatgttcatgtttaaattatttagtttgtttttctttataaaaattggttgttttagtttatgcaagttgagaataatctcaatagaacaatgtaaaaagtctatttgttaattatggagagaagcattaatggctaaccaattttcaaagttaataatatgcaactgtcatatttgtactaattttgtactagttatgataacatatactaatggtgcccataacattactattaaaaaacaaaaattggacctttacttatgtttccaatgatgggtcaattttaagcaaatagattcataaagatgaatggaaaataaataatttatagtttggatattaaagtggtgacatatggttaatagcccccatagtttagttactatatcattttcaattatagtagataattggaaactaaggaaagaattttgatccattttgaagaggagtgaagtgaaggacaataaataatgtaaaaaaattataggaaaagtagataatagtatgggcagggcagaccatactcattcctaataagaaccaaaaccaaataatgatttgattttagtgaaaaagaaagtaaaaaaaagagaagaaagaaagaaagaaagcacaatgcccaaggatgatctttgaaagatgggtttgattggtgagttagttatgttatatatatacacacaaagagcactttactttttagtgtctttagtctcagactttggaacttgtaaaatatattgcttatacaatcacattccaatcaatttttcttttttcttttttttccttctttcacaattggactttgatgtgacatgacaccaccccttaacaaacacactctctctctcctcattttattaactcaaaaataaatttaaaataaaacttattactttaccatgaaattaagagaaatgttaaaatatgattatcttgttgccaattaaatattaataatttaaaataaaattttttttaaaaatatcactaataaatctaagttataaagtgaatgaacttattgcaataatttatattcatgtgtcttctgagcaatgaattaaatttaaatataatataagtatttttaaaattaattgttatactatatctttttcagctgattttattttaattttcttatcaaataatttaagaaaggcgattcttaattgtattttcgactgaaatatatatactaattgaattgtatattattattttagctaattgttatgaataaaattccataattaattaaaaaaaaatcaaaatttatagaaaagataaaataaaataaaagagtaagaagagattgcggatacagttgagtgacttagtcaaaattttctatctcttaattagttttcttcttcttcttctagttcttctagtatatcaattatttgaatattatcataacaagtcctccaaattcccattaattgcaatctgaccccttcttcttcttctttctctctcagatctgacttcactcactcatttccacacaattcttttcattcttcaatggacgccaattccggaggcgcaccaccgccgactacgcctgttccggcgtctacttctaccggcggcggaggaggaggagggaatgacgtcgagttactctgcaaaactctacaagtcgaacacaagctgttctacttcgatctgaaagagaatcctcgaggtcgctatctcaagatttccgagaaaacctccgctactcgctccactatcatcgttcctttctcaggcatctcctggtttctagatctctttaattactatgtcaattccgacgatcaggatgttttcagcaaggaattgcagctcgatacgaaggtatctttaccttttcttctttttcagctttgttctttgttcgaattctctctttttttttatatagatttctctctctttttctcaggttttctacttcgacgtcggtgagaacagaagaggtcgtttcctcaaggtaaagctatctgcgttgaccttatcgttcttttttttcaaactatgtagatatgtaagtacagttcagtgcatgactataggttgacttttctatggcttcagttggattggattggattggatttagtaatataaatatacatatataaatgttgtacttcatatactttttggtcattcatttcaaaaaaggagaaataaagcctttgattctgaaaaagagtgtatttttttatcaatctatggatgaacagtgtaattgaatatctgcaagtcctatcctacagttcatcaaacaaggaccaaacatttttcttttccttcaatgcataacatgtgtgtgttatgtatatattggattcatgttttctttatgtttatgcagtttttgcctattgtattggtgaaaagctttttaattgtttggtttggttctttgtttctgtaatgctgtcataataaatggagttatgagcttaactgttgtgttttcagacattcttaattattgtttcataaatgggaaacaaataaattttgaaaatttattatgttacactcctactgtcacgtcactttaagaaaatgtattcttgcttcttaagtactgtgtttattcaggggtctctgtacactttttcataatacatatatgtgtgtgtgtgtaagaaggtctctcttcagttattccaagttaagcagtcgtttgtgtggtttgaatttgttgtgttgacttaagttgctcactcacagagacccttttttgaaacttttcctccctactactcaaatgtcttttaaattcatgttctgctttttgggtttagcatattcatttagagtgaactgtgaacatgcctcaattcgtgactccaattattgtcttatgtcagtataataaatacaaagaggaaacatattctattcttgatctagattatgttgcaatgagcacaaatactgagtacatttagatggtctttacatgtaatacacgactccaacttgtgctgcgttgattgtcttagcttgctcttctcagttgctgaagttggttgtttctgcaggtgtccgaagcttctgtgagcagaaaccgcagtactatcattgttcctgctggaagcaccagagatgaagggtgggcagcatttaggaacatcttggctgagatcaatgaagcatcaaggctttttatactacccaaccaggtagctgtctttcatacgattaacagtttcctttgctttgcctttttatttagaagtgaagagtctcatgagttcattgttattttctcctttggcctggtcttgcatcctgaataacagcaaagtggtgaatcttcagaacgtattgttgggctttcagatgatgttggtgctggtttcatatcagggcacagtagtcagccagccacaaccactgaactgaacatggaccgatctgtagatttgccagcgcaggaagaaattggtaatatgggagtgtcgaaagtgatcagagcggatcagaaaagattcttctttgatcttgggaacaataacagaggtcatttcctaagaatatctgaggtgtgtggcctaaatatatcagattttctctctctttttttttttgttttattcttttacttaaaa

SEQ ID NO: 222432 - DNA, 1777 bp, Cannabis indica
gcaacccgacagagaaccggtaggcaggagtacaatggagtgagaaagagctcttacaaatgagaataacttcaacagagttgatgagacgctttaagggaatgaaagagactagatgacctcccaaaatgataaccaatccagtaaattagagagacaagggaaggtactgcgcttttcatagcaagcatggccatgcgacatacgaatgcaggcaaatgaaactagaagtcaataggttggtaaaacaaggtttcttccaagattttttaataacatatacggcgttgcatgtccaacaaagtatcaaaagagcttagaatcagtctccaccgtcgcacatcaagaaaactatgaatgtaatttttggagggtcagatttaagcagattatcagtaaaagcctcatcagcccatgtctgacaagttcactccataagacccatgtcagtcattgatagtgatggaccaaatgtgcaaatcacgttcaaacaaagtgaatcatctgagctaagccatccccacgatgatgcactaatcataacattggatgtagcccatgtgagaatgaaaaggatgctagttgacacaagatgttcagctaacatattgtttgtataagtgttgaaggaaatggaaatcgaggatatgaaaacccagagcactcaagtgacgttgattggtttcttcagggcaagtgcagtaaaaaaaggttatgtggagctaccagtgtactcaaaacggggtgaaaaaactggtaaagttcttggtaatggattgtccatttgcataaaacgcaatcttaggtcacccttggattcatgccatgaatgttgtagcatcatcctaccattaggtgattaggtttccatgcaaggggaagataaaagagataaaggagaccaacaaagtgctcgagaatgctatacctctccttgagatgcaagacaaaattatagcaattagttaactctttgaatgtcgtcaacacctaaactcctacaatcgaagagttgcaagaagtatcaatccatcctatagatccaaagaaaacaacattcatagatgcaaatctcacacgagagaagaggagattacaactttgctcaaagtttattaccaggtatttgcttgggatgattttgacatgactggcataaatcctgataccatcacccacaaatgtgaacccaaattgcatccccgtcagacaaaagagaaggaagattggcatagataggaacaaagttgtgaatgaaaaggtgggaaagatgttgaaaaatgacaccatcatggaagtactatacccggcctggcttttgaacccagtggtagtttcgaaaaagaatggaaaattaagggtatacatagagttcaccgacttaaacaaagcctgccctaacgacagtttcccactgccccacattgacatgctgattgatgcatataaacttcatagccttactaataaatatgttgtaacctcaaataatttcttatatatatgttgaccttaaatttggtcaaccaacagcggagtctatttaatgttgatgcttgctacgtattacacaataagaatagaaaagtaaatgagacgcaagattttatagaggttcgatctccttagttagcggtaatgacctacttcccttttggtattattgataccagagagaatactactcaaatcacaagtgttgtggaatctgcagtagctctcttaagattacaatttatgaatcaagtaggcaagtatcaagagagagagagagaga

SEQ ID NO: 222433 - DNA, 1534 bp, Cannabis indica
gtaaaaataaaaaaacccttaaatttatcaaatataatacagtaatatttaatttttcaattagttaacgccacattttaattaaaattttatcaaaacatacaacacaacttaaatttcagtcgacattttctacttgaagctaaattttcgataatattaattgaccaaaaaatagtaaggggaaacttttaaaaatgaacttgtccaacgaatttggacaacaccaaaagttatgcaagtattgtaataatctgaataaaaatagtgtgaacactcatttttttttttgaacactcatttagaatagcgaagatttaacaatgagctaccaaaaacaaataatgacacaagaaaaatatggtggttcagtgagattttggtctgctttagtctactgttgcaaataatttctgcttagtttatttgatttggatcactcctttatatagaaagcaagtgtcctttcagttgtacatgactgatctattttaaaaccatttttacaataaatgatagtattaaatcagaataaacgtaaaataataaataaagaacagtttaattcgttcttgtattaagtctagcaacgtatgcgacttatcgagagctagttgcatgttcatattctcgcacaagttcgcaggctttaggtgcattctatattcgctaaacggctaatgggcctatcgtttggatatctgcgttcaccttgaaccgcattgatggacatcttgtgtgttgacaacatgggacatgcgagtctctgtcgagtcattgaacacgatttgttattcggacaaatctttatgtaaagaagcgatctttactaatcgtaggagaaaaactacttactcatcacatatatttcgatatatatgtatatatatgcgagacttgtataaaatcctctcgatcctgcttaattatcttatatttttacactatgcaaggtgctactagaccttatcaaggtcgcatcatctcacgaggtcatatcaagcaaggctaactctttgagagtcattaattaacaggtcatcttttcctcaaaaattagatccacgtgtcaattttaaaagattactctcaaattattaagcgaaaaattagcactataagaaacttaaaaactatatgtatgtataattaactttaagaattattattgttcttaaggatacactaaatacccactgtaaattaaaaccgaggcgcgttctatataataacacacgcaccaagcttatatggatcaacactatactattgcaatttgcaaagaaatatatatattaaattacaactatatcattcatatatataaacacggggtaagttttttaatttcaagtgagacactatccagctataattatttaaggaatatatatattttttatttcatggcacaaattaaaattcttaaagaaagcaataatcacgagttatatatataagataccatttctcaactagttgatacaacaataatagaatattgaaaatcaacgttgccatcagctacagatcc

SEQ ID NO: 222434 - DNA, 2079 bp, Cannabis indica
ctttacagatatacacgtaatttcaaaaaaaccatactcaaaatacaaaaaaaagagcccaatccaatcgactctgttattgttgtctcaattcaaatataggatcaaaatgaagtggtatgtttctaaaccttaaattaagttgttctatttattaaccaatattcacttgttggatttttcaaaccctaattaacattaaaaatggaaaaaacctaataaatagatactttaaaattcagttaatcaaccatagttagataatccatttaattaatctatctaatcttaaaggtaaatttaccgtactgttatcatttattcagtatattaattacgatatatgttattgttttttacaaatggagaaagggagattcgaacttggtatcttgagattgaaacggtattaccattatgactatagatattatctatgtgttgttgttaaattcttacataaacagttggttacaacactaccaacaaattaagcagttacacgaaataaatttaagcctactacaactaaatcggttataacaaacttatccagctcaacaactaagcctactctcactaatagactacagaaaaggaaaagaagcttcagataagagaaaaccttatcagaatattttccagttagaaagagaacaagctcgaagtgaagaacctattaaagaaaaaacaaagagagttagagaggaaaagttgagagaaaactagtaaaacaaaacatagagagaaagagagagggagagagagagattgcattgctctgttgtagcttggatcctcacacttgattcttgtaaccttttgatgttgatagtccacgattaagcatctctgacgcgagcttgatggagacgtaaccctagattagggtgaactccaaaatcaaatctcttttgttctctatttgtttttgtttgtttgtttgtttgtttatctctaactaaaccaaagatcaatttatatcttggttgattgtggttttgtgtttctccgtagggttttgtaggatagttaaaggagtacggatttcaaagctcttgtttgagcttgaggggtgaagctcgggttcgagcttggagaacacgaaggaaacctaagggctagggtttcggaagtggatcaaaagtgttcttcatcttttagtattggttttatataaatccaataagtggttatttttaattctttaatttgttttttcgcagaattatgaaatgtcatatttgatcttgtttcttaataatttgtttagttagtgtaggtgcatattaaggtacttaaattcctacatgtatattataatgttagatattattatcccaaaatttgaacagtatatttggagctttaggacccatgccaagtggtataggatccacttaaaggatactcattgtcttatgagcataactagcgagcaatcgcctagagcatgttccctcgagagattttcaaggatgtagaaaatcccactcgctacagcttaaaaatagagaggctcctctaagaaggaagggtctaggaggacctaaccctttagttgcttctccaagagaggtggaccccacatgtcagcacactaaaagaaaaattattgtagcatgtcccttacgcaccaatgaaaaacaagtttcccataaagcgaaataaatattagagttttcccactaccttttcttatatacacctttgccatgagtctataggcggctcctaccgtcacctatcacatcactagtggaccagtctcgtccacactcacttaccactggatttgggtttaagccttggacccaaaggaagggaaaatcttcattttagtatgcagaaatactctaaatgggcaatctttaagtgatttcctcatcatgggcctctaaccagcagggtccatttcaacttaacctataaataggagggtcataaccattgtaaggggatctgagactttgatattgagcaaaatcgctaccaaaacctctaggaaatcaaccatcatagtaatatttaacataaatacaattaactcatggactaaggcctattaacacttaaact

SEQ ID NO: 222435 - DNA, 1694 bp, Cannabis indica
tatgaagataaatatacataattaacatagacgtggcaatcataaagtgaattattaagtaagatggctacttaaaataattataataaatattaattacccatcataatagtatacaaattgttttataataattatcattccatatataatagatactaaaaatgtatactttaatattaatatagtaattaaacatatgtaataattagcgtgacctatttttgtagaataaaatataattttatagtcataaatcagatgttaatagccattctatgaaaattatattttttttgttgcttccaaaatgaaagtttaaatatatttatattttgtcaagaataagatattgtatttgtaaacatgtcttacagacgagtactaaatggaaggaggagtttcttctaaccaatgaggtttattgtttaactaaaaggtatatttagccaattcataacctgtaacattaaaattaacactaaaattagattgtgatgcccttaaaaatttagaaaactaataacagagacaagggagcctcaggtagccatgcccctataaataactaaatatttaatttattttttgaaaaatttatattgaattgaattaagttataataaaagacgggtgaatattattttggaccctttattttgcaaaagttactaattagactttctgttttgttaaatgataaaataaatcctatatttttaaaattgtacaaataggacttgaactgattttttgtcaaaataaaacttaataataatctaatctaaaattgttatgacaaaactggttacttttatatatctattcgtgttagaaattgtcttaaagttagttatattaaataataaaatttttgaaaattgaactcagagttctatttttattattttagaaaatatagttaacaaaataaaaagttaaattagtaacttttgcaaaacataatcttcaaaaactcattatccattaaagatatgtaaaatccatagctcatcgttacataacataggctattttatgcactaaaataggctatatattgactttccccgtgagtcttaattctcatctcactaacaatattccactaactcacttgcccaaataaataaatcttttctacactttttttttctccaataaggcttggggaaagcaaaggaggcaattatgtattatcttattaacatgttactaattaggcttgtttgcactcttcttattcttatgacaacagaaactacaaaatgtgcattctcaataatgaaaattatgaagacagcttagaaacaagagataaaaaataactttttgaatgattgtttagcaatttgtattgagaaagatattaccacaacgttgattccattatagatgagtttgcatctatgaaggaatgtcgtgcaaaatttactagggtgagtgtgtttagatgcaatagtgtaataattaagtagtgtaattattagggtaataactaattatactatattttaaaatataatttgtatttgaatgtcaaaatgtaattacatatgaattcttatttttatgtttaacaaataagttaataattacataatttaataatattaattttctaaaaataaatagtgtaattacatttataaatttaatataattattaatcacactgtttgttaatataatta

SEQ ID NO: 222436 - DNA, 3106 bp, Cannabis indica
aaaacaatttgactgtaaggaaatgcgctagctatgcgatgaataagggattaagaaagcgttttcagcggttgcatatccacaaagcaatggaaaaatagaggcggtgaataagatcattaagcataccatcaagggtaagctcgtagaacgcaaaggtacatggccagaagaacttccccaagttctatggtcatataatacaactcctcgatccacgactggtgaaacccccttctcgctctttacgggtgcaaagccatgttgccagtcggggatggggcaggatctcaacagagagatgtttttaaccttagtggtaacacaaaaaattaattgtttcaacttgatcttttggaagaaaagcgcaatcaggctcatttgaagaatgcgacctatcaagagcgaacaactccttatttcaactctaaggtcaaggaacgaactctgcgagtaggcgatttggttctgcagaaggtcatgccaaacacaagaaactcagcacatgcagtttttggtgacaattgggaaggaccataccccatcgctgaaaaaattggtcgtgcgacctatcgactatcagacctcgatggaactgcgatcaaaagagcttggaatggaaaaagcttaaaatattattatcaatagtactcacactgtaattatacttagccaatttattttgataaatgtcctgagtatagggggtatagcctaccttttgtactattgattattgtaatgaaaattctcaaagtttttaattttttgcaagttttaaacatcgatctgtaatagtaaaaacattgcaaatagaaaagataaaagcagtttataattatgcgagtacccctgtactgcttaatgtaaatatgcaaaagaaaatatcctcgaaaggatatatattgttcgaaaaggaaaagttgaaatttgttcaaagtacaaaatgcgagtacccatttaccgctgaagagttaaaagttcaacgataataatattaaagaacttggataaattaagaagctggagcaatggagtcatctacgactttactggcagccccatcagcgacttcctcagtttccgcattctccgcctcctcagggaaaaggtttcccccgtatccttgggcttgagtaggcaacatagcacaaaaagcctcgactatttcaacagcttcagccccaaaaactgagaaatcgaagtccggtagtttaaaaaagtcgtgtaaatatagtcagaaatagcctgttcgtattgtttcttcccgttctcccttcctgtctcaagatcgcgagttaattccttaactcgcgactctgagaggttggccttatcctccgcctgctttcccttctgttccgcctgctctcttgccttttggaggttcttgacatctttctccctagaagtcacttctaacttcaatttcttcacattgtcctagagaagggtgttctgtttcctcaaaaactcgacttcctttgagccagcaacaaacgctttcgagaacatggcgatgaactgtgaagccaattttgcagaacgtggcattagttccttagaaggagttccttcaacctttgacatgaactcttcacccacaaacttgtcttcgagagctaggacgtcgcgagctctgacaatggggtaaatcatgaatttcttccccttgtcttgggcgggtctgacctacttcttagaggaatcagctgcaggagtcgcgacaacctcactcttcctcttctgcgggatgatgggagacgtggttgcagttccagccttaagcttcagctgcaggagtggagcttgcttcaggaaagtcatttctacaaagaaacaataagataagtataatctttatgttatgaaatattacatgcatactcgataacttacctgatgttggtcttgaagtttgtttggatagacgcttgtctattctctccttttgtttctcagagggttccttgtacactggttccagatgaaggctggcgtcctcggggattagcttatttctcgtagtttggcaatcgtgcacaacaatcgccaatcgcgatcttgaacgggtaagctaccgagaacctcagcgatctctttacgagtgagatccagaagacgtcgaaccggtctatctacaatcaacaaaaaacaaacattagtgacttcacaaggtgacaaaaatataaactaagcattgggatacacgacgtactaggtagatgattgaaatctgccctaactcccggtactttgaatacgtaaaaccacttagatttccaatcccccatattagaaaccatgccttctaccccgttaatctcagaggtagcccatttactgaagcagtaaaagccattcttttgaccaactctttttatgttataaaatagctaaaatcctccattgagggttcccttcgaacatattccatatatattgcatagaatcctagaactatgcgataactattcggggttaattaaaagggagaggcatcgtagagtctgaggatagcttttatgaaaggatgaaagggtaaagagaccccacaacgaagaatggggacagagataaccacgtcctctgcagggatgattgtgggattggtgaaagggagatgaggtctttgcgatgctgaaggacgcatggttccgagtcgcaaaaaattcaaccatacaaatgtatgcaagtcagatttggtaactcgcgagaccaggtcctcgcatgaaaaaggctcattcaactgtgcatcgtcaactgaatctgtttcacttccctcgacattctcttcctctcgtgactcgcgatcaagaaccttccaatcctccccatctcctttacttcgatatcaggggcatgcctcgagtgggtaagatgttcttgagcagacaccatagattgattcactatcatgaatcttgattgtccctggttcagcgagttcctaaaccatcttatctatctcgtcaaaagatagggaacccagacacgtagctctcgcaacgggaacctcctcttcagaaagcaaggttggtatgaagctatcactcctgttctgctcgtcagcagaagccctgttggaagttattttaccaggatc

SEQ ID NO: 222437 - DNA, 3143 bp, Cannabis indica
catagtgtgtaagactgtgaagaatccaacacctgaaggagaatcgagctcagatcttgataatactctacaacagaaaagaacaagggttagagatctgagtggaatgagtcatttaactctactgcaatcaatgtaagatttcttgaactttatatgtgtttaaattccattattttagaaattcatgtttaggatttaggatatcaaacaagatacatggtagtaaattgaaatcctggtaaaataagtcccaataatatgtatatatattcaacagatatatataaaaagaagataataataataataatacaagattattttatcttttcttagccacaaagaaatttctaaccctaaggtatttggtcaaccccgagtacttaaaatactctggtaattctataatcaacttatctcaataatttcatcaaacttattaactaaaattgttgtgacattttcggcctccgatcgggtctctagggttgtcgaacatgaaaatattattatttcaccaataactcacataatatccacatattctaaataaatctctgtaattaatcaattacatttatacatccacttatatcaaaatttataatttatgttgaatcaaattagtaggatcataatcctgctcattactacctgtacataatatataataaactgtaattattcacaattaggtttttaggatattacagtttattaatacatgaaccacataaaaaacattcatctccttatttctcaaatttagtatttctttagctcttaaatatttagtttctaaaaatctcggtaaatatgttggtgctttattagaagcttaagaaagaggtagagcttaatgggctgattagaaagatccaatggcttataattcatctcatggtcgaaccccttagtgaagcccatgagttagaattttaccattattttattttcttaatgaaacaaacttgtctttcttcaataatgtcatttttttgctctagttatttaaatactaattctatctatttaataattataaataattatcaaataaaattactatttaaatatatttattaattataccctccaaggtctcttaattaataattaaaccttgagttctcttttttttctcaattaagcccttccttggtgaaaattcacaaacaagacatagtcttatttagaattctaattgattaattaaaaccaattaattgagactagaaaacaatattatcccagttagtgcagggaccatgaccctatgtaatcaagcttccaataagtagatctaaattttaccaagtaaatttcctaacttattaatttctcttgactccactatagatttggaattaaactcttaattacatagaacgctctattaccaaaaatagatgcgatttgaattactaattgtttcaatcccaatagtcaaaaatcctctatagatgatcgacatcgagtagggataaatttaccgttctacccttcaatgtattttatccttaaaacacttagctagttgtaaatgatatttcagtgaactaatataattactgaaatgaagcctcaatcatttatcgcgttaagccaagctcgaagaaaattattgtttcacttctaatagttatagaagctatagattccgtatctatgattagcgctcccactcaattatactaccatgttcccaagatgtaagcattgggtcgatctaattagtcagctttaacgaataagtttacgaacacaaaaaatgcatttaagccagaacctaaccatctcaggattaagatctattgacctaagatcaactaagtgatattgacttagaaaaatataacgataagtttatgatatcttatctaatgtcattatcggtccagtccgatgtatactccatacatctgatactagcatactttgccaatgccctgtgttatcccaaattttgtccacctgacgtggcatgttcacgtaagccaaagataaagtacaggtggagtacatccctgccagtagcagaacaaggcctccatgcaagatataacaatatcgtcaatcattaactgaatggggtgaagtgagccctcaaggagctgtaccaacatccctagctagccaagaaaagcctataggttggccagggtgatcctataggccggccaggttctgtgcataagctggccggtcaagaagtgacttccggactaagggagcttccattcgaccaagggaacctgacctctataaggaaacaatgtacaatgatgtcctcaacttgcaaaaggctggcctccacatccaaaggatggcctcctcttggtatagctatagtgacctgcaagatcctagcaggaacatgacctgccaaaccttggcaggaccatggccggccaggaatgacccgacaagaatttctagataactttacacgttgactgctgattgggctgcgaattggtccctaaaagcccaataaaatagctagataatatctgctttcaagggcactttattcttttgtaattatctagcaacctatacaaatatctagggatttaaactgtaacctaagatttatgcctcttatataaaagccttaaccctagccttgtgtaacaccctattagcttaggcgtgttaacgtgatttttaacttaactgtgcagctcgttactaatcaatgagtttattgaaaattgtggataatttaaactttatttaactatttgtaagtatcaaaataacatacttatattgaactaggatctcgttttacaaaaacatttataaaagtttcactgtgcatattacaaaagtttgtcgcccagcgactatacaaaataagcccagctgtcctaaggaccgtacgctccaggcctaaccgccccgacatgtacaatctccatctgctcgttctcacggctgctcaaccttagccttgcccttacctacacatgcaaagaatatatgtgagtcgacaaactgagtaagaaaagcataaataataacatagcaataacccgaactataatcaggcgcccatacacctaaccataaccctacccccatgtccaacacggtcccgagtctagaacgtttgtacgacaatactatcgacc

SEQ ID NO: 222438 - DNA, 2127 bp, Cannabis indica
aaccattgaaacctcttccaataattatttaattgttgaaatttagggatacttatacaatgagattagacaagtaataaattttaaatcataaattaagagtagtcgtaattaaatgatcaaagacagtagataaataaggaactatctaattgagtgagagtattaagtatgctggtagtatatttgaaagatcaatcaagaggtgattcatttgtaaagagttataataatttcagattaagaaaaaaaaataatttaagaatatatataatttaaggtattatttgagaaatgaaaaataaatattcttactaattatgcaatcttaaataaaagaatcaattaattgtgacaagtgattaaaaataagaaaagatgtgaaatgaaattattcattccaaacattgatttgattaatcatgtaatctattcaatttaataattatagtaattaataaaatcaattagatgtgactgatgcagggttctagattaatcaattttaaaataatagttttaaaaaataatatttaatattgaaaatatcaaatgatcaatcaaacaacatcaacttgaaggaaataaaagaatgaataaactaaatatgctagaatcaaattttgtatatttatccaatgatgatgtggtggtcttcgggatctgaaactacattatatggggagtctcgttcacatgacttagcctgaatagttgagatacaacgtctataagagttacaaaatatgttgtacttacttttagtgtaagtgagagattgttgggatttatgccttaaaagcaagtaattaatggataatatattagagaatatatgaaatacgattataagataaatgatacattaattataatagtataattattagatatctaaaaattccttattcatatggaggaagtataatcttgtaaggacgtgcaagggaattaagattatacgacatgaataacacaagttattagtgtattaaagtattaggaatctttaatatggaactgctcagtacagtttacgatacactatacttctagtgtgtgtgtgtgatttttattctgatcacatatgtggatagacatgtagttaagataatgtgtataattttattatgtataactgggccgatatataataaacatctttcattagtgtgtcgtttaccatgaaagagttattcataccacaacgatgatcattagtatatcagcctaaatcttgagtataaatgagctcctatttgtgttcattgagttctttgattcactcattaaagtttctcaaagaagatgattctttcaacttctgctttggaagcacaataacacgagtggcttcgaccttgttatacaatagtggaatccaagctttcctaatagatcaaatattagttcccttatagcgttaattctgggagtgctaacagttagatccaaatctataataagttatagattaactgttcacattgaattaatggtacataatgagtcaagtgataattagaagggtaaaatagtaatttttagcaactctaataataaactaataataagaggaagaactacttgtattaattatcaatgacctgcaattaagaattctctaaatataattctatattatcaaagagtgtaattttatatttatagtggagtaataatagaattaataaactgaattattctatcaatgagatcgataataatcaagtgtttattagagcttcgaaatataggtccatggtcctcgagtcacctctatacaacactgtataggggaaagttttatttgatgagtaactttgagtgagacttaatttctatgagaaataaattcttaaggacaaaataataatatatgaaattattattttgaataattataacaattataaattgtataactatttaattttagtagattaaattatattaatcagctagatatatattattttagagaaaatagtctttattttaattcttgtgaaataagagattaatgagaattaattaattattatttattgttagaataaataataaatcttatttatggtaaaattggaaaactaattgggaaatttgattttctatacttagaaa

SEQ ID NO: 222439 - DNA, 1254 bp, Cannabis indica
ggtaaccaagaagcgcttgcatgttgttttgaatattttcaggaactgaagtaaaacccggaaagcctttcactcataatgttgatgatacgagaagtcggctccatgtttcgatggtaactctcttctcttaaagttcttttcttttcccctctctgtataatgtttttctcgatacatagggctcatggtttgaaactgtcgatgatactgaaatacaatttgaggtggtttatttctttttttttttcttttttttaagttcagttactggtttcttgttgtatttctaggcgtcgcttgggatgggcaaagcgacaacgaaaagtgttcttcagtgtaatgtaggaaacaagagtcctgtttttctgtgctctttgtatcctgagaagactgagtcattgcaactgaatttggaatttgaagaggttgacgaagttatcttctctgttattggcccccggagcattcatctctctggctactacttaggtagtagtggtcgaattcgtggtataagtgaagaatcgtatcctttttcttagttaatactcagtaatggtggattgatttaatattagccctctttctctctccctcttatttatatgtatttattctttttgtattattccttaactcaagtacaagggaatcatacggtgaagatatagctgacacagacacccagggatcagataatagtgaagaagaagaagaatttgaagatagcttcattaatgatgaggacccagaagtttacccaccctctcccgtttctaatgatggagatggaggtaccactgttcttctaaaccatgcataatggttttttccccctttgaatctatcacttaaatttatcagtatattttcacagctgtttatggccattcaaaaatatatgctttcttacctttttgtttttcatcttctttttatttatatattctaaagtgtctgctatttgtgagtttggtttagatgatggtctggatgataacaaacctctgaatggaaagagaaattctagacgacgacttaggaagaaataccaactagttgagtctgatgatgaggaacaatttccaaaggtgattaagtcgaatggtggaactacagttccggtattgggcagtgaagatgatgaagataacttcccaatcttctcttgtattaagaatcgagctgctaaaaaaattaaaatggacggtgaagaaaatgcggacaggggaactgatgaaaactccaaca

SEQ ID NO: 222440 - DNA, 2097 bp, Cannabis indica
atgacagaaaaatctgtatttttttttcccgacggtttaatactgtcgcgtaggcgacgattttaaaccatgtcctatactataggcaacagtgtcgggaagtccacattagtgatattttttaaccttcgcctattttgcccattttgcgacgatcgtataggtgacgattatagaaatcgacggaaatactttaaatgattgtttaaaaatgttgagaaaaatcatttttgtagtagtgataatcaaaccaatccaccctgggtggaaacccaacttaattttccatcatacctcaaagaaaagtccaatcaacactatcataggtcttagccatatctgctttaagagcgagaaatcctttacttatatcttttaatagcattgggacactcaaagccaatcatacctttcttatgttttttagtttcgcggtgcgggtggtgtttgtggtgcggatggtgcggtttttgaatattttttcaaatcaatccgcacatgcaatttttttaatttcccaaaccgcatccgcacaacgaaactaaaaaatcgcagaaatcgcaccgcaaaaaatggtgggtgcggtttttgcgatttctgcggtttgaactatcaccaaataattaaactatcacaaatacaacaaagtttgagtaatacttgtcaaaataccataaaacttgaaaataaatataaaaaaaattcaacaatataataattagtgggttttgggctagagcttacatattggacctaaataaatataaaatttgatatttttataatattaacaattcaaaaccacaaaccgcactgcaccgtgctgtttaagaaaaattcaaaccgtgaccgcccagcaaaaatttcaaactacatttttttttacgatgcggtgcgggcagtttgatgaaatactacttactattttatttggagttttcccttctggattatgttgaaggtttcaacaaaggccaattttttcaaacaaataaataaataaaaagatgaaaaccaaacatatgtagtctgcatgcagcacatattgatatacattttgataaacaaaagatttgctaaaatcacgagaaatgaaatgagcagtggatcacattttagatagttcaaatatcaactatatatatatagttggttcaaccacatttaccagcatatatattggaaaaaaaaaatagaaataatgtttcttgtggtcaaagttaaggcattaacttcttacaaaaattaataacatacgttacgaaatagagagagtatgatgctttgtttattgatattgacaagattatttttatctcttcgttaattttgtaaatatgtcattaataacattattattttatatttacccccaagatttttggataaaaaagttcaaaaattgtcatgttttttgaactagtcatatttataatttatttttgaacaggtaataattaaagtggaatatcatttttataaagttattggtggacagtgattttaaaataataatcaaattttcaaacactactaaaatctaaatgtatccttgttagtatttatgatcattattttttactatttgagttttgtggctaacttttctaccaacaaaaaatattaatgggaatcacaagtttcagatgtgctgcttatggttcgtttatttatgagctgtcctccattaatttttacgctttactatttaaaatcatgactctttgaacgtttagttgtcctaccattacttgctagaaaaactttcaatttaaacataaaaactacatagaaaagtttttatagtatttttatttttgaaaaattacaacataaattctaaaaagtttacttttaatttaatctagataaatttccaatcttaaaaaattacggtaatagtcttaagttcgaaattcttgtaaatatgttggtacttattattttaaccgatccctttgttatttcttgcatactttgatgatgattagtagacgataattccacttaactcttaatgttaacaaattttatagttgggattttgaagatgataaatctgaatatctttctcttaaatttcttgaattttttttt

SEQ ID NO: 222441 - DNA, 905 bp, Cannabis indica
aaatcattcattggaatgacactacattaaaaatttaaaatgtaatcaaacaaatgaatggaataaaaattatttccattctatttcactacctctaaccaaacgccaccttaatggtatctactagattaggaatgaaaatgggaatgccgtaaaccaattgatccaactattgtagtttgtcttgattcaatcaagaataactacaacaaagtttatacacaaccaaacacaactccaacaagacaattaaaacaaaaatttgttagagttgaaaaaaagtaagtgcaagaaagtaagagaataatacgggaacttaacgagttcgattcatgtgcaatgttctacattgtagaatagactaagctaacaaatgaataggatagttatttataagttactagaagtatcaaatcttaactaaaataactaacttagtcccgagcctcatttagaagtcaaactcacaattaactatacatagtaaatagtaacttgtgaccatttacctcaaatctccaccttagttcaaattgctatgaggtaagcaaacttgatagtactgtagttcattcagccacaagggcttatccaaccaactccattacactgtttgaatttgttgcttggttatcatgtctgaggagttatgtttagtagaaactgtctcaatgttgacaactcccttctccgtaatttcaattcgaaatgatgcttgatattaatatgcttagttctctcatggtgtactggattttttagttagctgaattggacttacattgtcacataaaacagtgatcaccttttgtccaatttccaattttttagtcaaacgactcatccgcaaaacttccttaatagcttccattgaggctgtatactcagactctattgtaggcaag

SEQ ID NO: 222442 - DNA, 2324 bp, Cannabis indica
atacatagtagagtcaaatattaagaaagaaagggaaactaagaaaaagagaatgttgattacattaatggtaataaataaaaaattttgacatccacataattaatactatttataacaaatagaattttgttggttacaaattttggtgattggtttctcgaattaattcttgttcttcctctgcaaatattttgttctcaaaggaatggaaagtacggagagcaaaaaaaggtaacgaaatgagtggcgcaatgataaaaatgatcagaattaaagccaaaatacattcaggaccttccgggattacttccacattgcgcttcaatatatttacaaaaaaggttatgtgataatgaatcccaagccaacaaattaatacaaatggtgaaatccaccacttcaactcatctgtatcatttgttgttgttcttcttcttcttctttctttgatcaaaagctggaaactcactagaatagcgtaacaaaatgtgagtatcatcaccatgcaataacaaatgctaagaaaatcagatgttggtacaactactactatcgatgatgccgatgataacgacgacgacgatggcaacgacgaattgcaggaaatggtcttggtgagaagatgccctaacgctttacgccctacaaaatgaataccacaccagcaaacgcaaacaagacctattagaacaaaatatatgtcttctattatgtcccatattctaaccccaccttggccaccttcaccatcgatattcttattatcttcaaccctaataccttcactgccacccatatttttatattgatcacgtagtactttgtaaaagtagggattattttgatgagaatgaaacaattatcaataatattatcgacctatatatatataccgtattaattaatttgactcacattagattttttttttaatatatattttatataggattatgatcaatttaaatttcaaaagagtttatgtatacttaaatcgggaaacaggtaaaataaaactaaaataaagagaaatatcattacgtacacatggtactgttacggaaatatcttattcaattttatgttgacttggtgatgatgaggatgcagattcaaatttaaaggcctaaatttaagcaacaaatttatctcttttaattgacttttagacccttaaaaaaataataataataataatgataattttgtttttctttaaaaaaaaaaaaaactgattctttagtacaaatgaaatggaatcgcaattaaaaagaaagaaattgactcatcaaatacaagatgttgactaacacaagctagctttggataacaacacatactctcactctctcaccacatgaataacagcaacacatctattcactacaacaattacaacaattagaggcagaaggatccgccgataataacatcatttttggccggtataagtgattattagcggagtcctgctaatattggcccgccagtaatacctggtcagtattgctaattaatagcggcaaactaatacattcaccgctattaattagtaataccgacagacctatagtgatggaacccaccgatatttatgccgtcagattttaatatctgacacattaatagcagcaggtactatgccggtattgccttttaaagaaaaaaataaatattatatataatgtttataaaatatataatttataatagtattaataatatatatataaatatttaaaaatataatattaataataattttatattaaatcaaaaataaattaacaataaactaattattacacacataattaattgataattctctaacataccaaataaataattatcgtccacagataattaaaaattaaactaataattattgtccacacataattaaaattaacttaaactataattcatcaagcacattattattaaaaaaattctgaactaacggtgttcaagtttaaatgggttgtttgtgcattgtcttgagcttgtgatattggcagtgaagggtatggctactacaaagataaaatctttgaattattacatgacaatcgtgagatttcaatccaagaatatttgttaaatcattgttcaatttcttcttcaaatttgagcaaaatctatcgagaaactttacgtctttgataaattgacaaaatttaaaattttcatcaggtttgagaacgtaaggggcgtgcggcttcatcaaattaccattatcatcttcataaatccacatccattctcttatttccaatttcttcaaatcatgcctcacgttagttgtgtcttttgattta

SEQ ID NO: 222443 - DNA, 2148 bp, Cannabis indica
ctgtaaagacttgcagtaacagaatagaaataacggtgtagaaataaaaaatttgacataagagaattatatgtgatatcagtggtctttcaaacactcttagtctaaggagtcacgcccagagaatgacataaattagtaaagtctcaaacaattacaaatacaattgacttaaacaagtttagactccatctaaagtattgtagcaatcctttgtaatttactttgccaatctaattattgaaccccaccaaatagcaaaattcattcgtcttttgatgtgtgagtgcttacttcctctcgaagtaagactttgaaatgtcttctcccgaaaacccttctcttgctcaatatagttattcaacttattataagaacaatataagtacaataaacaaagactaaaacctatctgaacactttaagttttcacaaaagaaactctctccctacgaaaatgaaaatatgaaaatataagacttgaagagataagaacgttggatgctctctaggtcctatatagaaaccctagagacagccactacacgttgttacagttgtacaaaactttcctaaaataagtcttgctttgcaacgacaaaatcgcactctgtagtgataaatcgggaaactttccaaataagtatgttgactatggatttagccaaccgacacggagtctaactaggatcaaatttttcttatgactgtcacgtgttgaatgataacaaatataaagacacgaattatagaagtttgatccctttgttcaagtaatccgcttttagttgtatgcactcttgagataatctcccatgaaactcttctaatttaatagatgaattattttcatcaactgaaccttgactaccaacatcatcaatctgcacagatttttcttccaatgtcatctagattcttatctacaaagaatccatccaaatataggctcaacaattcctcctcagttaacaacaaattcttcactttaagctaacaccaatataaaataggtaaacaacatcaaacacacataatttaaataaaaaaaataacattaaaccataatttaaaataataataataaacaatatcttggatggagaaacattgaagatagaattcttgaaatccttaatagaaggagcattatcattagactagtttagaattttaggaatatgatcatacaacttagtataataaatgccatcaatatacaaataacattcattgaaccaaactcgaaaaacataagccaaacctctcaacctacaaaaaccatttttttctccattatcgcatttcttaattttaataagattctttgcaatcgcacctctatccgaatcaagaaataaaaaataagattctttgccccgagcatattcattgaacctcccactatcaataatatcaaactctaagtcagagactttctttgtgtccgaatcacttaacacaaaacactaaacaaagtagagaacaacaactttcaaggcaagctcatcatcatcgccaaacattttctcaacaaaacccttctccacatccttcttgtttattctttaaaacgagcaaaactcttctccttcaataatttttttcttgtttatacctcaatttatcacattaaccagaataatcaagccctaaaactaaagcaaattcctcaatgctaaagcttagcatccgactagcaacattaaaccacatctcattattatttggttggacaacctccctcaacgacaaactgtgaagtgtgaaccaactggtgttgcaaaacataagaacgaagtcttaaaaagaatccaaatatagtttgttcaaatatttccttttgtttagtggataaaataaaattgagagtctcaataattgtataacaacatgtagaagtaacccgagaagtatgaaaatcttccttactaaatttgttattccataattgaaaaaataaaataatataatcaataaaacagtaaaacaacaacaattataaaatatatatatatatataaaaaaaaacaatacataaataaacaattataagaacaaaatataaacgtaaaaaaaccctaaatagcaaaaaattatataaataacccaaaaaagtatatacgaatatagttgtaaaattaaaaa

SEQ ID NO: 222444 - DNA, 4569 bp, Cannabis indica
atttatagaaaatatggttttttatgttgtactcttgttaatttgttgttatttgtatgttattttttggttagtattttgatgttatttagatattatatttttctgttacttttatgaagtttttttgttattttcgtattattttgatggaaaatcgtaaaagtatatatatttataaaatttaaacgtaaaaatataattttttgacaaaaatttttatgtaattatctcataattatattgactcatttttagcaaaatttaatataaaatttacaccataaatcaggtctaaaactacctataaatgtatctgacaaaattttctaactaacaaaatgggttctactttttataaaaaaggaaataaaaaaaaggttctactaagatattttttttttttattttttttttggttaaagggagggtgcaagcacccattcattaaaaggccaaaacggaacaaacaaacaaagttcaagagataacaaaaaaaaaggaaactaaccaccagttaactaaaaaggaaaaaacaaactgacaaagtgccacacagggcaataaccaacaaaccaaattaaccttttcctttagcacccggattccattcctccttgttggagaacactcccatctctatcgatcctagatcgatatcacctgtaacattgtgtagcttcgcccatttggccatgttgtgcgcacagaagttctgcgatcgcggaatgtgacatagcttaaagcttactaaagggtgaacattgcttctgaatcggtcagcagccccggccaacttctggtgatagttgtcagggagagaagaattaaagtattgcaccacagggctattatcacagaagaacaacaccttgtgaagattgttttttgtcgcgtaattagctgctatcaccagcatagtagcttctgccagagttggatccgtgacatggaggcgactggaaaaggccgttcgaagcctgttgttgcagtccctaaacacagctgccccgaacgcatgatccgaggctgtggttatgtccgtgaagcaggctatccaatcctctggggggtagtaatgattctttcctttcgtagcgtggcatgagaagtggatttgtgatcttggaaaagacgacacacttgttgaattgcctccgccattcccaatttcaccgagttgtgtaacagcttattccgaactttccagataatgtcaaaagtgcagagtgcacccagtaagaattccataaaacaaaggttgaggggcctattcgcactatccctgaaccagatcagccactcattccagtcacgacatggagttccttcagttctgatgccccaaagactgccaaaccaaagagcttttgcatactgacattgccagaacagatggaaacttgattcctcatcttcatcacagagtggacacaatgaattctgtatagaaaaaaatcccccaatcttttgacgagtgggaagcgcattccttaaggtctgccatcctagaagcttgagccttgggtgtaagggggagttccacaagtccttccaaatccagttcgactgagaagcgaaggaacggtttcttactaatcgataggctgatttcagacagaattttccgctttcttcaccaagccatagccaagaatcattctgagagtgggcccgaagacatatatttaagatatgcttcacatcttccttcctaaaccagttgttgaggcgatcaatattccacgtaaggttgtcatttaggaaataatgaacaaggtttgccccctgggtagcatccttcagcggggtgggtttatgatcccctgttgtcacccaagaatcgaaccaaatggatgtagtcctcccatccccgatccttttacacaaaccttcacagaggagagtcctagatttcaacattgctttccaaatacaagagtccgagggtttaggctcgacatcaaagaaattattgcctcttaggtacttagtggacattgtgatgttccaaatggaggatttttcagttacgagtttccacccccacttgaggaagaaagctttgttgatatcctttagttgcctaaaaccaaggcctccttcgaattttgatttacacagggaatcccatgccactgtgtgcatagttttcctattgttttgatcgctccaccagaaatttcggaggcattgatcaatcttcaagcaaatgcccctcggtatcacctccgaggccgccatgtagacaggaatggaagcccccactgattgtatgagacacgctctaccaacctttgataggaggcgagatttccatccttcaattcttgccatcacttttttaactagaaagttcatgtccttcgagcgatttgcagaattaaagagagaggtaccaagatatatggtatcttttttcattttagacataccaagaaggttggcgatggcattagctctgttagaagggactcctttggagaagaaaactgttgatttttggaaattgacagcttgtcccgaccacgagcaatagaggtttaaacattccaggaaagcctctgcctccttcaccgatgcttggccaaataacataacatcgtcggcaaacattaggtgagtgatggggctggcagatcttgcaaatttgaagccccttatcttcccctcccttgaatagtctatccatagtcttgacaggaggtccgctgctagaatgaatagggcaggggataaagggtctccttggcgtaatccacaggaagggaccatggatccatgcttaaccccattgataaggagattcagctttgaaatttgaatacagctccttatccatccaagaaacgggtccttcgcgccatggaaactcaaggcttcacaaacaaactcccaatccatcttatcgtaagctttttccatgtccaatttgattatcataaaaccgcgattacctttccttctagccatggagtgaacaatttcttttgctactgccgtattctccgtgatagaccgccccttgatgaatgctgtttgggttggagaaacgattaaaggaagagcatgtcgtaaccgagcggccagaacttttgagatgcacttataaacgacattgcacagtgcaatgggtctataatcattaactgtttggggagaatccttctttggcacaagtacgatattggtgtcattgatgaaatggggaagcctcgaggtatcgaagaagtggaggatcattttcagtacatctgtgctcacggtgtcccaatgggaacggaagaaagccacaggtaaaccgtcaggacccggggctttatcaattcccattgcagataaggcttggataatctcctcttctcctggaatggtgtttaagttgtcatctaggctttcagttgacttcagctgaggccaattctcaggcttgaaagggatacggttcaggctcttagtgaagatactggagaatttatcaataaacagcttggcgatgtcttttatttcctccactgcatttccatcagcatctttgagttgttgaatatagtttcgccttcttcgcgtgaccgtacttgccatgaagaatttcgacgctctgtctccttccttcaaccaggaaactctggacttctgacgccagaatatttcttctctcgatagggcctcctctagatgtgctctagcttccttgtgggcttcaccatcaaagactagactgttttccagcctttccaatttgatcttagcctccgcgatttgcatagaaagccacttgaaatgcgatttgttccacctggagagatgctcttttgtagattttagtttgcggtataggttgaccataggatccttgtgttggatgagattccatgcctttttaaccacccaaaatacccgcgggtctcgttcccacatgagttcgtatttaaacattgctttcgtacaaaatcgtcctccttctgtgtctagtaaaatcggattatggtctgatgacgatgccgtgagatggttgagaattacattaggccatgcgattctccaatcagctgaagccagggcacggtcaagtctcgctcttttaaggttggaacccgcagaggcagaggatcctctcttgaaccaggtaaattttacacctaggaatcccaagtcaatcaatcccgtacggtggaccattcttcgcaagtcgaacgagtatctactggtgctagatgaacctacataattcaagcattccccatcttttagagttccatttaggtcccctataatgaccaaagggagggggcaactgcaagtaaaatctcctagatccttccaaaaagcctccttgtccccatagataggagggccataagtgccaataagagcccacgggcagtcgggggggttcgaggcaatgataccaatgattttgtttttatcagccagttggatgcgacagtcaacacccaatttccaacagaaacccaagcctccggcagtgcccagaggaggaacatactcaacgccaggaaaatgaagtttcgtcattaaattagcaaaattaccttgggaaagcct

SEQ ID NO: 222445 - DNA, 2035 bp, Cannabis indica
  modified_base (6)..(6): a, c, t, g, unknown or other
gcttanccaacatgttggtcattccactttttccactccaaatacctctaagtcttttcttcttaataatcttttgcatgtacctaaaattacaaaaaactcgttgagtgtgcctaaatttgctaaagacaactgtgttttctttgaatttcatgatgattgttgccttattaaggacaaggtgactcatgctaccttactgagggggacttaccagaatggcttgtattcctttgatgcttcttaactccaattcttgccgtccaaagcatcccagccgcatgtctctaatctgagcactccctgctcctatcctagtactacaaaagctgaatcaaatctatgttcaaattgtatgcacaataaattttctgattttgtaatttggcacaatagacttggacacccttctaatcgggtttgtccagtctgtgctcgagcattgtaatctgcccatatcatataataaaacaaatattgtttgctcaacttgttatcttggcaaaattaccaaattcccctttcccaaagcctccctcactgagtacacagccccattgcaacttgttgtgtctgatctttgggtccccccccaaaacacatcttctaatggctacaaatattacattcattttgtagatgcatactctagattcacttggctttatcttatcaaaaacaaatctgatgctttaaaggcttttcaaaccttcaaagctgaaagtgaacttcaattgggaacaaaagtcaaagttttgcaaactgattggggaggggagtacaggtcttttactgattttgtcaccaaactaggactgatccataggcaccattgtcccacaactcatgagcaaaatggtcttgctgagagaaagcatagacacattgttaaaaatgggttaacccttatggctcaagcatttatgcccctcaagtactgggatgaagcctttagaaccgctgtctatcttcatatagactaccaacactaattcttgccaacaagtcacccttagaggttctatttcatcaacaacctgaatatcaaaacttgagaacatttgggtgtgctggttttcccaatataaggccatataacaaagacaaactagaattcagatcctctccatgcactttcttggggtatagtttaaatcataaaggatacaaatgtcttgattccaatggaagactctacatctctcgagatgtgatttttgatgaaaattcttttccttttgctgctgcttcatctgaaaatagtactccaattaactatacttctgaatttctagtgtcaagcatcatccccactgcttccacaaataacactcaacccaatttctctggttttgaaaatttttctagttttgaaaattcttcatcaccttctgcacacagtgagtccactctaattccaaccatgaaatccctgaccaacatgtttctagcaacattcatgatattgttcctattaatagctctaatttcatgagctttgttgataataatcaaaatgctagtgctccaggtgatgctggttttattgatattcaggtacaacaaacttatgaaaaccatcctgctggtgtgcaatctgtgcctattgaaatattacctcagggggctgcaacaatctctcttcctgctgatgcagcagcttctggacacagccctgcacctagaactgtcaacagtcattcaatgcaaaccaggggaaatcaggaatttccaagccgaaagtatttattgcttccagaattcctaccacacttgctgaagctcttgccaaccctcattggaattcaacaatgtctgatgaagtccttgctctttccagaaatgctacctggacattagtgagacttccccccgtggtacgaagagctattggttgtaaatgggtgtatagagaaaatcaaaacatggatgggagtgtgtacagatacaaagctcgacttgtggcaaaaggattccatcaacaacctggttttgacttcactgaaaccttcagtctagttgtcaaacaaatcac

SEQ ID NO: 222446 - DNA, 5221 bp, Cannabis indica
taagctctgttccttgctggaacttaagatgaaagctgatatgttatgctgtgcagccttgatttttgacagtatttggagagccaggaatcagattgctcacactattgatgcccggccctgcttggatcaagctaggaggaagatctttaatagatttcaggaagtttgtatggctaatcctattgtgatgcaggtgaatccgattcaggttgaggcccttatcactatggacagatgtttgctagtggacggatcctttcttaatggtgattacggttgtgccatgatttccctcactaaaggctcgcttgattggtggtttaactcctcctccggctgctgtggctctgcattggaagccaagatggaagctgttttgcttgccttaaaatgggtagttgaacatcaatgggatcgtgtttccattgcctcggattcaaaggctttgtggatgctcttcgtgcgaaaagaaccccggactggcaattatctgctcttttttcttctatcttatattgcttacttccttttctttctataatgttgtgtttgctaaaagagacttactcatgttgataagcttgctaaggatgctacacatgttcaaagcggctttctgaactacaaaggggagggatttcccctgtgaatcccgacatcttttggagttaatttatcccgaactaaggttctttcaaaaaaaactaaaatataataattaaatgtaaaaataaaaaaaaaattaaattaaaaaattagtagtggtttggactggttaacccgaccgaaccgaccaatttgtgagttattattttttttcttaattatactgattgcattttgtaaccctatttttaaattaggctgaataaaatatagcataaatctaccaacagtattactctactctagtaacgaatgcttatatcttaactaaattacaatttctgtaaaaaaaaatgactacatatggctatgaagaccttgaggctagtccacactccacacatgcactgtaccatttgtcataaatttacatacaaaattttcttgcctacgtggaaagaataggaataaaaatccaattccattttccgtcatctctattattacactcgcaagtctaacaatgctccagtttataccgtcaatttctaatcgaacggacaataataacaagttgttacactcgcgagtgagtttttaatagtgtaccttaccttttattttttattttgtttttatttttatagttttataattatgcgccaaccaatacttgctttctcggcactttcctttcaatttcattatcaatcaaaaccattgtcttcttcgttttgttctgctcagctcaaaaactttgaatgaagccctaatcgtatctctctctctaaaagctctctatcttgtatggcgaccttagtcgattatggtattcttacttctatctctgttttatggtatttttactgtttggctagctcgaaaatgctttcctggaaaattttaagaatgggtgaagtttgtattcagttatgctgtgattagtaccttaagaatttgcaattgaaagtggatatgtcacatgttagaagatcaacttgtgaattgctaagttaatcaaaagaaaaaaaaaacttgtgaattgctaagtttgtttgatattattttcgtagaaagttagtttacttctgaaacaaacggatttggttatgaatttatgtgtaggtggtgggagggacttggagtcaggtttgatcagtccagcatcagtagcatcatcatcagctgctgcgatgagtcaaaacccgacggcggagccatcgccgtctccgtcaccgtcttcaactgcatcggcgccggctctggttctctcgaactctggcaagcggatcgatcaggctgggaggaagaaatatgtaaagcaggtgacggggcggcataacgatactgaacttcacttggcagcgcagcgcggtgatcttgcggccgtgaagcagattcttgacgacattgatagtcagatggtggggacgccgagaggggctgagtttgatgcagaggtggcggagattcgggcgtcagtagtgaacgaggtgaatgagttgggagacactgccttatacacagctgcggacaaagggtatcttgacatcgttaaggagttgctcaagtattcgaataaagaaactatttcgaagaagaatcgaggtggatatgatccacttcataccgctgcaaaccaaggccaccatggtaatattcttaaggctttgtgctgactgagtagttttgtcgaagtagctgtatgatttagggaagtttgaatgtttgattatgttgaagttctgaaacgaaaataccattgggttcaatcctccatttcaaaagtgatggtagtagaaatgtaacagaattacctttatttggcttgcctagtttaagaatatccgcttatccagtaatgttaattgaggttgcttaagatcgatcaaagaaatcggttagaagaaagtacatttaatttgaagttggctgataaaaacttggatgcacaatcgcatttagaagaaatattagtaaaactgtagtggaggttgcctagtttaagtttatcaagtaatcttactaaggttattcaaatctgattaaagaaatggggcagaagaatggatatcttatttgcatttgttgaacataaacacaaatttagtctctttggttgctgtttttgttcctctaagcctatgtagaagattcagattatctttgtctgtttcctttaagagatacgggtaaacaaagaacgagttctttattatgatgtggctagtttttattacacttgaattcttcgctatcacgctgccattcttaattacacgatgcctgagaaatttagaagaatttataagtgcttttatgagcattcagcattacagtgagtgactaccagaatcacggcaagccatacataaattttttccttatgatggcaacatgatagtattataggtctactacacaaatagatagcttggtttacattcagatcatatggttttgccctttcttcatttgtctatacttgtaagaataggtttcgttactgtctgctatggtcctcctcattctttgatatcgtgctgaatgcttttctcttaggaagtgtctttaatcaaataaaatggacttctaacattaacttctaaactcatgttggcacttactttcctgcagcaattgtccaagtgctattagatcatgatcctgggcttagcagaacgattggtccgtcaaattcaaccccgcttacttctgcagctacaagagggcacactgcagttgtcaatgagctcctctcaaaggattgtagtttattggaaatatctagatctaatgggaaaaatccattgcatttggctgcaagacagggacatgtagatattgtagatgcattacttaaaaaggattcacaattggctcggaggactgacaagaaagggcaaactgcattgcatatggctgttaaagggcagagtactggggtggtgaagttgcttcttgaggcagatgctgccattgtgatgcttccagacaaatttggtaacacagcattacatgtagctaccaggaaaaagcgcgcagaggtattatatattttcttcccaatattcatattctgcatgtgtcatataagacagtttgtacaaatggaagatgcaaagaaagcttgtataatataaatctcctatatcactacattaaatgacacttttctgtagattctttatgccccacccctccctctctatcctctaaagaaatctttgtcgtcttctttatatatccgcacacttatgcaaatgagaaaacttgaattatagccaatcatctaattacagttttatatttacatattcttaatatactgatgttttcctttcccttgcagatagtaaaggagttgttactccttccagacaccaatgttaatgcattgactagagaccataaaacagctcttgacattgctgaagaactccctccttctgaagaagccacagatataaaggcgtgccttgctcaatatggagctgtaagagctaatgaacttaaccaaccaagggatgaattgaggaaaactgtaactcaaattaaaaaagacgttcatactcagcttgaacaaacaaagaaaacaaacaaaaatgtccataatatttcaaaagaactcaggaagctccaccgtgaaggaatcaacaatgctaccaactcggtcactgtcgtggctgtgctttttgcaacagttgcctttgcagctatatttactgtacccggcggtgataataacgatggtacagctgtgatggtaaaaagtcctccatttaaaattttcttcatctttaatgccattgcacttttcacttctttggccgttgtggttgtccaaattactctggttagaggtgagacgaaggctgagaaaaaggtagtggaagtaatcaataagttgatgtggctagcttcagtgtgcacttcagtggctttcatggcgtcttcgtacatagttgtgggacgaaagcaccgatgggctgcaattctggtcacatgtgttggtgggttgataatggctgctgttcttggcaccatgacatattatgtggtaaagtcaaagagatcccggtctatgagaaaaaaagagaagtactcaaagagaagcggttccaactcatggcaccactctgattattccaattcagagattgatcgaatttatgccctttgatgtgtgaatctgtcaaagggcatagtttgttaccaaaccatggaatgttaaactactgcaactctgatgtagctatggaattatttggctgtgctattacctgttattctcattttagctacatccgaactcgaagaccttagctatttcgaactactaatgccttaccccaaaattgccatttctatggaaggagaaaatagaagaagaagagggttaatgggttaggagtaggtgatatgttatatatgacttgatatggatgaaatacgatgggcataaacaactgacatcgctccaatttgtaataacctgaaaacaaaaagtgggattaagtttgtatcaccattgtaagtgttttagctaaacgaagctttatttacatgtatgctagagcagttatcttaaagagaaaatcattgctattag

SEQ ID NO: 222447 - DNA, 1086 bp, Cannabis indica
aatacactgtcgttccaagaagtacgcaaaaaagtaaacaagccttgttcgaaatatgtacctttttaactaaatcaacaagtgaaatattattcaactccggtctgaattaaaaactgaaaaagcataacaatacaatagaaaagaagatagcccaatattcttgcaacctcaagcatcacaaagaaaataagtttggcattacaatacagtaagcacaaagataacccattattcttgtaacatcaaactataccaataaataactttgacatcacaacaacatagccactatgacattgcatacaaaattactttccagtctagctcaacaaaattgtaaaactatccaaaatgaacaaataacacagtgattgtctaggggcagagctatgaagagtcacactggattttgtctaaattgttattatattacatgtaaggatgggtgtttacaggcacatatactttcaacagccaaagcattttgatttaataacaaatttgagaacaaacagacaaacttatcatttctttggaaaatcaactctaccaaaaattgagttcattttgcctatagagaatgagttcattttcactgacaagaatctaaactgtgaagtggattaggcggaggtcccaactgaagccgcagcagagagaaattagggttaatgctgttaaatcttaaatttatatatagataaaattccaatattacaagtaaatcaaagtcaaatataaatataaacacaaacacaaatgcagatacagatgcaaatgcaaagatcaaagatcaacattaaaaatttacaaatattcaaccagctaactcaacaaagaaaaatggaagaaaaacaattcgccaatccaacaatgttagaacagaaatacacaaccagcccagaacaagaattcttcaagtctataattctactctttcactccaacacaaacatttaaacatattaagcagaaaaattataagttacagaaaaaaaaaaaagtacaatcattatagtactcaacaaacaggaagcaaggccagtaaaattaactaaataaatttgaaatctcatcacaaaa

SEQ ID NO: 222448 - DNA, 2243 bp, Cannabis indica
tataaattatattaataatagggccgaacccgcgcgaagcgcggcttagtcccctagttatttcataaatgaaaacgtgtactaacgctgtcaaatactataaatgagcaatgggaattggaaagaaggaattgttgacttaactaaccattcttaactttgctatcaaatttctttcttttttcatttttttgaaaggttggtatcaattttctaatatgcagttactaataaaattttagggtgaccaaagatatctaattataattggattagatttgattttaaattaggtagttaattgtaattggattgagtgatagataatgtcaaaatctaattaaaaaaaaaatccaccctaattatggtatgttttgtttgttgtaattaactcttgtaaagaaaagtgatggcacccatatcgtatacctcatgagttctcattagaattatgactaagggtgcacaaaatatgggctaaatactattttttgtagcaaaaaattgtgttaaagagtagatcatagttcattgagctgaaaagtgatacactatataattattatgggttggacacactctatataacccaactcaacttatttcttgaaaaatattttaaatttgagataacttttatacataaaatatattttatacacaaaaaaatataaacatattataatatatattttacattttaataaataaattatattattacaataatcgaattgaacaaaatacactattaacatgtagtccataattattatactatgtctacaaacaagtctaacatgagaatcaattactattattaactttgttacccatacaattagggatgcatattttctctattgggatggggtcccacgggacccactcctaatggagcaggaatttcctgtctaaatgggaaacggggcggggacgaggatcaaattttgtccccgaatggcgaatgtaaaacggggcagggacaaggatgacactcccgccctgatggggacctgtttaatttattaatattttatattttatatatgcgttgtattttttttagtgtattaatatcatttttataatttttgaagttgtgtttttgtataacaattactatattaaatagtaaataatatataatattttatcttttatgtaatttaaaaattttatacatttaaatttttaaaataaactttatttctacaataggggattcccccaccctatccccgccccattagggaattccccgccccgttcccgatggaaaataaacagggatggggcggggatgaggattaaaattctaaacggggatggagacggggagatcactccccgctaattccccgcctgtgtgcatccctacacaatgataccactaccaccttagatttttttataatactactttaacgtacacacatgtatatttacatattaaagttttaagggcatgatttggtagatatcaaagtctggggagcataatttagtacataaacaatcaatgaaacaataaaattgaatgaaattagacaaaagtccttaaatctaacaatctcaatagttcggggaaaatttttaatggccaaaaaaattcaggaaacatgatttagtacatgtcaaagtttttcaagaaaaaaattactaattagcaaaataattttatccatttactacttattttaattttaatattcatttcaacaacaaactaaagataaaaatagtaatcaattattgttaccattaccctattattatcattaaaattactattccattcaactaaatcaaacatcacttacatgataatatattttaaatatatttacattctattactattgaatgtttattagttttcggtacatatagcaattttatttaggattgataactacaaatattttaattgtattttattttatcaactacaaaattttatttgtattaaaatggtaagattgataactttatgtaatatttaacttaaatgtttgactaatttagttttttttttttaaatatgctcaagttaatattaaaaattatattataagttgaaatctaattaaaattaatttagactaatctaattactaattgaatttaaataatatttttaaaatctaattaaaaattaaattagatcggatcagtataaaaaatattagactgaattgtgaaaaaaaaatgaatcgggttaaaatataaaataatcggaa

SEQ ID NO: 222449 - DNA, 2264 bp, Cannabis indica
gatgcaaatggtagactctacatctctcgagattgttattttttgatgaaaccaagttttccatttgctactaccatttccaatagcacttcatgtccacctgagttgttttctcaaagcattattcctcttgcaacttccaactatagtattgacagcttgtttcccacagaggtgtctcacaatccaccttccacaactgtgccagcccacattgacacctcaacactgcacactactgaagttacacctgtccttatacctgtcacctccattatccctacagctccttctacccttcccagtattgtgtcaccacaaaatgagttttccttcacacaacaccctaactctagtgatctatcaccttgccgtgattctcatactctttctgttttacctcagttgccacccacacaaccctcagtcacccattctggtcctatcatgaacaaacatagcatgcaaacaagagctaaatctgggattcgcaagcataaaattttgttagcatctcaagagccatctaatgttaaagcagcccttaaagaagaaaaatggtgcaatgctatgtctgatgagatggttgcactcaaaaggaataagacatggacatatgttccattaccacctgggagaacacccattgggtgtaaatgggtgtataaagagaagcttaaccctgatggtactgtcaatagaaacaaagcaaggctcgtggccaaagggttccatcaacaagatggtttcgattttatagaaacattcagtcttgttgtaaaaccagttactatccgagttgcgttatctcttgccttgacacacaactggtctatccaacaactggatgtgaataatgcatttttaaatggagatctcaaggaggaggtctatatgactcaaccccggggtttgaacttcaagatgctcctcaattgggttgcaagcttcacaaagctttatatggactcaaacaagactctccatgtgatttttgtccttagaaaaacagtaagtggccgagtgaaattcaagaaaaactttgttatctttagtgagcttggaaaaactaacaagatttttagttatacttgggacttttaaaattgaattaagctgcaaagaatgtgaagaacaggaagaaggtaagaaggaattactaatatgagtaatgggaagtttttttaccattgcatacagctaaagactcagatccagagtaggggatttcaagttcaaagttttccattcattgagcagtgtgatttgtagcacatgtatccacacaccagtcttgatcaatgccaaagtcaggagttgtagaagaggaatgagcatgtggtgcatcaccatcttcaatttcaataagaaatgcccttgattctccattcgtagtgtgataattaaaatctttatcaaatctgcaatagaacacagccgctgtatgaccaagcttgtcacaaacttgacaaagaagcctgggaatgttggagccatttctgccatatggcctatttggtggtctgggtgcagagtaattgttcgatccacgaccaataaaaccttacaatttggagtagccattgttggtaaaccttgaattagatatagagaggttggcgaccattttttgacgagagatccccagtattgtaacgtcattcaagatgactttcacgagtgagaagtaaggattggatggattcgaagggaatattatcaactagagtggtgacatgaaccacgactggatcaaatttaggtcctaaaccattcagtaagtacatgacaagatcactttcatccaaaggatgacctgttgtggataaagaatcagccgaaatcttgactttatcatagtagtctgatacagaaagattgccttttgtgattgtggaaagttaggatttgatttgaagaacacgagccttagattggctagagtacctttgtttaagtgctttctagatagagtaggatgtgttgtgctaggttattgatccaagaattgtctcagacatagacaagtgaagccagctgaagaggagttgatcttttcttttccaagtggtgaattcaagattaatagctccattgatcaatttttcaatgggagcaacaccaaccagtagaatatcatcaaggccatggtcgatgactgttgggattacttgcaatttccatgcaaaaaagttggttcgatccaatttgactgtaagcgaagagtttagagaattttgaaaatgattctattgtggtggttg

SEQ ID NO: 222450 - DNA, 1842 bp, Cannabis indica
gatatgaaaaaattaagtaaaggtaactagatatcctaagacaatcaaatggataaccaaaattactatgagggattaactagatattttatgctaaaaaaaattaaatttttataaatttatactttaaaaaccataacaatgaatattatggacattatcttatatgaaataaatagtagagtattgaattatatataagaacatgtactactccactcaacaccgattgaatttgagacagaacctcataattctcaacatggtgtatcagagtcatatttcttgcatgcaagtgattctattcgatccgtacctatacagatagtaattatgtccattctaatatggttcaagatcggtgagcaaaaaaaaaaatgctatcatttaacgagaatattataaatattgtcccacataaaataaatagtagagtattcagctatatataaaaatatagactactctatctactcatcatcaataatgaaaattgattaaaggaaataaatagaatagaaataaattcattacattctattcaccgcgaccagatgtatcaattcgtgtattaaatttggacatatcttttcattgattttggagacaattctattaagtagtgggaaaaaaaggctcattagagtatcatacaccattatcatgcaaaattccaaaaaaacttgtgtatcttcattgaatctttataatgctatgaatgtgtcaaaaatccatcttcaaatattttctttcaacaaaaattttaaattttttggcgaataaaccttgtaatatgatatacatcttaaataaagatgattaattaattaaaattacttgcaatataaatatgtatccaatttatttatgaattatgtgtgtataattgtatatatcatcactcttgaaaaaaattaaaaattagtaaaatatatgcttttactacaatgtatatgttatatataaatttataatttatctatgtgttgaacatatagacaacatagatagatctaccctttataaaattgccctatatattattataaggacttttattaattacttattaggctaatcttcttggtcttgtgtagaaaaggtttccctagaatgtaatgattattgaatttcaaaaagactttttacagatatattcaaaggatcttttcatgaaatcctattttcaagtctagtgcatatggttttatcttctaacaaaaagttgagtcttttcttgagtgatcactattattcactatactagtccaacttgcaaatactatttatttattttttttaacaaaaaaaggttacaaaatatgacaaaattaaaaaatttagtgctccaccaacagtttctacataccccacaaaatatcatatctataccattttgcaaatcttgttaggtaaagtttacaaagattcaatttttattttccctaaagactctttttggtgttaaatgagaaggttttaattattcttaattatcttccaataaacttgtttaagcatatgattatgttatgattatacaaaattatctcatctacacgcgtgaaagccatgaaattattttcttaaaaagaaagaagttaaacccaactagaaatcaacaaccaagattctcaatcttatttccacaatattcttattgagttctttacaaaaatctcaatattttctaaggttgtaaaactatgacacattaaaaaaatgataaaaacaaagggctcaagggatttgttaccacatatgtagttagcacaaccaattattattttaattataaaaaggaaaaaaacattattttattttcttcacaatgacataatc

SEQ ID NO: 222451 - DNA, 3119 bp, Cannabis indica
ttggactggtagcatatcgtctagccttgcctccagcactttcagcagtccataacgtgtgttcatgtctctatgttacataaatacgtatcagatgctactcatgtgctgagttatgaaagcctaaaacttcaatcggatttatcatacgaagaataaccagttaagatattagacagaaaagataaagtcattcgaaacaagaccataacttaggtcaaggtgctctggagaaacagtaaggtggaggaagccacttgggagttggagtctgacatgagagtttaatatccaaaaattttagggttagatttcgaggaagaaatccttttaacgaggggatatttgtaaagatcgaccgcttaatttttaatatggaaattagcaaataattagggtttaattcagaaattagatttctaattatgatttatgaatttatggagatatatttgaattctaggtgtattatttatgttatatatggaatttcatgtttttcatgttttatacccgataacaatagaacgcaacgtttggccgatataatcacatttttggatggtttagtattttagtaatagcgggacaatatagatagacattaggaatgtcagggttgttcgaggtattagttttaaccaaaatatccctaggtggtaaggatgcattttggctcaggcaagggcaaaatagtctttttgccataagttatttttgtcctgtagtggattgaattaataggaataatctgaggtttattttaatatattaatatatatatatattagtgttatcaaattagtgaggattagatagaaagatatatccctctctctcttcaacttactctatctcttgaactctcaagaattagcaagggaactagggtttttagctccaaatctagtgcactaacaaggtgttagtgattctaatccaaggtaaaactctctagcctatctctttgtgatttccttagttctaagctaagtttatgcatgaatttctatggttagggttttgtagtttattttggttgttgtggtgattgagcaagatttgagtttatgaactcaagctttgctctctaatggtgaattttgcttttgagagttttgtgtgatcttttcgcatggattctacttgttattgcattattaagaggtcttaaaagtttggtgacatttggggttgttttgagttgtttaggtggatttttgtgtttcctacaccaaactagttgaccggtttagcgagacctggaagaaccggaattccggttggtcctcaggaaatcccatagaaatgctcttctggttggggaaccggtctaccggttggggcattttagggcaccctagtttttcttgtttttgagatatttagggtattgtcatgtaatccattgatatggaaacttttaatttcgattttaagtccctgaaaagtgatttagcgtgttactcattagttttatgaatattgtgatttaggggcctgtaaatcgtcgagcaactgtttgacagacacacctgaatttgaaaatgaggtaagattagtataatgatatgcatatgtgtttacatgtttattaagcctattagattatatcaataacggtatcaatatacgtaaagttaaattggataccgatagatgtatgtttggctcagatactgatcgatgctatcacatcggtacgactagagtatgactagagtatcgattataggctgatattatggtcgatagtattgtcgtatgaacgttctagactcaataccgcctagggtgcggggatagggttacaattgggtgtatgggtgcctaattgtaatccgagttatatttatgattatgattatgcttttcttactgagtttgtcaactcacagatattgcttgcatgtgtaggtaaaggaaatgctaaggttgagcagccgtgagagcgagaagattacatgtcggggcagttagacttggagcgtacgatctgtgggacaattggttgcattttgtatagtcgcttggtgacaacttttgtattaagtattttaaatcagttgtaaatattttaaactcgggatctcaaatatataaatgttagttatttttaatattaatagtaattaagtaaaattttaattactcacgattttcaataaactcattgattagcaacgagctgcaccgttaatataaaatcacgataacatgcctaaactagtagggtgttacattattgatatatgcagttcaaacaacttttacattaaactctagatcatattcataaccccacagaatatccatatcacacatattttgattagacatggatataatataataaacaagctagaaatctagtcaaacttattcttgatcttgtataagtgttccaatatatatgttacaatcgtaatagtaaattgatatcattgaagtccttggacattatcatagtaccttatcttagtggggggatttttccagcccattattatttagatgacattagtgattaacctactatgatatgttcaaaaacagctttaaaataaaacaaaaaaagttaatctgatcattcacatggatagtaataacttatcagaataatgaggataagataagaaatcttgcaatgtctatacgaaagacttaggcataattcctagtccttatgaaatattttatactatctctagtgattaattaatcttaagcaagtattttacattaatattaatactagaaaactatgttgatgacttagtctagaaggaacttattgtttcagattaagataaaaggtcacaacaacatacccctaagtatcaatagtaagaggttaaatgcacacttatgtatgcataaaaccagactcctactgttgagtgagagccatcaaagatgtaatcaaaaaaggaacacagggagacgatcaagaaagaatctctgaaagtgaccaatatgttagatgataggggtatatattagaatctttatttctacaccaactcttttcatgatatctgagatggtggttactctaggggtgaagaaattattctagaaggatgtaaaaacccgtctataataatttagttctacca

SEQ ID NO: 222452 - DNA, 2754 bp, Cannabis indica
tttttttttttcgaaattatcccaaataatctacccaaattttatatttgttgttatttttaactacttttaggatacttttggaagtaattgtgtaattaataggtagtgtaattaataggtagtaattctacaatatagtaattccactatgttttaaaatacaatgtgcatttggatatacagtatcattacttatgaatttctaattttttatgtaccaaaatagttaataattagtacataaaatacaatttcagacaatatcatgattgcttttgaagtaatgcactatctcaaacggaaggttcatggtaagaaaggatatatggctctaaagcttgatatgagtaaagcctatgatcgtgttgaatggggatacttaagagtagttatgcttcaaatgggctttgatcaaaggtgggttaacctgattatgacttgtgttactagtgtgtggtactctacttttcataatggccatgtcatggggccgatcacaccatcccgaggtatccgacaaggtgatccgctttccacttacttgtttataatctatgctgaaggtttctcggctcttatctctcggtttgaaagggagcggttattacaaggttgtcgtgttgcttaaggtgcgccaatgatctctcatatgttgtttgccaatgatagttatgtcttttgtcaagctaataatggtgtcactggtaatgtcttatccctacttcggaaatttgaaagtgcgtctggccaacaagttaatttggggaaatcatctgttttcttcagtccaaatgttcatgatcaacttcacaatagtatttgctctatacttcatatgcctgaagcttctgaaaatagtttttacctggggcttcctaatataattgggaggaataaaaatgttattcttggttttcttaagaacaaggttttgaataggatcaatagctggactggtaagttgttatctagtgcgggtaaggagattctcttaaaaacagtggttcaatatcttcccacttatgctatgagtgtcttccttatccctctcggcacttgtgatgaaattgagaattaatggctcggttttggtgaaaaacttcgagtagaaaaggcaatggaattatctggatgaattgggatcgtctttctcgaccaaaagatgatggtgggttaggttttcgtcttctccatgattttaacctggctatgttagctaaacaaggctggaggttcctgtgtcatcctgactctcttgcctccaagatctttaaagctcgctattttccccatgatgattttctttcggcggatttgggtcgtaatcctagctttgtttggcgtagcatttggagttccaaagacctggtccgacagggtgttagacgaactataggtactggttcctcaacgagtattatgcaccatccctggctccctgattctagtaatccttaaataacctcttcccatgtgggtcttattgggcatgaggtcagttccctcttttcggttgatgaaagaagttgggatattgagttggttcgagacatgttcaacaatagggatgccaacttaattttaagtatccctttaagtttttcggcttcttctgacttctggtcatggtctgatgaaagcaccggccaattctctgttaaaagtgcttaccgcatccttcaggcttctaaagatccaagaacgggtagcaataattcaggtttttggcaaaaattatggcaattaaagatcccaccaaaggttagaaacttcctacgacgtgctgcttctgggactttgccgacttgtgtaaatctcagaacaaagcatgttgatgttccctccctttgccctgtcttccgagctgcacctgaaacaacctcacatgtccttctctcttgtccctttgctacttcttgttggaatcatatgggtctaccagtcgggatctctctagacctctcttttgctagctggttggatggtcttttccactctcttgatgctgaccgagtctgctcacttgttatggttgggtggtccttatggaaagcaagaaactcaatggtttggaaagataaggttctcactgttgcaaatgtcctatcttcggctcgcattgctcttgatcattggcgtaaagctcaggataacacttctctatcctatatcactctagtagttgtggtgatggagctgagctttggactaaaccggaaacaaatacaatcaaaattaatgttgatgctgcgatatttgctagtgataaccaatatggctatgggatggttgctagaaacgactcaggttctctcattgaagctaaagctcactgctttcacggtgcttttggaccagaggttgttgagattattgatatcaaagaggccttaagctggattaaacgacaaggttggcaatatgttgaactcgaatctgacagcttagtctccatccaagcaaattctcaatcactcatccctttgctccatctttgagaatccggctcaagactgtccttcttttttgctttctatgcctttaataaaaattcgttttgtgaaacgatcagcaaaccgtctagcacatgttgttgttaagatgtcacggtccttatctggtcgtagtatttctgtgtctaatgctccagttgctatattttatactcagaatgttaatttaatgaagttgatatttcataaaaaaaaattagtacataaaatttgaaatgtgttataaatagtattaatt

SEQ ID NO: 222453 - DNA, 5619 bp, Cannabis indica
tttcttagtttcttaatatttaattctcttatgtatataaataagaaatcacccattagactacaaattttaaaaaaaaatctcatatttttccattttctttctctaaattataacattttataatatctaaagatttatttaagtatttatgcataaaaatatcctccaataatattacaaaatgcaaaataagatactattgcaacaaataataggtaatatgccttcaaatctttctagatagatttgtaatctgtgtaatcacaacaaattacaatgttttttttttttttgaaaaagagaaggagctcacttggcaaggctcctccgatattattaaagcctcatttttggcggagaaaaatcttggtacataaaattataacaatacaatgagtttgcacattgagtgaccaaacatacaaaaagaaagaattcctaagttttacatcaaagcactccaatccctgcataagtctaggaaagaaaaggccttaaagtgtttggttttaaagatccatgtgctctgtccaaaattttattctctctcaaacaacaaattacagtattatttaggatactacatacaaagcaagaaaatacaaaaccaacaaaaaataaatagattttgtatgttattattattattattattattttgctaatgtgtatatatttaagagattgtctactgattaaacataggcctaaggtccaaagagggaaaaaacactgtgatgcctattttatttttttgtaatgtctattttattttattattattattttttttttgaaaagatataaaaacaacttttatgtacccatttattttatggtgtagaatatccaatatctagaaaccaccaataaaaattcatttacttaccatatatttggttaaattgtccatgtataatgattagcattttgttctatacaaaatacattattctatttcttggaacagaatagtaaaacatcatatattttgtttttccataacctacactttcaaatcatcatgaaagcttcatatgtttgttttatagtttttgttcttcttctcgtccatacgtctgcaggtaatgagaaataatcttaatgattttgtcatacacataatttcgtatatatatatatatagattttttgatgtaataccttatattatctaataaagaagttttattttggatgtacaggtaatgaagtacatgaaaatggtgatgaagatctaaaggggcgttgcaacatagtttttcacattccgaattgcaacaccgaagaatgcctccgaaattgtcaattgaaaatgggctcatatgtggctacttatcaatgtgtcgatcaacaacgttgttgctgtgcttattaataattagcttgtcatataaatatataagttgatcgatcactgtcaataatatatatatatatatataataaatatataaagaaaaacttcaatggagagcatattcctggtttaactgaactgagtattcttcttcttcttctttcagttgcaaaaataaactatctaacacctcatatataaacaaattctcagaatgacccctatcttcaactccaaaaacatgacgattaccattcacttggacaatgctttgccctgggaatttcttcactttattacttttcatcatttttcttattgccgcaacatcatcccacctttgatctgatgcatatatgttagccatctcaacatatgggactgcaaccaaagggtctagctcgaacagacgatcggatacatacttgccaatttctacgtttctatgaatcttacaagaactaagcaacgagctccaaataccaatatcaggtttaactggcatgttttgaactagctccaaggcttcttttatttttcctttacgaccaaagagatccaccatacaagaataatggtctaagccaggatctatgaaatattcacatgtcatcatattaaagtactccatacctttctctaggataccagagtgagtacaagcttgaagaacagcaagaaatgtgatgtggtttggcttcatgtctgagctcaccattgaattgaaatgatcgaaagcttctttaacttcaccattcaaagcgcaccctgcaatcattgttgtccaggagacaagagttttttcgggcatgatgctaaagaggtctcgcgcatcattcatacttccacactttgcatacatgtcaattaaagcattggaaaccaccgtgttgtgtcttaatccgtttgaaaatgcatagctgtggatccatttacctagctcaagtgctcctgtttggccaaagcccgaaataagagaaagcacggtaactgaatcaggtttctcaccggctgcttctatagcatgaaacaatctcaatgcctcatctaaatcccctttctcagcatagccgctaattataacagtccacgaaacacatgttctacaaggcatgttgtcaaatagaagccttgcagaaacaatgtcaccactcttagaatacatggatataagagtgttaacaacagaaatatcataatcacaacccagttgaattccatgacaatgaatcaaagtaccttgaagcatagcttctggttgtgcacacgatgagagcaagctgacaacagtgctagaatcggctctatatccatcacacgacatcagtttgtagcaatttagagcatcacgaaacttttcgaagtttgagtaagctgctatcattgaattccaagagacaactgatctcacacccaagtcaatcccatcaaatacgacctttgctaaatgaagatcaccgcatttggcataggcaccaatccaagtgttagctagagaaatatcagcatctaatccgagttgaattccaagcgattgaatagctttcagtaatttgacgttctttgagtgtgagctcacttgagtcaaccccaaaacggtcaccgtatcaggccgaatcccagaaaacatcatctgacaaaatagacatagaactctatcaagaaaacctgagtgagcaaatcccagaatcattgaattccaagcagccaaatctctcacggtcattttctcgaacacagtgtaggcaacacctaactgaccgcacttgacatacatatcaaccacagctgtttgcacaaagacaccaaactgaaatgaagatttcacgacgtgggtatgaaccatctgggatattctgacataggatagcttcgaacaagctttggctacgaagggaaaagtgaaattgttaggctccacaccattttgtttcatttggcgatatagaataagtgctttgtgggaatggccttgattcacagcctctcttatggtggagttccagactccaacggtcgaaaaatttgaaaaacggttgagatatggagtcagtgagaaggatggaatcatctctcatttgtaagaacataatcaaggacataagtcatatgtaagaatcataatcttagacaattcaaaataaaattatacataaattatgtctttaatttttcttaaagcactaaacctaaagaggaatcaattcaagaggcaaataattaacaagtttatgtctttaataatcattcaaacattgtgtgtcgttgagcactttattatactatattttaggagaaattattcattaaagataacaaccaaataattttgtaaccaggaagacaattgtcaaggtctctatcaagattggaaatgttaagtcctaaagaaaatagcgagtcccccaactttttttttatatttttaaaatataaaattattaatttaaaatttccatttaaatattttaattttgtaattgtaacacttgtttttcatctttagttttgaagaaaagcttataaaactaattactttaactaaaaacataaattcttcatacaattatttttaaaagataaacaaaattacgtaaaaagaaacaagtccaatattggtttgaattgctgcaaaaattgttgggtctccttctttcaccttgtcgggtacttttccaaaaagtcttatactaatggagtaggtgaaatacttatatctaatacaactcttgtctattcttccaatgtggtatttggattgataatccaacaatcctctcctcaaaccaaggaccacatactcgtggcctcccctccaacaaaaccactttatgtcacctctatcaccaacggaactcgctgcctaaccatcaccttcgtcaggaaaactttcaacacaggtcctaataccgatctccatcttgtaccgccataatcatcaatgagagaggccgcttgaccaccacaatatcaggtagactttcgatacaagacaccatatagatcttcaaccgcgaggtcatcacaatgagagcttctcccacacattgcaaatgtagcccactatcctagtgctcttaaacctttggctctaataccacttgttagcacctgttcttccaccttgtcgggctgctacctcaccttaactcccacattagtatgatattgtctgctttggtctaatccttaacagttttatttttgggtaccttcctaaaaagccttatactaatggagtaggtggaacacttatatccaatacaactcttgtctattcttccaatatagaatttgagttgataccccaacaaaaacaaatacaaatctcccaaataattgagcaagagcaacttaaacttattaagttattacaaaagtgaagaaacctcctaaaaagaaaatcacttaccaactccatattttagtaaaatataaatcaatcgggtgcattttagtaaaatgaagttcagagtaataaggtgtctataaaacctataaagacaaactctatatttttcagatccagatcattaaggatataccatttaaggcttgttaggagcttgttgctcatatatggatgtagtattatttaagattgtgttgttttagtagatatttgtatttaggattgttagaatattagttgtatattagttgtaaaaattaaggtaacttgtatatagtagttttctatttatatttagtagtttttcatttagtcttctagctttatatataaatatatactatattaaggaatacatacattcaccattctctacatggtatcaaagtcatacttaaaattgtgatttaaaatttgaaattcaaaattaaggttaaataaaaaaaaaaaaaaaaaaaaaaaaaaaaagagattagggtttgagtttagggttctttttcaaaaaccctatttagagtgcaagtttattctcactgccactcaagaggattacctagccactgatctgccaaaccccaaaatccgattgttgaactcctcgcacgtggggctcacgcaccgcctaaagtttttgtgcacatccccacgcactggcgcatggaggggcatgtgacagcgtctttgacgacattctttttttggttctttactcgattctaagtccacttgcatctatctcaagttataatttggtattttttgtcttcttcgtgtttgggtgttcattctttgttgttctttttcttccttttctctttcaattgtttttgctttcgagattatg

SEQ ID NO: 222454 - DNA, 2122 bp, Cannabis indica
taacttcaacagaaatagatttaagtaaactcagtaaactccattgaaaagaatggggcaaaactattgtttcacaagatagaagcacttacttttcctctttggtgtcatttttcttggactttactctagcaacagtttccaaaacggcctgaaaacaaagattttccatttctaagtcagaacttagaatattttctttgttttttctaattgatgggaaaataaaactaataacaaaaaaattaggataatcaagacagaccaggaaaaggaaaatccaggtaactgatgaagacactgtaatggtaaccccaccccccactaactctctaaaaaaaaggaaagaacgtcctaataataaatttacagggccttgaatttcaagagatcaatccaaagtagtctcttctctttataatgcaaaaccgaaagagagcaattcctgattcaaggtttcctcaaacacttataatggattagtcatctttacgactgttgtcattgaagacaaccagagtatagcataagttcacaaggccagttggctgcatatagctgctttcccatatgttttaacagcagccaacagctccaccaatttcagctaaacatcattagagcacttgcaaaacctggattctcaaagtctcatctctctacagtaagtagtgacatggctaaagcattttaagtaaaatattctaggttattgtacattgatatagcaaaattatgttattgttaccaaaagtctatagactatatcatttcttatttgatttgattctacattctcagcattttctactttatttctttactaccatgaacaattttcgcactaaatgaagtattaatgactttgctaaccgtttatacaggaaaaagttgagcacttctaatgaattataatttggactagccaacactggcatcatatgagttaaattgaatttcttacaaactctactctaattttccaactagaattctcttcttgaatgctattctacctttccatgaaatgaataatgccaaatccaaattattaaattaataaaccatttcagtggttgttactaatttgcttaacaatataacagtacaactaaacgtattgaagttgagttttcgctttctaatagtccaatatgttatccaatgaaagtgataccaacataaattttaaaacttgaaatcaaaattaaggccagttctaagaaatgaaaatgccaacctgctgctcagcaacactgttgttgaagctaccagcatcggtggctgcaaaatagaacacaaaaattggagtgactttaattcatcaacccaaacattagaacgaataatcaattttccatttcgcaacgcatgttctaatttaaatctcgcaaacacagtaaccaccagccaaccaatcagaacaataacgcaatgaagaacaacaaaacaccgaaaataataaaaatgaattccccttctttaaccaacggtacctaaggaaacacaatttctctatacgaaccttcattctgctcattctcgggaaactccctctcaagcgcccggtcgatcatgtccgcaaagctgtcctcattggatctcgaacgcgtagagttggagtcggcgtcggcgtcggcgtcgacgtcgaggatagtggcggtggtggcattgatctcctccgacgctgagttggactggagcgaatcggcaatggcgaagaggggaaaagcgggagaaggaacagcaaggaggaagaagaatgcgagaatggaagaagatcggaccctcattgcagttgcaggtgagctaggaaacgaagaagagggttctggtgatggtgggtgggggagggaagggaagggatgcgctgagtgacaccacagcgtaagttagcaaagccccgtcgtcttggatttgctttttgctttttttttttagagagagagagagagagagagtgaaagcttatttagttgagtcgttgggaaagggagggaaggagaaggtgtgaaagtacgaaaagtcctcaaagtacggctttgtgtgactcatgtcacttgtttataaatctaagctaaccacgcgcgcgtcgtttttacacgtcaacgacgagagatgc

SEQ ID NO: 222455 - DNA, 1832 bp, Cannabis indica
tatatctataggtcaattagaatgtcataggtcaaaacatttcctcttttaagttagtattaatttagaatagctatgtatgagttacatatatgaaaaaaattgatgtgtaatatatatctataggtcaattagaatgtcataggttaaaacgtttcatttcaaaaatttgtattaatttagttatgtatgaattacatatatgaaggaattgatgtgtaacatatgtgaaactaaaataaatatataattatttttttgtttgtttttattcttaaatgaaaatagattttgttaagtataaaaatttagaataataagaaaaaagataaaacacattagaaaaattttatatgccacgtaccttgtttaacattaggattatatagatatatagatatattgatttttaaaataatttatattaatgcatacgttggtataggattttttaaaaaagaaaaacaaaatatgaaacactaaaaaaaggagtaaaaatagattaaaaaatatacataacatcatttaacatattttgtatatattgatatttataatagattaatagttagatgtggttataagttacttcattattaataataatagatagtaaatgtgttattaatgtagatgttttatatataaatttttatctttaaaaataattgaaaaaataaaaaaatggcaaatatgagaaaattaataatcgatgaaaaaactcatatagagtgccacctaaacttgttgatgctttcctttatattatatatagataataagaagaagaaaaataagaatatcatatataatttaatgagttttcataattaagcgtgactatgaaaaattactaagtgctaaaagaaaatgttgggaggaagctaatttagaattttggagatgtttgtggcatcttaagattccccctgaagttaaaaatttcttatggagagcagccactaatattcttactacttgttttaaacttagaacaaaacatgtccatgttgatatctcttgtccattgtgtttggggacgccaaaaaccattggccatattcttctatactgctcgttctcggcagcaatgtgaagtaaggttagtttagattggaggtttgtagaaggcactttgttttctacttggttggcggcgggggctgtttcatggagagaagaggttcgggttgaggtttcgatgttgtcttgggctttatggcaagttcccaacaatgtggtttggaacaaaaaagttcctaaggtagttgaggtaatttcatcggctagtcttacttttaatcaatagcattatgctcaagataagtcttttattccaatagtgagtgatcagatgaggccgaaagtgagtgggtggtgggtcaaatcgaatttctgaaagttaaaagttaatgttgatggagctattttttctactgaaggaaaatatgggttcgttggggtgctaggaattctattgggcaagtattagaagcagtgcaacaatgtcattcggcagtatttagtccagtcataattgaaactatgagggtgaaagaggtttaagttggattaaaagaaaaaatgtcggaagtataggtggagactaactgtttaaatgtggtccttgatattagcaagacaacctatatagtttctccatatcgaaatatcattagtaattgttagtttttaatttcataattagataatgtttttttttcttttgttatacaatatgcgaatagagttatcacgtgattctacttttcatgttgaaagtgtttatagtggaaggattgttttcgctagtttatcatctttgattaaag

SEQ ID NO: 222456 - DNA, 1459 bp, Cannabis indica
actctactaatcatatagattgtattattaatctctctagtaattatatatggcaccttacttttttctatggatcccctgttactcatcaaaagcatattacttggaaacttttacataatatttactataatgctgctaatcttccctggttagttattggagattttaacagttacctttcaaattctgataagtctggggtagttctgctgacgaggcctctatggactgttttcgtaactttcttcatcagtttactatggcccctctttcctattctgggaataaatttacctggacaaataagactattcgtgaaagacttgattgggctgtagcctctgatttttggtacgatttttttcctgaacattccttgcatcatctaggcttctatgggtcagatcatagagttcttaagctagtcttaacctcttctaaccctcgagctaatcctacttctgttcataaacgttttaggtttgagaatatttggttagaggatcccagtttctataccacggttgacactgcttggaaggaatggtctaattctcatcctactggtagcggtttccatagtttccttgctcagcaagacgattgtgtctctgctcttaagacttggaataagaatagcaaccattcgtgtcagtccagaatctagttgttgatgcaggaaatcaattacctgcaaaataaggatacacttactaggggggataattttaaacttgcccagttgcaatctaggttagattctttgctttacaaggatgaaatctattggaagcaaagggctagagttcgatggcttaaggcaggtgatcgaaacactaaattttttcacaaacatgcctcttctcgtaagaaatctaatcgaatcaaatacctgaaaaatgttgagggggtagtggtgaacactcaagagggcattgctgagcttgtcatctcttatttctctgatctcttctcctctcaaggtagtgaccttgatgctgctgcctccatttttgagtctttggggccagggctcgatgagcctgagattaccttccttgctcaagattttactgctgatgaagtcaaaagagctgtcttccaactttctggggacaaagctgctggtttagatggcctcaatgcttttttctatcaaaaaaattggtctgttttaggggctgacttcactaaggctattcttgcttgtctgaatcaaggaagttacttcactgagattaattctaccctcattgttctcatccctaaaatattaacatgcaaatactcttaaagattttcgacccattagtctttgcaccactctttataaagttatctcgaagattctggctaatcgtcttaagaaagtcttggataaaatcatttcaccttgtcaaagtgcatttgtgttgggtcgtattatccaagagaatattcttattgcaaatgagct

SEQ ID NO: 222457 - DNA, 3533 bp, Cannabis indica
aataatttccaacactttatatagtagagcttacacccttcaaatcccttagaaataggtaaaataagctattatttacatattaaattagtaaaatacaaataaccaaaatatcccttgaaaatagatattttctctctattttcgtaggttgttaacgcccaatccgtagtttggcttgttgtccacgtgtgaagttgtgcatcaaaatcatgccaggccaaaagctagtcagccatgcatttgtaggatgcatgctggccggccatgagatatccagaaccatcctatgttggccatagggccagccaaggatggctggttcatcactttattgtctcgcttgagtattcagacttctcattggttaaagtgctgagtagatgacttgaccttcttgttggcgagctgtactgtcacgtggcactgatgttgaccacgtagatatgtcacatcaggtgggaaaaaattgagataacaatacagtatggatctccatatatctctcggtcttgacctattcccacatctgtgaagcttctctatgacttggtttaattgaggggatttaattagcgagaccttgagattgtattttctattttatgccacgtgtcatttgtccagaaacacagataacaatatactatttaaaaattgtgttttgcatgttctatatagctttgttgtaatattctcttcatctacttttctctattttatgtgtaacttttatttagtgttataacattatttaaattctggttatattattcttgtattattttgcatagaaatgtatttgttgattttattattttgattggaccacaacttaattctaggggtgttcgcggtgtaggtggtgcagtttttgaccattttttcaaactaacccgcacatgcggtttttccaattttccaaactgcacccgcaacgcgaaattaaaaaaactgcagaaactgcactgtaaaaaatggtgcgatttttgcagtttggactatcaccaaataattaaattatcacaaatacaagcttgagcaacacttgtcaaaaataccataaaacttgaaaaataaatatgaaaaaaaaaattaagtttcaacaatgcaataattagtggactttgggttgaacattcacatgttggacctaaataaatataaaaattggtatttttatcatgtgtggtgcggtttgaaccgcatattaacaattcaaaactgcactgcataatttaggaaaaattcaaaccgcgactgtaccacaaagaatttcaaactgtatttttttacagtatgagcagtttgagcaatttaagcagtttgataaacacaattacttaattctaatatagaatgattcttttaatctcccgacaattcgtcatcttcaaaaatgactagcacacttattgcttaatttaggtaaccctttatgcataacattgcttgcttatctctctctgaattattttaaaccaataacatgaatttcatcaccttgacttgtccatagttatttctttattcattatcaacccccgcataattatatatatattttaatgagatacataaatgtagtaaaatgatactaaattccgaagatcttagggttgtaaatctataataaataaataaaaaaaaaaaaaaacggtcaaatttggtgttctattatttaactgtacatgagtaaattaatgatatttcacaaattttgacattttgttttcttgctcctaagagtaattgtcatgaatcgacctcatcaatttaaagaattatttattattatctacaaaattatcaaataaatcgctcaaaagaaaaaaaaagaaaaaaaaaggttcaataaaaactggtgaattaaaatacacggagtcactaactctagtctttacttgtattaatatataaataattaacaaaataacattactataataaataaaaaatacgaactttagttccatcagaaaaacaattataataaaataaaaagtagagatatatcatttcacaataaagattttttttaaaaaaaaattaattatgaattttttattaaaattagctaaaataatagttctccaattagacatcttcctcgttattaacactaggattagaattagaaaaactagtcaaataattagccgtctaattctcagatcgtttaacaaaaaaattaaaataaaatcagatgaaaaaccttaagaacatatatatattctgtttcatctaccgctcataagacacaacagtaaagctgttgcataagttcattcaatctagtaacttgagcacttaactattgtgttaggtatgtaattgcactacgtaccaacctctttagttgcacggaacttgttatttccaattactaacaacgatttgatggcgagccattgaagaacagagaaaaaccaacaacgagacaaaataaaacaaaaccatgtcacatagacaagattaaaacactcaaaattatatcagagaaacaagactaaaacactcaaaaccatatcatatagccaaaactaatcatagtagcaaaaatcgaattgcagtagcaaaacacaactccgaccaaaccgcacccaagcccaaagaaaaccggcaggtttgaccgaagaaaaaagacgacctccaataactatagatttaagaatgagaaacttctatttttccccactcacaataaagatattagagacatgaaattgagtaacacggcattttcttcgacaataaaatattcttttagttttaattagatttttcattggcaagcatggaccgttattatctacccaaaaaaaaaacgttttaaaagtatgtaaccctgatcttatgactttcgagactcaacttatttgggattacagtaattaacaattgataagtcaaagacaggaattcatgtcacatgtcataaaaatcctaagttttataaattcaaaagtcaaattaattatcaattagagcaaacaatgtacggtactagaagtgctccagaagaaaggaaaatacttttttttcttattttttttttaaaaaaaaatgcattatcattcaactagatcatgtcatataatttacaagatacacctttcttcacattatggttcttgtttaccagttctatctttgagagttgagttgagctgtctatttttaacgttgtaaccacgatcgaaataaacactacaagatcacaactactttactcacaagtcacaagtagcgaagtcaatatatgtattatgtatatatgtatatatacttccctactttttctattatctctttctcactctgttatgttggggttagctgatgacgagtaccattaccatacatataatgtatataatatatagaaatcactggtttagttaagtttagttagaaggaataaaaatataagaataataatgaaataagaataagaatagaataaaataaaatttaaaatacaataaaaaaaaataataaaaaattaattaaatttttacttatactatatt

SEQ ID NO: 222458 - DNA, 1634 bp, Cannabis indica
attttaaaataaaatgtatatttgatattaagtggtaattacatgtaaatttttaatattttatctagcaaaatagtataagaaaataatatttgtttagtaattaatatttacagtgaaacgtttttagtaattacacagtgtaattacacttaattctcatagaagtcatgagaattagagagaatacttggaataacttaattacacagtgtaattacactcaattctcatagaagtcatagaattagagagaataattggaatctctcaattacttacaattacacaattataatataattacatatttagacaaatatattaaattgtgtaattactaccaattacacacaaattcaattacattgtggctttccaaacgcaccctaaaataaattatttttgtaagtttaatttatataaatttttctatgaacaaaatataatttgcggagtgttaccatcaacctcctattacaacttctctttctttgttgatcttattccaaggactcctaaactccaataaaccctcgaaataatttttccaaacctcttaaaaatccaaaacacctcttgtgctttgaaaaattcttccaagttacttaggctttttccaaccaagtttgactttccttgaattgtaagcaacttgaattattgaacttgagatggctagggtaaagagaagcagaaggttacctgatgaatatgatccccatgtttctcattttattagacctaagccgacagtgcataagtctaagaacttggacaaggcgcatggtggaaaagtgatggcaactaagcttctcaaacctgtttttgagagtgatgattcgagagattgagcctttaagcttaggcctcttgtgtctagtacccttaccgggcttcaagctcaaaccattcgagatgactactatagcccagaaaatgtcagtcggaagcctcgacatggtggtcccaaaggttcccagaatacttgctgtagtgcttggtcgagaatccatatgaatggaagtgcttacttgcccttgcatccatggtttatatccattgctgacttattcagtgtttgtccttactagataaatcctaatggctataggattctagccaccttttttatattttaccgccttaggaactggcctatcccaactcctcacgagataaattttctatgggacttgaaaaggagtccaacttgtagaaatcaagacttctaccattttcaccaatttggcccgttcatagaacacataaccaaaagtaattgtggcttttatttactaccaggagtttttctatattcttgttctttcgtcaagacacattactttccaaaaagctggccctttcgaaagacatgcttctcttattaacatgaagaggagagttaataccatgttgcttaaaattgatgcatgtgagagagatggtcaaaccctctttaatactaaaaatcttcggaatgttgggttgattatgtcatgccagagagtgtatgttgatgtagccttctctgacaaatcttggaccatgccacttagggatgtaaacggggtgaggcgggtgcggggattgctcccccacccccatacccgcttcttaaattcacctcatac

SEQ ID NO: 222459 - DNA, 2191 bp, Cannabis indica
ttttttttttttttgaatgaatgcctctgtttttttttttttttgatttgagatacagaaaattggtgttctctgtttcttgatagttttttcttgttgaaatacagacaactgtgacagttggttttatacttttatttggttatactagtggagtagttgagaactaactgagtattgtataagtacaaatataaatttgataagtgtgcattataatcacaaaatatctatacatacatatttatttatatagaaagtagaattcaatcttgttttcttgaaatttgtaaattaaactatcaggactcaaagaacacaaccaaatctaaagtgaaagtatcatacgaatgaattgttataaaggtgggaaagcaaactaaaaaatccatgtaactgaagaaggagagttgagaaagagagtatgtgcaaccgggttcatccaactatatggtgtactcaactaatcactaaccaaaaacttaaaaaatcactataatgattgtttagaaccaaactcataagtagtgtgtttctgtattagtggggaggttgttgcacataaaaatcttgcatgaagaacactgaacatggataactagatttcatcaagatatgaaccgacaagactttaaatattagtggggtgcctttgctactttctctagcttttttcataaggcaacccttcaatttttcaacaaaaactcccttacttctataaattcagtcattgtatttctagtactgttgttccctgaatattcaatcacttgttcaactcctgcccaaagaacaaagaaaaaaaaaaatagcaaatataaattttaagtcattaattaagtgtacataaggatatcatttgtattatatttacctttgaattttttacaatattttatgattcttcttgtacagagttgacagtgcttgatgtactttattgtcactgtcacacgctgttaaaccaaaaattaaagaaaattatagaaagtagtaaaaataaagaagaaaacatagaaagaaactaattaataatcttaatcaaaaatagaagaacctacttcatgagtttgatgttggggttcttgtgttctagttttattgaaaacattcgtaagggccttccaattccaagccttcattttgaggtgcaaattgcaaaataaaaaaaataaatgcactaaaattatagcatgaatccactataattatttctaatttcaaatatatatccgtatatataagtacttttaaaatataatttaaatttgagatcttttttgagtggagataaataagtatgatattttaattatctaattttctaggatatacttttaatttaatttaattcaaatgtaaatgattcaaatttaaattatgttacctcattctggaaaaaaaaattacataaatattaataaaacaatccctctattaatcctataagtcataattgattaaatcattgatgcaaaaagtgtctaaataatataaaatttttgttagaatttaggataaagtaattgagttcatcacaaaattaattagtaataagagaagtagtctattctatgacaatttatttttacacattaacaatctaactctaataaatttagaaaaaatatatatatattactcactaaaattttggaggacttaccacattattccttgaaaaattatatcaaatatggggtaaattttaaattcttacttatcccaattccttttaaagttgtcatagacacaaatatcaaattttatataatttaatatattaatttttggagaatacggttaatcaaattgctgcattctccaaatgttgctaagcacgttaatacttaataacaaatgttgacaatttgctttgagaattttgagaataggatccaataattcacgtcattcccactttgccaaccacattttccaatccatttgcattggaaaaatcccacttgcttaattacaaaatcaccaacttttaattttcactaaaaaaaaaaactaacatcaattgatttctaaactacttcaaggaaaaaacacaacaaaacgtgttgtaaacttgtaaatgttttcttcatggataatatgatataacataaccacaaataattttcatcttcgtattaacaaatgatcataacctataaagaaataatttaaaaaagaaaaa

SEQ ID NO: 222460 - DNA, 2382 bp, Cannabis indica
gctctgtaacatatggccgaaccatataccaaatcatatagttttgccaattcaattgcatcattgtatttgtagacccaaataaatggtaaataccaagtcccgtcccaatccagacaatatttaagatatttacgaaaatactactgccttacaaactaagcatcagcatgtaccacaacatgcgccaccacttgaccaccacttggcaaacttgtgggcatcagttagcttgtaacgtgccatcttagcacgcacgttacaccggtgatggtagctgaagacgttgctctagttctcactattgttgaatggtttgaagttattgaatgaacaaatcacaaggttgcgtctgataccatattaaaaaataggggatcatttactctgttttttattattcaatcagagtgaaaaaatacagccgtataggagcaatatatataggctcattaattactaatggtaatttcttgggaggcctagctgggaaggtcatacaagttgatttagagaaagataaaccagtctctaggagtaagtctcttaagatcatgattgagattgacattgctaaacctctttttccgagagtctactttgacttagtttctagtgtcaagagatggcttcagttcaagaaaattggtatttttttgctataactgtggttgtttgggccaccagcacagaggtatttctttgtcttctccagtcacggtggtgaattgtaatagagttccattccctttgtttgggtcgtggttgtccacttcttctttgtacatggatgtttttttaggtgccaatacttgttttccttgtcgtgcctcttctaaaaggccggtgtctcagtagatccgccattctttccctccggtgaatgttggaaatggtgatggtggctttaagggcccaatatccaaaatagcccgtagctcgaggcgtgttaagatggtgactagttgtgcacctgatgctattggtaagtctcagcaagccatgtggattaccaagccgctgcctagacgtcgcatgcctccggttgctacttctggaaatggggttggtgttgggtgtgaggaaatggaaaagagacttgctaatttacctaaattggttttgaataattttgaccatttattaaatgaagagaagtcttttaaaattttggatggttctgaggtggtccaaggctcgatgcataagcttgtttctattgggccggcctcgtcttcttttgggcctggctttaaacttgatgatgttatttggcccgaggatgttaaccacatggattgttctaaagttttttatgttgattttggagtttcttttggcgtgggccctagtcggcttattaagggaccagttggagtgggccttttgttgatattggtcataataacttgaaacggattgaccttaatgtgatgaataactctaagaatagctcagtttgtgggcaagaggtcaactttcagtaagatgaagataaggcattatctaattttttccaagcccaagatacattgttgcaagaactcaagcaatttgggagaatggatttatatgagattcaggctttaggaggtgacattggtgccaagcctacttctgagaccaatgcttaactactcatttcaagaaaataaaatgaaatgacgcttcttcctccttatgctcaagacctttgaagctccttcgtcaacatcccggtgttatttgtgacttttcctgggatacgaaggatcacgatcaagcttctaaaatagcgttgggagaatcctctgatgacaacttgaactttgtgagttgctttgatgacccagaagagtggaatttaaaagataaaaatgttatcttggcacaaccaatggttggtacttttttgattgaagattctggctctcttgggtcaactcactctcatacccatgtggaggaaaatgttatctctcctccacaggagccatgagaggcatttcttggaactgtagaggctacaattcgcgagttgaagtccctgattcagtcgcgcttcctgaactttgtttttctgaccgagctcaaagttaatggtacctctctagtacgtactcttaactccctccatttttactttaatatccatgtgccagctattggtaccgcaagaggaattattttggcttggaagatcgggtttgtgtttgaatgtatttcttgctcccaaaatcatacttttggtcttgtctacttggatcctccttcccatccttggctcctctcttgtgtgtcggtctccttatttccatgctaagaaaatgtttttaggctgagttcatgaagatcaggaataggttttaaaaggcttgtggctaaatttttggtagacactaa

SEQ ID NO: 222461 - DNA, 2772 bp, Cannabis indica
tctttctttttcattccatctagtttgagctctctgtttctgatcggatcttcaaattaattctcattgctagacgctctcacgccattatgttggcaccaggtttgaatgcatttccccctaacacaagtaaatggttgattttgtttagatttccttggtagaaaattttgaaatcagtactgcatatacacattttctagaatgctttcaatgattgtttcctcttccccgtgcagatactcgaaaaggtgcaaatgagaagggtagagtcgccaagaacagattgtaattgcaaatgctactgaagattgcccgactcaaattagttctgttttacagattcggggctcaattccacttttctggtcacaggaaacatcaggaataaacataataaaacctgacattatatgtttgaattgcaaaatcccctttttatgaggctacaagattttgagaatctagtcaagaggtatggaaatccaatcatcattttaaatttcattacttgaataactattaaaatgctgagcaatggatgcgacttatttattggttgtaatgataatacttgagttagcaagggtgtttgcggtgcgggtggtgcggtttttgaccattttttcaaattaacttgcttgtgcgattttttcaatttttttaaactgcactcgcactgctaaattaaaaaaccgtagaaaccgcatcgaaaaaattgtacaaaatacatataagagttaaggaatttaatgatatagttgagaacttacttgacacagcagcaaacaaaaacaatgatgttccaactaaaattcaaagtttttgtggcagaggttgaatacgtataatttgaaatatggacatgagaattttacagtatcaaaggttttcaaactgaatgagaaattagaagagcaagatgagtgaagaaaataaaagataataaggtaatgtttacctttacaaagatgcaaaatatgtaatcaaatgattgtaacaaaatatctgtacgggtactaaggccaatttacatgcagattgaaaatatccaatagttaattaaatattatgtaatcaaatatattaagaaatagtatatattaaataaattctttactaataaaccttaatcaaatgaacaaatttgtttgactgaattaaaaaagcgagagtaagattcattggcttgttttcttcgaggacaacaataacgggaatgtgtttaggagtatcttgttcttcgatgtgtgggagaattttgttggccaaattgcattttcgaaaagtctagccatagtggcagatgacacatcgggcgggtttcgggtttcgggttagcgggttcgaaaaattgaaaccgaacccggacccaaatagggcacgggttgacgggttggcgggtttcagttggtcgggtttagcgggttggcgggttgaccaggtcaactcggtcaactctttacaaaaattaattttttattcaaataattatttttttttatttatttattaaattaagcatatataatataacaatttgtttatagtatctactattgaagaaaaaatgcactaatcaatccaaccaacaaacaaacaacctatttatcaaagattcaaatcaaacttcatatttatgttcatgaagtatgataaaagtgaaaactaaaatatttcaaaatacatccatatccaatatccatagtcaataaaaatctaaagtccatattatatatataaaaatagtaaaaaaatatatatatatttataaaccgggttggcggacgggttcgcgggttcaacccgaaacccgatacccctaaaatctcaacccgccaaaatattcagccctagatgacagtgatgtgagtgttgcctattgtgttgagtacaaaaatgatggtttgatgaacttttgtcgtaatgtgtggatgttgaagacgagtgattccataaattatacttgaacttaattagagtttagcattaatttagatagaaagttcaaggctctagggttcttgagtaaatattttattttggttatcagtgtggataagaagattttgtttgacactaaaacccaccacaaacattttattcagattggtgatggtgacatttaacaaacttgttttatttatttattttattttatttgattaacatttaatgtattttttattatacattagtgaatggaagcataaatggttggagcagtctcatgtctttccaataagctttgtaattagtttaaataacagggtcttctctgatttaaaatgtgagtcaaaccaaatagagctgatttgaaaataagatcaaaaaaaaaaagggcacaatttataacactgaagtggccaacacattgaaggaacgaatctgcattcatcaggaatctgcgaatagtagacaaaaagtataaatataaaaccataaaatgaaccagaagagagtgagtggtcaagtttaagtatattattagaccagaataagcatttcaaaccagtactgaatttctagaacttttcaagtaacaattggcaattgtaaacaaattaaattatgataataactaaattgtggtattctgcagtacatataaaaagaggggtggttggtcttaggatcttttctgcagcctcatactcctaaagctatatcaccagtcacagctcgagagtcgagactgaaggaatttagcacaaaaaaacttttcttgaacccccggaacattcatcacacatcatcattgcaagctgatta

SEQ ID NO: 222462 - DNA, 1781 bp, Cannabis indica
caaatagtgttaaactaatatcaacaacatgtctatgttttctcttaactcgaccttattgttggtgagtgcgagggcatgaatttttttggacactgcttatggttttgtataaattgtacaatggttcatattctttgccaaggtcaaactgcacaaattgaattttagtgtgaaattttctttcaacaaagttattgaattgaaagattgtgctgaccttagatttagttttcataggaaagattcaaacaaatttggtgtaatcatccataaaactaacatagtacttaaaggcatcattagaggggtaaaaagaggggctccatacatcggttaacacaagttgaaaaggatgaacaattttatttgtagtagatttgaaactaaactgatgtaatttgccaatttggcaagcactacaaaaatcaagttgtttacatttgacattaggaacaacttgaggtaaaactttattcaaaatagattgagatggatgaccaagttgacaatatcagatgttaccaatttgtgacttgtcatgaacatggttgctagtagcggtatgattctaagctttaggctgggaactgaaagagacaggagcattattgatagaatcttgagaataggtgggagagacttgaagtgtctagagatcttcattgttatcttttagtgaatttagagaatgctaagtgaatttttgggaacattaggcacatgaaggatggcttggaatatgagagattggtttggaaatgtggtggaaacagaacttgtgccttaatcatgagttgataaggaggaaccattacctacaacaaccttttgctttccctttgtagtcagcagcagtagcaagattgtctgcatcatttgtcatgttgtgagtggctacactgtccaaataccaggttgctaagatatctggagtggagttgatttttagaaaggtgagcttgaggattgtcaccattcttggaagatgatgtttaggcagaagctgctcctgtgaatgttatttaaacttgtggtagcatttaagggcaatgtggccaacacgaccacaaagttgacacacaggtctgttaccacggcctcatctatttaaattgttggatcgccaccatgatatgcaccatgagaacctcaattttaatatgaacctttggtgttgctgagattcgcattggccatattggcttgaatattatgaagagagtctattgtgtgttgttgaatgcccatctcttgactttgcaacatgaattgaacttttggaagagagagtggtttagatcgagaggtgaggttgacaatcacagcttcgtattcaaatcctaggccaccaagaatgtaaagaaccaaatcatcatctttgatggattgaccagcagctgccagattcagcatgttatttcatcttcagtatatattcttcaatcgataaggagcctttcttgattgtttgaaaaagattttgaagttgcaagagtcaagctcgagatcttgtggcaataaccaaaggtggtccagatctcaattgaggttgcacaatggataacatgtccaggcatgtgttcagtgacaaaattcattagccaatgcatcaagaattgatcaagacgaagccattgttgaaaagaagggttgggaacattacctgcaaggagagctggaggttgaggaatggtgccaagaaagtagccatcaagttcataggcacaggcagctacaagaaccagggatcgccaatgagtatagtttgtacgatctaa

SEQ ID NO: 222463 - DNA, 1777 bp, Cannabis indica
tatgcattgatccgatctatagtcaagtttgtgattgttgtatggcctacaagtgtgggaaacaggcacaaccaaaagacttaagtattttgtaatcgggtagacgtccaaagagacattcatagggacttttaaaaccaagaacagcacttggaagtcgattgatggtaaacactgcagtttgaaaagcataccaccaatatgataaagataatccagattgagcaagaagcaccaaaccagtctcagttatgtgcctatgcttcctttcagctcttccattttgttcgtgatcatgtggacaaggatgctgaaaatgaatcccttgggcacttaagaatttagcaaaagatctatactcccctccccaatcagattggacacatttaattggaaaattaaattgtttttcagccatatttttaaatttaagaaagacatcaaaggcttgagacttaagtgtcaaaggatagatccatgtatacctagtatggtcatctataaaatgaatgtagtattgaaaaccctctttagaagaaacatgggaaggaccccataaatcagtatgtattaattcgagaggttgggaagcatgactagtagacaatgaataaggttgtttatgactctttcctttttggcaagcaacacaaaagtgtagatcttttaaggtgccagaatgaggaattgattgtaaaattctgcttaaaattgcagcagatggatggcctaatttttggtgccaaacattcacatcttgctgtaatgtagtagacaaagcagtagaaaaacaatttgagggagaaggaaattcattgtctttattatcattgagcatagtacaaggagctactgtaggaccagtagaattattacattcagtagtaatactaggaatactaggactatattgaaatcgagacacaatagccaaattgcattgtaatgcagtagctgaatggttggtatcaccaagcacatagaggccatctttaactggtcccttgagaagaacagctcgatcctgtgagtttgtcctttacaaaacaacaatttttgtgaaattcaagatagacattattgtcatgagttagtttagagacactaactaaattctttttcatggtaggcacattaagaacagaatttaatagtaaaggatatggactattgggagacaaaagagtagaccctatgtgagtgatgaataattgcttaccatcaccaacagccaaggattcggtgccagtgtagggagagaaagattcaagattttcagatccattggtcacatgaacattagctcctgtatcaataaaccagagattatcatcaccaaagtcaggtaaaacagaggagttgtatacctgatagtcactttccatttccaattctgtgagataagcacgaagtggagcagcattcggctttggtgggacaaaatttttatcaaacctgtagtggcacacagcagcagtgtgaccacttttgaggcatagttgacacaccaaacgatttggaaaagagaagaatccacgataaccgcctctgccaacagttcttgaagatgtgtcattgacatttcctcgagcatgtggagggatgtatttgcttgggttgaatctattatttccaacagcaagattggcttgaagcttcatggaaatatcagatacgtagctatggtgttcaagccgactctcatgagacatgagaagagcttgaacctcatcaagagacaaagaatcacttcttgatgtgattccagaaactacgg

SEQ ID NO: 222464 - DNA, 1867 bp, Cannabis indica
aaaatttgacaaaaaattatttcggaaactaaaacagataaagatgtatcgttataccccgtttttaagggggtgcattatagaatttcccaatactgttttggatattgtattttttaaaagttatatattgaactctctattttgttaaatgacaaaataaaccttgtattttttaaaatagtaaaaataagaccctaaatttaatttttaacttttttttaatataactaacttgaagacaattcttaacatgaacggatacagaaaatgtaaatagttttgtcataaaacatttagattagattattattaaattttattttgacaaaaaatcagttcagggtcctatttgtactatttttagaaaaatacacggctcattttatcatttaacaaaacagagggtctaaaaaaaaaattttgcaaaacatatggtctaaaatggtatttacttttttttatttgtttgaaaagtaaataaactattacatacacacgtagaaaggagtgagttttggagttgtgaatgagccccctcatcatcttctccacccaattcacgtaatattaattattaaaatagtacaaaaataatttaaaaaattattaataatatttattttattatttttcttttttttcttcgaaaatacatgttatctgcgtttctggcattgaacacgtagattccaggttagcatttaagacccgtcagtgggaccctccttagtggtaaagcaggccaagcccacctggatatgtccttctgagaaccatcctagtttcgtacttgcaaagtcttccgccttcgtctgaccgagcccggaagacacctccagtgtcgcgggcctagagggacaaaatattgtgttcccataagacccttccggtttccctatttattcctgtacatagataaggaaatgtcaactgtcagatcgcgccataatgtcgtgtcgtgattaaaaaggaaatttcccataacaagtgtggtgtagttaattctgaataatcatccaccattagcagatacggttttgactcaatcaaccaaattctaatctatctagtcagcagatcgtgggctgaacctcatgaaaaagcccaaagaccttgtttagttgtaaacttcctagtagagggaaaaagagaaaatcctaatgtaatcctacaactactataaatactctatcaatctcatggattaggggttgaactctcaaacgtactttgctcaggcaagcgtgcgaacatacatcttgtgtattccttaaagcatttgcaagtaaacaacttattgaataaaattgactcgtggactaaggctaattaatgcctcatccacgtaaaaattgtttagatctttttgtaatttctttttttatttatttcttcagttcttggtatttttatttcgtttccaaaaatcttgggaaatattttgtacttgcattgagagctgaggaaagtagtgagattttttgcaaattacgtatgaataatcaaggctctcaccataacccaatttggccttcattacactggtccaaatactagagctggaggttctagtgaccctcaagaggtgactagtcgcgagcaagaccgtcatgaagaagaaaataatctagatgctcccgtcgtggaggatgcagaattaggagaaagtagttctgaggatgttgaagttaacatcgacgatgtgtcaaaggatattcatgaagacgaccctcaagacaaagccgctgagaataatgttggatagaaaagctagtctgatgagtcagaccctgtggtcatcatggtgcgacagcttcaattaactgaaaagaggttatctcaggaagatcaattcaacgagata

SEQ ID NO: 222465 - DNA, 1910 bp, Cannabis indica
aagtatatgtaatatgcacatataaacaaaggatgataagataaagcgagagagaaaaaggaaggtttccttgagattcaagcttcgtggagagttctttttgttattgggaattgatgattgagagtgttgaacagtgagtaagagagagagagaattggatactaaagaagaagaaagagtttgaatagaagaagctaaaagctggcacagatggcaagagcaggagagcctctttgtcgccgactatgatgtcataattattatttatccattttcttattaggacaatatagaaaatattaaacggtaattataaggttagtttggtgtaagcactattacactatcatatatagggtaaatagcgacatacccaaagttttaagtttataagcggtatgaatcaaatgtttatttttagcggcacaagtacttaatgtttataaaattctaattttcctccagttttgaccgtacagattccattttgaatttattaaaggaatatttggaagtaactgatattacatgtttctgtctagacccaatgatcaagaatctagaccttatatgtctgtttaagaaaataatagagcgtgtactgatgaaattagagaaaaattacagttttacaaacattgggtacttatgccgctaaaaataaacattgggattatgtcacttacaaacttaaaactttaggtacctatgctgctatttacccttataaatataagttttttcatcttgttttgtaaaagttatcaattgagccttttgttttgttaaatgataaaaaaattatatttttttccaaaatagtaaaaataggaccctaagctcaatttttaaaaaaaattattttttaatataaccaactttaagacaattttaacgcgagctgatgcagaaaatgtaacaaattttatcataacatctcttgatcagattattattaagttttattttgacaaaaaatcaattcagggtcctatttgtacaattttagaaaatacagtgtttattttgtcatttaacaaaacagatggtccaattagtaacttttacaaaatacagggtctaaaattgtatttaccctatattatacagtgttatgaaatattatatatacttgaatgtctaaatcatcttaattaattatatattttttttcaaattatatccacttgatgtggtatgtccacatagtcaagattgaggacacgtggaatgcagctcgttagcaacaagacaaagttaccttatacattatgtaaactgtcaagggttatgaagcaatcaagcaaaactatcaaacaataagcaagaagacttaagcaggccgccaagaccttaaccaaccatgtctagccgatcaagggaagtgtataggttggccagaggaagcttgtatggccagctagggttttgagcacaagttagcatgctaaagagtgactgttagaccgaaaattgtttgtttaaccaaaaagacctgacctttgcaaggaaagttgtacagagaggctaagaaagctggcaggcacataccaaggcttacatgcacataccaaagttgacaggcacatggaaaaactggcagacacatggaaaggctgacaagcacatagaaaagatggtaggcacatagaaaagatggtaggcacatagaaagctggcaggcacatctcgaggctgcaggaacaatacctggctgaccataggagtgcataggtcggccaggccctaaaaatagggctggccagccaacttttgcagacaactctgactagttgagcaaagttgcgagataggcccaacacccccacgaacatagggatttgccctcgagatattagtcttattttctagggatttagttttctttttgtaacttaaataataga

SEQ ID NO: 222466 - DNA, 3418 bp, Cannabis indica
gaatccaagtgtgggtctgtgttcaagtccaggtcctagtgcgattacaatttttggtctaggtcgtcatccaattcttggtccccgattcgcttcttgtttcggttctagtttcaagtcacgaggtacgtgtcatgtccaagcatcgagtcccagatcccaagtcccgaggtgggtcctatgtctaggtttgggtctagggttgtgtcccgaatcgcaatccaagttttaaggcccaagttctggtctcggtttgggggaccaattcctaggtctagttcccatcgatgtttgggtcctaggtcgcagtccaggtccaagtttgtgttccggttcgggttcatgtctgaggttcctgtccgagtccagatcccgatttgggtttggatcccaacctagtctaggtttaggtttttcggtcccaagtccgactttggttcttgggtccttggtttggccctaattttttggtttgggtcttggtctgggtccaggtcccggtcttggtttaggttccaggtcatgggtcgcggtctgggtccaagtaccgatatgtgttttggtctaagtttttgtttaggtttggctccttttacagtcacaggtctgggatctcatcccagtcctggtccgattccaattccaagtcttagatcaagtctggatctcggttcaggttcgggtttgagtctctgtacagaactgggttcgggtcctaaattaaaatactgactatgggtcaggacaaagccttaggtcaagattcatatctcggtcttagtttgggtttgggttcagagttgtgtcccggtagtcagttcctaggttttgggtccaaggtcgagtcctgtgtctcgagtttggggtgaagttttgggtctcggtcccgatcgagcccagtttttggtcaaagtcccccatctaggtacggatccttggtctaggtcctggtccaggttcaggtttctggcccagatcctcgggttctagtcccagtacaggttcaaggctcgatttaggtccaagtcccgggtacgagacttaacccaaaacaaaacccaactcatgactcgatcccggaccaaaacaaggactgagacttaacccaaaaccaaacctaaactcatgactcgatcccagacccagaccaagccgtatacagtgactgggatttggactggacatggacaagaaccaagaccggaaatcgaatactgacccagacccagacagggattgaaacacgggacctagacttggacctaaacccgaacatgggacccgagctcagacctggacgcagcccgagttctgaaaaacctttacccagactcggactaagactcgaacctcgaccataatctggaccaaaaccctgacccataatgaaacccgaacccaaaactgagactagaactgaacccaaaccataacccaaactcataccagaacttggaccgagacctcgactaggactgggacccgaacgtggatcaggacctaggcctgacctggtcgtaaaccttcgaagggacccacaccaggatctataccttaatagggacccaaactcaaacccggaccaagacaaggaccgagacctggactcgaacccagatcgggacctaaactcaaaccaagactcgagacctaaacccaaacttggacccagaccaggacctaggaaccggacatagatgggggacctagactagggacctaggccacgaaaccaagaccaagatcaaaattcagtactcaaaccaaaaccaagacctgacctggacccaagaatttgaagtccgacccatacccgaacccgaaacctggccaaaacccaaactaggacaggaacctggaaagggacatcgaccaaacccgaactcggacacaaacccaaaatctgacctgaacctgggacccaaactcaaacccagacctagaatcagacccaaacctagacctggacccggacccaaactcgaacccagaccgagatcaataccaaagacttagacccggaactaaacctggactcagattaggatcagaacttgggacttggaccttgacgtagagccagacccaggacccgaacccacaccaaaagcctcatctgaagctagattaaaatctggactcgaaccccgacctgaactcgaaccctaactcaaacatagtatcacaactataactggaaccaaactaggactaggacttggaccaggacaaggaccttaacccgaaccggaaccaagataaaagccagaccgagacccaaacctcaaccgagactaggacgcaaacccgaacccagactaggacccaaacccaaaaagaactttgaccaggacaaaaaaatcaggatagggacctcggcaacagaactaggaacgggacttagtacccgacccagaccccggacttgaacctaggacctagcttgtgacccaacacccgaaatggaacgagactaggaccgaagattgggattttgatctggacctgaggcttggaccaaacccatagtcggtgtttggatttgggacccaacccatgactcgaacccaaaccagcaccacccaaacccggacctgaacccaatcctagaccaaaacctggacccgaacccgtaccctatgacctgaaattcaaatcgaaactggaagtagacggggacctaaaaatgggaccaaaacgaggacttggacttggaactgtaaccgtacatcgacgtagacccagaaccgtaaccggactaggacctagactccagctcaaacctagacccgatgcggaaccaacaaaccagatcccaacccaaacctggactcggacccgaactcagacccaaacatggaaccagactcgggacacaaacaggggctaggacctagaaccgcaccccagtctcgatcccggatccaaactcagacctggaacctaaaccagaactagaccgggacccgtgatagggatctagatctgaactcgaggtccgggaaatagggcttggaacagaccaataggaggtgtctggatgtgggacttagactaggttccgaaccggaccaggacccaaacctgaacccagacctagacccaggacacaaaactagaacgtgacaaggtccccgacctagacttaaaaacaaactcggacctagcccgagacccaaaccgagacaggaactcgggccttgacccagacctaaatctgggacccgatcccagacacaaactcggtcctagattggaatctggatacgaactttgactcggacccagacccaggccgggatcgaaacctgagatctagatttggatagacatcttgacgtagacccaaacatggacccgcaccagagaccctaactcggacttggacctgaacccagacccagatcaggatccaaac

SEQ ID NO: 222467 - DNA, 2558 bp, Cannabis indica
cagttatgtagtcaccgaatagacaaatttaataagtcaataaaataccaaaataatacctagcatccatcattcctcatttctaactagtacatcgctaatttaagtcatccagaccatccatttcagcttaagtacaaaatcagtttcatatcaacaatagaattttaaactgcatttttttgcggtgcggtgtggtgcgggtggtttgggcggtttgatgaacacccctagtgtactgtgatgcacccaccattttgagaactcgggtagttttcataacaaaaatacatacgacctaaaagctaaaaggtcctaagaattagtaaattctagcagagaaaaaaaagcagagaaaggcttagtaattggtctggtaaagttatttctgggtattcggatatttgaaaaactcgcgagcattcaaaagactcaccaaagacctgcgagtattcaaaatgctcatcaagaaattcgcgaatacctgaagtgttcttcctgaaacctgtgattattcaagatttaggcacatatttcctaggaaaatatggcattttgttagaagacagacaacaaattctatcatttcatgtattttctacccctaaaagcacaaaacgcatataaattctcaaggaaaagaaaacggttgcataaatggtaattcactaaccttgaagtgcagtttctctttgagtgattctgtgagtattgcaaacttcaaaatccttctcagatgaagaaaactcagaaaatgcaaagaaatttttagagtttggaattcaaaggagagaaagaggggaaaacaaaaatgagagggaaatgaataaaagatcatttcataacagggagtttaaatattaatatccctcatttaatgggatggagacacatggcaaaagaatgcctaaagtctctcaatctaatggttaccaataatcatggctacacgtaccccaaagggttctgatgacgtggcacctcaaaggagtaaaataataattacagtcgtctttttgaaaccctcgataagacaaccaaaagtcaccaccttgtgacaacctctcacatgcctctatctcatagtttgcctcacgacatagctgtcaatcgcgaaattaggggcatgtgttatagtgtgaattttttacctagaaactcgagactaggctcccataagaatgaaatatggactcactctcctcgaggattgctaagctgtcggaaggagaccactcaagtataaacctcgcctgaaccagactcagcgagatgatgtgaccttgacagagtctagtcgcattattacgcctcgtatgatgtaggaccaagaagggcgggtttaaaactcgcacatatgcgatgtccacaaaattttctcttgcgagttggtaaagatcaattctttacttagcgaactggtctggatgacctaacacgctcgatgatccgataaggacacgcacgtcctagatcatcgacattgacaaggtatccacatatgcgactcaattagaatgcagatatcttaacacaaagattcgttagtccttcacgcatcctaggcccacgagcttatgcgagaatatgaacagacaactcgtaccattaaggtcgcgtacgttgctatattaagtaaattgagtcgaaactgttcttcatttattctatttacgtttttcttgatttaatgttgatattcaatgtaaaatggtttgataattaattaagctctgtgtgaccaaaggacacttgctttgtatataaaggagtgatccaacatgaaataaaagagggcagaaatccttgcaacagtggactaagtaaaccgtgatctgactgaacaactataattctcttgtgttcaatatattttccagtacgtctgagtatatatactttgaatactcgccattctaggtgaagtactagcacattttaattgataattatattttgattttttatctggtgttgtcaaaattcctccaacaacaggtatgatattttatttcctataaactcaattagtaaacatttataaagtaagaacatagacattgacaaggctatgaaatatttgaatgatctcctttcttattattttgaagattataggaaaaatagatttgtagtgtctatgaattcagctaaaaatattacaattgagatgagaataaagcctaaattttgtgaaaaatgacttatttgtaggaaaaagtaatttgatgaaaatattgatgttgatataattaaatctgttggagaatcatttcgaattgattatttttttttacttgattgaccaaattatttgttcacttaaaaataagtttgaacaattttaagtgtatgaaaatatttttgattttttgttcaacatgaagaaactaaaagtattggatgaagatagtttgaaagatcactctttaaatcttgaggatgttttgaaatacaatgaattgcttgatattaatggtttagatttattttcagaattaaaagtgttgagaaaattttttccaaatgaaaatagtaacttaattgaaatacttgat

SEQ ID NO: 222468 - DNA, 2518 bp, Cannabis indica
aacattaaatgttatttctgatctatattaataagtagatctgattatattgaaatgagttttatttagggcataaaacccaacatagatgaccactaaataaggttttactttaatctaccgtcattttagaattactattcccctaatagtgtagaattcttagtgtttgtgataaaaggcaatttctaatattatcaaaggtatttttaattgtgatgaagaatagaacataggttgaataaattatatgtttcattagtttgtttcctagattagtctatctctataaatcttaaagctttatctaagttaaataaattgcatgctttgtggatatactgcttaggtaaaagagttaataatttgactacttcaactttatctgcaggattaacactttgattagaaaattgaaattacattcattaataggagttatttatttttgtttttatttatgatattttattctaatcatcaaattttgtttttttaattcttgtcactaatttttgaataataaattgataattgtcctcgtgcactactacaaatatgggctttagaggtagtttttaagcctttcagcgtcagttttggcaaaattttctactaacgttgatccaggcaacgcgataggttgaaaataaccgacgttaaagtgtaccctatggcgtcagttattatcaaataatcgatgccatatatgcactatatggcgtcgattatatacaaataatcgataccatatgcacatataatcgatgttaaaggcttaaaatatgacgccaaatccttaataatttatttatttttcagttaaaaacctattataaatctagaaatttattttatttaaattatatatttattaatttataatatattttttaatttaaattaaatatttattttttgaaagctaaattaaatattatttaaattaattttatggctagccaatatacttaaattaattttatagaagtaataaaaaaaattacaattatattacacaaatattgtaaaattagtctaagtgttaacaagtgaataaatctaattacaagttaacctaaaaaataagctagggaagaaaaattcttatatatttcagcatcaattgtctaagccttcgtgaattaccgccaacaatcattctatccactatcgctataatagtaacaattcaggattgcaattcttttttttctcaaactgttaaaagaagtaaaaatttatattagtttatgtatattatttgttaatctaataaatacgataattaataatttaaacttatagctttttgatcgtgtatataacagttagggtttgcacgtgcgacgatatcagtcatgtatttcaaaacataaaaatcacattcttgatttttaggttgtcttggataatttactagtgaaattcatgaccacgcctcaagatacgtattttatgcccttataatctagtaggctctatttttaaaattatattaacattttaattcattaacataaatatgcacttttaatggatattacccataatattatgaaaatttgaatttctatgctaagtttttctatctaattaaaaaaatatctcatttttatattatatgagttggagttgtttcattggctgaaaaaaaattaagaaaaacaattttctagcaaaaaaataattgagtttgactttagtattttgtatataatatatttttaatataatgtaatagagtgattttttttatatttttttaattaagtagctaaattaagcataaaattttaaattcctcttttagtattcgtaattggatcaaaatctattagtttaatatttttaaaattaatgtttatagttaaattgtttagtaactatcaatgggtaatacccattgagaagtgttccaatacatatatcttagttaattaataaatttgtgaccatcaagtgtaattaaattattacctttccatcgagataatgaaaaattatttcattttctagttggaacttttggcggtccttgaaaaaagatggcgaaaaaaaataattcctagagttaagactaaaaggaatgtataaaccaatgctgccatagattcgatttcgtctcttcctctttatttatgtattttgtatcgtcttgagtctgtaatcaagtctacaaaagaagaagaacaacagtgctacttttggaagataattctacaagcttttgggaaataacttttcaagacttgcctcgggaggaagcaaacactcttcaaggagatcgaagagagtttgagaacttaaagtttcaccaagattctgttaaaaagtagaatacatcaagcttgcggcatacaataagagggagtgtatttatgtacgtataagccaattactttgtattttgagatctatctaatgaatcttatatcttggcatgaccacgtggactagtgccaatctgtaaggattattgataccttatacaaaactcttgtgtgtttttattttt

SEQ ID NO: 222469 - DNA, 2697 bp, Cannabis indica
ttagagcataaaacccaacatccccaaagcttccttgatccctatcttcatgtcgtaggagatattctaactaaaaaagattaaagttttgagcttattaacttgctgaccacaccaagaacaaaacctctcaagacagtgccagtaacttttagcttcattcaaattggccttaccaaccagtaatttacgaagaagatatgggataaaactggaccacccctgctaagccttataccctgaatagcgcccttaaaaagggaatcctctaaaagccttgataacacttcgccaacccaaatgaagagataaggaaagagagggtcaccttacgtaagccgcaggagggtttaatcttaccaatctgtcccccattgatgcagacattgagagtggtggtagagatgcactgggagacctatttgcgaatttgtgaggattcccataacaaccaagaacttggtcaatgaatctccagctcggtctatcgtaagctttcataaggttaattttaatggaaaagtaaccctctttgccttttttccagttgaacgagtggataatgtcttgcacaatcacattgttatcttgaatattcctacccagcacaaaagcagcttgagttgggtagatgagagaaggtaagataggcttaattctattagcaattatcttagaaattaccttgtacatcacattgcaaagagaaataagcctaaaatagtttgttcttttgggttctggaccttgggaataagaactatattcgtagcattaattctcttatgcatattgccagacacaaaaaagtcagaaactacatcacaaaaatcttcacctgctgaccctaatagtgtttaaagaacagaactgaaaccttatggttgcccatggcaaagagagttcttcaaatttcatcatgtgtagggcactttagaaactcctcctggtctgctaaagagatcctctcatggaaaaactgactgcaattaagaacctgtccatcatcagacccagagaatagccctttaaagagatgaatgaattcatgtccaattaactctcaactagtaatccagacactatctttgttcaagatactctcaatggaatttctccttcctctaatagcagctgagagaaagaaaaacttagaatatttatccccttccttaagccaagagattattgcccgttgtctccagtataatgcttttctttctaaagattcattcagggaccatcggatgctacattcagtatcccaatcatgggatccggtaggttaactttatattaagttaagttgttgctccagccctttaataaccgtggtgagcataccatattgagatctattctagtgaaaaagagcaactcgagtagctcctactttcttaaacatgcgggcaggagcggagcccaaaagtgaccaaccgaattccaggcatggacaatcaccaacttacttctatcatcctgcatccatccttcttcaaatttaaaacatctttaaacttggcctccagcccaccagttttaaggcacataggtctatgataattagagttactcgtttgggacatacaaataacagcttttggaataaatatgagccaggccccattaaccaagcctttgtcgagagtagatttaacatggttctttccagaacagtgattatcccaagtcatcttgtcaccctgaatatgcatgttaataaggcctcgagaatcaaccaggttagagatgaaagagataaactggtcccttcctatagaccattcacgctccgaatcactaagcacaaaattagtattgtaacacactgtcccacagggacgccacgtgtgtgtgctttttacaaaattaatctttaactgattttataaatatacgaaaagtgtgggtaattaaaatttataatcaagataaacacataatttttataaaagttaactattaatatttatggggaccccctgttttataaaatgttttataaaatatttacaatcagttccaaaagtaactttacgaaaagagttcacacttcaaaatacatacaaaaaggaaaatcatgtccactggagtcgtagcaccgcgactaatatgtacactactgaagagacctcaaactcatggttgttcgactttaccctttcctttatctgcaccattagactcagcaagaaaagtaactaaatccaaaagcaatatgaaatccaagcaatcacaccatgacaagatgtacgcaatcataacatatcacatattaacatgcctatacaatttaatattattattatcacacagtctcagtgcttcataaagcacccttaccactcattatccacaagctatgtatgtcactatcgttgcccgatacagcgaacgataagtaagaaacctatccagagttttaagagtaattactcataacagtaatgactatttccaaccctcgatcataatcgaggcacaacaaacacatatcgggatctcgatcataatcgagactataacaatcataatcatttaactataaatggtgcgtaacactttgttgggttttgtgccctaaataaaacccatttcaatataatcagatttactaattaataaagaacagaaattacattttatgttgcatggttcaaatgatttatttcatgattatatttaatgtataaattc

SEQ ID NO: 222470 - DNA, 1364 bp, Cannabis indica
gataaatattattttgaattttggtaaaatttattgattagatcatttatttataaattgataaattttttgtattttttataatggtataatatagtattttgagctcaatttttgtcattatttttaattaatacaaccaacccgaagccaatttctaataggaatagatacaaaatttgtaatctgtctagtcataacatctctaagtcaagttattattcaattttattttgacaaaaaatcagctcaagatattatttcatactattttaaaatatacaagtttcgaattgtaatttaataaaatagagaatatgatcggtaacttttgcaaaatataaagtctaaaatagtatttgcccttaacaaatcactagctatttcatttttttttctttttcaccattcattttgaaaggcctaactgaagctagggcaaaacatttgtacctgaaaaacttgaccgactcgaacccaaaaaaccaaaaaaattgggtttagaaaagtgcagggcgggttcaggttcaacccggtaccaaaccaggctgagttcgagttctagaaatttgagaaaccccaaaaaaccctgttatataattaatatatatattttatgtttttatttggcttcgccatacaattagaatatttaaaagtaatactaactgtaaattgatttgtgattgtgtatgtgtgtgagaaatgttaatataatttattattatatgataattattaccccaatttggcccacctgacgtggccttgcttatgtggacaaaatcagcgccatgtggcaataaaactcaccaacaagaaggccaagtcagcacctcaaccaacccagcttccacaaaggagctggtcggccatgcacccctggccagtcctatggccaaccaccctctagacttcacaaggccggacagcctgcttcctacaagtgtttggctggccaagaaaggacctggtagaatttctgtacaattttacacgtggactgtgaattgggccctaacagcccaataaagtagctagaaaatatctctgtttaaggacaatttagtcttttgtaaataataaatttatatacaaatatcgaagaatttcaattgtaaattagggttaagctctcctatataaatgccttcactctaacctagaaaaacctaagtctaatcctagcctccaggccattaaatgctaagcctcattctaagcctaagtctctaaatttgataactctctctttctcattctctcacatgcccatactagctttctcaatacttgagattttccaaccttgattcctactttgtaccttgaagggagctgtatcaaatcccacctatagtgat

SEQ ID NO: 222471 - DNA, 3482 bp, Cannabis indica
atttatacagtaaaaatataatcataaaagaaatcatgtcatccatgcaacataaaatgatttctgatcttttattaattagtaaatctaattatattaaaataggtattatttagggtataaaatcccaacaaactcccacttgcactaatataaaactaaaagtgaaatttaattaatttcaacaccttgatgtccagatcaagtgtagtatgttgtattatctttgtaataggatctgacaggttgtatttaatacaaactttctctaccattacatctctttagtcacaaaatccttaatattgtgtaattcctttctatttgtttactcctcttagggtactggattatttactatttggcaactatatctatgttagtcaataaataacactatagtagttaatttattactagaataacgccaaaaactgtattgaacattccataggctgaataattatctagtagccttcctggccactttaacatttagtctcactagtagagttagagacttcagatatgtttttacacttctccaaaatcattgctccacccccatagtaaccaacatctcataagtagactttctagcattaacgcaagtctaaaaacctgatttggtgtagtctaagagtattacaataccacccttatcaactaacatatagtttctcttttgatcctatgatttatttgattgtcttctattgttttatttttttggattaaaatgatacatactcataactccactcaacaataagtgtttggtctaatgcataccaaaacatacatgagacctctgtctgttgattcttaagaaatttctttcatgacttttatcttttcttagaatagatgaaattgttccttatataaataaaatatatgtctatgaggaaaaaggcttcttttagagttagccattagaaaagtgctctagcatcttactaaagtaagttgcttgcacttaagtaagtaaattaccagctatacgacatgccacaggtttagatgatctttaacctatgatactaggatcatgaagttttgttaagtccattgaataaacttattatcaaaatttcccttcttattcttgtaatagaaaacttttagttactctatatgaatgattttaaccatagttatataggctttgcttcttagtttcttattctaactatccattacttgtttaaatttacaatgaatttttaagtcataacagggtgggttccttgacaccctcccactacgacgaggtaccgtgactttctgtctaggaacattaattgtattattctcattggttgtgtcaagacaacagaggcagtgggaccatcttatatagaataagatgatagaacactttggaattaaaaatatgtcctctactttgctactatttataatgaccacattttggaatatgaattagtaaaggcaattagagttaattatttatctctttataattatgtttgagtttattatgttgtgggtcccatttttagaaatgggtactagagttatgatttctcaattttggagattttattaaccaactagaggtattatttgtgttataggtgaattatgcatttttatgattttgctcggcgatgacgaaaaatacgacggatggttatggttaaatatttgagatgaatttagcgggttatggtttagactattttacccttagacttattattgtttatgtttaaagagcaagggtatttagtatttggctaaggggtatgtggctgaatatatgagtgacacctagcctttattattttcagcctagattaattaatttaggagtttaccaattggaagaaaagtcaaattggagaaaagacaagaaacatttagaacctctcgttcctctttctcttttcaaacaaagaaggaaccaagggttagggttcaaagtcagattgttgtgtttgattcttgctgggaattcagtagctcttgtgaggagaaagtgaggtgtggccctaatttcttcttgttaagttttttagtacaaattgttggttcaagcttattaaattggtgattttgttgctgtgtaagttagaatggatatgtgattagtttgtgttgtttaataaggtttttttagggctgaatctacttgttttggtgtttaattcttaactcaaatttggctcaacaatgacattttggattgagtatgctttttcttgtttctattgcttgcaatttattgtttgaggttattataggtgttctagaaagtttggtgaagtttgggcacgttttgatcaaaaattggtttgttttgggttacctgatgcaaaccggttaaccagtttgacgggtagtgaaaaaccagttcaccggttttgggacaggttcccgaacaagctattttgtcaattcgtgttatttttagagccttggttggttaattccttcatacttagggtatttttattttggttgtcaatagcaaaacccttagttaggggtttgggtttcctagattagggttttggcgcgtgtttacccgtttatgtaatgtgactagggcatccatccagcatgaagtttttcattcaggtcggccaactcacttgaatttggaaatgaggtaagaataatatagaagatattgtatatatgcgaatgtatgtatgtgtgatatatatgcatgcttgttgtaattcgtacactaccaacactaatacggtagcggtacagagtgcattagtatagtgtacaatgtttaaagagtacgttacgatgttaccagtactagtacggaatggtacggggtgtgtgtggtacaacccttagcggtactcggggttcaaaacaaaccctaccaacactcgtacagtagtggtacgtagtgtagtggtatagtggttgtacattagtaaagaatgttcttattcatttgttaagccttgtaaatgggtatatgacgcctagatacgggtcgatattatattatctgttatatgcttttctctcagccgaattccacattagaaaagccaaaattcctatttgtctcccatattttacacacaaatatctattttatcttcccaatttattttacctaaataaacattcgtagtttatttttaccctatcttttcaagatttttatccaaacaaacatttatattttacaatactacacatactctatttatcccttctcttctcaacactaactaaattaatcaatttatttattatattttaattaatttaatctctcaattttgcctgtaaatatggtattgtaagaccatttcaaagcatctcttcacccctaaatacctcttcattgcacatctcttcacccctatacacatcttcattccacatctcttcaccaccaaaacacctcttcctttcacaactcttcactcttctcttccacttttcattccatataccatttcactcatctttctacc

SEQ ID NO: 222472 - DNA, 1857 bp, Cannabis indica
ctctcttctctctctctctctctctctctctctctctctctctctctctctctctctctctctctctctctctctctaccgtagttaaaggaggcttagtgtagttgaaatctacataatctattatcaactcctcaatcaataataactatttaaaaaactagtattatgatcattagagtaatagtaatatcattattataattttttaacaaagtttaagattttttttttgtattgttgttcattgaatttatcttgagattagtaaaatactctttcaagtttcaacctttttccgtgggaaataagttagtggattgttaagtaagtttgtaatgtttttcattatttttttaaaataaaaagtgtcatacttaattgagaaatgttaaagagttatataacatattgcaattggtacaatttatactatcaaaattcacaaattataattataaataatataaaaaactgcaagtaaattactaaaattttacatgttagaacttagaattaattgataataaaattaaatttagagtaaactgctaaaaacaaaaatatatattattatataaaaatgaaaacttggtgtgggggtggggtttggcttttatttattttgttttatccaactggcggatcagttcgttataaatcttgaaaaaatactcgtgtgaaacacatttcacagttcacaaagtcttatacccaatgaaaaatcaacacgtggacattgagaaatgccaaatcaggtagggaccacctattcaagttgtaccacgttgacagctgttcttatccgtgtgcaggcaagggccaccctagtctcactttttttattcaatttatttatttattttcagtaaaaataataataatacaatttctttccttttttttttgttggcaagataaatccatatcactttttgggatatcacactcttatatcttactcttcgttacatagtaatcttcatcttcagctaaagtagagagaggctcaataaatttttgctccttaagattctatattttttttttcaacatttaaaaaaaaaaaacgaagaaaaaagatttaagaacattccactactaggtattagttgacacaaacaaagaataaagacaaaaatttcatttttttcatgatttataatttttttagatattataatactacagtgtacaatccaagaatgaaaagaaaaggaggaaaaaaaaaagctaatagaatctaatatcttctgatgtgatatttatggtcaactttatacatatgataaaatattcttccttttttttttcttatatatacatacatagatacataggaatacatgaacaagttgtttaagtgggtgtgaatgaatctgcctgccacccccacaaaacttcattatcgattcatctttttttggagtgaaaacctcattatagatctgaataagccattattcagcatatgcatgggagtaataatcaatgttaattaagatcaatcatgttaccaaagatggtcacagcctggctccgcagatggtgtgtctaattcaaaatgctccttaaacttagccaaaaaaccacttatgtaacttgcttattctcaccactcatggtgtgtttgagcattcattcattaccataattgctgctataaaagcacttgttgtcatatatataatgacaccattcatttaaattaaaacaaaattatacaacataattgtaggtaaggaataatgacctttccttttcccctaatactctcatttggaaaactatacgagatctgatccggttgaattcgatacacatacaaattcttgttctagctatatattactttct

SEQ ID NO: 222473 - DNA, 1586 bp, Cannabis indica
gttgccgaaaatcttggtgaatattttggtgatttcattgagagttgcatgaagctttctaaaaagaaaacaataatcaatcctataccacaatggtgctaacaagaaatactttgcgtcctctaaaccaacttgaagccccaaagcatccagatgaggatgttgttggaaacttgttttgccaggatcttattcactattcaagtatgttaaattatgactaatctaacatcctaacatgaattctttaaacaaaaaattaaacacataagagttatagaaaaccttcaagtggttgcagtataatattatgactcctttcgtttagatctctaaccctttcttcttgtctgtagcaaagtataatcaagatctgaacctaaattatccttcaggatgtgaaagactacatagtcttccacactatcctgagtattaccttgaattgtgtggacaatctctcaacactaaggagaacaaaattttacaaagaaaaccaagagaatttttgaaaatataaatagaataataataactttcttttgattcagttttttcagacatttgagagtcttgagttgttatgaatcaaaggtcattatgttctatttatagggagatactagggttaggttttagaatgaatgggctaattaaaaatgatatatatatatatatatatatatataatgacactaaattacaagcccatggctaaaatcgagtttgaattttgtcattattttatttccttaaatgaaacagccttttctatcttcaaaaatgtcatttatctattataattatttaaatactaactttatctatttaataattataattagttattaaataaaattattatttaaatatatttattaattaaactctccaaggtctcttaattaataattaaatcctaaattctcttttcttctcaaacatgccattccttagtaaaattcataaataatatatactcttatttagaatcctaattgattaattaaaaccaattaattaagactacaaaacaatattatctcagctagtgtagggaccatgggcctatgtaatcaagctcacaataaaaagttttagaatttaccaaatacttcatctttataattcctcatgactccattatagattcgaaattgtactcttgattacatagaatgctctatacaccaagtatagatacactatgaatttatccattgtttcaataacaacaatcattgatcctctatagacagtttacattgagtagggacataattactgttttacccttcaatttattaatacttaaaatacttagctacttgtaaatgatatttcaagaaactaatataattactgaaatgaaacctctatcatttatcgcgttaagcccaactctaagaaaagcattgtttcatttctaacagacatagaagctataaatgtccatatctatgattagtactcccactcaattagactaccgagttctcaagatataagtatggactagtcctttaggtcaactggtaatgaacaagtcaaagaacctgtgctatacatttaagctagagcttaac

SEQ ID NO: 222474 - DNA, 2038 bp, Cannabis indica
aagccatgccaaacatgcccaatatcgtcaatgatttaaaaccaattgatcatgtaggtcccaatcatatttgaccatgtagtaatattataattctctctttttcctttctcttagtttctcatacttaatatttgatttgaaataattaaaaaaaaatatttgataaatctaatttcacgtaatcgaaattcaatcatttatgtgtataaataataaaatcaattaatgcatgcatggttctattgatactgaaaaaaagaacccaaagatatgctaaaagtactgtacaataattgggatgatatattatttgttaaaatctgtcccaactagctttgaaaatggcaaggtgtgatgtattattattagcacattgctattagactccttgcgaattgttaacaattttgtgtaatagttgttaaaattaaaataagtgctcgactgatttaaaatttaatggaccataacaaaaaaataaaatatttgtgagcttttatttggaaaattatatgttattttttaaaattagtaaaacaaaatgtgtattttttaaagggaataatttttttggaacataagttaggtatgcctaaagcacaagtctagtctgcttatacatagacctggttatgcttaaggttggatctgaataaattaagaatttttacacgatatactgaaatttttaattttttttttattttttattgtggggccgagctcttttaaataatattatgtaaattttatattgtttactgtgttaagttttcactgttgttctacaattatttttagttgtttcactgttgttttaattattgtgttttgttattttacaaaaaaaaaaataatattttggtaaaaaaattcgtgtaacaatgaaattataaatttaaaattttaataaattactctgataaattcgtgatggtaattatggtagaacttagtaatggcgcccttagggtttctcattattattattattatgggagaccccacgtgcagaaaactgagctccaattaaaggtggggctagtgattaggaaatcctcatcatcaaaattataactgaaataaaccggccaatgtatatataccagaaaatatatatctagaatacacattcgaaattatataccatatgatatataattaattttgtggttgagctattacacaaatgactagactacataaatatactgatctgaccacactgacatacacatgaaaatgatgataatttattaaattaatattattggtattggtaattaggtgtgcatgcctgcagcatcaaaatatggggtcgacattattttgaatgtctcaattaattgcttaataaacatatacaaacattatatatggttgtaaatatatttatatatcataaatctaaatatatgacatgttgtgctagctcaagtggccataggtgggtgtgtgtcttggaggtcttgggttcgagccccaagtaaaacatggttgtaatatataaacgcttaaataaaaaaaaaaagtacgcagtaccaattaacgtacaaccgataaggaataatgcatataaatcaatttaggctctgtcatttttatttaaaagtttgatcagatgatgatatgtttgacaaaagttgacttacaaaaattatatacaaattaattagtttgaaattttaatttttttcacttataatttaaaattttatgtaatataattgttagatccaaattaatgatgagggactattgttcagcgggaaaatatatagtaacaaaactaaataactatcaattgccatttaaaaaaaaaattagtgtccaattttggccactaaataattatactccaaaactaaatatatattatataatgaacaattttgtagtaataaatgcaattttttttttatttttctttaattaaaaattatttgaaaattacaaggagctagccttgagagagagagagaaaaaaaaaaattaagtatatagtatggaatacgtacgtactattttctttctt

SEQ ID NO: 222475 - DNA, 4056 bp, Cannabis indica
gtctaaaccactttgctaacatagatagcttcttaaatttattctttgcagttcaacgtgcgtacaccggtagcaccctaagaaaattcccaagcaaggtctacaaaacatggtgaattgcaagtgaccaagagaccgtaagtctccgtgctcacttggggggcacctacactgtacaatgcatcggactagcatggagaacttatgtagagaaattttaatgcttagaagaagctactaaatttgcctctatgtcaagttcagcgatactttgacttggcataaagaaaagtaaatctagaaacttacatgtcaaggccataagaagatagccacgattatcatatgcccatagtaaaaagctttaaggctaaatgatagtagtgtttaaaattagagtgccaataggccaaaagtaagaacatgaaatccttaaggccgtatataaatagaaaatcagttcaaatgcataaggccaaggccacgcaagaaccgtgtggttcaaaaacgcataaggttgaggccctacgagaactgtatagcaagagaagaacttgacagagttcctacaggaaccacgtaccgggctaagactgaggtagagttccttacaagttccaagccatagacaaaactctggtcaaccttaccaatggtacttgctagcaatgtcattgcacaaggcttggtatcagcaatgtacaagtctcaagtgtaacaacttggataaatgttgagtcttaagttgaacattcgattataatagactcaccattaagtttcacatagagtttttaagggaaccacgtatgagattgaggttgtatatgcctagagggccatgataggatttttgccaaagtcaaaagaggataaaaagctcgccactcgcttggaacaaaggcccaggtcggccagggttcccaaaccttaaagggtcacacagggtcccatggctcatctaagaattggccaaggtcaccaaacggagacgtgaactggctagctttacagggtgaaaccctaggactggccaactcccatgattaagtcctagaactggccgggtctcaagcaagacctctaaggtcgctaaaggttaggtttgaagccacatgcgttttttttcaaaactcaaaaatgtgcctcgtgttcttaaagactcaaagagtcaagaatcacaaagaagaaaaaattgaatatattccatcaagaagtcacacattatacattctaaaactatcatgtggatcaacataccaaaaagatcataatctaacatgttatcctaattttttcccacctgatgtggcatgcttccgtggaaaaaattagcaccatgtgggaatacaactaaccaacaagaaggttgagtcagaaccatagacagtaggggtctcagctctcaaatgggacaacaggtaatagaccaactacctcaaaggagctagtcggccacccctagccagccctatggctggccagcctttggacaacacagggccggccagcctgctccctacaggtgcttggccggccaggactggacctggcaggatcctgtgcacaattttacacgtggataatgagttggactacgtattgggccttaatagcccaataaagtagttaaaaaatatcgatgtttaagggcattttagtcttttgtatttaataaatttaatatgaaaataattacttattttattgttaaattagagtttaagctctcctatataaatatccttaactaactcttgaaaagctaagtgttaagcctctaagtctgataactctctctctctctctcacacacacacattaacacgcccaccataacatctctcaacacttgagattttccacctttaattcttattttgtaaccttaagagagctatatcagattccgcctatagtgatctgaatagtattatctcgcaagtagctaaaaaatgtttatgtttaagggcattttagtcttttgtaattaatcaatttaatatgaaaataattacttattttattgttaaattagtgtttaagctctcctatataaagagccttaactaactcttgaaaacctaattgctaagcctctaagtctgataactctctctctcacacacacacattaacacacccaccataacatctctcaacacttgagattttctatctttaattcttattttgtaaccttaagagagctatatcagattccacctatagtgatctgaatagcattatctcgcagtatcaatacaactagaagggcagtagatcattactcgctaactaaggggcccaaacctctataaaaatatttgtgttatttacttttgagttctaattgagcaacacgtggaaaacttcagattcatatgaccctattatcgattggccactttttgaggttaatagtttggtgctttcattaagagcgagtgaatatcatatttgatcaaatgccataattaacacgacaagaactctagttgcacaatctgcatctttgggtcttcctcaagacccacatactgtagatcctgatgttcatgtagcaacaactagaattcctatgaacactacaaatatggtcaatcaagtctccatgatagccaccacgagtctggttactagagttggccaaagtgacataaacatcctggtttaacaaccctaagtaacaacaatcagatcttatctctcgtactatgctatagaaataggactaagagttagcgagcctatgattagcgagtcccatgtggacttatgagaagatctcaagttagccaaacttagagaggccgtcggccaagccgacctaactaaagaaccatacattactgatggtaacgtattcgcttaatagagacgtgaattcctgagatggatggatgaccaagagtacatccttaaatctcactagagggagttagaccgctgaaatagagaggtcaacaacttgataaggcagttcaatcagagaaccaatggaagaggccatgatctcattagagatccactccatggaagactcgtatatagataagtaagggtctttcagtgacctgatgaacccagttcttcaggaatagccctgatcgaccagcctttagctagccaaacacctacaagagcccctttgtgagccaaaggagtacactccctccttgagggtagcgagtagctcaaaggctgatcttcaattgactaggatcgagagtgagtggaaacactcaaagtaacaatttgagaagaaactaatcactttaggtacttagatccaacaaacttcagcaactggtgtgatctacctcctatcaacacaccaacacccttagccaatcggggagtaacgagcagctagacactacctgatccaggtttaatcggcatggacagctgcctagtgtaggctttgctagccagagccaacatcctacttggagtggccggccaaggtctacaacacaacataggtctggctgatctccaccatacactctctcagagtatagcaggctagaccctgtcaaattagagtctgtaacccctccaaggagggccagtcagtcaaattcctccaacaataaatccttctgtgcaagcatagttggacaaactaagggacatgatttagggcatcactagtccaaaccttcagatctttaactagattggtcaaggggatctccattcttagcatacataaatggcttgccctttcccaaattcaagatgtcgatatggaagatttatactagatgagaagacccattagcacacattaaatactttgagatgcagttgatctccaaaagattactggggatgtgtaatgtcgcatattcccaattgttgatctcaaaaaatgatcaaccgatcacagggtcgtgcagatcagatgcttgccacgtgtttgcaccaataagaatgaaaagtaataaacaacaagattttttatagagtttcggcctccttgtgatagcgggaaatgacctactctgtaaagcccgcttagttaatttggaaattagcagttgttta

SEQ ID NO: 222476 - DNA, 4707 bp, Cannabis indica
aaccaatagcatgttgtccagcaggtaaggtaacaataatccaagtatcattagctttaagagcctcaatctcaatgtccatggcatgatcgatcaggttcataatgactggaaatagctaacacaatgactcaaaatttaggtgataacctgctgtaatcaacaatctcaaaaatagaatagttagtggaagccttgagctcttgtgtgtgaacagaattcgtggacaaatagcattggtaatcttgcaaataagagggttttttggacatttcgaagaggcctactattaacaatctgctgtgataaatcatgaacatcatcctgaagaacaggaggcacgggtctggtatgattagatctctaaagaacagagggattattaaaaacaatgtcatcatgatcaactatgggaggagttaaactggaaggagtaggctgctgtgcatccgaagtggtgtgggaaaaaccaattgtggtttgagatgcattagcaggaaaaatctcaaaaaaatcaggtgacacttgaccatgtttaagaaaaggaaaaatttgctcatggaatatgacatccctagaacaaaaaatcctattagtattaaggtcaagtaatttgtaagctttcattcccataggataacctagaaaaatacaaggaatgtctctaggggaaaattttgatctagctcccccaagcgtggaagcataagctagacacccaaatatcttaagatgatcatagttgggggctctagaatttaggatctcaaaaggggatttatgcttgagattggttgtaggagtcctatatatgatgtaggctgcagtgctaatacactccccccagtatggtaaaggaacatgtgactaaaacaaaatggcacgagcaacattcaacaaatgttgatgttttctctcaacaacagaattctgttgtggccgtcggacacaagagtgatagtgaacaatgccaagagaagagaaaagttgaggaaattgaagctctttggcattgtccgatctaaccccctttatttggacattgtattgggttttgaccatgtgaataaaggctggtatggctatttttgcatcagacttattcttgataagattgacccatgtatatctagaacaatcatcaacaatagtaataaagtatctatacccttcaatagtttgaatatgatatggtccccgaatgtgaatatgaatgagatcaaaacattgcttggaaatattatgattggaaacaaaaggcaattttctttgcttagcaagatgacatatagaacaatgaaaattggaatcatgtgagtattgaaattgtaaggctttattcaaagaatgatttttaatacaagaagcatggcctagactataatgccacaatgtgtcatcattgattttagaatcagaaattgaacaaataacaaggaaatcgatttcagacaagtaataaaggttgccaatcctttcacccatcccaatcacacgattcttggtgatatcctggataacacattgtttaggcaaaaatatgaaagaataattacaagaatcagacaaggcacatgcagaaatcagattatgcttaaactcaggaacacaaagcacatttgtgagggtgatattgagcagtttaacagtgcctatgaatgatatcctaatgttagttctatttggcaatttaacatgtgttaagctagtattcttttgaatggaatggaaccaattaggattggaacaaacatggtgcgtagcacctgtatcaattatccaactaaatttagaaataggatagggattaccagaaatgttggacacaacaggttgctcaggctgctgagattgctgagaactttcttgcatcttttgtgttagcatagccatgagcctctgacattgaatagccaaggttttttcctcactcattccttcattaaaattgctgccaccagaagagaaattggctcatgaacgttcttgttgacttcctggtttaggaggttctctaggagaccttccaaacaaacggtgaccaggagggtagccatgattaatcctataacacttggctattgtgtcgccaggtatcccacagtgagagcaaataggacgattatcaaaatgatcctgcctgttatcagatctgttatcagatctattatcattcctattgctgtttcgattgccttgtgcacttccagcaaactgagctggattcttaagagaagacttcgaactttcaccttgaggaacgataattcctctttgcttttcttcctgaattatggaagcaaaagccttattcacactaggcaagggatcttgaagaagaatctgagatctagcattaagataagactcgttgagaccaataaggaactcaagaaccttatcttcatcttcatactcatggatgatcttcatagctccacaagtgcacactggttgaggtctgtattcctgaaactgagatcccatacacttttaagtcgagtgtagtaagaggtaacatcactggatccctgtgtcaaactgtgcatcaatcgtttgacctcaaaaattctgggacctttttttttgtgaaatctctcttcaagttcagaccagatctgagagtcatcattcacgtaaatgacactgtcacctatcgcagctgaaacacaattcaaaatccacgaaataaccagactattacatctgatccaagcttcgtaatctttatcatcttcatccagagcaggtaattatccatttattaacttaatcttgttcctcactaacaacgccaccatcatagaccttttccatgaactgtaattatctgctccagtgagaatttttgaaactaaagacggtgaggcattatctgcactagaaattaggaaataaggactgtgtggatcgatcgtggaaaatctatttgtttcatcgagagctgaaaaaggattggaatcttcaactccacgatttcgagtactgcgattttgagttcctccttctcgagccatgggagatcagataataggaagaagaaagaaggatcagaagaagaagcggaagcaatgagcatggcgatcgaattgctctaataccattttagttgataaactagagaaaaaatgaataaagaagaagaagagagaaaagatgaataccaaaaattgattcttcattaattgaaaacagagcaatacaatctgattttatacaattcaggactaaacaaaatcactcaagacagctagcaacaaacataacaaacctttaactaactcctaaccgatttcaactaacactccatcttacatatcttaatagtaatgacaataaataatgtcaataaaagaaatcatttggtcgaagtacatgtttatgacattgttgctgtacacaatcgttagaaatgaaaatgtcatataattaaacggcacaatggactagattatttctcatatttgattattacaacccagctgctctgacttcgataatacatacccgtttgtcacttatgatcaaagatgattagaatagataaaattttgttcctcaaaaaaaaaataaaaaaataaaaaagatgattagaatagataaaattttgtccctgttataacgtgcagtagtagtactaggtacgtagctattgaaggtgtgtatctaaaactgtccaatagctaacaaggtatagaactcaatcgatatctcatatgattaattttgtagctcaaaatccaattctctcgggttttgagttattaagatttatgtgcggtctttatttactcccaagaaacactcagaaaacactattccttacacacatagaaactagggttaaattttgaccaaaatattctcagtctgaccaaaacatcagtttttccagtttacacactttttttttctccgcatgatgaaggtattctacgtgtacattctatgtagtactttattcctttattagtttggacacattataatcctttattaggtaagatatgtttagttaatttaggcatatataattaaaactttgaaattaaaaagctttaacaccaattaaaaattaaaaaaacaaacatttactataacaaagcacatgaaactaaaaatagctaaactgagataacaaatccccctctcttttataccattatactcaatcccccaacgtaataaaaaagaaaaaaaaatgaaaaaattattagttcctcatgagatgatttaatgaagactacaacatatacccccacccaattgcaacctagttactaacaaatacactagagaagaaaattaacaagatttcatgcatataaatacgtacaacatataaactaatcacaaattgattataactaatcaaattataaggattgtgcaaggaaaaccttcaactctctttgtagatatatatcgatcgccaaggatgacgaaagctcgtggcggtgagatacaaaagaatctgaggatcctctcagcgcaaatgaaggattctttcaaccttgatgaataataaaacaagctttgctgctgacatgatcgctccgattccagctcatcgcccatctgttttgcttctctatataaaattgtttgttttttttaaacacaccagtctcaacccccataataaactctgttacaaacaaagtaataagctgttaaaaggaaaaggaaaagaaaaacttaacacta

SEQ ID NO: 222477 - DNA, 2719 bp, Cannabis indica
cttcctctcaaatcacctcccaattatcttggaagaaaaagcttgagtaagcatcagggccaggtgatttgtttccaggaattccaaacacagcttcttcacctcctcactagtgcacttctttgtgagcatttatgcttggctttgagagagagtagggcctctgcctacaattctgcttgatactttcttccttccttctagtttagttcccaacaaagttttatagtaagatataaaagcatctgtaattttttgaggcttatgaactcttgctccatcctattgttctattgaaaaaaatttgattttgtcggattctttgcttgatatttgcatggaataaggctgtatttgagtctccattctgtatccaggcacacttagatttctgctgcaaaaatagggaataatttctctgcactttgacataccgatccctcacttcttgttcaatacttatcaaaccattatttagaggatccttctatagttgctcttaaatactttccaattccagccgtgtttttaaagtagcaacctttagatcagaaaaacccttctaatttatatctttaaacacccgctgcaaagctttgagcctactgaccaatgtgtacattttggagccatgctttggttttgtccaaatttcttgaagtttaaagtcaaactcaggatgatttttccacattctgaagtatttaaatggcttcttatcaccttgccattgtggatacaaagttaggacagccggtatatgatcaaagaggccttcatttaggaaaatagaaatggtaaagaatttagagtcataatctttaaccagttctaaccatcatcgctgcctcatattcaaatcgagtgaaaaagtatttggggcttttattatctatgtagactttgcacttcttgccatacaggcaatggcaccaaactttcaaggtaaataccattgctgctaacttaatatcgtgtttgggataccactgttcataattcttcagttgcctagatgcataggcaataaccttattggactgcatcaaaatgtagcctaacccttgttttgaggcgtcacaataaatcacaaatttctcatcactgatcaacaaagtcaataccggtacagtaatcaatctctggtccaactcctggaagttactttcacacttttcagtccaaacaaacttacaggtgtttcgggttaattccgttatgggtgtagaaatcttggcaaatcctactaaccccgggaagcatctaacttcaatagcagatttaggttgtggccaatcctgaactacttcaatcttcattagatccactaaaatttcatctttattcacaacatgccctaagaaacttacttggatcaaccaaatttcacatttcttaaagttagcataaagttcatgttcccaaagatgttgtaacaccatctgaagatgtctctcgtgcaattcctcagaattagagtggatcaaaatgtcattgatgaaaataatcatgaagtcatccagaaaggctttgaacactcaattcgttaggtccataaatgtcgctggagcatggtcaattcaaagaatatcacaaggaattcatagtgcccatactgggtacaaaaagttatcttgggaatatcctcctctcaaatcctcaactggtaataaccagattaaagatcgatcttagagaagatggtctttccctatatttgatcaaacagatcatttatccttgccaaaggatacttgttcttcactatcaatttattcaactctagatagtcaatacacatccttagtgttctgtccttcttctttacgaacaaaactggtacatcccaagttgaaatactcggcctagtaaactacaaatcaaacatgccctacaactaaatcttcagttcttttaattatgtcgatgccatctgatacaggatcttggaaataggctttgccctcggtatcaatttaatcttgaaatcaatctcccgctttggcagcaacccaagtaactcttttagaaaaagatccaaaaattctcgtaccactgggatgtgttcaggtcctattggtagctttctagtggtatccaccacactggctaaatagctgatacatccatcccacaataaatctcttttcttgagcatcgagatcattggaatttaggatccttgaacccttcctacaaacacaaatgggtcctcactctcgggttcaaatattaccatctttcttttataatcaatggttgcattatacgttgctagccagttcattcccaatattacatcaaaatcttctaagtctaattcaattagattaactgatagttctctgccttccacatacattagaagggacataacctacctgctatagataacaaactccctagtagacataaagtaccaaaaccatccagtagaacatcattaggcttatttaagcaaccaatcactttactcgacacataggaatgctaacaccaaaatcaaataaaactgacaacataatacaatcgatagaaatttgacctgtcacggtagaaggaccagcatcgacccctacttgggtcaaagaaaatacccaagcaaaaactaaagcaccctctttcttttgttctggtcttagtaactgtagaaattttctctttagatggcctactaccccacactgtaagtaggctcaagcttgacattcaccctaat

SEQ ID NO: 222478 - DNA, 1562 bp, Cannabis indica
ttctgttagggattttagaggccgaaggccaacttagggattttgcatgtatttccttttctgtcatttgtattaagtctaatatcagtgtaagtggaggtttactccaacacaaatgtctattaatgatagttaaatattcaaatattaagtacaaaaatctcagaatttgtaactagatcaatttaaattttttttttaaaaaaaacatttataactttattatgagtagaaactaacattgcatgaaaaaacttaatattcaacgcaaatggcaaaatgggtttaggggttgagggttctgttcaaatctcaacaattaaaaatcaaaacataaaattagtattggaaataaaataaaatgtatatataagaaagtgaaaatggctttgatgattctgtgcaaaaatgaaaatggttgatttggtcaatgaccaagaagagaagactttaactaatggttagttaactcgaaagacgaagagtcttaaagaaacgacatccatttccgactcaaacagcaaagatgaaacgtctgaaaaccgtacggagaaattcgccaaaaattcacctaactttttaggtcttgggattcgtatgtggtagaaaaccgtacagagaaattcgccaaaatttcgcctcactttttaccatcttggaatccgtatatagttctattatggacaaaaatcagccttttgttaaaattttccatttttgttaaatttatattccgttttataacatatcaactacatgaaaaacctacaacattgcatgaaaaaactactatactatgagattttggtgtgataacattccaagacttttgctatttggattcattggcttcacatgttctatctggtttatttaataatggcattctttgtctaccgaaactagaagggaattgtccagaagaatcagctagccacaagtgaaaatagcttttttctttcttaatattttggtgtgcatattcacacctttgtaaaaactgtagtcatcattaagttgagttaatgtgcttgtgaaattcttagacacaaaaacctattgaaactgcttaggatatcttagttaaaaggttctgagtttttggagagacaatacttgttgttctgaaaattcattattgaatccagcaggagctgtggtttaaaatggctgcttgtaactctatgacttcatgggtttttaaacaaaaatcaaatcaacaaggccagtcctgatagatgttgtgctgtttactaactttcagtgcatatttcgttttccatgcagataagtaaaaaaagttgttcaaaaccaatagctagtatgataatagtttttatcaacttctccataacattaacctaacatttttcaaacccaatggcaaaactgttatggttatttttctccctaaccattcagcaccaaatattgatatttgtttcgagaattaatgtttggaccggtctttcttccaattactagtgtttatttaggcccttaacgagatgcgtttgacctcctcaatgactacaagcttgggatttagaaacaataacaat

SEQ ID NO: 222479 - DNA, 2757 bp, Cannabis indica
agttcactattaaaaaataataatataaagttaaaattaataagataaattcaaaagacaattacatgagtaatattagataaagtgtctatataacaaatatttttaacaatactttcaatatacaagccgaaccttcataacttagtaaaaatttgcacttacaatacacaatcctatcctctatatgtatgagtagaaaaggttctcctactcctaactttcctaactcttgatattatccgaagtacctttttgcttatccaatctcgattaaaattgtatcgctaagtagttagcgccataagctttataatgaaagattgagcaattttctgcaacaatcaagaaaatttatataagccaatacacaatttaaattttaaatataaaatcacagggaaatggacctaagactagtaacaaagtactccaatactgtgaagagaagtgatttaacagaataacaacaactatatatgtatgctatgaagccaattatataaggcatactaaccgatcacttaggctaagttcttaccccattattcttagagaatttcagatgcacagattgttaccttaattaaattcatatagatcatagttttctcaataatgattcaagtattcaattatcatagtgtgataattaagtctgattacaaagtgtttgatgattgtactattagttattgtgtcttgaaatcccaataaataattttgataacttatgctgaacaaagttgataaaattcaataaatgattgaaaaacatgacatttgggataacaatggcttgacacttgcatttgttctaattaaagggaaaagaagatgacctcaactaccacctgctcaagatcattcttattaaacaatatatcagctagctctaaacctacaaaacttaaaacatataattctaactccaaacagattccaatttttctttgcgagaaaaacacaaacaattacgaagaattgcaatgctattctagtgcaagctccacacaaataaagtcaaacatgtaattagagtcaaacagtcacaatggccaaaagtatgacattgactccaattgttatgcccaagattcatttaagaaataatacagattaaataagtataatcgtagactgaaactctttaaacaaaagaaacaaatggtatcaaaaatagtgtttacaatagaaattcattcccaagttcaaaatacttggaccctcccagggaatttttcctttttacaaaagaatagaaattgagaaatagtcaattttctaaaagctaaagctaagaaaagcatgtgatgagaaatcctacaaaagaaaacacctacatgatctcaagaaagaaaaatacaattattatttgttcaaagacagaatagtaagataaacactatcatactttctaaaaaatagtatgatgaaaatccacaacacaaagaaatgaaactttcaaatatgctcaaatagcctggttattgctaaaagatcatttcgaatcatatttctattttggattaaaacacctgcttgtttcttattttctatattattgttaataagtatagattacattttttcttttatttattaatcaccagcttgcaaactaatttcggaattgaatacatacaggagctactttctagtacagaagaaaccagagcatctgttcataatagaaataaattttaaaaaccaaatataccaaaatcttgaaattgttcttacagttttgaagaaaacctctagcagcagttcaccaaccagtccaagtcccgtagcccacgaacaagatctgaagcccgtcgcctccaatccaaccttcgcccaacctcgtcaaagaactatatatataattatagattttgaattagagcttttgattttcaaatcaattaaaaaaaactatatatatggaagaagtatcttggtacgaaatagaaaaagaaagaatgtgtatagaatcgcaacaactaaatttttgttttctttaaccaaatcaaggtgtgattaccaaccttactaattactttactataattatttctttaacaaaattaataatatatacattccttctctgtatatattaaatattttaattacatatatatacctctgctagcagcggccggcaacgagaaggacaccaaagaagtgttgttgtggttgggtcgttgggttgcgcatctggtggtggtggtttgggctacgggtttgcgaagaagagggcgaaggggagagagatccagcggagagggaaatagagtggagagggttgaaatggccttcaagattcggtggtgcgccgatggcctagtcgagagacagtcgtttattgagcttgggtgaagagagattcatggaatgttgggcgggaaagagaagagagcaatgggatattaggttttctgaaaatgaaatatctaagttagaattggagattttgtgaaaaactaactaattagagactgttttcattaaaggctcatggcagttgcgtcggttgccaactgacgtcagcattaatagcgtccgttcatagctgacgcataaaacttcttttttttaaaaaaaattaagtttgtcatcggtttaaatttaagcgtcgaattgataacggacgcaaactcccattcttttgcgtcagtttccaaccgacatgtagaaaatagtgattcgaattgttggggaagacattgtaaagcccgcttagttaatttggaaattagcagttgttta

SEQ ID NO: 222480 - DNA, 1218 bp, Cannabis indica
tgtgacagaggagactaaatgcagagaacgaaaaagcttttattttatcacacaagcagtggaatagtaaagattccgcataagaaatgtaactaagtctaaaattaaacttaatagtgaaactctccaaaaaaaaaaaacaaaccaaacagtactccaaatcggtagtttgcatctatgtttatattatatgaaacaaccaagaagtaagtgaaaaatgccagtagagggcaaaagtgatttgaccaatgaaaaacaagagaatgatttagtgttacatacctattaaacggaggctggggattgaggaagataaattgcttgagaatacacattgcagtttgaaactaatggaacaaaaccaaaaaattccactttggtcaccgataatactcgtaaaatagaaactagacaaggaagcaatcacttacttcacgaacgatctccattgtatactcaatctctttcctgtgagcagcgatcaaggcctcctcttcctgtaacaattcgaatagcttaagatgacaaacaagaagtacaaagaaatgtgaatttggcattagaaagttgatatttctagaatgaatccaaatgaatgaaaaatcaattgataaaggaagaaaagccttaccatccgggtcaaagaagaatactttcttgactccacgattgggtcagaattctcaaaattctcaatacccttttcctgaaaacccccaaaatttcatttcattcaagcaaaatgcttaaaaaaaaattaaccagagagatcagtaataaagtactcagattgagagtttggacaaaagattcaaaattggagacagagaagcagatatggtgacccatgtgaatatggctagggtcggcgacaggtgatgtggcactccatgggccttcaggaagcttggtggcggggtctctctcgacgaggtgaagagcgaaagctgaaggaagattcagccatatcatgctcatgtcgccttgacccagcattagttgaattgaaattaccaatgttttgtggtaactttaaacctgttgatgatacatctgatgagttgaaattgccagtgtatggggcagctttaaacctgttgaagatacatctgaaattttggtaactttaaacctgttgatgatacatctgatgagttgaaattgccagtgctatggggcagctttaaaccgtgttgaagatacatctgaaattttagt

SEQ ID NO: 222481 - DNA, 2480 bp, Cannabis indica
aataatgacaacaaatgctgataaaccaataaacataatcgtacaagaagctaactccaatgcccatgaaaaaattatgcatttacaatttcacctaaaattagaaagttacaaactaacataccttacttcactttgagaaagatctttagcatgggtatatagatgcttcagttttgctaaggaattatctcctggcttttcaaccacctcaggagctgcaatgatatgaacaatgagaaattggggaaaacaaaaaataaacccgcatctcaaaataagtaaataatcatattattaaactacaaattatggtggtatttcatttatatttctacaccaatcatctgagatgtatcactcggattaattattaccagaaataataaatcatgatttttaactctccatcaaaatcaaacaacatagttattatttcataaagaaatccatgattaaaaaatatacatatatacgtatgtaataaaataattaacaaaactcaccaaatatatccacatagaaagatataagaaagatataaacaaaaaaaaaaaaaacataactgtatattattcaagaatcaaacaatttactattccaacgaacaaattaacaaaaacccaatcatctaattaacccaaatacctttttgatataaaaataaaaaatcataaaattacccacacaacaataaaggaaagaaaatttataaatggaaggataatcaggtataaaaatagacatgtacatataatacatatatatatagagagaatattgaatagatagactgacttgttaaaagcttcttgtgcatcttattgatctcgctgagaacctcttcctgctccttccttaaccgatcaagctccttcgagttgtccaatattccagcaatgtccggcgaagccatcgttatttttgtcccaaaattcgattcaagctacgattacagttcttctactttgattaatcattcctcgtcaaaatatctcactgtaattactcacaaattattattgttaataatagtaataatcacaaatttctatcttagaccgaaacaaataatgcaattagttttcaaagaccaaaaaacatgtatatgaggaggtgacctaaacacgacgtcgtttttggtttgtaatccattatgaatttatgatcgtagatcacatggaaaatatgccacgtggagaaacgacgatgatgaacagtttcgcacgtgccaatagtaagtaatcctttttttttttcctttttaaatttcaattttaatagaaattttaaattattttcaagctaattaattaactgtcacttacttaacagacactcgaacacgatacatgcatgtatttatttatttatttgttttatttttgagtgactaaaaataattaaatttcaatttaaatagaacaaaattcaaaccaaaattttccgttaagaggttttttttaaaaaaaaaattatgaacaaaaccgaaaactgaaccccaaattcattgtgagaaagaaaattaacccaaggttcgataagggtggaagatcagaattttaaatagaataaaataaacaaaaattagggttaggttaaaaagcaaacctgttgaatttctggaattgagttcatgtgtctggatttagaaacattcaatcaaggagatctggtggaacttcacgatttgatttatttttttttttggaaaggttggaacttcatgaccataaataattgattaaagagaaaataaccacaactaacgtggttgtaaattcacctgatttattattgggcctggcccaataacacatttatcttatttaatttaattattattattatttttttttttttgtaatttaattcttgtttttatatgcccctttaaaagttttaattaggataatgaataattaaatacatgaaaagaagaagaaaaaaaagttgaattacagacactcaagtggttgtctgcatggtttcgaaagaaaaaaaaaaaagtggttattgcttttagtaagagacttttattttattgatgatctcgatcattttatgatgttataacaagcttgtaatttatatatctaagagtatacttaatttatgtttgttggatattttttcatattgtcttcggaatgtttagtttaaaaaattaaatcttaacaattaataaaatacatttaaaataataaataatattctaaaaatataaaacatgaataatattaatgagataggagtatagtattttaaaagacttattgtaatttaaatcattaaatttaaaaataaacttgttgttggtaaaagcattggtaatatctataaagagagaaagtaatcactctttcacatttttaaagaagtcctcacaacacttttgttatcattgaggaagatatggtgatacgctaattcaattgttattgttgttcaaaaggtttggtttttttttttttatgaaa

SEQ ID NO: 222482 - DNA, 1712 bp, Cannabis indica
gaatctcgtggcaggagccaaaattggccgttaatttatcgcggtcggggtcgtggggtcggggctggagtggggttaggtctggccggagttagcagtcgggatgtggttgtggtcgaggtcgtggtggtgctccggtcatggctggttggggttaagttgaagaagaagaaaacgaagaagacgaagaagaaaagaaagaaaaagaaaaaagaaaaagaaaaagaaaaaaaataaattattttaaaatgatttatttatttatttatttttttttttttttaaattaaaataataacacccaccaataatatttcgacacgtggcatttgaattgagtttaacggatctgttaacttggataccaacggacaaataaaaaacatgacattgaggactattgccgttatttttggaggttggggacttatctgtatcaaactgaactttttggggacttttgccgcaaattttcctaaataaaataaactttaaatatgcaactaaaatttaaaaacaataaaagtgaataattttctttaaaattttaaactaaagttgacttcttcattactcttctaaaatcctcctccatcacgaactttgtagaggtctcacttcttcgaatcatcttcgtcttatgttcataaaatctacaagcaagagagaaacaatgtcagtggtttagaacaattcaatccaccataatttattaaaacaagaagaaaaactaaatcatatttatcttcctctccagcttcgtaactctatcaaaatgtctatcttattaggatgaacatttctctcataggccaattgatcatgagcgacaccgtacttattgtgtactaccttccagatgtcataggcatagactaagtagtcatacgttctcttatctcttcattaaatgaagtcaacaagataaacctggcacaaataatatcatcatgccattagttaaaatctctcctgactgcgtagccagaatgtttacgcaattcgatctaggaagtttctacaaagacaagttgaaatagattttctctttgcaaaataagttttattttgattctccatttggattggaagttaccatcaaattcagttacattgtaatatggatgtgtattgatattgaattgtcaatccatttttatcgttgttagactcaattaaaaaaataaataatgcgggaaataagtaatatgagataaatacaatatacgtaccataaataaaaaataaatatcaagtttagaatttaaagatgatgcatgagtacacttagaaaaacacagaaaaccatttagaatttcacgataagattatccaaaggttaaagttccgccttagggtggtcaaattaatatcgaataatctacaagacttgctcttttctttaataattacaactaaaatacctcttattttccttaaaaaaataaagtactatttatttagtcaagtcatgtcctctagtatgaaaaattgggacatgattttgtgagtgtaacccattatttcagatttcatgacttaatttagtagcaccgccttaagagtcgatatcacactaaaatacatcactttatcctatccttaaaggaagccaaccttgacaatgtatgattcaacaccttcctagggggacgaaaacaaagacgactcgaggcccgtccccattccctcggtgttggactaataatgga

SEQ ID NO: 222483 - DNA, 1908 bp, Cannabis indica
atatttcaaaataaatatctaaaaaaatgacaattgccgaagatatctttaatccacatgtgctagcttatttttgtcacgaggagcacatgcatgttgatgaacaacacatgctgagatcatgatgctaatgagttgtgaaaaagcacgtgctaaggtaaggagcatctcggctagggtcgagatgatgactttgtgttgtgatctcggctaggaccgagatgttgacttgatattgtgatcttggctagggccgcaatgatatgttaaggttgtcattttggcttgggtcaaagtagcatgttagggttgtcatctcggcttgggccgaaatgatgccttggtgttgccatctcggcttgggccaagatgaagcctttggatgtggtgatcttggctagggtcgagatggttttgatggtgtgcatctcggccagggctgagatggtgcttggtgaagagctctaagacaatgccttcataaggaggccgagatgctgccttcttaaggaggccgagatgatggtgtgagacaaggacgaggtgatgagctagagccgagatagtgctcaatgaagagctttgagaaaggtgatgagctttggtctgagatgatgcttgatgaagagtacctcgaccttgaggaaggtgagttttggtacgaggtgatgaggcatggtggtttcaccacttaggtgtctaggtcaaatgttatctttacgattgctattttgtaaaattagggtataataattgtcaataataaaattccatgattttattaaaaaaatgaaaaaatacatgtattttcaaaataaatatttaattattaaaaaaaataaaaaatagatctagctaaacaattatcatcgtatttaatcacttaaaacataaattcaaatttattgctgaaaaacagtaatccccaaatcaaatcataataaaatattaaaagtgtctatctaacagcattttttggtttaacatttattagtttaacagaatattaaatttacagaaatttaacgattaggttttatctcccgttaataaataaatccaataattaaactcaaaaaattaaacaatcttttaaatattaataatctctttttaaattaaaaaaaaaatcatgaaaaatcatcttaaccacatatctctcctatcttgggagaatattaatgaatttttttatttattttttttaaaaatctttatagagaagggcagaggaagaggactccacttcacccatcgattttcttcaaaagtcgatacttaattactgcttcaaaaaaacgattgaagggaagggcataaagagagggagaggaagcagagcaagagggctgatattagcatcgtctagtcataataaaacgcatcatagcttttgtctccatcaccaatcctctctctgtgttattccatctctcgaccgttaccctataaagattatcaaccgaggaagaattccgttcgagtatagctccaacttgcttctttaccattgaataaacaatttctttactcacagtcacaggtacggcttcattccctgtagatttcatttcattttatttatattctctgatcagtgttttagcaattaaatgaacctgtgttttgttgctcagtagaagagcatgcattagttttttattgtgacatttacatgaaattgttgtaaactgtgtgtggggaatgaaagaaagagccccaattgagttttctacttgaaacatgtaatttttatgcagccctacatacagagagatgatggaaactttgtctggttgtttgagattttcaggttattctctctgttttgtatggtgttctacattggcattttaggtcatacagggatacgctatagctattatgctaatttcttttttttttttt

SEQ ID NO: 222484 - DNA, 3075 bp, Cannabis indica
gtaagtttgattatcgacatattgtcgatggattctcgataggttctcgaaagtattaattcatgtttggtgagtgcttactgattatcgatgggttctcgacaggttctcgatgggatttagtgtttttttatattagattgtactccgaatttccaactttttttaccttagtcacaaataatggcataaattatgtgtttgacattgttgccctcatatctaagaacgttcttagttggcattctttcttaataacctctagcagaatcattttcctttcatgtacaaggaacaaatctccaatttcaaatcatacgccaaaggatcaacctccaactcttcatataaaatctgacgcaattgttgtatggttgtgtcagttctaactattaacgtcaatctgtcttcagctttataaatccaattaaaaccttcaacacaccaaacaccattgtacgatataacaagaaacacaattgatcctgtaatttgaaacaagaaaaggttcgttaggaaacaataccaaaaaaatataaaaaccaaaattgaagaaatttaatataatcgataacctatcgacatctcatcgatatcccatcgataagaagtgccatgatttcgagcagtgagaaaaattgacaagtgtcaataatctatagatataatgtcatgtcattgaggcatttgggacactcaacaaaattgtcgacatatcgataaagattggcttcaagaacctatcgaaaatctatcgaataaaattcgagaaaggtcatcccaaaccttggaacatctgcttcgagaaccattcgagaacttatcgataacaattcgagaaaaataatgtcatgacatgacattgaggcagttgagacactatacagaactatcgacatatcatcgatatcatatcgataagtattggcttcgagaacctttcgaaaacctatcaaataacattcgagaaaggtcattcctgaccttgcaacatctgcttcgagaactaatcgataaccagtcgagaaaaatacaaaacccaaaagactcatatcgataaatattggcttcaagagcctatcgaaaagcatttgagaaacgtcatccctgaccttagattatctacttcgagaagctttcgagaactaatcgataatctgtcgagaaaaatacaaaacccagaatactctgaaaaaataaatctcgcgattttgacaaaaattctacgaacaacaccatagatctaccgaaatatgctatactttgttaggattagttagttagttaggctcagttctttatcagttatttctgttataagtcggttgtacattagttgagcctatatatatgctcttgtcctcactttgtaaattcattcaatattgaataaagacatagattttctttcccttgttttctcttctaatatggtatcagatgcaaaattctgacctattcttctaagaacttcaatcaaacaaatcaacaatggtgcgcaccagagaaacttcttcagctaccatcaccgacgatgtccctgtgatcgatgctacaaatccaattgcccagtcaccatctcaacattctgtcggtaatcgtgcttcacaaccattacccacttcaagacctgctgtccaagatcgtcctgcttatgaaaacattcgaatcccttactaattaagcatggcagatcatccaggccttgctcttgcaactccggttcttaccgatcgaaatttccaaccatggaaagatatttcatgatctccattggtccaagaaataagtctccatttcttgatggaagtcttcctcaacccaactctgatgatgctcttcttagctcttggacccgctgcaaccagatggtcatgtcctggatcatgcattcgatttctcaagaaatcaagagtagcatcatgtacctagaaacggtcgctgctcagtggactgcattgaacaatctattcaatcaagggaatggccctcagatttccgagttaaatgaatctttaatctaccttcatcagggagatgactcattcatcacttatttcaccaaattaactgcaatctgggatgagattaacaagctacgcccaagaacaacctgcacttgtgctgcagcagcacaacaccaactccaaattgataatgatcaggttcttcaattccttactggtttaaatgaatcttatcatgctattagagcccaaatattaatatatgatccgtggccatccttaaataaagttatttccatgattgtgcatcaagaaagacaacgcacactaggtactcgaaacaatgtctctgttgctgctacaacttccacacccgctggaacctctgatgcagcagcaaatcttgcatccaaaagcaagaagatgcgtcccatgtgttctcattgttaaaaacctgggcacttcaaggataagtgttactttctccacggattccccccaggatatggcaatcgaaggccacctgatgcatccaatcgaaaatcagacaaatctcaggcacccaaacaaacaccactggcttctcaagtgtctggctctacctcagaaatcactacatcagaactcacaactgaccaatatcaacaattaatttcaatgttggcacaacaacttccctcagctgcttcaacttcaagtgacacccctgttgtcaccaatttttctagtaaaaatactaatttcccctctaatttttggattgtagatagtggagcaacccaccatgtttgctatgataaccgatgctttcaatcatttcacacacacacacacacacacacaacaattttgtcacattacctgatggcacacctatccaaattgctaaaataggtactgttatccttaaaagtaaaataacactcaccaatgttctctatgtggcccagttcaggtttaatttgctatctgttagtgcactcttaaaaacttattcctttaatatgtcttttactactaacaaatgctttatttaggggcattctccgacattcaggattgggattgctaacaaaatcaacaatctatactacatacaacaagaagc

SEQ ID NO: 222485 - DNA, 1540 bp, Cannabis indica
aagattattgatgaggtagtggaaggcaaggcagaggctcatgctcgtcggtcatctgttgtcgtatgagagaagatgcactgcctcaaactcaaaataatgcttttgccatcgctacaatgctctttcaacacacttggaccttgttcaaccctcaaaacaaaaatcaagtgcttttcttcctcttcttcttcgttgcagtacacaccgtggtctggtctccaaacctggagagatagcccggttaatgaagatcgtagttggggacccaatggcccccaaccccaaccattgcctttacactcacagccctccgcatctgattcttcctgcgactttcatatactcgcatcctcagcttcgtctcttgcggagctcggtgctctggttctctcaaccagtgaccctctcacgaagtccaggctttctcatctcgcttacaccaggtggcgccatgagaatctcccgattggtgtggccgaaccgccgtctcggccagctcgaccccccaaacccgagttggtttgtctttcgtttcttttgtttatatccattccacccaatttcttgatagaatttagattattaactttaaaagctaacacaaaattctaattgggaatgcaattatcattggtttcattgcttgagtgttcttaatttttagttttttttttttaaatttccaaagcagcttttgaggtatcagctaagctcattttcttgatttcagttttatcttttagttgctacgatgatagtgcagtaatgttggtatttacaaaagtaagaaatacttattctacttcaaattttcaggccgggtttcatttcctctttattcatattcatgtgtttcctttcttatttgatacttgagttctaaggaatcggttactggttaaattgagaagaatgagtataaatatatatatatatttataaatatatatatatatatatatatatatctatttaatccttctcatctatttccagtcttttcctttacattcttttctttgcaattaatatttatgaagaatgttggccgttggatatataagcttttgttccatgattaacttttacttattaaaactgaacattttgatgctttcaatgtgcttcactttatttctgatttaaaggtccaagttttataaactcttttgtgtagctaatatacagagttctgcatttcttatctgttaaatccttgtctattgtattgagattcaggtatctccaaaggaaattccagctccaaaaaattcagcgttgcctctcaatgcttatatgctgcataatcttgctcatgtggagctaaatgcaattgatttggcttgggatactgttgttcggttttcgctattcagtgaaacacttgaggaggggttctttgctgatttcgctcatgttgctgatgatgagagtcgccattttgcttggtgttcacagagacttgccgagcttggttacaagtgaggagggtcgttaatttgggggtagataacaatttcctgtttcttcagctgat

SEQ ID NO: 222486 - DNA, 1707 bp, Cannabis indica
ctgtgccacattagtccagggacgttacggaggccagtaacttcagaatacgcttgcaacatcccataagatcgaaagtagttagatttttgatctatttcccaaatggaatcagtatgggcctacacacaggctcgcatcagtagaggaattttaaccccttcgtctctcctagcctcgacgatgaggtctctctcagtgatgggttcattttttagaatggtttccaaggcctcaggttgagatgttaccatgtgagactcggtttggtcctatcccactaaagatctttccacaaacggaatagatccacctttgacagatatggtcgtgctagcgagaaggtcttggttaaaatccattggtatgaaggaaaaagcaaaccttttgaaacgaataacatgcacaaggacggggtttctttcgtatacactagccctaacctaagcaagaattattttgctctaaacgtgaaatgtcgaaaattcagatagtgggttagtgcacttacttgtcaaattaggagggatgagtggcatgtcaagaaagcctgccagaaagctctaaagccagtcgatacagcggtcgtagttaacctgaaagtcaacgttcgccctaaggaaaaactttgctggtctaatcgaagaggatcaatgtctgggaaaagttctgtgcggatgacgagtaatcgctggatcagatcttctaacgcttcttgcatgcaaaagatggctggaaaaggaaaagaagttgcagagaaaatatggagctttgagtaaaaggagtaaaaagaacaccaccaaagccagtttatatttcaaaaaaaagacagaccaattgaagatcaacagttcaatttttttgcaatagatccaatgactagggaaatgagaagccccatatgattagcctggggtccaccaaaatgtcgaggtccctttttgcacatcattcagctgccaattgcactccatctttttgttaaacgcaccttgccacgcacgaaaagaggtgacaaatacttcctgaaatgtcgcgtggttaccacgcaagtgaggcaaatgtcgtatgtaccctcagtagaatacagctcatgtgagggtgcatccccgacctaaatctacagcacgtgtcaatgatcaacaccaaaaacaatatcaagctttcgtgatccaaatgatctcgaaagcttgggggtgttatcaaagttttcatcaataagacatgtggcatgatcagagggaaacaaccacaacaagaattattcgaggtaaccaagaaaagaaacaactcccggacttggaagacaacgagaggcgatggcctccgagagtaacttcctttagtaaagaacttagaaggcgatgagggtctcaaagacgttggccacgccagcatcttgcaaatatcactccatagactgttacacctttttttgacgcaggatcaaattttgtccctcgtgccaggtcatggtagtgcgcgtacacaccctcaaacatacttttttcccaatggcctgcttagagagtatttttcaaaggagagacctttgcgcgacgcatgtccaggatcgtacaaaagcccttgcaagtcgctgtataccacacgatgaagaaatttcttaccagccaatggtcaaatcatcatctcgcagtactgaccttagtagcgtatggggtatgaaatcctaggtaggtaaagggt

SEQ ID NO: 222487 - DNA, 2610 bp, Cannabis indica
gtaaaataaattccaacattgtgcaccatgaatttcagttggtgccgctcttcagacgttccgtccctagtttagaaataagggaaagagcgaatcacatcctttctttgtaagctaaatatataaatattatccggttaaccagtgtggacaacttctggatgcatggcttgtaccccctgctcctggggttgtgagagtgccaacagctggtgtggcctaccctagagatgggcaaggccctaacttggatgatgaagaagcacctttgtctagtattgtacagaatctggagaggagagagagggctctccataggcgcttggcccgtgggggtcaagttggtgatgcctctcttcatatcgggccttgagacccggcttcagatagacttacacaccctatgcctacatctaggggcaagggcaaagctgtagttatgagctttgacagctcttctttagatgatgatggtatttaatagttataacaccatgcttttattattgtgctgaatattttgaatgcattctgactttgctactttttttttctgcagagatgtcttccaagttgagaggccttataggtgggcttcggatgagcctactggatgagtgagggccaaggtggccatgacctcttgtggtgcagatgctagtggaccatcactgcctccccttgcacctgggcctgcacccgccgagcagcctatggttcagcctgccagccacagtacgaggaggcccagtagaggagcagggtcagctgctagtaggaaggcttctcagtcagcaactcggcatatagagaggactatccctttcttggatgagctttgcaggagttgggtgacggtgtgccttgcaggctgtactctgccggactttaggacctttccctagtgagttatactttcagctttatttatcttattagcactgtataagctggccgaccatggtgttacttgcatgtggctggtcggacttgggcatccatacagggttctgcccggccatagcagtccaatgagaggactggccggctagagttgacttgtttgacactgatattgttttgctttgttttcaggccctgatgaagctgagtttggctcgtgacagctctaaggggtcttcaaacgctttttaggagcgtgtgaaggtcttggaggcatcctttgcccaaaagacagagccaatttcgagctggagttccttcttgcaaagaagcagagaatggtctctgactagagattatgttgagtgccaggaacaccgagaacaccaaccaagttgctctcatctctgggttgtagactgatcttgaggaacataagaagaagttacatgaggctctcgatggccaggccattaaagaatattacctcgacctgtccttcgaaattacttacgagttcttcttgcacaatcctcagccaatttgtcatacatgggcagtctggcctttgcggagagaacactggcccgtggaaagacattgatcgaaagtcagatggagatagaatagactgctgcttattgacaggggtcatcatcaggtacccgtgacgaggtgttggtcaacccaccagtggaggaggtggccggccaggatgttgtccactaggccggccaacatagtgatgatggggccagcctagactctgtcctgctgcccctgcacacatgtagatgtaatttttattagtattcaacatcatgttatgcatagcctatgactttttatggcctgtggcattttagcttaggaacattactcactttgcgttccatgtggcctatggcctatggcctttttgaaactttatgtcctatgtggctttgtgcctttttagaacattgttttcatgtcttatgtggcctgaggcctgtttagaacattactttattttcaacctcatgatcttcgtgttcatatatttggccataagccctctatttttgaacaatactagtatttgatcatgttgctttttttatcatggattgtgtgaccgaccaggcagtctttaatcctggctatcttcttagggccttgacaagtaagggtctggatttactttgccaagctgaagtatgcccgcacgacctacaggcaggtttagtagcctatactaagcgttaaaatttctctgcataagttctttgtgctagttcgatacgttgtacagtatgggtgcccccaagtgaccatgcagactagtctcttggtcacttgctattcactaagttttacagactttgcataggtaccgtcttgcgagggtaccatagtacgcatgtggaactaagagataactttgaaaagttaatttgtgagtaaatggttcatagtagggcaacacacaggttggattttcaggttttcagatggtcgagttcgaatttttgaattttgggtgtttaaaatgtgcaatcgaacctattttttgggtggtcgggtctggcaagttttgggtcggatttgcgcgggtatgttgtggtcgggtttgggttttattggacttagtccgaatgaatcaattttggaccaaatgaaattttgtttttaaaaatgccattagattttaggctatcattattc

SEQ ID NO: 222488 - DNA, 1576 bp, Cannabis indica
aaaaaaaaaaatctaacatatgtttttggacacggagattgactaagacgttgtaataggaggttgacggtagcactcctcaatttttaaaatcatcactaatattatcgtcagtattaatgtagtatgatgattacatgaaataaatctacctaaaaaaatacatgaaattaactataaactttttatatgttcacggtttgctgtgtacggttcctacaaaagaacaaatgtgtcaataataaaaatataatttaattaataaattttaaaaatgaaaataattatcatattcggatctacatcattatcttgatcatttacagtgattaacttagttgttgtgcctataaaaaaataacaaaaattatcaaaataatataacaaaatattattaattaataaacatggtaaaaaaatattatataataagagataaataaacataccttgtttgtatcctcaaccaattttgagtacataccaatgcctccaaagtagtaggatgaagtctccctcgatgtggagtcacatgtctaccgtcagtgctgaagaggactctgaagtaatagtactaatcgacacagcaaatatgtctctggcaatcatgttcaacacaggatatttggatcctgttatattttaataattgcatatataaaaaaattcatcagttctgggtattggtcatctaaatagagatctaattttgactttttattcatcggatcaaatgaagctcaaacatataagtcatagttagatagatgatcatgtgttgaaaaagatgatgacgcattatctatttgtgaattgctttcactcaaagtaggacatttatatttgtattcattagattaatcattacaaagcttgcacacctttttaatttcaacaacccatttatcacccatacagttaaggaaaataaaattggagcaacaaaaatttatatataagatctaaaaccattgcaatagtcataatttcacgaatctcttcccaatacttttgaaacttaaacatcatttgagttgccatatccttaataaataactcatttaatgtcattccctcttcaatttcctcttaattttacacatctctaggaataacagattgacagtagggtacttagttttagaaaacaactttgtcacctcatgaaaaactttcagcctttcacaaaacttttgagctctaatctaatcatcttctgatgacaaacatttatactttggccgatcacgaagctttactcgctcaaacattgttttgtacaataaaattgtcttcatcattaagtatgttgaattccatcttgtaacacactcaagagacaactttttagtacatgtcactccaagatgatgagcattttcctcaaatttttcataacatttttgtgtgcctggccaataagcgatagtgtctttaatcttatcaatgtgtggtgaatcctcaccctcaaaataagttgttacaatagtaacaatgtccaagaaatacaaatcaaaactcaaaccaatcacaaaaccaaaacttgaacttaattgaaataagacaaagaaaactt

SEQ ID NO: 222489 - DNA, 13640 bp, Cannabis indica
gtaaaatatttccaacaatttgcacgtgcgggttattctttcttaccaaaaattcaatttctcgcttcaaattgttgcattcattggtgtcataaccatagtctccatgaaaacggtagaacttggacatgtcccacttacttatgtcctttttcatgggaacaggtttcttggacggagctactgactgagtagccatgtagatggtctctaaatcgtcagtcaagacagataaagtagttaatttggaaggattttctctaggggcctatttggctttgccagcaaactgtccctttttcccattgcctagcctgttgttgctcttagaccttttaccgcccgagcttgaattacttgggtactgggggtgttgagcggatgttccagaatagtgatcttgtgattggtgattggctcagtttaagctcgacttttgctcgctaaatggcctcttcaagcttgataaaatcatctacgcgattgaggaagtcactcatagaatctattggtccatctctcttgatgtccttccaaagttctctgagagctttgatgcccctagtattgcgcttaatttcccttcttcgattaaccatgccactttcgtcgcctccgacatgaatctactgatataagctcggaaaggctccccttgccttactttgactaggtcctctaaatgcaatgggagttagcgagaagaagagaattgtgcatggaattcagaggagaaagccttccaagagttaaacctttccagtgtcaacttgaagtaccattgtttgtcagcttctgagagtgtggcaggaaaaactctgcaacacacatctcctcatactccttgtaagtctatttgcatttcaaaatatttgtgatgtgataagggatctttggatcttctctcccggtatacatcttcccggtcggcatcttgaacttgtggggcaactctagaacattgatctctggagtaaaatgggatccacgtgctcgatccaactcgagatcattgagattttaaccggccaggccttggaacatgtttttcagttcatccaattgtgccggcacggatggatgaacttgttcggcctcttggccgatcgatgtcacgtcaggatctctttgagctggatcttaagcgcgggccccgggcagagtggttggtggaacatattgttcgtctaaccctctttttttgtttatatcatctctgagatcatgagctattccaagtctattaaatacagatgcactaggttatcttagtgactaatttgcttggtcgagcacttggccagaaccactagtctaggtggagttattaggtataacccctcctgacaaattaatagataaggtctggccgcctaccgcttggcccacaggtggaacctattcttgggattggacgactgaccgctcagagtttgggaagtgttcccagctggatcttcgtctgagctgccaagcgggatgctagatgcgagttgctaattagcaacttggtaggctcttcgtatcagtatggttgcctatcttgttcagtcgtcgatggttgcttgttgagccctcaacgtttccatctctttatccctccattaagagaagtgacgcctttgttctttgaatgtaaggttcactgcagcacggagctcttcctgatcatgatgaagagtattattatgtccttgcatgagcccaagagcattacggaggttttggatcttggtttcatctctaacagttgtttggacatttgttgctgaaaaaaccccagtattgggagtacgtagatcggttgctgaactggtatttctagtctcttgcacaacaggtgtagtcttgataataatcgataaatgatataattaagatataatatgaaaagataaataaagaacacaaggtttttaaagaggttcggtcctgagcagttcggtaatagcctactccccttaatttgtattgacttaagaacagagaatacaatgtttcctctcttaaagctcttacaatgaaatctcagagtatgctctcttggatctctctcaagtaattattttgaccctttttccagttagaaaggatcactatttatagggctacatgtttgagggaaggtttcccttttacttacaatatctataattggtaagaatacatattacatatttagaatacagatattgtgggatttggatagctagccatatctctgtgatacgatcccagatttatagggattgctcttgtgcttcacaatgcaaattctagaattgctaagtattgatatgctactcagattgtccactgctcggctgggaggatctcattcgtgcaggtatatgttgtgttctgctcggaacatctattttgggaaggtatggagaaccaagtccgcgtgtcaccagcatgagatgccacatcagagtgtgaaaattgggataacagatggtgaattctgttacatttgtttatgcttttagtgatgaggatggtagaagggagttatggcaagacttaaactccattgctactcaagatgcttgggtagtaatgggagattttaatgacatatagaacaagaagaaagagttggtagaagggtaaaagaccacaattctcatgcttttaaggattgtgtctccttctgccagctggaggacatagaatgtagtggcaaattcttcagatggtgtaataaacaataaggaggtgatcacatttactcgaaattggatagagtcctagcaaatgcaaaatgggtggatagctttccaggagctcaagccatatttttgaatgaaggagtgttcgatcattttccagcccttgtaacttttcatcagctaacacacaattagaaaaatccatttcgatacttcaaaatgtggatcacatccagattatgcaaggaaagttcaaagcatatggcagcagcattatcatagcacaaagatgtatcaaataattgccaaactcaaagatctaaaggctacttttaaatagatcaataaagaaggatactctgacttacaatcagcaactattcaagcaaggggagttctagaggcctgtcaaaataaattgttccttgagccttttaatcagattttgtagcaagacaaacttgaggccgcgagcacatttacataggcgtccatgaattatcaattgttcctccaccagaaagcgaaaactagttggactagagatggtgatgacaatactacaatctttcattctagtatcaaaactagaaataaccaaaatagaatcctctctattctggactcacaagggaatagagttgatgaccctgccgagaatactgagatatttcttgactactataagcagctccttggcacaaaaatgacagatacaaggagagtaatctcaaatgttcttagcaatggccccactatttcaaggcagcaaggtgctactctcttgacacctatttcagataaggagattaaaaacgctttgtttgctattcctagagctaaagcaccaggtcaagatggctattcaagctattttttttcaagacaattgggacctaattaggggtgatacttgtgatgcagtgagatcctttcttcaaactgggaagattattaaagaattcaactctacttatctaaatatcattccaaaagtaagatgtcccaatactccaggtgattttagaccaattgcatgttgcaatgtgatctataacacagctacaaaggtcatttgctctagactaaagaatattcttctggatatagtggctcaaaaccaaggggaatttgtcaaaggaaggttcatagctcacaacataatgatcttcaagacttggtcaggcattatggtaggaaatcatctaaggttaattgcatgatcaagcttgatctacaaaaagcctacgatattgttgagtgggatttcattgatgaggttctaaggggtttactttttcaaggaaagttcattactcttgtaatgaactgtgtacaaactacaaaattctctcttttttttcaatgggactcttcatggatttttttgaatccaagagaggattacaacacgggcatcccctatcaccccttctttttttcattggtatggagtacttgacccgaattatgaacaaagtaggatgcaaaagtgattttgcatatcatgagagatgtgaagctttgaaactcactcatcttagcttcacaaatgatgttttactcttttgtagaggtgactttaaaagcataatccacttgctccaaggattacaacccaacaagacaaaatctacaattttttgcagcaatatggtagatcaggatgttgttagagtgctggaggcatctggttttacaaagcagcagacaccctttagataccttggtatccccatatgtactagaaaaatttcaaggcaggagtgtactattttgacagagaaaatgactgctagaattcgatcttcgagcaccagaaatatctctttgctggcagggatgtgcttatcaactcggttctcacagcaatacactcttactggtgccagattctaaagcttcctaaaaaggtgatttatgagattgaagccatttgtagggcttttctttggaaaggccaatatataatgcagggagctggtttattgccaaaaatgcctgtcaaccaaggacaacaggaggttcaggcatcaaaaaaattattgaatggagtacagctgtactttttaaatatgtatgggcttttgcaaatacggaggataatctttgggtcaaatggatacacaatgtgaatctcaaataggaagagttgtgggagtacaaagctcctaatcatggaagttggtattggaagcaaattgtgacagccaagaatcaagtcaaaaatctatgtgatacccaataattctcccaaaccaggtacacgatttttgatggctacaacatgcttttccccatccaaaccaaagtgtcttggtgcaatgaggtttgggagagattcaatacccccaaacatagcttcattctctggttagcagtgcagaaccggctcaaaaccagggatagattgcagagattcaatttggtatctgatactgtatgtagcctctttttgcaacaggatgagtcaagtgggcatctctttttcaagtgtacatactcccattactgtcttctacagataaaggagtggcttgcctggaaagcccgagcatcagacctatcctagttcctcaaatggatacacaaagctaggatcagcgagtttaaaaagaagacattggtagttattgctgctcatcttgtttacttcatatggcatgtaaggaatgaccaaatattgaacaaccatacagaaaatagatatgtaattgtacaaagaattaaaagtagtgccaaacatagagtagaattgttttggccaaaatagattggtcaacaagatagaaaatgctttcaaaaattgtgaaaaagatgttcttgaggtcctttgtcaaaaagatgctctttctttgtaaaagattgtaaataatttgtagaataataataataaacttcctgattaataaaaaaaaataacatggcagagactccatttgatttaatacatttagacatatggggaccatttcatacagtaagtattgaggggtatagatactttctcactattattgatgatcacataattttcacttgggtttatatgctcaaaagcaaagctgatgctcaaaaatcttaccacatttttatgctcttatattaaacaaattttttgcctctataaaaggcatctcatgtgacaatgcaaaggaactacccttacagtctttctttgcaagaaaaggtatcacactacatcattcttgtgttgagagaccccaacaaaatttcgtagtttaacgtaagcatcaagacaaattaaatgttacgcgagcacttgccttctagtcacgtttatctctcacatattggagttattttatacatacgtaagcatcaacacaaattgaacttttatttgataaaattttacacaatattttacttttttttccctttttaaattattattatgttttcttctcttagcactctatattaaacactatttatttttaacttatatatgacgtttgaaaataaaaatacaaaacttaaaataaaactaagtatacgtccaaagcacgtaacaataacctagtatagatatatagaatacttctcaataggtattacccattgatggttactaaaaaattttacttataaatattaattttaaaaatattaaattattagattttgatccaatatcaagtaataaaagagaaattttaatatctatgcttaatttagctacttaattaaaaaaatattttacactatcacaaaaatatatctagatacaaaatatttaagtcaaactcaaattttttttatcttttattggtcaagaaaatcttttttcttaatttttttccagctgacggaacaatattacaaacaaaatagaaaacagagagaggaaaactagaagaagaaaagtgtttttctcattatcaaatgaagggaatacacttatctatattagcagagctgataagatgaagtaacagaattcagttacaaccaactgaaaataacaaacacttctaactaactaacaaggacaagacacactccttactaactcaacttttctcttttcttgtattgatacatactccccctcaagatggagcatgaatgtcaaggagtcccatcttgtctttgagtagtttgaactgtgtaggaagtaagagcttggttagaatggcggttatctaatctttactagaaacatgtactgttcggataatcccttcttgtatcttttcacgcacaatgtgacaatctctttcgatgcgttttgtcctcttgtggtatacaggatttgctacaatatgttgtgcaactttgttgtcataatatagaactgctggccctttatgatcaatctataacttctttagtatagacaaaagccacactatttaacaggtagcattagccatagctcggtaccctgcctctacagatgaccttaatatggtatgttgtttcttgcttttccaagacactatagaagtcccaaggaaaatacaaaaacctgtagtagaccttcttgtatcgggtcatgcagcccaatcagagtcagcataggcttcaagcttaatctctgttgttaatgacagcataataccctgtctagcggtagctttgacatactgtaataatctttgagttgttgtcatgtgactaacctttggaacagctagaaattaagcaagcttgttaacagaaaaggatagatcatgtcttgtaatggttaggtattgaagcttaccaaccatttttatgtatagtgtggtgtcagccagtcctcctttgctatcttgagatggtttgagattagcttccatgggagtacttactggtttactccctaagtaacccaaatgttctaggagctgaagagcataccctctttgagaaacaaaaatgccttgtttatatcttgctatttccaatgcaaggaaatactttaattccccaaggtcttttagcttgaacttgttgttcagtctaaccttcaatgcttctagttcttgtgcatgattgctcaccaaaataacatcatcaacatgcacaagaagaataataaacctatcaccaaaatgcttgatgaatagggaatgattagttgcagaatggtgaaatccttcatggtctaaggctgtataaaacttcttaaaccattgttgagaagcttgttttaaatcatatagtaatttgtttaatttgcacactccatagggtggtaactcccccataggactatacccttgaggtatattcatatacacatcctcatgtaaatcaccatgacaaaaagtattacttagcatcaagtttgtgtaaaatccacccttttacagcagcaagagcaagcactagtttcacaataacaaacttagcagctggtgcaaaagtttcagaatagtccaccccttcttgttgattgtatccttttgtaactagtcttcctttaaacttttcaacaaatccattagtattgaacttgattttgtgaacccatttgcatccaatcacatgatgatgcaaaggaagcctcacaatggtccaagtgttattggcttcaagagcctcaagttcattgtccatggctgaatcccacacaacaatgccatgagcctggaaaaaaaaaattgggtcttgtagagtagatatagccaggataagagcatgaaactttggagatagtttagaatagtcaatgacacctgaaactggatgctctgtgaccaaatcatgatcttgagaaaaaaataccataagtgaatttagtgagaaaataatgataatcagtaaggtatgaaggcttatgatgagttctggtaggtctacttctggaagaaggattagatgcaggaggatcatgagttgagtggctagaagtaggatacgtactactggtatgtgtaacatcagatggcatagcagtaggtatagattcagaattaaaaaatgatgatgagaatcaaggaatgtagtagattgaacaaaagggaagggatgttcatgaaaaattgcatctctgctacagaaaacacaattagtgttaagatccaaaaacttgtatgctttcatcccaggaggatagccaagaaaaaggcaaggaacaacccttggagaaattttttttctagatgagctaagggtagacatatatactaaacaaccaaaagcttttaagtgttcataattggagggtttaccatttaatatttcataaggagttttatgttggagattgggtgagggtgtcctattaatgagatcagtagcagtagctacacaatcattttaataatacaaaggaacaaaggactgaagaagtaaggccctagcaatattaagcaaatgttggtgttttctttccacaatagaattctgttgtggtctttgaacacaataatgataatgcataatgccaagttcttcgaataaaaggggaaactgaagctcctttgcattatcagattgaataactttgacagtcatgttaaattgagttttaaccatttgtaaaaactgaggaataacagattgtgcatccgatttttgcttaatgaattttacccaaattgagcaatcattcacaatggtgataaaatatttgtagccttcagtggttatggtattgtatggcccccatatatcaaaatgtaatagatcaaacaattgacagtaatattataaatagtaatgaaaggtaactttctttgtttagcatagtgacacactgaataatgaaagttgcgactaggatagtgtcaaaattgtaaattttattgagaggatgttgtttgatacatgaaggatggcctaaacgataatgccatactgtattatcaacaacagtagagtcactaatgacagaaaatatagcaggaggaattgaattatgtgacaaatttagatagtacatacaagtctccatttcgatcacccatcccaattgttttagtcttcatattgtcttgaatagtacaatgattaagagaaaaattgaaatgacaaccaatagatttgattagtggacgagcagacacaagttgtcataaaatcaggaacatgaagaacattcttaagaataatgtcagaagaatgttggatagttccaacacagttaacattgacttaagcattattaggcaagttaatagtggaaaaggaagtacttttctgaacagtggcaaacaaagatagatcagggcacacatgatgtgtagcacatgtatctattatccatctgttatgcgaaataggaaagttcttatcagaaaaatcggataccatgtactgatcagaattagaaggagcttttggagtttcttgagtcttccgagacaaaagattcatcagctgttggtactgactggtgatgctttgaataagatcttgatttggcacattacattgtcaactttgactagcttgtcctgaaaactgtccttcctgtaaactagaaaaatttacagaaggctttccaggttgattattgctgctcttattaggaatttttccataaaacttgtgcccgagtggatatccatggagcttgtagcatttagccataatgtgtccaggaatgccacagtgatgacaagtgactccaggtcgattgaaactagaatttccagcaaactgatctgtagcagatccagaagaatctggtgtagttttataagtttctacagtagcatttggaattgcagtgatgcttctttgtctttcctcttgaatgatcgatacataagctttattaacagctggtaaaggatcttgcataagaatctgagattgtacaactccataggattcattcaatctgattaagaactccattactttatcctcctcttaataatcctgaatgattttcattgctccaaaattacaaataggtagaggacgatactattgtattaaatcccaatgagcatttcttcgagtaaaataagcagtaacatcaagagatccttggttaagcatcatcatcgatcttttttcttcaaaaaactcttggagcattattttgatggaaccttttttgcagatcatcccaaatctctgctgcattctctttgtacagaaaactattagcaatatcaccagaaacagaatgtaaaagccaagaaattaccatatcattgcatcgattccaaatatcatgatcttcatctagttgttgcagctttccattgacaaacttaattttatttcgagctgacatagcaaccaccatcgatattctccatgcattgttgttgtcactgccagtcaaaatcttaaaaaccagacttgctgcataatctctatttgcaatgtagtatggatctctactctgatcaaaatgcggaggtgcaggatctgtatcaagcacaaagaaaggatttgcattatcactggaactgtctcgagcaacttgactacgagtaccattcctcgccatggacacaagcaatcaacaaagaagagcagcacacaaaaatagtggctctgataccatattaaaaacagagagagagagagagagagagagaaataaaataggagaagaaaagtgtttttctaattaattgtcaaatgaagggaatacacttatttatatcagcagaactgataagatgaagtaaccaactgaaaatataaaacacttctaactaactaacatggacaacacacactcctaactaactcaactattcttgtcttgataaacaacctcaagtcatataatgtaaaaatgagagattaaactataattagagagagaaattaagctcaaaaactaaaatttactcatttatgggttatacccattaagagtgcactcatatactactacaacaattaatattttttgcagtcacatcatattcaactcgtctgtaaaaatatatttatacagacgtttgtgttaattagtttacttttacggttacactttacaaatattaagaaataagcaggcgggacaaatatgagtgcaaagcttcaaagtcatatacgggtattattattattattcatataattttgaaatttatatattattattaattatacgtttcatcatggttttctggaaggacagattcacatatatattcgtacgagattaggtaaaaactctaaacattgtaatccttgcattttaaagataatcatatatatatatatatatatatatattcgtaccgagaccaacgaataaggtagaatttcatacagtacaaaataatcggtacgtgtttcccaataatatatatattatatagaattaataacgtgttttgatcagatgcatggcaagcagcatgcttccttgttagctcaattgggcatatttaaataagagaaatattaaagagcaatagtggtgcctactatttttgtacgtgtttttattgttattgttgaattaagtgtcggatcctatatagtttaatgtaataacttttaagtaatatcctagttaattgcaagacaacatgtctagagatgctataagaaatgtcacttttgccagtacttttttgtgctggcaaagtttggtattgctctgataaaataaaatttatttctgatgtgttggtaaaaggagttggcaaatcaacgttggtattacaacttttgcgagcacaaaatggaaagcgctggcaaaaaatgacttttttcagtgctgaaatgcgatggtaaaaattagattttaggcactataaacgtgtgctagtaaaattttgacctttttgacagcacagtttgcaaatacacaagtaaaagttactttcacttgtataatagtaaattatactggtaaaagtgacatttcttgtataagcaccaccacctctacccaaaaagaatgctctttaaataaatatacgttcaatttaataatgatagtaaaccgatcaatcaatatggaaagaaaactaactttagcattttaataatgaatttacctttttgatgttaacgattcgtactcatgcggtgtcagtagtgtttgcatgcatgaaccatgcaaatcatgtgaatgatatattatatataattaatatttataggctatagcattatctactaattaattagtattaaagatgagattattatcatatccgagcccacaaaggaaaacgataataacaaaccaaaaacaataattttagtcggttatataaatatgcataatgcatataagtatattattattatgcagttgcatggttgttgacctcgaatctacataatcccaactatatagccttttagaatttgagttattagacttttattgaatttaggacattgcttcttatcttgatgagtatactttctgtttcacctactctttttttttcacctttctgtttctttatagcacactttttcttctatcaacaaaaataatatataagattccttcttaagctgctaaaattttatgatatgagattatcgaataattaagagaatcattatctcaaaaacttaaagttaatacataattatctcttcaattacatatctatacaaaagtactgtaaataatttttgagacgttaaatgttaatttacttatttaactttttttttttctattaaaatcttttgttgtttaatataaattaatatattttgacaaacataatattttatagggtaaaaaacaaaaaaaaaaaaaaaaatacaaaaaaaaaaaaaaaaataacaaatatcctatgggccggccctttaaacatttatacaggcccacatacaaatatttacaaaaataccacctcctctaaaccttcagccgcacggaacagaacgatcaagaacaacatcactggatcgttcaaagcagcaacacaaccgaaataaaaccaaaacgagggaaataccaccattaattttagcaaaatccattggaaaagaagacatgcaacgatctaaacagaaagtgacgaaaaaaaaccaaaaaaaactgtgaagaaacta

SEQ ID NO: 222490 - DNA, 2080 bp, Cannabis indica
tctctctcaaagacaacctcacagcttagtgcccagttgatagctctttaattcactacacatttctattacaaaacttcacagtttctcatgaactactcttcccaacttaaatatttactataactgcactatttccaaatctccttaaaggatttaaggtgcagccataagggccttaaagctaaaagggatgaacccaaatttagtgatacagtatatatcaataatcatttagaaatgatccaagtaagcaggttttggtggtgggataaccaatctctaatccctttttttattattgtttttctgtgtatatattaaattaatacacaactaaaaaaaagcctagcttttttgtggaaccttgtgtgaaaaaatggatgaaattccacaaaataagttttttctttgataaatatagtaattttctactttaaatatttctatgaattttattttttataatacatctttagaaacatttctcttattaaattgttatggtcttgtaatgttgtttacaaatttttaaaaaaaatatatgcatattttgagatttaaaaatttattttagtgttatagttagtttagtctaattaaaatttaaatttatcattgtacttaattttaaatatttttttatttatagtcattcttttattttatagtatattgtagtttaattttatttaattttgaataaaaaacatacatactttatttttaaattacttttatatttgattacagcattaattaacatagcaaaaacacattagaattcctagttggaatagttactaaaaaagaagtaacatgattgtataaactcaatccaacaaagaaacaaactttcaaagacaaagagagcttgcctcaagcaaccaatttatccaaaatcaaaattgattttaattgtatatttttacattttaaaaataaaataaaataaagaataatgattagtagacataaaataaaaaataaaaaaaagtatacctgatgataattatatactgaagaccactagctttgatgaagagcagtccctaatcaaaacacaaaatattagaggctatatcaaaataaaaaccaaaatctttcatcacaaacatagtacataccttttcttttttaagctttttttccacctaatataaaaaaacagagaaataaactacacaccaattttttttgttttataattttatgaaagttaagtaaagaaatgagaacaaaggaaacaactcaaagtaaaaaaaaattgaaaactctgggcaacaggaagaaaagaaaaatgattatgaagacagttttttttttttttgagagttgaaagagagcagtgaagaattaaatgagaaaatgagagtgggatatgagtgagtagagaccagctttgacatgactttgaacaaactcaaacataaattcccaaagtcccattcttttatttgtttaatcctaagcattttttatttaattaaataaacaaacaaaaaaaagaatcctaagtatgttttgattattataatatagctataataagagtatattgaaagtggggagacgaaaggtcatctcttctctttattttgcatgtttttgggacagagtttgcttttgggttattgttttttaatctttctgtaaagaaaagccactggtaccacatttttaaatctatataagaaaaaaaggcacatctacctaaatcatggagactagtaatggggatatgtatgttaaaataataacaatagttgagagcaattctccaatatttggatttggagatgatatcttatcatcttttggttctttccttaacctgttttgaacctatgttttcatccattattagtttgtacggtgccttttcaacattagcttttaaatattcttctctaacacatatataactatagagcattgctattagacactagtggtgccctttagcatttctcataatgataatataatatatcttccccgaaaattgttttcagtatttaaaaatagaaaacaaaaatttataagaatatttggctaaattttttaaaaacattttttt

SEQ ID NO: 222491 - DNA, 1315 bp, Cannabis indica
atgtcccccgaacttttccacttgttaaaaattgagttggcattatgagccgcgatgtggtattgccacattcaaaggcttgatttgaaagtggtaacagttcagggggataaatcctattttactcttacgaaaatcgtactaatagattcaaccaactttctcctttgcataatgaaattgttatttaggcttctcaagcaaacttggttgtggattacaaggactggcaaataccgctcggacgtcggtttaggtttggctttcactcaattcagattttcgtagcgcattcttctgaaattcgtgttttgataaatcttcatgtacttttactaataggtcacttaaactatggatggtacttcgtctttatggtttagaaaacttacaatgctacataagaaaccatatcaacttggctaaacactttgaagaccttgttgttcaagactcaagatttgaggtaataaattaagtaatagtcataactttctactatgaaaatcccactataaggcaatgcaatgtagcttattttggtgttatataacttggtaattttgttgtgtttggcattggcatggcagatggtaactcctagaatattttctttggtttgttttcgggttctaccgagctctaaggatgaaggtttggccaacaaactgaaccatgagctgttgaatgctgtgaactcatctggaaaagctttcatgtctcacacagtaataaacctctcacttagtctcactctagtactaactactgatgatcattttatagattttgatactaaaattaatagataatatggtccacttttgtttgttttaatgttgttaggggcgtctttgttttactgttttaggtactaaatcatgctttccagactttgatatctaccaaatcatgtccctcaaacttttatatatattaaatcatacccgttgaacttttattcatgttagaattttttttactaaaattaaacaaaaatcttttaatttaacaatctcaatagttcatggagaatttttaacgcacaaataattactattaaccttttttatatagcgtcctacaatgtagatatagtagatattctactattttaaaaaaaattcaaataatttatagtattaaaagtaaagtttaaaatttgaatgtctgaatagtttttagtaccgtaaattatttaaaattcatgaaatatctgatgtaattatacatgtacgtcgtcatataaaaaagatttaaaattatttctctaatgtgaaaaataaagatattcttatcgataaaacaaaaataa

SEQ ID NO: 222492 - DNA, 2032 bp, Cannabis indica
taaactcttatgtgtttatttcattgctttagaattcatattaggatgttaatgaaacatacttggtagtaaatctagatcctgataaaatatttccaacaaggtccaatgttcatgatttgggttctaacccaaaagctcctctaagagttgtggagattgctagcctttcagtttagcagaaaaagtgagttattgtattgtgttgttttaatgttgcataatagtttcttaactattatttttcattttttaacagtgattgtggcgcatttattgctacttttgcagagttcttcatccatgggaaagatgtccctactgactttgacattgaagtttaccgcactcgccttactgccctcttattttcatatggtcaaaggaaaaataatgaaaatattaacaatgaggatgagaagcaaaacaagtcttccaaggcttctaaagggaagaagtagggtcattttatggggaactactttttgctcattgtttaatttttatattttaaatgattatactttttactagatgttatttttttttgggttttatgatctactttaagttatgcatgacttattgttatcatttacaacagttggtcttttatgtattatgctacttaatacatttaatattatggcaactgctttatcaactgctatgctatttaaaattaaccattatagtatgttcattctttttcatcttaaacaacaaatgtattatgaacttataatgcatatttttaatatatttgcttagacgtacaattttataaaaaaaactattatcgaactgttaaacaacaaatttggtagcaatatatttgtcaatatatttgtaacatgtttctcaactgattagcaactgttatgtaatttgtatatttttagtatacaaacttaaaaaaaaaaaactaaattttgtggaaatctaactgtaatatatttttaacaagtatcaccactgtctagcaactattttgcaaccatgaaaaagctatttcaattttagaaagtagtaacaatctaccaaactaactttacacgatgtaagagttctcatagagatttaaacaattcaaataaatgtgatgtatctatttaattgcttggttgtggcatgtctttcagttgttaccttatgccatatctgttgcacctattttgtttcttctaccaatcagctataaatcttcttctccttggtcttccagatctcattttctcgtttggtggcagaacaataatatctttgatgttttgtggtacatcccatgttgtgtgattgtgtataggatatattgatccgatatatatttcaagccatgttcttgtcgtgtaatactgtggacagtaattgtaaaaatttaagttcatctctttcatcagatcaagagcatgagcacatggtaattcgtctagttggaatttgttgcaactgcatgtcttttcttttagattgaccacccatgatcttgttagttagaaacacttcaaacatgctcttgtttattggtttcacctacatatttagtgaagataattaatgtattgaatgttaagaaaactgaaaagaaactataaagaaactgttaggcaacttgaagttttatgtgatcttatattttctgtgaatgagtccacaaagttgttgattcacttcttctctactgttgttgtcaaaattgttgtggttttctgtgcttttgtcctatttctgtatgtccattgttgtattaaagctctcaatgactccattagttgtaacaccctaactagcataggcgtattacaagatttttaaacgtactgtgtagctcgttgctaatcaacgaggtatatggaaatcgtgattaattaaaatttttcctttttaattaaacttataaaatatttatacaaaaatactcgggatcccgattacaaaacattttacaaaagttcactgactatacaaaatacttgtggcctagcgactaattacaaaacaagcactgttgtcctgaggatcatacgctcca

SEQ ID NO: 222493 - DNA, 3064 bp, Cannabis indica
aaataataaaattgaatgaaattagataaaagttcttaaactaacaatctcaatagttcatggggaatttttaacgcctagaaatgtttaggaagcgtgattggatagatgttaaaatttaagatgtaaaaatcttaattaatataatgctttacaatattatagttaattatactaataaaataatacaaatggtataaatgtatatcatttattgtggtgtaaattttacatcataataaatattgtgttaaacttgatacaaaatttattatgttctaaatttacatcaccacatttttttttgttaaataaaatacattttagtttttcatcattaaatatttaatggagatgctttttagtaatgatatgtggacactattttcacataaatgtgtgttatatttatgtgtgcacatgttgccgctaaatgtttttacatagacatagacatgaagacaaatcacctcacatttaaactttactaaaactttactactggtgaaatttaaatttaacattacctctcacttattttacttaattaataaataattatagcaccacacttttatggtgttgtaagcagcatgtgcctcaatcttaacaattaagtaatttaattgtagtcggcgaaagacaaacttcaaagtcaacacttccttcttcagccccgggaaacggcgttagcttgccgtcaaacatattgcccagaccacttcgaaccgccactggtcttccccaaccaaaatcattaccgtagacattaaaccggggcgaactaccacttaacaatgagtttggcggcagttttcctacatctgataacgtaggcctctcaatccaatcctccaagtactttctcgctttaatcgccgtaagggaactaatcttttctctaatctgagccgccgcccaacccaatccacgatccaatagctcccctgctttgcactctacgttcacaccaagaaccgcgtttcccaggtacccttctggcagcggcggctccagtcttgacctcagccccattgctactctgtaaaggacatcatcgtcgggtttcagatccctgccacgtgtcacagatatccaaagatgagccatcagcgcttgaagagacgagatctcgttattggtgaaccccatctcggcgttggcttttgccttgagctcaatgattctttccctggaaaaatggatcatgatcctttgttgtagatcagtttctgatgatgatgaagaagagttttctttatgatcatcttcgtggaagaatgggactcggatcgggagattgaggaagaaattgccgcggtctgagttgaaaacgatgccgttattaacgtagctgccctcgcgtgagatttctgaccaaacgttgataaacttccagaaggacgtgccgtcaatgacagcatggttcgcactacacgcgacgaagaaaccgtcgacgagctcagttacctgcacggccaacaaaggtagatttgaaacggcggcttcgtagttgggaactccgtttaagaaaaacagagggtaaacgatgtcgtttgggacaatgactggctcgagaatatcagccactgtgacgccgtcagtaacggcgtgaacgaaaaggactccggctccgttacagttaacgtggaaacaagtggtttcatcgtcggtgtttatggtcttgacgagtcggccggcgagaggataaagaatatccaacgtacgagagagagtggcttgtaagtgttggatgaagtttgtatcggaatcggacggtggcttgttatgataaagaagacccctttgaatgtgatgaagatcgaggagtcgaagatcgcacggagttaggtctagtcgttcaccgattaactcattgtgattaatatcatcaccatcatccttatggtggagattggctggctgaacgagagtagttgagatgaatcggattttgatgtcgttcatggtatggatatggtctctacgcagttaatgataacatatggtatcaattcacagagtacaaattggattcctataaatttcattccaatggcgcaatgtaaagctcaagctcttttttttcccctactttttagtatttttaaattgttaattattctgatattgcatgggcccagcgtgtataccacttacttgtctttattattatggtaaattatgtaatacctcatatacttttactttttgagaaattgcataccgcaacacatcttagccacagcttagccattggattccaaaaactgaacttttgctaagatatgaccttaaccaaaaggtaaggccaatataacaataaaattcggtgatctattcattttttgtgccattgtactttatttttatgtgtaaattcatgttctttttctcttcaataaattgaagagtttcagtagagcatatcacggcttggtaggctgggctgggagtgaccgagaagaagaagtagaaagaaaaaaaaaatagaaaagataaaaaaataaaattaattaattagttttggaaattaattattcatttatatttattttaaattgaaattataatttggactactaaattatcaacacgtgtcatttttgggagcaacaaacagagcaattaaattggatacctactcacaaacgagaatcttgagcatgagactattacgacaatttttaaagattgaaaacttatttgcatcaagtaaattttttgaggacttatactgcaatttaatattaacatgtgatatttttggagcaactaatagatctcttaaaatgaagataaagaacttacaagaatctcgagcttgggaactattacggctatttttcaagattaaggacttacctgtatcaaagttaactttttgagaatttaactgcaattttaatacacaaagaatttatttatctttacataaatgaattattacatagaaaatagaaattgacattttatttacaaacatacttctataaggaaaagacaatatttatactttttatgtgattttaattaccaaaataccacttacactatcatcact

SEQ ID NO: 222494 - DNA, 1731 bp, Cannabis indica
tgaagttgttcactagttctcagagatgtccttttttgtgaaatcgggaagactcaaaacttcctgattttgccaatattacaccttattgagagggtgaaatatcaaagtgagaatttgacctttcaaaagttgtagctctcttttactacgaaaaaaatagttgaacgctcgaaacagaattgaatctggtccactaggtcaggtacttggctgttgcatgctttctaagttccctcccgggacttgtttgatacttttaattagagattgggagagagatctcctagcccatttttgaccattttaagaagaatttccaaagcaaatatatgcgaaccaagttgcatgttaacttaggcactagggccctgttctgactcccttgaaatctcgtttgctcccaaaatacttttttttcttcaggaaaatgaatggaaataacccatgttgataaaatgtcaacctaggtgctgagctcagtcacaggtgtcaacctaggcgttgggtcctatatttttccactagatgactctattgacgttgatggaaacagagaatatgctcaaaagacttctaaaaaaaacatcttggaaatggcctagcacgaggtcaacctggtcgcgggtcttaattttgacccctagacgacattttttatttcctgaaagcactcaaatcttaatagttgatagaaatagaaaatatgcttggaagacttcatctataaagttgatggaagtggccgaggttgacaaagaatcaacctgggctttgggcctagcgcctaggtcaacctgggcactgggtccccgttttggcctccaagtcgatctgtttctttccgaaaagcacttgtttccttgttttggatgaagacggagaaaattcttggaatacttatggagtattattttttcaaatgccccaagttgacaatatgtgaacctaagcgctgggtgcctaaggcaccttgtgcctcgggtgctcaaaactgaaagtcatccgattctaattatgttgcctcaaatatgcttgtgagaggtataattcatgtgccaatacaaattttgtgccatttgtactaaaccggattcagaaactaaaatcctagttggaaagtcaccttgggtgttgggcactcgagttgacttatggggtgttgtttcgtgtatttttagcttctaagccttgaatttggatttttcttgtcttcttggtacataatactgaaagatgttaaattaaaaacaacttagcgggagccaaacacccattctggagttcctggagtcaacatgggcgtaaggttagggaccccctggtaggttgattgttatgacttgggagtagtcaactctaggatgttttatttcttgccacatgtcaaacgtttatgtccacgtcaccagggtcaatttcagggtaaataaaaagaaatcatgtttacttttattatgtgattttttatattcaaaaatgtactatctagttcttttaagaaaaagaaaaattaattaggttttttaaataaataagaataatcatgtgtggcaacaaaaattttaaatgcaacatcaacatgacgtggcatatctagattgaataaaaaaatcctaatattgagatttttaacacaatcatagaagaccttacctataaatatttatatatatacatatttagttatatcaagcaataactactagtatatttacattgtacacatac

SEQ ID NO: 222495 - DNA, 1110 bp, Cannabis indica
attatgagaacttgatgcaagtcttaattttctacaaattgttgaatggtctgacaaggactattattgatgccgttgttggaggagcattattggtgaaacctgcaactcaagccattcatttattggaggagatggccactaatatctataattggcctaacgaaaaaaaaaaaaactctaagaaaggtggttggtgatcctacgaaaaatatagcaatctaaatttctactttatctaatcaagtagttgcctttgttgctcaaaagaatacatctattatagataatgttgttgctgcactacatcacaaaggcctgacatgagtagcatagtatatggctagctaatacaccttataataataactattggggtgctccaatgcttaactactatcatctagagttgagaaatcatgagaacagttcttatggtaacactaaaaatgtcttgcaactgcctcctagatttaatacacaacaacaagaagagaataaacccttagaagacattctaagtactttcatcatataaatgatattttaaaattaaaattgataaataaaaataaatcatattaaaaataaagataaataatttacatttcttgttttttttttttgtaaaaaagattgatcttattctttttcatttatttctttcttttttctttctttctttcttgcctttacttttaattttcttcttctagtagataccctagccacgcctctaatttcctttccccctaagccacaattttcaaacctcatgtgtccaccattaaaggttctagaggagatcccttggccggtgtcgggtggcccatctggtaccctagtacaattatgatggcagagataagaagatagagggaggatgaatatttgttaaaaactcatgctactcacacgcgtagaggtacgacaccgtcgaacaagaagacaaaaagagggttcagatatctctaaagaccgacagcgtcaatgcacacacgcactttcacaggtcctctgaaggcttaaggtttgaacaatgttgtcatcaattggtggaggagaaccacacacacacacacacacacacacacagagagagagagagag

SEQ ID NO: 222496 - DNA, 1635 bp, Cannabis indica
aaaaaaaaaaaaacaaagcatttgccatgaatgaagagtaggttttaggatcagaacgaaaaatatgaatatgtatatgatgatttatatataataataagtaaaacgcgttatatatatttatttagatatagttttttaaataattgatttacggtagatattttagtattttagagaaattttattaaaaattgtaatatttaagtattattgtgttaatgagaaatagaaaaaacttaattgtatcccatcaaatgaaataaaagaagacaataataataatatgtaaaacatatatgttgcctctgatttttcctaaaatacgtggcagtggctgcgtgtgacacgtagattttaagagcacctcaccaacaaaaattggctaagtcttaaatggacagaaaagtgcatctcaatgagtgagcccctcggagaggagcataaagcacgcctttactctccgggagctagaaatgtaacaatgcatctcctaatgagaagaagagcccgttcgagcagtcacatcacatttaatgtggcatgggagaaacgtatcagatgccccataaaaggatttgatagatggcgtaagcctcttttacggcgattacacgataatcgacgagtctagtgacgactccattatgaagaatcacatcaattaaggaaggataaagattattttcacctaatccctaagatacctacggtataggtcatgtatgccttattttatatcagctaggaatttgtgcccctaagtggctgacacttagagacaagcgatccttttctggtgatccttacaaaaagactataaatacccaaaaatagaaggaaaaagggattgatcgatcgattaaggaatcgaagggagtaaagaagagagatagagattcaccaagaatattctctgtataagaactctcataaataacaaagactcgtggactacgactcattaatgcttgaaccacgtaaaaatcacctgcattaatgcttccatagctctcttcattatatcatttaattggttgccgaaaatctcgatcaacattttggtgctttcatggagagctgaaggaagcatcgttaaaaagacaacagtcaaatagtcagagtaacaatggtagaaactcgaaacaatacacgtcagccccgtcctcctccggatgctcaaaacccaaaaggtgaagaagtggcctcacgagtaaatgtgggttctaaggaacgagacgaggcaaacgatgaggaatacaaagaaaacttcgaagggtacgacacctactatgaaggtagctatacgaaactgctggtcttaaggcaaaaggtggctgatcatgaagtcaaacttgctgttcaaaaagaacagaataaaaggatggaagaggtaatggttgtcatgcgaaaagccatggatacagcggggatacatatacaccccaaggacatcccagcaggactagaggaaacaccaaaagagtcctcatcaagtactcagaagcccaagaccagggaaccaagccttatacgataccctttcgaggaaaaccttgagaaaaatccaacttcgatcccaaagagaaagaagaaggcccaggatctgcaaaaagttcaatcaaatttcccgaa

SEQ ID NO: 222497 - DNA, 1703 bp, Cannabis indica
aataaaatgggaaaaaacagtacatggtgtaaatttcccttaataaatgaatagcgtgctcgagtaaaataatcaggtccaaaaattaattataaaaacaatgtcaaaaaaaaaaaaaaaactcaattattggtgttatagctctaaataaattctcctccggcccacttcattctaattgggcccccattcaaagcctaacggcgttggttcctccgtcagcttgatgattgggtgggggcccagtgtggtccccacatcaaaattgtacagtttacgtattgattcttctaactcttctctcccacacaaacattatacgcctgcgttttgtcgtttttgtattttattattattaatttttttttctcttaaaaatgaatcacacgtgtcatcattctattgtaaaacgtcctgagatctaacggtctagaatggttgatgttgttaaacaaagtcaaaagcattgaacgactaccagagatttatgacacgtcactttaccgggagggacctgctgtatgtttcagacgtaataattagatagataatagtcacttcacttttaatattatttaatgaattgtttctttaggcaatattatttaatgatttacttttgattaagatttttttttaattttagtacaaaaatttaatatagacaaaaatttaagaggcacaatttaatacatatcaaagttcgaggagcataatttggtagatattaaagtttgaggaccatagttttagtacataaataatcactgaaataataaaattgaataaaattagacaaatgtccttaaatccaacattattcaggagacatttttaacgaccttaaaagttcaaaagacatgatttgatacatgtcaaaattcaagagtaaaaatcttaatttgcctttatagttttgtaaaatttagtgatgacactctattttattagataaatttaattttatatttttaaataatataaataagttattttttattaaaataaaatttaataataatcaaatctaaaagtattagactaaggttcatatgtctaaaattggtatcattttgaaaaataaagtctaatttatcatttaattagaaatgtttattaaaccgctcacactacacaaaatgcatgtatcgcacatcattgtataaaaaatacaatttgaaatcttgtgtggcatgattactgtctatatttttgccaaaccgcgcgatacagtgtggtttgcggctttaaatttaataattacggttcaaaccgtaccatattatatatattacaaaattactaatttttacaatatgattattaattcctttttcatataaaaacaaatatatatatataatacatgtgtatattactttattttttctaagacaattcaatgtactaaatgattattacatgttaaattttaataaaaatttttgttttgtattgctaaagctttattagtttaatttttagattttcattataatgtttgataatgatgatagtgtaaatagttcaaaccgcaatgtaccatatcgcattttcgcagtatagcttttgcagttttaaaatctcacggtgcggttgcattacaaaaaccacatataatgttttatttgaaaaaaaaacctacaacctataccacctacccacactgcgaacacccttatatttaataaaaggctaattag

SEQ ID NO: 222498 - DNA, 1577 bp, Cannabis indica
aagtaagagtactctaggatttgaccacccttatccatttttagctttttgtgttaagttttcattacactttctaatccaagcttaatcattcagattttttgattgtaataactaattatgccaatccatctctccattttacagatcataatcacacaacttgatatgactgcgttacacaaagtccatgacagaacatggtggttgttgaatgattaagcttggattagaaagtatatgaaaacttaacagaaataactttatattgcgtaagagaaataagaaccttcattcaatcaagaaagattgaatgagaagaaaagttgagtaaaaaaacaaaaaccaaactccaaagtaaaccaaatagttagtcaataaatttcctctgcaaacaggcatgacagcatatttgttataatcaatcttatattatattccagcttttcttatgtgcatacagagctgacccaaatatttatttttattttttttaagcataatgggatcggttaagactagagaagcaaaaacatgaatgaattcagaagcaatataacaaattcaatctctttagctaattaaattaacaacaggatatggaactctgttccacctcaaaattcatacatatttgaaataatttccacaaaaacatttcatatgtaccagcaattactccacatcaaaattcattgaaatatattccacaaaacatataccagtaacgtatagttgtaacaaaagtaaaaacagtagatcttgcaatccaagcccaaaaaaaaatggcaaaaaccacatttttttcaacaaatccatacaagcatacaacaattttcatatataatttaccgaaatcagactcatgggatatcttccattttctcttcctccttcttcttcttcctaaatatgtatacatcagcctcttcgtacgcgtattctgggtgcaaatcttcatggggaaccttctcaatttcaaacactttctcagacatttcccagaacagcttatgggcttcaggggacctgagctggtatcctagcaaaatgacgccgtcgtccgacaccaaagcctccatggctgaaataagcggacccaccgactcctcgatgtagacgacatcggtggccaaaacgaagtcgtacggaggtttgagggacttgatctgatcggcgttgttccagtaaagaacggaatgctttagggttttggcgagcacggatttattgttcttgaggtttcgcttcagtgcgggcatgactggagagatatcggtgaggatgacgtctgtcagaccgagtaggtaaaagcccatgccagcggctccacagccggcgccgagctcgacgccccgcttggagccgaagtcgaggagttgggcataagggttgggtgtggttgtgggccttaggtttgggcccggaagtggggcccaacgctcagcgaacttgacgaggacaagggagcagggccagacggaggtgccgacgtggaaggagccgttgtcttgctgtatagagagaatggcgttgtgcaccgggagctctatcaccggcgagtctgtgaacttcat

SEQ ID NO: 222499 - DNA, 3044 bp, Cannabis indica
cattagctaatcaagactggtcggacgcacatcctactgctgaagttgtttttatgaatgagagtatttttgaccatactcctgcagttctgaactttcataacaatgttgtttgtggaaggaagccttttaagtatttctctatgtgggaatcgcatcctagatatgctgaaattattcagcaaatttggcagcaacaatgcaatgggactctgatgtttcgggttgtttctaagcttaagagtatgaaagttgctcttaaggctttgaataatgatcattttgctgatatttgtgcttaggaagctcaagctaaagcaaagcttgatgaatgtcaaactttacttcagcagcagcccttgaatgatattttacaccagcaggaaaaagatctcaggactcattatgctcttattttcaagaattacttgtcttttttgcagcaaaaagcaaagctaaactcggcaaaggtaggtgatgaaaattcagctcttttccacactagtatccgagagagaaggagacacaatcaagtaattactattgtgaatgccgaaggagtaaggattgaagagtcgagggccaacattgaagcttttattcgatattataatgagttacttggtagcagtatgcaagggaggaagtcgattcagcagagcatacttagagaaggggagtttttatcccagcagcaagctgattttctcttgagagattacactcgagaggaagttaacgaggcaattttcgctattcctggtaacaaagctccaggatcaaatggttttggcagctccttttttcgaggaaattggaatattaaaggcactgaagtagctaaagcaatcatcagtttacttaaaatagggaagcttctcagagaaataaacaacactattctaacacttgtgcctaagttgaaatggcctaatacagtgagagactacaggcctattgcttgttgcaatgtgatatacaaggcagccaccaaactgatatgctcgagactcaattgcatattacctcacttggtagctgacaatcagggaggttttgttcaagggagattcattgcacataatataatgatatgccaggatctggttcgacattatggaaggaagttgacaaagtctagttgtgttatcaatcttgatttgcaaaaagcttatgacacaattgaatggagcttcattgaagaaatgtatggattgcattttcctgatcagttcattcaacttgtgatgttatgcattcgaactcctagattttcattgatgattaatggatctctacatggctactttgaggcaaaaagaggtctgagacaaggcgatccaatgtcccctttgctttttgtattgggtatggaatatttaacaaggatcgtgaggaaaattggacagaaaaccgacttcacttttcatcatagatgcaaggatttgactttgaatcatctcatgtttgcggatgatgttttgctattttgcaatggtgattacaagagcatcatttacttgctacagggccttaaactgttttctcagacatcggggttgcaacctaatccttccaaatcgactatcaactgtcatggtatgactcactcagagattcaaagaatacttgatgcttcaggtttccaaagaggtgaagtgcctttcacttatttagggattcctatcagccctaaaagattatcaccaaaggaatgttccagttttgttgaaaagatgactcatagaatcagagcttggagtactcgacacatttcatttgcgggcagagcagttcttgtgaactcagttttgttagcaattcatacctattggagccaggtcctgcttcttccaaagaaggtcattaaagagatagaaagtgtttgcaaagcctttttatggaaaggacaacatatgatgacaggagcagggcaaatagcttgggaaagtgtatgtcaatccaaaatagctggtggtattggttttaaaaaagttgctgaatggaacaaagtggcaatgttcaagtatgtttgggcaattgcaaccaaagaggacaacttgtgggttaaatggatacatagtgtatatatcaagggcaaggattggtggagctatgagatacctcaaactggaagctggtattggagaaagatagtagctctaaaaggtatgctactgaatttagttgatcctattaccttcactcaaacgaaatataaagtagttgatggctacaagtggctctgtcccacggtatctagggtcaattggagtaaggaagtttggaatcggttaaacactcccaaacacagttttgttttctggctcgctattcaaaataggttgaagaccagagatcgtttgctcagatttcaaattgcaactcatccctcttgtttgctctgttcggggaatacagaatcttgtgagcttctattttttcaatgccctttctctagtgaatgtctaaaacaggtcaaatgttggctgggattgaagactccagcaaccaatttaaatgagctggtgcgaatcatagagaagagaacaacctctgccttccgaagacaggtttttactgctgcctgtacagctttattataccatatttggagagcaaggaacacaaggctttggctatagacaaaggaagaaccgaagaccactgtacagatgactaaaaatgtttgtaaaactagaatacaaagtatatggcctaaggtttcaatgggggatacaacatggtttagtgaattgtaaccaatgtaatcaaatagaagaaaaaaaaccagaccttgttttataaaaggtgctaaataggatgtaaaaagtctattggagtaatgaaaaacactgctgatttcccaaaaaaaaattataaattttattttaaatatttaaataagttagatatttttgtagaaatttgaataatgcttaatttgagatattttgacatataattaggataattattctttatttattattttattcttaaaataataattgcctaactatatctattttaaaattggttta

SEQ ID NO: 222500 - DNA, 1632 bp, Cannabis indica
ttattttaatttttacctccattatattttttttagatatacctacttttatgtatgatgtccccgttagaccccttaagttatgtaaattatatactaaacttaagtagagagtgagagtatattatgcaatctactaaaaaaagtgggtatattttaataaaaaaaataatatgaggtatttttaattaatggatcaaaaagaaatatttttcaacttattccaaataatattcttaaattatatgatattagatacttaattatactaatagtagtatgatgttaaattataatactcttaccatttgtcttattagtggcaatttgtttcgttcacatggaagaactatacacgtgcaacgcacatataaatattaatatattattatgtattatgtggaaataattattgattattattatatgtaatatgctgcatgaacaaaaagttagctagataggttgcatgttcccaataatttcgatttcgattattgcaactgaaattataatgatacaataataagtactactactaataatatattatatatagttctatacaataatgaaaaaggacaatatatatcataatataatttttttagttaatttatatgttcaaaaatatacattgaatactatatttttttttaaaaaaaaaattaatagcagttacaatgttatttttaaattttttaaaaaattcaaatcgtgctagattagaatatcaaaaactctattttagtattataaattattcaaatattattgtaactataacaaatatcgttatgaaaaaaattaaaagaaaaataattcttccacgtaatttaaaagtaaaattaactaaaagaattgtaattagcatttaaaattgtagatatttattacacatatttgtactacctgctttcacatgtatcttgaattgtatataatttgttttctcaactttctgtttgatccactttttctttaatgaatttgttgagatacatgccctgaaactgaactgacccaaatcaaatatatatgtatataaataagagaagtgtatatatttatatattatatgtatgtgtgttgttttgaggagagacatagctcatgcaaatggagcaaaaaaggtatagtagctgaataaattttgttgattaatattaaactcctgctgggaagcttcaatgttcataaaatatttaactaatttagtttggggcaacacacaaaacatcatcatattatttatagggtttatatatatatttggtgtcataattattgtggcttaaaatatgattcacatttaatagtcagtcttccattaaaaaagcagattgtttaaaaaaatatatgaaaacaacaaaaaaaaattacaaaatatagttatataaaattttaaatattgttatactttttaagatgttatctacataaaatatattattttgatatatttttatgttgtacttttgttattttattatttatatattattttttatgttattttatatagtatttttattatttttgttgttatttttatgtaacattgtaaaaatgtaaaaaaaaaatcggtaaaaagtgtaaaaaatttattaaaaataataatttatataaatt

SEQ ID NO: 222501 - DNA, 917 bp, Cannabis indica
tttttttttttttgaaaaaatttgcaacttcattagtacagatccttcaacaataaagataacaacaattttagattcgatcagaaattaaattttcatattaaaaaaaaaaacgcatatggatacaagtttagcaatccacatttccctcaaaatatgtttttagtgtactaactaaaaataaaattaactcaatttctattatacaaattttctcatctaagactcaagctagaaaacaatataaattcattattgtaactaattaattatgataaatctgataatattgtttcttcttccatatttaattgtcgggttaaaaactacaaaacatgatctgcagatccaaatgttttcatcaccaatctatatatttacatatctttaatcgacttattttcagacttattctctatatttatatataatatatatgtatatatgtaaagcattaactagcacatggtgaataatttatttaaatttgagggataaatatagcaatatagcttacaagtggaaagtataatataaaataaaaatgatagaggattctctaccccacatttttcagatatatttgatatattatatttataaatctctacatgcatatatgctcgtagacaatttgtctatacattatgaattgagtattgtgattaggcacttacggtacctaatatcatgatgaaatgacgtgttataattagttattgattttttataatatttattaaagtaaaacaagtgagattcaatattgagttacaccaatagtgatagtacacctcacaatgatgctaagtattataagtatcttttaacatttctcttatggtcatttgaactagtttttgcttgctctttgagttttttcttcattaaagtttcattattcaaaaaaaaaaaaa

SEQ ID NO: 222502 - DNA, 3759 bp, Cannabis indica
aaaataatatatgaagtaattcctctataaattttactataggattttagtaattaaatcaatattatgaatttgattgaattttataaaatatatatggcaattaatgcaagtttactttggaaaaaaaaaatattatacggtaaaaatactaattactaacatacaatacttgttttccatatataatcatgtaaaatgtgtttataaaacctccttaaaaaaatatagtttacaaaattgtaataaatatttttataatattttatgtgtttatggtaggagggacaaaataaatcggttgcaataataagattcaaaactcgtatgaaatactaagtttgaatttgtttttaaataaatttgcatcactctcagattctcattcactcatctaactaatttaataaactaattgtatttgggttattatatgttaatataaaactatctcgttaataataaatttaaaattaactatagaacaaaaatcatagattaaattatgtgaaccaatttataaacaagttgaatttagattttcttttatatgattatcaaacaagtcatgttagggtcgaatgaataaccacactaatttatgggtttagttttcgcactaataagtctatttcatgattcacggtcatgattaagaaggaaaagaataaggctaattaagatttttgttccctgaactttgacatgtatcaaattatgcctctgaacttttaagatcgttaaaaatgccccctgaactattgaaattgttggatttaaggacttttatcaaatttcattcaattttactatttcaaagattgtttatctattaaattatgctcccaaactttgatatctaccaaattatacccctcgaactttgacatttattaaatttttctctctaaactttcatccatgttagattcttttattaaaattggaaaaaaaaaatccttaaatcgaacaatctgaatagtttaggggtcatttttaacgatcttaaaagttcagaggccgtgatttgatatatgtcatagttcaggggcaaaaattttaattagccatagaataattttataaatacataaaaaataataaaaaaaattataaaaataaaaatcgtacagaaatttaaatagttctatggtttttaagattttatacacagaaggacagtatagtcttttagcaattctcctgcacttaaagccaaatatgggctttaacaggtaggcccaatagccgaaattgagcccaaatctacctcttaggcccaaataaaggaaattgaaacgcagacaaaagagagaaacaacgttaggctccgttctctttccctgcgccaccgtaaaccaatgctccactccggcgccggagttcatcttcccctcgacgaaactaataccagtagacgagcgccgtattcgatagagctacgatagatttcaatcacagaagagtctcgcgagtgagtttgttcccaaaccttagaaattttcttattattgtcttgaggtatttttgcattttgatgatagaattaatatgaagaacattcattgaaattctttgacaatttcattgagattcttggaaaattcttgtttccataaccatattttgaagtgatttttgcttgtacagtggctgattttttgtacagattctcttaagtttttatcttaagatgtccaatacactataattgattgatggtttcatatataggtttaatttttgctatgtattaaatcaaaaatgtataagacttgatattgaaatgcatcaataacagtactagttctcaggcaccttaaggttccccattagaatgtctcttttcatattgtgctattggtgttgtccataagagaatttccctctctttgaagttttcagtgatttatatgcagaacctttgatcaggccatttgtgggttaagaggcatgttgtgatttttcaactgtgtcattgatgaatacataaaaagggtctccaaagcagcagctagctacttcaacacactttgtgacgattatgttgttggtctgtatttatggcactactactgatgaaacaaattcgaggtcaactcacttggtgtagcagttcattgagatttcgtgtggcttcagctacttcttggaatgccttcgtatctactcaaattcgagaattatatctcagtagaactatcaaacatttttctactagtgttgagagtgaaaagctatgttgggaaggttcctcttatgaaatcctgttgaagaagcttgaagcagctctgaagtgtcacgatgtggatgaagcttgggtatccttttcggatttcaggaaattacatggctttcctgaggattcttctcttgtgcataggttgataactgaactttcatattcatcagaatcatattggctgagaaaagcatgtagtttagtcttgttaatatcgaaagagaagtcgggtctgctaaaaggcgatgtcttgacaaaactctcgctctccttagctcggtctcagttgcctaatcctgccacagtgattcttagattgatgttagagaaagacatgttaccttccatgaatattttgtggttggtttttctgcatttggtgaagacagaaatcggtacacatcttgcttccaatttcttggctcaattatgtggagaatttgtcaagttacgtgctaacaagggcaaacatgcagaacttataaaacccgatacgatgatatttaatctggtgcttgatgcatgtgtgaggtttaaactggcttttaaaggacaacaaattatggaattgatggctcaaacaggagttattgctgatgctcattccatcagcattattgcccaaattcatgaaatgaatggacaaagggatgagctaaagaaatacaaaggccatgttgatcgagttttgtctaagttcgattgccattatcgacaatactatgatagtttgttgagcttgcatttcaaattcaacgatatcgatgctgtagctgagcttgtgggacatatttgcaggtacaaggagtgtgttcctattcaaagagacaagatcttagataagatttttcttgtcccaattggatctcacaatctaaaagatgggttgaagatgcagatacaacccgagttgctgcaaaaggatactgtcctgaaaatggagagtagacaagagcttattctttttaggaataatggcaaacttgttttagtaacagggctctttcgaaactcatcaaagaattcaaaacagctgggagggttagtgagctgtcgaaactcttactcgaaattcagaaggaacattgttctttgagaagctctgatttgtgttctaatgtgattaatgcttgtattcgtttaggctggctagagttggctcatgacattttggatgacatggaaagctctaatgccgccataggtgttagtacttatatctcactcttgacagcttactttaaccgaaaaatgctacgagaagcaaaggctttgcttaaacaaatgagaatagctactggtacgccgatgtctttatctgataagatggttgtgaccgagagtctatcgaacatgttagaaaatgcatcatcaaactcgattggtaaaacagatttatatcattctttgattcaagaagtgaaagacgagaatgagaagcgaattccttcaatggttttcgagttgaattcttcaatctactacttttgcaaggcgaaaatgattgaagatgctat

SEQ ID NO: 222503 - DNA, 2287 bp, Cannabis indica
gtcaaagttcggaaggaaaaaaaatcctaattagccaaaaataaaactctcttacagctaggaacaaaagtgatgcttcttcccgaaattttttatatatttatatacctgtagtcattatagctgaatgaattgcagctggactccaatttggatgaatgtttttaagaaggccaacaattccagaaacatgagggcatgacattgaagttcctgaggctgcattatatttgactcttctcttatcaaattctaagtctgtagttgctggtgcagattcactaaaagcagcaataatattaactcctggtgctgtgatatctggctgtaagtgaaaaaaaagctaaagtaagctttgacatattgtgactataagtgaaaaaattgtcacttaagaaaatcataataactatatgtcatcactaaaatgtctttgctaaaagtaatagtaacaaatattatgatatgttgttgctaaatatgttttaattcacaacaaattttattgctataaatgaggttgtaaatcattagtaacaaattgtgtcttttgggcaagaccttaagcaaagctggttgaataatgctaggtcctcttgatgagaatgaagctataattggggatggtttttgtcctatttcagtttttggctgagtgatgtaagccataggaaccctgcaaatattcacaaaaaagaatatgaaattgagtgcatgagtttgagtaaaaaagaaaattatttgatcctttattaaaaaaaatgtgttattttcaaaagtaaaataatttctccaggccctgggtcgggttggccctaggtgtagactcatgaccctgaatcagggtcgaccctgagttgaaatgggctatagacaaatttttttttttgggcatttactataaaaataaatggtatttttaaaaatataaaaaaaaatatattttttaaaaagtatttttttctttgggtccttaaaatgagtgggccctataaggccgaccctgtcctgaattttagtgagccatatgaaaaaaagaaattttgtgtctttatttagaaaaaaatgtaatattttaaaaatcaataaaaaatatatgaatatttttaaagaggaaattctttttgggcttctggattaaatgagccctaagcacaagcctaactcacctatgcacaaggtcaaagcctgtgcagccgtaacccgttttagcctaggcctaatcatgttagtagtagtacttacttggtagttttgaggtattccaatacataatttccttgagtgacattgagatgagatgtagggagcacatgaagttcagcagtgaagccatgatttcccactgagacattattaactagaatcattcccacagcaccagcaagtaaagcttcttgaccttgatcaagtgtgaaactttcatccccaacaagacataccaaaatttttccctttaccttctttggatcaagactctcagtctcacatagttgtctgaaatgaatattaaataaatgtgtatataattaattaaataataaattaatttgtttcttcgatcttttgggaagagaggatttgaacttgaaatcttctctttatcagaagagatgcgaaactactagactatatctatgactacaattaattacttacgctttcaaaggatcttttactttagcagcttttgcatccaacccataaatcaaaggataaaacttttgagatggcaagccacctaaagaaagacttagtccctacagtcatgagattatatattaaaatatatcacttaatagttataggaaacttttatgtttagagctgcattgatcattacaattttttttcttacttttagctataataaaatttgtaattaaaaataaaaaattgtgaatccgtagctaaaaatattagccacaaaaagtacagtttattgtgattaaatgtgtttttagtcatattatttattatgactaaaattaaattagtaacaacttgtatctaaatactatattttagtcacaaataattttttgttcacattaatttagtcacaaaaaaattatgtgactaaaaggtagtatgttttttttagtggatgctcttctttgtattttcgacatccaaatagttttaatttgaattttttctatatgaagtgtacaaagtagttattaagatatcttgtaaattttaaaaaaaaatcataaaaatttaacgcactgtaatgttcaaatagtctattgcacttgcacacatttctttgttttatacacat

SEQ ID NO: 222504 - DNA, 1315 bp, Cannabis indica
tagtcacccatatatatatatttatatatatactatacttgagaaaaaaagtaagataaggaaaactaatcaataataatccacttatatctaccacattaaaatgtttaatattaggatctctttgcaggtacaattatttaattatcaaaatatatctttcttatattaaattagtaaatattctacgtttcgccgtaaatgtttaaaatatttttaattatataaaaaataaattatattttaattaatgataattaattaataaaattatatttaaatttggagaattgtcatgtatttttttatttagttttataattcattttgagattatggtgttttcatttttataaataaataaaaaaattaattataaaagtataaatgaagctcttaaaattttaacctaattaatttttaatataacttttatttgaataatatatatgagaagttattatactaaatttttaatattaatgataaaataataacacgaagataaataaattaataatttaactttttttttttatatatattgaaatttattttataatactgataattctccctttacaaattcattacttctatttctaagtgctttggcatgttgtgttaatttcatttttgacatatttaattaataaaaatattttgttaatttattattaatttttgatgaggtgttaatattggttttggaatgaaagttgtctagctttcctatttatggaaaataaagtaaaaaggaaatttggttactcaattctttcctatctaactaagttgtgatattatgatcttgtgtgtgtttcccataaagaaactttaaaagaagctattgattttacgggtactattgatttttaaaagaaactttgtaataccataaaggaacgcctagattgttactttgtgaataattattgggcagaaatgtttgagttaccaactgtagaacaccttgattattacaagtcgaatcaccatgccattcaggtgcacatttctttgttgactactactgttacagaagaaaaatgaagaagcatgtttctttgagaaaatatggctacctaaaccagaaagcacgaagatagttcaaaggtgctggaattacaatattctagttgatcctgtggaagttgtcgtgtctaatatagacaattgtaggcttcaaacttgcagagatggaatattcaaacatttgggtagttcaaaaagaaaattaagcaagctcaagaaaatgtttcagcactccataataatcctaaccatgtgtctcacccagaagaagctatgaaaa

SEQ ID NO: 222505 - DNA, 1861 bp, Cannabis indica
ctttaaatagttgagtagctgcaatagaacaaccttcttcatccactttagtacttgcgtcgacattatattcacaataggtagagtagttccacatgatcgtgtcatttatcgtctgtctccacaagggattcgaagaattatatcagcatcctctttgttaaaaactctgctaatgaacacctcatccgttgagcattttccagtttgagatcaataacatagagaccttgaggaaggtggggtttgtcatagattttgaaactgagtggccttgggagccaagggttatttgattatttgattttagaaaaaaaaaaagtaaaagtttggttatttgattttgggttttattcaagattttgcatactgatatgttgattgataaatattttattatcctcttatagaacactgcttctaaggttttaaatttgggtttggggggttttatgtcaatcatcttgaggtagacaagttaatttgtgaacaaagtttgagactttaataagaacttgtctctcatttaccaagtacagaacatttatctagttttgtccattgggactactttgatctcgttaattgtctgtttagctgctggttttggtgttagttttcatctagttctgtttgattgttgttgttagttttctttgagtccatgttcttggtgtgttgctagttttgtttctttgttctgattttgctgtagctgtttgaactgttgtagttttattttttcgcaaagttaatcactcttaatccgacacttcccataaaacaaaaagaaaagtacagaataagaattggtatgaccaataagactttattccgttgagcaccatatcttgagcaatggaataagaaataacaatggcttcttctactaaccactctcacaaacactaaccaccctctttctaaccaatcctagaaaccattttaagatcacaatcaaaagctctcaaatgatcatttctcatcaaaaagttttaaatttgctaatcttaactaagagaatgtgctaagttagattttatagataacctcttaataaaagaagtaagtccttagttttaacagtaaataatttttaaagggaagcaactgtaatcttgccaacagaaaaagttttagagaattactttttatgtaataggttttaaagtttgatttgtttgattttataatttagtgaaaatgttagtctgcaatatatatttgtatacttatatgttagttgataaatattttcttttgaaaacaattctctaacttggtagtatatattttgtagactgatatatcatgtcagtatatattgatcctaacatatttccatcctaagtagtctcataagaatctctaatgttttcctaaccatttctagaatctcacagttgctctcgttgagatagtgtgttgtttattgataaactaggaaataaaacttccatcttgtattttgtttagtgttaattaagtcataaaattatattaaataattaactttaattttaattttttaataaatcatttattgaatagaatgttatagtgatgaaaagatttgagattgaaaaatcatcacaaaaaatagagatttgaaaaaagacaattgataaatttgtaaaaaagttatattttaaaatcgttattatcaacatatcttatttgtaggcaccactaaattttaagtcgatgtgtcattatgtctcacttgtaatcatcactatcatgctcaataaatttgctatacataaaacgttaatcaaacaataagttaagtactcacttctatacaaagtacaaacgttattgttaaacaaaaattccacatttaaaatattaaaataaa

SEQ ID NO: 222506 - DNA, 2951 bp, Cannabis indica
ctctctctctctctctccatattgagagaattgagaaattgagaaattgagaaaagtcaaaaaacaagaagagagaagcaaaatttgaatcaagctcaacctcaaatgagggaggagacttttatttatatagaataatgaaataaataatgtggtagaattagttagaaaactaaccaaagaaattgttaaaacatcttttataattagttacgaagtagttaaaaaaccaactaactaactaatatacacatttgatgttcagttgagatgtgtcttatgtcaagctaatttacaagaacacgatccctgataaagtgaagatccagctttgatatgcttcattttggcatgaaaagcaaaacaagtagctcaagattgtcacaccatagaatagggcaagaaagatcaaataatccaatttctgtaaatagagaatgtaattaaccagattagctaagttgtagctaaggcaatagctcgatactctaactctgtgctggaacgagcgacaactgtttgtttgtaggaaaactagtgatcaaataggttgtctccaagaaatacatagtaaccaaaggtagatttcctatcatccactgagctagcccaatctgcatcagagtaagccactaattgaaggttggatgattgaccaagatcacaggtactaaactaaatatcgaagaactcttttgcaagctaatcagtgctcagaagtgggagctttaagaaattgagagagtttgttgacagcaaatgagatatctggtctggacattgtgaaacattgtaatgccccaattacacttttgtatagggtggcatctgttaagggtgttccacttgatattaatatagtttggtaccttagaccataggagtgggagttggggtagcatttgtcatgtttgttgagctgagtaaatctctgatgtacttggactgagtgagatatatcccacttgagtttctggcgacttcatcaaagcccaagaagtagctaacatggcctaaatttttcaatgcaaactgtgagtttagatcagttataagcttggtaatttgagcaatgtcctctccagtaattaggatgtcgtcaacatatacaaggagaagtaagagtttattgtttcttttagtgaaaaaaaaaacgatgtgtcagcccttgagttatatggaatccccattttactaagtaagttttcagtttgttgaaccaggcctgaggtgcctgttttagcccgtagatagttttattaaacttaaaaacatgatttttggatggtcaatgcttttgaaacccagtggttgagtcatatagacacattcttgaagctccccattaaggaaagcattatatatatcgacctgttgaatcgtccaatctttgcaagtagcaagtgtagactcaaattgtagatggcttaactactggactataagtgtcaaagtaatctagacttggtgtttgttgaaagcctcttgcaacaagcctagacttatatctgtccaccaagacatcataattgtatttaattctatgcacccacttgttagtgaccatttttattcttggagaatgagacacaaggtaccaagttttgtttttaacaagagcataaatttcactttgtgtagaattaaaccatagagggtcttgaagggcagcctttagagaggttggttcaagaaagactttgtcagtgaaagcttttggttttgttatgccctttttggagcgtgtggtcatggaatgtgtgttgagaggtgcagccacagggatatttagttgcggaccagatgttggtataggggtaagaataggttgtggttcgtgatcaggttctgattgattttgggctggcacagcgtggtgtgtaatattttcatttggcagttggagtgttgatgaatgtatctgaactggagatggagttcgaagttgtgtaacatgttcattttgtggttgcattgggaaggaaggatttagtataggagattgacttggttaaggcacatctggagaggtaacaggagttggtattgtgtatgtaataggttgcttagttgggttaactgtgggatttaaggttgggattggtggtgaggatttaaagagagtgttgtagggaaaattgtgttcatcaagttttacagttcctgctatgtaaatacgacctaatgaatgcataacccttgtgtgcagtgttgtagccaagaaataggcattaaattgttctgaatgaaagcttatgactttaataaggtctaagtaaaggatatatatcatgcacttaaaaataaataatctggtttatgatgaaagagtacctcataaggtgttttgagttgtaagacaatgttggtaacctgttgatgatataagtagaaaagacaaaagcttcccacgagaagctcaaagacatttcagcttgtgcaagcaaaattagactaacatccacaacatgtttgtgttttctttatgcacactcttgttgttgatgtgtatgaggacaagggtgcctgaactcaattcctagatgttgtagcaatggattcagaggtctgaactcacccacctatcagtttgtaaagcttttatttttgtttgaaaactcctctcaacataggcattgaattgtttgaagattgtagtgacttcaaatttgagtgtcataggaaaatccaagtgtatttaaaatagtcatcaatgaaactaatatagtacttgaaaccttctgttgaattgtaaaacaagaggccccatacatctgaatgtattaacttgatgtattaactgaaaaatagcatttgtcttaggtacagaattggaaaaagacatgctataaagtttgccaacttgacaagcttcacaaaaagaaatgtccactactacaaaaatagtatttaacaacacttatttattaccatgaattgtaatcaacatt

SEQ ID NO: 222507 - DNA, 7992 bp, Cannabis indica
gaaagataattccctttttataaataaggttttctaaataattatactccaaaaaacaggttgttgttcaaacctcatagtggtctcaagtaccaaatctccacattcaaaattttatccaaaatagagtccaaaaccatgttgatacaaattctgctgctgcacaagaagcatctcatggagcagcactgaacctcctttccaagaggtaagtgaaaacacattatttcagctactgaacacactaactttgacaatgatgatgttgaagatgcagctactaaaccacttcaggacgtccaacaggaaccacgacctactcctgttcagtctcatccgatgataactcgtgtcaaggttggcattttcaaaccaaaagtctatatgttgggcaagctctatggaattcagttggagaggaacctagaagcattgaagaggccttgaaatctaaagtctggaatcaaaccatgaacaatgagatgggtgccttgaaggcaaacaaaacctacacattggtgccatatattcatctcactataatttagtgggaaacaaatgggtatacaaaatttaaaggaatatgcagatgggtctgtaaagtgttttaaagctagacttgtagacaaaggctatcatcaatgacccggaattgacttcagtgaaactttcagtctagcaataaaatctttgaccatcaaaatcatttctcacaattactgtcagtaaggggtgggaagttagacaactggatatcaacaatgcattcttgatgacacccttgaagagaatgtctataggcttcaaccactaggttttgaagacagcaccacaccaaatgatgtgtgcaaactctacaagtcattatatgacttgaaacaagctctaagagcttagttcgagaagctcaaaaagacacttcttggctggaagtttgtcaactcaataactgatacatccctattcttttacatgacaaacgagattataattcttgttctaattaatttatgtggataacatcattataacaggtaatgatgataccaaattgaagcagtttataaatgatctgaacaagaattttcctctcaaagacttgggaacacttcacttctttttgggaatagaagtacatcaagataatataggactgtatctcacaaagagcaaatacatctctgattttctccacaaatttgatatactgaatttaaaaccttgtcctacacccatgatttctggcaagcctctctcaaaatctgatggtgagttaggttattaataataaaaaaaatatgagttaagtttgataatttcattctttcaacaattatctaggtagtattaagcattacattgactttgtttcatactgtcatgcagattataggggctcacttttgggccaccctttcctgacctatggcgatcgagtggtcacctcctccttttgattggatcaagctcaagtgtgatgttcatcttgaggagaatgacatgtgtatcgccgttattgctaggaacaccttggtgcactggtttgggtggttacaaaaccattatatgcttctctgatttgctttgtggggaggcagttgcttgcccttttaactttggatgtcgcggcatagaagcgttacaagtatatatgttattgtggagagcaactctagtggggttattgatgccctaaatggtgtttgtactaattgggggttgattactgcactagtcattgccaaaaaaaatttatttgtcttttgttgattttttattttcaaaagttgtaagatattgtaattttgtcgcttataatgtggttaagtgggcattttttctacaattactataatatggtagagatctaatttcagtatcattctatgaacctttttattttattttttttaaaaagctcatatcaaatgccccatataattcctagttcagtagtaaaaatcttatttattttaatttttaataaaatcaaatgaatttttttgctaaacaccaagatgcaatcttggtttgtacaacctaagtgaatatgatgggtgatattgccaagataaatatttaatttaaaattattattaaactagttaaagataacaatatggttgataatttcaagatgaatattatttaaattgaaattaaatattaatttcgaacttagaaattggagaagaaaatacaatctttgtttcaacaactgatttaaagaaaaaataaatatttattttttagctaataaagacaactgtcgatattattaagatatatatttaatagtggtcataattagcatatagcctagcaattcacactttttcttaaaaaaaaatctcaaattaaaatccatctctcccaatatcaaatatataaaaaatactaaaaggtatcattggtgcctaacacttttattgtcatattactattggtgtaattaaatatattggttccatataatttaatataatagcttttggtaaatatcactaccaatcataggaggctacatctagaacgtgttaagatttataaaacactcaagaaatacaaataattaaagatttaatcatatttttaaaagtgctttaatataaaaaaaaatcttaaattatattttatagaacatttgctaagttaaagaagaagaagataacgagatgagcagaagcactaacctgaattcattgttagagattgtagagaagattaattatgatcttctaagaatacactatttcactaaagtattttctctgatagagaagaaaagaatacatgaaccctagtatttcttggagaccactacgttatagactcattatataatgagttttgggtatttataagttgaccccttaacaaattataacttaactaacggtatctacattatttttatgacaacttaattttgtatcacactttataatagtatatacattatacatatgtgcctacaataagattttaatccaacaaagatgctaaacaatactggtgtctaataacagtgctccaaatatatatacatttaatattatattttttaaccaataacaaagatgtcattgatactatcaacatgtattttatttattaaataaaaggctatgtttgttttagctataacattttatttatattgaataaatatgatagtataattacatagtagtgctatagtttaacatttctcaaaatataaaaaataaaatatatatatatatttatatatatatttgctactttggttagaccaccatggagcaaagaatccatgcacatacgcagagatgtctacttaaatataagataattcatttcacattttaatcaataaccactctcttaagttctatccttatttcctttctaatcatacctcataagtgaaaatggccgaaggagttttattagacattgctgcaactcttattgagatgttgatatcctcagcattcgaagagattggattgctttatggtgcaaaagacaagttccaagaacttgttgacacaactaaagtaatcaaaggcgtacttcttgatgcagaagagaaaatggttgtcgatcaaagtgtcaaagtttggctcaaacaacttggagatgctttcttccttgctgatgacttggtggacaagtttcataccaaacttcttcagcatcgagtcatgtttgggaataataagtttaccagacatgtatgtattttcttctcaaactctaatcaggtgagggaagaggaagttattgggagagaggatgaaaagagagagattattcgaatgttggtggaaatggagtttggggaggatgtgtcattcattccaatggtagggattggagggttagggaaaactacactagctcaatatgtttttaatgatttaaaagtcgaaaactattttgaattaaaaatgtgggtgtgtgtttctgatgtttttgatgtgaaattacttgtggagaaaattgtaaactctaatacttctaataacagtctagaaaatttacaaaatgaacttagaagtaagataagtggtaagaagtatctcctagtgttggatgatgtttggaatgagaatggtgaggaatgggataagttagagacgttgttaaagtgtgggggaaagggtagtaaagtcttagtaaccacacgtagtgaaatggttgctaggataactcagacagttcaaccattaaaagtagaggtttgagcaaagatatgtcttggtattcaaaagaatggcatttaagaaaggtcaagagccggtggagggctcaaaagaaatggagctagggatggaggttgtcgaaaaatgcaagggagttcctttggccataaaaacaataggaagattattgcaagaaaagttatggctgtctagagatccacaaaaggagttgtcaaggtttttgaataacgaatttgcaaaaatagatcaaaatgaaaatgatatcttgcccaccctcaagctaagttataatcatctcccttcacatttaaagcattgttttgcttactgtagattgttccctaaagatcatgaaattgatgtgagggagttggtacgactatggatggcacaaggatttataaaatgctctaataacaaaaaccaatgtctagaagatattggttatgagtatttcataaatctattgtggagatcttttttccaagaaccaaagattgatggatttggtgatataatgacatgtaaaatgcatgacctaatgcatgatcttgcaattaaggtggcaggatcaaatagtgtcataattgatcaaaatcctaaattttctaatgaaaattgtctccatgtgtcattagttaattttgattttgatcttgaaaccaacaactcactcgagattttcgaattcttttctcaacaaaaaagacttcgaactttacttttacatcatcgtaaagggttgagcttctcagaacttcaagattatttacccaaatttaagtgtctacgagctttgagtgtacctttcatgagtattgaggtgttgccaaagaatttgtgtgagttggaacatttgagatatcttaatctttcttgtaattattttctaaaattgctcccaagctctttgataagattacagaatttgcagactctaagtgtcgtaaattgtgaaaaccttattaaattacctcaaaaaatgaagaaattagtcaacttaaggcatcttatgattgaaggatgttgtagattgagagagatgcctcctgaatttgggtatatgagttcccttcacacattagataaatttgttgcatctgagtcgagtgggtttcatgaattgagcaatcttattaacaacttacaaggaagattagctattaaaaaactcaggcacacaattaattattctgcatcagaaacaacttcaaagcaagccgtttgtgaagggaaacataatcttcaatcgttaagtttagagtgggaaaaagtttatgaaaataacaataatatggtggaaaatgatgaaatgttacttgaaggtttgcagccaccttccaacctaaaagaattgcatgtgtggcatttcatgggagtgagatttggaagttggctttcttcattgaataaccttgttaaactgaagttaaacatgtgttacaagtgccaatatctcccaaaattagatcaattacgttctcttgaggaacttatggtatcaggagtagaagcagagtacatgtgctcctctggcgaagatgatgattttgacgccaacttgttctttccatccctggtgactcttacaattggacattgttcaaatctgaagtggtggtggtggaaaaaggaagtggatgggaataatattagatcatttcctcgtctctctaatctagtaataacagactgtcctaacctcacttcaatgcccttgtttccaactattgaaaaggttaaactgttagcaagtagctcaatgtcattagaagatacgtttaaaatgatgaggggatcaagcaaggcacacaacactactcacccaaacatttcattgctaaggtctatccatataagaagctgccccagtttgacatcactactggtggaagagattgataaccttacttcccttgagtctatcttgatagaagactgtcccaatttgacatcagtactggaagggattgataaccttacttcccttaaatctatcttgataaaagactgtcccaatttgacactagtactagaagggattgataaccttccttcctttagggatatctctatagaacactgtcacaatttggcatcactacttgaagggattgataaccttccttcccttaggtctatctatataagagactcctctgatttgacattattactggaaaggattgagaaccttccttcccttaagtctatctatataagagactgtcccaatttgacatcattactggaagggatagataaccttccttcacttgagtttatctatataagagactgccctgatttgacatcagttcccgacaacttcagaaaagtgaagaattcttttattaagaattgtccaaagcttgaagagagataatgtaattgaagtttctatgtgagtttatatgtctttctctctctccctctctattgttagtgtttaattagattaatgtgtttatggagcataatgcatgcatttcaattttatttataagtttattttttcattgttgtttttgtgagtatcatgtgtacaagtagaacagtatatgaatattgatatggttttctcatcctcatccttgttatttgatggtcagacaccattggagttgtgataaacaagcaaaagaggcagaaagggagtgaggacaatggaatggaaccctctccagctgtacatgttattatgtagaagagagttcaaactctgggatggttcctatgacagggcagggaatggggtcaacattaattcttcttgtctagactgatttacatagtggcatgtctcttgaaatgatctcatcatcttctctttacttattatttattgtatattggatttctcatacatgtttgtttgtggttttaactctaggaagacttttgcattgaagttattggcaaagagtatagagtaaattattgttggagaatacagagaataaagatgcagaattgggcatccttggctgtcaaatatcaattgataaattcatacaggtacaaaaagagaatatctatctatgcatactgctttgttttgttgttgagtttaattattgactatgaatgattcatttcataggttttgattggacacaagagaaatggtggagagattggacagagacaatatgccatttggccaaagtgcagagagatgatcagaccgaaatagatggagacataagtggagttagctgtgaaaaacaactagtactttcagagtctcattcttccatttcaacagattcagtcgatgagaagattggcgttgtcaagaatttcaggagaatggttggtgtcaatcaaagttagaaaactctatttttgcattcagtgaatggatcgtcatgcatatttgaatccattgtaagtaaactaaggtgcagcaaatgcaaaacccaactatggagaactgcaattatggcattaatttgggctgtttggttcgaaagaaattctagaatttttgagggccgtgacgaggttcaaaagaggaactttgggagaaaataaaattctggtcagctacttaggtatataaggctaaacactttgaattcatatcatcattcttctctggtgatggccttggatttaactattaagatgagaagtgtaggatttgcaatcctaattctatgatcttatctctgctgacattcgaaaacaaacatggcagaagtgccaacaaaaccagaaaactaaatcgagagcaataactctcttaacacaaggaataattgaatgctttcttttt

SEQ ID NO: 222508 - DNA, 1110 bp, Cannabis indica
caataccaacttacatccccttttaattcatactccgaaaaatctactcctttcatatagatattgttaacccatttaacccaaaagatatcatgcttatccattatagcccaaatgaatttgccaagaatagatctattccaagttggcccattcttgaatcctagaccccaaacgactttggcatacaaactaaatcccaagaagccaaatggattttacttttctctcctttgaaaccccataagaaacatctacaaagtttctcaacctcttttataacactttgaggaaggataaaaaggcccatccaataattacgaagcccaagcaaaaccgaatggattaactgagcgcgcccagcataagacaaatgcctagttgcccaagttgttagcctcaatttaaccttcttaatgatagtctcacaatcttctcgtctccattttgttggtcttaaaggaaccccaagatatttgagtggagaagttccctctcccatgtgcaaatcttccaagatcaccagtttatcacctgtagacactcctccaaagtaaacaagagatttatttttattaggaaataaacccgttacctcagagaagctttccaaggtcaatttttagatgatgaacaaccataggagaaacccttactaaacaggatttatcaatactttttattctctatattcatcatcatttttttaaaaaatctatttatcatcttgatcttgatctcttattgtttatttttttttagctttttgagaatgtctttcaaaataatttttttgatagcacgatttaaattaattttgcttattacatttccatttattgattagtgatactttccattctctctattcaacatcatcattttttatatggatttattgattgttatattattatttttttttttcaaaatacaaatgagatacagtaataataataatttatcaattattatattattaattttcaggatggtgacgattacaagtgtatacagtaatgacaacgactttggatatagtgataagtgaaatatggtaataacaacgattttaaaattgaatgagctttaaataaatttaccaattgt

SEQ ID NO: 222509 - DNA, 4366 bp, Cannabis indica
tattctcccaagataggtttgttagagagatatgtggctacgatgatttttttaatttaaaaagtagattattaatatttaaaagattgtttaaaatattctgttaaaccaagaattgtcgttagatagacacttttaatatataaagatataaagtatatatctttccaaggtgtgctgaaatatgattccactcaaaatttgttctattgcatgcagttaattataaaatgaaaaatactaatattttaattattcggtaaaatatcagagctggccattgtcttaaggattgcatgcttttttgtccgatctgatatgaaattataaaataaattctaaatattaaatataataatttttatataacttcacttctcgtgagcatccgaacatacattccattaactttactcaaccctctctctcaaaaagttatatatataatattgatagaacaaaaatatttaacgttgattaacacttgactagtgtgtgcaaatggtatggatcgaataatattattaaatatgtaataaaagatttgattcattttatttttagatgaatgagttttttaaagttatatatattaataatttaatattattataataattattttgggttgaatggaatggaacttttgctgcgttagccatgaacgtgttacatggtatatttggaattatcagtatgggacgtaaggtaatatgtcatatcatatataataaggtgtaatatataagagaaagagtaggaaaattttgtcttgaacacttaacaagtgttgaaaatgaatgtagccctaatatgggtaatgttcaattattctagagctacatttaattaaacaataatttgagaggaaagtggtatcgattttttcaacattggtggtgttttgtgcatctttgaattgaatatgtgaaagattcatcgaatgcaccatgaaacttgtcagtcaaatatattctgttaatataaaaggcattttgagtgtctagcactacttatattattactgttattaaggatataattaaggaacaaatataatttaatttagtagttattatagaatattgttaattatttatagatttttttttttttgaaattaataaacaaatcaaaccttatatatatatagaacacttatatgagtacacttttaataaatattatctataaataggtagtgttagaaaatttaagttttataaataatttttttatcaattaaaaaaaaatcttatttttgcattatataaattgggttgttccaccggtttaagaaaaaaaaaaatcgacaaaaaaaaaagataaaaaaatttagtttgacttaaataattttttatatacatattttttatataatgtaaaaaaaaatatatttattaattttttttttaattaagtacctaaattaaacttaaaaatttaaatttctctatcattgaatcataatcaaatacctgtatttttttaaattaatatttatggttaaagtatatttaataatttttatacccatatttcgagcaaatagtatagtgagacacgtgtaaaaaagctagaaaataaaccagctcatgttagaaagcagtaaatatatgtttaataaactcacctcagacaatatgtttggtagaaatatttgaactcgtctttttaaagaaaatgacgagtcgtgaataataactaccgtttcgtaataccagcgagatgaacaaccaacgtagaatgtccatctcgggatacacagagtacccaacagaacgatagtatggtggaaagggtagataatgaattcattaagagcttgcaacttattgacccacatactcgtgagtatattgaaagactaagagaaatttacccatcataattcatctcgaaattgttacacactatgatagtatctcacgtgtgcttctcttaacattcacagaaagatgttagaagtactagctagagtatgcaaaaagttaccttcagaataaaataaccttagaggattgtttgtattgcaagataaagaagtatagtcagcataattttttatagataaagacaaagagcgattatagtagttatttattactatcccgtgtgatgtaaatatgaaacatggggtttgtccacgttttatgaatggttacaagaatgagatcccaagggaataactgtcaccctaaaactcttataaataaagatagaacttggaaaataagggacgaccaatttttagaaagaaagaatataattcataaatcatatcttgtattctgtatttcaaatacacttcataaaatcccaaaaataagatagactcatgggtaaagaataacttcaaaactacattaaaaactttattgtcatttattattatggttattattatttttaattacttattctaaagtttatttattactttaaggcttgtttattgattaacaaaaatttgtattaacagtttggtgctttaattgaaaggcttgtaagaaaacactcagaaaaataccctcgttgaaatatattcgaacattccagccatggcatacgacactcctcaaaacgaagatactcaactaggagaaataactcagcatccatcaaaattcacataggacaaatgcgactaagactcctcgctcggggggtgggggaaattgtggaggatttgtacaaactgggggtgaaatcttagaaagatgcagtgaggacgcttacgatcccaccagatacgtgccattagtggaattggaaaatagacaactccttcaaagattggtcgaatcaaatcagaggaatgttaagttggaatgcaaggctatggctgaaagggttgaacgcagcaatgcacctcctaaccaaccaaacacatccactaggcgaccttgggaaagacctagaggatcaaggataggagacatggggaaacttcaagaggtgataaccatggacatcacacgaatccccaggatgaacaaccagggaatacaagggatattccattgaatggaggaggccctaaaatctaggaaacatcagcaatagagaaacttgacccaacaatcctagaacctcccgcaaaaacacaaattgtgggaatgtgcaacccaacaacccagagtcatctcgcatgaacaaagatgctaggcaaacacaacctcgagaccaggggtttactcagtatgatgcgatgggtgtagggagacgacctggattaggtcatccaccaagacactcacaaagaccaaactaaaatgacaaagatagcatgcatacctacttaagttgaggacgtgtgtcaaatctctttcaaagatggatgccagtgcgagaggaaccccaagaaataagatcaagcactggtcctagtgggtcaaggtcaaaggcgcatagttaaagtagatcgaccaggatccatgcacgtgaaaggaaaacatggaatggggaagatacatgtcaccattatcaagatgaacgagagagcatgaggaattctcagagttatcaattagaatgttactctgcaataaggtcggttagcaattatgaccaaaggaatgaaaggcgatgcaaccctaatcttcgtggacacttaaactgtagatagcctaacttacgggagcatctgaactgttatgttctagatctttaagatcggttaaattagaataaagctcgtcagcaacaattcgagcagctagccagggatccaattcaattgagagtgattcggttggaggataatttcaagtgataccaagatggggaatacaggaaagttagggtattattttgatgaggagaaagaacctttttatcctgatataatcaattctcgatttccttaaggattcaagaatccacatgtcgcgtagtatgacaaaacaactgacccggttgcagatctgaacaacttcaacactataatgcaagcaagtaatgtctctagcaacttgtgttgcatattattcccatcatctctgactggtgcagtgagcagttagtttgataaattcaccaaccactcctttacctcatgggaacagttatccgaggaatttaagaaacagttctaagctacgagagacagaaggctaaaaggaaccttgatgacgaacaccaaacaacgaccgagagagtagttaaaggcttatctaggttaattcattataaaagtagcaaaagtaagaaacttgaatgatagtattcagttaacagctctcaaggctggaataaccactgatctgtcaactgtgagaagtaaattgtgggttgatctgcaagttcccctagtcaaaacaatcaatgaattcaatgatagagcattagtcttcaattggaaaga

SEQ ID NO: 222510 - DNA, 2299 bp, Cannabis indica
ggaacaatccatatgatataaaaatgagagatttttttaattagataaaaaattaagcataaaaacttcaaaattttttaattttactcgttcataggtaataccccccatatatatatatatgttgacaaaccattactttatattttagctgtgtaattaagagtgttcatctttttcatcttgttcttgtttttttttttaattaattctcattatttgtatcattttgttttgacttggagatcttcatcatattttcttttctatttctatttatttgtaattttgaacataagtgtcgtaacttttatttaattattattttgtccaagtgtatttctatcatattgagttgtaatattttgtttctttattctattgtatattatattctccaacatttttgtgctaaatgttacacatgcatacatatagatatagatgttatgttattttaaggttagactactttaaaagaaaaaaaaaaaaaaataataataatgataaagtatcgcatgtggttcaaaatcatgcatgcctaacttttttgttatttcacttggtgaaatttacctggtacaaatttggtactatttaactcaatatattaaaggaatgcttttatatgttacctacttttgtatggtagtactaatgcctaagcatgatgtatatatcatttacccatgtaaacaattgttattttattttttatataaaaagggcatctaattttaattctaatatgaagcaaaacattatggtaataattttgtttttaaaatttttatcacaaatataaaagaaaaattattgtctttaaaattttgtttttgaaaaacaaaaatgtgttctataatcacttatattttttaatttaaaacactaaaacaaaattgtgttctgtaaattttatttttatttttatttgttaattttatttaagtaaagtctgggtctggggctaggaccgtggctggtgtctggagtcggggttcggggcgggaccgtggctagggtccggggttgagtctggcacccggatcgggtccagtcggggttcgggtttgcgtccaaggtccgggtccgatgtcgagaccgtggccgagtctggcgcaagatcgagtttggggttcgagaccgagttccgaattcgagttcaagtctgggtccgaggtctgggaccaagtttcgaattcaggttcgagtctgggttcgggttcaagtccaggttcaggttcaggtcagggttggggttggggtcggggtctgggttgaggtcgggtctgggttcggcttcgagtcgagatctaggtccaaatccagggtcagggttaaggtcggggttcaactccagggttggggttggggttggggtcggggtcggggtcggggctgagtccggattctggtccgggttgagattcgagtctgggtcaggatttggagtctgggttcggattctagccagagtctaaaatattaattaattgagaaaaaaaactattaaaaaattttgaaagtgacatttttctcgttttcaaattatgattcttaattaaaaataaaaaaataaaattaattttatagatcataattttaaaaacaaaaaacagattaaaatttattaccaaaagatcataaaggatcatgcaaaataaccttttagaaattttaactcacatgtcttcctctttgaagattccaatccaaaaatataagacacacccacatacattattattattattattattattattcaaagatttgggcatgagatatattcacaaaaattgaagtttgtaggcaggaaatttctctagggaaatgatattcaaacaagtaggagcaaattagggtgttattaactttaataagtgcattgagtgttgtagataataaagggtgttacgtaacttgtgtagaccgtctctaatgcgtggtgcgggccaagtcaccagcctagcacactgcacaccccaaagaaagaaaaaaaaaaagcaaagaaacacattccttgtgacttcagcaaattgtagaagagagagagagagagagtatagcagttataatcaacatcaaatttcaaatttcacgaagaaaaaagtttaataaattagtagtctgcaaaattatttgaaataaaaataaaagaaataagtgagttagggtggggagcagtaagggcataagggggcccaaccccatgatgaaatgcatgccattctcggaggacccattaatgaagcccaatgagagcatatttgaccatatataaatattattttttttt

SEQ ID NO: 222511 - DNA, 1480 bp, Cannabis indica
ttatattctgcctgttctgtttcttcattgcaaaactggtttctgcagtaacagaattactttctgcttctgcagacgcatacagttttatattttcgtatatataattgacatttgcaaaaattcggtttttttataatacatcacattatatgaattatacaaagaagaaaataagaattctcaaggatgtttatcctaaagtcattcctcctccacacaaacagtacttaaggaaactctaaaaatgctcttaaagatttatcaaatctcatatccaatctggtgtctaaagataaatatgtccttacaagactctaacaacaacaaagttatttcaaccaagaatatcacaagtgaatattatggcctctaattatagagttttcactctcatataaatatgaatgacaaccataaagtctttagatgttaccaatcataatatgagtgttgtaataaccaaaatatttagttattattttcttttacgttaatctacctatctcgatgtagaaatagtaggtaatatgttatttactcgtcaatcaaaatgatattcttctaagttatgagaaacatgtcatttttataaattatactttttataaatttctatgggctttaataatagtccaatacgttatcaaataatgaattttattaaacttattattaagttacggataagtcgtactggggtcgtacagtagcatgggattggctaagttttaaaaaaatttaactgaaacattatatgtagcatgaggaataaatcttaacgaatagaattagttcaagagggaagatatatgtgtgcatgagacccattaggcttataagtactcacatatattatgaagttaacgcaaattcgaaacctaagctaactagtctacacgtgcgagccaaggagaatggagtggaggaggttgataacttgaatgaattcaaatttgaaagcattttatatacccgacaaatatgggattggttcacttgaccgagtctgaaggaagctttaaggaggttattacgttgaaatgacttttagctcattatttaattaatttcgtaatgggtgtagttagctaaagacttataaataacactctactcagctcaaaatgtatcactcgcataagctctctctgatcttcattcactcgtaagccaaaaaaacgtccctccccatagtctcttgacctcaacttagtcacactttcaaatatttttcttgtttcatcttctttgaccatacactaccttagccctcatattactatcaccactacaaccattataattatcttttcaacactagcctataccaccatacgtcatcatcaagatttgggtcattacaaagtgatgctggctgaaacatagaaaaggatttcaagatttggagcactaatatatttcgcatagggtcggtattcctttttgggagctaaggtataataattgtgtgttaata

SEQ ID NO: 222512 - DNA, 1250 bp, Cannabis indica
gttctgaaagtttttatattcgtgatttatttcctatattttttgttagcgtgtaaccacagtgttcctttggcataagcgaggctcgctaataaatttgggaggaagtcagtcttagacatttacctgtctcttttttttaagaaaaaaggcaacataacttaatatgggggcattatcactgtagtgttgacagaacacaaggatgtcaatgtaatgctatatgcatgagagagaaagaaagaaaagtaccaatttttccccaccaaggtgcagcaaacacgaagcatagtgatctccattcaacttgagattcttggttgttccgataaaaagttaaaacccataagaattaaggcatcctttacaaaagaacataagttctgtctttgagcttacctcagcatgccattctagtggatttgacacaccaagaatatagtccaccagtttagactgatacccgtatcagaaattcaaagcaacattagtacacgtataaacaagtaacaaaagaagatgaaaaatataaagagaaaccttgtcattgttatttggatgaagagcagaaccgtagacacaacagaactctacaggtggaagaactttcagaaaactttcaaccacagctttgccatcattcatcatggaaaaactgcttgatcaagttcaaaatgtatacatttactcattccacatacctaacttgtaataaaagaatttcttgtggcttaatagaatatttttaaagatcttgttaattttaacaggaacatgtcaaatactaacaacaatgttgaagagatgcaaatgaataaaccataattgttcacaacttctctaaacaagctattagttggtagctattcaatgaagtattgtccattttggttcaaaacttctccaaacaggttattaattggtaacatttcaatgaagcattgccttgtttgcttctcctattaaaatacctatgcaatttgaaacaactacaaattatctctccagtcaacaacaaaacattgttccaaataacttatttgtcactatgagtactcagaatagttacaatttaaattggctagaaacaccataaatagattttatttggagagaagtttctcaatatcaccaaaaacttcatcaacaccaagatatagagttatcccaaacttaaacacagtactgatttatatataggaaaaaataccatacaaatgagattcacatgaatgaaacaaaaacttttt

SEQ ID NO: 222513 - DNA, 2968 bp, Cannabis indica
  modified_base (2924)..(2924): a, c, t, g, unknown or other
ttttagcaacctagtctcattttttttttgataaatcaatgagttgtattgcacaatcatatttacagcctaatagcacccatacaagggtctaaaaatctatacaatgtgtttctttcccttcctcaattcaattccttcattttacaattcatctataaatcatgaaaccaatctctatctacacttttaattttctttggaaaaaacatgttattctggttcttcaaattccacttgatgtcttcaactatttgacatttattcacatgttttccttgccaaatgacctcatttcttgcttgccaaacctgatataccactactgcaacagtagcatcaaaaaccaactttttaaattttgaaattcttgccctgcctatccaccgaaccagtttgggaagtgacttggtttttgccttccaatcgagccatttattgatttcatccaagcagtaaacagatacacaccaatcaaaaaacaaatgttgttcattttcaatgtttgaatcacaaaagctgcaatgaccttgcaccaggatgccaaacctcttcagcctattgagcattgctagccataatatcacactatgttttggtgtgttcaaccgagcccatacctcattacaccaattcagttttgtttgggctggtccattataattatcaaaaattaaatgggctccctatatgcatctaggcccaaagcaaacatatgatctcttatattttcaattttttcgcggttgttcctctattgttcttcggttgttcttcttctcttttattgttgatgccttctaatgcatgttctcttggtgtgctccagatctccacatttgctgcacttgatatgttgcttcttctcccagccagcttcccatgtcctctttttaggtcttcctgattttagtctttcaaccgaaggcaagactattatgtctttcacgttttgtggtacttcccactcgctttggtgttcaattgggtacattgttcctgcataagtttctagccattttttctttgtgtagtattctgagcagtagttgtatgggtccatgttcatctcctttagcacggccacaacttgtccacatgacatttcatctatttaaaacttgttgcacgtgcatgttctctccttgaggtctactgttcatgattcttttattcttgttaactcaaacaagtaatcagtggttgattttacctgtcttgtttgaaaacatcattcattatacattcagaacaacagtaaaacaatcctaaaccaattttaggaaaaaatatgaattctctagaatgattttattttttaaaataaaaaatgcatattacatatttgacctccaggttcaacgagtatgtgtagctatccagtaacatttgttctgcaggtggtgccaatgtagtgaatgtgttttatgcctttgtcctattagtatgtgtccattgttgcactaatgctctcaagcattccagcagtgttgtaattgaaagttcccttgctgctaaatttgccgagtttagtgattccactatgttagaggtcatggtgctatatcttttgtttttgttatgaatccttgaccatttttcgtaactgacttttttcaagtacgatcttatgcgtttgtccaacccgtctatttctgccatgtggtactcaaattgtttttctgtgtatgctttcactgccccaaagaatggcaggttgtacttggcatcatgtgttttgaaggttgttcaacaggtggtatccatagtatgtgtgtgtaatttctgcgtatatttctcttgctgctttgatcatgctctcatttctgtctgaaattatacactgatgttctctgaccccatatgcttcttttaattttttgaaaaaccattttcaagatttgtcattttctgaattgacaacacaaaatgcaagcggaaatatgtgtcatgctgcatcttgtgtgcatgatgacagtagtgttcctccgcaagccgctttcaagaatgtactatcgaccgctattatcggcctttatgttttctacccttttatcgaagcatccaaagccataacaacaaataacaagctattgtcttctgctgttatcaaatccacaattgatcctgggttgtttttttccaccatgtgcaaaaaacttggtattaagctgtatgatttcttagcctttcctcttaagtcatttacagcatgctctttactcctccaagctttcatgtagttcatcttgataccatacctgtatttaaattctccttttatatcttgtggtgttgcttttgtcttgatgttcaaaaaatttagtttgatgcattctattatgaattttgtagttgcttgcctttggtcttcatgtctaatatttattgggcaggtgtggatgtttgagaacctcctgattatgaatgtattcgttggtccattttcaagcctcttagtgaccaattacagttttgataaacacacttcaagttatattcttgagagcacgacttccataccttgaattggaaattgttttttattgcatagtatccgaggaccctctggagtgtttctttatctttgtatgcatgttcttttcatcttttgggtagaatttatttgttatgagctttgcattgttgatgttaatctttggacatgtttttttacagttatttctaatttttctaccatttctttagcaacaagatttgcgtagtcaattatgtcaaattggttgttgtttgcttcatctgtttctgtttcttcttcttcctctcttattgttccagtgtgtttgattatgttgttcgtgcattgtctgaagcatttttgcattttctcgttcttgtgtcttttttgatgtgatcataagtattgctgcggttgttgtgctgttgttctgcgggtttgcacntaatggatatgtagtgaaaatcagtttctttgatcttcaattgc

SEQ ID NO: 222514 - DNA, 2043 bp, Cannabis indica
tgctgttcttgttcttttatcttgtactaattatgtaaccagttattgtaaacctctattatctatccattattctcttgtcttgtaggtagtactaattatgtattgttggttggatcagtagatctggaattaatactaatgtttttcttagttggattggtgtacttgtgtagtatttgcttttccgaacataattattagtatctcgttttatttaccaaatatcacccagctagagctagtgagatcacttaatgagtttttatgtgtcaaatgtgaaaattgcaagaaatagcagatcaaaactgtccattcattgttcataaaactactataagaatcttaatgattatataattgaacacacatactgcatccaattgaaatggatgatggagaaatatggtacgagaatttagcccaaagatatacaacaagcttatattttttagcccaccaaaactcaaggggttggtccaatcgtttgaatgggatcaacactttctttttgtccactgatttaattacttccacctcaacaactcatttatttccttaaaataaaaaaatttcatgccaatagatttatatattagaataaaatatagattaattaaacttcttatgttctacaagtttactgcatttgtaattgagtgacaaattattccttgttgtacaatgtcttctttaattgataagcctgccaactgaaatgataaaatctctcgaatcttatgcgtttcttctatattttttttaccaaaaatgtttattattgataaaaaaagtcagtaaagaatttatttttttagaacccctttccctttgttcattcttgatcatttctttaccttcttaagccccaaaagacccccattctagtacactgcctctatttatataattcttttacccttaagtatcaacttaacaagattttactttgacatatgcctattacttcctataaagtgtctttacatattttgataagtgtcctttattttatcataggtgtctatattttatatttctcttattcataatgtgtaattctcttaactaggatatttaagtcattattgtatatgttctctatcttgaatgtaagtgattcattttgggtataccttccatcttggatgtaagtcatcatttttgtttatgtttatgtaatcctgtctgaggtatgtcatcctatataaagtatgtcatcttgactgaccgactaaaatatgagtgtcaccccaaccgattgactgagatatgagtcatttgactgattgactgaccaagatacgagtcatctgatcgactgactgagatatgagttatcagactgactgactgagatacgagtcatccgatcaactgaccgagatacgagtcatccgatcgtccaaccgagatacgagtcatcccgaccgatcgagatacgagtcaccccaactgattgaccgagatacgagtcatccgactaactgactgagatataagagtcaccccgacataccaaccgagatacaagtcgtctgaccgaccgaccgactgagatacgaataatcctgaccgacattgagatacgagtcaccctaatcgaccgattaagatacgagtcatctgatcgtccgactgagatatgagagtcaccctgacctactaaccaagatacaagtcatccgactaatcgaccaagatacgagtcatcccgactaaccaattgagatacaagtcaccctgaccgacagactgacaaagatgcaagtcattcaaccgaccgaccaagatacgagtcatcccaaccgacctattgagataggagtcaccgtgaccgaccgatcgagatacgagttgtaataccctagaattaagaaatagattagcaaaatcctaattagataattatgaataattgaggaattatattattatataattatataattcagtatatgtgaattaatatgatttataacatggtaagaccccgtcggtgagccaggggcaatttagttattatgactcgagaagggtaaa

SEQ ID NO: 222515 - DNA, 936 bp, Cannabis indica
gattcccaagtatctaaaaggaagatcatttcttacaaacccgaaagcacccacaattcgttacacctcctgttctttcattccacagcaatacaaagccaatttcaaatcattagaaaataaaccaaatgaatttgaaaacagtttaagaccttgcaaaagatagtaaatagatttaaggtctccatgacaaaatagtaatacatcatccgcaaaacatagatgattaattttcatttctgtagatttatcatggaacttaaaatatattttcctcctcaccttagctagaatttgagatagatattccatgcataaaacaaaaattaagggggacatagggtctccttggccaagtctcctcttagcttcaaagaaaccatgtaaagtttcatgaaaaagcaagataaacttaggagttcgaacgcataccatcattagttgaatgaattttgaaggaaaattcaaggcagccagtatttcttcctcgaagttccattctagaaaatcatatgccttcctcatatccaacttaatcgtacaatttagtcttgcatttttcctaccataatgtttaactaaatcttggcagatcattatattataggctataaatcttccttgaatgaatccactctaattttgagcaacaatctctggtagcacctctcttaatctcatacagatcatttttgttgccaacttatatatgaaattacacaggctattggttgaaaattgttgacatcttttggacacttcattttagggataagagttaaggtcgtgaaattcaattctttctgcaatttacccaaataaagaaaagaaagcactgcctagtaacatcttcttcaaccaaatcccaataatcttgaaaaaaaaaagtaactacaaaaaccatcaggccccagtgatttacaaccagggattcta

SEQ ID NO: 222516 - DNA, 1009 bp, Cannabis indica
taaataaattaaatgataattttgattgtcaattaattataattattaaatagataaaattgacatttataacgttagaattaaaatatagtatttgtgaaaagaaagataagttttaataaaatggtaaaattaaaactcattaggcccatatgatatgagaattcaacaaacatgataaagctatttttatcatttttttcattttaattctaaacataaccctaaagttatcatataaataaaatatgatagctcttattttcataacattatttgactgaaacacttgcatatcatacttggtacttaataccaaaagatagtaaggtcatccactgaaaatgggtgtacaaatagaaggaaggcattttgggagtacaagaggcacggtataaaagaagggttggtcaagggttctctaaaacggaaggggttgactacagtgaggtattttctccagttgttaagcacaaatcgatttaaattctgttggcacttgcagcgtgccaaaatcttgagctagaatagttagatgtcaaaaatgccttctggtaagaatgctaatgaaacaatgtgaagtatttgaggagtttggaaaggaacacatggtgtgcttgttaagaaagtctatgtacggtgaatatgagattggatgattatatgaccaagataggtttgaagataagtaggtttgatctctgcatatatttgagagaaaggaatagagatgcattgtatgtgttgttgtatgtagatgacattcgaattgctagcaagagtatgcaagagatcaaacacttgaaacttcaggtgaagaaggagtttgaaatgaaggatttgggtccatcaagtataatcgtaggcatgtacataagagggaaaggggaaagaggctactatacttgaataagaagagctacttcaaaaagatactagatacctttgaaatgagtaactcaaaggcagtaagaacactacttgtgcaacacttcaaactgagtgttac

SEQ ID NO: 222517 - DNA, 1325 bp, Cannabis indica
agttcttgaagatcttgaatcagctcagagaagaagttcttagctaatgggaaacgcgaagtttgacctggaaaagtttacaggcaagaatgattttgggttatggagagtcaagatgcaagctttgttagttcagcaaggactgcaagatgctttgctaggagaatctaaactccctgcaactatgtctgagaaggagaaaacagagattcttaaaaaagcacacaatgcgattattcttagtctaggtgatcgagttctcagggaagtgtccaaggaaacaatagcagttggattctggctcaagctagaaaacctctacatgttaaatctctagcaaaccggttattcttgaaacaaaagttgtattcttttttaatgttaccagggaaaagtgttgaagatactttggatgatttcaacaagatcgttcttgatttggagaatataggaatccagatcgaggatgaagaccagaccatcattgttttgaattcgctgccttcaaaacagtatgagcattttgtcgacaccatgatgtatggtaacaattctttgacattagaagaagtggtcactgctttaatgtcaaaagaaatctagaggaaatttgagaatttagaagaaaattttggggatggcttactggtttgaggaaaattccaaaagaaggggaacaaggcacaaaatagtccaagcaaaaggaaggcaaactcaaagactaagagaaggtgttatgtctgcaacaagccatcgcatctgaggaaagattgtccaattctcaagaattataacttgaaggaagatggagatgctggtgtggtcccagatggtgatgatagtgcaagtgttcttgtgatcaccaagaacaacagggataaggtatggataattgactctggatgttcttttcacatttgccctgaaaagagtcaattttcaagttatcaatccagaaatgatggcactgtcaagttaggtgataatcattcttgctccatacaaggaattggaacaattaagttgtaaattgataatggaaacatgctggaactaaaacaagtcagacatgttccacttggacatataagtcatggtggtctgaaagttttgagtaagaaaggggtatttggcaaagatcagatcaaagaactagatttatgtgaacaatgcattgtgggaaaggctaccaaagcaaagtttggagttggaaaacataaaaccaggagcattgtggactatcttcactcaggtctttgggggccatcaagaaccatatccagaggaggagcaaggtatttattgacctttattgaagatttttc

SEQ ID NO: 222518 - DNA, 3910 bp, Cannabis indica
atatatataatactagcattgaaattaagtaattaataacttttagatacatgtacattacattttgtgaatattacaaattcagatatagctcaaataattgataaacacataatattaaagctatcacacaaagtacttaatcatggtaaatgcatgcagcatttaatatgcattaattaaattttaactagaatatatctaagtgattactaagacattctgaatgataggccagaattactcaatttttctgcaactatttgattcacacgctctgccatagatggagtaagatgattaatccaatcaccaatttgaccttttctaaagaaaagtttattgtgcaacttaggcttaaattcaccgtgtttattcacatccaaattcttcaatttgtttaagctacacatatccattatttgctcaacaactccctcactctcttcctcttgggaaaaaggaagacctatgaactccgcaacccttttaagttgacaaacactcttctcttttaagtcttcgtattttaaaaacaacactttctcaggtctctccaagcttgctttccaaaaccctaaaacatggtcccaataactcccgaattcagtctctcccttacaaaacttgtccacaaaatattcaatagtccactcgtccgagagacggtcgggatgaccacttgcataataccataaagacacgattacatcaagagggtttcgactgatgtaaataattcgagacttagaaactttcaaaatagaatcaggaagagatgcataaggaatgtgtgtggacaccaaacgaggacttggcatagtagtgaggttgtggacattttcaggataattggcataaatttggaactcgaaaaaggaaacgaggtggtgaggggacagtggtgagtagcggattattgttgttatagtttcggcggttgagaatggaaaacagaagggatttaagccaagtcgtgcctgatttaggaaaagaagtcataattatatcgtcgtctttgggtataaaatttttttggaaggtcaagacattgggaaggacatggaatgggaaccaacaattttggtataaattaaaccatctttctccaaccattcgatttaggcagatcggaaataactatttctagtattgatccacctctgtcatcgtcgttgttgttctcatcatcatcatcatcgacattttggccacaagaaaaatgttgtgatgccatgttttagcgtaactggatagacagtttaattaagtacaatattaatcatgagtagttaattctaatagtaataatacacattataaaatctgaaagacaaagagatcaaataatgatataccttggaaaacgattagagatattaatcgatgtgtataaaagctttggcaatttacaaactttggttatgatcatttattttttttttttgttaaatatacaatagctagcatatatatatatatacaaaccttacatcacatgttatcactttacaataaaatatgaaatttgtagccattcattgagaaaatatatgatacggaatattgtatattattattgtgtgttaggtgaagaaatatacctaacgtagtgtgtgtatcaattacatagtaattaatattccttggatgtattattacaacttcatattataattttttaattaatttttacctttgaaattaaatatcacagtactcgttatagttataataatattcttgtaattttttttaaaaattctaaatagtttataataccgaaaatagaattcttgatattctaattactatgcgtgtatttaaaaattttaaacctatttttgacattgtaaactatttaaatttttttaaaatttacaggaatgatgttataagcataacgaacaccactgccgtgaaaaaaaatattaaacaaaaatattcctgcatctatttttaggtataaaattgacagtttcactcttaaataaaatatagtataaataaatgtaaagtgggtaaattgatatccactaatattgagaaaatccaaggattatattatttattaatattcgtgcgttaggtacagaattaaaatacataggaggatgaatatcatgagtacttaaaaaattattttatatgaccatataatatatattgttttgaatgagtggaaataaataataaataaggttattgatggaagtactacttaaattatgctatttaattgttttggtaattatattagttttttgaaattttatttatataagtagctaaatattttaaagataaaatacattgaattaatggtaaaatgataatttagtccttactcgatgtagctagaccatctatagaggatcctttattgtttaaattcaaataatagataacttataatgtatctattcttggtaaatagaacattctatgtaaccaagaatgcaattccaaatctatagtggagttaggaaaaattaataagataaagaatttactaagtaaattctaaaactgcttattgatagtttgattatataggcccggttctcacactacctgagatgatgttgttttgtagactgaattaattagtttaactaatcaattataattttaagtaaaattatgtcttatttatgtgttttattaaacaagggcgaatttgagaagaaaaagaaaacttagagtatattttttaattaagagactttagaagtctaattaataaataagttatatagtaattttatttgataattaattataattattaaattgataaaattaacatttaaacagttagaatgaaaaaaatgatatttttaagaaaataaattttaataaaatgacaaaattgaaactcataggtttctctataagatttcggctataggttttaattaagctattctttttatcttctttaatccattttaattctaaacctaaccctaaagttacaatataaatataacatgatagctagaacaactgtgactctccttttatcaaacaaagataaattaagagctattatatatattttatacagatatataactcgaaattctttcattattctttattaaatttcttgtattaattagagtatttgtccacacatttcaaggtaatactcaggttagtgtagaagactctgtaatgttttacaacttgaaaagagaatccatgttcaattcttgatcatactctctccagcagaagggatcaatggatgaattagagaaataaactaattaaagaagtcaattaattaattaattctactataactaatgtaaggatttcttgatcccttatgtgtttattttattgttttaagattttcatatattaggatgttagtttagtattaatttaacatacttgaatagtaaataaatcttgcttaaataattttcaacaactagtatcaaaaccatgtcaatcatttataattcatgtaatatggaattgaaacgattttgtatgtttttatgtgagatttggatgattcatgattgatttatatattttgatgaatgtatgtgataataattttattttggttctaaaattattttagaatgatagttggttaaaaattatgcaatttagaattttacaaaactcaatttcttagatcaaaatttttcttagtattgtcgacagttttccagtgtagagaaaaactttttacgaagtttttccattgacgcctattttacctaattttatgacagtagaatactaagatcgacgggaaaattatacccgactgtcaaaaacagtcaagaaattctaattttctagtagtgaaagaaagccctacaaaactcttttaatttgatcaatagtgtcctttagtgctacaaaaaactgctacttttag

SEQ ID NO: 222519 - DNA, 3475 bp, Cannabis indica
tgttacttttatgttgttttcttgttgattttatgctgttttcgtgttattttttgaaaaaccgtaaaaatataaaaaaacattctttgaacgtgaaaatgtaaatattttacaaaaaatagtgccttacgtaattattttattattggccttttggtccaatccaaattcaaaatatataaaaatgttgaacactttttaatgaatatgggtactaaaataaatcaactataaatatttgaatattaaattttaatctaatgacaaataataataaaaaaatttgagtatgtatacttaatttaactatttaattaaaatgaatataaaaaaatatatctttttcatttcaatgatgaaaatgagatgttgatagtatttaatgcaatctaaatctgcagttctacttactaccgaattcaattaaagcctctctctgtctctctatctcatttcaccattattgtttgtgagagatttgttcatcttttgacatgggaggtgttgaagaacttcaactcagcatcattagaggtaagtcttcttccttttaacttttaactaattaagttacctcttttcaagaaaactaaatgaaatggttactagtaaccaattttttggtactaaaagaactcaattgaataattcttttcataaataccatttatatatatatgctaattatgtatctaatgcgttatcttcagcaaatgaatcaagcaacaaccagccaataacttgttcttctcatcaacacagaaaacttacaatttcgattcgaatcggaatctattcattctttgttctttgtggacaagcaatagcaaccttattaggaagattgtattatgaaaaaggtggaaagagtaaatggatggctacacttgttcaattagtaggatttcctatttttcttccttactatttcataccaaacaaaaatcataagttactagttaccaaaaccaaaacaaataagttactagttaccacaatttactttgttcttggcctactcatagcagcaaattgttacctttactcagttggacttatgtaccttcaagtatcaacttactcaatcatattatcatctcaattagctttcaatgctttcttctcattctttctcaactcacaaaaattcactccttacataataaactccctagtacttctcaccatctcctctcttttgctagttttcgaacccgaatcacaagactcttcttcttcttcttctaaaatctcaaaagggaagtatgcaattgggtttatttgcacattgggtgcctcagcagggtctggtttgaacctaaacttaactcaatttttcatgaaaaaagttcttaaaaatgagagcttttcagttatcattgatgttatagtgtttcaatcacttgtggcaactattgtaacacttgtgggactttttgcaagtagtgagtggtcaactttgagggaagaaatgaatgagtttcaacttgggaaagtttcatatgtcatgacattattatggatcactataacatggcaagtttacttcattggagtagtgggtttagtactagaagtctcttcactcttttctaatgtcataagtattttgggttcacctattgtcccaattatggctgtatttttcttccatgaaaatatggatggggtcaaggctatggctatggttttggctatttggggttttgtttcttatgcttatcaaaactatcttgacaattgtagttccaataatgataatccaataaggaatggtcaaaccaatgttacatgctaatatctatattagtgtgcctattcaagtttaaaatagtttgttttgttcaaattttgggagtaattagacattttgtttttagttactatattctaattttgtatatttttagctaagcaattaattaacttgtttggttttagttaacttgtttatacttttttatctgttcatttgacttgtaaacaaagtttgtgtaattattttattgtgtgaaagataaaaattgtttattggattgtatatatgtatatttatatactatattttttaaattttagttttggttacatttaaaatataatacattttttttaaagaaaatataatccatggctttctttctcctacaatcctactgctttagcccttgcaagttgcaatggctctgttgcttccttcaattaatgctcagagttctgctgcatcgctagctccgactcctatcactacaaaaaacagttacttttagtgacaattttttagtcacaacataatttttttatgactaaatgtaatttttagtcacaacaaaaaattagttgtaactaaaatatagtatttaaatacaagttgtcactaatttacttttagtcacaacaagatgtgactaaaaatacatttagtcacaataaattgtgattaatttgtgactaatatctttttctatggacattttaattacaacataagaatgatacgttataattagtcacaatttttttacttttaatcacaaattttgttgtgactaaaaataaatttttttattctctctcaagtcttttctttttaattaaagatgtatatttgtttggcaatatagctcttttctctttttccttttttggttaggaaaagttctaatgtgttttgctcacctatatcattcactgacttttcttctcatttttcttgagagaaagttataggattgagaagcatttgttaaaatacaattaaaataactttaattatatgagttctaacttaaaatttaattacacataatttagagtagtttagttgaattgatgaattttattaattagaacaactaaataatgatagactagtttaggtacgttttataaagtgctttaaaagttgttttaattaattatgttcattttgtgtaaaattacacttattttctacttgtttcatgtctaaatggtaaaatttataatattaaaatgagaaaaaaaatattttaaatgagatgaatatgatgaatttatcatagaatttgaagttttaagatataactgtgtaaaaaattttaaattttagatgttcaacatgctctgtgtgttatcgaaattcgaaaattaagtttgaagcttcaagctaatttttgactatgatgtgttcacttttaggaaaatattgtaaataaaagttttagatctctctttcactttctaaaacatcttaaatagtccaatttcgagtaatattaaaagagatggccaaaacattatcagtcgtcgcaccaggaagctcgcttcccgaaaacctccttcaagagtcgcggcatggagggccaatgtcccgaccccctatgttcttaaaccctaatttcgagattaaaggggtatctatgtaactcttgagaacaacactttgagagacgaaaattagaggcagaaggcggctctggagattttcaacatt

SEQ ID NO: 222520 - DNA, 1400 bp, Cannabis indica
taagtttttcttacaagaatcaaaagtacaaatgtactactaataacaaaaatattagtattactttattttattttattattttttatttgttggggtccacaaaaatttaaataaggcatgtggagatgaggtgtttaattgggccaacctggttttacctgacgcagcatgaaacaggcaaaaggcccacctcgagtccaccctgtgatgggccccactctcaaccgagtgatgcttgacacgtgtcccaatgaatgggccccgttacagttcgtgggtgggggcccactcaacaccatggaggcccggttagtctgtgccaattttagtacctttctcttctttctctgctgcctcttacctttacccacgcacctgtttaaacctgccaccctcagtttttctagataatagaaattttttaaataataataattcattgtgttttttttgagataaaaataattaattgttaagttttcagcaaaataataaaaaataatacgcctatcacaaattcttttgtattatgcttgaaattttttaaaaatttattagaggcccattaatattattataaaattaaataatttttacaccacatactaaaatttttaataattttattttttttaatgtaaggtggaatttttttaaaaaaatactgtgtaagttttatactgtatactgtgttaagttttcacggttattttttagttgttccactattgttttaattattctgttttattgttttgaggttattttataaaaagaaagtaattttataaaaaattttgtatgacagtaaaattataaacttttaccaaaaattcagtatttttataaaaattcataagaataattattatttttgtccttgaaactttttacactataaagtcgtgtctctataatataaggttcattaataatattaattgaaatataatttttacagtatcgtagtctttcttttatcatattctatttaattttatcgtaaaataaataacgtggtaaataataattaataaatagatgccaattaaacattaaaaaatataaatataaattattattataaaaaagaaaaactcttttattttatttcattaacgtaaaaaaaaaaagtaaaaatatttaatttgtatctatttatcaacaaccattactttacatatttcataataaaattaaataaaatgtaatggaagaattaccttactgtaaaaaaatatattttaatggatattattaacaaactatatactctaatttggtagtataaaaagtttggaaaattctacaatgcacccccttaaaatggatatattgatgcacccctactctgttttagtcatctgaaataatttttagttcaaattttttctcat

SEQ ID NO: 222521 - DNA, 1311 bp, Cannabis indica
aaaacagcagcacagcatggaccacgaacagttgataggtgcataaattcagcaaatgttttccaagtaagatgattcaaaacccgcaacatctggtcataactaccaactgctagaaattggccacatggagaccaggacacagtttttacgcctaatccactttcgtatgcttgatacttatgaaggcacctcccatctggggaatatattaagacctgtatgaaataattcaaaacaatgtcatatatttgctttgacagctttggcagagaatagctagcaaacacctaaacacgcatatagttaagctagtggctatctctttgccataagagaagaaagatagggggatggagaaaatagtagggtcaccttatattcaagaggtgaatcccaaatcacaattgcactatcatctggtgaccattcaatatcagccaaatccagtgtgtcaacagcaaatacacccattatctcccatgtatggcaagataaaagattaatgtagtccttgcaatcacgcctcgtgcaaactgcaacatattttccatctttagtgaaagaaacaccttttgatgcgtgctttggcccttgcacgtgtacacatgcagtgttcagcaacgaccaaactattaaacgcaattgaaattctgatgtagtaagtatatgacgactgtctggactccatcgagcatacgcaatgccagcatgaccctcatcaatcttacatgtccattcaggttgggtcaatgaccatgcctgtatcattggtcttttataaagaccacaaagaatgtattcagaatcaagggcccattcaatatagctaatcttgtccaagcatgaaaataactgcacaacctgcattggaggatacaaaacaggttcaccttggaagtgcacataattgaatttattgaacacaccagtaaatccgatttcatcagataaaatcaaaaagcataaaacacacagaaattaggacatttgtgaccatcaagagcgtactctcgaatactcttaatccaatccacaaatttgcgtagagctatatatcagcattgcaagcaatccacttaaaaccaattggtgttaagtggagttaccctttccttaataaaggtattgtgtttctaatatatgtttttcatgtgggactgttttaacatctaatacttagcttccttgaaaatttttctttactccatatacatgcatggagtccaaattcactactcagtgtcctatttcatttacacacttctaaagacaacaactcaccataatgaccaatatcaaaacaatcaa

SEQ ID NO: 222522 - DNA, 2416 bp, Cannabis indica
ggaatatataatatgaactttatcggtgttatatataatgatctagtacattttcttatggaataaccaaattatattacataaaagattagactagagctttgtttatcagtttttttttttaatttatatattattaatttcaatcacacatattattaatccaattaaaaatgggaaaactcaattatagggttaaaggcttggtaacttgtttattagtttggctatagctgtaaaggcttttccaagaatttttgccacaaactaattaacattcgatatatgtaagttatttaactaccttctcctactatcattgctacttacattatttttaagtctatcgctaataacattacttaactgagataattaaatcctggtgaattctatcaattacaatttttataatattatattttaatatatatatatttatatataacaggcaagatataacacgagtctcctctatcagcaaggtaaagccctgagtactataataaaccaggttcccagggtttccgaacaacaataccaaacccccaattcagttgagaagagacaacatcatgcatttaatttacattatcccataataagtggacaagtccaatcaatttttcgacccaaaaaaacaaaagagattatccaacacaggcaaaaagtggatttttcaaaaaaaaaaaaatatattttttattattctaaatatatagtccaaattaagcagagaaattcttcaaagtcagcaaacgttaatgttgatggtgccttatttgagcatgaaggcgggtttggggttggttgcgtggttgtgactgccatggtcatgtggtggaagctttcaatcggggtctaatggggcgggttcaacctgaaattgctgagatggttggcataaaagaaacattaagttggatcaaccgtcactcatggggacaagtgattttggaatcagatagcttggtctgcatacaagctatacaaaaacaaaatctctatcatcttcgtttggtcttttagtgcatgatgttcatgttctacttttatttttaaacaatattgagttgtgttttgtcaaacgatctgcaaataagctggctagctcactacttagtcagtgattcttgtttctctccaggtcgtgtgcttcagttgaaagattgttcttctgaagcacgttctattattattaacgatttgattagttaataaagctactgaattttattttaaaaaaaaaaagataaaaaaaatgtgaagatgagaagttgatcatatactacttgattgataatatttttcctgcattgtttctaagtgaaaaattcattttcaaaatttgtttgtttcactagtctttaaatagtatagggtgaattgttataaatatatggatataacaacttgtaaccatttttattcagtttgtaaatattttatttataaaataatttttttgattattttaattgtcaaaataatttttttgaattgatttattattttcctaaataatttcggttatatattgatggttgtgtttttttattcactacaaataaaattatttttagtgacaattttttaataacaaaataaaatttttgtgattaaatgtgatttttagtcacaacaaaatgttacttgtgactaaaacataaattataaaaaattataaagtgatgtatacactacactatctcttcacaatattcatgtaagaataccaagttttacataaaaaaaaaaatgaataggaactattaataaaattagttggataaatatggtaatttgaattattaaagtagatatttattactcaatttagcaagctaattataaacactacctattggttccacatggtatattaattataatatttattcatctataccacatggtgtaataattattaaacaaattgtatagaactatatatgtagtatccaagattgaaaagtacaaaaaatcaaacttatttcttaatttgacactcgaaaagaatgcctggcttaatatatgtagtagtataccctgttgtaacagctatatactataatgacaattattaactaattaaccaataattaataaaagaaaatattactttaattttactgtcgtctagtacagcacatgtcttggttttcgcatgagtacatgactgttattaaggtcatgttcaagatgcaaaatatactttataccacagaattaattatgtgacttccatgtttcttccttctcatttgtttgccaaactaatttataaagaaaaaataaatagattatattttcttttttgtttcatcaaaagaatcatatatattcaatgaattctttagtacctctaatataataactttatgtttaattcttttgaaaaaaaaaactaaaaaaa

SEQ ID NO: 222523 - DNA, 2344 bp, Cannabis indica
cacgtggcgtccctatagattagggcgttacaagatgactttttgtattgagattggattggttgtgatagtattgtattaagtaggcgaaactcttgcatgttttaatttttatacacttaacctatttatttattttttgtggcaaaactcctttaagtttatttttctttacaaatttgagaggccagttaaatattacctaactggatgactactgtatacacctatgtatatgtaacagtaaagcctcgaaatcgatacaatagtaatctagttagtatttaacggtaatatttaactgacaccttaaatttgtgaagaaaagtaaacttaaacgagttttgctaaagaaaaagataaaaaagtcaaagtgtttaaaaattaaaagataagggattaataaaataaaggctaattaacaatttttccccccgaactttaacatgtactaaatcatgccccctgaactttttttgccgttaaaaattccccatgaactattaagattattaaatttaaggacttttatctaattttagtaaaaaaattctaacttggatgaaagttcagggggcatgatttaaaacatataaaagtttgagacgcatgatttggtagatatcaaagtttgggaagcatgatttagtacatgaaacagtaaaattgaatgaaattagacaaaagtccttaaatttaacaatctcaatagttcaaggggaatttttaacggcaaaaaagttcagaaggcatgatttggtatatgtcaaagttcggtagaaaaattgctaattagcctaaaataaactgcttccagcgtgtcgttttcaaaactatatcgtcgtttgtaggataactacaagctcattgatgatggagatgttttccgaaggtcggaaaccaagttcgtcaacgacaaataatataaaatataatttgattttcttcgttgctaagcaaattttcccaattattattatagttgatcctctcatctcccttctcgttcatcacaagcttacacccacgtaataccattgccaaaaaccatggatgaacctctgctatcaggtaatatatagttctgtaatggtggaattcagtttgttccattgtgtaaacaacttttctttgatgggttttttttctttgttgatgaaatgtgatcgattgtcgaagatcgaaggagtgaattgggagagaaagagagtgataaatggagctcgtaccaatacgtcggtagagctggttctgtgattcccacagcttctttgcccggaactgaagtaagtgtcgaggaaattcgctccgccgcggctgtttccgatgcttacccgccttccattcatgcccctttggttggttcgccaccaccgtatcatcatggtatggtgtttttgagttttttctgatttgggttttcaattttagttgttgagtgtctctattgcatgatggtgtcttatagttaaatgggataagaacttatttgggttctgttaaatcttttggttttccaccaatttataatggaatggagcttttttcttacctgggttttcaaattcagctgctgatgtgtctgtgtgtttgatatatatggtgttttgtgatgataaagtgagaaacttacatatacatttatgatagttcagtgggatatttgtttattttggttctgttaatcctctatctatgtccatattcgtgtactttttgaaatttgttgttatagagataacttttccaatttgattctgtataagttccaacagggacatgttcataacttctgaattattgatccttatgttttatgttacatttaaatcaatattaaattaagagtcacttgttgcagaccaagctattgtctatcaaggtggatatgggggaaattatggtggtacgacaaatgaactccacaggtaatccgaccaatcaaataaacaaaataaaattgtgagaaaaaataatttaatcaaaaataattatgtgattatgtgtcaatacacaaagtacttcttttataaaaagagcacctttatttggacctgatctggtttggagctgcttcctttcttagtgagctatttgctttaatatctagattctatcttagctctaaagcctctaatggttctctagtattcctttggaagaatttaggtacattctccccatttattttactctttttctccttttggtttcatttgccaaggccagtcagcaagattagaagaaatacaaatttagctataaactaatataattatggagattagataaagttagaaaagtgtatgttccattaatcattatgatggagcaagacctcaag

SEQ ID NO: 222524 - DNA, 1230 bp, Cannabis indica
tataaaaatacagtatttttgaattttttttcgtgtgacagtatgtttgtaaaaattaacccaaattttaatatttttgtaagtttccctttagaaaagctcattaaaactctttaaaaaagcctaatgaaattctttaaaaaaaggcccaaaacaacttaattaggagaggtgtaagcctcacacaccttagaggcttaagtctcaagcaagaccggtcctaataggagagggctttaaaaagaaataaaattttgagccctttttatatttatttaatttttttttatttgggcctctaataggagtgggctttaggtgcgggcctagcccgccttagcctagggtcgaccctggtctcaaggcgtacgcctcacaaaactaaggcgtaagcctcatggacagtgtgactgaagctaagccttagaggcgccttttgaatgcctcgttctgagacgcacctcgagaggtacgcctttcaaagcattgagagggatatatatggtcaagtgtatgagtgtttaattagttgattccaatctaccattcatgcataatcataaacacaatttgtaaggtgtaattatatctcatcattcatttaaaaaatgagcttataaacatatgaaaacaaaaccaaaattaagctcttaataaattataattaattaccaggcagcctagttctcattaatccataatgagcatatggaacatgtgcagggtccataagattctcaaccatcacttcatatctgaaaaatgtacacaaagtgacataatatataaactagaaaatgtaacataattattaaatctttacttacccataatgaaattctctaattaatattgattgagaaaatgatggatcattcatttctgcaatgtaaggtggtttttgctttgtaataatatttttatattttgggatctgtgtttggccaaaaccatacaatgccattttgtacagtgcttgggtaaacagaaacacatgctttcttagaagtgtgaacctgcattatgattaataattcaaaagtcagtatttatgaatcaaattaaagtaggccctaaactaaaagtaccattttatatataaaattttataaaaataccatattttgtgttaagctcaaaaaatttcagaaccattaacaatgagctcaaattaaaatcacacataggtagtaaaaactttacttcagtattagattataatttgttcaa

SEQ ID NO: 222525 - DNA, 1483 bp, Cannabis indica
actcattaattgccgcaccttgcattgttcaagagctgggtgataagaggtaacaaaagggttgatgtcatcagctaaccatgggagattcatcacctcaatatctcccattcccactctgatttttgcaccagcaagtattaaactctgagattcatgtatgcttcgccatatgtaactcgggttggcaccaagggaagtatttaacattgagccatgaggatagtaacgagccttaacactcgaatgaccagagtatcaaccccctgtagcagccgccatgcttgtttcccaagaagtgacaagttgtaatcacgaaggttgcgaaactcaaggcctccaatgctcttgtgacgactcaatcggctccacttcatccatgttataccacgtgactgtcgggaagaattaccccaccaaaacttggacatcaacttttcaagcaaagtacatgtttcaactggtaagaggaacaccgacatagcataagatggaatggcttgtgctaccgtttttattaggatctcacgcccagctttagataagaatctaccttcccaactcaagatccgtttttccattttttcctgaaggaaactatgaatagctttcttacttcttcccagtatacaaggcaaacccaagtaaaaactattatcgctagcaggcaccatccccagtctagtacaaagtctatctcgaagatcgaaaggagtgttagcactaaagaagatggatgattttgcacgattaacttgttgtcccgaagctacctcaaacatgtgtaatatacgaagtacattatcagcctcattctcagttgctcgacaataaacgtaactatcgtcatcaaaaagcatatgagatattgttggcgcaccattagcaaccttacagcctcgaatatgaccacttctttcagccctccttagcaaagatgaaaagccctccgcacaaatgagaaacagatagggggatagagaatccccttgccgaatgcccctactcggaatgataggaccaatttcatgacccccatgtactatcttatacttcaccgtagagaccgtgtgaaatatcaactcaatgaaccggttatgaaaacccattttgctcatcatagccatcaagaaaccccacttaatacgatcgtaggctttactaagatcgagtttcaaagccatatagccagtctgccccttacgctttcttttgaagtagtgcattacttcataggaaaccataatgttatcagagattagtcggccaggaatgaacgctgattgattctcagagattatatgtggaagcactgttttcaacctattagccaagacttttgatataattttatagaagacattgcataagaatattggcctcaagtctcccatactactaacattctcttttttaggaataagataatattagtattattgacattgtcgggtagcacgcctgaatcaaagaagtttctcac

SEQ ID NO: 222526 - DNA, 1074 bp, Cannabis indica
agcctgtgccacatcagtccagggacattacggaagccatcaatttctgaatacgcttgtaacatcccataagattgaaagtcgttggctttctagtccatttcccatatgggctcaagatggacctgcactggtgaaggaatttccccctttcacctctcttgctatccgcaaagaggtctagttcagtgatgggttgactttttgggatggtttctaaggccttcatgggctaagaagttgctactaaggcttcaatttaattttgttctgcggaaaacccttcagcattttgaataggttctccctcgacgaaaatggatgtgcttgtgagggggtcttcgttcaaatccatgaaggaaaaagcgaattctttgaaacaatgaattgatttgaagacgagttttctctctcacacacactatcttgcgacgcggcacaagtacagttctagccctaacctaagcaagaaccttttttaccctaaatgtgaaatgccaagaaactcagacagggggttagtgcacttacttgaaaaatcagtggggatagttggtgtatccaaaaaaaatttccttaaagattcgaagctaatcgatgcagcgatcgcagttaacctgaaaatcaaatgttccccctaaataagaactttgctagttcagttgaagaggagtaatgtctgggaagagttccatggaaatgacgagtaaacgttagatcaaatccttcaatgcctcttgcatggaaaatatgacaagaaaagggaaaaggaagttgcagagaaaatatgaagttttatgtaaaaagaataaaaaatgacactgccatagacaatttttattttaaaaaggagacagggctaagagagatccacggttcaaagtggttacagtgaatccaatggctagggagatgagaggtcccatgtgattggcctaggacccacaaaaatgacaaggtcattttcgccacatcactcaacccccagttgtactcctccttccttgccaagcacgccttgcgtctttaccacgtgaagggaagtaaatgacataaatactctcagaagaatac

SEQ ID NO: 222527 - DNA, 14191 bp, Cannabis indica
tttcagtagaagggcaaaggagaaatctccaaacagaatatgttctaaaggtgggttcttttgtagtttaggtaatgaagtagttgaaggaaggtttttaagtttccatccatcctcacatgtacactgcaatactttttgttcttcctcttagatccttggactggatacctgcagtgatgtaatggttggtgatgcattgaagagaggcatttcgggtggtcagaagaaaagactaacaacaggtggtgaaccttagatgtgcaatactggctatcttggaagaaaagaaatgatacaaagtactaaaatttgttagttttttcatgtggcaggggagatgattgttggtccaacaaaaactttatttatggatgaaatatcgaccgggttggacagttccacaacctttcagatagttgcctgtttacagcattttgtgcacataacagatgctactatattagtttcactacttcaaccagcaccagaaacctttgaactatttgatgatgttatattaatggctgagggaaagatagtttatcatggtcctcgtactagtgtactcgagttctttgaaaactgcggtttcaagtgcccaacaagaaagggtgcagcagatttccttcaagaggttcaaaaacatgcttttatactattcatgtcatggttttatattactatactcttttgtctaaaactactccattctttactgtctttaggtaatctccaaaaaggatcaaattcaatattggtaccacacagaccgtccttacaattatgtctctgtggatcagttttctcaaatgtttagaaggagtcatgttggaaagaatttatatgatgagctatcaaaaccatatgaaaaatctcaaagccacaaaaacgccttatcttttaaaacttactcagtgagaaagtgggagctattaaaagcttgtacagccagagagcttcttctcatgaaacgaaactcctttgtttatatattcaaaacagctcaggttattagctttttaatctctgaactgaaaagagtagctttttttacactatgaattaatgacacctcattcagttcttcttcctctttctttctttctttctttcttttttttctttctcacagcttatcatcacagcattcatgacaatgacagtattcatacgtactgaaatggatgttgatttggagagtgcaaattatctaatggggtcattatattatgcacttgtgaggctcctgactaatggagtggcagagctggccttgacagtaactaggcttccaatagttgataagcaaaaagcattctatctatatccagcatgggcttattctattccagcctctatattgaaaattccattttcattgatggattctctgttgtggacagcattaacttactatgtcattggatatagccctgaaatagaaaggtaaggaggctagtaaaagagagttggccaaatgtgaaggcttttaacatatgtgttgttgttgtattcatattgtacaatatatttcaggttcttttgtcagttccttgtgctatttgctcttcatatgacatcaacatcactgtgccgttttattgcctgtattttccgaacaactgttgctgcaacaacttgtgcctttttggttgttatattaatgttcatgctaggtggtttcattctgccaagacgtaagtcacttcctagtttgagttactttgattttataggaacaacaacatgagtagtaccaacacaggcttttgtttgttgcagctgatttaccttattttttaaggtggggattctggctttctccaatgacatatggagaaataggcttaacactaaatgaattcttggctccacgctggcagaaggtaatctaacttagacccttgttaactttcaaaagattatgtatgctaatagctcttatcttttttgtagatcaaaataggaaacatgagcattggaaagaatgttctaactaatcatggtctagactttgaggcctatttctattggatatcagtagcagcatttgttttgtttcacaatactttttgatcttggatttgtcttagcattaacttacctgaaacgtgagttaacttcaattgatcttaaacaaactgtaaaacgacacatgacttttattctaactattgaatttttgtaaattcagctcccaagctgtccagagccattgtttcaaagaaaaaaatagtctcaactgcaagcaagaaatggttacaatgatagtacaaaactagataataaatcaaccccagttgagctttcacaaaccatatcagaaacaagaaaggacggtgagaaagtgtagttaaaaattcttgtaccaatataagcacattgaataatttgtaactgattcaagaatactcgatggtgattaattatacaggtaagctggccataccattcgagcaactgacaatctcatttcagaatgtgcattattatgttgatacccctgcggtaattcatcatttttcttagattcaataacatgtatagtcatagcacttgtatgtttaacatgtatgttccttgtggataggaaatgatggagagtggtttcactgagaaaaggcttgagttgcttcaagacataacaggagcattcaggccgggggttcttacagctttgatgggtgtcagtggggctgggaaaaccactcttatggatgttctttcaggaaggaaaactggtggtacaattgaaggggatattcgaatatccggttaccccaaggtccagaagacctttgcaagaatttcaggctactgtgagcagactgatatccattctcctaatgtcacagtggaagaatcagtgatgtactcggcttggttgcggttgccacctgatactgatgcacaaacaagatatgtgtgtgacattctcttatttgcaaataaattactcaattcttcatagactttcttacagataaaccagatttaacattgaattgctttcttttacataaattttataggctggctaaattcagtgatttctttagtaaggacagttagtaataataacaggctctatcttataatcatgtagaggtttgtggaagaggttattgaaacaattgagctgaatgatataagagattgtatagttggtattcctggacaaagtggcctatcaactgagcaaaggaaaaggctaacaatcgcggttgagcttgtttctaatccatcaataatatttatggatgaacctacctcaggattagatgcaagagcagccgcaatcgtgatgagagctgtgactaatgtagtagccactggaaggactactgtttgcactatccaccaaccaagtattgacatatttgaggcttttgaggaggtaggatgtatagcattttctacctgcatcaaaattttaggcttcatgtgtcgatgaccagtgagaattattaattttcttttgcagttgattttgatgaaaaggggagggcaaatcatttattctggaatgctaggcccacattcaagcaaacttattgaatattttgaggtagatttgcttatggtaccaaaactatacttataatgacacaaagagccctttttccactattaacataataatgttattgttgtggtaaattactgattccagtactgtttaccatgcatagagtattcctggtgtgcctaagattaaggataactataatccagctacatggatgctagaagtttcttctgcttcagttgaagcagaacatggcatagattttgccaccatttacaaggagtcatctttatataggtgagtttcagcctaagctatacatatcttattttttttttgtcagcatacagtacagatatctatttaagtacacttaaatcatcattctctccaaggcaaaaattagcagagtttttaaattcttgttgaatttccagagaaactgtagatttggcaaaacaactgagtgaaccaaagccgggttccacagacctacacttccctactcatttcccacaaaacggctgggtgcagtataaggcttgtctttggaaacaacacttatcctattggagaagtccccaatacaacttggcacgtttcacgttcatgattattgcgtctgtgttgtttgcgataatattttggcaaaaaggaaaagagatgtaagttcccatttaatctcttgaacatattaattctcatgtaaccaaattttgctgttgacaagaagcgcctatggaaacttctaattcctttcattatttcttcaagtaacaatgagcaggatctgtttaacatacttgcatcaatatatatggccgtcatcttcctaggcgtaaacaactgctcaacagtactgccttatgtggcaactgagcgcaatgttttgtaccgggaaagatttgctggaatgtattcaccaaaggcatattcccttgcacaggttcacactcaccaccttaaaaattgattgagttgtggggtatagatagtactttgctcttgtcttactaacaaagcaactctcttgaatgatgtaggtgactatagaaattccttatatattggtacaagcagttttgtatgtgctcattacttatccaacaatagggttccaatggacagttggcaaggtcttttggtacttctatgcaaccttctgtacatttctatactttgtgtatcttggaatgttcatagtttccattagtcataaccttgaaatagcttctgtattatcgagcgccatctatacagtgttgaatcttttctcaggcttcctcatgccaggacctgtaagtaactcttttctaatgactttgatttggtgtagaaatcaattggattaaatctttagacatagttggctgacatagcttcatgattcaccatgtatgcagagaattccaaagtggtgggtgtggtgctactggatttgccccacatcttggtctcttaatggtcttctgacttcacagtatggagatatgaacaataaaattacaatatttggagagctgaaaacagttagttcttttatagaagatttttatggttttcaacaagaccatttagctcttgtggctattgtgctcattgctttcccaattatttttgcatcactcttcacttactgcattgggagactaaattttcagaggaggtaatgtaaaagctacaaggttttgctcctcggaatgtagtgaaaatatacatacaaattttatgatatttctaaataataataataaaatgcttgttacaaatgttgggattgtaccttttagtgtcaatatgatgcttattatatccaaaattaaataaattcactaattattgattattcgagggcattcaagaaattccaaacaaaatcccgaaatcacacctgtctcaagtatggatttagacatgaagaaatatgctgcagatggcatcaaagttatttgataataataactatggtagttgaataaagaagcatgtactattggctttaatttacaaaacaatataatatgaatgccttttaacaacgtcatctcctttgaaagttcaactttccaataaagtaagcgaaaagagaagcaaatagtaagggaaacaaaataagtgcaacagcaacaacccctaaaaagctgtgttgatatccaaagtaatcttctaagaaggcagaaactgttgttctctctccaaatgctgagatttctttctctaaatctccatactgtgaagtaagcatgccatttaatgcccatgaagaagggcataggtaatacagccacagccaccacttgggaatatgctgcaaaaagggaataactcattttctcagttagtttttccaaactcaactttgaaaatataacacttctatactaaatgtttatctccattttaaagtatgttattaagtatggacttccaagtacctagacacctttctatctcttacaatacaagttatacaacaaacatatttttagaagcggtataaagtggagaatgagaagttagcttactggttttggtacaataaaaccggtgaaaaagttcaacattgtgtaggaagatgaagccacaatggcagccagctgaacatttggtgttaatgataccactaacattccaaggtaattgaaagatagcaacgagcagaaaatgctatagaatgaccaaaatatcttatagaaagaataggagtaaccaatcattgggtatgtgattgctacatatatagctgcttgagtaaacagatagggaacctcaataaccacctacaaaaatcaaccaaggttactataaattctaactctatagtcagctgtaaaaatctaacaatttacctaagagttaaagaaaacatttgatattataaaaaaaaaatcttgaacctgtgcaaaagaataggcccatggagaatgcattcctgcaaatttttcccgataaagaacattgcgctcaattgagacaacaggtagaaccattgagcaattgtttatgccaaagaatgttatcgcgcagaacatgctaccaacaatattgaagatgtcttgctggttatttattgtctttccttgcttccagaacaatataccaaacatgatagatgagaaaaacatgaaaactattcgcattaagttgtatgaaggacttctccaataggacaaattttgcttccataagcatgctttgaactgctcccaaccattttgtggaaagcgagtacgaaaatgcaagtctttcgagccaggaactggtgagttcagttgtttgattaattctttgttctgtctgcactcagaagagcaatgaaaaaagtgcaagcacaactttagaaacaaagattcatgagaaataacattgctttctttgtacaccagtaaatagaaacacggataaaatggaatgtgaaaatattatgttccttgtattgcatatgtatacttactcatgcaagatggagcctttatatatttgtgcaaaatctacaccaatttcaacttctgcagattttgaagtaacttctaacatccatgttgctggattatagttgtctttaattgaagggacccctggaatactctagaaacatgaagagattgcatcaacatttatttcttttccagatataaaatttaagcactactactgctcaagtactcaaaaaactgacctcgaagtaatcaataacgttccttgaatgctgtcccagtggaccagaatatattatgcgtcctccagttttcatgagaactaactgcagtgatgataagaaatggatcaaattcatttggtttatgctcagctaacaagaaaacattgatactaataaatacgtgtctgaacttcataagaatcaactggcagcctttaatgtagaaccatttaagaataatgttgtccatcctaatcaatttacagcagctacctcgtcagacaatcaatataaatcatatgattaagctagaaacaagacagcagaaaacaagttcaaactaatcatatgatttaagtggcagcaaacactaaaccaaactgtggagaacagtgatcttggtattactttgggttgtttagtttgaaagaaattcgagaattttttagggtcgtgaaagttcagcagaggaactttgggagaaaataaagttctggacagctacttgggtgtacaagactaagcattttgaggacttatcatttctggatttgagtagagaatggaaaacctttatgtaaggagtatggtgtgtattttgtccatgtttttaagttatctttccctctaagttctatttgtagttaatttctgttgtagtaaattgtgctaaggttcttgtaaccaaggttttccaacgccacaagtgaagctttcaatttataacgagggaaagtcagtgtaagacaagtggcctctttctctttttcaaaaaaaatcatttcatctctatggaaagttacttttacctcatcaaatgcctcaaagatatcaatacttggctggtgtatggtgcaaacaactgttcttccagtttcaacaatattctttactgctctcataacaatagcagctgcccttgcatctagtcctgaagttggttcatccataaatatgatagaaggattggcaacaagttccacagctatagttagtcgcttcctttgctcagttgataatccactaacaccaggcatgcccaccaaactatctttaatcacatcaagttctatagtttcaagcacttctttcacaaattcctgccaaaaacaaactgaagaatcaaactatgtccaagtctaaaaacactgaattaactgtagtgttaatttaatgtgtttcatacagctttagtgttcgaatcaatctgaggtggaagtcgtaaccaggcagaataagccactgattcttccacagtaatgtttggagaatgtatgtcgttttgctcacagtaacctgatatcctagcaaatgtgtcatgaactttaggatacccaccaatccttaattccccttcaattgttccacctgttttccttccacaaagaacatccataagagttgttttcccagctccactgacacccatcagtgctgttagaaaacctggtctaaatgaacctgaaacatcacaaaggagttgcagttttttgccttcatagccccgttgtctcatttcctgaaaccacagtaaataaataaataaacaactacatcaattgatgttcatattgaaatatcagaaataaaaaaaactaagccccggctatatgatttttaccagtggagtttccacataatactgcacatccttaaatgttaatgtcaagggctcaaaaggtaaaaccatccttcctggaaagaaagaaaaaggagattatagtctaaaatatgtaggaaaacatccttgtattggttcaaatcttgaacaatattaacaaaagacaaaaacacacttacctttcttctttagttctaccgtagttgtagaagcaccagaagattcattgtttgtgtctgtaccattgttgtctttctttccttgaagttgtgagtacttttcataagaaatgagagcacgagttctacccagtgctgaaaatgtatcagagcgtttggtcggctatcaagtatggtgacaatacatttatatgctattgctcaaaaagtgacttactaacgaaagagaatgaacttacgcttcatgaacgtcaaagccaacgtaaaaccaacattgaatagtacagtcaaaccaattaaagcaccaattgaaatccaataaaaataactctcgaagtttaagccccggctttctagtgtttggtggccaagagttgtatttccagacacctttcatcaattaaaatttaacaagttatcattatatgtgagccttctagcattcttattgtcttaacgtgtaacacaagtaatgtatttgttaccttttcccatcgaggggcgaggaattcattcacgctaatggcaatctctccatatgttaaaggagaaatccaaaatccccatttcaaccaatcaggcatagaagctgcaaccaaagcactctttaagagacatggcagcagaaaacatgttatgaatacgataataagtgcaagagatcttacaattagggatgatgaagccaccaaataataaaacaaataatatggtgaaactaccggctattgttgatgcaaccgcagttcggaagattgaagcaataaatcggaacatagatattgaagttaaatgcataaagaagagtagaagaaactgacagaagaacctgttggaacagagagaagaggaaaataaacattgtgaattatatcaattcattattttttatgtaatggattattgctcaaagttttcacttgggaaagtcaaaaggttctatctgtggctaaccttccaaattcaggactgtaaccaattacatagtatgtgagagcagtccaaacagaagcttccaaaagtgaaagtgggactttaaggacagcagttgggatagcaaaagcccaagcagggtaaaaacacatttctatctgtttattgagagctacaattcttgagacagtcaaggacagttctggaaatccatctacaagaagaatgagaagcccatagaacatagaacccatgtagtaattagcatggatgacatctacagccattcgagttcgaagaaaaacagtcattgctatagaagcaataatgactagctgcattaacaaggaagaatggtatttcagaaaaggcagactgaaacaaactaagagttcaataattccagccaaaacagaatttcacctgtactgatttgaaaacatagatgaaggaattccttttcattagaagaaattctctccttgcacaagcttttaacagttgccatttggataaggagtatttttgaaaagatagagcatccttatggctttcagacttgttatacggctttgaaagctcctcattaagtttccttccaacatagctatccttgaattttttaatgaactcgtcaacagaaacatatctataaggctgttctcttctgttccaatactgtgcttggtcttttctagagattacctgaaagcataatttaacattgaagaaaaagatagtaaaatactgaaaactttgcatagtgaaatatcagaaacatagaggcctacctcctgcaggaaatctgcagcacctttcctctgtgggcatttaaatccgcagtcctcgaagaacttaaggatgtgagtacgaggaccatgatacacaatttttccttctgtcatcaacatgacatcatcaaagagatcaaatgtctctggtgcaggctgaagaagagagatcagtgcagtggcttctgtgagatgcacaaaatgttgaatacaagaaataatctggaaagtggtggagctgtctaaaccattagatatctcatccatgaatagagcttttgcaggtcccacaatcatctcccctacatcattggaaacaaaatttatgattcattctcttaaaacagaaatgcataacacatttaagctaactttaccagttgtcagtcttttcttttgaccaccagatattcctcttcttatgggatctcccaccattgtgtcagaacacatgtcaagaccaaggatcttcagacaatatcaaacaaattatatatataaagaaaaagttatttcaatacctttttaagaaaaaaggcacacttagagactgtgctcttaaaatacaagtagctacatatatactgcatcacctttagaatgtaatccgtttgaaggtttcttttcactccctccactgatactgcctatcatatgaacaatgtttaatcaaagaagcaaagaaaatccatacacaaataaataaattcatttatgacaaatattaagtaccttcatgtaagcatctacatcaggatctgggacaatccctgcttctttctccctcctgctgacttccatcattatttcttcatgcataaaaaacattattacatgccatagaatgttagttattcaaaaattaaaacagcaatatacaattatttacatcaaaccaaaaattaagaaagatccttaccagctcggcttccaacaccctgacaatgcgcggagaaatcaagtgtttcccttacagtcatctctggaatatgcaggtcattttggctgacatacactgaggtcttctgaggaatgaattcctctagcttgtaaccattgtaagatatttctcccgaaaccaatttataagaccactgaagacttagaaaaatataaagacacagtgatcttgacaatgtaaaatttaaaggcatagtgatcttgacaatgttcttcaagatgctaaaaatggttacataccttgagagagtgacttagcttttttgaaaaagccatcaacaatgtggttttgccacatcctggaggtccaagcaacaaagtcatcctgtattaaaaccaagtcccagttactccggaattacattaatattactattctatctcgtttcttcatgtatctcccatatatgtctatcaaggaataaatatagtttgtaagggtatcacatgaacatattcattatcaagacaaataaaaaagaagataggaaaggcagtaccttccaggcttaatgatcccactgacatcattaattatgctgatctttgcttctggtgtgcctaaagtagacaaatttgtaaggtcctgttatgaacaaagaaggtcacatggcagaaaagtgattcatggtattgttttgaagccaaagcctccaattcagtaaacaagggactaattgaacttctcaggaatttaatgaggttttaatatttaccatgacagtgttttttactgtgttccatagggtgggaagaggttttccattaactattttgcactctgcttccacacacagattcttgtatctcacctcaatagtgggtaacttcacaccaactctgcagagtaaaataaaaatcagaaacaatcaagagtaaacaaacagaatattcaagttagcagcagcaacatgatgttttgtgagttgtacctgtcaatcctctttctaagcttctgcaacaatctaaggttgtcattttcaatgtgtttgataagcttctcaatgaaaatgtgtcgttcttgagcccctagcttagtgacattagtgacacgttttcccttgctgcctcctccatcttgaccaataccatcatcttcatttgtaccattattatcatcataggcatcaaacaatgccaaagtgttcctgtcagaagtgggcaatctctgaataacagcccattctaagtcatactcttcattaacattcacagtagttgagctactccgaaagctggaaccattgacatggcttctgaaggaggttcttatactccttcctatctctgctaactcaaaacgcaaggattctatttcatctgttcctgccaactgagccattgttttctttctttccttttcttttggcaatggaaactaaacaacaaaactctacatatccaaaccacgtatgaaaaaaaatagaatagttataggcatagcctgcacatagtagtatcagacctcccaatgtagagagtattcaactcaaaatcaaatatatatactgataaaaatataatcaagaagtgaagccttcattaagtcagctgccaactggtgatttttcacattttttatatggtatctgtgatgagctaatggaatgcgtcagggataaattggtggcgaggcaagcattgaaacaatatattatagtcaccttagaaacatatataacgtaaatatatatgatgaggaaaactaaatgtgtggcatggttccaacttcaatctgcttagaactagaaagtgattatattattatttttcataattgagctctttaacatgcagcaatatattattccattttttagttgactttgtgtggtttcttgtgttgcgtggaccagtgtactaatattttgggggttgctggactggtatgattcatttcatatgagtttgaagactgcttcaacgtcaacaacatgtacaaaataacaaaaagctatgtttcataggtcagtattattattgttaatttgttattaccatttcttcaacatgtctttcatattctaataaatataattacttagcattttccttttggaggatttcttgtgaaccatctattttacttggcgggaatgttgaatggttttttttttttccaagttctgaatagtttatcctgctacagatatttccatttacccacgttcaaaaacttaaattgattttggatgctataaaatatttggaaagatgtcaacttttgttttaaactttcactgtcacgtgtgtatcacgtgggatgcatatgccttaaggtaactctcatttagattttgaagaggacgaatcgatcaagtgcacaaactcttcacgaggaggaggttgcactatgaagattaataatgttttcatcctcaacacaaataggcttagaatggtaacaagatcaggtattgccattcccccaacctaccaacccttgatatatatatactataaaaagttgtatttatattatatatgatgctttgtatactgatttttttttag

SEQ ID NO: 222528 - DNA, 978 bp, Cannabis indica
gcataaaacccaacagttagtaacagaaccttcttcaaaaaggtctaagggataaactacataagcaatatattgattttcttctctagcaacgggctcgatgtggtagcatcgacctttgtagcaatcaagactagtaagtccttacagttgtcccaacattatatgctatccccataatacccctcaaaccttaactcatctcttttctatattaatattgcccaatattggtttaggaaaccaattttcccttaaaatatgcatatttagtcaaatttctcatgcataaagtcaatcacataaacaatttttttaatgcaaataaaataaaataaataataaaaaagaattgtctagtgctgattcttcccactccttcaattttagataatttgtaagatcgcgtacttagggatcggtttggtccgttttttctatataaaaatctagaattcgattttcgatctgggttggtgcaatctgaaaatcgaccgaccaatccagaacctgttttaaaaccgaccgttttgaacctcgatttggtcggtttaaaccgctcaaaccgaacttttttttttaatataattcaatttattctataagcacattattctacattgtacaactatacaaattaattgttcaaaactaattgtcttattcttttaattttaatattaataaaataatacattattattatatattatcagtaactataatacatatagaaaaaaattaataaaataatatttatgtataatggtcggttgttcttttttcggtcggtttattacaaaaaaaaatcgaccgttcgatggcaattttaactgttagtggtttttctagtttttgattttgtccagtttcagttctagcggtgttcaacaagtcagtttgaacaatttttttcgattgtttagatttcatgcttagccctaagcactaggactgaacattttgaccaggtttgac

SEQ ID NO: 222529 - DNA, 1940 bp, Cannabis indica
ttcttcatgttcctactataaccgagaatttagttaatgtttctcaactaactaatgacaactatgtgtttcttgaatttcgaaaatcatactgctttgtcaaggacaaacacactgggaaggtgttactaagggaactcttaaagatggtctgtatgttctagaagagtgctcaaaaaatcccaatcagacaactcaaaatagtctttgtgcaatgattgtaatccttcagctatggtctgtaacagtcaattgaatttgtccaatgtaacaagttattctcattgtaatttcactcatatcaataaagatattattattgaccaatctctctgtagccctactatttgtcacacaagtcaacttaatgacatcaatacacgacacaataagttaggacacccctctccggctgtcctaagcaaaatttcaccttttgtttctcactcaggcaccattcaacaacttagattctgtgatgcctatcaattgggcaaaagtcacaaacaaccctttcctaaattatctttaagagcctttcaacctcttgaactcatacacaccgatatgtgggaccctcacacattaactccaaagttgactttaattattatgtacactttcttaatgactacaatcgctatacttggatttacccacttgtcttaaagtcacaagcctttgaagtgtttattaagttcaaagccatggtggaaaaaaattcaacttacctataaaaaaaagttaaaggctgattggggaggagaatatcgatcatttacaaaatttctaatgaatcaaggcatttttcagcatccatgcccaaaaactagtgaacaaaatgggagagtagagcacaaacacatgcacataacaaaaatgggacatacaatcttagctcaatctgggttagattttacatattggcggcatgccttccatacaagagtgttcttaatcaataggttacccacatcagttttgaaccaactatcaccaatagaatgtttacttggacaagtacctaactactctatacgaaaaacctttggatgtgcatgttaccctcatctcaggccgtacaatagacataaaatgcaatttaagactcagcagtgcactttcttgggttactcatcctctcacaaaggatacttgtgtgaaaatttaaattatactcagaagacatttgcagccttaacaaactcgtctaatgataagatacactccaatgctccactggagctccctctactgttttgtctacatcccaatatactcatgtcaccactaacaaatgtgtacccgatcctatgatcaatgagcaaccaagatctcaacctattactaatacaaacacacaaaatcaccccaacactaatgtgcatccatcacacactatccaaacccacattcaaccatcaacaacagtaactaccatttttacaccttttaattcccacaatcaaactcaacttacctcgacacaaacatcaactgctcctactgctatcccaacaactgcataaaaagttgtataaagatgttcgaaaaaaatctattttgaattgacaaaatagtaattatttatttttgtaataaataaataattttttaaattaattaaataaggaaaagattaaaattatttagacaaaatttgtcgagacaagatttgtcaagacaaaaattatcaggacaaaagacagcaatcttgtcctaaagacagtggtaggtgcctagcattggttccgtccctattgaatttgtcttttttaagttaattaattatttaattaattcaattaagtaaatatctaatttgaaaattggttaaagatatttcaaggttattgaaatattctttcaagtagttgagaaattctctcataaatatcagtaatcgaattcggttataaatatttatttattttaaacaa

SEQ ID NO: 222530 - DNA, 1053 bp, Cannabis indica
tttaccacaaaattttagattaggggattagttgcaaaaacctgcctaccttagggggttttgccgcaaataaccctacttttaaatataatggggtgagtaatgacgtaatttaactgaggcttttctcattttttgtaagggacaaagctaaaagttgatagtactctttgcaaccgaattctattattacttggtaagatttgggttgaaaatttttgtcaaaattctttcctccctccaaagttgctaaattgagaggagaaattattaatttttgatagaatgaaggagaatccttgtatgaagtttgggaacgattcaaatagttgttgatcatcatggtattgaacagtggatgttagtgcagaattttatagtagtttatgtcctaccactagaactattatcaatgttgcagcggatggtactttcatgagtaagagtgcaaccggagccgcttataaacttctggaagatatggctatgaataatcatcagtggtctgatgagagagcatctcggaaaaaagaagacaactggtgtttatgaattagatgccatataaacgctttaactgctcaggtagctatattaactaagtagttacaatagactagtgttgctaccaatgccttacaaacacaacttagttgtgaaatttattgaggatctcatacttttgataactgcacatttactaataatactttgaatgtccctgctcagcttcaagctattgctaatttttaggggcaatataacaattcagaatcgaattcatatatacaacaattaatgacctctatgctaagcactttagctattgatttagttttttttttattgggtccttcatccattttacaattttgtgtattaaggaatatgttatagatcgagttacgtactcactttttgactgataaaatcaacattgtaaatagacattgggttttggatagggacggagggactttatagcctatatgtaagcttaagccctcactcaaatatatacatcaaacttttcacatgtatatatatatatat

SEQ ID NO: 222531 - DNA, 5413 bp, Cannabis indica
ttgcgaaaatataatataacattgcaatagcataaaaacaatattaaaataacacaaatcgtaaaaatataaataaaaataattcgtaaaaacaatagaaaattccattttcaaatgtattgtgtaaatttttcgagtatacatttttcgaaaaaaaaatgaaaataatagtctagtttcctagaaagggtagcctaggctcaggccgaggctcatcgggttaaaaaagatgccatttccaaaaagaagtttttattattgttccacagttatttttaaattctttcatttttgttttaattgttctattttattattttacggttgtttataaaaaatagtatttttgtaaaaaatttcacataacagtaaaattgtaaacttttgcccaaaattcagtatttttgtaaaaagccctactatataattatcccacaaataagggtaggcccagcccaggcccaggcccaggcccaatgagttaaaaagaagccatttccaaaaatattttgttttttggtttttttagtaaaaaaaaaaaaaaaagaagaagacggtcgaacgaggaagagagagagaaagaaagaacagagagaagaccaaaatccgaaattcagagcaaaacccaaaaacccaaacccattactctctgaaatctggttcagaatcatctctacaacaagccaaattcaaaccattttatgttcttttctaacttcatcaccaccgattcttaatcggaacaatcaatcaatttcagaagaagaagaagaagaaaggtgattgattgatgtgtttaatttcagaatcttcgttcgaattgcttcaagctcagagcttcaatcaattaattaagtgattttatattagtgagtgagtggtgcatgtcacgaagaaattggattattctttttaattaattgattgattgatgatgatgatgatgattatgatgatagatcttagggattgtgatgggattgtaatcttgtgacgaacacaaaaagaagattggttatctgaatgatgggattagagtcagttggttatgcaattattgaatcccaatttcaattgctacacggactgttccactgctcaagtcgtagctttttcccttttgcttcatggtcatggatgaacttagccctagttgtactactcaaactgataccagtgattcccctcactctgacaaccaccagtcattggggtttcattggagccctaaaaattcgctctttacttcctatgaaactcccaaccaaacatcacaatctctccgagtcctcgtcagaagacctgtaagtcttcttcttctttttttttcttattcaatctttacaattatacttacctgaaatgaatttaaggatcgccttcctttgctatgaatttaaatgtgaaaatgtgttattaaacggataatcatgcattttcaatcaagaaaagtaaatgactttgttcagtcagcagtgcttattattgtcttttttctgattgtattatatatgcacaccaaaccatcatttagtttgctctaagaaggtctaaggtctaggtatatttatctgattatatgttgttaaaacccctggtgtggtatcatgcttcattgattgaatgggggcttaagctcttatttccttataacatgttcatctgtgtgttgatgtgcaattatattttaaactgtccttttgtgatattgtgttgtttgagtttgttatattgcaaaatttttgttctttctttatgctgcttctcatgaaattaccttattattgtatttattgtgattgtattatatatgcataccaaaccatcatttagtttgcttgaagaaggtctgaggttctagtacctcctggatacttgtatagtaattgttatggttttcttttgttcttttaagattgtagggctaggtatatttatatgattaatatgttgtcatggttccttgattgagtgggggcttaagttcttattgccttataacatgtttatctgtgtgttgatgtgaaaatatattttaaactgtcctttgtgtgatattgtgttgtttgagtttgtaatattgcaaagttatgatctttgtacttatcatgtctattgttttgacattggttgaaccagaatgttttgttgacataaagctttcaattctgcagttggtgtcaagactaaccaaggacatagttgaaacataccaaatatgcaatccacaatttaagtattcagaagaattgaatccaaagagatatttgacctccccatccattggagtttccaatgatgggcatgataattcgaactcggatttgattctcacagtgaaccatgccatagttaattcggatacacaacaaaggtttgttattgctttattcaccccccttcttttcccatgaaagaaggggctggaagacatattcataatttgttgcaaatattaattcaattcgtgctacattcagttaccttttggcttgggtccttttaggattgtatttatactcagccttaaatgtttcacaggtatgttgttaaagatgtccttggccatggcacatttgggcaggtggcgaaatgctggatttcggataatgaagcttttgtggctgtgaagatcattaagaatctaccagcatactatcaacaggcattggtagaagtatctcttttgagaacggtaatgatgttatcactttaccatatgcataagattgtgagtatcaaaaactgtacttataagtttgctaaacgtgttttctgtttgcagctaaataagcattatgatcccgaggataagcatcacattgttcgtatttacgattactttgtttttcaacgtcacttgtgcatttgctttgaacttcttgacacaaacctgtaagtcattaaatcccttgatgattagaataccaatattttttatttgaaccatattccagtgtatcttttctggtccaatatattttgacaatgttattcaggtatgagcttatcaagatgaatcattttagggggctgtcactgagcattgttcagttgttcggaaaacaggtgtgatagttattggtgcaaatagcatttattctacgctgcaatttttttttcttgttgctgtactaattgtctatgccttccagtgatcttgaatcttacattttgtaatttcttttttctgctttaagtagattctatgtggattggccctgttaaaagatgctggaataattcattgtgatctgaagccagaaaatatactcttgtgtccaaggtttgtactggcaataatgcagcatggaccatttcttaagaatatatttttattaacttgatttctgtcttttaacaacagcagtgttaagccagcagaaattaaaattatagactttggatcagcgtgcatggagaatcgcactgtttactcctacatccaggtttgtggctacagcttaggtttctgtacatctatattttgcagagcagagtcttacatatataagttcttttttcatgcagagtcgctactacaggtctcctgaagttgttcttgggtatcagtatccttttaaatatttacattttgttctttgttatacgcacgaatataactgtattgggtgtcattgtacactacgcggttaaaacaatcatcctgaagaagacgaaagatctacaactctttttctaactacagaaattagagagacgatgagcacatcaaattttctgggtgatataggttttattgtgaacattgggaggttaggtttagagtaggttaacgaactaaaatctcagaatttctaatttataaattggaattgattgaaaggactacggtcgtcatagatgagttactgaagagttgattgtttaggacattgtttgttatgtgtttgtagatagatgactgaaggtgttatctttaacatttagtgattttgtaagtaaccactcctcacttttgctttggcagatctgtgggttggccgtcaaaagctagaggagctcttgtgttaggtagccaaacttgcaaggttcgtgagtagtctatggcctttgtgagttgggcttcacaaccctctagccaaaagaaacactgagttgcaatatactccctccagattgtgggattcatttggcttgatgtaacattaccaagatgcaaatggaactatgtctttaatgagatcaagtatcgataaaaaaaaaagaatatgtgatgataataagtgggtttgctgggttagtgtgttgagtagcctgcattcaaattcttgcaaatgtatcctataaaattacaagtaaaaatgaagagaattaatgagtaatatgatgatgaaggatgacttggtagagtacaccgtttgctaagtaggatgagtttatgccttttgttttgtcctgacttcacgtgttcttgatttggtccttaacagttctccagatattccacttacattgatatgtggtcctttggatgtatacttgctgaattgtttttaggtttgccgttattcccaggggcctcagagtttgatcttttacgaagaatggttaggatactcgggtatgcctcgtcttgtgtttatcagttaattcagtatggtactgattattgctgtttcatggttttacattaattcattctgcttttggtgtgcatacattcaattgtatgaaatagataagtatgcatgcagtacactatattctattcacacagacacacacactaatatgcatatatctacacagacaaggaaatgtcaaagtttaagtaaataatcaagaagctacacttattcaaatatttgttcgaaagtcactaattcaagatgtttggacatttgattgatttttttcttcttcttcttttgcatcatcaatttttaaaatttgttattgaaactaaaacatatcaatggttcttgacttcacaattaggaagtattttgtttctgataggttacaagaccattagtggtcatgcaaagtggatatgattacatttcaggagttttcttgctgaacttggctgcaactttaaagttggttacttggcccaatggtgcttgagtatgtcttgtgttctaattcaaattcatacgctgttttgtctctcttttaagtgaacaatttttacaatcgtctgatatttattgaagtatttcagtacagtgatatatttcttctgctgtaatgatagaagatggtataccatttaatttaggtttttaactgtgtcctattttctagtggcattcccagtcatctgatatgttttttcttctacctcagattgtgttactctgttttttttttgcctaattttccctaaccccccccccccccccccccaaaaaaaagaaaattatttcctttcttgaataataat

SEQ ID NO: 222532 - DNA, 2494 bp, Cannabis indica
acacagttgaagagagcttaaatggattgattggtactacctatatcaacaaggtgcatcttgtttttcggtagcccatctcgaaagaactccacagttaagcgtgcttggcctggagcaatttcaaggatgggtgacctcctgggaagttttcccaggaagcgtgtgagtgaggacaaagcacgctggaaacactcgtgttggtctgtagggtcagtcatcagtccatgaagcagccagagtgacgtactcgtgtataagagccattattccgtgggtgtaaggacccaatggaggcttgaagcggggacgttacatatttgaaaaatcaaggtctaatttatcaatttacaaatcaaagagtccagttaatatttttacaaagtacgagatccaaaataaagtgtaccctaatgtttattaatgttatgttggtgagcatgaaatattgatgtaatggtttatttctttctttctttcttttctttttttttttttggtaaatatggatactataaagtttgattacatgtgtcatagccctatttttattgtttggaaacttcccattatttactaaaaataaagaaacaaagaaaacaaatcacatcaagttttcggtaaagtatgatgagtttatttttaatgaaaatgacattaacatgtcattgtaatgatcatgactactttgtgaaagttacatggtttaaattctttctaatatatgtttgtgaaaatgtgatttttttttttttttcaaaaaacttattatcttatggttgtttatttagaaattttaatttaataagtttgttttctcatatttttgcacgaaaattggtttataccatagttttactcgtaattaagtacttttctcataaattcttcactatttcaaacttcagtcataaaattttagaaaaatattttgctcatatttttgcaaataataaatgtaaaatctataattgtgacagtatgtaatattggataagttgtataattccacctcgtttgaaaaatatcaagggtgatgattctgagactgtgtatgtatgaggctaaaatagattgatggatactagctaatcaataaggtgtattttgttttatagtagcccatcaattaagaactccaaagttaatcgtacttgactgaggtaatcttaggatgtgtgacctcctgagaagtattctcaagcagcgtgcgagtgaggacaaaaatgttgaaaacacttgtattggtttgcaggaccaatcgtcattctaagaagcagccaaaatgacgtacccatgtataagagccatatattcgtaggaaaagatccaacgaaaacttaaagcgagggtattacaataatttaagtgtaaaattgtatatttagatataacataaaagaattgtttaatctcatatataccaagataaaaattttaggtgatgatctacttgttgtgtgactgcctttagggcatgatctatctcttcctattctaaataattcttatctgtcctattagaggggtaatattcttctttgatttttgttctttttttgtaatcagcataatctttcgtttgtttagtcgcctttttatgagatttgtgcaatttagttgtaacaccctaactattataagcatgttagcgtgatttttaacgtactgtgcagcttgttgctaatcaatgaggttattgaaaatcgtgaataattaaaattttgcttatttaattaaaacataacatttaacacttttaaaatttcgggatcccgtttacaaaatacagttacaaaagtttattattcatctacaaaatacttgtcgcctagcgataaaacaacaaaagccctgatgtcccgaggatcatacgctccaggcctaactgcccccgacatgtacaatcttcatctactcgctctcacggctcctcaacataataaacatactaatatcccaggttataatcaggcgcccatacacctaaccacaaccctaacttgatcaggatcgatcttaacaaagtatgattaaccgcgaatctagtctacattcagtactctaatcgcactgatgtggtagtagttaattcatactatctgatagcctagcatacatctgttggcatctcggtgcatctctatgtacactttaccgatgccctgatatgctaatctgagggctataaatttgctctttctgacggcaactaacatgtacgctaaacatgtataaacatatgcataatattatactaatcttaccttgattccgaattcaggtgtgccggccaacctgagtggaacaactgctcggcgaattacagactcctaaatcacattaatcgtaacataggtaagcaatacgctaaatcactttccggggacttaaacttgaaactaaaagtttccctatcgatgaataacatggcaatcccctaaacatatcaaaaataggaaaaactagagtttctgaaactgcccaactggaa

SEQ ID NO: 222533 - DNA, 5209 bp, Cannabis indica
atgtttaaataggatttaactgactagcagtgacggaagtaacacgaaatataaccttaggtataatccatcataagaaatgtggtacatgtataaaaaactgaaaacataaggtatttatactgcaaattttctttctattttaaatgaatttgttcattgccccccaaaaaacataataatagtaatactgtaattttaataattaacttcctcatcatccttcctaaatagccttaaacttcccatcattatattgttgttctctatcatacataatccctcattctttcctatcaatcatagcctaaatagtataggccacatcaagcccggccctgggtataggcgggctaagcctgtgcctagggcccacctatcccaggggcccaaaaaaaataaatagaggaaattacactctataccctttttatattgtcctcttttatttttaccttcttttttaaaatctatcatttttacctctttttttaaacattgtaccaattttgaccctatcacttcaagatactctccatgtgattcttttatgtaagggtattttgggtacaatacatataaaaagaggtatatttcaaataaacataaaattagaggtaaatttgattaattgatgaataaaagaggcatttttcaacttaccccaaaaaaatatttaccttttaaaattataccatttttttttactgattttgaaaaataccatttttttttctaaataagggcccaaataattttttttctatggcccactaaaagtcagggccggccctgggccacatgctgcactaatgttaatgtaattaatgaggcaagtcagctaaaaagctgctaataaagcaatgacttgacattttgaaacaactacccattgcattttgtcttgttaagtttgaagttaatgtaaaattttataagccaaatccattatgtgagtaatagagatacttatcagataataaagagaaataactagtttagaagattcacctgaactgctttatctgggataattcctgaaggaagttgagaggatcgagagtctctcatctttaagtagttgtacacaacaacaccacataaagctgcaaaacatatccaattatgtcatacaatggttcgagatatcgatgagtatataaaaagttaagcaaaagacatacctattgcataaccagttatgttgagacctgttatcatggactcaggaaatatgactgttgacagggcaatcaatatccaatctttcatgaccccagcaactcggatagttactgctccagttctaccaatgactaggaaagttgaaatattcaatgccagtgcagcaagtgcatttgagaaaaaaatccagaaattaaattgaatgtgagaaacttctaatgcaggactctccaaaatataccaaggaatagagagaaacacaaagctgcaaaagaaagtagacaaaataagcacatcattggataaaaacacatatctgaaatgtaatgtgacatgcactaagatttaatgtttttattcctgatgcaaaagcaatacatgaaatgcatataccattgcaggaagtgcaggaagaatgttgtgttatagcaaaaaaaaaataaaaaaatagaggtgatacccccacaaattagtacaacaaagataacaccttaaactagaaggtcagttcttcaaaaaaaagttagcaacagtcccgaaactcagcaaaaaattgatgtaaatatccaaacaactagatataaacacatgtgtgcaccaaaaactggaaaagaacaagacacattaatggaacacttgaggagaaattttaagccggctgcagccaagtacctgcatggtgctatgtaataaagagtggtaacaggatttagagttaaacccttgttctgaagaagaacttgtgtcaatacaagcctgagggcctctccaacaatgcccatgacttggtaaacagtaccagtcatgttaaaatgaatttccccatatgaagatacagccactccaacactgataagcaccatgtttaagaacacatcacaccttaaaacatctgtgccacaaaacacagccactaggaatgttgccacaggcactgcaaattccaaataatgatgaaaaggacacttatttagtagcattcaaacaaacaaacaaacaagaaaaacaaaaacaagcaattcacatacttagggctttaagcatctggatgaaggccacagaaatgaacaaataagcagtattgccaaacctgtacattcatagaaaaagactttaataaacggtgcaaagtgagaaagttgagcctgaaaaaaaaaatgcttggcagcaagaatgtctaaggaacagacaagtatggctttagttgacataaatttcacatttacgagtccattaaaaacaggaataaaagagaaaaaaaaaaaaagaattgcaataaaaggacatcggtataatgatgaaatgtcaagatagaatcatcttatcaggcatctgtagtagctcataagcataaagattattctggattcatggtgaggaggaaatatagtagtaattacttcctcaaaaaaaatgccatgaaatatgttagcacatgacgtgagtgcttatatttctcgctaaaatttataaactagattaatgaaaaactcctagttccattagctcaaaatacttataaagccacattgacctaattgaaagtggagaaacaattattaataagcattagaatgcattcagcagtaaaaaacgcttaccatagacttgatgcaaagaaggcacttatgggaaccacacaagtcatgtatctacaaaaaaaaaaataataataataagattactgaagaggataaaattacggagacatgaagaaattctgctgcttattcaagaatttacattttgaaggtcattttgataggagaaacaacctgcacaagcaacagaagataaatatcttacatattaactagaattaagttaaagacaagtagcagattgaaacagattgccgatgcacacagaagatcaatggaggcagtatacctaagtgcaacctcatttgatagagataaaactacagaagacacacataaaaagaaaagtattcaaagtggaccaacaaaataaagagcaacgcaacaatcataaaaattagagatatgttctgggaccaactaatatttgtctaccctattctgcaagactgcaaggctaataactgattttttttttgttgaaagggaaggctagtaactgtcgaataaaaaccatgtcagcaaaagattatttgaagcatagacaacgatccatgagttttagcagactaacaattcatactaaaaggtgagaatcaaaagcaggatgatggccgaaagcaagtaataggtagtgactaaaataagataatgaaatggaaagcttgaaaagggtctcctaataccttgacaacacggataagaaagaaggccacagcaccagaaaaacccatatgaatcatggtgagtgtgattggatatggaaagttgaagtaccttgtagagaggaaccactgcaaataaacaaaagaagacaatatacgtataacaaaaaacattgattcacatatattagaggaataatgccaaatgtatcagttagaatatgaattaagctttaccttgttgtagagaataaccccagatgaaagggtgatgtaaagtaaaaggtatatgtacgttaacagatgctgcttgccgatcattgtgtactgtatagtgtccacaattgactttcaatggtccaaatcataagcctgattttgtgcagataaaacaaattcaaaacacaagagttgtgaagccaatccatagacaactggactcagatttaggggaacaatggtgagaagaagcttcaattttaagaaagctgcgatgccaagcatggatccaaagcaacggtgtctcacattttcactaacgctacttaaaacgtatgcaattgtttgactctcatgaaaaccccgagtcattgatcaatggaacagactcttacttcttacttaggtcgtgaaaattttgcaaatgcatagcagaaattagaggaaatcaacaagaaatatgaatgttcgaagaattgaataagaagattgtgatcacaaatgagtagcggcgttgagaatagaagttacctgacctgcaaatctgatgatccgtattccgtacaatggaagaaataggagaagaagaagtagcagtgggagtgaatgtggtgagaatgggagaaggaaagagtagttggtttagagaaatgggggacgaatcgttgagtcgactcgttcggattccaatgaatcttccataaatgtcatcgtcgttcccatgtgatgatctcggaatcttcgtcgttattttgttacgcaaacgcaacgccgcttcctacacttcatcctttatgggcccttaggcccaaccaacaccattagtaaaagtaaaaatataggaaaattttagaggaaattagactctatactctttttatattgttctttttcatttttaccctcttttttaaaacctatcatttttacctctttttctaaacactttagtgattttacccctgtcacttcaatatactctctatgtgactctcttatatcagggtattttgagtacaatacatataaaaagaggtatgtttcaattaaatataaaattagaggtagttttggttaattgataaataaaagaggtatttctcaatatacctcaaaattttaagagtttacttttttatggcataaataaataaagctaagtggttatgaggtttttttgttttttaacatttatatgggttttttttatgccatatgtttgtaaaaaaagtagaaatctcatatttacaaaacaacaataagttttgccggaaaagtcgccgggaaagtcaccggcaccgaaaaagttgccggaaaaatcacggtcgccgagaaagtcgtcggacaagtcaccagaaaagtcgttggaaaagtcaacgtggtcggaaagtcaacagaaaaatcaacaacgccggaaaagtcaacgtcactgaaaagtcaccaaagtaaatgtcttatatataactaaaaatataacctgttatatgaataaaaactaataactcaaaccagttataattgaaatataaccggttctct

SEQ ID NO: 222534 - DNA, 2202 bp, Cannabis indica
aactattaataaatttcatcaatcatataaaggaccacaaaactagcataatacacgattatattaaatatgtaatcacgtagttgtatttattttatttgtaactggattttatttatttcattataaataaaaaataaaaaataattataaatattaatagtgaaaaaaagtcttattaaatattttaattaaaaaataatttaacttaagtatatataattaattataattattttgagtctaaaaatagaatttttaatttgttatagcaagttatataagaatataattattttagttacatgtaataattaatcacccatatatataaatatatatatgaatttagagggtttttttgagtgtataattaattataaatcaatttgttttattatatggtgcctgttttattttatgcattcgattagtttaaattttattttccatattataaaatatttagaatttcttaaagtatgaaaaataagaaattaaccttataggatgatgcccctaagaagctactatatatatatgctttgattatatatcacttaataagctattaaataaagagtaaataacggcataagtacctaaaattttgagtttgtaagcgtcataaacttaataatttttttagtagcataagtacttaatgttagtaaaactacaatttttctctattttcgtcaatacagcctcctttttaaatttattaaaaaaagatttagaaataattgatactacatatttttgtccagaccaaataatctaaaatttgggtcttatatgtgctctgtttaagtacttatgacactaaaaaaaattattggatttatgccgcttacaaacctaaaattttaggtacttatgatactatttacccttaaatgaattaaatgaatgagcttgttaaattaacattaattaattaattatttaattactggtttatatgaaggtggtcagtgatagccgatcatctacctggtagaacagacaatgagattaagaactattggaactctcatttgagtcgaaaaatctacagtttcaccaagcgactacctaatgaatcatcatcatcatcttcatcttcttcatctcaagccatcattcataacttagcaaaactagcttcatttaacaagagaagaggtggtagagcccgaaatactactcctacaactaaatcatccttgaaaaagaataacaaaactgttactactacaactactataaaaaaagatgaagaagaagtcaaagagagtaataaattattagatgaagcagaaaagaagaacgacaatcatgatcatgacaaaacgacatgcgttttgagtagtggtagtagtgtactggaggagcatcatagtgaggaatggcacacttgcatctcttctgcaatggatagtgatgacattaatattaataatataaataacagctcagttgggtttgaagatgaaggaatatggttagattggaagtgggaagaatattatgttgttgaaacccatgataacattaataataataataatgggatatgggattgggatgactactcctctgatcaagatggagagagattgttttctttatgggaaaatggtaattttgaagggcatcatgcatgagatgatcacaccacaaaataaacatactacaatttaatgtccacatcgaataatgtttgtattagttttacatagtgtgattggatgagttgaaaaaaaaaatgttatttttagtttgttctttttcacaagccgtaaacagatttgattgctcactcgaaaaggtttgacatgtttttgagatgtagagctaattaagaagaagaaagaaagaaaaatcattactagtttcagaaatgattttcccttactttcttcttttgttgtaatttattattttagtaatgaaatgtctccatcatatggtaatatttccaacttccaatgctgtattgtatgtttattttaaagcgtctgtacatatgcatatatgcatattttgttttatctaaatagttctgacaatggttgttttgttagactaagttttgaacagacaaaaaaaacacctactaatatgacgcattgtgagtggttaacgattgagaaatgctaaaagacactattggtgtctagcatcctccttggtattataccactatagatgtaatta

SEQ ID NO: 222535 - DNA, 2284 bp, Cannabis indica
tcaactagagttatgtagttaagcttcctcttaattctataaatacatacggtctcattactattgtataccttttgataattagataaaataaaactagttttaatttagaaatgtagcgaaaaaaatttagttgatagtattagtattgtactatcaaattgtgataattgttatggatatttagaccataacaacattgatttgcctcatgtgctcattgtgcgttaggctcgtgcttaccttaggacgttttacaataaacagacttcgacagtgtctccttagcttggtgactcaaatactccctctttgggtggttctaaaatggaaatctctccgcttaattttctcaaagtcaatacagatgctgatatttgttctctgggtatttgtagtagtggcgcttgggtatggtgattcgtgatcagtttggaatcattgtagcttcgacaagttggcatttggatggttattttgatcttgaaatggcagaagccttagctatccgcaactcgctattttaatgcatctcctttggatatggacatattattattgagtctatgtgactttttgagtattgtgattaagctgaaaattaagggttcgtttggtacgctgtatcacaccgtattatattgtatattattatattaaattgtattttatgcaatatttttatgtaaaactatatgttgcattaattttatggacacctaaatatataatattttagtataaattaaagtttaacatagtattatataaaaatataatatataatccaattcaatataatacaatacaatacaatacaatacgacctaatacgacgttccaaacgagccctaaggcttctattattacttctttgggtcttgttttaaatgacattattggtctttgtaataggctccaagatattacttttgtgcattgtaatagatcttataatggtgttgcccatattttagctaaaattgttttgacttcatgaaaaagtgtaatttggtggccaaagaatcctacttgtatttaaaacttaataatagcggatgctatagttgaataaattctcaccccccactttagtagattgcttgttgctcttagtgctttcagtgtttggtggttgagacttttcctaaaaaaaataggtatataatctaggttgtatctacaatgcactcacttaaaatggatgtactaatgcattcttaacttatttcggtatccagaagaattttttagtctaattttttttttcatattcatgtacgttatagctatttaagatatcttacaaaattttgagaaattcagaataatttataatatataaaacaatgcttaaatagtctattttacacgcatataaaataaaatagtcacgcgtgcaacacacagtttgaacgtaatttttggtgtgttaaactttttcgaatttcttaaattttgcaggatgtcttaaataactataacgtacacgaccatgagaaaaaatatgactaaaaaattatttcgaatactaaaatagataaacgtgcatcaatatatctattataagggggtgtattgtagaattttcccattattattattataataataataataataattatattttagattctatgcaaattaatatcttcggtttatttaattttctatctatttatacttcccttgtattcctagtttgtgcatatataaatatacatttaaaaattataccaatattattcttttaattctaaaaaattaattagcattagtaaataattattatattgacaacctaccaaatattttaaagcatctcaactattcattaaaataatacaaaaacttaataaagttatgcagacagcacatcacactcctcttcttatatacaaataacacatatggtacatgtttatataaatcttttacgcaattattaagacaaaaagatataaagttgtaaaagaaaaaccatataatgagataaataaataactaaaatttaaaaaggtcaaaacagaaatgtaataaggtaggatataaaaaataaaaataaactactatgaattttaagataaatactttgttattataaattaaaatggaaatcatttacagtaacaaaatatatgggtagagatatagtcttcaacaaaaaataattttcatccaactctagaacataccgagtcaaaatgtgaggtgtcatattggcactgcatttgacatgaaaaaaagtaactctaaagaaaaagaacaaaaaatttaaaat

SEQ ID NO: 222536 - DNA, 1790 bp, Cannabis indica
tttaattacaagtatttttttctgttagaattaaaaatcatatttagttacaaattatttttgttatgattaaaaaattatcaataaaaatgacaatttttgtaatgtaataaaattacatgatttattagaaaaaacatacaattaattagaatgtaataaattactgatcaaagtagttggtcgaaagaacatatcaaaaagttctatagatgcatatgctcatgtatataatttgttttcatcaacataaagttctatatatgcatatgctcatgaattttgagttgtatatatattatagtataaccggccgatatagatacaactcaaaatccatattaattttattaaaagggtagttgtatattacttttatattggtgtacaaaaccaaaaaaaaaaatctgccacttttattgtgattaaatataattgtttggaattggataaactcaataacaacgaccgtaccaaattactcattaacattacaagctagggttttggaattgtgtactgtttcacgagtctaattaatatcatctaaatatcaaatccatatatattagtcattttattgatgagttcaactcgacgtgagtttattaaataatttattatatataacctaattttaaccaaaagtaactataaatgttacctttcgtcttcttcttttctattatttattttttctgacaccatataataaattttaattcaatgatgatttgaagcagcaggtacgtatatatgggtcagtgtgtatggcattaattattactcatccaaatatataacggtctcataattggaatatgtatatattgtcttacatatatatatagattatatcaaatatagtagtgtgtttaattactattattattattattattattattattatacctaaatagcgtctatataccagactagctatggcaaaatcttttcatagatcctatctggctctagcttgaggatcaattcatgcatgtatgtcatgtcatatagtaatagtatttaatttattattagctttttataaggaccacgttagaaaaaatatatatatatatagcccaacaaatgaatcacgatatatcagatcataattaaggaccatttttaaaattatatatatgattattaattcacaataataaaggatcatggtcatgaaattaaaagttcattatatatattagaatctctatgaaagaatgcagtactttatttatttatttttcttggacaaaagataattctattcaaaaattgaacaaatacaatcagaacaaggcatagtcgaagcccaagcaccaaagcctcactagctactaattacatccatgattctattatttgttttagtgtgactacaagcaaatcccaacaccctatacttcaccaattttctaattaacatttataaaagtagtagatctagtaacacatcaagttgaacacacaactatttctatttttccaaacccaatacagaattccagccaagacagcattataaatctgaaattttaagtcataagtagcgttttgaatccaatcttggaactcgacgatattcctaggccagttaaaccccaaaccagttgttaacataccgcagcaccaactttgtgaagtggcagtccatgaatagatggttatgtgtctccttttgctgatcacaaactggacaaagattggattgaataggaaggattctctccaaattgtccctgattagaagttgcaaattacaagcttgccaatagataaac

SEQ ID NO: 222537 - DNA, 2476 bp, Cannabis indica
tattatttttttttgaattaaatattgtaatttctaaaaataaaattttgtaataaaagagggaaaaaaaatttatttgttaaagtttaagtggtaaaaatactaaattttgacagtaaaaggataattatgtaactattatattttaggagaaatttttaacaagtcgaattattttaaggaataaaatctgataatactaaaagttgaagcgataacaatgctaattattttataaaaagttatgattatttatttatttaacaatcatatataagttcgtacctataatagaattttacacataatttattattatattatatattatcaacttagaccataatcaagactacatacacgtatcaaaatgattcgtttccagattatataaagccactaaaatgtggacaaaattattggaaagttaatggttttttttttttttgaatttttaaaaaaatatatattttatatgctttatttataattttaagatttaaaatttataattataaatatacttttgtaaaattttaaaattaaaaaaatatattttattcagctaaaataaaaaaaatatataactaaaaaataacgtaaaattaaatctactacaactatacattaactataaaataataaaaacaataaataattcattattttcattgaagagatatttttataaataaaaaaaattaaattaaaaataattttttttcgtgttgatgtatatttttataaatttttgatttattatataaatttgagctattttatagttgttcatatctagtgatcttgattaattaacgtagaacaaagcctttccacatgtaaacaatcttatagtccacgaaaatgggacccatacccatttcttttaattattaatatttatatatgttgtaggttctaaattatattaaaaattaatgaaatgaaaaatgaagcgatggataggatattttgtgtagaatcgacacaaataactcatgctatttatatataaattcacctaattattttttttatattgttattttgtcgggcaagtatagttaatatataatatttagagacttggtagatagagaaattgttctaaattaaacatggggtaaatattattttgaatttcgtattttgtaaaaattattaattggaccttctgttttgttaaatgataaaatataccttatattttttaaaatggtacaaataagatcctgaattaatgttttgtcaaaataaaatttgattgtaaccttgaattggcaaactcttgctccaacgtatcttgggctcgctcgctccaaggtgtcaagggctctcgctccaaggtgtcttcaagtttgttatattaaaaaaaaaagttgtcaaaaattaagtttagagttctatttttatcattttaaaaaatacagaatctattttgtcatttaacaaaatacagggtccaatcaataacttttgcaaaaaaaaacaaggtccaaaatattattaatcattaaacatattatatcttaatcacttcttagtgggacctttcacaagttcatacgttacaataaataattacaattacttaaaaatatgtcaatttcaaagttgacatacgttatttaaataattacaaatttgtagtttttgctggatatttacgtacggtttaagttaaaatatgtagagagagagaactatggcaagaatagaccaatatggaaaacgaagaagaaaaataaataaaataattaatattatgtttagggaagagaagaatttttcatatcaccacatctttgatattgggttaaaaaaataaggaagtgaaaattcatttcatcattattaaatgttacttaaacaaaagtagaaaataaagagttgtggagtgataatattttaatctttaagtacaataatctttttttggtaaataagtgaacttgaattataaattagattttataaaaatgtgttttaataattaaatctaattataaaaacataggtagttcgtaataaaaggtattttaaatataggtaggtgttatccgcattttcagatgcatgatacgtatattttcaggggctaaaattaacgcgcttagtttatttgtcaggcccagacagagcaatgactaatgagtcagcctataagcaaagtcggattaaggctccaggttcaactatgaccttgcctcaaccaagccagaccttcttggtcctagaaggatgactttcatctagagagacaaagactcaaagagacgaagccggataccctcaggccctgagtaatcctggaagagtagttgaggaaaagtctgagtgaaatcctatgtggcatatttctgaaactagatcacacaaaatcaaaagttttcccctatgttagacctaaaaagggggcacaacacaaaagaaaaaataacatacattttgtccaatgtccactactctaacattt

SEQ ID NO: 222538 - DNA, 3051 bp, Cannabis indica
aatttctgctcttggctctagtagtttctggtttagctagattagtgtataattagtcgttgtgtctggcgttcctattgttagggtattacaatttggtatcagagcgccaaggtttgtaaacttcttgtagaccgactgaacatgtacaatcatcatcaaagacaagcttgactcgtagtgcagtaagtattgagagtaaatgcttaattgcttttgtgattaaatgtttaccactttctgttataggcagcatatgagcatttagaaaatataatgttgtaagaaaagcatgattagtaattatattagtaaatgattattttaaaagaaaagtagtatgtgtgagttagggtcaaggcaataagtgtgtaagtgtggatttggtgtctgattcgttggggttgttgattttagggttatttgagagaaaatggatcctaatcaatcaactagaccacatggcgagcttgtagagcctgttaatgaccaaaccaatccataggcaccacctgtgcctccgcagaatctgggagataatacgaggcttaacaatgttaatccacctactgacgggcagtagattttcctcgaaatacaaaccattatacttcgtcaggaagatgagttgcgtcggttcaggcaactggcccaggcagctcctgttgcataagtgttacgactagctcctgttccagtggtgggtaaccttggatttgtactgccacaccgagactcaatttttgagcattttgtcaagctacagcctccgacgttcttaggaggtactaacatcattaaagtagaggcatccaattacaagagaagctccctaccatttcgataccttggcatcccaatctgtacaaggaagatatctagagctgaatgttagtgtttgttagaaaaaatgactagcagaatccgaagttggagtacaaggaatctatcttacatgggtagggtcacattgatcaactcagttttgcttgccataaacacatattgggctcagattttcattttgcccaagaaactcttgaaagatattgaagcaacttgtaagtcctttctttggaagggtactcaagagggatccggacctggtctagtggcatgggaatttatttgcaggcccaaatctgctggtggcttgggatttcgaaatatccaacaatggaatattgcagccttgggaagatatgtctgggatatagcaagcaagaaggactgcctctttgtcaaatggatacacatggtctacttgaaagatcagttgtggtggagttatgttactccacaagattgtagttgggcatggaaaaaataagttgctgtgaaggataagtttcaacaaaaaggagacatggacaactttataaaacagagatatcgagtcaagcaaggatatcaagatcttttccccgagcatcctaaaattccatggtgtaatctggtttgggacagacttgtcattcccaagcatagatttattctatggttagtgttttggaaaagattaaacacaaaagaaagagtaagcaagttcaaccaaaacatagacacaacatgtgttctgtgtggcaaaggtgatgaaaccattgagcatctatttttttagtgtgaatacagctcaaaatgcttgcaagaaattaaagtgttcctgcaatggaacacaccagcaggcgacattgtcaagctgctgcaatcttgccatcaaacaaaaaggttttctgcagcaaggaagagcatggtgaacacagtcataacaagtcttgtgtatcacatatggaaggcaagaaacgaagcactttggaaccagcaacagtggttcaccaacaagacagtacagaaggctaagcagctaagtaagctaagaatccaagcatggccgcctaaaaaagcaaaggaagaagacatagattggatattggaaacttaaaattgtacatgattatatttggtgatggaatagttgtaaacattgtaaaactgtgatgtaagctgtgatgtaagtttggttatgagcaattaaatttcttattcataaaaaaacatcattaaagcagaacaatggatgagcactattacttgtattctggacaacatgggagtaacgggaactgaacgagttaattgtgctacatttatgttccaagaacatgcacgcatttggtgggatattgtgggacagactaaagatgttagtaatatgtcttgggatgaattcaagagtctatttgaggaaaaaatttataatattgccatcagaacttctcacatggaagattttgtagaattgacttaaggaaagaagacagtggtcgagtatacactggaacttcatcgtttatctaagttcactggcgatctagtaccaatggacttcactcggaaacataagtatgtaaggggactgaatgtcactatcagtcaggacttgaaaatcaccatcaatcacgacactattacaagaaagtggttgagttagcattgatttctaaagaggcgaaacaacacgtgatcaaagaataggctgctaaggatgccgtcacggcatcgaaccctaatgttggtggtagtgtaagtaaggggaccgacagtgacaacccagaccacaagcagaaggctgaagctttcgaaatactagggaataatagaaagttttgtaggaacagaggtggccatcaaggtcgtgggtcttcatttaaaaacttacctgaagtgtcccaaatgtaaaaagcgccatcagggtgagtgctgagccaaaaacatgtttctagtgcgatatggtgggccattttatcagagactgtccacaatctaagaaagaagaaccaaagaagaacaacaatcagaatttagggtatttgttctctatgactcaagctaacgctaatgctagtccatcagtggtgacaggtcagttgtctattaatggttgttcttattcagtattatttgattcgggagctactcattctcatgtatcaggtagagtaatagaaatttttcataaactatttgatgtgtatgcttcggggtttggga

SEQ ID NO: 222539 - DNA, 1543 bp, Cannabis indica
tcgacatgtcgcgacacaaaatggtttgctagttatcaaaaattttcgcgacaactttgcgacatgttgcgacttaaggcgatttaagttgcgataaaatgcaacttaattcgtgacatattgcgatgcagattgcgatgtcatgtattttatgcaatatttgaccattagtttaatttgatgattttttctcttattttcatgcagtatatagatgcaatatcacacatgttgaggaggagacattttcatttttcagaatcttaccctcagtcaggtgtgatttttgacacaacactcccacaattcctcatgggcatttaggggcgtcaccagggtgacagaagtaccttccaatggccaaaagcagtgactgagtactataagggtatggagagtcgttacctaccatgttggaaggatcaaggctacttatatttcgtcctacacttcgagagaaaaatattgggtggctgttgaggtagacattgattattggtaaatttgggtgtacaataatgatatctcatgtaccagcaaaaaaagattttaaagccattaggctaccttggactgagctatttccacatctgttgaggacaactggctattacaatcttaacagtttcattctctatgtagagttaggggagaatagccaactgagagcaatgcatgctaaatgcatgccaagtgaggaggttccccaaagtaaaagaaggtaatattcattaatatagtatattaatattttccttatcattaatttttttaagtctctaaatgtattgctttttatttttcagtggtgattgcggggtatatgcgattgagtacatcgaacacctcatgatcaatcgatcattggagaaaattaatgatgataaaataaggatattgttcagagatcggtggtgtatggacttgttttaccaaatcctgacttggtaaataattaaaattttatagggttgttattttctttttgtgttttttaactctgtaattaaaattgtacagatatcgttgtatatcgcaagtaattgtgaatttgattgataaatgtgttttgtacttaatttatatgttaaaactgaattttgtacttcaatttcataaaatgtgtttgtatcgataaaatatcgcgaacaatgttgaaatacattgcaaaaattcctcatacgtcgagatcaatatcggtaaacattgtaaggttgccaacaagtcatgtttctatttgtagtactgcatcacataatatatcgccaaacatcgtaaaatatcgtgaaatatccctgattgcacactgcatgtcaaacacgtgtacaattcgacatttaatggtaattaatttttgacatttattatcccgccttcccaactactaatttatgtcaataataatgtcagtaaacgtcgtgaaatgtcgtaaaaatactaggaccgtgtcgacttcttactgtcgctacacgacgctgaatgtcgcaaaatgtcgttagatatctgctaattaatttttgacatttattatcccaccttccca

SEQ ID NO: 222540 - DNA, 2045 bp, Cannabis indica
gtaacccaagcaagattagacaatttattatttttcaatcacactcctggacagattagagaccaaaaaaaagaaaaacactgccaatccactaagcaaatttttttggttgaatttgaattattgcgtggcattaaggtataggcatattgatattgtgcattaattgttagtcaatgaatagtccgcatccaccggggatattaaatcattttggtatttgtcctcgagaaaatatcctgggagctattaataatatgcaggaaaaggaaatttaggaggcatgagcaatacctattttgacccgaaaatgctaaggaacacatccattctatataggctgtagatgtagtaatatagtgtcattggtgtgtctagatattaattaagtactaaatccaaattaaactatgtaaaacttgctaaataaggaacacataggattctatctatgccattggcacctgaaaacttaaggtttccaaactctccctctctattattgagttacctattattgctataatctttggctccttgatgagtctggtctcatagtcgactggtgatttctgcctctttgctctcttctatgtctttgctttttggttacctctgctgtgggggtcacctgttctgtctggggttttcgttggtgcttcctttttggtggcggtgggtgttctttggtaccggcggtggtgtttacagtcatgagcactgtaagtggatgcgaggaggttatagtgggagtcgacacgatcaatcctgctgctactaagttattggagcgtgacagtgagcttgaaatcgaaatgatggaactttttgaagatttaactctggagaatattgtaataaacaaagcttgcgtgggaaaggtcatgggatcgtaagaatatggccccttcggttctcaagaaaattatcctgggtgtttggaaccttgaacaggggtggcgcatgaagaaatttgaggatggggtccttggtttcttctttgactatgaggatgactgtactttcgtcatgaacaaatggccatggcttgtcaatgatatgcttttgaacctgaaggcttggccagtggaaggggaggtccaaatgtcagactttgacaatgttcgcttctaggtggagttccatggcgtacccactcgttgtctgttaagaagctaatgttacctattttggccaagaaggttgggcagttgataaaatcggatggcaatagcagggaggttattgctcgaagaggatttctcaagtcctggattgatgtgtggataagccatcctttccttgcaggattttccctcaaagcagaagcaaagccagagtcgtgagtccaattttttgctactagctagcatattgctccacaaatatgtcagtcaattgagcaaatgaagaaatagaattattgggtaggtttgtgtacaactggagggctggccttaccagactaaaccaaaccccttacacatacaagcctctcgcagttcacgaggaatggagactgtgaacattctttgcttgtaactccctatgtgatcgttagggtccgttgttccatcgtacatcttcattgatgggaagacaaacttttttggcatctccacaagagctatagcatccacgaatggagagtctgggaagctacttagtaagctctttttgataggtgcagggactcctgggattctgtgaatcatagcctccatgccttcaagcttccttgctaccatttgttcgatcatctcctcatgtgtcattgcaacggcttgtacctacaaatagaacaataggaacattagatatcaaaatacttggagtgattgggtcagaggtcttgagttgtccttcttgagcacttggtgcaggaacacttccgtctggaactgatgtgacttgggcgttgatcatagtctcgtcacctaccaaagagggtccatgtgttagagtagatccccctggtaccgatccatctgctccaatagtcgttatggttgaatgttggtgtgttgtttggttttgtggtgttc

SEQ ID NO: 222541 - DNA, 3248 bp, Cannabis indica
aaatttgtctcaaagtttgaaaattaaaacaaaaaaatcataacccaagtatagtatcataaactcatacctctcaagtctcccaacaaattaaaaagtaaataaaaataaaactaagaatcaagaagaaaatatatttacacttgtagtctacaatgattatcagttcactatcattattagatctttaaacatacgatatataattttgattataaataataattaaaattatactatatatacgttaagaataaaaagaaaattgtatatatatttatatcggggtcggatatggtatagatagtattatccctgcttctgctccatcctcgctttgagtattgaaattattcttcatcactgccccattaatcaccaagacggaaaatccccaatccattatggacgggtcgcgcgattattcatctccaccatataaatttctttctctaatgcatacataatttacttaacccttactattctctcttcttttttgctcacactatcctctatcaaaaacaagattttttttttcttcttcattgatcatatttataatttatttcagaccaagcgtgtgcgtgagaataaaataatttcataaataagaattttcttaattttatttattttgtaaacttttaagacttttagtttattattattggagtgcttttgtgatattctcttctgcatttttattgatgaaatattctataaagatataattatatattttcattatgttacatattgaagcataagttttgaaaaaatattcagaatcttgaggttagaatcaaagctataagaattaatcaaacttgtcttccttactccatcaatatatactttcatttaagaaaaataataataccagcttaaattaattaagcatccacagaaaagttgagccaaaaagcccaattcttcaacacctaataataataaccattgtaataaaggaaaaactaataataaccaattcaaatcttcacagaaaaagatttgctttcgtagtacaaaaccttaaattcagagcttggtttagaaatacgccaaggcccttctggaagcaaagtaagcttatgaacctcaccccacaaatcaacattgtctccttcatttcttctactcacttcaatttctccaccacataacttgtaaactccccttgtagaactctcataactcacctctccaaacatcataaacaacctccctttcaaattgaccaatttggcattacacacgaaccggggcatcccttccatcacacctttgacctctttccatctccttttactatcatcataccattcgattctcccgttattattactctcacaacggtaagtgaccccattaaccttgcaatccattcgaccacagaatggctcgtcatgttcagacacctcccacatcctagtctccggattcagtcgaaactcattcttattacttcgtaatttgattaagattataccgttcacaacttccacttctgtaaaattggatttgcgcccgtcaagtggacttggaatgtgttcccattgtcctatcactggatcaaacacttctacccatgattcctccgtccacccccatcacatccaatcacataaatcttctcgtccactacggctacagaagcatcgaagcgcggtattccaatgcttggaccttgctgccatgtgtgagagcgacaatcgagtatccacacgtaagaagaaggtatgataaaatcggattcatcaatgtagtggccaccaatgacgtagatattgtggcccacaacagcttcaacatgtccatgcaatttatatgggattgatgggagtcgggcaaatcgaagaaggccattgcaaatggggtcagctgagacggttggcttttgatagatggcgaaccagttctcacaacaacctagggacgtagaggagaccttgaaatagagcaggttttcggtgaggttgaggagagatcttgttgtgtatagttgaggcgatgaaagggtaaatctgatggattttgatacagctgagaggaccaagtggtactgtcttggcacacgggctagaatgttcaatgccagatcgtttgggaggcttgggatgatgacatccggtagtggcggagctataactgctgacattggattggatatgaagctcaagtttcctacaaagttcacaaaaagtaatttcttattagcttagaattattatagaaaattacaaatcacttggataaatcaaagctacacttgtggattggtgctaaatctcatgccaaccccgacaccccaaatactagtataacatctactcatattcgtctctataaacaaagttcaaactcatatctctctcccaaataagtgcctttatatccaattagagacttacagcaaccgtgatagaatagaaaaaggataaaacacaagatctaattttttctaacaagcactttatcaaacaccttataggcattatagcaaaatatatatgacaaaaaggataaaacacaagattcaattgttctcttcttttactacaaagtaatttcttagcttagaattataatagaaaattacaaatcacttggatcaaaatatatatactaaagactttaaacccagaaataaacaaaaattttagaaacagaagttagggttttaatttctagaaatttagaagtaacttagaagctacaataacataagaatcaatacaataattggggtaacgataaagaatcaataaaataacagagttaaaaagttgagaagaagaaaatcaaacctttgcccactgagattgagatttatggctgttcaaaaatcttaggaaatgatatgcatggctgagttgaactcgggcgagttggaaagctgagtctcagactcgtttcgaagccgatataccattatagtaagaagaagaccgagttaaagaaaaactcgactgtttttaacaaagttagggatattttactatttttttttttttttaaaagagaagaataaatatgaatattttcaactcaatattatttttaggttatgatatatgtattatcaaagttttctaacacaaaataataatatggttgtttagataattatcatattaaaactacatatatatgtgtatattttaatattaaaaaaataaaaattatatattttaaaatattattaaattaaaaatctgattaaaaaaattaagtaaaactaaatt

SEQ ID NO: 222542 - DNA, 1345 bp, Cannabis indica
tatatatataaatataaaaaaaaagagatagtagagtttaacgttataattgtgaagcagagtgataaaagagcacagtttgtccattatatttgaactaagaagtagaggaataataatggtaatgtcgaggtttgttgaagataaaagagcactagttttgttagcatttaccattagttttattgttttgtcagctccttgttcatcttctagccactgtattttcaaagacccaataggagtttgttatgtggtttaattattctttgttttaacagagtttgagtttctctgtgtttgatgtgatccaattcctttgttttcctttgtgatttgctcctcaattgtacttattttgaatattgaaacaacactacatgtctaatgagatccacatgtcttttgatgcatataggatttgggaaatgaaattgtatcattatttgattcatttcttatttgtttttgcttccagttcttggtataagttttactaaaaacttttctgatattgtgttgtgagatgttatagatttttaatctcatctttaatgcatattcactataatatttgataaataataatggtaatgagaataaagtttgagagagaattttatatttgttataatgtattgattttattacactatttattcattcacctctttatgctgcagaagtagaacctagctacaaaattaaatgctatgctgttgttgtattcaatgtactctatagaattaaaatgatatataagaagagtgtatttaacatcaatgggaaggagtatcgttgggcaatagataactacatctcattttgtactaagtcatctcactcttttagtagttgttgtttttcatttattaataggtcttgtaactttgccgcacataatgtggttaggtgggctttctcccatcagacttttgggtctatctcggttgactctgtcccggaaacctttttttgtaatgaccgcgaggtctaactatttatgactctatgatataaacgcattttttcaaaaaaaaaaataagggtgtctacagcaaggcttgccaagaagccaagtaaagcaccagcaatgacctcaatttcagtatgatcaattgattcttttagtggataatagcgagaaattctttctaatcatgccccagtgtcatctgctaaaccagaaggattctgcatctgagtcttgctctctgactttagtactaaaagggcatttctagtttgttgtatgtgtgcgtatttttttattttctttcatgtgatatgatgaagagttattcagtggatctcataagtgtaggaccactacacttactacagc

SEQ ID NO: 222543 - DNA, 1446 bp, Cannabis indica
aaaaaattagggctatactccttggactcgacaatcgcattgatctgtagtccttctgtccactttggtctgttaagtgccaaagtggactgccagagtgtacataagtgtacacgtgacaaaatctcatttatccacctaatattaataatatatattaaaagataatttaaaattttaaaaatcgggaaaaaaaataaataaaaatttttttttcctcttttttctttttcttcttcccgacctttccaacattggcttcccaaaccttaataactctgcctgagatcagtttctcttcaccacatgccatgaaaacctgcacctccaagccatctaacccaacccatattcgacccgacacccaaacgacccatcccaaacccctaaatccctcccaaacacaaccctgcacaaattggagagatgtacacaatgacgtgttcggtgctagaaaaattacgcgagagagcagatctgagaaggagaaagcaagagagaacatatctaaaatgaaaacggcacttgcgatggcaattgcgatggcattggagaatgacgttgggatctcagggtttgggtctcagtcctgaaagttcttggtgatggcgacgaaggtagatctcggggtctgtggttttcggtgacggtgacaacattgggatctcggggttctcggtcagcagtgtgggattggtcggcgacaacacataggtctcggggttagctggatagagaaaaaactaagaaaggaggaagaagaagaaagaggaggaggaggagttaattggtgatcgttccagattaaacaaaagaaaaagaaaaagaaaggaataaaggaaaaaattagtaatttatttttatttttaaaattttttaaataattattattatatttaaataattattatttttaattttttttattttgtaaatttttaaaatttttttaatttattaatattaggtggaacaataaaagtttaccacgtttatatttatgtacactgtgacagttgactttggcacttaacagatcaaagttgacagaagaactatagagtaaaatgattgtcgagtccagggagtatagcccgagtaaaagaatttaaccgtaacaaacatgaaagtataaagagtttagctacaaattactactaataataataattataatattgaaatggctgacttcataacttttgagtcttgatgacaaatcttactaagtcgaaagtacaatgctcatagaccctatagctaaattaaaactgatatataacatgtatatatatattacataaatataaaattaatttatcaaatgctttttgaaaaataaaaagcatatataggagtagctatattaataaacgcaagtccataatttcaacactcaggtgtcgacaatatttaacttaggaaataattaatctagtttggccg

SEQ ID NO: 222544 - DNA, 4451 bp, Cannabis indica
gtgctaattgctataaacggctactttttatttattcactataaaaactcattttccactcaaaaatttaagttagctgagcattttgttcatataccaaatctattcaagtgattttaatgagctcccaagtttaaaatccaacaaaatactttgagctaaaatttgaatttatttcctctaagtgtacttgctaatcactctaggttcttcattgtatgatcatacttctaaagtgagtttgtttgtaattcctaacatattttcaaattgtgactgaggtgaggttggcactggaattgtaaacaacccggttagagtgagattttcactaaaataatctgaggaagaggttgatagtctttggcggtacaaaactattgtgagaggtttgtaaacaccttggtgaaaaattcatggttgtaagggttagtcaagcccgttaacttggctcgatagtggaactcaaagctaagtctacagctttgaaaatcaagaaagtaggtggcttagttctatcaaaccttgtaaaaattgagagtttgtaatttcttacccttaaactcttaagtttacaagcttgattatttgatctatatatttgtttgccatattgtttgtatttacttgagtaagttgattaattgcataatgttgtgtcaaaagtattaatttaccgaaataagcttaattttctaattcaccccttcttggaaacatatcttaggttaacaatattttcatgttagtatcaagaaaagaagagaaggcaacaaaatttttaatttcataaatgaccaaggtacaattgttgatgaatattctgatgtgctggatcattttttatcacattttaggagcattatgggcagccaaagttcagcaactattaaaattaagtcaatgcattgaccttggttataagtttttcctggatcaatgggttcaattgacaaatcctttttcttttagagaaattaagaaggttggtttcagcatccccaacactaaaagtcctggccctaatggtttttgttaagttttttgaaggagatgtggcttgagattggtcaagaagttagcaatgacattgtccatttctttaaaacaggtatgatcccacctaaaaatcaatgaattgttatatctttggtcccaaaaattaataacccttcttaggttgttgactatctaatatcccctttgctttttgttctaatcatgaaatatcttacaagaaggcttcaactagcaataacaagaaaagctttaagtatcaccctatgtgcaaaattttgaattcataagtcgctgctttgtatatgacttaagaggtccctatgaggcctactaaatggagaatgaaagattgtgatgttattatcaagaaattaagcttagagttcatactagggctagtaggcatttatcgtttactggtagaattcagcttatccatttcgtgcttcttaggcttcaaaattattggatgagtatttatgtgcttcctcaaagtgttcttaaagaggttgagaggtttgtcgagatttcctttgaagtcagaatggaaatagaagcaagatacacattgcttctttgggagaacgtatgccttcctaagtcgcttggaggtcttggctttaaggaaggtttgaagtggaataaaggaatccttgccaagtatttatgggttgtgactgaaaagcttgatattttatgggttaaatgggtcaacgctattgatcttaagggattagatttgggaggacaacttaaaccagatacaagctggtattgatctaacctgtgccatttcagataaatatttgacaagaaaagcattgttgttgctgggaatcatggtaagttcaaaattgaaaaattgtataacaatcttctgcattagattccagtgagccacaagagtgcattgcagtgtagacttattctttccaaacaaaggtttataatctggcatgtagtgaatttccatctcttaacacgagaccttcccaagttccatattcttattgattctttgctttgtctagtatctgttttggtgaataagagttatgctcatttgctctttgagtgttccttttctcaaagaatagtgtgcttgttttttgcttggattagtttttcggcttggcctctagattttaataatttgaaaatatggttaaactctaaaagaaattgaatgaaagctgatattattaatgctaccgttgcagcgatatgtattgcatttgcatgaacaaaaattaatgtgttcatgatggttactcgcactgtcttgtatatccagcagaaagtcaagagtacttcaacagagaataacaagtctaaatcattggaaatgcaatatttttgaagaaaggttcattagtcatttgattaatgtgttaagctttataccaaaaaaaaatgtaagtaatataaattgtgagatgttttaactaaataatttttttgggtgtcgtacttcatgtgatgtctagtgttaaaccatttgacttgttgcacaaaaagtaatatattctgcctcgcattagtaaaaaatgtacatcaaaataatataaccattggagattatgtaagattgaaatgaagatagaaaaataaaaagaaaaaccctttataatttatcttgccaaaagtagagaatagggacaataaattattatattaccctcgttaatagttattacaatcaaaagtaaacaaacaaaacagtaatctttcttataagaactactttttccttcttgttcggaaaaaaaagtaatgattttttttttttcatttcaaaattttccatctcttgattctttttccttgtgctaacattataaacatctatttccatcaattttaaaggaaaaaaatatttgttagagaataggttaaaaagtcaaaaaaaaattatatttgttatgcccttaaattcctactcagctaagcattttaccattaagtctttgcgagccttcacatttgttcaacccaggagaagagatctttactaggattaagaaactaagaatttacaaggtagccataaccccatgatgccaagccataattctatgatagggttttggtaattgaatagcgaagcacaaaaaggtgccaccactaaactattctgcgagccatctttctggtcccttgacttccctttctcatccgttcaggatggaaaaatgaaacaccatccgtgcttggtgctgagtccttcatgtctcctgaaagatcccaaaaaaataaataaataagatagatgctcacttttaacgaaatggcaattggtaaattaaggaacactagcccttgatgaactttacttgcattgaccaaattcactaaacctgaacaatgcacttaatgagcatcggaagcagagataaggttatggttattggaatttaattatccttcaaatataagttgaatgacataaaagtacaagtaaataaagatcacaggaagaaacagatgccaatgattattttgctttaatcattaacatacaaaaatatttcaagataatatttctttaacaatcatttatgtgacaagccaaatacccgacttcattattccataaattccaaatgaacaatttcagacctgaggtatctaatttttgtaggcattacaaatgattattctcgtgtcacttggttgttttttaggaagaatcgttctgaattgttctccatttttgtaccttttgtgttgaaattcaaaatcactttaatatgtctattcgtactttgagaagtgataatgcaaaagagtacaaatctggtgtctttcaatcttacatggattaaaacggcatgcttcatgaaacttcttgtgttgatactccatctcaaaatggtgtagccgaacggaaaaatagacatctgcttgaaacagctagaactctcttatttcaaactaatgttcctaaaccattttgggccgatgcagtttctactacttgtcttttgattaatcgtatgccatcttctattcttcatgatgaaatcccttacaaaattcttttcccaataagctattatttcctattgagccaaaaaaatttggaagcacttgctttgttcgtgatgttcgtccacatgtcaataattagatcccaagtcattgatgtgtgtattttttaattagtctagtctccaaaaagggtataggtgttattgtcccgatattaacaaatatcttgtttctatcgatgtcacttgcatcttcgtcgtcaaattcggaactcacaaatgatcttcccattgcactacgtaaaggtatatgctaatgtactttcctcttcttcttgctcttttattgcttctattgattctatcactattcctataacagttcgtgaagcaatatcttaacctggttgccttgctgtgatgatagaagagatgaatgct

SEQ ID NO: 222545 - DNA, 2212 bp, Cannabis indica
taaaaagagataaggcagcaataatatcaatattttcttttatatttttttattttcttttatttatatttttatatttttttggttttattttattttatagttctaatctttcattaatttttatcaaaaattttatataaaaaataaataaattattcaactatttatatgtaataaaattcttaattttcttttttctttttagtctcaacagctttaaattttaaaaaaatttaataaaattaatagttaacacaaaaataacattatttattatttattgttaatttattagtaaaaatataaaaactgtcatgaatgtatagtagttaactattttttgtaattaagtaatttttttttattttttgcagaagaaaaaagataatcttttttaaagaaaaaaattacatcatcaggcacaagcccagtttgttaaacttataaattactactttgaaaagggatttttacaaaaatactgaattttgaacaaaagtttacaattttattcatacagaattttttataaaaataatgtctttttataaaataacctaaaacaaccataaaataacaaaatagaacaattaaaaacaacagaataacaacttaaaaacaaccgtaaaaaatcagtgaaaacttaacgcagtatacagtatgaaacttacacaatatttttgaagaaaaaaacacagtatttttgaaaaaaattctgccccacaataaaaaagaaaaaaagttgaaaatttcagtatggggtgtaaaaatctcttttgaaaatagcatattgtgtttctaactttaaaaagtttagaaaacacacatcaaaatatgatatttttaattatatcacaattagtacaattaaaaaattcagatttacttaaatgatgccattttgagcttttgccaggctacgggtctctctgctaataagtctaagtcccacatttactttggagaaattaaagatgaaactaaagctcagatctggaccgatcaaaatggaggacgactccttccctctcaaatacctaggggtcaaattttgaccaactaaatagaagactgaagattgtggagtgattctggacaagattaataagaatctaaattgttggactagtaggaatctatcatttgcgggtcgtgcccaattgattcactcagttctcctcggagttagaaactattggatgagtatctttactcttccaagtaaaatcacagctgccattgataagagttacagagagtttttatgggggaccccagggaaccgggccaagctccatcttgcttcatgggaaaaggtttgtcttcctaaaaagtttaagggagttggttttcgagagggtagaaagtggaataaagcgttgatggccaagtttctttgggtcattgctagcaagcaagatagccgttggatgaaatggataaattctatttacctaaaggagcaaagtttgtggagccttcctatcaaacaagacatgagctggtacttcaaaaaattcttgaagcttcgatctagtacaaatgagacacccttgttccttgctgaaaatgggtaaattttatgctaaacatttttataactcgctttttgacgctcatgatgtgaagcacagtagtgttatttggaataaacttattattccaaaacatagattcatcttgtggtaagtttgcaatcttcagctcctcactcgagatcatttatgcaagttcttgagcatcccctcagatctttgcctggtctgcaagtctgttattgaaacgcatactcacctcttctttgaatgtgtttagtccaagaaaactttttctgaaattggcagatggttgggacatgtgaaatggccggaagacatcagcaacgtccaacattggtgtttacggggtctcctcgacttcaagaatcgtataattaatacagtttttgttgctgccatatatatgatttggaagaacagaaataaatgtatatttggtttgccttgtgtcactcctcataaattgagcttggaagttaggaaggttgctcaagctagaatattgagcatgacttgtagtaccctaagaaaaagggagctagcctcttgttggctctttgagttgttgttttgtgatgtgctcaggttgattgtatcttgttttgttttgaataaaattccttttcgttcaaaaaaaaaaatcaaattta

SEQ ID NO: 222546 - DNA, 3576 bp, Cannabis indica
ttacaaactcaaaattttaagtaattattattatttgtgttaagaaacatggggttccatctcaaaactaattaatgataagtggagtagcccatgttcttatatatgactcagtacttttacatttaatccatgtgagacaatgttctccaatatcccctcaagatggtggctatttttacttactaaacttgaatcagcaccttatcacaagtcatgccatttgcacgcttatttttgttcagatatcgcgtctttgcactatctggatctcgtgcagctggctaaccatttagatatgtgtggatcaaaagcccgctagagagatagctccgataccatgttaagaattatgaggttcaatctcaaaacaattggtgatgagtagagtactcatgttcttatatatggctcaatacttttatacatttaattcatgtgagacaatattctctaataatttaaaatggagtcatatgcattttttgttagatgaatatatgatttgagaatttttaaacaataattaattattataattttaataattttgatgtcttcttaagattttttttattcttcctcgttatgttttgtgaaaaaaaaaagagagttcataagaataaaaaaaaattaaaatttaaattatttagattatttttaaaagataattctattttggattttttatttgttcaaaattcatgtttgtaccatctattttgatttggaaaatacgtgaattttcgaccaacatcaatatttatagagttaaaattattattattattattattattattatttgttactaaaaaagaggtccaatatatatatattgaaagactaataagtattatttatgaaacataattttttttttaaaggtaaccgataaatgttaaaataataaaagtaacaaagttgcgtaattactggaggattttctttcatctataaaagtttattgtctattttaaggacatgcataccccagaagaactagacaataaaagcttaatattaatttttttttttttttaaaaaaaaaaaacctcaaaactgagagttgtaattttcgacccaccaataaaacacctacaaaaaataaagagaaaaaaattaacatataccaaatatttaataaaatatgaaatatagaatttaaaccttgtatttggagtccaaaattgtattatccgatctcttaaatatgaaattaaatagaaatactaaatagatatatagtaatggaaatcataaaaataaatattcttttcacaaaataaacttataaaaataataaaaaaatattgcaaaagatattcaaataacaaaatatataaacttataatacacaaatacacttcactataatttttgccaagatatattataaacatgtatttatattgataagaaaaaaaatcctcttaaaaaaaaataaaaaaccttatcttatacatatagaaatactaaagcaaaagaaatgattaaataatgaaattaatgatgagatagaggcaaagtaaagaggagtggcaaatgttggtttggtcggaaaatgagtgtttggatctcattaacaaaccttattatctcaaatcaaccatttttttaaagcttgatacttttgactcactcaatcaacatacaattatatatttttattacaagaagagttttttaacagctaagtggagagacatttcatgtttatagatacctaattagtcttctaatttgtcttcttgtctcctaatggtgtaacaattcgtactaagtgtaaaataataataataataataataatcaaaattaaataataaaaaaaatgcccattatttaatatgacctacctcactacctgcccttttgtttaatgattattatgcataaatgtaattagattccatcataaattttcatgtttttactttcattgattttgttttctcttctctaaattttcattgtttattgtatattctcttttcttttttattacttaatttcatcacttttgtcttgtaaaaacactgctcattttagtatttcaacatcatcaccttccttctattttatataaaaatatatttatttcaaaagaagaaagataagacagtagaagatattttattttatttatttatttatttttttgttttggttgaagacagtattacccaatactaagactaaaatgtagaaatgagatgagactggtattcatgtcaatcctatcagtcctatggagaaactctttgttttggagtttagtcttaattcttgtagattttatggatattttgtcctatgtattttgttgctactattccttaacttgattccaaattttgaaaaggtacttattacatattttcacatttcatttcatcactcatctcctcattttttttatttaaatagttataattttatttttttttagaaaaatttgactttttatatatttattggattaaaattattttccaaaacttaagttaacccatattagtagaataggctaacatttcataaaattcaattctacccctctcatttcaaacatctaaccctttctcttcatcccttctctctctcgcactctgaactcactccaaggactcaacccacaacccaccgcccataacatcggtctcttctctccacgaccactgcgaccacagacccaatgaccaccgcagacctaacgacttctccatcaaccacggcttctccatcgataatattatcaaacaaataagttgtatgattaatatttgttatttgcgagtagatattagatttaggttaaatcggctagattagagttttgggcaaaaaattagtttttttgccaggcctgatggtggttcgatgcctttctgttgttaaaatgagtaaatgttgaaaacgaaggtccgatgatagtctgatggtagcccgataatatgtttcgatggtgacctaatgccttcctgttgttaaaatgagtaaatgttgtagacgaaggttcgatagtagttcgatggtggcccgatggtagtccaatggtggtccgatggtagtctaatggtggcctaatactttcttggcgagcttaatgaatggggcttaatatatataaatgttgaataaggttcgatggtgacctgatactaccatttttttatgtataaaaacataaaaaaaatggctagcattgggccaccatcggaccctattggaccaccatcagtatggatgagaatgatgagtatggatgattaagttaaaaaagaagagaagggagaagggtattaatataaattgtgcctattttttaaatttcggtaaacttgtgttcaaaaatttaagatgcactaaatatatgtatataaattcaatttttttatatgatattatacattttagttatttaaaacatcctaccaaattttgtaaaattcataataatttacaataccatacaatagtctgtttgaactatactttttgtaacgttaaatatttgtaaatttttcaaaaatttataaaatatttatataactatgttgtatattgtcatat

SEQ ID NO: 222547 - DNA, 2608 bp, Cannabis indica
ttataattaaataattctaaaaaaggaatgtctatttaattaattattttaagaaaatagttaaatataattaattaaatttaaaaaagaaagtctacctattagtaacctgctattacaagttaaaaaaaaatgtaaccgtataggtacaataaaaatgtaactcacccatatttaagactagtaatctatataatatatatacacgtagaaatttgatgtatatatttaaaaagtaatgtggtccttcataaaactatctatgactatcattacatatatgtatttatcgtgccattcaaataaaaaatatatgtatattattgtgtctaaaaaatgtgtgttatttaaatatgtatctaacaatattacttatattttatcgagacatattaggtaataggtatatatagagagaggagaggagggagggggagatcaaaatatattaattattatggtgattaaaatgatgtaaataatgtttctatttctttaatttattaaataattagttaatattgtgcccagagttagtcttgaaattttatcataagaaaaaaaaatattttcgagttcttatttagaaaaaaaaaaatataatatttttcataatcagtaaaaatatatatataattttgaaaaaagagaaaaaaaaattggatccttgagctagatgggtcataatacaaacttatcccgcctatatgtctaaaatcggatctagttgtggctcgtaactttactaaacttactatttttgtaacttgattatcatttcagtttagaatctatttaaactaattactactgtatttgtaaggaaagttgatgattaaataatattgaatttccatttaaagaaatgatgtaacacgatttgagaatatattaaataccatatgagaatataaaaggtttatggtgaagaaataaggaaaattatttcatatactatttttttaatttttttttattagatttacggtttgaatttctaaagtggttgtagcgctagttgtaatagggatttctatacgattttttattgcgaattaggttgcagcgctagttgcaataagaatttctatgtagaattccgtaaaaaatacaaaaaaaaactgttttaaaagtgtaaaaataaaaaaatcccaacaaataattactacaccgattaatttaatattatatatacatgctgcaaaaaaaaacataatattttcaaagtcaaagcatgtattattatatttataataaaattgataatattattactttttagatttttgcattgcctatgtgtacatgtaagcatcattgtgattatgaatgataattttgtatagcactaatttaattataaccatataaagttaattaatttcttatcaattaggagtaactgagtatatatatatataaggaccatactaacactattcatatagttaatgataaaacatatataaactttatgtgcatgaaagttgttaaaattaatgtgcaataaattaatattaattacataaataatttagggtttttgtatcttaaaccctacgttttatttttgacagtgtttaaaatatatttaatttaatatattatatattcatgtatttgagttgtctaaattaaataatggtactagctcacctattaatgattcttccatttgattaagtagcttattacttttataatgaccataagattaagattattaaaaattggttaccatatactaattaatttggttttgtggtcataatcatgaagctgaccaaaaaaaagttgtgatcaaaaagcttataataaaaaagtgagtattaggaagatgtagttttctataagaactttccaatattattattctcaattatacatactacttttattaaatttttccccatttttttttttttttaaatggtgttttttcccttcaaaataattggaaattaataaatcactacattattatttccgcaaagaacgatcgttgtttcttcttcatgatacaataattaatgctacatattatatatatttatagagaagcatttaaaagagaaaagagaaaaagagagtgaaaaatatataaataaaagaaagcaaaaagatgaaaagaaattgagagagaggagaggagatgcatcttatctctaatttttaatatatatgaaatatgatgatgataatgatgatgatgatgggcaacccaaagaagtgtatatgagatggactaaatagcaattgtgaatacaagggcatgattttatgcaccatcttctcatgatttaagccactcattatcattatatatgtataataaatgtacatagatacatatatagattagtttttgagaattgatagaaatatatatatatatatatatattaacaaccttatgcatatattatatagtatcaaacaatgtatgtacagtacatgcactacatatgtatatatgatgtatgtagaaaatattcacggatctatcaaaaatatatgtattgttttaatataatatatatgaagaataataaagaatatgcagatataataaaaaaataaaaataaaaaaacaaagaagaaagaaaaa

SEQ ID NO: 222548 - DNA, 1841 bp, Cannabis indica
  modified_base (290)..(290): a, c, t, g, unknown or other
taaatctatctggaccaatcacaacgtaccatgtaggtactcacctggtacttaacgtccaggttcctacggaagttccaagaccctaacagaaggtattttaccgccaaaatacgatttaggtatttatctgctactcggcataaaacttaaatatttatgccgcaaattactctaaattatccataagtaggtagttgagtttaaagaagttaggatcctcatatctaacattgtcctcaactcacaacacaaatgtaaactaatgccaccttgaatggtggccttanattaaaacatgtcatcaagttttggtgtagttaatttaatagtgccacaagaaccaaacaacaacaacacattttcctcaatgcatgaacagtcgattctattggtccaagccaattgcctccacacactattaaatcaatgcatttcaattttcatccaactctgcctttttcactgcggtacgtagctgtctcctaattaaggtaaagctaattcataattatttctagtattctaatgattagtagatatatgctgccactaagcaacattagctcttaaaattaaagacacagagcatatagctaggatcattccttttttttagaggttggttgctcattcagtcatttgatgtagctgcagatctacattaacatcagtgggcctcatttctgatcaacttagccacaagagatgacataattgggaactctgtaaatcaaaaccagctggtttctctcatttagtatgacactcaactacctgcagagtagaaattatgaaatatataaatactattaatatttaataggtattacaaatgcttattatctaaaaaatttgaattttcatatataataaaaaaacttcatttttatattatatgggctaatgttattctgtcaagaaagataaaaaaattgaatttggcttagatattttttatatatttaaattaagaataaattttatataataagcataagtaaaattaaattaacaagttaaataaatatacatttatattagtggagaaatgtgtttaatcataaaaaataaccctaatcaattttattaacattttttttttacagtaaagataaaaagtcaattttttcgttgtattacaattatgtcccaaactatataaaaagaacaaataaatattatttattagtatatatatatatatatattaaatagtttgataatataataaataagatactgataaataaaaaatctacatactttcccctttcttaacatatcccataacaaatttttgtattaaaattacttcaaacaaatatgtccaaaacaaaatgcttcaaaataatacatatcccaagccaaacgtttaattgatgaaagataaaaagatactaaccaaactttttcaaacattttaactactattttttttttatatatatatatatatatatatcaattcatttatatttcaattcgaaattccttaagtgacatatatattattataaaaaataacagatatgaaaatacacacaatcgtaatttgtaataaattttagtaagaccgagtatcatcccacaaaaactgattatcaattaccaattaaatatgttttggtttctatttgatcaattaattaaaagttttagaaaaaaaaaaacaacaataatgaaaggttcgagaagtaaacaatgagaaaataattagaactatgatccttaactattcttccttttacttaatgcaattacccaattcattttcttcctattcaattaactaagttgataaaaaataatttataatctagttaagacttataaactca

SEQ ID NO: 222549 - DNA, 1641 bp, Cannabis indica
attgaatgatgggtaaattttttgaaccagctgctcgctgccccaactagtgaggtagggaataaaatatagcataaatcattcgtcacattgctagctcacatgatagtattaaaattattcaagtgcgcaaccgaatctgtagtcccatcgtatgacgagacgtgagggtccttcaatccctaaggaattcaacactcatgatatctggatggaaagggtcgggctcctcgtcaaagtcgtaaccagggaatttcccatattccccatcttggtacattctgaacttgtcctcaaactcgttgattcataattggataggatcctcttgtttttgatcaagttgttggtgtaagtcagaattcttctgatttagttgattacgaagctctaattgttgttgattatagttacttatagaccttgtccttgagtaactttcagttctagatgttcccatactctctcgatcagtactataacgcgttctatcccctcctcgtatagatcgaatacgagttcttgtatgtccagagctagaactggcctcgtcatttactggccttcttctttgagaatgggttgatacatgccccctgtcgggatttgtatgtgccccttccccatcagttcgaaagggacgttgacgatgtctctgtagcaacccacctatcctcggttgagtcctaggatctctctcgttaccacgagggatttcctattccctagtacagggttgccttctgctcacatttttacgtgaagattctggtaaatcattgtttctattccactgggttgtaaatccccagcgtctacgaggcacctcgtggtgatgtgcctggttatttggttctcatcgtcaggggcatccttagtttccccgagttattcttcctaagcattttaagggtcccctgagctgtctcagacctcgtggcctccttacctcaggatcatgttggttttgagcgtcattttcctgagccgccctggctgcgactgcctcctgttccaactcagcatttcatcagtttgcctcctccaaatgtcgcttgagttcgaaattttccaactccaccaatggcacgtatctagtgggatcataagcatcttcctccctaggtacatacccaccagcttcagtatgagtttcttcattccaaatttttggggtttggccaccttcaggttggcttctccttgaacacgtcgatcgagttatcagttgggaggcctttgtgagcctgccggctcttttctagcgtggtgagttgtctcttcagtttgattattatcattttccctcttgttagccacagagaaaagtttttctatttgttagaagggattttttctaggcctttttcacacaggctctcggtgaaagcaccaaattgttgacgcaaaatttcgttaacgataataaccctattttcgtgataggatcactacaaaaattagttgaaatctaagaaagaataataagacaaaaacaacaccatgtttttcgttaactttgcataaaccacgagtcaatcttattcagattagtctaatacaaatttctttttctatcaaggattttttgtcccctttttctgtacattttgcccctatttataatgacatagggtggca

SEQ ID NO: 222550 - DNA, 2126 bp, Cannabis indica
taaaaagacatttgctatagttgttatagtttaagagaatttttgtacaaaaacaaaaataacaataaaatataaatctgtaaattttataattcaaaggaaacatttagtattactaatttaataaatgcatttcactacccgtactatgaaatttgtatttaactaataactaaaaaattcacaatattatgtgtaatgaaattataaaaaattcacaataaaagagctgctgtagtgtactaatctagtagttatcctataattaattaataattttttataatttttattaaaatttaatattaaattacacaccaataataatattatatcccctaaaaatactaaccatacaatgatggtctttaccatttatcttataaaaaaaatattattattaggtactattttcatgtcatgttgcgattggttagcgagatttcttaaaatttattatattaaattatatggaactcaatacttaattagaccaatagtgatactgacaaataggaaaagtactagacaccagtatttctctataaaaagctcaagagaacagtggagttgatgaaacattgatgaagtttccctagaaaagttgattaaatttcctgtttccttctccccactcaatgagtttgaaactatcaccatgtcttctagcagaaattaacaaattaatacaatttttaaatttgtagaaaatttcattgggactctcaattaatgtgtaacacgtacgcaataggtattctcgtctcgtcatgattatcgggttgacgcgcccacagaatgattctgttcagactctccttcttatataaacatatatcaatgactcctctcaacccagctcatacactctttcaaagactttgaagctcataagttcataacaggtacgcttttcattctattctatactactactctctacttattagtacgtacacgaatatctatgtacatcttcacttgctattgtaaatcaataaccccaatatacaactgattattgacatttaaaaaagttttttaatctattttttatatattggtgtatattatgattatttaagagtatttatatattttttaaaaaatttcaaataatttacaatattaaaaataaattttttatattttatgacacgttttattatttatttttagataaattgcggcataaagacttaatgttttagattttatacacttaaatacttaatgtttattttttagacagtagcatttagcttctgatgttaagaatattaagttttaaaataaaataaaaataaatgtaatgcatttgaaccctccacatgtctatatttatgagttaacgaaaatagtagtaacagtataagagaattgtaacattagatatttttgcctccaaaaataaacattaggtatttaagtgtataaaatctgaaacattaaatatttatgccacaatttaccctttattttttatatttgtgctaagtaaccatttaaatcttatttgttggcactataaattatttaaaattttctaaaattttacaaattgacttaaataactacaatgtacacaatcataagaaaaaaaattagactaaaaacttttttttttattgtccaacaccaaacgacgctttaaggagtattatccttgtatatcaacatttaaattctaatgataattacattatattcatgaaaaatacttttaactacgatttataaacctaaattttaaatattatgttgaactccaatcatattcatggaacttttttgtgttgtttttctaagatataattagatttcaacacggaaaaagttttatttttatttttttgaacttttttatttataaaaatagttttttagtaaaaataataaattattgttttagttgttttataatttatttagagttgttatgagatattttttcttgttattttgcttgttttatagtttatgatttattttttattattttttagttgttttttatttttggctgcgaaaattatatttttgtaattttaaaattttacaaatgtattttagtaattaaaaattttagattgtaaattcgaccattaatatgcttgttttgtttt

SEQ ID NO: 222551 - DNA, 2148 bp, Cannabis indica
taaagtggtcttaactttagttattctgattttgcttaacaattatgaaacaaataaaatgtaaagtcttattcagactattctaaaaatagaagtcaatgaatgttcttaatttattctcattccacataattttacagatgttggtttgaattgaatttatcacactttatgataaaaagaatatgagatgaataatacataaattacttagtgaagtcttcaaataagatttcagctaggaagaccaacaattttacagtggataataatggtatgttacggcttatgaaccgtgtttgtgttcctatggatgatgatatcaagagaaaaattttgagttagtctcatacaaatccttactctgttcaccatgaactactaaaatgtatcaagatctcaaatctatgtactggtggcctggaatgaagaacaatatagcagaatatgtcccaaagtgtttaacatgtcagcaagtgaaagttgaacgccaaaggccagcaggtttgctgcagccattgaacacactgtcatggaattcgtagttggattacctaggactacatggcaatatgactttgtgtgggtcatagtggacaggtttacaaaatcagcacactttttacctgttcagacgaacttctccattttatcagtatgtggaactatatgttagagaaatagttcgtctccatggtgtcccaaagtccattgtatatgatagggatctgaagttcacatcgagattctaggagagcctacatcgagctatgggtacctaattgaagttcagtacaacattccattctcaaacagatggacaatccaaaaggaccattcaaattttagaagacaagttacgggcatttgtattagactttgaaggatcatgggtaaagtaccttctcctgatcaagttctcgtataacaacagctatcaagctcaattggaatggctacttatgaactgctctgtggaaggaagtgcagatcacctattcactaggatgatgaagtaggaaaacaaagtttttgggtcccaaagctatttagataataagtaaggcaattgataagattagagcgtgcatgctcgctgctcaaaagtagacaataaagctatgccaatccaaagcggcgagattttgattttcaagttagagatatgatatttcttcgaatatctcctatgaagggtattagacgctttggtaaaagagaaaaacttacccaaagattcattggacctttcgagatcctagagaagatagagcaagtagagtacaggctggctatgcccccagcgttggtagttgcacataatgtgtttcatgtttcaattcttcgaaaatacgtgtcaaactcgtcttatattttgagttatgaagcattagaacttcaatcggacctctcatacgaggagcaaccagtgcaaatattagacagaagagagaaagttttgagaaataagacaattacacttatcaaagtattatggaggaatagttaagtcgaagaggcaacctgggaactagagacggatatgcaacagaaattttgggatgaaatttctataaggaggcgataattgtaatactctaaaatttagtaattggagtagcaaccctaacttagtcgattaagtataaatgagaaattatattattgtatgatttaatatgtagaaattattgtaatttattgcattttaagaccccgtttatgtgttgtgggcatttttgtaattttgacttgagaagggtagaaatcataatttaatggtatattgtatttatggactatattattatatagtatgtttattctgtctttttgcaggtaatttttgacaagtctgcacagtatatatagtcatgactggattttttgggccgaatcgggttcggggtccaaaatacatttttgagatttagttatggcttttatgtgttacatgagaaaatataaatgatatgatatatgtgtgtgagcgggaatgacaaaattgcccttatgtgttatatatgcttatgtgtgtgccttaggggaaaaatcttttggccaaataattttttttcaacaaaactaattttcagcaaaataaaacacaatttctgggttttgcaaccccaaactaccccattctct

SEQ ID NO: 222552 - DNA, 2720 bp, Cannabis indica
atgatatatatatatattccatgtattttacttcccttcaaactttagatttctctttgacaataaataaataatatatagaaaaaattacaccgtgcaccaatttttggaaaagaatatattttgacggtaaaaataattaattacaaatattcaatacttaattttttgtaaaatatgtttataacaaagagtgtttgtaaacatgtaaaaaatatttagaaactatttacaaacatgtaataattgtttacaaacttttatttcttattttcataaataaaatttatatttttataatatatcatatttttaatatacatatatatatatatttgagtttttgggtactttaattttctcccataagatatcactataaataatattttcaatgatatattaaataaatgtgtcaatagccttgtatcttacaaattgatcataatctaacacaaaatgaaaatactatcgtgccaaagaggttcgatccattttcaacacatttaattatgttcagccttaagttacaaaaactgtgttattttggtttcaaaattcgctttgtcacttgtaaattttaatagttaataatactgagttgatgagattattattattattatgttttacttaacttagtgtttgttataatacctatataataaatacactttatgttgattaaaaaatctatctggttgaacccaatgccaagacaagattaatgagctttttaagacaagagtagagtaccatgtgagggaaaatgaaaaaaaaaataaaataaaaagagtcaaggttgacaaaagaaagtcaattatacactctcatagtcatagtatgaaaacgagcttcacactctcgtattcatctttactcctaaaaagaaaactttagtaaaacgacaccgtttggatcaatcttccccatagagttgtgttcaaacaaagtggtcctaacccataacccatcacagtctcactcaaacacacacctacctagccacgcccacgcgactcagactttgctctgctctgctaaattcagttacaagctttattaacaaattattattttttctaagtggaccccacgaatttcaccttcacgccacctcacagcatctctccttcaccgtcaatcacacgcgctgggaatccaatctcatagtgtgaatcctctatatcaaccgtcagatgtgattactttttaaaacattttttgacagatgagccgttaaactgtcgcctcacaagtctcgagtatgtacacacccacacacatgaaaagattcacacgcgctcgactaaagaaaagaaaataaccactctcttactaatcgcaccacgtggctttactttggttgagcacctcaaagtggcctggccttgggctcgacgtgtcggttacgagttctacggatttgggcgccgcaagtaaggttgggtgggtgcccctagtcaaattaagtgaaagacggcataaataaataaatctgattttttttctttttaatttggtaatacatcactattttcaattattattattcctcttttatttttaattatgatcaaatttgagaaataataattgttggttccaccagaaagtactgaatagtaaaatttcgaggtagaaaatgattatcagtttaattttttttaaatatagcaataatgatatatcataattgtttaaaaaaagaagaggaagaagaagtcaaatggcttattggatcattattgttggtgttaatgggtaggaggtgcaatttttatgagaaatattgaaccttgagaacattgaaacgtgacggacataattggtattagatttgaaaaatcataaatgtaacatgagatgtttctcgttaccaaaaacctttttatttttgttaatgattcaataaatatataacgagttatatcctagaagctagaactttaatttctagtaggagtattattactattacatgcatctcgaatttttatttatttttcatgttgattcatgtgatcactaattttttttgtttaattcagatctataaataattaaaaaaatataaattaaacatgatgaaaaaactgtattttctatagtcattaatcgttttatatttatgtatcttttaaatgaaaactatatgagtattattttgtctgtataacttgcaacaacaatgtgattatatatatattgattcatattaatatattattgcttttatagttggaaaaaaattaattgaaagggaccgggaaagttataaccatcacttttttatttttatttttattttacgttgataagaataaacaatgtcaattaaaaataattatataacttggtttcatgaattatgaggctttttaattagagcattactcaaaatattacgagtgagcaatttataaaacacgagtttatatggacatataatttgaataatcaatcacacattccaaaaaagatatataaccaaaattattttgacaaaaaaccccggaaatttggacttacattatccctaaattaagggcaataattttttctagatattacaaagatatttggagagaccagaccggctttctttgagtctcaccgacccattcaaatttaccaaaattaaccatcattctaaaagaaatttatgagagcacccaaaactcaaccggtttccacaatttttttgttttttgtttttt

SEQ ID NO: 222553 - DNA, 1581 bp, Cannabis indica
aaaaattaaactaaaaaattattatagataccaaaacagtagaggttgcaccaattattttagaggatgcaccctaaaagctctctatatattattgtttatgtttgataagtttagaaattttattttacttaaaaaataatataataattgaaaatattttagttgtcatgattggaatgaaaagagtatataacaccaaatttaatatttaaagttggaaatggcttaagtaattaatttgaaaaatattactattaaactaatgggtatgtttgttcaattttttattatatatatttatatatatgaattatttgcagtataagtatcctagcaaagatctaataatttttttttaaagacatcagtacataaaagtattattctaaaaaaaaaatatattaataaaactataacttttgtcctaacttatggtagatgcaaggccgatcctaggcataagcgggctaggtctgtgcctagggctcacttattttaggagcccaaataaaaaaaatatcttttaaaaaatatacatattttttaaaaaaaatttaaaaatactatttctctttatagtaagggactaaaaattttttttgcctatgactcattttaactcagagccggccctgaatagatgtccccatccacacctaataatttagaggttaacctcgaactttaacatgtatcaaaattttctcttccaattttttcagacgttaaaaatttctttcaaactattaaaattgttaaatttaagaatttttgtataatttttcaatggaagcctgatgtgaatggaagtttatgtgttttactatttggtacgtgtcaaaattcaaaagatttttaaagcctaaaaagttatgaaaatttctcaagcacatcattaatatattgtgattcttgttatagtatcaaaagtcatatcctaaacttgttttcaacatacacgtatcctaatagttagtccgagtcaaccacacgagatctaaataaaaatgaacgagcaaatagcagagcttatgataaggtgattcaagatgggtgagtaaaaaataaccactattttaagagaatattgattaatattatcccatatagattaaatataaaatattgagccaaaactattgtctccttattcttgtcatagataaatgtttacttatattttatattatacatgtaaaatgatatctattctatataatgtaattattggtttgacggtgttttttaattttttatgttaattttaacagtataatattattttttaattttataatatttatatatttaaaaataaaaacaatatagatattttatataaagaaatttaaatttaaatttaaaagctttaaaatatttttaccagtattttgttgatttaacttttaattaaaatgagagacaattttgctcaatcgcgcacgtattgattcaccatgatatctcacttgggttttattatacatatataaccgcatccaaaaagcacacaaatatagtcgcaatagctaaaaaaaattaccaaaaattaaaaatctcaaaccctatttcaaaaat

SEQ ID NO: 222554 - DNA, 1354 bp, Cannabis indica
gttatttttttttatttatgggtatttatataatttgcaatccgtagttttaaaccctaactaatccgtaccaaactatttgagaatgaaccaaatgaatttggtgcgaatgatttagttaatccggaccgtttaaaatttcttagttcagtcatagttttagaaatatcagtagcggttcaatcctaatcaattcgtataattattttatatatacttaatatatataattttggataaaatgttaatattttataacaactttaggtagaatattgacattgacttaatattattatgataataattttttattattatttatgtatgattaacttattaaaagtaaaaagaaaatactgaaaaaatgaacaattaccgtaaaaaaatttagaacaactacgaaatataaactatagttttgaaccaaattaatccatttttgagtggattagtttgatttagtttggtttgatcatttaattggtggaatggtttgattttaaatttttaaaataccgtaatgctaatttggtttgaaaaaattaaaaattcgaaccaagctaatatgtgaaaattcctatttttatttaataactttctatgcatggcttgtaaggaattaagtttagttgtataggtgtttgatactgaataaaaaataaagatctagacaacatttcaatgcaaaattactatcctagctataataaataaatattttttaatttttcttggtgaaagatattttatatatttttcttgttcactcattcttctatgttcaaaaagatttattttagagaattaaagaaagtattgtgtttttctccaattcttttctttcatactcttttcttctgcccaaaattccctcttaccaaacatatttaataaggaggatattcttaatcactaatgagatctagaccgttgggttgccaacgtggcatgagctcagccattgatgacgactggttgttgacttgaaggagtgggcaaccatcaaagaacacgtgttgaaagctacagaagactgcttttcagggacacgtggcacgttcatagttcttaaaagcaaacttatccactactactaatactatggttgaggtaattgtcaacagagaaggaaatgagattgggcccacttaataaaaaggtgagcccattcattgaaaacgaaagcccgctattgtcattgttttgggccccacttaagaacaacatccttatcggacccaaaatcaaatatggacccataaaaagcaaaaattatcattaactaacttcttaaaataaaaagaaatattctcgtaatgttttgggagaatacagattgcgttattttaat

SEQ ID NO: 222555 - DNA, 1501 bp, Cannabis indica
aggggatacgatttgatagttgttaatatttaggtggcaaagtttgtaaattactaatttacaaagactagttatcatttaataaaaattaatgagatgaaacctaacaaaaggaaatatgtttctgtagatgtaaaagttcagggagaatgtttaacaagccctatattttaaggggcaaaattaatattaaaatttaagggataaaattgctaattttttctttaaaaaaaataaaataatatataattgacttaattttataacattttgttagttttttagatttttgatggacttaggtttactatgttctaaatatcataatatttaatgttttaaagtttttttctctctttgtttgaagcataaacttggaaagctaaaaatatggtattccaaaaatatcaaaattcagttttttaaactaaaaagacagtttcataataaaaaaatcttaaacataagcatacaacaataataataataaaaaagaacgaaataatataatattaacaattttttaattttaagttaatgtacttttcaaatttttaccattttttagtacgtatgtaattatgatttttgtaggctattcatattatattatacagtaatccagttaagaaacttatcatggatattgttttcttcacattattctttttttgatcaattttttttagatgattttcatattacattaatatgtgagttgttaaatatttgtttattttaactggtttttgtatttagtttttattttagttatttaggtaattggtttatgtgagttaatttttaatttagttgattatgtaaccggtttctttgtgtaaaattttttgctaagttgtttaatgtaattgatttctgtgatttaatttataagtcattgttaaaaaaatcttctatggtatgtatatattttttaagttactagttttcctatttgtttttttttttattattttaggtgtcatataattagttgattaatgtataatgaaactagtttttgtatgtaattattgcttttattattttacgtaattggtcctaagatttaattttaaatttagttaatctacataacttgttttttagtgtcatatttttaactagttgataaatataactgatttttcagtctcagattctaacgtctaactccgacgacaactccaaaatccaacggtgacaactccgatgtttagctttggagacttttcggtagcaacgacaattctaacgcgtcttaggggatagtgattgtgttagattaatggttggtcattctgttaagtttaacagttgacagttaaattcgttaactgtccattttgacaccaaatgacaaagctataaatagctttgtccaattcatttgtaactagtttttagttagacacatattgtaaataaaagagtattgattcaataaaagagcattactgctcacagtttttcaaagagttcgaactggtttgtaattgtt

SEQ ID NO: 222556 - DNA, 1554 bp, Cannabis indica
taaaatatgacattattttgttttgtaaaacaaaaacgtaatattttttgtacttttaattttcattattatttgatttgaattaactattttgttttttcacattattaacctgtctaaaagctttgagataaaatctcatacattttactgtatacttctaaattctaacaactcataacaacgaaaccctaatgactcactagctagctatatatagacataacaatataaaatttgaactaaaagcttttaggtataatatggggagggcaaagggtaatgaggatactgggaagaaaccaaatgatgatcaattggcaacaaaaccgatcgacgaaactgtaacaaacgatggcggcggtgcagccaaatcatcagttgaatccaaggagaaaaccgcaccaacaaaaacttctgaagaaataccaacggcgataaacgcagccaaatcatctgttgaatccaaggaaaaaaccacaccaccaacagcaaaaacacccgaaaaagtatcattggagagaaacaaaggcaaatcatcaattcaatccccaaaaaccacaacttcaaccgacactactactgagtctgaagttgttaattcgaggaaaattggggctaggtcattacgaaccacaccaaaatcaacaaataataatcatcctgaagaagtgaagaagattaatggagtggattcattaactaataataataaagtctgaacaaactgctagtgatcatcctagtgctgataaagtgaccagggaagaaggaaaacactacattaataactgtcaagggaactaaatctgctccaaatgataatgatgatcataataataactctggtaatttgattataccctatataatcatatatatatataatttctttgcatttatatatataatatataactgtatgattggttatattttttttataatcaaggttgctaataattaacagattattaattaaaaagaaaaaattgtgtttttggaattggattaattaattataatcaatcatataaaattataatcttgtttagtaactaattacgaaaactatatagcatttggttatgataattaaattgaatttttgagataaaattaatcttgattataatgttttataagaaaaaaaatatattaaaaagggatcaaataagatcaaattagtttgatgtatatgtaatttattaattatttttaattaattttaaataattatttaatgcctaataaataaaatgtaaccattaaaaactgttcgtttttttcccctaattttcctcatgttcatacagaaaactaagattacaaacttcaatataatattaaattgggatcatttctaaacttctattatatgaaatatattggtatacttaatttatatacgagtatatatgacactttataattgtttagcgatattttttaactaaaagttattttttaaaaaattatataaaactcaatacttaattacatcaataacagtatgatctcaaaaaagtattagactccgatagtatcttttga

SEQ ID NO: 222557 - DNA, 1269 bp, Cannabis indica
tctaagctcttttgatgatgcaaattatgaattcacaggaaacaacaatagaactctcaaaatctacaagggttccttggtgatactcaaaggtgagaagcaaggtggtctctactatctaaaaggagaggcaatgcatggtgatgcattggtagtagtagagctgtaacaccctcctagtttagatgcactacaacatttttttaattactgtttacacttttataataaaaaatttattgaaaaatatcattaatttaaacttttagataaatttaaacttttaataattaaataaaatttacataaatgaatcaatatttggaaggggtttgatttttcaggtttcaagcgggttgatttacataaatagaaagcttacccacaccgttgatgaaaaagatagaaaacttggatcgtcgaagcagtgcaaaaatctcaagagaatgaggtaatgtgggtttgggctctagaaagaaggataagcttcttcaaaatttactttctagtgagagaatgaaaagtaaaaaagtgaagaagagttttctccaaaaaaaacttaaatagtttttgtgggaccactccttcacttgccatgcattattcaactgaagaagagacatgtagaagtgcaaagcagctagttcactacaacaaataagatcagacagtcaagagcagatattttaaaggctaaaaatgcagcaacatttactcagttaaggcatatatcaattacaacttagctgggaagtccctatccgcacaaacatctacatagggacttagggggtaaaatgttatcctgattttttccacctgacatggcatgcttacatggtcaatatcagcgtcacgtggtagtacaactcaccaacaaggatgtcaagtcagcaccctagtcaataggggtcccgacactcaaacgggacgacgagtgacataccaatcacctcaagggactggctggccacccttggctggccctatggtcgaccagcttatggacaacataaggccggccagcccatttccaataggtgcatggttggccagacttggacctgacatgactttggtgcataaccttacacgtggactacaaactagactgtaaatcgggccttaataacccaataaagtagatgaaaaagacttatttttaaggggcattttagtcttttatttcatctcacattaccaacatgttgggagaacaatgtggttcattctagtctctatcatgtattacatataagtataaatata

SEQ ID NO: 222558 - DNA, 2135 bp, Cannabis indica
tcccctactggtgtaatcggctctgatcccgtcgccgatctccccagttcgggaccagttgaacacctttccatcgcaccatttagttcctccactactccagcatcgacctccacaccatcacaaattcaaacaaccatgctttcgtctttttcctcctctaatccgtcctcggttcagacggtcccttcactggcgtcatttttttccggcgccaccacggctccggcccagccacagcccacgccgttctttaatggtaacaatccctttcttggaactctaagccatgtggcttatactgataactctagcttttttgctaatcaaggcctatctcgcgcctctttcgatcgaccttctcaagatgatcgttatcacttgggaactggagatcaaccaaatataatttcctcattccttttgactggtcaagataatttttagtcttggaaacgagcggcttcgattaatatcgctgccaaaaataaaactcctttcattgacagcacttcaccccatccaccacttaatgatccttctatgtccgcttgggatcgatgcaataacactgtaatatcatggatccttcaatccgtgtctcgagaaatcgatgcaagcatcatgttcaaaactactgctcgcgagatgtggaccaatctccatgaccgcttcaatcagagtaatggcccacgcattctccaacttaagacctctgttaacaatgttaaataaggcgataactcggtcaccacatacttcactcagttacaagccctatgggatgaactcaacgagtatcaaccaaatactccttgcacttgtggctgcacttgtggtgccatgcaaaaagttcaagactactacgctagagaacagatccttcagttcttgatcggtctcaatgaatcttattggggaatacgggctcagatcatcctctttgatccgcttccaccattatcaaaggttttctccatgattgttcaacaagaacgtcaacgttgtcttggaaataccggcattgttgctgctgcccccaccaaaccaaaaccgaatcagccttctcggaacaagaaacctcgccctacatgttccaattgtcttaaaccaggacacttggttgagaagtgctatttcctccatggtttcccacctggatatggtgataaaaagaaaaatactactactgctcgggcaaaccaagtctcggccagtcctgagacccctgtcgccggctcttctcaacttcaactcagccagcaattgatctcactactcagtcagcaaatccaaagcgctccatccaccagcgaaaatcttcctgtggtctcaaacgtctttggtaaagataaactttttcctctttttttatggattgtagatagtggagctactcatcatatttgtcattctcttcattattttacatctctaaacactaatcctgttgctcatattgttactttacctaatggccatcagatgcacatcaacaaaatcggcaccgtaaaaatatctgataaactaatactggctgatgtattatatattccagaatttaagttcaatttattttctgttaagcatatcttgaacattgtcgtaacaaactcacatttaattttactcaatgtttgattcaggatccctccctgacttctacgattgggacagctaagaaagttggccgactatttttctttgaacaagaacgacattttctcacttccaatatttctatctttgcaaacacttcttgtactttgaaggacccctggcatcttcgccttggtcacccttctatgaacattactagtatactaaataaaagtttgcaaatctgtgaaaaacctttggattatatgtgctctaaatgttattttgctaaacaaaaacggcctccttttatttctaacaataattttgccaatgctgctttcgatttaatacaccttgatatatgaggaccttttcatattattagcattgaaggttatcgatatttcttaactattgttgatgatttttctcgttatacttgggtttacatgctaaactctaaatctgatgtctcttttattaatccacaattttttttcgctcattgcgacaaaattttcagttcccatcaa

SEQ ID NO: 222559 - DNA, 2416 bp, Cannabis indica
cttaaagaattaattcctcgcaccgaactcgcctacgggttctccagcgagagtgtagcaccacttggacaaatttgctcacatcttatagttggaaaagatctaaagagcataactataatggcagagttcttagtgatcgatgcaccctcaacttttaatgtcatgttaggccgacaagccctatatgacttaaaagttcccacatctgtattccaccggtgagttaagttccaaactaaaagtggagtaggctgtctaaggggaaatcaaaggattttaaggaaatgttaccttgctctatctaaggtcaaaaaggaaaatgcttccagccagagtttagggaaaaggtgggcattgcctaatgggaattgacccaagccaaagacaaagacatggatccccaacattggaaaacacatacaaatgttggcccaatagaagtgtttgatgaagtggagatcaatccagccatctcggccaggaagctcaaaattggtaggtttattacttgaagtaaattaaccttaataaaatttctaagagaaaacgttgattttttttcctttcacataaggatatggatggtattgactccactatcatgtcttacgccctaaatattgatccagacttccgtcctgtccaacaaaagacaatattgctaaaacaaatgtgcacatgcactaaaagaggaggtagaaaggctagacacaaataagttcattattgaagctttttactcggcttggattgcccaccccgtgctagtacccaagccaaataaaaaatgacatgtatgttttgacttcactaacctcaataatgcgtgtcccaaggactatttttgattccccagaattgatcaagttatggatgcaatagccagacatgaaattctaagttttatggatgcgtatttggggtaacataaaatcaatatgcatcaacctaagaacttacaagcttccgaacagagatgggtctatactgctataaagtaatgccatttagtctaaaaaaatgctggagctacgtaacacaggttagtaaaaaaaatgttaaaaaaccagttcagacaaaatatggaagtatatgtggatgacatgctcatcaaatctaggatggttgaggagcacatagaggacctcgatgaattcgtttaaaatgactcaaaaaatacaacatgaaactcaatgccgttaaagtgttccttcagtgtcagctcgggtaagtttcttggatttagttattaatgctcaaggaatagaagccaacctagagaaaatacaaggcctcctggatatgaagttgccaacaaaaacaaaggaagtgcaaatcttaactcgttggatagccacactcagcagattcattttaaagtcaacagacaagtgtgttcccttttttaacatcctccgaggtaacaagaagtttgaagggagagaggaacgcaaaaattctttccaagtgctagaaaatcaactcgcaaagcatcccatactctttaaaccttttgacgatgaataattagggatacatctggcagtcattgaatacgctattagcggcgtgctgataagagaagagaacaatatctagccttcagtgtactatatcaacaaaggactggttgagggagaaggttggtatcctttaatttagaagctaacttgctacacgatcttagccaaaagaaagctaaggccctatttgcaagctcatcctctttgggtttatactcacaaacccttttaccaagtttttcaaaagcctaatgcttctggatggttactcaagtgggctatagaattgggtaagtacgaaataatctttcaaccccacaaagctataaaagtgcatgctttggtagacttcatggtagaaggcacatgtaaagaagcagacaattcgaaagatggtcccgggccaaacacagaacaggagtccctaccagaagagaataaagacaaacccatctggaaactacatgtggatggatcagccaccaactagctttctcgtgcatgagttactctcatcacacctgggggacaagccctgcaatgagaaatcaaagtttgggttgaaagcctctaacaacaaaagtagagtatgtaagcactaataaaattgactaaaagcttgctcgagaggtacacgttgattacattgacgtctatagtgattcattgttggtggtaaattaagtcttgggggagtacacagctcacaataaaaaatgatggcttgtctcagcaagatccaggagctactcgcacaattcaagggttaaacattcaagaaaatttgaaggaagaaaatagaattgctgatgctagcacggtgacagataaggccaatatagttcctcttaaattcttataaaaacctattatcacttgtgtgtaggaaa

SEQ ID NO: 222560 - DNA, 2073 bp, Cannabis indica
gaccgcagtcatgcaattccagaacttacttcactatggatgaatatctaggatattcaaactcttctaggatttataaaatataaagaaataaagtttgagtagcttaccaattccaagctagcgttcaagcaatttcttcaaaagatactaccacaattgaaaagctgcattgtgaataaaagtagtgatgtgaaaaattgtatatttggtcgaatagccaaaaatacaaaaacaaaagtacgtacatacaatatatatatcatactagacaagaatgttactcggatagaatacaattgttcgtttcacttcaatatgaatcaatctaaacaaaagccttactctgctacttccataggagatttcatggaacaacacatatcaaggtaaaaaaatgaactttttaatccaaccccacataatatttttaatcaaatatgtaattttttttttaaataggtacggtaaaatttacaagtcaaacttgtttggtgagcctacaatagtatcagcagatgcagggctaaacagattcatactccaaaatgaaggaagattatttgaatgtagttacccaagaagcataggtggaattcttggtaaatggtctatgttggttttagttggagacatgcatagacatatgagaattatatctcttaatttcttgagccatgctagactcagaactcatttactcagagaagttgagaaccatactttacttgttttaaaagcttggaaagaaaactctgttttttcagctcaagatgaagccaagaaggttttcaacacttaaaacacttcttttttgaatatataatttttttttaagtataaaaaaacattattatttgttgtttcagttcacatttaatttaatggctaaacacatcatgagtttggatcctggagttcctgagactgagcaacttaaaaaagagtacataactttcatgaaaggagtagtttctccacctttgaatttgcctggaacagcttatagaaaagccttgcaggtatgattttaccaaaatattattaggcactaatttttttttttcattatatattgatcatataaatgatgtttttcataacagtcaagatcaaccattttgaagtttataaatagaaaaatggatgaaagagtcgagaaaatgaaagaaggaattgaagatttggaagaagataatgacttgcttggatgggttttgaagcattcaaatctttcaacagagcaaattcttgacttaatactaagtcttctttttgctggccatgaaacttcttcagtttccattgctttagctatttactttttaccaggttgtcctagagctattcaacaattgagggtaaaaaattatttttattattattattattatgttaactttctagctaattataattattaacctttacttaatttaaaagttactatttttacatgtttttcaggaagagcatactgaaattgctagagctaaaaagcaagcaggggagacagatttgaattgggatgactacaaaaaaatggaattcacacaatgtgtaagcaaattttacaatacaaaaattaaaaattttataaagtgattaattttaactaaacttaatttcttctcctccctaattattttattgtgtaaaataattaggttataagtgagacacttcggcttggtaacgttgtgagatttcttcacagaaaggcactaaaagacgttaggtacaaaggtaaggactacaaaaagggaaaaaatggcctttgtttctttattttatttttttttcatttttttttataaaaggacttaaaatatgcacaaaaaatatgacacacgttatatagtatagtatagtgctgttttttaaaccagtgggttctataaacattattggtttagttattattattcttttttaaaaaaaaatattaatttaaagaaactttagtttgtgtaatgatcatttcgaaaaaaaatgaatgaataatgctacgaaatgtacactacttatatttgtataaatcgaaggccaaaattatgatttattatttattta

SEQ ID NO: 222561 - DNA, 1553 bp, Cannabis indica
gccgctaataactattattagcgacagaattggggtttattagcgctggagtagtccgccgctaattaaggtaattattgtagtgaaatatattgacaagaattttatagagcactgcaacacttccttgtattgtcgcggcacttgaagcccaattttggacattgatgatttaagggttccaatgcctcaacattagatcctaatattgaggccctcctctaaagttgctaaacacgaacttactgccaaattttagcattttagggccctgacgttgaattctaatgttgaggcgctacttcacgctttccaattttttaatattagaagctccaatcacaccagatcttttgaatttctttattggattattctcttggtgatttagcaaaaaaatcatttaattaatcctttttgcacattattttctcaaatttgctctattattctccaatacttaacctaaaaatattaacaatcaaaagcgtaaaattacaaaaaatacaattaaaaactaataaaaataccttaaaaacctacttaaaaatcgtactaattaagtcctaacaacagttatcaacatgtctagaatccaaattacatgtttgtttgttatggaacatagtcatctcaaacatgtcacaacatgccttcttcctccccctcaatccccatttacaatttgaatccttagaagttacataaaatacatcggtgccaaacttcctcaccatgaactcaaaattcattttcaatgcaaaccttcccactatatatttcaattcagtcttgtttgggtacaacttgccaacgtgcagtttccctgaaggtgtaccactaagagaagctgtatgaatattatttttctttttgtctttccttgtccacacaagaggtttgaattttgtacaaacttcaaaatcttatggtacagtactatgaggaggacttggccgactactactagtccttggtgtttggtgattttcacaacaagaaagtcctctttcttgctctgcactctagttccttagaggtagttctaacctcaaagcaggtacctctacaacttcatcaacttgcaacatatcaccatcctcgtttaaacttaccacaagatcattgttataaaatggagcatcgaacttatctttgatcaaatgcattatcaactctatgttcatctatattagtagtggcttgcattgaaacttactgcatgatcagtttctagaaaaaaactcccaataacacttcgtggggggacaggatgagtaggccccgaattcgaatgcctcttaaccttataagttacaaatagtggaagcaaattctctacactcatttttacctccattcttaagaacaatcttacttgtctatctttcactaaaacctcgaatggtatcatattatctttcatgtacatgtaacatacctctactttcagttcatacacaagagggtctatatccaactcttcatacaaaatttcatgcatcttttgtaaaacagtgtcaacctcaaacattaacatcttactttttgag

SEQ ID NO: 222562 - DNA, 2005 bp, Cannabis indica
ttttgatttataaattgaaggcatttatttattttacttattgtgtgacaacgatcacaaaaaggccaattccaactcctaaaacggtagagcggcacaaagctctcttagttcttccatttagactgcgatcagccaatttttctattgaacaagatcaatctgaagacttataatcttctcgacagtaaacaatccacctgcaatataagaatccaaagtattctgagtggcagtaagtcccagttccaactgacgaggaagatagagactatgtggctcgcatccatttcttgaggaatgtatcccctcgggaaggtgaagaagaagcatcctgagataataattgtggatggtctcctactgtgcttagggctgagcgtacctcgctagttaagtttgaggatagccagtataacttctatatttgggatcgtttctgtgtagatcacatagctcataggttttacagttggtatccccaatatcatgtccaataaagttgtaatagctcctactttggaattatcgaacagtatggtactaacttggatagagtgagccatttggattctgattgggatatatctccaataaaccattatgacatatatatgattactggttctaggaaatttagtaactactatagttcttccccatcctcgtctaaagattatggtaaatttctataagtgggagttaattccccaccttctttttgtttattttggataagtgctgatatactttatttttgtctcgcagccatgaattttgaaaaccttttctcaagcccatctagttctaaaaggggaagaaacgcgttgttggttcggaaacttcctcgagagcgaaccctaaactagtgaagagggccaaaaagactatagtaaataggaaatgctcctccaaacaaattttcatcgagccttacaatccccaggttccttctccaatcccagtagttgtaaacaaggaagaacgggtccttggatctgttcaccaagttaaattctcaagttctcaacccgagatggttttcttggagcctacctgccctttattgaatcatgtcggcattatgggctcacaggcttgttcgtaacttgccacatcttgttggcgtcacttctaatcttaccagtaagatgactgggatttcgtcaaaaacggggattttgagagcttatgtcaaaggagtttaaatctctctttctcgataagcattaatctccattttgtttttcaaaatttttctttctctcccttatctatcctcgtcttgagttacttttgtcttgtaggcttctctcttttcttagctagctcaccaaagaggccttcagagaatcaagcaactggggccgagcttcgtatcattgttgagaaacgtgaggttgttgtgaagcaatagaatgactcctagggtgaagttactcgtttattgaaggaagctgaggattagaagaagagccataagactaagctcgatggtgataaacaagaggcaaaagatctccacaaagctcattagaagaccattgaagaacttagcgaggccaaccaaaagctcaatgaggcaaaccaaaagcttgatgaagcccagaagaaacttgacggggttgaagaggatgctatagccagagttaattcaatggctatacattctatctatcacgcctggttaagcaatcccaacatggatttaagctttttgggaaaaggagtcgcggagatgctggcctattttgagcaaactaagaaggacgaggctgtaaaggacgaggaagaagaagaagaagaagaaccatccaagtctccaaccatgtagacttggtttttatctttattttgtttgttgtcttttttttagtaatggccatttcgcctagagaatcgttgcccctagttggcattttgtaaaaacttttacattgttggatggtaaactttacttatttatatatttactttttatgcctcgtatcttgccttttgagtt

SEQ ID NO: 222563 - DNA, 2323 bp, Cannabis indica
taaaatgaaaacgcaattaggaaaaagtaaaagagtaagcatagttttaggcttatatttttacatgagagcataaatgacaactaagaaaagaactttgatgaaactagtagtaagtgttaaaagtgcttgaaataagatactatggggtttattctttcataatgattataggatattgacaaattcttaaattaaaataaagtggagccgtaaaaagagcaagaattataccaaatcgtactaaatgtaatgacatttcttgagcttagaagtgcctagaagttataattgccaatagaaattgaatgaactactctagttcaaaatatagatctataagatgaagttaagaccccatataatcattggagttttttaaaatttgttcaatatctcacttagttgccaagcatcatatgcaatatattgacctattattaaggtactcaaattatgcatgaacaacaattaaaaaaaaaattacccactcaatactgtatattaagggagaataactaacaacagtgagttattaaaggcccaaacaaaatcaaaatatttcaaaagaaaacttaattgcagaaaagtgttattttgcttcagccacttccttatctccatatctttgatttttatctcataataattgattatctttaactccatgtaaacatacatatgtaagaaagatagttacaaaaccacttttttattattaagaagataaatataactagttaaagaaaatgattgatttgctactgttgaacctcttcgccattgatgaacaaccaagcaagcatgaacaataaacccagagaaaaatagagacaaagaggaagaagaaagagatggaaagatagagaaagagaagattgaaaacaaagagtaatcttactatttagtaaagaacattattggcattatattgccaatgattaaagctgtagtttgttgaagacaacagaattagttaagaaagagaataacaataataccgaacataattaactctctaaccaacaaactaactgaatagacactcctaacacggtcccttaaggttacaattggaagcatcttgagtaacagagatatcttcaatagtaagcttgtatcgaaatagaggaaacctttgagtggagattgcctttgtgagtccatcagccagccgatcttgagttgggacatgctttacttggaccagtttttgaatgatttttcttgcacaaattaaagataaaagctcaatgtgcttagtacgtgcatgaagtactgaagtcgttgtgagaaggacagtcctaaggttatcacaccatatgataggaggtttaatggtcttgatgtgcagttcagtgaataattaatgaatccaagtaagttcagcaactgtactagcaaggcttcgaaacttggcttgtgcttgaccttgatatagtgtgttactttttttattgccaagcaaccagattatccccataaaagattgtgaagccagaggttgaacgtcgatcatctatgttagtggcccaatcagcatcagaaaatgctaccacttccttcacatgtgactttttgagatgaaggccatgactaatggtgccactgagatatcgtaatattcttttcacagcaaactagttacttagttggggatttttcatgaactagcagactttattgacacagaatgaaatttcaagtcgtgttatcaagaagtattgaagtgcaccaataattgatcgatacaactgagggtcttgaaccggttcactgtcatatgctgagagtcaaaggctgcttgtcattggagtgggagctggtttagcatcacgcatttgtgctttgaaaagaaagtctctcatgtatttggcttgtgataagtgtaaaccaaatagtttgctgcacttcgatccctagaaagtagtgtaggtcaccaagatccttgagtgaaaacttactatcaagagcaacaattaaatctttgattgcagtgttgttgctggtagttataagtatgtcatcaacatacacaagcactaacctagtgtatgttgaaatgtgttgtatgaaaagagattgatcgagcttagatggaacaaagccaaggtcaaagagacaatggtgaagcttattaaaccaagcacgaggtgcttgttttagtccatatagagctttgtgcaacttgcatacaagattgggggctgaagaaatttcaaatcattggttttttagcatacactttatcattcgaagtgccatttagaaaggcattattgatgtcaagttgcttacttgaccatgttgggttttgtgccct

SEQ ID NO: 222564 - DNA, 1458 bp, Cannabis indica
cgatcgcattcaatttctcataagtttacatcaagcgagattagctctatttagagctatctattgacacgtcatcctttttcactgggaactggatccacatgtcagttatctacaagactgtacttatatttctaggcaaaaaattcgtattataacacatgcccctagttttgcgatgataattgtttgtcaaataacaaaactattcatgagggacaggctagttgttctgtcacatgacgatgactcttggttgtcttgttaagggttttgaaattgacagttcacattttatttattttattttttccaatctaccacgtcatcaaacgtctttgggattcgtgcatgcgtgttttgagataaccattggattgagtgacttttgattttctaatgccacgtgtcaagatccttacaaatgagacttattcatatttaaacccctgggatatgaattaatttacttcattttcctctcattttcagtttccattgagattactctctctaaaattttaagagaaatcttttttcaaaattcaatcattggctgaagattgttttgaagttcgaaagggtttttcgaagtgataattaagctcagaagaataagcttttggatcaaaggttggtttttttctttctaaaaactctctttgtttaatgtgttttctttgaataatcgcatgccttctgggtagaaattgcatgaaaatagtaggataggttctggacaataaaatcgcatgccatccgatacaccaatggtcagtggtctaaagctatcagcttatggcggtcctcttgttgacaatccttagcattatagatatattgttggtgctttgcaatacttagtcatcaccaggcttaagatcaataaattatgtcaattcatggccaaccctctgcagtctcattggcatgttgtaaagaggattcttagatatctaagtggtaccattgactattgacttcatctcagaaaaccaaatcactatgagttcactgtattttgtgatgtagattgggtcatagaccccaatgcagaaggtaaacttctagttttacaatattctttgattctaatctcatagcttcgtaatgtaagaagcagcacacattgtctcaaagtagtattgaagctgagttttgaagcctagctcacactattgaacttacttggttgcactccctatttactgaattgcacattgctttgcttaaacttcctatagtgcagtgtgacaacttaagcacagtccttcttactgccacttcaatttttcatgctcgcaccaaacacatcgaacttgatctctactttgtcctagagataattcttcagcatttggtccaaataaaacatgtgacagcttttgatcaacttgctgatggtctaaccaaccaatttccaatcaactgttctctttttataaacacaaatttaca

SEQ ID NO: 222565 - DNA, 1978 bp, Cannabis indica
acagaatattctttatttttaagatattctgttaaaccaagaatgttaaaccaagaaataccaagattttaaataaaaatacttatgccaagatttttgcaacaaaaaaactttggcgtgaaattcgcacaccaccactactattgcattgctgcctgaaacgcgctaccacactcagccatgaccgtcttgtatcactgttttcaactaggatggaccgaacaaaatctaccttagatgggagaaaattgatcggactaagaaccgaaagaaaacattccagtttgtgatcggaatgtaaaaacaagacacatactatagatatagaacataaaaccaaatcatctgtataaacacataaagaaactaaacaaactgccattaaaaatcatccctaaaactctaagaaatcaaaaattttatttatgtaatttgaaaaggaaaaaaagaagaagaacaagaaaagaacaacttacaaatcgaaacttcaaaaaatattaatagtagcaaaaaaagtttagaaaagagggatatagcttgatgaagagggaaataaatccgaagtgtctctctttctccctagaccacaacatagaaggttgagtagaaattttacatgacatcgaggggctggggacaagagagctggagacgaaagaaatttgatgcgagatggaaatggagatggttacattttgaagtggatctgtgtgaataggaggaaaaaggaaaaatagtattaattgtataattgtatttatcaaactttataaatagtattaaaaaaaaattaaaaagtaaaaagtaaaaaaaaaaaaagtagagcaagtataaatgtttaatattgataaaaaaaattacttaggtaaatttccctcactaaaagataatccacaaaaattaaacatgtcacaattgattatgttaagtgatataaagcttattaatttttatgtagtggtcacgtatattatagcttgtacatttaccttatcttcgtcgcccagcaatttctccttcctcactactattcgcaatcaaacattttagttttgaaaaattaattgaagaacatcattgtatgcttctccatctaagaatatactcactcaagacaactgagagatctgggaagctcttgcaagatctaccagtcggcatcaatggctcatgtatctaaactaaacgacaaatactattgcagattctcaagaaagttggactctctatttgtgactatattctcaagctcaaattattgtttaatatgtttttcattctgaccatcagatttatttactaaatttccaaattgcatgttagggaattagtttgcatacattagccatttttcttaccacctaccacaaagttaatagctaatgcaaattatgaaattgtaatggtacagaggtcattagaaaacaagtagatcacaacaaaggcatatgcaaatcctcatttctaggactgtagatccaaaatttgacaagataccatcatatccaaaaaaaccaaaataggaatatgaaaatttgaagcataggcacaataaataaagatcttcaaccccgatgacaaactctctgcaatcaaatcacaacgggcttagatcctgaaaaaggcaaacataacaaatcaacaaagcggatatggtcaccagaaacattataagcatcaacataattttgtacactttagaacaaactgcactaatagacttacatattttgttgaaggccacaatatcacaactctggacatactcattaattggttcaacggtaagacgttcctcaatgagcgagtcaacagagaccagatcgtccacaatggtgagcattatctgcaatttcttgataccatacccaacagctacaagtttggctgtgacacaagaagatgtaaccaaataagaaacataactcacttatagaattttgaaaaatatctacagagctaaaaatgttggcataca

SEQ ID NO: 222566 - DNA, 1830 bp, Cannabis indica
caaaacaaaaatacacagctctataggaatggaagattcctcataacataaaactattaatatattttgcaatacttttaatttcaaacctcagtagcacatcaagaccacacacatgtcaataagattctctattcttctactaaaaaatagtaaatatattttgcgtagtggaagctaatagttcacaatggttcatactaaatcagaacttgcaaagacacgcatactgcacatgaatagagtataagagaaatccaacctcattgatgtcatatttggactcacgaagcctctcgctccaaaaggtcatgtcccaatggctcaagtcatcagcttctaatgccccttgcttcttggaaaaattcttaaggtcttcaagatctacaaggaaggaaaaaaataaacctcaacagctactctcccaaaagttaaaaggtatgaatatagttacgtataacacaagacttaaaatccaactcaaggaagtccaacttctacttaaaagtttaaaacactggttctgtatattgtctgatatgaagtttgcttcattttagcatagaccttgcacattaatgtgtcaaatttaaaataaacacaaatgaacaattatggaaaggaaatttgtaaacaaacatatgattgccttaccttgaactgcaggaccccatgaagcactgcgaagcttttccagaagttcttctgctttttcaacagttgccattttggttgccatgcttacctgtaagattgtgtgtcatcatacctttggtagttgagttgcaaaagacaaatttataataaaataagatactaccacaacctcagcaaaagtattgtaattaagaagcttggccttctccaatctaagcttcaaaatttcttcaatgatggatgtattatctagatccccactagaggcacgagttatgtaagcacggtaaattcctcacgcaatgacctttttacaatgttgcatgacagcaagaaaacttggagcatctaatgtgatcatccagggaccactctcggcggtggcattttcatgcccctgaaggtacaagcagatgtatcaagctatactaatgaaaagcaattgtaacgaacttgaagaatgaaacttatagagcagccagatgaaaaagctaaaaagccaattgtttcaatgggaatacctttgaagcagcagtttgtgcagccaacccaagagcagtagcgggcaatccctcaatttctttcttatcagtaattagtttctcaaacttttttgttgcatctaaaacattctcttcaaacttttgagatagtctttgcaattcctgcaaataaatttaagacttattagaaatctgatatgaacttttcatcctaaacagactgaggaagaaacctaaccaatctacagcttcaatagttcccatatccaaaattatctttctttttagggaaactcacttattcatttaagagagacatatttgggttccaatgtttatagtttacaattagcactaggcaaacactagagaaataactttttttttctttcttaaaggtggagggagaagagaagccttctgttctccttgctttaacaatactaacttaagcatacctgttcaattttgttaaagttgtccctctcatcatctttaagagcaacaccactgagaactgcttcctttatttggcctgaatgtgcacaataaatatacaaggggaactgttagacaagacagttaagctaaaactatacaagtaactatgtgatagtaagtagatggattaatcacgccccatttactacagttttaacagaagtttttt

SEQ ID NO: 222567 - DNA, 2149 bp, Cannabis indica
accttggacctagacccaaccccaaaacctgaccctggacctgaaccctagacccagaccccaaactccgaccccgaaccttggacctagatttgtctcgaacctttgaccccagacttggtctgaaccccgatcttaaatctcggtcctgaacctggacacgaacacagaccttggacccagcagggcccaaggctagggtttggggatggggtccgagttaagggtcgaggtgggggtcgggttaggtagagtatataataaagatagtatgtttttacacaaccattaatacaagtcaccaaatattgtattgtataaaataatactaatataatacaatccaaccctatagtgtaatatataatataatataatacaatacggtgtatcaaaggaatcctaatggtattaaaaatcactaaattaattttaaaattatttatccatattacatattcttagcgtgttgacttaggtgccgtttgataatacttttgctttctaatttttaaatcacaaaatgaaagtaaaatatatgtttttaaaaaataaagatgcgttaggcaaccactttcattttttaattttaaagtgtgttttgtaaagtttattttcgttttcattttttgattttatttaagtcggggctaggttcgaagtcgaattcgggttcgggttcgagtcagaggtcgagtttggcgttagggccatgagaagatttggattcggatatagtcagagtccaaagttcattttcgtttttaaaatttagattcttaattaaaatattaaaaaaaaaagttttatagaaacatgtttttgaaaaatatttttacttttttaattttaaaaattaaattttttttaccaagcactaccttaatgttgccctgtcagttttaaactaatctagaatgctaatacacgtgaaattaaattagctcatgatagaggaaattacatgacaaaatttgagggtataaaatatatatttgtgctaaagttgagggtataatatattaatcatgataaataatttcatggtcatcgtcactttcatatgttaaattaataaatgttatttaatatgaacacgttatgagatttttcaaagaaacacgtcgccaaagtcttcccccttttcatgcaatattttttaatttttttgtaaagaaagaaaaatgatcaaattacatacaggaaccgtacaattgctcaccactgaaataagataagaaaaaatatatattacgaagctgtttgtaaaaaaaaaaaaatacagattttggaatttgttatgttgtgcaattatttcatatctcaagagagaaagagtatgttatgtgtacttaatatgtaagagacaaaatagttgtggatcccaaatattaatgtggatcattacacatggtgtgggaagaatatcccccaaatagtacaatttatttagagaattattagactaataactattaaaatctactaaaaaaataaaagaaaattattagttaatggggatgatgaaaaaagcaggttctatgaggacaagatgaaaggtctgttgcgaaacatcgaagagatttcagagtttggccccattaattattgtatatattatatccattcgtataaaacaaccactagctagtactccaaatattggacaattatttatattttcagtagtactaatctttatatatatatggtttatttatgtttttggcttaagatctttgtattatataatttggcacatgtgtacctccatgccctacatgatgtcgcccctaaatgtgcctcatttttagatatatattcatattttattaaacataatattgtaaatattattaataaaattgtgcttgaataattaataatcattcatatatagtagtatgtgggataaatcatcatgcccatggagtaatgaataatgatatagtatatcttttgtaaagaagaatgaaaatagaagtacttacactgagtatataccattgactttccttactgaaactttgatttgaaggccaaatattgtagtgaaattaacgtgtgtggtagggaagggataatcataatccattataaacacactttggtggttggaagcgttgatgtcttatatgatacattcaat

SEQ ID NO: 222568 - DNA, 1042 bp, Cannabis indica
aataatattgtcaaaaaaaaaaaaaaaaaacttcaagcaatatatctatattatattatgtgtaaatgtattttataagaatgacatagaatttgtaatcgtttgtccgcacgttatgtatgtgtacatttatcaattaacatgccatcttagctagctgtattgtattttgaagcaaaatactaggttattatataataataatatactaattacgaagaaatacatgaaattccattcagtgccttgtttcgttaattttaataccctttagtatataaagttttcttcattaattttagcacaaattacttaacaaaagtgtcttatgagtagcccaaactaatcatgtaaattactttttgagtcattaatatttatttaacaaattattttttaacatgacacgaatcgacattagttcggaaagcagaagtataactaggtatgaaaatataagaaattttacacaaaatattatattttttaaaaaagttgtattcataagggatttcttacaattacactatctatactttattttttttctttaaataattaacaatttttcttcctgaactttcgacaatactgattttgcccctaaaatatacgacttgttaagaattctcctgaacttttatatttatagaaatttagtctttttgttaggtttcgtctcattattccgtttaaatgttgacgtgtctttgtaaattagcaactttgccctctaaattttgacaattatcaaatcgtactctctcaaaataaaaatgagaaagattcaatattcttaatctaaaaaaaattattttgaatgattaagaaaattaaaaaagaaattaaaattttaaaactaattaagcaatttaaaaaattatttattttttattcaaaaattcatttagatattaaaaatttaacttttataaaaactaaattttacgggaacaaacttgagtctattttatttttttcaaaaaatgtagatttattttaaataaacataacactttttaatttaatttctaattttttt

SEQ ID NO: 222569 - DNA, 1510 bp, Cannabis indica
gcctgacatgggggacaagatctaatctggtgtcaaaaaaaggcataatcgtctattaaagcaacatttatatgatgttgacgtggtcaatcctgcgagactgcttttgcacctcaggttcatcacttaagcaatccccatctaggaatcgcatacctcaactatctttcgagtccaagggatattacttgtccgtgaatggttcattctatcaagtgtctagtgcatatttccaagatgaccgagatgttccctctgagatattttacgagcttatttcaattaattcactttgctagtacaccttgtcttttgatcatgccacatgtttcatacgtgaaaacacagataacagttttattagtgagttagtgaagtgcataccatagatattttatttagacagcacatgatgattgtgataataagaaatattaagtaaacgtttataggcaaaaaaggataggtcacagaatataaagtttaattctataaaaataacttataatgaaattacttaagagaaaactaaaagtaaattaattctcaaaattgtaatatgatttttgtattttaaaactagaaattgaaatagaagttcaacaattaaactggaataaaataatattttaaaacataaacaatttaatcaagaatttaaataaaagctttgtcttctagcttggaccaacaccacctaacaaccccaacttagcctaaactcgctcaaatatagataccaagttttaagcctcttaatctggaaaaatgaacatatatatggttagtagatctagaatcaataacccaaatgaattaattagtttctaaaatacatgttaccacaacaaaagatttatttagaaataccttgattctttgactaaaaaaacttttgacactagagtttctactacaattattcattgcattagaattattttccttttccttttgccttggtaccatttctttctcttgttgattttggtattggtggaaatgtttgccgtaactttgattacaccattggtagaagtagtaagaactttatgttcacccagaaactttctctggtgatgtggacatcaatgtttgacatgtgacaaggaggatgacgttatggagttcactagaccgaagtcatagcagttgatttgggaggggaccctagccttgcgccaggttgacttcgggagctccaagatgaaagttctaacttcaataacttgaattcaactcattgtctttcagtattacgtaccatgaagtcatggagcaatgaaatccaagccctgggaggtgaaattacacgaacaacaccttcgaagccaacttgggcacctagggtttcacccatttctctagttgacattcccaactagggttttagttttttggaccgtattagtgccaatgggtaaaaattttcattagggaatcagctagacataccacaaacatatttgaggtattagaatgagatgtagagcaagttcattttttagca

SEQ ID NO: 222570 - DNA, 1410 bp, Cannabis indica
tgtgttaatgtcattttgtaattgagaaatgaaaacttgggagcaagattctagaaaatattcaaaagaagaatctttactcataataatcgagttacaagatttcattttattacagcaaaaacaaaagacggaccagtaattgttgtaagatgacacttaaaagcaaaagcagctttgcttgaaccatcatctggaagcatgtacagaccatccttgagccttcctttaagaactttccatgtgtccttatccttgacaaaacaacaattcttatgaaactcaagaaaaacatcattgtcattagtgagcttagacacacttataatattctttttcatctcaagaacttgaagaacagaatttaattgcaataaattgttagaggaagatggtaatcttgcagaaccaatgtgagcaatgagcaaacacttaccatttcgcactattatagtttctgttctagagtaggcagttgtagaatccaagttgtcatgtccattagagatgtggtttatggctcctgtaaaccaagcagaatcattgccaaaatcaagaatagagacagagtcatatacctaaggatcatagtcacaatcgatttcagtcaagtaggctgttggggatgctccattaggcttcggagtaacttagttcttgtcaaaacgatagtgacatacaggagttgtgcgaccaaatcgaagacaaacttgacaactgagtcttggattcgccattggatagccacgagaagtaccatggccagttggtcttgtgctatcttgggaatttcctcgagcagaaatgggtctatagtttccatttcttgaagaaccaaaggcaaggttggcttgcatcttgacagtgagatctgtcatagcattatgatgctcaagacgactttcatgagacatgagtaaggcttgaacctcttcaatggatcaagaatcactttgagattttataccaaacacaacagagtcaaattcaaggcctagaccattgagaagttgaagaacaatgtcttgacttgtcaaagaagagccaacacttgcaagagaatcatctaaagattgaaccatatcaacatagttagagattgataagtttcctttatgtacatgagagaattggcctttaagttcaagcaatcaagctcaagattgacggttaaacttctactcttgggctctccaaacagcaaaagaggtggagtgatttgcaactgaggccaagatcccttcagacatagacgaccgaagccaagaaaataacaattgatctcgtttcttccattcaacgagttgatttcaccattaacaagattttgaacaggaggcacaccactaaacaaaatctcatccaactcgtgaccaataacagttgacacaacctgagacttccacacaa

SEQ ID NO: 222571 - DNA, 3239 bp, Cannabis indica
aaattttccattttgtatactttttttttggttttcggaaaagtttcattcataccaaatgaaacttacacaagaaggggtaagtcagctaacacagctgcactaatcactgagggagtaatcctcttccaaataactaaagttttagactctaaaactttttttagctaataaatgaacaacaacattagtttctctaattgagaaggtaaaaacattacaacttgtgcatccaatgttagggttgaaatctgtgcatccaatgttgttggcattaaccaacttgattgcatgaatgcaatctgattccagaatacagttaggaaagccttcggtttagccaaattaaggcctagttcaattgcagtcaactcggcaccaagaagggaagactagacaaggagaaaggtttgagaagcagctaccattatgcccaaagagtcgcaaatagctacaccaatccctacaccacgacagctagctatgggaaaagctagcatcgacattaatctttatctgatttctgggggtcgagtccatcttgcgcttctatcaaagcaatccttgttgtgattcgaatcttctcacgggtacaacctttgtaacttcatggtatacacatggattagcaagttcctatttggaaggatgcaacttcttaactgccgcagtttctactcctgctaatagtttagcacactctttgttgttactttggggtccgaaagcacagggagattttactcgttggtgtcaattaggcggtctgtggacttttgttgctctccacggcgctttcgcactaataggtttcatgttacgtcaatttgaacttgctcgatctgttcaattgcgaccttataatgcaatcgcattctccggtccaattgttgtttttgtttctgtattcttgatttatccgctaggtcagtctggttgtttgcgcctagttttggtgtagcagctatatatatgctgagaatggtgatcccctcaatcgatcaagtttgaggtctttgatctattgctgtggggacatgattaactagcactcctttggaaacctgcagattttaaagatataggggttggcttgccatacccttggacagtgtatggtgaagattagccatgccctcaagaccctggccaaccattcctaggtatgggatttggcctaggcaagcctggtttgaacccagttattgcgcttggccggtaagacctgtaatggatagggtctagtcacccagtactcctccatgaacggctagacctacaaagggctacaagaggttttgtttcattttcatgtagcttatatttaatctatatattatgttgagatccttgggattatggttcagatttgattaaattaattttaataaaatctgcttatgctttttctaacgctgatagggaccatataaaccaacatttataactacaaacactagcatggtcgaagtacggaatgtatatgctacaatatattattaaagggtatgacatagcattatcaatactagtacaagacgagtacagagtgcatgtggtataacatccagttgtactcagagtataaacaaaccctaccaatactagtattagaaagatatttagacatatggtatagagggcgtacttctgttaagaacgttcttgattcatctgttgagccttgtaagtaggtgtatgggcgcccagttacaagtcagattgtctgtttatatattttatatttttcttactgagtctgtcgactcacagatataatttcaggtgtagataaagaaaaagtgaaggctgagcacagtgagtctagggacaacacgggctcctattttgtagtcgatgggtgacaccttttgaaacataatatattttgaaatgtttaaaaagtttaattacgggatgtcgacacttgtaagaatatgtatttgattaagtaaagtttattaaattgtgaaagttttaattaatcatatttttttggttaaaccctttgattagcaaaggttgtcacagtaatttaaaaagtgctataccgtgcctaatcaagtaggttaacattaatttgaggccatgtcatcgatctatgctaattttgggataacagattatttatgcgtggttgtgcaattatttatcaaagggtaaatactatattacactctatatttagcaaaaattattgattacacccttacggatcacggctagttaggctctgatatcatttttgatgctcccactttacatttgtagtcctatatatacttacatagtataaagaggtagctgcatccttggaatgaggattgttcttgcaaacaaccacgagtgtttgcagcatattttgttcttgaaaacttcccaaaaaattactgatattcttaagattaatctaggttattagtatgctttactttggagttttttttttatagactcataatggttgtgttcaataatgaaaccatgcatgtatagaggagatatttttagtgtttgtaatattcatcacgttttttttaaattgtttttggctaagtcattatttccatatgtttgattgaaaatttgaaacatatttaggataatacttgggtggaggctaataaacgtttgtaccattttaacaactttcttctcactaaaatgtttcccattttaagttttgtttatatattattcaaagttatttggaattattaacacacccaaaaacgtctctttaccaattataccttacatatatgcttaaattttataccatagatattttatctggacataaaataaaagtgaaatgaaaccttatcttgattacacgtgttttaattcattatgatggtatagtctatttcattcaaactataaaatatatattattgtaggttaatttgattctacaatgcacacctttaataaaaggagaatattgatgcacttttatatatttcgacattcaaaagaaaaaaaaaattaatctaattttttttcttcatgtttacgttataattatttaaaacatcttataaaattttgagaaattcgaaataatttacaatatagaaagtagtgttcaaacaatctatttcacacacgtataaaataaaatagtcacgtgtgcaacagtacactttttgaaccctattttcggcgtgttaaatttttttaaatttcttaaattttgcaggatatctaaaatagttataacgtgcatgatcatg

SEQ ID NO: 222572 - DNA, 2484 bp, Cannabis indica
ctaattatattgaaatgggttttatttagggcacaaaacccaacaagttccacttctcaaattttcactttgggtgtttccacttgcttctggtcctagtcgattgaatactagcctttgagtggctcgctcccctcggggagggagtgtactcctctagccaggcaggggtactcctgcaggtggctagctagccaaaggttggttgatgggaggtgttgttgagcgtgagatccctggtcaggcccccaaaatgctggttgctgggatctggttgttcttgcaattagaccttcctggtaaggcctgtcctccctcgggtaggggaacatgtttgtcctggttcctgaaaaaccgggttggtcaagttgatgatcgaccctccctgatatatcaactagtcttccttggagtggagctctaatgagatcatagcctcttccattagttctctaattgaactgccttatcaggtcgctggcatttctattgtggcaatctagttctgcctggttagatcgaaggatgtactcttggtcatccatttatatcaagaattcgcatctctattgagcaaatacatcgcaatcaagagggcgtgattcttcagttaggccggcttggcagacagcctctctaagtctagccaactcgagatcttctcccaagtccacatggggctcgccaactcctagtcttgtctctccagcatagtccttccttcagtgggaggcgccagtggagggtcctccctcggagacaagggcctactgttcaaatccactgggatgtttgtatcactctggccagctctagtggccagatttgaagtacttaccgtgataggaggattgactacatctgcagtgttcataggaattccagttgtggctggaacatagacatctgcaatcaggggatatcgccgaagacccaatgatgcaaatggtgcaattgagttcttctcgtgttaaccatggagttttattagatgtgatatcggctcgctctcaatgaaagcaccaaactattgaccttaaaaattgaccaactgacagcgggattgtattaatctgatggttgccacatgttacacaattagaactcgaaagtaaagaacacaagaatttttatagaggttcggcccccttagttagcgggtaacgacctattccccttttagttgtattgataccgagagataacactatttagattactataggtgggatctaatatagttctcttaaggttacaaagtaggaatcaaagatggcaaatttcaagtattaagagatgttatagtgggcgtgttagagagagagatagagaatcatatcagacttagagctttagagcttgatggcttgaatgagacttaatgacttaggtttagacttaggtctttttagggttgagttaaggctctatataggagagcttaaaccctaatttacaaataaaataagtagatatttacatattatatttattaaatacaaaagactaaaatacccctcaaatttaggtctttttcatctactttattaggctattaaggcccaattttgcagtccagcttatagtccacgtgtaaggttgtgcactagaatcctgtcaggttcaatcctgaccggctagacacctgcagggagcaggttggccgaccttatgtagtccagaggctagctggccagcccccttaaggtggctggtctatcacttgtcgtcctgtttgagtgtcgggacccccgttggctaaggtccttacttgacctccttgttggtgagttgtattgccacgtggcgctgatattgtccacgtaagcatgccacgttaagtgggcaaaaattgggataacaagtgctgactattttattcatcaccaatgatcttaattctctgtacaatataaatcatagcctcatatatgaaataagaaaattttcaaaatttatatatataaattattaaatataaaatattaataattcaacattcaaatatatatcaaattgttcaaatactattaataatcaaaattttctttacaagatcctaacaatctcctacttgtgctaaaagcaaattaagcatctctcttgatcccatattggttacataaccaataaaagattttgttggtatcgtctttgtgaatggatctgtcaggttatgttccgacgtaatcttaaaaactgtcacatcacttatccttactatatctctgagtaaatgatacttcatcttaatgtgctttcctctcttttggcttcttggtttcttagggttggtcactgctccactgttgtcgcagtagagcaccagtgatttttctacctctagaaatacttcctgattagtgtaggacttattcaaccataccgcttctttagctacctcacaagctactatatattcgacttccattattgaatggtttgtataatgattctccatactacaactccaccaccaagagt

SEQ ID NO: 222573 - DNA, 1560 bp, Cannabis indica
aatgaattttggtcccaatttgcgactcaagaaggagatgggatcgttgtcctgcatcaaaacactaccaatttctgacatttagacgcatcattctccaccacaaattgtttatcaaaatcaggtaaagccaacactggcatctctgtcattgccttcttgacatgagaaaaagttattgaagcttcgattgtccaaacaaaattgtctttctttagaagtttagtgaagggggctactatggacgcatagtgagaaacaaacacctttattgtttgagagtcttcgactgtggccattccaagattcctgaatttttttttttcggatcagcgtgcaacccttgagccgacacaatatgtcctaagtactcaatttgctacttaaaaaactgacacttactgcccttagcatagtatttcttctctcgatgtagctgaagcaccacccgtaagtgttcaacatcctccttgatactacggctgaacaccaagatgtcgtcaaaaaatacgaggacacgtcttcggagcaatggcttgaaaaggttattcatagctgcctgaaaagttgatggtgcattagtgagtccaaacagcatcacagtgaactcataatgtccctcgtgtgtgtgaaaagcagtcttgtggcagtcacgtgggtccattcgaatttggtgatattcggcatgaaggtccaactttgaaaaattttagctcctcccaattcatccaatagctcatcaattgtgggtataggaaatctatcctttactgtaatgtcattcaaaactctatagtccacacaaaagcgccatgtaccatctttcttttcgactaagatcactggggaagagaaggtgctggtactagtcttgacgaaccgtattgatgacatctctcgaaccagttgttcgatgatatccttttgataataggggtacctataaaggcgtacattcattggtgctgatcctggttgcgaaaaaattctatgatccatacttctgaatggtggaaactgagtaggatccataaaaacatcttgaaattcaagcaaaagacctctgccctcattaggtaacttggcatctagttgaaaaatttgtgtacctggctcatcattctttgttacagcagtaatatgatacatttcttgaacatccccttcccagagcaaggcatgaaactgagaaaaaggcaattgatgtgttgccgcatcgaaagtcccttcaagctcaattgatcatcgtttctatcctcaaaaagttgcgctttagccatagcattagctaaatcaattggcttagactagagaagttctcttttaatttccaacttaagacccatacaaaaaaatcaggaataaatggtaaggcacacctgttattcgtgtcatcagatcttcaaattcaacacgaaattgagccactcgacctgtttgagtcaacttagagattctccctagcgaatcatcatagacggaagtcccgaatcgtgactgtaaggcattgatgaaagaaccctaatctacaaatgaaccactcttttccatccattggaa

SEQ ID NO: 222574 - DNA, 1641 bp, Cannabis indica
tgtaccacggaatacattccgtgaaagtacacgggacaaaatcatatcccaataaaattatttaagagagaattactacagaataatgacgtacgaggcttctacatcattatcaccaaatttaatggatatttagtaatttatgacttcattcatgcatgtacatactaaaatcaattctcctacgcaccaagtcattttgcaaataaataagccaacctctcttggtggttgagacctgaagcattggtaattcaataattagggttcaaaattcttcacaccctccattaattcttcattgtaaatatatttgtacgtaatattaatgtatgttgtgtccgagtgggaatatgttcactacaagaaatatcacttttaccagcacagttcgctactgtactggtaaaagttatttttaccagtgcatttcgcaaactgcgctggcaaagaagtcaaagttttaccagcgtacatttgcagtggctaaaatttaacttttaccagcgcatttacgcgcttagaaaagtcatttttgccagcgcttttcattttatgctgaaaaaagttctaataccaacattgatttgccaactcccttttgccaacacatcacaagtaaattctattttaccagcgcaataccaacttttgccagcacaaaaatgtgctggcaaaagtgacatttcttgtagtggttcttgttgcacaaagagcgttactaagtcctttccatgagcaattcgataatactttttcagtggcccaaacaaatggatgtacaacactcgtagaatgtttccaatagggttacattattattcgatttggagatcactagaattgtgaaaaaagtaaagaaataaaaacctatgtttagaagtggaattttgggaaggaatgaacaaaataataaaaattaaagtgttttaaagttttgtctctcttctttctctctcttttggtgtactcaccggagctatggcaaaagggacgagacaggaaagctaaacctaaggcaaaaaggaggaagatagggccgccttcttctgatcgagtcatcaaaactaggtccatggatgctcttttcatgtgatggagctggaagctcgaggagtttttgaaatagggcaaaaatggtgtgagaaggtcttatcgcttgaggaaacagaggaggaattcagaaggcaaagcaaaattcttcaagatttttctgattagttgagcattgccaatagagcctcacaagatgctaccacagggatgaagactactcctccaattttgagatcaaatgtagttcggaatatggagagtaggtttgggaattcaattgtggatgaacacaaagaagctcgatctgagattgtcacacttaagtctaaagtaaaaattgattttgaagacattgcttatgaggtaaacttctggcaaccgttgattgtatgccacataattggggctaaccctccacttagcattttaggtggtttcgtcagaacgatatggaaggactcggttaataaggtagctagtatgattgctcgagggatcttcatcattcaatttcagaatatggagcaaagaaatagagttttacagggagaatatgtcttcttcgattgaaagccaatgatcatg

SEQ ID NO: 222575 - DNA, 2607 bp, Cannabis indica
acaattaatctttatatttgatcacagtttttttaatttgagatgctattttatatttaatatataataaagaaagcctatattatagtaaatattagtgataattatagacataacccaaataaaatacatactaaatactatacatgccctactacttctgttattgtcaacaattttggaataaaatttcatacactttaattatcatatattctcttatttttactttctcaaccatacaattccgcaattctattacacttttttttacaaatataaaaaggttcgaaattgaaaactccctcctctagtattaacaaataataataatcatatttttatttcttttactctgacctaattaaattgaagaattgagcttaaaaatatttgctattccttctttctatcgtatcggactatatatgttctttctcatttaatttctttctagactacttctaattttcttgctggggttagaagtaaatttttcggcaattttgcttcagacaaaaattgtgcgcggggccacaatccatccatgtctatataaatatacattttttaaaaaaatcccttatgcttcctaacttaaaaaatataaaattgttcttaataacatataattaaattattatatgaaatggagtattcagtatacaatataagtaattaaatatattataatttttaattggtgtgggttctctttaactttagtttaatttttattatttcttaaggctaactagcattaatggccagaagaatataaaatgtatacataatcatgcctcctgaacttttaaggtcattgaaaatgtcccctgaactattaagattgttggatttaaagacttttttataattttagtaaaaaagtttaacatagatgaaagttcagggggcataatttagtgcatgtcaaagtttgaacggcataatttggtagatatcaaagtctggggacatggtttagtacaaaaacaatcattgtaatactaaaattgaataaaattagacaaaagtcctttaatctaacaatctcaatagttaagaggacatgatttggtacatgtcaaagttcagggggcaaaaatcctaattagttttttcttaattagttgaggctaactcaaatggccagaaagatatataatgtatatataaatgcttcaaaaaaaaactttaatttttcatgtaatgacaattagtagcaggaaacttcattattatactttctagtttctacaataatgggtgagtaacattgttttatactctagagcggtacttcaataacaagaaattaatacagttgaacaagactagtacagtttgaagcattttattaagagtattcaattatttagaatgttaaacaagttgtacattatacaattatttagaaatatatatacatatatataatgaagaaaaaaaattcgcaacagccaaagtttagcctgtaaaaaatggttacaatatatactaagtttgtaacattaaactacgtaccaataagaattacatcagtttggtaagaaattggaccatttcttagtatataagacaagctttacagtatttaaatctgattttcgatgttttttttttaattattattattataaaaaaaaagtaattaaacaattgtttgcaaataagtaatttaggcatttctgagaatagttttgtatagataggtattggtcagataagtatgagcatgtttttatttatttatttttattttatggaaaaagtatgaatgtatttttatgtgcacgaattgaaaaacattactttcttttataaataaaaattaggagtgactggggtgagttgtttcgcaattgtttatggggctgaggtgtgtttaagaccatggagttatctcacgctttcaactcaagcaaaggaaaaggaagatgaggtggagctttctgacgaagatgtcgcacgtgtgttacgcgttacttcaatccccaacacgtgtacactactgtccctcacataagtaagaaaataaaaaagaaaactatatcgaaaatattaatgacataaactatagaaaatattttcactttcaaataaagtaagagtaaaacaattctagctaggctaagtccattcccaacggaggcagggaatttatatatatataagtaggtagtagtggtattttccactttgtttatctacaagcctctctctactactcgatcaactctaactttcttcctctttctctctcactataaactacacctgtctttcattttctctctggacaaaacttttaattaactttaaacagtttttatttatataccgaaggagaaagagctataaaagtagtgtgatttccttgtttgagagggtgaatttgaaaggaaagatattaagatgggaagacaaccgtgctgtgacaaagtggggctgaaaaaagggccttggacagccgaagaggacaagaagctcatcaacttcatactcacaaatggccaatgctgctggagggctgtacctaagctcgcaggtctctattcattgtagtatatatatatatatatatatatatatatatactttcttttt

SEQ ID NO: 222576 - DNA, 1491 bp, Cannabis indica
gacatctagcaagttcaacactgtcgttttaagcgagtgcccaactataagcactacattcctaccctctagatgaaggatagagcaaaaccacatcctgtccctccctgtagagaggaggaatattctacagttggccaatgtagccaacttttagagatacggcctatatccccccttatctggagttgcgggggcagagggcccatcgggttgtttaggtggaactctagctgcttaggaggccagcccaggtggggggcatgctcttgacatggatgatgatgtacctctatcctagatagctagggattcagagaagagagagagggccctcctccagcgcttggcttgtaggggcaccgttacgaacaccactctacggattaggcctagaggccagagttttgctaggcctactcgcctattgcttacatctagaggcaagggcaaggcagccattgaagattctgatgaatcctcttctggggatgatggtatttgatagtggattgcaccatcttttatatttttttttcctgcattgaatatttgtaacttacattatgactttgttactttcttgtagcagatatatcttccagacttagaggtctagttggtgggcctttagacgagccttcaggtcgcctaagggcctaggtggcttacaccacccgttctagtgacgttgtgggatcttcacttcctgctcctcctcttgggcctgaaccaatgtggcagcccatgatagttgaccctctattaaggaggaatccgccttcgggcaaaggcgcctagaggcctaactgaggaggaaagttatccatgggttaaagagccatggaggcagtttgcaagcatcgagatagagccttacttactgtggataatgagttctaggagcttggtgacaacgagccggagaggcaatcttctatcggcttcaaggagttggcctcggtaagttgcacatttaactttgctcaattttcaatattattgtgggatggctggccataagggttcatgtatgaagttggctggccattgtagtgtctttgagaggctggctgaccttggtagcaccatagaggggctgatcggccagtgttgtcttctggcactaatcttgaccttgttttgtgttcaaacattattgaagcttagctttttgcatcgcaactccagggggtcctccagtgctctctgggagcaagtaagggccgtggaggctgagctcctgatgaggggtgaggctgtgaccaacttggaggctattgtccaacaaaattaggataagatttctagtttggagctcatgctcaacactaggaatcaggagaatacctcacttgctgctgacgtcttcaggctagggattaaacttaggaggagtgacgataagctaaaacttgcccttgatggccagcagtccataaaggataagtatgccggcaagatcatttacgagtttaagctacgcaaccc

SEQ ID NO: 222577 - DNA, 3177 bp, Cannabis indica
tttttttttatatatatttttacagaatttcatgtagaaacctctatagcaattaacgtaacaacctaaattatactaaaatccgtataacaactcacatagaaactattagaaaaattaccgaaacaactcaaattgtgaatttcaaaaaaaaaaattaaaaactaatacatggaataattcttcaaaataatataaggtaattagttaattctttaaagtaattaattatctctctcattacctaagagtacatagttacttttacttagttttcctatattttgatattaaaggatttaatggtagcatgttaaatttagaatttttattagaatattgttaatattttttttattattgatgtgttaaattttgatggttattaataaggtattttttttttctttaaaaaaacaagtttggcttgacaattacaacgttcttaaaatggttaaaatgggaattgaaatgtaattaattcaattcaattcaatttaatttaattaatttaagagagatagaaaagacaaaacacacgcctgcattttgtacataagacacaacacaaaacaaaacaaaacaaaacaacatatgtatattattgtatgtacgaatgagtgagccactaatgtcaaatgcaatgaaaacccaatctaatccaaacccaactcaactcaacaaagccataatctttgactctttttttccaatgatttattcttcttcttcttcttcttcttcttctacctttggttctcatcctcgaatccatctaagacacgcatagtccggcttttacggagacttgtacacctcatcaccatctaccaacgactaaaacatatttacttacttacttttcttgacctgacatcctcaacctcaattattgccaaccaaccaaccaacccaggtgttggagtgttactgtgtgtgtgtgtgtttggagtttaagatttcttgatttcacttgttgattcttccttttgggatccaaatctcatctgggtattattacttttaacctgttttgtctgattagaagtgtttagggtcaaaattggcatctgggttttgatttggtgagtttaatgatcccttatattcaaaggttgcttctttcaattatgtttattgattcactttgccttatttaagcatcagtgtttgatatttgaaaagggagaaaaagaagaaaaggaaaaagatgtcccttggtggtggtttttgcaaggaaatgatagaatcccatgttacatatggagattgtgatgcatcatcagcaacaacatcaaatttggaattaagaaattcacctttcaagaaaggtgtattgactttgagtgaaaatattggaatagcttctaataatgatgtgcatgaacttcttgaatgtcctgtttgtatgaatttgatgtaccctcctattcatcaggtactactaattgctcatatttcatatcttacatgtttgtattgtattgaattgtattgtagaagaacccaaaatcactactcttttgagcttgaatgattcattggtaaacaatttgtgggagttttaaatgttaaataatgttagtcagagctattgtttggaagttggattttagggctacgaaaaaaaaaagggtaagggaaaaaggaaaaatcaatttctcatgtttggtatggaaagaaacaattttcatatcgaacatgaaaaattgattttgtttccatacttttaaattcaacttccaaacatagcctaagtgatcagatatgtggttacagaatgccaatactgttgcagaagccataaacatgaatatttatttagctatgttcctatactttttcatagttaattctctgaaaatgtgtttgtatgatcttctcaatcaatgtacattgcctataacttgataaaaacaacagaaaaatctttgttcaagatgattatttgtgtcatcctaattctagttttgtaaaatgagtttacttctctttgttcttagtgtccgagtggccacacactatgttcaagctgcaaggctagagtacacaattgttgccccacatgtcgccaggagctaggaaacattaggtgcttggctctagagaaagttgcagaatcacttgatctcccttgcagatatcaacttttggggtgtaatgatatattcccatattacagcaagcttaaacacgaaaagaactgtaagcatcgcccgtttagctgcccttatgcgggagctgaatgttctgtcaccggcgatatccctttccttgtgatgcatttgagagatgaccacaaagttgatatgcatgatggctccactttcaaccatagatatgtcaaatccaatcctcaagaaatcgaaaatgctacatggatgttaactgtatgtccctctctttctctccataaatctcaatcatataattgattagctttttagagactgagttgtcaagtccttgtgtctgaactatttagagtaaaagattgctctagggagataccaaactgtcttgaaaagttaagaaatttataatgccttacttggtatcaaattttattaacatacttgattttcgaactaggttttcaactgtttcggtaggcagttttgcttgcatttcgaggcattccagcttggtatggcacctgtttacatggcctttcttcgattcatgggggacgatgatgaggcaaagcaattcacctacagtcttgaagttggtgggaatggaagaagacttatgtggcaggggatacctcgaagtattcgggatagccacaggaaagttcgggacagtcaagacgggttaattattcagaggaacttggcactgtttttttcgggtggtagtaggcaggagcttaaactgaaagtggccggtcgaatttggaaggagaattgagctgaataaatacattaagagatttttcaatatattggtgtggaaaaagaatgaaaaaaaattaaaggcaggtaggaaaactattaggaatttcagtgtaaatgagtagatacatgttgttttgcttgaagtcagattactgtattgatttattaataaatctatgaaggaaactttctttgagtaatctttcatctctataaggaataaggataaggtgtagtagttaactacgtgatataggaaaagaatagaagaagcatt

SEQ ID NO: 222578 - DNA, 1505 bp, Cannabis indica
agagggtgaatttagttgctaccccctgcacgctttactggtagcaacccaggaaccaatggtgagaccatagtgattcaactagtatgggcacttggagccttgaacatatttgtgcaggggccattctccctcttcgggactacttcaaggattacataaatcacatcggggttgccccattccagttgactgccattgcctacagggttctcacttgtttgaaagtattgtacaaaattctgaattggggttgtcctacacccgtagagattgcgtatctttactaagttaaatccgttccatcgaggaagaacgctgcagtggactttttctatcttagtactcatgctagcgagccaaaaattattgtagacttgacaaataaggtatccttcaaggatgacttcttcttgacgtctggtctctcccccattggcacaaccacattttgcaaactccgtaagtgattgttctcttctttcttatttacatcagtcttcctctttcaagtacttgactaatgttttgtttgttctgacagctcttctgacgagacctactcctacctccgagatggttagtagacacaggcatcttatgactctcccttacggtcttcaatcatgcaaattcctcttaaacgaagtaaacttgtgatcgacaggccttctcggtgacaaggaatacacctgtgattacaagattcccaagtattcctcttggcagtaaataatcgttccacctgaggatcaggcctaggaccgcttggcccaagcaccataccttcaaagcactgtcctttgggaatccggtgaaggagcatcccgaggtaatcaatgtggctgggcccctactgtacttagggctgagcgtaatacattagttaccttccaagactcctgttttaatttttacacttggaatcccattctcgtggaccttattgctcataagtttgatagttggtatcctagattccacgtccagattaactatcacgagtcattttacggtatagctgcgcaatacggtactacagaagatagggcaggtcacatagatgcgagctgggattcagaaacaatcgagccttttgatatattcaaaattacaggttgtaggaattttagcaaatattatggtccttccaccccttcttctagtgatagctcgccttctagtgattttggtaaatcccttaggtggaaatttatactcttcccctttttaattattttttataatgattgtaatgcctcgtcttgtcttgcagacatgggttatgaagacatcctggatcgtaaggggaagaaaaggtcatccaaccctggagtccctgctgctgctgaggtggttcctcccaagaagcaaaggaaaaccactgctcaaaagaaaaagttaccggccaagcctattgatctctaggtttcagacaacgagatccaagagcaagttccttctctagttgttcctcatgccaatgcccctcatcccgaggcgac

SEQ ID NO: 222579 - DNA, 1263 bp, Cannabis indica
aacttcaactctaaataattacttttcaaactcaattcttatgtgtatgtgtgcgctcattcaactcatcatactactaatattcaaattaattaatgcatgtggacaataaatattcatctcaaaataaatatgtatttgaataaaaatctactccataagcttaattattacacacaatctaaaaattaataagactttacaagcttatattgtaaggctggggggaaaggtaaacgagaaggttaatttaagctcaaatctcaccataacatttatatatatatatatatatatatatatatacaacactatctcaaataattctttcttgtattccccaatcacatccctcaataattttatcttgaaactcttttattttatttttttcagcataacatttactattcccccacacataaattgttgcaagtgttcatatatttctcattaattttccattttttagcgagatacttacaacttacaaatactcattctaagggaatagtaattttttttatttatcacttaagtataaccatcaatatttttccctcaacataactctcgcacctttacaaacataaaacatcaatatactaaggtgtcaaaaaagatgaaaaatacttttttttttaaaaaaaaaggctcaaaagattcatgtataaggttaaaaaagaaaaataaaatttcaacatttaaactcaaattagataactagagaatttacaaaatagggtatgcttgaaatgctcaattgatctaaattttttttaacctatatcatatctcaaaattatatgtaatttatcaattttgcctcaaatgattatcaaacaagttctagagtggttgggatagaaaaattaacaatcaaacacacatttatctttccaaatattagcaaatatgaaaaatttaaaaatgaagcttgatcaataattaatatggagctaagtacacaaatcataagattctatcatttttctagaatcatatctatcacactatcaaagattttttcatcaacccaattatttttcaaaagaccctgcataagaccagaagaaagtgagacatcaaacatgagcagtcatcgtcaacataagtttcccccacacttatcagttgcattgtcctccatgcattagcaaactaatagtagaaaaattatgggatacaagttattgaaacacaatagaaaaataaaaagaaaaacaaaaagtaagataaactctcgaaattggcatagtagtg

SEQ ID NO: 222580 - DNA, 1877 bp, Cannabis indica
atgcaaactgctagtattgctgtcaaacgatatgtcatggtgtgcgtgggtgaattttctcaaagacaagtctgacactcttggtgctttctctgctctttctttgaagttgcaaactgaaaaggatgttacaattgggaaagtgtatcaggacagaagtgaccatgggaaagagtttgaatatgctatatttgctcaattttgtgaatatatggggatttttcatgagttttctgctcctaaaacccctaaacaaaatgggttgttaaaaggaaaaataaaactcttcaggagatggctagagttatgttatgtgccaaaggtgttgcgtctcatttttgggctgaaacagttaatattgcttgctacatatgtaatcatattcatttgaggactggtactacttaaacaacctattaaatttggaaaggaaagactcctaacttaagtcacctgcatatttttggctgtatttgctacatactaaatgattgtgatcatcttggaaaatttgatgcacaaagtgatgaaaggatatttttaggttacttcgcaaatagtcgtgcataccgagtttataacagaagaaatttcacgatgatgtagtccatgaatgtgaaattcgatgacttggaagtatctaatgatgtcattattgatgatgaatctcttagtcccactttggaatttgaatccttctatgatgaatcctagaagctcttgaattatcaaatgctaactcatctagacatccgtctatctcatctgactgtgttacaagcccttctgcatatattacagatacttctaaaccatctagtgtctctgcaggtggtcaagctacaaatagatcatctgatgattcatctcatgctcgactgtataagaaagagcctccatcgtggatacaaaaggctcatcctcctactgttgtgatcagggatcccaatgctacaatggtgacttatcgtatggtattggatgtcatagactttgcttgttatgtatccctagttgaacctcgaaagatgaatttcagacaatgctatgcaagatgagatgggtcaattcaaaagaaagaaggtctggatctggttcttgagccaaatggaataaatatcattgggactttagtggatttttaaaacaaagtctgatgagtttaggactgtaataaggagcaaggcctcttcttgtggcacaatgatacaagcaagtttagagagtggattttgagaaaacctttgcacatgttgctaaaattgaatcaattcaattacttctggccatgacttgtttttttgaaattcaaatacatgagatggatatgaaaatgtgaatttctttatggttttctccaagaataagtatatgtgaaacaacccaaaggatttgaggactccaagtatcctaatcatgtttacaaacttgaaaaataattgtatggactcaagcaagctccacgagcatggtatgacaagttaacatcttttctcatttctcatgaatttatgcgaggtattgttgataacacattgtttattaaccatttaaatcttggtatttttgttacccaaatttatgttgatgacattatctttggctctacatgtgaaagggaagttaccaaattttttgatctcatgaccagtgagtttgaaatgactcttataggatatcttaccttctttctaggattgcaagttcgacaaattgaccagggctttttatttcacggtcaaagtatatataacaaaaatgcttgagaaatttggcttagatcaaactaaacatgctcctgcaccttgttgcaccactaattgatcgcttagagacgagtctggtgagtcagttgatcaaaccatttataggggcat

SEQ ID NO: 222581 - DNA, 2288 bp, Cannabis indica
tccctcccgtcactcgctttctctttttctctaaccatgtgctggaacattagactccccacccgaaggcgacctcaacctccaaatggtgtcgctcctttcgcccctgttagcctgagatcgcaagtcaaagtttgaagattcaaactttgaaaggatttttcgaccacctctagtgttggtttgacgaattatctttaccactagactcaattcatcaaagagaacaatctacactaagccattttgtccagcccgttactttttctggtgacgtttttgtagctctcccttttcggcgaatttccgacaataacgtgtaccgattcgataaatggctaacatgggtgtgatctactcgtcgaggtggtagttttgatatatgttactcctattttctacgacgttttcggaacaccgatatctactgccactaatagttaatgtgtaccgtttaagtgaggtttcaaaactccaaacttttaaatatagtcttataatatatcgctggactcagttttggatgtaatatgcaacgatgataatttatttagccattagatggtatagatgggagtgatatctaagattagacttaacgattggagctcgagacttgagagcttaggatcgtctttttggacaacaacttgggagaggtagggactcaacttgattattggacatgatcttatatgtattgaatagaattagacatattctaatttttataatttacaaattgtttgaaaaattgaaaacttaatcaatatatttttttagagtgttctgcgactattgagtgccaaaaatatttatgtgtaaatatttgtgtagattatatttttgggtttattcaaaatgtagtcgttatgcggtcgaatttttaaaataacaggaatttgttcttttgtaattattatttgtcggcttttggttatactgatgagagccatgttgatcaagatttgtgcaaattattttttcgcaacctagtctctttgtcatcatagttagatcaagtgtgcactcacctgtaggtggaagaccatgaatctgtacaagaagtgaatagaatctaagtcctgggattatggtagttatcaagtgtgactactcagttttggatgtcgttttcttttatgattggtattgagatgtaggggtctagtggacggtgtgatatgcatttgacacttgagtttgtgattatttgtggtctctctattttatttatacattttgataatggtgacgagatgttttatttttaaaagctaaccatggatgaatttttattaaattaagggtcctttgatattagttttttttttcttgtgggctttataagctcacccttattttcttctattctaggagctgagtttgatgctattagatgagaatggtaccgttgaggaagagagtgttagtagtctcgtcttattctatttatcaaactttccattgaaaagtaattttgtatttaagattgaatagaaggtctagatgacttaaattagctatgtactatttagaaatgaggaataatgagtgctagatattatttccatcttttattgatttattaaatctatctacgcggtgactaaacaattgttgagatattattattcttttatattgaggagtgatcctgattatgtgattaatatttcttatagttatagaagttaatccattatttttaaataagtattttataatataaattaaaagatcatttacaaccattatcttcctacaaaggtcaaagtgtgacttttaactacccaaattatacatattacatatctgacacggcctaaattcgagtagtgacatttctgtatttctttttaaagtgggaatacctgtaatgaaagtaagcaataaaaatatggatatttaatgattatgcatggataaaaacattcaccatctgctaaaaacaaaaacagtcagcaacaagctaaatcatgcaatgaaaatggacagctcacctattctccttaacagtatcatcctttaaacaaatttattaaccatgccaaaggataatatctttaatcaatatatgtaaaccattccaaacaatcatacaattagaaataagttgatattaaagttacaacctaatgctctaaaaaataaatatgttgaaaagttacgattgttatacccgaaattcaactgccatctcattggaggacatgtgtcatgataaggggaatatgaatcgatgcagttgccttaaatggaataactcattaattactatattggcg

SEQ ID NO: 222582 - DNA, 2494 bp, Cannabis indica
atcccaccacctgctcgtggaaattactctgacaactcttcaagaaatgctgtgaagagttcatctcgtggttcctttggatttcaaaccagactcatatgtcagttatgcctcaaaagtggacacactgctgctgtgtgccactatcgttttgacaagaactttgtccctcctaaatcagcccctccccgagcatatctcactgaacttgaagctgaaaatgactcccaggtacatcaaccaactattttacctgattttggagatgacaacctatggtttgttgatacatgggcaaatgttcatgttacaaatggctcagaatctcttgaatcccccactccctatactggtactgagacactttctgtaggagatggtaagactcttctcataactcacatagggtccacttccttgtctgcccctcattctcatgctttaaacttaaattctgttttaaatgtgcctgctatgaaaaagaatttaattagtgtgtctaagctcactcatgacaatcatgtgtatcttgaatttcacaaaaattgttgttttgtcaaggacaaactcacgggagctgttcttctcaaagaccacttaaagatggcctctatgtgcttggtgactcaaatcaacactcacacacactacaatgtaatctcaccaatttgtctcagtccactaattgtaattcttcttgttcccactgttgtaataccatcactactgaaccagtgaacttgtgtaatgagtcccatattaataaagaaaatacttctgtgtattcttctacatcttctccatctgcttctttaactaattttattcatgatatcaatacttggcatcaaaaattggggcacccttctcctgccactcttagcagaattttagaaactatacatcattcgggcactttaaaaaaatcttgagttctatgttgcatgccaaaaaggcaagattcacaaacaaccatatcttgtgtcaaatagtcatgcatctcgaccccttcagttaattcatactgatttatggggtccttctcatttctcatctcgagaaggttatcaatattacattcattttatagatgatcacactaggtacacttggatataccctatgacacttaaatctcaagcctttgatatcttcttaaagttcaaaagcatggtggaaaaacaatttaatttgcttattaaaagtgttcagtccgattggggatgggaatacagaccatttgctagatttttacatgatcaaggaattcattttcaacatccttgtcctcatgaccatgaacaaaatggacgagctgagaggaagcatagacacattactgaaactggtttgattttacttgctcaatctggtctttctttgtcttattggtggtatgcctttcaatgtgccgtgtttaccattaatagacttcctacaactgttcttggtttcaagagtccctatgaaagttaatttgggagcctacccgattacaagatactcaaaccttttgggtgtgcctgcttcccacatttgagaccttacaatagtcacaaacttgaattcagatccgatcaatgcatctttcttggttattcttctcatcacaaaggatacttatgtgaaaattccaagggcagactttatattgcaagaaatgtggtgttcaatgagggttccttccctgccttctcctctcaggtacattcttcacattcttgttctattgatcttgagtttcctactattgtctcaacttctaatgttgtttctgatgtgtctgctgctgttttaaccactcccatgccctctgccactgccaatgttaatcaacaagctgttatacatgcctccccacctactatctctaaccccatattgcctacaccaaacactatgtccttacccataaatactcagtctgcattatcccttcagcaacctataaataccaataagccatctgacatacaccagcagcctgaacctacatcacatgagcctatacaccaaaaccagacccttactcacccgaacccgcaacttgactcacaccagcaaccttattcttcacaccagcagcctgcatcacagcagcagccacaaaattttgttcctcaacagccccaacgaccaacacatgactcaagtctcatctctagaattcaccacatggaaacaaggtctcaaagtggcatctataaaccaaaagcctacttatctacacgccacctattggttgaatctcttatccctattgaaccaaggacagttcagcaagctttaaaagatcccaagtggtttcaatccatgcaaaaagaaaatacatctctcatctgatccaatacttggactctagttccatatcaacctcacatgcatgtcattgacaataaatgggtatatcggatcaaactaaacgttgatggctctctaaacacatacaaatccaggttagttgctaaaggatatttacaaaaacctggtattg

SEQ ID NO: 222583 - DNA, 2725 bp, Cannabis indica
cttttaactgcaatttccattcccaactagttttgtttttcacttattgattttaataaaaactattaaatttctaattttaatattactaatttattatttaattgaatcgattaatctagtatgaaacaaataagttggtatgaaaataaatattggatggttgacaaatgcactccaatttgtttgagaaaattttttagtttatcttttttattatcatctatgccgtaattgtttaaaatatcttgtagaattttaaaaaattcaaaaaaatttaacacactgaaataagattcaagcagtatattgcactcaagattcttttattttataagcatataaatagactgttttaaccttattttcgcgtattaaagtttttgaatttctcaaaattttcaacgtataacgtgacggtcataaaaaaaaattgaataaacactttctaaaatattaaaatgaataaaaagtacatcggttgactccttttagagctgcattgtaaaaattttcataactatttataaatacaaaccaagttccactcactaaaaaaatatcaaactataaagaaaaattgaggacttttagagaaaaaccaataaaataaataaattatcaaaataagatggattgactttataaatatttatacggcctattaagtttaatattacaaaaatacaacttgtttatgaagtcttagccacactcaagaatctctaatagtagcatttttgaaagatgtatgatccaaatataggtggaaagccctaaagtgacacacttgctatgtgacaattctgaaacggatacaagaattctaactagtacaggggtcttgtttgtaacaaagtctaagctacataattatcttattgatacaaaagtcaagggaagaactaaatcctccatcttaataaaacatcccatccaatgaaaacaaatcaatgatattcataatgaaacaataatacacatccaaaagttcaatacatagagcaaagtcctacattaagaaggctcaattcacagagcacaaacccacattaaaagagctcaacatagaacattacacataaaatgaaagtccgaaaaataacaagactcccatcatgaacatgacaaacattgcttgaataaaatgaacatacaaatagattcaaagcaaattaacctgaagagagagaaaggaaggtctgaaataacagaccacatgtttatggccaaagaaaatgagtagaagactcaaaataaacaaagcatgactgctttcgtcacctacttttacactttgtacagaattatataattaaattaaacttcagaagaccttttatcattgggcttctagcattcaaaatatcatttttacaaatcaaggtccacaagtgtttagtcaaataaaatcataccatatatacttttcaaactaaaatattgaacatatgcattatatgttccaagtacatatatatacatataacaaaatcaaaatcaacataaaaaatatatctacatcctttatattattattattattatcatcatcacaacaactattgccattattattttttaccacatactatttatctctctctcacacatacatacatatatacatatgctactcatttacatcatttctaatacaaactcaatatttatacattcttcaagtcaatccatgcactgaaaataaaaattcttatcgatacatacatttactactcttcaacttaaccacacttgcctcaaagagtaagagacatactatagtggccaaaaattgcaccaggcccaaatgctttttagcttacgacccaaattagaattacaatccttcaaaaccaagtcagtaaatataacccactcatccaaaatacattgggctttggctaaaatacaaggcccaaacgagcctagtagctacaagaccaattaaatacaaaggataggaatgagtctataactgataagaattgatcattcatcccggtgaaaaggaagaccacttctcacgttcgttcttcagaacgaatgaatttgaccatcagagactctataaaaggagaatcctggagtcctgaaggatcatcacatcttcactcattgaacacttacctaagcattcacgcaatacgttactagtattattaccagtccttctccatcactctacggtggaaatatttattttctatcttctttatttacattcaactattctttattcgaactatttactaacttgaacaacagtcctttttcctttgggttgtcagtgtccccgattcttccattccaatcattgtagatttttccctttacaaccactaagaaatctttaattttaaagtatttggtcaactcctagtaccccgaaaataccctaatatttctaaaatcgacttatctcaattattccatcaatattacgaactaaaactgctatgacatcttaagcctccaatcaggtctctaagatcgctgaacttgaaaatatttttagttcaccaataacttacattatatctacacatttcaaataaatctctgtaattgacaaattacgcttatttatctacttataataaaaattaattttttgaatgaaataggttatagtagaattataatcccactaattgcctgattaacccaaagtatataataaattcctaataatttactattagactcatcctaatattataat

SEQ ID NO: 222584 - DNA, 1824 bp, Cannabis indica
acatcaaaaatttttcaaaagaatgcatctatggatctgatcatttgcatccacttttaaggatttcgtcacagtaaatttaacacaagtctgtggacaaatcccacgagaaaatatggtaggctgccaagaactattcatacccaattatgcttcaacactaacacaattcattaccttaaatcaaaataatgatttttgttcttgcccaaatggcaagaaataaggaattaaaagaaactacataagaattaaaacttacaatgacagttgtcacaatagctctcacttctcctcggtgtagccatagtcaactcttcgaatttctttgctatgctgtcaatgtatcttagcctaccatttgcagccacggtaactaaaaatacaataaattattacaataaaatcagcatctgagactaaaatctgctgccaccaaagctaatatctaacttttaaagtgaaaaaaaaattgcagataaaaagtaaacagaaacggtaaagtattaaaagaaccatgtaaggtacttggtacttctattatattaaccatatctacaaagcaaaaaaatcgaaagagggagataaggctgctttgcagataggtagaccaaccccaataatttagtgtcttgactagggtggttgtcaatgtcattggtccacccacattcaatgagaacttatgctgtttagtacacaagagtggtgtaattttatatatacaacaaaaatccaaaaactcagcagctagagataacaaaatcagaaatacagtgaagcaacattgattacaattataaagaaaccaaataagattttaactaaaaaaactcaagccatagaagaaaaagggctgcaagataaatagataaagatataaagaacctaataagcagaagtgatactaaaaaaagtaagcaactctaaagtctaactacggacataatacaaacacaacctaataaaattcaaagacagaagaacataaaataaatactatgagcaactgattatacccaagaagttctttgtaacatctgaaaatttagcttggatgcaaatgtcatcaattgcacccactcgagtctttgcaggaactgatggatccttggtgaattgagaaacacaggactttgctttgtcgcctcaacatatcattaagctcagactcaaccttatccaaggcattagtctttactgctgccacatataaagcagaggcatagttcccacagccaccaacaaagccaatggaacctggaacaccacaataatgcccaattagtatgatttgctcatataattgaactagctgcaagtagtcaaaacataaaacctctatgcagagtgtaagatgtatttaaatgtatatgcatatctcattttactacatattgttatagtggtattacatagtgcaaataagataatttacaacataatttttcagtttgggaatgtgagattataatattaaaaagagaggcacttcaaagaactgagaacagagactcatgtcaaggtttacattagcataacagaccagaagaaccatgcacaatgtgcaacaatatgagtaaatgatggtacacagttacaaagaacattgctatagtttcagaattatcgtgtacagaaagaacaggggagaggaggcataattacttcaaatgatgatatatcatgtttccttcatatggacataatcacatgataaactgattcttgctttgaagtaactagaaattgcctgaacatgtagcattgaaagaaaaacagttcagttaccttaacctttacttccttcttctcagtagcagt

SEQ ID NO: 222585 - DNA, 1897 bp, Cannabis indica
gaccacatctaatatttttaggcatatccagatccgatctaattatatattgaatgtttttacccaatctgatcaaattaatttcagtcatccaatctatctaacatccattagatattggattggatcggttctatccgttggatgtatttcatatatttattggtttaatttaaatttatctaatattttaaacttagtatgtttttgaatcggatcggattagatccatctaatattttaggtttattatgtattggattagattggattcatccaattcaagaaaaaaaaaaaaatataattttaatattaatttttatatataacatgtatattttacgtataataatataggtatacgattttgtcccgtgatgtacggcacccgttagatgagggagttatttgatttgagggctggggttgatctaggggtaattagggttaaaacataataacgtaccctgagacccatctaatgtaccttgagacccatctaatgtaccacgaaatatattctgtgaaagtatattacgagacaaaaatcgtgtccctaataatataaaaggggccctatataaaatttaattattgatccaaattaaatgaaaatactaatccgttagattgaatgttggatgtattcacaatcacttgtaattaaattaatctgttatcattggatgcatcggagcaaatagtaaaaaggggcatagcttagagaccaaatgtggcaaatactcttaaaaagaaaaattgtaaaaggagatgagatgttcttattgtaaaagatgttatttctttgattccataaagactaaaaggaaactgaaaagaatagataagttatacttgtcaaaagaaatatacacaaaatcattaatattatagtgtttatatttagtatagtaatcatagaggggagaatatttccagactttcctagcactagagcatttaatcaaagcacgtttgatagactccgattgaagatgacagagagaacaaacaggggaacgaataatatccctaaaaaagagaggaggaaacaacgatggagttagagatcactctcgagacaagatgcttaaccttaggtggagcataagacttccaaagtttagaccaaaactgctcttcatgctgaaacagagaagaggaaggaatatctctagaggtaacagcaagatgataagctattgcaatattagaaataccagagctatcttttcccctaaccaaatcatctatacaattattaccagagatagcgacatccaggatgttatttataacatggtcatcaaaatagcttcgaattttttctaagtcccatgaaccagaaagagtgataaaaaagacaaagtgtgagatgaaggcaactgaggaaagtaaaaggacttgaatttatgatttggaagccaatgatcctccaaagtcctgatagcatttccattaccgattttccaaattaaaactcttttcaaaagatttcttccccaaataatgcttctccaagagaaagaaggattatggccattaacaacttcaagaattgatgaattagggaagtagcgagctttaagggtttgactaagtaaagtatttgcgtacttaagaagccttcagacatgcttagtaagcatagcttggttaaagtgaaccaaagacctaaagccaagatcacactcgaatttagattgacatataaccttccatgttttccaatgcagttttcgagaatcagccgtagaaccccactagaatcttgacataagagcttctatttctttacaaattttggtagctaatcagaaacaagccataacataggaaggaatggcctgtaggacaactttgataagaatttctttaccagcctttgaaaaccatt

SEQ ID NO: 222586 - DNA, 1801 bp, Cannabis indica
tatgcaattgaaaatattgtcttgttatatatactatactcatttagtttcttctatttgcctgaaattgagcctaagtatttcctaaggttgattcacacgttagagtttgtaaggaaattccaattaatacaattctctaaactagagaatcatgattaaggatacgaaccttgtctccttcttagttcttacaatacaaaaaatgaaatttttgccaatgtatttttatatgggcaaaaactaagtattatgctggtaaaataaaattcatttttgtcagtatatttttgcactggcaaattcgagttggtattgaaacttttaccagcacaaaataaaaaatgttaagcaaaaatgactcttttcagttcataaatacgctggtaaaagttagatttttaccagcacaaaacttttaccagcacaattatgcacgagtaaaagtctaacttttggaagcaaaaatatgtgttgggaaaagtcttacttttactaacataataacgcgttgggaaaagttttaacttttgccagtaaaaatatacattggaaaattaaagtcttatttttaccaataaattaacacgctgaaaaaagtcacttttaatagattgatatttgacttttgctagcacaataatgagccagtaaaactttgtaatttaattttttatttaatattagtaaaataatacgtgctccacacgtaaaccactcacaaaaaaaatataaaatacaatatttatattatatattttataaaaataattatagtattaagatatgtattataaataattatattattttaataattttacaaaaatcattattttactaattttttttataattattaataatatttatgcataaattataatatatgtatattattttacataattaatacaaatataattatttatattgatttatgtaatttttagctaatataataattattcataagaattaaaatatattattataattatataagaaaatctactaatttttataattaatagtaatatctatgattaattataatatatgtatactgtattatatgattatttatatattgatttgttggataattattggctaatatataattataaaaagaaattaattgaaaacaaaaaaaatatataaaaatataatgtgatttatattgaactaaggttgaaaaagtaatttaatatgtaaagcctaaaaattattgacacttttatatagttataaattatttaatttttatttttatcaattattttaaattaaaaaacatgaaagcttaattataaaattatacaataaaacataatttttaatacttgttggctcttaaagcactagggcatagtgggcaatgatgtggtcaatacttgttgatgcggttgtttatcaactgatctaagaagatcgtaagggctatgctgaatcaagtaggctaaataaaactacaaaaaataaataaggacactaggctttatagtagttcaccccacatattgttatggtaatgtggctacgtctactttatcttttattaatcaattccaacagtagagttatatttttaagagtgtgtggagattagtacaaatagagatttctaggtaaaatctatatcaaagtttatgaatataaggttcatgggagacccaatactcataaacttgataatggtggttgtaagattcttggaaacattacaccaataaaaataagaataaataatggtttcttcttcttagtaaatgtaacaccctaactaacttaggcgtat

SEQ ID NO: 222587 - DNA, 1401 bp, Cannabis indica
acttccaccacgccaagtgacacacctggtgtaatgctctgagactggaattataaggcgtgtcagtcttgtattctggaaaaatgacacaagaaaaaatacaggttagaataaaaattagaataaaaataaaaataagctatatcggacatatataagaccaaactcaaaaaaacaattaaaataataaaaaaaaacaatattatatcaagaggggcatcggaccccatcagccccacttgaaaatcacaacatgatcggtctataatcggatccatcggaccaagaatcggaccctatgacaaaaaaaattaaacatgcataatcgaccttaccatcagacccaatcagaccccatgaaaaataaaaaatcacaagaatcggaccccccataatcgggcatacaatcggacccaatcggaccctattaaccactatcagaccgagaccatcagactctatcgggacttcatcatcaacctaaaattttcccacatacccaataccatcgaacctacatcggtccaccatcggacctaagcagtgtatcgacttccaacacagacaacccaaaaaattcttaaatctaatcaaaactcacacaaatcacagatcatgcatcacaaactaaaatataccctaaatcaatgaatcataaatgcaaaaacaaacaaacccatgaatttttaaaagagaaatttaaaaaattaccttagacatggtttggcaccgtgcggttctcctccttcgtgcgtcgatgagtccgaagggtgggtctcctcctccgtgcggcggtgatgaaggtcgggtagtgggtgggtctcggtcggagtcgtgtgggcgtggttgtgtgaggtggctgggatcgggcgaaggaagaggcagagagagtttgagggtttgagtggaagagagagaaagggatttggattttgagaagggtattttggggggttttataaaatggtcctattttaaaaattacctacacttttggttctccaaaccaattatgtattaaaacatgcataaaaattcaaatttcccttttaattttattaattaaaaataaaaaaagataaatatgtcctttaaaaatctataaacagaaaataattacatgttctgataataacaattttgtcaaattacaacattctaattaccgtttctagttatgtaaacaaaataatatgattctaatttttttccggacagtttagtaaacagcttaataagatattatttctaattattttctgtttttaaccaatacatttctcccattgattattctgattccaattacagtttagtaaatgtgccattaaagtattgcaatatctttccaacggaatggtcttttcactattttggtgaaatgactattctattttaaaa

SEQ ID NO: 222588 - DNA, 1568 bp, Cannabis indica
aaactccacctcaaacaggcatctcgaaccccatacatgacattgcttcaccctcccagtctagcacactgcactgacaattccttatacagtcagataaaaagattgtttctttttttgataatctcgatgactctcgatagaggctcgaaaggcaatcttgtttatggctttggggttggctcaatgagcagtctttttatgactttggcattgacttgataggactcaacaagatggaggctctttaaggaaaaatacaaatcaatagaagcaatatattaagatgaataaaataaatcaagaaaattacaactcaatactaacaatacaaggactataaaaagatataaataagtgttacaattctaaaaacacacaaagacaaaagaagaatacgattataattataactcaaagcatgaaatacatgtaaatataaaaagcaattggagaatataatatagtatactattgtataagagagaaaaaagaacgcataagtgtagcaagagggggatcactaaaacttgaacaaggtttcaacacctttgtccaaaaaattatttcccccctactaccaagcactcggtgaaagatgtaaaagtttttgagaataatcaagcctagagagtcttctaactagtgttcaatagatagaaaacaaatgtgtcaaagagtgagtcataggtactcatttatggtgtaggtgaactacatttgaacctcacacctcatgatagttaccaattgaatttaggggagtaaatagggtttagaatgttggcattgatgctgaaaacgtccccatttaagagacacattttgcaatgtttttttagaaattgggagcaaaaccattaagcctcttcaaatacgtttaaaacatcgaaaaccccataacgtcaacttccaggtgacatgtcgcccaatgccaggcaacatcgccagatgcatttccagccaactcaaatttcaattttgtaactccctctcccagccaacttttccacaaacgtttcaacactcattttactgatataaatgagttaaaaacattttccaacaacgacattatcatagtttttaatctcatgacatctttgtgtaataactcgcatatttccacaattaagcaaatgtgattcataagttacaaatccatttttctaatgttactaaattatcaaactatatattatataatttaatcaccaaacacattatatacattaacttcacattaatatataatatgtcacattttaacctaattataacatttgttaatagcagatagtattttcaaataatatctcatcatcatcaagacttttctattttcttacccttttcacctctcttaaatttccaaagatggatctttcatatgacccgccgctcttgctagcttaccaatttgggtatgttttcgtttatgcttttcataaaaactaaaatataatattattctttttatttttataataagaaaatctctacacattaagtggtcaataataaaaagagttgcagtgaaaagtctcttacatctccccacactccgc

SEQ ID NO: 222589 - DNA, 6250 bp, Cannabis indica
taataataataataataagatattgtagtgattatttataatttttgcccacgattattttataacaagtacttatgtaaagtgtgtattatgaatagttggtcattttatttgttacatgtaataaaacttgataaaaaagttattttacgatactacaaatagtttagaaactatttttattggactgaaaaatttaaaaagtataataatacataagtcataattgagggggtaaaaattctaaataatttattgtagttgtttaatacattttgcacatttataatagagaaaagaggcttaaataatttattgttcgtgcatataaaataatatagtcacacatttaataaaattttaaattttatttttatttttggagcaatgaattattcttaaattttaaaaaatttacaactacaatttatattatcttataaaataattagaattaaaatatttatacatagaaaatacataaaggttcagtgatatacctattttagagcggggttgggtgtcgatagattttatatgtgtttcagcattttagagagtactttttagtatattttttatttttataatcgtgtatattataattatttagggttattgataaattttttgaaaattttaaatcgactatagtgtagaaaataaaattcaagtattttattacacatattactgtttatttatacatgtagtatgtaaccgtttaaattttatttttgacattgtaaattatttataatttttttatacatagtaccacctgtaaaagttgctagacacctgtaatagttactaaacctgtgatccgtaaggggaaatatcaagtaagctgtgcaatccacattacttgagaaatatcaactgtgatgattttacgactgtgtaaatataaaactatacagttaaagaataattaaatgaattaattagtactacctatatcaataaattacaccttattttttaatagcccatcacccacaaaagaacccttattacaagttttcttaaaaaaaaaagtatgagtgaggacaatattctatattaaattttaaaaaagaaaacaattattcaaatataaaattatctttattttattttttattttttttataaaaaaaaaaaaaagaacaaaagcaaaactaaaagctaaatttcagttgactgtctctctctcactgtgtacagctagggtttttccttttagtattactctctctttctctctcctctcacacagtcacagcctgtactctctctctcctcgaaaccagagagagaaaaccaacaaaaatgcaggttacccaatactctccactatatcaaatctctctcaccatttcatccccaaatcaaacaatgcctaaactttaaaaaaaaatcccatttttagtctcgccattgttggacaaaaaaatacaaaaagcttggtttttctagctaaaatggagccattaaggcttcccattttgcttttcctctctattcttcttcttcctttagctaaaccagatctgagttccgatcgtgaagctttactatctctccgttcctcagtaggtggaagaactcttctatggaatgtgacccttcagagtccttgttcatgggctggagttaaatgtgagaacaacagagtcgtcgttctccgacttcccggagtagctctctccggttctttaccaaagggtattttcggtaatttaacagctctgagaactgttagtcttcgtcttaatgctcttaagggttcactcccttcagatcttgcttcatgtacaaatctcagaaacctttatcttcaaggtaactttttctctggacaaatcccaagtttcatcttcactagtttgcatgatcttgttagacttaacttagcttcaaacaacttttccggcgagatcccggtggggttgaacaatctgacaaggctgagaacattatacgttgagaataatcagctttctgggttgattccggagttaaagcttcccaatttggaacaattcaatgtttcgaataatttgcttaatgggtctattccggtaaagcttagaactttcaagtcggattcttttatgggtaacactctttgcggtggtccacttggtctctgtcccggagacagtaacgggtcttctcctttacctaatggagaagtcaacattgatggaaaaagtcataagaggaaactttccggtggagtcattgccggaattgtgatcggttgtgtggtggcggttttagtgattttaatgcttttgatcttcttatgccgtaagagtagtaaccaaaggaggagttctgctgacgtggcggcattgaaacaacccgaaaccgagctttcgagggataaaccgccttctacagatgctgataacggcggttttagtaacggtaatggttatccggtggcggctacggcggctgcagctgcaatgccggttggaaatgggaataagggcgaagcgacggcggttaagaagttggttttctttggtaattcgagttcgagagtgtttgatttggaggatctgttgagagcttcagctgaggttttggggaaaggtacatttggtactgcttataaggctgttttggaagctggaactgttgtggctgtgaagagacttaaggatgttaatataagtgatgttgagtttagggaaaagattgagtctgttggggctatggatcatgagaatttggtaccacttagggcttattattatagcagagatgagaagcttcttgtttatgattacatgcctatgggaagcttatctgcacttttgcatggtataattctctctctttcttttgattcatctatcattaaagtatttagatttgtttttctatttgggaaatttgaaaaaactaactaacaacatgaaaatgttaaatttagcaaaataacaagctttgttttatggtggctttgttttatgttgatgatgataaaaatgttgaattagcataataactgtgatttttgagaaatgggtattgttaaaagggtgatttttgatgtaatttggtgttaaatgagtgattttttttgaagtctcttcttttattattattactttaggctttgtgttgatttttcatctatgactatgattatctatctcttttttgagttgttgatgatgattcccatttctctgtttttcttatgattgtgttgagattttgcttcacaagtgaataatgttaattgtttatgttgttatgagaattgggtattgttaaagaagtgattttgatgcaatttggtgttaacaactgtcaaatttcagtttttgctgatctgggttttcatcaaacaatgttgtttatctttacattccattacaggaaacaaaggagcaggaagaactccattgaattgggaaatccgatcaggcattgcgctcggtgcagccagaggaatccaatacttacactcacaaggtcctaatgtctcccatggaaacattaaatcctcaaacattctcctcaccaaatcctacaatggtaaagtctctgatttcggtttagcacaccttgttggcccttccaccaccccaaaccgcgttgctggataccgagcaccagaagttacagacccgaaaaaggtttctcaaaaggctgatgtctacagtttcggtgtcttactcttggagatcttaacagggaagccaccaactcatgccttattgaatgaggaaggtgttgatctccctagatgggttcaatccattgttaaagaagaatggacagccgaagtgttcgatcttgaactccttaggtaccaaaacgtcgaggaagagatggttcaactcttgcaacttgctattgattgtgccgagcaataccccgataggcgtccaacaatgtcagaagtgacaagtcgaatcgaggagctatgtcgttcgaacactaaagatgaacctcaacccgatcttgtcaaagaagcttccgatatgtcgtatcggtaaggcttaaaaatggagccaaaaaaaccaacaacaaaaccatcttctttcccttgtatggcttttgtagaattatataacaaactttgctttgttatgagccatatttgtgtgttatgtttaatcttgggcataaaatctttctttttttctattttttttttctaattaggagccaaaaactctaaattttttacatatttttttttatcattgtaatgtttttttcttctttgttattaatatacaattggggtggatatctattccatttgatctttgttgttgttgttgttgttgttgttgttgttgttggttgaggatgttaatggtggttgctttgtaattattattactttgagttttctttgcttttttgggttttggtgggtacatttcagctgatgaaattaagatgtttttagtactgattttgactaatttgttgtgatgttcaatcaatcattttcattctatttttctccttttttctaagattttaatgtaaaggttaacactttataatcacatggttacttttttaagcttcaaagataatcataatatgtccaagaatcactttttcttttctttaggtttagggcatgaaattaagttaataggaaagcctacaatacatcctctaaaaaaatctttcgatattctttatttaagtcggtattcaggataattttttagtttaatatatatatatatttttatgattgtgtatgttatttaaacattttaatgtacgtgtggatctgtaaaaaaaattaaactaaaaatactcttaaatagtaaaacaaataggagttttacgagatgtccttctaaggaggtgtattaaaagattttttcaattaataatacaacattaaaattagttaaaaattatttgacaaatatattttagaaaatattcaaataatgttaaatttgattgttaaggtagtaactaacaagttgacaattgagattgcttttttcaatgttatttattaatattaatttgaaatgaaaaacacatataaattgacaaaatattaggtggatataaatggacaaaatttagagtttaatttcagtattgtcaccatctttttacaacttactaaaatttttttgtttgtttagttattgggattactttcatgttaaaaaattgtcatatgagaatcaaagaaaattaataaaaataaattgaagtgtacaagaatctttgttgacatcattatatttggaatctaagcaaattaaattaattattaatcacctaacaaattccataaaatacatataacctaaaagagttgttaaaaaaaaataaaaagagttgttgagttttacaaaattgaatattaaaagaaaagatatgttttcaaactaatcataaaaaatatggctctttaatcatttaaaattatataaacattcaaaattaacacctttatgtaaaattggctaaaataaaataaatgaaaaaaatatcaattaccttctcttaaatttaaaaaacaataatagatttcagatgtttttacaatgcactcctatttgttttggcatctaaaagaatttttcagtttatttttttatgatcgtctaaattatacttatttaagaaattttgtaaaaatttcaaaaaagtaaaaaaaaaataatatgccaaaaacaaaattttaatagtcttatcttatcttaagagaaaaaaaatgtctttctattttttaaaagatgaaagaacaaaaatgtactttcttatcttatctataattagtaaaatacctaatataccctagaccctagtattttagtatattggaaaaatagaaaggtgttttttggtccaatataaagagagctctatattttcattgtttgtgttaatataaatatacaaattttaaaaattactaaattaaaaaagtaataaatgatattttctaactaaattttaaaatttaaaatgaaatattagagtaatagtaataaataataaatatgtaacaatttttttattaatcatggattgaaattatgtacttattattcttattttaataaaacttaaataaaatatagaataaataagatttttactctccaaacttcgacactaagtaattttatcttattaattattatttttgtgtgaaaatatccatcaaacttaaaaaaaaaactttaaaattattttagtcggttatatttcacttattttttgtagacaataatgttagtta

SEQ ID NO: 222590 - DNA, 979 bp, Cannabis indica
taagcgagagtttttgaattataatttttctatatatttattattatttatccaatttttttttaaatatttagtatatgtgcactatatactttctttaccatattattattatatttattatttaattaaaataaagaagatgaaaagtcaaatttaaattacatatgttgttgtgatatttttttttgatcttattatctttaaaaaagttaaaagaaacataaattaaaatatattgttatatgttaagttcataaataatacaacaaattattaagatatttttttgtaattttttaaaaagctagtgaaactaatttcatgtaacacaatattatcaatactctatatcaattgataacattatttatggtaagttatatatgtcacactataattcttttaacattgtatatctaaccgttcatttttaaccttgcaaaacaaaaaaaaaaaaatatctagaaaaataaagaaataaacaaaaaaatttcaagttcaaaaaagtctaacaaagtgccataaatattacagcatactctgaaaaattacataaaaattgacacttcttattctgaaggtatatttttgtctttgtttatttgttccaatcattcattaattctcaattagttaactagatgagaatgtatagtgacaactataaagattttttttctaatagtggtaaatatgtgtaagcttaaagagtctacttacagattaaaataaaattttcacaatgaatatttcattatgccatctttttcttaagttttagaaagagttaaggcgttgttaaatatacctgaaggtcagttggagctacatttttttacatgctcacaatatattacttacaattgatgataaaagtttcctatataaggtgaaataattcatatctcattttattattgagataaagaatataaatgatatatatataattttaattaattagatagtagccaca

SEQ ID NO: 222591 - DNA, 2695 bp, Cannabis indica
attaagttgtaacaaaaatagcagattttgttacaaaccgttgagttgagtcttgagtcttgaacttagattgactgttgcaactagcaagtctttagatgcaacaagagtctgaatagatgagtccatcaaaggtccagataaatagggaccaatcctccacaattctccaccttggttgtatttcctttgagtgtacatacaagtgaattagaaactaccttggaaaagctacatgaatcaagtcttgataccaagcaagtccaatgcaacattgaacttgctaaatggtatcgctttagttaacatatcagcaagattgatctctgtggcaatttttaccaccttcatgagttcgttcttagctatgtcccttagttcgttgttaactaattgtatagcactttgagagtcacagaacacacttacatccttttgatcaaaccccaactcagtcatggttccctttaaccatagagcttcattttcagtttcaatgagggtaatatacactgcttaattctttagtggataatggcactacatattgtaaattcgatttccaactaactatattctctctaacagtgagtatgtagcatgtcaatgatcttcttttattaaggtcatcagcataataagagtcacataacaagtaattgtgcagtccatatgatcatgtttgttaatcttcaaacttgaggttcccttcatgtatttgagcagcaatttcaccgcttgccagtattcagaacccaatttgctcatttatctactcactaaacgtattccatatgcaagatcatggtcttatagaaatcatagcatacattatgcttcccacaacattggagtaagacactccaagcatcttttttctttaaatgcagcttgttcatctgttagtgccttgagttttaagtgagcacttattggagtgttgacagtccttacatccttcttgtcaaaaatctccaccactttcttaacatttgcagcttgtgtcaagtataagatgttgttttcttatctctggttatttatatacttaggatcttagtagcctatcctaaaatatttcatgtcaaattcagtgtcaagcatcttccttagcttgtctatctattggagaatattgttccacatggattaaatgtaaaagtattgagctatttataagaacatggactactccactcatcaccaattggttttaagatggaacaccccatgattcttaacatggtattagagctatatccctagcggactttcgatccacacctatccatatggttagccagccgcacgagattcaaatagtgcaaagatacttgagatccgaacaaaaataagcgagcaaatgacatggcttgtgataaggtgatttaagatggtgagcaaaaatagccaccatcttaaaagaaaatattggagaatattgttctacatggattaaatgtaaaagtattgagctatatataagaacataggttactccactcatcaccaattgattttagatgctatccccatgtcagctacataaatcaaaagatatatgtaactcgtcttctagcaccttgtagtatacataaatgttaaattttgatcttgtgaacttctgtttgagcatatgaattcatcaaatagtaacttgttttctcctaatttttattgttaataacaaatgactataataatgttcatgtcattattaagtttaattattataagcgacctgataatgttgtagcttatagtcttgcaaaattagttctatttttacattgttatagtttggtggttgggtttaccaaatcgtataattgagttgtttatgactcaccaattatttaatgaagatttcattttattgataaaaaaaggttatatataagtgctcattcattattcttttatcatttttttctaatattatatatttttctaatcaaatcaaatctaatcctatctaagtctcatggccatctaaacaatgatcattatatatagactaaatccaacttagaaataaattaataataagtagttgaaaaccatgtcacaacagtgtacgtaatttcttttgtgtactaatattattcgttataaatctttctctagatatgcatgcaatattagagataatttttttattaaaagaaaatggtagttccttacccacttataaaatgtttgtatttatagggcaatataaatatactcatgaatgataatttatcactcaaaaacaatacaaaattaacatgttaatttgtatttagcataaacatgtatgagttagaataacaggttatacggaattataattcaggtcaaaaacatttcaaccatcacactaaacttgaaattgacttatttaatatgatgtcagtttgacacatctggaaaaagtaaccgtgttgtaacatgacagtgaaaaaaatatatatatatatatatattagtttttaattatttttttcagagtataaatttatatgtatttaataaaataaattatatttttaaattatattttattacaagtaaaaattattagaaactaaaatatataagaatgtgttttgttaacattaaaaatataaattataaaatatttttaaaacaaaataaaagaaataagagattaattaatatattttaaatattttttttaatatataataaa

SEQ ID NO: 222592 - DNA, 2258 bp, Cannabis indica
aactcacagtactttaaaatttataatttaccaaatacccagctcagcttttttccacagttttgctatagctgtttttttctcacagcacagttgtgccaaactagctctaagttatctttcgtcccttctccttctttctattttttctttcttcttttcatttttttctcttgttttttaaaattcaactaagtttctatgttgtttgcaatttaaatgtggtttcttagttagtttttatcctttttgttcaattttttttttcaaaaaccattttctctcttatttttcctccatttgttgttgattttttccctataaatattgtttcttttatcaatagctattatacattcgaatttatcttctccaattgtaaaaaaaatcctaaaaaaataacaaaaaaccgtcaataaatttgcaatggacaagaaaaatttcaaagaaactcctagccttacatcttctatagcatcgaataagaaatcagttgttgattctctaaaaaacaaaatcaaaacgtttgaaactaattattgaagattcacactctaatttcaaacttgatgatacataaagtatcgaaggtatttatgttatttttcaattgttttaggagttttttccttttttgcggtagatattttggattttttttttctaatttatgttttttgctcattttttaaagcaaaatacacttaccccaaactcattacttattgttcttctcatctccatcatttttaaaattttcttattcttcttaatcttcttttttcagtattttttcttcatttatttgaaaaatttatccacatttttttaatgtggttaccattactttttgttattctcatctccatcatcttaaaaaaaaattcttcttcttaagcttttttttttagtttttttgtttgtttgaaaaatcaatccatatttttcaattgtggttaccgacgattgttaaattagttttttgcatttcacattagtttatatttttttttacaaagaaagtgccaatggtatttatcttttttctttgacaaagatagagaagtgacaagtattttttttttttgggggggggggggggggggggaaggtggtgggttttaatcattttattgttgtttatgttttttgttgtatttttgtttttaatcttattatgcagtttaggattttttgttgttttattattattttaggatttttgtttgtgcatgtttcgtgtcagatatcaatttagaattttattcatcgctctctgattttgttaaattttatatgttttgttgttctgtatgtgttattcgatgtttagtattatatatacttgatttttatatttttaacggatatttttttgttgttctgaattatttttatagttttactgttattttatagttattttagttaacttttatgttattgttttaggattggagtcttaaacacttacgttccaactagaataatggttgttttctaactgttatgtggttcatcggtgtttccaaccgtgactactgataatgataaggtttctctcgttttggcctagacacagtataaaagaaaaattaacttaagactgtataaatgtaaaattctctgtatcacaatccctattttatagtatattgttaaattccctaccccccccccccccaaaaaaaaaaaagagagagaaaaaatacacatgtattttgtaaattacaccttttctttgtaatggttaaattattttctatttatcttaaaggttaagggttcaaatcccaatgttaaaatttaaagtttactttttgaatttttaccaaattcttttaaacaatatttttattattttaaataatatttaatactataaaaatacatgtatgtattaatttttaatatgttatatttgttaaaatatacttaaaaatttagactattcttttaatataccacctttaaataaatactctaaatattctccaaacaccctaaaaccccaaaattacccttacaattcaaaagctctcttctcccactctctctgtctaacttccccccctctctctctgttattcccatccagccccaaacctttcaagccccgactgttcacgagctccgaccgaccaagacgacccacgaccgagaagacccatgacgactcgcgacgacccacgagaagcacccaagacaacccacgaccaccgtattttttttttctggtttctgacccatctagcgct

SEQ ID NO: 222593 - DNA, 2750 bp, Cannabis indica
agatgaaggagaactttgggattgctttttgttgaatattaaagagtctcatgttataggactttatttttattctcttaaaacttgacacgtaaacacattgttagtttttgttaaattatatatgtgaagcactgaattagtactcgattattatcttttaagaagagctaggtctctctcaagctaattagtggttttgggtgagaaaaatcattattagatttttttatgtaaaagtttttatttttttttttattatatatatattagtggtgaaaaatcaaaaatatagtatttaaaaataaaaattgaagtttttttaataaaatattaaatgtagtatttttttaaaaaaatagattaggcgtgagttcttgctgtcctacccttgaaccggcttgagaagagcccacgggtagggtacgagctgtttttggccattgaatgaacgacacatgttgttgtttatttgaataattaatttctttgtgttttatgttgtcttcaccgagcatctctaacagtagtatttttaagatgtcaaaaacttctacatcattgtttgttgcaatgtcatatacaaagttgcaactaaattgagatgctccagattgaaacatgttcttcctgagttagtggcacaaaatcaagggggctttgtatagtgaagattcatagcacacaatattatgatttgtcaagatctaatcaagaattatgggagaagaaatacaaagcctagttgtgtgatcaagttggatctacgaaaggcatatgataccattgagtgggatttcttggaagagatgttgagggcttttaagtttcctaataagttcataactctcattatgaactgtgttaggactccaaaattttctctaatgttcaatggaacaatacatgaatttttttaatctaaaagaggattaaggcagggggattcactttcccctttgctatttgtgttgggaatggagtatctctcaaggattatgactaagattggccagaagcaggaattcaagttccatgaaagatgtggaagtctacaactcaaccatttgaactttgcagatgatgttctcctcttttgtcatggcgactttaagagtgtgtacttcatgatgcaaggcttaaaattattctctctcacattgggacttcaaccgaacccatcaaagtcagtgttctattgtagtggtatgcaagaagctgaaattcagaggataatcaatgcaactggatttggtaggcaagttcttcctttacttgggaattcctatatgtgctaaaaagatttcagggaaagaatgtagtctacttgcagaaaagatggcagctagaattaaaacttggagtactagaaacatctcatttgcaggaagagttgtactcatcaactcggtcttactctccatacatacctattggaatcaaatcatgaaacttccaagggaagtaattactgaacttgaagcaatatgccgagcctttctttggaagggtcaaagtatgatgcaaggtgcaggacttgtggcatgggagaaggtttgtctccaaagaaggaagggggtgtaggcttcagaaaaataccagaatggaatcaagctgctttatacaagtacgtgtgggcatttaacaaataaagaagataacttgtgggttcgatggatacatagtgtatatattaaacaaggagattggtgggaatataagttcccacaaaatggcagctggtattggaagcaggtggtgaatgcaaaagacaaaatcaagagcatgatggatattcaacggtttgttggaacccgatattccattgctgagggatataagatgctctgtccagttcagccgaagatcacctgggatagaaaggtttggggaaggctagatgttattgctatattttctagttagcaatgcacaatcggttgagaacaaaagcaagattgaaagctcataacatagtgcaggaagatacttgtgtcttgtgcaaccaacaccaagaaaacattgagcatttattcttcacttgttcggtttcagctcactgcttgctagaagtaaaacaatggttgcaatggggctcgcaatgcaactcaatgcagcagctggtgagagggataagaagagcaaagctgtcaagtttaaggaagaaggtattttcggctgtcattgcttctttgatttataatctttggaaagcaaggaatgaacacatatgggacatgaagatagtacgcacaaatcagattattcagcacacaaaagaggttgtaaggacccatgtaaggatattctggacgaaggaagtcaagaagaaggatcaagattagtttttcaatttttaagatagagtaactagcattgatgtaaataatgatagatcatatatgattcatacaggtccttatttcaatgaggatgctatttgtttgtacaaatgagatttatgagcaatacaacacttgattcatcaaaaaaaataataaaaaaaaaacttctacatcatttaaaaatataatattttattttatttcttttttatattattttttattgtttttgttctaaaatattacaatagtaagctattattatttaatataggggaatcactttgtttatgcttttttctaatttattttctatttttatgactttttttttagatttttctatattgtatttttttaacatttatttttttaaaaaatacttttctatttcaattttacggt

SEQ ID NO: 222594 - DNA, 1099 bp, Cannabis indica
tattaggaaacactatgaaaatagtccttttttttcattttattttttacaaaaaaaaaacactgtattctaatattacataaattaaaatgagtttttacgtttaccattacgtagaactctagatatttcttcttttaccctaaaccacgtatgtctttacagatttgtaactaaagtgtgaatttcaactttatatatagtgttaacaactttaatttgagataacctttcttcttttttttttcttgaataattttgcttttcaattaaaaaaagagatatatattgtattatagtaaataataacataaatacttaaaataaattttaattttataagcaaaataaatttaataatttttttagcggtatgtgaaccaatttaaaaataattgatattacatatttctttccaaatttaataatttaaaatctaagctttataaatgtcatgtttaaaataataacaaagtttgtactaacaaaattgaaaaaaagttgcattattataaatattaagtatttatgccgctaaaaatttattagatttatgttgtgtactcttaactttacgtacttattatactactactatttacccatatatagaaatatgtatatattcatatttatatagttcagtgggaggcttactttcactttatctaaacctaagttttaaattaatataacactacgtacgtttttttttatttcctcaaagagcactatacgggttttgaaaagaagaaaaaaagttgtcaaaattaaaaccccaagctatgtatataagtcgtttttaaattttaattaaattaaattcataattaatggcaggagtataatataactaattaattaagatatataaaacatatatatacatatagtagtagtgaatcacatttgagattgccaaaagtcaaaatagaagaccttcatttcagaagaacaagaaaagtcagattgctctaccattattgatgaaaacatgcattttggtacgtatatatatcttgttataataatgaaaataatttaaaaacacaaaggttattgattagtgcatgtcaataaattaagtacgtagtacata

SEQ ID NO: 222595 - DNA, 2193 bp, Cannabis indica
ccttattatggctaataaaaacggactactgattactcacatctcattatagcatatttttttttaaaaaaatatcatttttgtagttatttacttaatgattctattattttttaaagcatcgagatgttcataaattgcattataagagatcgcgtaaataaaagtttgcaccaagctgcaattatgatgatcgcatgaattgctaaataatagatgcacaaagttacatttgtaatcgcataaaaatcataaaccacatataaaaatactgaaaaatatccttgaaggatatattatttagaaactgcaaaaatatagaaggtatgaatcccaattgtcttaaaagttaagtacaaagtgcgagtacccttgtaccgtgatcaaaaaaggaaataaacaaaagaagatatattttttctaaggagcaggggcattgagattctctataattttctcgatgacatttactacttcagctccaggagcaacatctttaggaaaaagagtattggctaggccttaaagtctctattggagacatggtgcgaaaagcgatggccaactcgactgcctctggaccaaccacaacaaagtcaaaatgagacaacttggacagagtagtgtaaatgtaatcgctgacagcctgattgtaaactttcttcttttactctttctcattattcaagtcgtgagtaagattaacaatttggttctccaactttttgattttctcatctgctttattttttgccttgccaagatccctgatttccttatccttgttggccatatcgagtttagccttcttcaaaccttcatgaagagcagaattttgtttctctaagagctcatagtccttaagagcctgttgattcgcagcaatagcctgcgagtactatacgcaaaaggagtcacaagctccttgttggtctttgacttgcggtttagagctcgagcactcttcaaaaaagtcttatttccaaaaaaaaaaaaacacgaagtacaagtaatcacatcaattcgtaaaaaaattaccaagtacaatggggcacgttacctgcgggctatcttggtattttcctagatttttttttcaatctttactttctatttcttagaaggctcctgtatactggttctcgctggagtctggcgtcagctcaaattagttcgtgttcttgcaattttgcaaacgtgcaaggaaatagccaatctcaatctttaattggaaaactgctcaaaacctctacaatttccacgcaatcctaagctagttcagatcgagtcggtctacgtacgagtgcaaataaaggtcaacattaataagaaaaaaaggaaaaaaagtactaagtgtgaaaataagaaacgtacgaggatgataattgaagtctattctaactctagataaagaaaataaataaaaccactttgattatcaatctttcatattggaaaccgtgtcttttactctgttgacctcagagttggcccatttaataaagtagtaaaagcctttatcatggccaatgttcttgatgttgtagaaatagcaaaatctttgatagtaggttccccttgcgtatattctatatacgtcgcatagaatctgaggatgattctataactattgggggtaagttggtatggagaaatatcgtaatatcagaatcgctttgataaatgaataaaatggaaccgtgacaccacatcaaatgatggggactgaaacctcagggacgctagtctggataatcaatgggttggtgcatggtcgatgcggacattgtatggacacaggttttgtacaacaagtattgattaatttcaatttttggaacgtcgtcaagccagacttccttactcgtgaaaccaagtcctcataagaaaaagatttgtccaaaggtgcgtcctcaacaaagttcgcaccatcttcatcatcatctcttttatccccacgagcaggcaactcaaaatcttttctcatttcctcgacttctacatttggtgtagtccttaagcaaattcggtggacttgcttccccatatctcgatagcagttggtgcctctaactcttggaccatgcaacctatctcgccagcagaccgcgagtcttattcatctactcttgatggacccttctcttctaacagggatgtttggataaagttgttactcttctgaggttcatc

SEQ ID NO: 222596 - DNA, 2540 bp, Cannabis indica
tcatgtcgtttaattaagttgacttcttctcagtcaacaaaaagcttaataatgtttatatatatatacacaatatttaagtacatattgaagtgttgtcatccctcactgaaatttcgaagagagaactacaatttcatttcccaacaacccaagtaatatttttggagagagtgccacgtcatcacttaattagtcaagatatgtaaataataatataattttatttatccttacaaaaaattttatttattttatatatataaagatcaagacaagagttttcttttgtgatcgtcatcatgaatttcaacacgttcactatatatatatatgatgactttcatttgtatattttccaattatatctctttttacaagtatttgactctataatatagatatgtttcgtttcaattactatatatataaataattattataaatttagatgaataattaattgatgatcagtacgtactggtcttctaattaagtataatatctatagcttagtatatatattagcttaaccaaataaaagcatgaacatatatgcgcgtaaacacgtccatatattatatataaatatataatgtaaataaaattatttattgaaatgatgatatcatctataaactataatatgaagtttattattagattttattaaagcgcgtttgcatgggatatgtacgtatatttaaatttcatttttctaatatatgtacaaaattattttgattttttaaaaaaaatagttagatgtggtaaatttaatttagggttgtatatacaaaataaatttatatgataatctaatatatattttaaaacaaaatatattctaagaaatctaattatataaaaattagctagcaaaccactttaaacttcttgcttctgatcattacctatatctatagatattgtatgtatataagaattacaaaaattattatcttatgaataatatttttctttatgtatataattatgttaatcatgttaattgtttcatattacatgtttaataatgatcatgttataaacttaaatttcagatttatggcatgacagtgtttaacatatcgtgtcgttaaataattgtgtttggtgttcgtatttaaagtcttaatagttgataagattaaatataattgtattgtgtgtgttaaccataatgtaccatatcataaacgtgtcgatacgaaccctacttttcatgaaccatataattttatctaaagttctattaagtcaaattctttttgctaattgtttaatattaagttttgattctgaatttacattaaatttcttaacatataatatatacattacttatacgaatctaattaatatgaatgagacatatatatatatgaggattaattttaaaacgatttttccatttcctaataagtgcatatattatttttttttttttgataacaataagtgcatatattattatttccactagtatatattaattataataaattaatagaatatataataaaaattaaaaataaaaatagatcggtcattttctataacattttctccaaaatgcaaaatgcagttggatcttttgatttatttatttttgtttggtgatatagaaaactaaattatttgagaccagcaaataaagaaaatttataataaagaaaatataaaaagaaaatagactatatattgccattaacttcaatgtaaacacgacaatatatactgaattattcctaacatctataattttctaattaattagaaattaaatttaataatgaatatatacaaaattcccacaaaatcccaagtagataattttccatatatttgtttggttctaagtattaatatttaaaaataattttgtcctctcattatatagtccacttgacttttttaataacttatcatatttttattcaagtatatattattcaacttgattttcacactatatatataataaaataattaatttaatatccatatatctcaccaaccctctaattatataataaattgtttgattttatttctttcataattaaagtggtgatggtgactattttcatatgaccttctctatgtaatattaatgctactatgctagtatcaaataccactttccttttttttttaagtaaaaaaaaatattaatattattacttactacttttttttaaaaaaaaaaaaaaaataaggttttaattgtctctagttatgattttgcgtggtcatagacgtagacataatttagtgattctatattttttctcacaaaagagaatgtctcaaacttaaatttctcttctctaaagtcaaataaattatgatccttataaattcttgtctccttattttttcttttttgcttggagagcgagaaaatgaatctgacatgataacataacttatttacacaaattaaacgagtatgagggttttttttttttttaattttagataagtttgagttatttttgcattcatgatacatctaattgacctgttaataattt

SEQ ID NO: 222597 - DNA, 1269 bp, Cannabis indica
ccaaagaattttaaagaggctgaattcaatgaattttagtttctagctatgcaagaagaaataaattaattcataagaaataatatttgagagttagttccaagactatcacatcaattgatgattggaataaaatgggtctatagaaactaggtagataaaaatggaattattatgcataacaaggctagattagcacctcaaggttacaatcaataagaaggaattaattatgaagaaacctttgtcccggtggcaagacttaactccataagaatgttgttagctttttcatgccagaagaattttatcttgtaccaaatagatgtaagaagcatattcttaaatgggtaaattatggaagaggtctatgtctctcaacctcccagcttttaaaatcacaaataacctaatcatgtttataaattcaaaaatgctttgttaagtttaaagcaagctcgtagagcttactatgagagattaagtacttttcttatctcaaatggtttttcaatggggaaagcggataatgcattttttataaaaagaaaatcaaaagacattatatagtacaaatttatgttgatgatattatttttcgtgctagtaatgatgctcttagtgaagaattttttgtatgcatagtgagtttcagatgagcatgatgggagagctcaactttttccttagacttcaaatcaagcaacaaaaagatggcatattcataattcaaaccaagtacatcaaagacctacttcaaaattttgacttggaaaatgcaaagtccatgaaaacctccatgagcatatccataaagatggacaaagatgaaagtagtaaggatgtgaacatcatcaagtatcaaggtatgattggcatttttagtaaggttctagttttcttggaatttttttaaaagcttaccataaatcatcatttttcaatatttttcttattttcttggttgagcatttttgtattatcatatttaaggtgttagaaaaggtttagggtcaaaatgtttttttaaatcccaagttgtgacctttttttgtcttcagccactgtattgagaaaatggcagaccattttcctagtaccttagaaaatggttttctgcaagatttcatggctgtgaggtttttagtcatttccaactcgaattttttcctataaagcctattctaaactctcacaaccccaatctgatctagtaaccctaaatagaagcccccattctctctctcaacctaattacctttatctttt

SEQ ID NO: 222598 - DNA, 1180 bp, Cannabis indica
tagtttgagatattttgttttaaaaatagttaaaggtacagttttaaatattatggtatataattttctttttattttgattttttttaaaaaaatagaaaatgtcttatggtatatagatttttttttttgaaaaaaaaattagaaaacgtgatatactagtgatctttcttattattaattagtaataataaataaataaataaataaatgtttgtaaacctaataaaaaataaaaaaattaaagagagaataataaataaataaataaaagttaaaaaattaaaatgtgaaaaatttaagaagaaaatagatagaagtatttgaagttattttaaagtgtatatttatagatagataaatagatagaaagatatagtagataagtagatatatagatggattaaataatttattattattattttttttaattaaaattaataaaataaaataagtaaataatttgataatattaatttctcatataaaaaattgaaaataaagtaaacaaaataaagtaacaaacaatatatttgaaatatcccatttaaatatgaacttaaataattttcaaatgtaagtaaatgtgatattttataattaaaaattaacttatttaaaagataggtggtttcttaaaataaaatagaagttaattgtttgttaaaagaaaagataagaagctcttaaaccatcattaatctgtcaagtaagccgattagatgaggtattgcctgttatatcttttttttttttgagtgtgccttatatcttttttacttctaattgtagtgtttacttgattcaattatttattatttattatttattaggtataaatatttaaatattgttgcaaaaagataattaggtataaatattattgtgtgaagttgaagtagaacacgctgtttttcttccgtggaaaatatccttttcctattaaaattgaatttgtcttcctccacgctctaaccctatgcatatataagacacacaccttggccgcctctctctcacacctcataatctcctttctctttctcactctctctcttgctctttccttggcgatagatcgaatcgaaaccctaattctcatattctctcattacgattacaggtattcctagctcccttttatcttagtttcaacttaatgtcttatcatctcttt

SEQ ID NO: 222599 - DNA, 2895 bp, Cannabis indica
agataatgatgtttttcttgaatttcacaaatattgttgttttgtcaaggacaaacaatcgggggctgtccttctcaaaggaattctcaagaatgacttgtacctgttaggtgatggtcactccaaactgtccaatcattctcttgcctgtaatcttgtcacatctgttccaagtccatctacaagtaattgtaatgcaatagactcttgtaattcaaatgctactgcagtctcttcctgtaatgatttctctatcaataaaaataccttttgttcatctcttactgtctataatactacttttcataatgatataaaaatgttgcattgtaagttgggacatccagcacctgctgttctcagcaaaatattaaccaaatccaacatagcacactccctaaaaaatctgcatttttgtaaatcctgtcaattagggaaaagccatcgacttcccttttctctatcaactagtagagcatctcagtctttagaacttgtccacactgatctttggggtccctcccatattgtgtccaaagataactataaatactacatactttttcttgatgactacaatcgtttctcctggattttcccattaacacttaaatctcaggcatttgaagtgttcactcgattcaaaaagtttggttgaaaagtaattcaacttaccaataaaggctgtccaagctgatgaaggaggagaatatagaccatttgaaagatttctcagtgaccaaggcatcaagtttcagttgtcttgcccacatacacatgagcaaaatagaagagtggaaaggaagcatagacatgtcactgaaactggtttaactttactagctcattcttgtcttgacatgtcttattggtggcatgcattccaatgtgttgtctactctattagcagaatgccaacttctgtcattggcaatgttagcccatctgagagtctgttcttgcagcaacttgactacagaattcaaaagccgtttggatgctcttgtttccctcacttaaggccttattctcatcataagatggagtacagatccgaggagtgtatctttcttggatactctcccaagcataaaggctatctgtgtgaaaataagatggtagggtctttatagctcgaaatgtggtgttcaatgaagctcagtttcctgcaattcacaccagcaacacaacataggtaaattccaacaccaatgattccttccctacaactcaatttgaacagtatttacctcacactaatactcaacctgttgttgtcaatgagcacaatgattctccttcatcaagtgttgctcccttggattcagccaatttttccagtagctcatctacaccactacatcagcatctgtcattctcaaatgctgcacatatgtctactgattcatcatcagttccatctgaacctatacagaccttgcctactccatctgctgcacctcagagaacacatgccatgacaacaagatctcaacatggcatcattaaacccaaggcatacatggcaacaaagcataaacttcttgaatctcttctccctcgagaacctaagtctctcaaatctgctcttaatgatcctgcttggaatgcagccatgaacaagaaagttactacccttaagaaaaatggtacatggacacttgtaccttatcaaccccatatgcatctcattgataataaatgggttcatcgaatcaaattgaattcagatggcagtgttgacaggtacaaatctagactagtggccaagggttacctacaagcaccagtgatagattatgctgaaactttcagccctgtagtgaagccagtcactgtcaggatggtgatgacccttgctgttttgtttcaatgggaagtcaaacaattagatgtctctaatgcttttctaaatggcatactagaagagacagtctatatgctacaaccaagaggcttcgaagacccaactaaaccagactttgtcacttacacaaagccatctatggccttaaacaagcccctcgggcttggaatgaaaaactaaagactactctcattgactagggattcattgcatcaagagcagattcatccttgtttgtttatggttcaggacaaagcttaatcatctttctagtatatgtggacgatatactaattactgcccccaatactactctcatcaacaagttaatttttgatcttaatcaatgctttgaactaaaagatcttggtgctattcattattttcttagtgttgaagttaacagaactaaagaaggaatctatttgtctcaaagcaaatatatctcaaatttgcttgtgaaagttcatcttgatggagctaaaccttgttcaaattctaccagtagtgcccataaactctctttatatgaaggaacatcttttgaagatcaaaccttgtatagaagtacctcaggcgcattacaatatttgactcttaccacgcctgatgtggcattcatcatcaacaaactatcacaatttattcatgccccaacaagtgtgcactaggaagcatgtaagcgtttactcaggtacttaaaaggcacaatcaatgaagggttattactcaaaccagcatctagactctctctgcaagtttactccgatgcagattaggcaagttcacttgatgacaggcgctctactggtggttatgcaatatttcttggacaaaatttgatctcttggtctgctaaaaaaagcaggtggttgctcgatcatccacaaaatctgagttcagagctctaaccaatcctacagcagaataaaatggatttgttctctactttctgagctgcacattacatctccagatgttccaattatctgggttgataatcctggtgcagctgctcttgcagccaa

SEQ ID NO: 222600 - DNA, 4814 bp, Cannabis indica
gatgttaatgaaacatacttgttagtaaatctagatccttgtaaaatatatccaacactagcttggagtcattccgacctgactgcgattaatttgtataccatttgtcatgctttaaatatccacaaggatacgaccccggtctgtcagaaaagaatacctttagatcctgttagagaagacttagtaaaagcagaggttaacaagctgactaccaatgacttccttcgggaatcatattacttggttgggcttgcaaatctagtgttggtcctgaaccccaatggcacacgaaggatgtacatagactttacggacgtaaacagggcttgcccaaaagattatttcctgctcccacggatcgatcagacggtagacgccacatctgggtaaaagtttctcacctttatggttgtctactctgggtataattagatcaaaatgcacataatcgatgaggagcacactagttttcaaactaacaaaagcatatattgctacaaggtaatgccattcggactcagaaatgcaggagtaacgtaccagcaaatggtaaattgactgttcaaagaacagttggggaggaacatggaggtatatgtggatgacatgctggtgacatccaaaacctttgaagagcatggccgggacctgaaagagatctttttggtgataaggatttataggatgaagttgaatcctaaaaaaatgcacttttggggtctcctctgggaatttccttggatatattgtcagttctcgaggaattgaggctaacccagagaagatcaaggccttcattggcatgccctctcctaaaaagcataaggatgtccagagtgtgatagggcacattgctgctcttagttggttcattttgaaatctactgacaagtgtatcccattttttaatgtgttttgaggcaacaaaaagtttgtgtggactgaagagtctgaggacgctttctagaagctaaaggagcatctaactaaggctcctattttaatcaaaacctacggagggtgatgatttgttcttgtacttggcagcgtcagatcatgctatcaacgctgcactcgtgtgagaagatgataaagtccagtattcggtttgttatgtgagcaaaagatttcgtagagtccaaatatcccatgattgagaagcttatcttttacttactaattgcatcgtgcaagctgagactgtaattcaaagctcacgccatacgagttatcacgaatcatcccctacgccaggtgctttaatagttagagtcatcgtggaggttactaaagtgggctatggagcttagccagttcgacatccactactagccacaggtgtcgataaaaggacatgcccttgctgactatgtggttgaatgcacaagcttcaatcaccttccaaaagagctagttctcgagttacctacttggaaagtccatgtcgacgacgtgtctaacgagaaaggggctagagctggggtgattttaatctccccacaagagcaccagcttcaaagtgctctgcgttttggatttttcacctcgaacaataaggcagagaatgaggccatgttggcaagtttgaagttggcgaaggaagtaagagcctaacaggtggatatttacagcgattcccagttgttagtgaattagatctcttgcgagtatcagacgaaaggggagcgagtggtcgtttatgtcctaatgtcgcactttttattacagatatttaaaagttataatatacgtcaaatttcgagagagcaaaacacgtttgccgacatgttggataagttggccacagatctcgagataatcgaacatggagtagtccctgttggccatctgaagaagcccaacatcaaagtccaagggtgaatgccatagtggataactcccactcttggatgacacctatttataagttcttgagcacgagagaactccccgcagatagggctgcctcaagaaaaattcaataccaagccccccactatgtggtcatgaatgggaagctatatcgtagagggttgtccatgctgtatctaaggtgtatcaccaggagagagattagcacggtgattcatgaggtccctgaaggtttttgcagagtcaaatatgcatttgtcacagttgactaccaaatgggtcaaaactgaacctatgaatacggttacttccaagaaggtgttggatttgttgtcaaaaacattgtgtgtagatacggactcccatataagattgcgtcagacaatgggagtagttcaatagcgaccacttcactgaattctgtgctacgcatataatcgtgaaaagcttttcagctgtagcctggccacaagccaatggacaagtggaggctgtcaacaaaatcctcaagaccacattgaagaagaagctttaggcttgcaaggcccattggccagtggaactccatcgagttctcgaggcctatcaaacaacaaaaagagcttcaatagggcacacactgtatggaatggccttgggtgcaaatcagtgatcccggtagagaccatgatcccttcccatcgacgagacacttatgacccttcccgcagccattccctgctctaagagtcattagacttgattgaagatctctaggaacagtcacaagtctagctcaaaatgtaccatgagaaaattgcctgacactttaaatcaaaggtgaagagtcgtacatttaatgttggcgctcttgttttgagaagagtattcccagcttcgtaagaactgggagtggaggtactcgacccaaactaggaaggcccctatgagatactcgagaaggtgggtaaaggtacttttcagttgaataggatggatggatcgagggtccctcatgcctggaacgcaaatcacttacgtcgatactaccaataggcaaagagaactaggctttgacgacatttgtaatggtttgtgtaaaaatctatgtaattaactattgtacgaatggccctcgggcatcatgtaatgaaaaaaaaaattacatctgaatttacactttacgtttttaggccacaagctatgtttaaatcaagtgaccaggaagttggaggcgtccacacttcttagctcacttggggggtatcacgcctagccatgtgtgcctaaaaaaaacttaccgtgtgctgtaaattgttattttatatgtttggtttattaatatttataatttttgcttaaaataagatgcattgtcaaccaaattccttaaaaaggaagaccgcttgaattccttttttaagtgaaaataaacacacgtttcgaaagaagaagcattttcagccaaaattcctagaaaagggaaattcttgcctgattcctttcttgaaaacttttagaaaaagctgttcagaattttaaatcattaaggcctcgcttgaactactatagactctcagctttatcctgactaggaaaattccatctaaagtctgtagcatgtgaaactggcctccttaaattataaaatggcttaaacagtcgaagaatatcaaggcttcatgatcatacagtaatacaagaacaacctaaaagaccattcatgttttcagcaccttttagttggctcaggctttataaaatttataaggggttaagaccaaaaccatcctgcctgacaataggaaatatgtactctctaagtacctcctaagtcagtagtgggatagaaggctgactgatatcaaaggttttaagtggtggctattggaactgtacacttctacacagcctaagaagacatcccttaaaataattatgcaagccgctacataaagctaagagttaaaatcagtatgaaatattatattctaaatatagtacctcgcgaaaagaaaaaccaagttgttctcgaaagcaattgtcacatacagccccgcagacaaggataaataaatataactccgcgacaaaaagaaataaaattgtcttaaggaaaaagatagacaacaagaaatgaaggtggctcctattgatctcgagcaggggaaggtgctattaagttgatttgggctggggctttagttggctcctctggatccgagttgggcccaactacatcccaaacaagttcctcctcagccctgtgagaagacgcctcagcttctgcaaactcctgagaattcaagactttagcccctatttcctcattgctatcactatcaatcgagagggaaaactatttgaggtacatgtcatgtttaatggcgagtactgtactctcccggtaacatctgccctatctttctcattaatgagccaaagtattgcaggatttaccttccacaagttatgaaggaccacgacataggaaatctccaaggaacgaaggctattttcattgcgttagctgctgccttagctgttgccatgaccgcatcctaaataagctgggggcagtttctctcattctatgcgtagtagctaaggcaatatatgtcttcacactgttttctagacttcgttcaactttcctttgtaacttattgatggtctcctgtcgaaggttgttactatcactaaaacaaaatgatattcagctacaaaaaataaaaaaatggtagcaaataatgtatatttactagctaatattcttttagctacctatttttttttggtggctacttcgtagctaaaaccttgttattgaaatttttttgttaccaagacaatttgtagcaaatttgctaataatatttttgtagctaaaaatatcaaatttagtagcaaaataattactttgaaggactactaaaacgtttttagtctactcattttgg

SEQ ID NO: 222601 - DNA, 1411 bp, Cannabis indica
ataccattttgtatcactatgcctaactttccttaggccaaacacaagaaaatcttaattttaacatccgcgcctttattctaattccttcgatatacaatgaaacatcaaaccaaatttcctcattgttgatgatgagattcagtaaaaattaagagctagctttccacccgagccaagacttcaatacttgaagacaatgttgcgtaaatgaacaagtaaattaaaatgttttaattttaaatattgatagaatttaagaataagatgaatagatttcatttaaaaatcaattggctatagaaaaagtggtctatttctcttatatataatattatatttgcacacgttaataatgtgaaactctctaacaaatataaatatattttaagtcttaattaacaatatactagttgcatattgtgtatatatatatacaatgaaaacttggtaggcaaaattcattgatgtatcatgttcattgacttttacacacattacgttatgggcaacatatctattaaagagaatatatatatttatatatatatatatatatgcatgtacaaaaaaaaaaagttgttgtctgaaattaaagtcgaaaaaagtgaataagagatgaaggttttcattagtggcaccggcggctaaatagagaaaaacaaaaataaataaataggaaaattattttgtaagagcatcaactttgcttttatatgtatatataagagtatttcatgttttcgatttatagaaaaattataaattatattataattgtatgaaaattttattgaccacaaatagtgctgtacctacttaatatacattattataattgattgtagattattaattaattaattaagaacaaagatagttaaaggttaataattaaaagaccgcactccataaaaattagctggtcaatatttattattgaattataatgcaaaatcttttcctctttttgtttttcaccttaatggattttttgattgtgtatgtgtatgcatgcatgcatgtgaacatatggaaacaaaatttccaaaaaaaaaaattcataaagaactacttactacatgcttttttgcaaagacaacacatatatatatatatgtatatatttgtcgtgaagaaatgagaaaaaaagggagttacatatagccaaagaaagtgaaagtaatatataggcctagtttgacaataatgcacatgtgtatgtttgcccccaacccacaatcacatatatatatttatatatatatatataaatgctaaaaaatatcagtgatgattgaaaaaaaaattaataatcagtatgattgtaattaaataatcaaattctatatataatttaatataataactttattaatatataatcattcacagatactttagtgtacac

SEQ ID NO: 222602 - DNA, 2197 bp, Cannabis indica
ccagattataaccttatcaaaatttttggttgttcttgttttcccctcttaaaaccatatcaatctcacaaagtctcatttagatcttccaagttcttattcattggctatatcatgacacaaaaaggttataggtgtctccaccctagtggtaggatatatgtggctagaagtgttcaatttaatgaagctgaatttccttatcaagaattattttctaaatccaactctcagaataatcacaatccgaacccatctatcaactatactgcctatcctatacctcccacacatgtctttccacctatcaaccatactcaaaatccatccttaagtgtctcacagccgctgcttggtcccatacaacaacaagaattcagtaataatcactcctttgagtctcatacaccagcaacctcacaaacaacctctccaaacctacctactgctatacttgaaccccatactgcctcctcttcccacccatcacatattccacaacctcccagtactcataacagccaccccatgatcactagatccaagaaaggcatttttaaaccgaaagtatactgtcaaagaagccttggctaatcgtaaatggattaaagccatgaacaatgagttcacagctctcaaaaacaagaaagcatggaaacttgttccacctaccccggatatgactattattactaatagatggctatttagaataaagtataatgcagatggatccgtgaacacacaaaagcaagactggtggctcgaggtttccaacaaacacaaggaattgacttctttgaaacatatagtccggtagtaaagccttgcaccattcgaatcttgtttactctagcagctcattacaactgggatattcaacaagtagatataaacaatgcgtttctaaatggagaaatcaccgaagatgatctacatgaatcaaccacaagggtttgtagatgaagaacacccagattatgtttgcaaactaaataaagccatatatggattaaaacaggctccaagaacatggtttgaacaacttaaacaattcctactgcaacaaggatttcagcactccaaagccgataatagcatgttctacacgcaacaaaaatgggaaactcatcatgctactggtatatgtagatgatatattaattgctggtcatgaactcaagcaagtttagagtatcatagacaatctgcacaaacagttcggtctaaagaagctaggatcggtcaattatttcctggggtttgaggctttcagaaatggcactacttatcatcttactcagcaaaaatacataagggatttactcaacaagacaaacatgacagaagcaaagccacaatctacacctatgtgtgctaataccaaagttgtctctcacttctggacaacttcttgcagatgccaaacaatataggagtgtaattggggctctccaatatctcacaatgacaagaccggaaattgcctttgctgtgaacaaattgagtcaattcctcaaggctcccacaaccgaacactggggagcatgtaaaagaattttgagatatcttgtaggtacatctcatctcggactcaccttcaaaccagccacccaaatcgatcttcaaggttacacagatgccgattgggccggctgttatgatgacagaaagtcaacatcgggttattgtgtttttctgggacaaaatctcataagttgggcctccaaaaagcagagtgtggtagccagatcaagtattgaatctgaatactgggctcttgctttagcaacatttgagttagtctggattgaatctctccttactgagctttctatcaacctgtctcactgcccgattttatggtgtgataaccttggtgctggctcccttgcttccaacccggtttatcatgctagaactaaacatattgaaattgaccttcacgttgttcgggacaaggtcattgacaacaaactcgatgttcgatatgttgattctacctaccagatagcagacattttgactaaaccattgctggtacaacaatttgtgtacttaagagacaagttaacacttagttgtccaagtgtaacttgaggggggatgttaggattatgttagttactttgtctattatttcagttagtgtttaactgttttttagtctgagctgtttgccagctgttgtaaccaa

SEQ ID NO: 222603 - DNA, 2004 bp, Cannabis indica
tctttgcttttcgatcactgatatggtatcagagctgccattgttggttggccttcgtcttcatctttttcttgtttctgtctcattgattctttgatccttcttcaatggcacgcggtggtggagctcaaactcgaaataatcgagatactggtaatgtatcaaacgattcgaacatgtactctgttcttggtgaaaattcgagatccagcactggaaatgatttatcgaatcctttctttctatcgaatggtgacaatccagctgcagttcttctgccaaagatcttgacagggagtgaaaattacagtacctggagaagatccatgatgattgctcttgttgctagaaacaaaatgaagttcgtcaatggcaagcttccacagccagatgaggaacatgaagatttcgatgcttggtgtagatgtaacagtactgtaatttcttggatacttcatgcaatttctgaagagattgctgatagtatcatgtatctcgataatgtagctgagatctagtatgaattacatgagattcaatgaaaggaatgcctccaagtaattttgaggcaaagaagactattcagaaccttgtgcagagttcaagtagtgtgactagctattttaccagattgaaatcattatgggatcagatccgtgagcttagaccacaacctgcagcaatgtgagatcacagatattgatgagagatcctcttcctactgtgaacaagcttatgcttcggtgttcaagaagaaaggcaaagaaacttgacatctggacctgttggatatgctacttccagtgatgctgaaacttcctcaaacaattctgctggacagtttgctggtgctgtgcagccttttcgatcaaaatttaattgtacacactgtgggatgaatggacacacaatagatcgttgtttcagattgaatgggtatccacctgggcataagctgcatgggaaattcccaaatcgaaatgccaaaggaactcagaataaacctggttcagcttctgctaacttcactggagtagatgatgagaaaactgagagtgcttcaggagaaaaagatcttgtgtccagcttgtctaatattcagtgcgaaagcctcatggcccttcttgcacagaaagtagctaataagacaacatccactatccttgatgaacaaccagtggtatcccactttcttggtaagaactttcatgttcctagttctaagtggatcattgatacaggagctacacatcatgtgtgccctgacatcaatttgttttctaaaacttataaagattctaatcttagaactgttttattaccaactggtttacatgtgaaaatttcatgtgtaggaactgttattttgtctaataatcttgttcttgaaaatgtcctatatgtgcctaactttcaatgcaatttgctatctgttgattctctcacagctacagctaattgcacttttgtgttcactcatgacaattgtattattcaggcaatgtcaagacagatgattgggatgggaaaagtgtggcagcctttattacctgaattcaaatcattttcatgattctgttcctatcttttcttcattttctgatacaaagataaccaatgacaccatttggcattatagaatgggttatccttcttgtataaaggctcatccattgaatgaagatttgaattttcattccaattataattcccattttcattgctccatatgtcattatgctaagcaaagaaaattacctttcatttctaatcataatattgccaagaattgctttgatcttattcatgttgatatatggggtccctatagcaatctgactgttgaagggtttcgatattttatcactattgttgatgattgctctaggttcacatggatcaaattcataaaacataagtcagatgctcaatctgctattccccaattcattcaacttgttaagactcagtttgggaaaatcattaaaggctttaggtctgata

SEQ ID NO: 222604 - DNA, 1611 bp, Cannabis indica
aatataatatttatatatctattataatttaaaataaaattattaatttaacataaatatatgtatatgtatttttaaaatatattatttactttttaaatacgagactttaaaaatataaaactaatcaaaatttaaaaattatttttatttataattgatttaaattaagacttaattttttaaaactatttttaaatataatattgttactatatatataaatgatgaagatttttctttttcaagtcattgataataaatatgagatgagagttatgagtgacatgagaaaagtctatagtgagtctcctatcaaaacaaaaagttatgactgatatatatgatgagaattgaatggtgaagaaacattccaaatattataataaataatacaaaaaagagcttaataattagctctttcactttcattaattgtgcttttcattgccgtgttgaccaaaagtgtaaatatggcaatgaaaagtcttcccaatattccaaaataaagttgacttaaaagttttcctacactttcctctttaaattattttgagcaatttacggcgaaatttgtttatgttttaatttttaaacacttaattcttttaattttttttttttggtcaagacctccttatgttttaatttttatacacttaatttctttatttcttttttgtggtaaaatctttttatgtttattttttttttgtcaaatttaaataccatcatttttttagtaagaaagctttgttgatgaagaagaaagatagcagtgaaagttaaagagagacaacataggttttttttagtttttttaattattaattaattatttttttaaaataaaaatgtatttttttataagaataatatgatttttttaggaataagctaagaacctgattcaatttttaattttcaaactttaatttttaaaataactttttacaatttttaaataatttaattaagtgtaccaatataaatgcggcacgtgtttaaattatacacataagcagctatgttggcagccatagatagtaccttaaattatagtactgtcaaaatttaaatttggagaattaaatacaagtgaaatgataatttatgtatttttcatcatttaatggtgtgattatatgagagattataactctatatgtatttttcattatttaatggtgtgattatatgagagattacgattttaagaacattgttataaggcaccagtggtgcctagcaccttctcgacatgtcgtgttgcgattggctagcgatactccctaaaagctattatattaaattatatgaaacccgatacttagttggaccaatagcgatattgacacgtaggagggtgctaggcaccactggtgccctttaacatttctccaattttaacctaccatgcattgccacgttggttttgtatcaccacgtctttgactatattaatatttaagtactttaatatatgttatagagttttcaattctatatgtatataagtttcgaaacccttaacaaaaaagtcgttgtagtatagtggtaagtattcccgcctgtcacgcgggtgcccgggttcgatccccggcaacggcg

SEQ ID NO: 222605 - DNA, 1544 bp, Cannabis indica
tgagaaaactacacatcaccctgggaaacagccaatgggttctcagagaccccatatacttctagaacgttcaaaaagaaattatggtggtgataaccaaaacccagaaggaaggaacgaagaaacgaacacttttgcaggatatttacctagaagtgaggatgtgtatgatctagctaggtatgtacaattagtgaaattggaaaatagacaacttcagcaatgcttagtcgaatctaaccaacgaaccgctgagttgggaagagaggctgcagcagctagggcaactcagggaacagaatcaacctaatcctggggtaagaagattacgaggtaaaccacggggtttaagaaccaggagacaggaagcaaatcaaggaaatccccaaaacacccaggaggagcaacctaggggtactagggatgttctagtggatgaacaacaaaataaccaagaacaacgtcgagatgttcctcaaagatcctaaggatttatgaatcaagggaatgaacgtaagtggcttctcgcaggaatgaggacacaaggaagccccgaactagggaacaggaaatccctcgtaataatgagataaatcctgggactcaacctaggacaagtgggctaccactgagacactcccaacgtccttctcgatccaagagggaaggtgtatacacatacctaaataagggacgtgtatctaatctcttccaaaggagaaggccagtacaagacgaggcaagttctagctcaagacactcgaggtctcgagggcacaatcaatcaggaaggcaaacacaagatggaagcagacctcgatgttatgttgatcaagaaatcatgagcaatacgagaagctatcaatctcagagttactttgatacgagatcagtgagctattatgagcgaagacaacctaatcttagtgagcatttgaattgaagacaacccaatcttcgcgagtgactaaaccagaatgcacctgacttacgccatcaacttcaaaatagaagagccaattatcaattattggtggttataacaaataaaggcgagaagaaagaagatgatatagaccctagaatccaagacgagaataaccagctaaaaccaattgaaaggttggcgaaggttattttagatccaaacattcccactaaatgtgtgtttattgggaaatatttcatgtgcctgatgtctttgtgatacttacagtatctggttggatctcttttatgcctcgcgtgcctcatgagctcaggtttacaaaatgtaaccttatgctcatgcgcgagatagatattttcccaagctttattaagctcggtataaatggtgtaaactggcacgtacttgttgtattttttttgtctcttcttgtctttagatgaccccttgaccccttggagtcgtctttcctctttgaaccaaaggcccctgggttatcagcttagtacttgttgaaatagtgatgggtttgcttcccgagccagttttgagcaagttcatctctttttgaacttcttcctttcgaacaaacacc

SEQ ID NO: 222606 - DNA, 1289 bp, Cannabis indica
aaatcatgtcccttgaactttcatctatgttagactttttttactaaaattagacaaaaatccttaaatttaacaatctcaatagttcaggggaaatttttaacggcaaaaaaagtttacgggacacgatttagtacatgtcaaagttcgaggagaaaaattactaattagcctaatatataatctatatagagataacactagtaccacttgttagtttttatgatccaaatcagagtacaatggagaatcaattttatattaaaaaaaaataggaaatctagctccatgataagaacaatttaccttttgtagactatcagggtatctttaaatattttcatataaattaacgagcatctaatccaatgccaattgatttgtgaagaactcacaccaaagatcttccagaccaatcatcaaaactacaggacaagtgtgggcttgtagaattaatcaagaataattatttaatatcatagtgtgtactcaactcataagacactatgatgatgagagagaggaagagactctaactgaatcatacaatttggataaaaaagtctatttggctatatggcttttttttttatgaaaaaaaaaagtaccatcaaaaatcttacatcgtgtatatatgtatatatcatcatatatatatatatatattaattttaatatttaatgtatatggcacgtatatttagtaacatttttagttttatttttgttatgcatatttttaaaattttataataaaaaggaaattacttattaattttttattttttatttaaaaaataatatttaaaattttacaatttgagaaaaataaatatataattagagaatattaaaattaaaaatactctcaatattaaaaataacaatacaaaataataaggttataaataatattttaatatttatatatttaaattaaactaaaataaataatatttatatttataaaattaaccctactaacactgttaaatttaacgaaatattttttgttcttaaaatactctattaatccaacaaaataaagataaataattatttatttaatttaaaattaaaataaataattgactcaaaaaaaaaaaaattgaatatacatattagtttatattttttttatttaatcattcaataataaatattttatcatataaaatattttactaattaattacaaatttatttattttgatattaatctatttaataaaataatcaaaataaataatgtggcaattatatgtcactctttcaactgacgagaggca

SEQ ID NO: 222607 - DNA, 1627 bp, Cannabis indica
caatttgcttgaccttcctatttagtacctttgtctggttccgccattgtctgatacaatagttcgataattccattcattttaacatttaattgcaaaactaatttaaaatgaaacaaacttgtttcaattagggtttccaattttagggttttctctctttgtagccaggcagccaccaccatcccaacatacaaaagacactttacactttcgattgatagtacagtaactttttaaaagaacacatatgtttcagtggtgacagcaataataattacatatcttccattggtttttgagcctcaaattaattctttgtaatgatcgatacccacaaccacataactccaaatactacagagttgaaaaacgattattgtttaaggctgaatgaataaagggactaaatatagacatagacatatttatatatgatatcactccaattttgttatatatattatatatatatatacacacaaaccctggccgagtatgactcccccaattgcattcccactttcaatcaatctttcgtgcaataatttcttaactctggaccattaatattatggctgattatgtatatatatatatatgctgattatgtatattaatatatatttatggaccacaatattatatctctaagaaaataaaatcaaatcaatgtggagtggacaaccagacagctactgatattgaaccatcttaagtttttttttagagtttctgctaaataattaatatttatttattttgttttgacaattatatatatttcgcagttaattgattatgatgatgtgtaaattaattaatatattagtttttgaacgatttacctaatttagttaatatgttaaaaattgagttttaggtatatgtttaaaaataattaaaatgtgccaaatttaaattgagttttaggtatatgtttaaaaatattagtaattttttgctccataaatttaatattattaattttgatccttaaaatatactttttgttaaaatttctctctgaacttttacatttatagaaatttagtcattctgttaagttccatctcattattccgtttgaatgatgacgtgtctttgtcaattaataattttgccccctaaactttgacgattatcaaattatacgcctctaaaataaaaatgagaaagattcaatattttttagtaaatcttaaaaaaaaaaatttagatcttaagaaaaattattttgaatgattaaaaaaattaaaaaataaattaaattttaaaactaattaagaaatataaaaaattatttatttttattagaatatttatttagatattaaaaaaaatatattaaaaatacaatttgtaaaaactaaattttatgggaacaaacttgagtatattttattttttaaaaatgtagatttgtttaagtaaacataacctttttttagtttaatttataattcttatttttattgaatttttaattattttcctttatttattaagatatgagtttataaatataagtaagtttaatttttttcatcaaaaatattagtttatttaaattatttattagattcttaatacttttggtttaatttttaagatatgtgttgataaa

SEQ ID NO: 222608 - DNA, 2338 bp, Cannabis indica
ggagatttatttgaattcagggtctattatatatgccatatatgaaattttatattttttgcatattttgtgcccagtaacatcagaacgcggagtttggccattagaattgcattttggtattttatcagtaggcgggacttaattaaacattgggaatgtcgggaattattcgagatttagaaatgaccaaaatactctaaatgacttagaagctttttgggtttggtgtgggggcaaaattgtcttttcgccctatgatcctttgtcttttagtgagtttattttggttttataatctgaataatcttttaattggttagatatatattactttattctttaatcgaaaattaaaaaaaaaaatacaagaaaaagaaagaaaacacactctttctctcgagccccctagaaccagctagggtttggattttttttctacataatttaaggaattccaacaggtttctaagtgttccaatccaatctatacgtcccttagatcttctctttgttttcttaagttcaagttaaggttttttgcttgattttagggtttagggttctatatttattcttcctacttgagtttataatctgaggttataattatgttatttgagctgaattatgatagtttgtgacttggtttggttgttagacctagtttgagttttagaactcaaactttggtctttaatggcaaattttgattctggttatgttgtgatattttattgcttaaaatatgttcattatgatacaataagcaggtctggaagttctggttaagtttggagtcgaattgagggtgtaatgaatttttgagtgtttcctacactaacccggtcgaccggttcaggagaccccatagaaccagattccggatagggaaccggtctgccggttggggcatttttgggaaccccaatttttcccgttttgcaatatttaggtttttgccatgttatccatcgataaggaaacttttagtttcaagttgaagtcccagaaaagtgattttgcgtgtcacttattggttttacgaattatgtgatttaggggccagtaattcgtcgagcagctgttccactcaggttggccggcacacctgaatgtggaagcgaggtaagattagtataatgttatgcatatatatttacatgtttagtgtgcatgtttattatgcctgttagattacatcgatagcagtaacagtatacgtaaagttatatttggtactgataatgtatgtttggctcagatattgttcgatgctatcacattagtattgttggagtatgaccagcatactgagtaggctgacattatggttgatggtattgtcatacgaatgttcttgactcagcaccgtgttggacacagggatacggttatgcttgggtgtatgggtgcctgattataatcttggttaatgctatgttattatttatgcttttcttactgagtctgtcgacttacatatattgtttgtatgtgtaggtaagggcaaggctaaggttgagcagccgtgagagcgagcagatggagattgtgcatgtcgggcggttaggcctggagcgtacggtctttaggacagttggccttactttgtatagttgctaggcgacaaacttttgtattaagcattgtaaaacttttgtaaatatttttgtaagcgggatctcggtttaatataagtatgttattttatcatttataagtagttaaataaagttttagttgctcacgattttcaatagactcgttgattagtaacgagctgtacagttaagttaaaaatcacattaacatgcctaaactagttggttagtgatggaatatgttttaccaggatctgtatcctgtctgtagcagagtaacaccaagatctaagcccgaatgtccttctcttgattctggattctttacagccttacacactatgattgagataccacttgatgtgtgtgggcactcactctatcactcaaggtatgaaaattatgaagaaggaagagaagtggctagttcgaaaatagaaggagaatgtctcaagaaaattttctgaaggcaagaaatttaatcatcttttaagtgtgagccatcactatctatgtataggcaaccacctaggtttaggttaggttttattaggcattaaaataatggaaatattaagtggaaattaccatccaagtgaccagccatagtaatgggccccactttggaatttttcaacttttgacaaatttttccttattttctcaaaaatactatttttccaattctacccacttaaatgccaaaactattattcaataattaaaattaatta

SEQ ID NO: 222609 - DNA, 3039 bp, Cannabis indica
tttttttaaaaaaactttgatagtaatggacacagtgaatatggtggtgggggcaaaataaaaagggagatttacatttaaagcgcaaaaacacaacaatcaaagattactctaaacggaaagttagaaaaattagggagtgatgatggtgaaaactgaaaagataaagccacgagctgtgggggaagtttttgggctaaattgggttacttttcttgtgcagaaacaccaattaaataaataaatataaaatcgaaagaaatataacggtcccatttgatgtggcagtgatcaattaagggttacagctttttgagttaacacaataaattaaaggctattttcttggtgcctatcattttcaaacctttaattcatacttataaccactttgtacttactccttttttattatatttttcttgagctagctagggagtgcttctatagtcaataacaaaattaaactcacataaatgtaatatataattttaaaattgttttgggctgtaaggttaagaatttaattcctggagagtacatgcatgcatgtccatgataagagaaaagtatatatcttatgtttttcctggagagagagatcccactaattaattaaattttaacgcaaagggatattaataattatggcacaaaaaaaaatatctatatttaccaatgaagtaataatatcaatattatttcgtgaacaattaataatcagttacaactatcactccaattggtgaaataacacctttaattacattaattgatttagtgttagttcacaaccaacttttacctttttttattactgatagttgagataattgtaatttatatatagataaattattatgtatatatattttccattttatgattactggcaaagcaaaacacactttttttttaatatatattactttgtttgttcaaaagaaaaaaaaaaaatctttgtactgttgatttacgccagtacaaaataaacacaccaaaaaaaatgaattttaattaattttaatcagaaaacatcggcaaaagtctcatcaatcttaataatattcacacatgcatgtatatttttaagtccaaacatgataaatctaaataatctccaacataagtttcactataagaaggtaaacttctaagttatatatatgataatgtcatgagatcagtgaattatttggaaactcttatgatttatcatgatatttctttccttcttatgtatattgggttttcattcaaacactttactaattaatatatatatagtatatatatatattttctcaaagttttctatttttatttgatatcaaccactctcccattaattatgacaagctatatgtatatataagtaaaaatgacaaaaatatatttgtataaatagtaacatgtctacaatcacactatcagcatgatgaaaaattgaaaatgggcctgcaaggaaaaataaaccaaatgtgccaatatgtactgtatcatatatatagtttctaaaaattaatttttgaggcatttggaaataataataattgcaatagaaaagatacatataaattaatatacataccatgttccaaggaagataggggaccataaatgatggtgacaatttagcaaacaaagagtaaaacgtattagtttaatgtacgtacaaaaaagtaaagcatagcggcagcccagtttagaatttgtaaaatatatacatgtggtcctaaacataaataaattcatagaatttgtccaataaacgagtgccacgtagaatcatgaattgcatctatatgtacatacccattttggtcacacaacttttgagtttcaagatttagtgctctcccatttgcaactaaaaatattaatgatgtgcatatatgatcgatatatactttgaataatttaatttatttgtacttgtttggaccctaaaactttaatttatatggtcttggccgtaatcctttttttaaaagaaaaacaagtagaggagattccacgacacatatgtatttatttatataaatatatatgatctctgagtaatgttacatatcatacacttactgtggatcagaaaaattaaataattctttagaggctaataactacattaattaaaaaagaatttgtcagggagtatttttattgttaaatttgtgatacattgacatattttaacatatttgtaaaaaaaatgtttatgtgatgatgtgctaaaaaatatgttaaatttgttgcacgctacaaattgtatcaaattagattgcgtaaataatttaagtcaaagtttaaatctcaccactaacttatttaactttttctcgtatcttttcttttttttttagaaaaaaaaaaaaaacttaggcccctcactatatataccatagtattctctaacattaataaataggtgatgatgatcataatgaaaagacagtaacgatttcgtttattcggtagagaagtacatacatataccaatattatatttatttatatataatacatcaagaaccgacatatgaacagagcgatgtgattgataccaaattggtgaacagctaacaagagaagagacatgtcatattcatatttcacacactctcttctacatgcatttgaagtagtaaaatatattactatggaaaatttgataatttatctctgatttactttctatatttcattgtggtatgattaaagtatctacaattaatacttgtaatattattaatttgtcatcaaatttattaatattggtgtaacatcaaatataatattacaataataaagcattgctattataaagtattagggattagcactattttattttaaattttgaggtgacatattgtaaataattagtgttatctcataatttattaaattaaattatgtaacaagactttatgcttaatatatcgattgcagtacgacatattaggtcattagcctaatattgtctaatattttacttacagatcttatatttatattatttatattaataattaa

SEQ ID NO: 222610 - DNA, 1375 bp, Cannabis indica
atcgtatagaaggagaaaattaacaatatctatattttattttcactcaggaaccagaggagctatttgaggttgtctcacaagcactgttatcatcagttgaccgagattgtttgagtggatggggaggccacgtctatgttgtgtaagcccatctaaactacattcttcagtacttgttactacaaagcagcatgttcctcaaaattctgtaacataaaacttggtgcttttctactgctgcgtgctgaaatttacttttttgcttattgattgatgagaatagatccatgatagataatgtctttagaaagtagatatctgaaggttcttgagcacatttttgggttcattttccttgcttggattagtgtattttttcgtctgtctcatcttccatcatccaaatagttagttctattcagatttagttgacaaaattatcatgtataacttaaacctgaaatgatcgcttttgctgtattaacctgagtaacacaattatgttatttatctggtaaattttcacagaacacccacggaagtgaccgagaggatcttgaagggaagaatggattgaggtttgctacatggccgaagcgaatatgttaaacagagccttccaaatttcttttaggtggtcagtttcccaatgtccttgtagcttgccaattggaatgtgggaaactataatgctttttagatgagcaaggggattggggggtctattttctgtgtcaacgacttgtttgaatgtgatctgataatgatttaagcactgtattttcagttgatatagttgtgtttctcattagtaagaactgttcggaggcagaacttgttcttatttgcatgtttcttcccggacactgcattctaatttaccattaaatttcgtttcgaaggcaaatacgtgtaggaattgcatttttctttgtgttctgtctattttcagtagctatttttttttttaaaatctattttctattgtatttgaatttgcaacatttctcatatgctaaactattattttgagcaatgttgccaaattatgctcggcaagaatatcttcaaaaataaaacaatttttgctataatagtttattatgttctgtgaaattacgaatgttttagtcctgtttgtgtgatatggttttgtttcgttaatgtttttttttcttcgatcaaattgttgttagtggttggaaataacaagttgttgcgattggagggagttgttaatagtatagttacgtattttgcacaatagttgagtgctcaagctactagattgaatgaacttaggtggcgtttagttgataggaatgaaaatataaaaatagaaatgagaagggaaataggaataggaatggaa

SEQ ID NO: 222611 - DNA, 7202 bp, Cannabis indica
atattacaaatattgattctcattatttttcaataatttattctgttatatttctccattaataatcttattaataacattacacaattaaatggggactaacattacaccaaggaaatgggaagaaaatcacccataacagctggttgtttgttttaagggatcaaaacaatattagccctacaagtattactatattatagttttactatcattacttgagtttaaatataacctctaaaaaaagtcattcttactatattttttttaattaaaattatgtgtaacaatttaaaattataagagcttttactataaatattttaataatttaagcaaaagaaaaaatagcttaaaataatcttattttgtaataatttataaaaaattaattaataatttaattttggttaaattaatcttaattaagattttataaaaaaaaaataatgtaccaggttagcatgttacccatggttttttattcttttttgacatgtttttcttttgtttgaatagcttatgggtcaaaaaataatgctagatttagtgagcatgaaaaagaagaagacgaagaagaggaggaagaaataaagaagctggagatgccacctgcaagtgtggtaaccaagctcatacttaccatggtttgtaggaaacttgtaaggaacccaaacacctactgtagtgttattggtcttgtgtggtctctaatagcattcaggtatatcattattatagcacaactactaaaaataataaattatatttacttttataacacttttcattctggttgttctttaacttgtagggctaaaatcgaaatgccagtaattattgaaggaatcatcaccatcttagcaaacacaggcctgggaatggccatgttcagtctaggtactctcttcatacataaaatatatctatacatttcttttaaagcacataaaactagtatgttttttaaaagaaaaaataatgggatatttaattatgaataggtctattcatggccttacaaccaaagataatatcttgtggaaaaactatggctgcaatttcactggctgtgcggtttctggttgggccaggagtgatggctgcaacttctactgctattggcattagagggattctccttcaagttgcaattgttcaggtattttgaaattcatctacactaatttaaagctataaccttttttgttttttgaacacaaagctatacccttttcagggtcataaaatatcattgagtttatgtttatatatgtttaagacctatgataaattctcttttgatgtgattattgattacacaaccatgcctaattagagaaagagctatttacaaagatactgcaaaaaataggttggtttttatatttacggatatcaaatttatgccataatatttagtgtaattttgggagagaaagagttaaaaataggaaatacaaaccccaacaaaagtttaaaaggtctgtgaggagagttgaatctcctagacattgaagcttcaaatcaaacaaagcaacaataagagtaaaggaaatctaagaacagagaaaagagagaaaagataagaatgacgaagatgaaagatattatgaaatagctcaattgttattgatcatagttgtattgtatttataaaagagatttagtaacaaagaatgaaaacagacacaacagaaagctaacaactaactaacagaaagttagttagttatgtaactaacataaccataaagtacaactgttagctcttaacactcccccgcaaactcagcattggttatgtcagcattggtggtgtcagcaatggtgagtttggctcaaaaatgactaaagttttggctcgatattgcctttgtgaatccatctgcaagttgatttgttgctggaacatgcttgacaacaatttggcgattttgaacctttcctttgacaaagtacaagtcaagttcgatgtgttcggtgcgggcatgaagaacagggtttgcagtgagcaaaaccgtgctaagattgtcacaccaaacagtgggaggatgagaaagttgaatgtgaagctcagagaacagagactgaagccaggcaatttcagccacaacattagctaagcttcgatattcagcttttgtgctggatctcgaaatggtatgctgtttctgagacttcgaagcaatgagatttgatctaaagaaaatggcaaatccagaagttaatcttctgtcatcaacatctgaagcccaatcagcatcacagtaggctttgatttcaagatgttgaggctttgtgagatgaagtccatagtgtatagtgccggcaacatatcgaagtatccttttgacaacaagccagtgagaatgaagtggtttttgcatgaattgacatacttttttcacactgtatgccaattctggtctggtgatggtgagatactgtaatgctcctacaatggatctgtatatatgaggattatcaaagtattcactgccagatgctgagagtttctggccacttatcatcggtgttgtaatgggtttggcatcttgcatttctgcccttagtagaaaatcttttgcatactttgcttgtgacagagtaagaccattactggtgtgagagacctctatccccaggaggtacttaagtttaccaagatctttgagtgagaagttattgtggagatgggagatcagatcagacactgccttttggtcacttccagtgaccaatatatcatcaacatacactagaactagtgtaattgatgatttggtgtgaagtataaacaatgagtgatctgacttggatgatatgaatccaaatgagagtagacactgatgtagcctttcaaaccatgccctgggagcctgttttaacccatatagagctttgtgaagcttgcatactaaattaggttgagtagtgatctcaaaaccagggggttgtgtcatgtagacttcttcatggagcaccctattgagaaaggcattgtttacatccaaatgtctgacatgccagttgtgtgagatcgccaaggttagaactactcttattgttacttgtttgactacagttctgaatgtttcagtgtaatcaaaaccaggttgttggtgaaaacccttggctaccaaccttgccttgtatctgttgagtgagccatcaggattttctttgattcttataatccatttgcagcctataggttcttctcctggttgtagaggaaccacacatgtgtggtttctaataagagcaagtatttcttgggacatagcttgtctccatttttcatactacagagcagacttgaaggattttggtatcttctcagacaggtatatcttaggtttatgaattcctgctttggccctagtggtcatcttgtatgtattggtggatgttgtaggaagagtaggtgtgacagaagatggggatatagggggttgttgttctggtatgacaggctgttgtgaagaatcaggtgagggtggattagaatggttgctgtcatttgcttgagtaagattgaaatgtgtgggattaggagtaaggtatggtaagggttgtaacacaggtgagatgaccatgttgggatcaagagatgactcaggaatggtgatgttgattctgacttctggtgtgccaatgtagcgactgtcatgttggaaagttagaattaaagcagagggcagatactcaatttgttcagcaggggaaccaaattttattgtggcatagggaaaaacaaactcatcaaatatgacatccccagatatgtatattctcccagatgaatctaaacatttcaagcccttatgattgatactgtagcctaggaatgtacatggtgaggatctgaattggagtttgtgtttgacatctaaatgttttgaatgtaatatattctggtttaatattaaacaagacttctattggtgatctattttgtaagacaggtgttgggagtctattatggatatagacagcagtcctaaatgcttcatcccaaaattttaaaggcatagaggcttgtgctagaagggttagaccattttccactatatgcctatgttttctttcagataggccattttgttcatgtgttgttggacatggatgcctatgaactataccatattggttgagatatggtgtgaaggatctatactcaccccccagtcactctgtaacactttgatttttttacctagttggagctcagcttcagcgttaaaaagctgaaaggtttttagagcatcagatatatttttaaggaggtagatccatgtaaatctggtgtaggaatctaggaagtgtatgtaatacttatatccattagtggatgtaatgtaggatggaccccaaagatctgtgataacaagttgtaagggttcattatacacagtattagaagaattaggaaatggaaacttgtgtatttttcctaaacagcaagcattacaaggagagaatgaatctttattgctaataggtatattacaagagctgagtacagatttcacacttttttactagaatgtcctagtctattatgccacagttaaaactgggattggacagagtgactttctttattttctgaggtagagacataggcttgagcatgaaaagattggtttctggctgcagtttcaaggttagaattgaggcttgatgacagcttggtgggttgaagatggacctgtgattcatcaaaataatacagaccattcttgtgaacacaagtcaggagtgtattgtgtgtcacttggtgcttgacaaggaaaaaatcagggtaaaacacaaagtatacattgttatctttgccaaacttagagacactaagcatgtttcttgtgatttttgaaacatgaagcaggttatttaagatgaggggttggttagtgtttgataaaaaaaataggaatggccaatgtgttcaatagacaaacttgttccatctccaacatataggttgtctgctccattgtaactggttcgagtcatgagattttgagcatctggagtgcagtggttagaagctccagagtcaggataccaatttgaatcttgatttgtcgaattgtgagctatgttcacttgtggttgtgtctgctgatttgagttggatccaacaacagtgaagctcttatcaaatctgtaataacatcaagaacagtgtgtcctagacgatgacagagttgacattgaactcttgagggtgggggtggaaaccttcctcctccattgccagctggaattcctcgattgaatgagttaggttgttgaggttgagattcattatcacaaaagctggtgctagcatagcctcctctacagttgttgaaattgttgcgatttgtcacaggatacctcatgttgcgattgaattgagctacattggcttcatgattcagatcgtgatcaaacacatagtcaggcttagttttggcaatgttgacactgatcttaggttcttgatcaattttctcatttcttgattctgatgcgagtaataaagcctcaatctcagcaactgtgtaaccttcaattcttgtgttgcttgagattatgaatgtgtcatactcgctgggaagtcctctgaagatagctgagatatgatcatgattattgagtgtttctccaacactagctaaaagatctacagtctgtttgaccttcaacaaatattcatttagagacatagatccttttggaagattttggagtttggtgcgaaactctagaatcttggacgacactcgaagagtgaagtacttttccagggaattctagatctgcctggctgtgttgcatcctaccattcttgtcagcaagctttctgtcattgacgatagaagccatgaaacaagtaactgatcttgaacatcccattcgacaaaggcaggattgaacacgccattagtttgatctgcatcattgagaaattgaggaggaggagctacattttgaatgaatttcagcaatcgatttccacgaatggcagctaagacctgttgtttccatagaagaaagttgtgatcattttattgaaatcgagtgattaaaatacacaagtgagttctcatccggttctctgtttctacttctgatttgatttctacctttgacagtattggcagctgttccaccatttgcagcagttccaggaccggagttcgccatgtttgccactagtggaggccatggctctgataccatgtgaggagagttcaatcttttagacattgaagcttcaaatcaaacaaaacaacaataacagtaaaggaaatctaaaaacagagaaaagagagaaaaaataagaataaagaagatgaaagatattatgaaatagctcaattgttattgatcatagttgtactgtatttatacaagagattcagtaacaaagaatgaaaacagacacaacagaaagctaacaactaactaacatcaccataaagtacaattgtcagctcttaacaaggtcacctatacaaattcactttgaaaaagttgtgagagcagtcattactaccaagaattcgtagtagtcattataacggtaaaatcaaaggttatcgaacttgtcatcgccaccaaaaaataccagaaagtcataggagttattattggaaagttgtcaaaattgttgtcacctaaaaatgtcgctgaaacatctacgaagttgccatcatcatcactagagttagacattaatgtcgtcactggagttggtggttgggatcttaaatggagaaaccaactacatttatcaactaattaaaagtctagacacatgaaaactcataaaagaaaaattaaaaactattacaaaattattagctagtagctagctacctaacaaaataaaaaattgaaacttagaaaaaaaccaattattacacagaaattagttacataatataactaactagaaaatcgaaacaaagacagaacacctaaacaatcaaaaggtatattgaaatagaaaaattagttagttaaaaaaaaagacatattacaaatgaatttttaacaaaatgacttacgaaattaaactacagaaaccagttacataaaataactaaataaaaatctaacaaaaacaaactaggtgcgcaaaataatcaaattataaactaacacaagaaaatcaactacttagaataactcaatcaaaaatt

SEQ ID NO: 222612 - DNA, 1637 bp, Cannabis indica
gcgcaaggcggttcttaaacccgatcggaccatagccatagccatatctcagaagtctttctctttctctctgttcaattttggagagcgtagaatgaatgaaacccgactctttttcgcaacgactccaggcagcgaagcccttgctagtaacaaatagggtcatgctcagccggtccaggcccactcagactggcccaggcccaggcccaggcccatacttaactgataacgttattgcaaattagaccattgtacaacaaaaatagaaatttgtccccaatttaaatttgttttaaaatgaccaaaattatttaattgataagagtactttacttttgattgggaaagctattttcattctaaaacaataaattaaaaatagaaaagaggatttgagtttttatttagttaacttatttaatttttttttttgaattcaaataacttatttaatttgttgctctatcaatttctttgattattatagggaaatttcaataatcatgcttaaaatttaaaaagacatccaaataattaataaatttcctcttattacattatatcattttatgtcaatattattaacccaataccaaaagtacccccacccttagaaagctctcaaactaaagtatgtagttcaaaaacttgcaatatatttgtttttctttacgacgctttgcttgttctttttcttgaattgttagtttaactcaaaaattcttaatgaatccatgagttcttcaatcttcattttgtcaaaatcttttacctcctccattgctaataatttcgtgtcaaatctgtcaggaagcacacaaataatttttcgaaccaacacaaattcatttaaattttctctcaaagtaaaaaactcattagcaatatcgaataatctttcataaaaatccgacaaaattttagtttctgacattcttaattcattaaatctagtatgcaacatggtaaaatgtgatttttttttttaatcaatggtaccttcaaacacaatttgaaggattttccacactttctttgtagattcacaagctgatatttttttaataaaacattcaccaacactattaaaaatagtatgcaaggctttattgttataacccaacaaattttcgtctttagtagtccaattaagttcaagttttatcttagaattaccttcatcatcattttcaatagaacgagaccaacctgcaagtataactctccatgctttttcatcttgtaacttaatgaatgctctcgttctaacatcccaatatggataattcgagtcattcaatagtggtggtcaagtaatggagcttccttttgcaaacaatgacatctcacacaaaataaattatacggtataaaataagctcaagatctcaccaagagtttagtgacaagctctaatactaaataaaactttgtattttaatattaccaatttattaattaattaatcaattaactaaatgcagaatgataaatatggtactgaaacagttattccgtaactacaaaacacaactctgtaactacagaataaaaccagaaaataaatcgtgcagaaaaataaaaatgcacaagatttttatacgtggtatcaacaatccttgcaaattgttact

SEQ ID NO: 222613 - DNA, 1911 bp, Cannabis indica
agttattttttttttactttcttataacaatctacatagaaacttatttagcaactaacggagcaaccctaattgcaaccaaaatccaaacagcaactcacatagaaactatcgaagcaaccactgaagcaacccaaaccgtaaatttaaaaaaaaaacttaaaaaatatatataaagtaattcttttttttaaatcatatttccatgtttttgcttaatctcaataaaaaaaaatagaataattacaaaggattgtaaaaatgattgcgtgctaccagctgtactactgaagagtagtaattctacttttttggaagaaatccaagtgttgccccgattttttttccaaaatacgtggcaactgctatgtatgacacgtggacaaataagacacctcactcggagatcagttaaaagtcacatagaagagacaataagtgtgtggttaggggagttagctcccggacaagtacaaaaggcacaccttcttctctgggagttgagatgtagtaagacacctccaggacgagaagggcccattcaaacagttacctcgcatttaatgcagcatggggaaaatgtttggaaacgcctataagaggacatgtcagacatcgtaagccttgttcagggcgattacacgataatcaaagggggctagtgacggttccattatgaagaatcacatcaatcaaggaaggatgaagactaatctcacctaacttctgtgatgcctactatatagtgatgcatgccctatttagtatcttttgggaacttgtgcttatccataactagcactcaaagacaagttacccctttttagctattctcactaacctctataaatacccctgagaaaattgagaagggggatcggaaaaaggagagagaaaaatacctcaaaaacattctctgtaaaagaaatactctcattgataacagagactcgtggactgcgtctcattaatggctaaaccacgtaaaaatcaccgacattaactatccccaaagctcttatcattatctcatataattggttgcagaaaaaatcggatcaaagctacaatggtggaaacttagaacaacacacgccaaccttgtcccccccccccaggatactcgggacccagaagaggctgctttacaagtaaatgggggctctgaggaacgagccgagttaaacgacaaggaatacgaagagaatcttgaagggtacgatgcttatgacaaaggtagctacactgagttgctggtcctaaggcaaaaagcagatgatcacgaggccgaactggtcgcccaaaaagaacagaatagaaggatgcaagaaataatggttgccatgcaaaaggccatggaaacggctggaatccacgtgcatcccaaatccgtgcccgcaggactagaggatagggctgaacatctagacccgcaaatccgaaaatccgaccacccgccccgacccgcttccaaaaaaagccgaaaaaattaaaacccgtgtagtcgggtcgggtctaacccgaaaatgctcaacacgggtgtcgggttcgggttttaaaataatgcatttttttattcgggttgtaacccgatacccgaacaataatattaagtttaaatttttttattacaatgaaaaataatattaaaacttaaaagttaaattgctctcagacagagcaaagtgataatatatagcttggatcgttttcatgaaaaatggttgcccatttatttggttctctctgaatgtttgtagaaccaatgatttcctcctctcagcagcaacaacaacaaaataaaataaaaagagtatattaccattcgttaactaaatcataaccaaagaaaactggcagatgcttcttcttctccggcgggttctcatctcagcggtcagctcagtcagg

SEQ ID NO: 222614 - DNA, 2545 bp, Cannabis indica
ttgtaataactcacctttcgatcctgcttggtgcactatacggaaacaagtattcactatagtgcaaacatgttgattactcaacataacagatgctttactcttcatacaacccaagagaacttgcaatatcttcattagaactacctcttctgaggcagggtcagtcacctcaaatcggcaactagtgacagcatcaactagcaagttcattgcatcttcaacatgttcagtgtcttgatcaatgatatcaagtgttaagatcttgtaaacagaagacaaagcaacaccagtgattggagcaccagtttcatctgatcgaatcacatccagaaatggttgaagatacactgatgggttaatggcacgccagttattctgccatgtaaaaatctgcttacgtaatgccttcaaagactgaattagggagtgctctagctgatcatccccggacatataccgcccactccaccgtacatttctcctcattactgctaacacagctcctacttctgaattaatcatgcatgctaaagtagttttgatagaatagccatcacattcctcaggttcttcttcaattgccttgattcctgactgcatctttagtcgccccatcttggaacaagattcttaagatagaacccaaattctatctgtagctagtagctacggacttaaaagtgaagcctatgcagagacagtgtagaaacataagcaaatcattccttcacaatctacagagatgacaaggcaagccaaattaacaggaagtttgcatattaaaatagtaatggagtaagaaatctaactcaaagaaggttcgatcatatcttattgtatcacaactaaacaggactctaaaaagccaccacaatatttagtaagaataaagtaccatatattccatatagtacttataaataaatagcaaatacacgtatgatccgcaaagacctacacagctgggatcacccaaccacttgagataaactcaaaatctcaatcaattgcttcatacaatcggttgtggccaacttattaggatcaattagtctagtgaactttaactggccattatacatttcatctattaaatggcacatctcgacagacttgaataacccagaatgcagagaaatctaatttaaaaccaagtctttgcatgaccagaacaagattagattggcattaaatataaactccatagctccactaacagaattccatttaaattaaaaaaaaaaaaattgcctactgtaatgttaccatttctgagaatcaacgccaataattacaaacaaagtctcccgacatggaattcacaaggaaagttgaaatacagaattgatcacaacagataaacacaagtagatgtaaatacaagatccggcccagctaagtaaacccaattcaataacaaatgaaaaaggatcgtagtcaacgagctagctaagaatataaaagcagcacaacgacagatcactgcgcgcagatcttcctatttcatgatcctaagtcctaaaaaagaaaatgcaagaaaacgagaaattctaaaacccaaacagcggcatctgaagctttaagacttaatccctcaaaaaaacgcaattacagagagaaatgtgtagagaacctgagattgggagaagccgggaaaccctaaacctctggagaagaggaagcaggaaaaggagaagaaagagagagtcgagtaaagcagcccggggtgggtctggtaggagtagcagccgaaaccagtcagtcaccaaatctcacctcagctcagctctggtgagattttccttagccgtaattactgcttgctaattatataaaatacatatatcttgttttttcagccgtaattttccttttcaggttgtcgtgtcttatggagctattttatttaaattaattaagtattattttaattattttttatccattaaagtgttaaaattattttacgtcctgcatatttactattttcatgtacgtatttatatcttttgcatttaacttttcatgttcttgtactggaaattaacattgtaattttgtctgattgaagaaaaaagaaaattacatagggcttttccatttttattttttaagtatcatcaagttacacacttttccggtttccaataaagactcatctttttcgtgaacactcgcttccctatattttgagctcatcaaaggcgagagagcttttttttttttttttttttttttagttattatatatatttttttatcataataactaattttattgctaagagtagtgaaacaatagattagtctacaaagaggaatttcttccaaccaaagaaacctagtttttctatatgcatatcttgctaacacatgtgctacagtattaccatttttgcattacataaaaaaggacatacacccgaaaagacaaataacaagaacctaatagatctaacaatacaacctcattgggaaacacattctaaagaagagttgactgaattgacaatgatttcagcatcactctccacaaaagaaa

SEQ ID NO: 222615 - DNA, 2283 bp, Cannabis indica
aatttctcattcccaaattaccctcttaaagcacaatttttctactccaatttttcgacgtcacttttgtgccactaaattttggaaaatccatagccaaaaatcagaaaagaatcaaatccaaaaacagtcacaattttcaaaaacaaccccaaaagaaccaaagggggttttggccaatagccaaataataagctcagttgaagtagatttttccactagtggagacagaaacaaagattttggcttcattacttagtagaaaaaaaccacaatagaaaatacccaaaataaatgaaattgttgaaaatgatcaaggggtatctgattttgtcgtttatggggcaaatttgtcgtttttagattggcaagaggttgatttatatgggttggaattgcaaagttacaagccaaattttgtgtcgtttgatgttcaaggtgttggggaaaacggtgtcgttttgttggccccgggacctgaatatattgatgagtttggaggaattgaagaaatgttgatgatgagtttgattttgccacaaaatgaagtttgtgagatgaaatttgagttgaagaaaaatggtttagtgagtgaatagaaaagtgtgcactaaatatttattagtggttgtgagttactaaaaaaaaaaaaaaatgttagtggtaaaaaaataatagggtgtttacaatgcaccttactaataggtgtattagtgcaatctttaattgttactgcatttagaagaattttttaatttttttttaatcgtgtacgttgtttaatatattctgtaaaattttgagaaattcagaataatttataatataaaattcaatgtttaaaccgtttgttttcaaattgtataaaataaaaaagtcacgagtgtaacaaattttttgaatctttttttagtgtgttaattttttttttaatttcttaaaattttgcagagtatcttaattaattaccacatatataatcataaaaaaattcgaacaaattttttttctagataccaaacagataagattatattttgtaacattttgaagggatccagaattttctaaaatgatattatgttaaatttgttctaaaaaatattcttatttctttgtactttttttctttttttcgtttggcatttcctaattttcaattctagttgtgttcttgtacacatacaaaaagttaattccaaacataatactataaataataaagacctatatgacatttgataaaaatgtgacttaatttatttttatgtatttatattattaactttatttatttagtggtagaagtggtgagtggtactgttgccaacaattgagaaaaagaaaaagaaaatgtttgtaattactaatcctaaagaattaatgaagagctttgagttaatctttattcaaaaaaataaaaaaaaaaaaaataaaaaaaaacattgagttaataaagaaataataataaataccattttggatcctgtgttttgcaaaagttatggattaaagacaaaataaaccatgtattttccagaatagtaaaaataagattctaagcttaatttttgacaatttttttttaatataattaacttaaagacaattcttaacatgaacagatacagaaaatataaacggttttgtcataatacctttaaatcagataattattaaattttattttgacaaaaattagttcatggtcttatttgtaccattttaaaaaatacaggatccattttattattgagaaacagatatttttatttttctttaaacttttactattttctaaatcgaacatagtgttattttattaaaaaggctagaataaattgtttaatatttttttacgtgttatacttatatcactgttagtttatttaaatattaagcctcatataatttaataaaataacttttataaaatatcattaatcaatcacaagacgcgacatttaaatggtattaaacactaataatattttatagcaatgctattattttatgtttgataatagactttttggcatgtgaattgtgttgaacattttcaaaaagagacaaagcaaaattaaagtgtccatatattccaacccactctatagtgatctcaacattatttaataccaaaaagtctctcatatgatgtaaatgtaaattggccaagaagtttggtcaaaataatgatcaactttgttttctagtatacttttcttttttgatttaacttcaaaggtcattcaaaacacacaaattagggaacaaaacaatcta

SEQ ID NO: 222616 - DNA, 3045 bp, Cannabis indica
actcttgaacgctgcttccagtagatttcgtccttgaggaggaggccatccaatctagattggagggaggcaatgtgagagagagagttgggagtttggtgggaagcattcagcaggttatcgagttcagcttgtgtccgagatatttggaacttaatagggtgctaggatttactccaattcctaattttagcaatacagttggattgcttgtcaagaaagagctgcaagggagaagaaagagaatccctagagttagcccaggatgaattaaaaaggtgagaaaaagagcgatccttcagccaatgattttcgaaatgaaaccgattagatctttgagtggcaaaattagggtcttgaagcatgatcttcaaaaccctatgatcagaaccataaaaccccagatggaaaagagtagcatgaggaaataggtctctccaaagctgattagaggtacaccaatccagacgctcaaggattgaaccatgcctccaagtaaatttaggcccaacttgaggaagaggaacatgattatatttatcgagaaaagaatggaaaaaatgcataacatggggggggggttaagagaagagttcctgtcatttaaagaaagatattcattgaaatcacccataactaaccacggcaaaagaggagcagtatcaaataaacgattgagtaaagtccaagtaacagatttaagattaacataaggagaaccataataaccagaaaagtgccagtctttgccattaaaattatttataatacaatccacatgattaagggagtaagaaattacattaacatcaatacagtctttccaaaaaagtaaaatccctcccccaagaccttgcctaggcacctctaaaacactatcaaaacgaagcttgtgtttcaggtccgttccacgtccagccggcaacttagtctccataacaaacaacatcatgggctgatgttgcttgaccagcagggagagattacggaatgctcgagggctccccaaacctcgagcattccaactgcagagactcattgttctcggcggggccgcgtagcagcacccgccgttggttcatcatcagacatggagggaacaacagcatcatccgaggcaatggctctagcgcgcttaagcatgctgcgcatagagtctccaacttgagcattctgacgcatgaatgttggcctaacaacagagggaatggcagcagtgggaggggggcaagaagcattgataacaagtccagattcccctcgggaacgagagggattagttgtgggagcaaacataggggctttccctttgcctttgtcaatattggtggaaacagagatagagtcagtgataataggggcggagggtctgacagagaaagatggcatagcatgggtattagcagtgtaactggctgaccgagtagagggggatgaaactaactgtggagattgggtcgaaagtcgtggattgggactggattgaggagaatcaacgtggagaaattggtcgacagcttgttgcagatcttgagcatccgaagtagggtggagacgaggaaaaaactcctcaaaaggtgttgaattggacagctgaaaagaatttttcttgtgtggggatgaaggggtagcacggagggtatctttgtattccaagagtggggggtgcgggaaattatcacaacggaggaggtatttagcgcatttattgtaagtatgatcaagcagaccacagaagtagcagaaattgggaagactttcatatttgaaactgacccatcgtggctcagaaatgcctctgaaccgaatggtcatacctcgacggagaggcttagtgatatcaaagagtacacggattcacaggtaaggaccaaaattttccattaaggagagaggataaatttccagaagatcaccaatttcatccgcaatgaactgtgcgagctggggacttttacgaccaaacgagattcgatggatttagacccaaaagggggcatatctaatagaatcaggggtaggtgttggtgacacatcaggatgagtgaagaccatcaagaacttgtcaaaatgccatggctgctcttcaagcacacgacgcctatctccatcgcattgaaatgaagctagaaagagcccagaatggtattcaaaaatttgacaaggaaagcggagagtccaagcttcagacatggctttttcaatccaagatggtttagcagatttgggagataaaagcttgaaaaacaagcagaaagcgtcagtatcagtagaggagtgaattgagatgtggtcaaagtcatgaacgaggctgtcctcgtcatcaagagcagtaatggggtttgggttggtggaagaggaagccattaaagtggggcagaagagactaacaaggttttcagcaggagacgaaaatggtgtgcaaaaagaaatggagagaacatataaataaacaaagatggaaagaatcgagagagacgagtacctggagaagaaaagtcgcctcgaagagaggattggcgtctgaaccatcgcttcacagctgggagaggcagtctggaatcgtcgctgaaatgcaatgatggcttttggttgtgagagggaaagaagcagaatgacggttggtttagtagtataagaacgattcgaaaatcgaagggagtgaagatcgtgcaggaaaattaatgctgataagaaggagccgccataattaaatgcaagtgtgagagagagatagcattcaacagcgatggtgctcgagaaattaggggaaaatacataatgattagggtgacgtattaaggaaacaaatccaagggcattaatgagggtaaacagaaccaaataaaaagtcaggggagagtaagaaagggggagagtaggaacaaaagaaacatcaagtgaaagagcagatagagcaataaatgctaaacagaaaggaatcagaaaaagaaaaataaagaaagagaaactaagaagactcaaacctgagaagaaactgagaatcaggcacaacaaaccaatatcggtgcataaccagagcaa

SEQ ID NO: 222617 - DNA, 2173 bp, Cannabis indica
atgcaccaagggagctccccgctccccactcccctctctccccgctactccctctctctccctgcgacaatccctctcctcgttctatagctctctctccccactccctcactcactctccccactgcctagctcactctctccctgctccttcactcactctcctttgttctcttactcccctaatcatcacctaataccacattctccacacaagggagcaatcacattcaatgtatatatgttacaacggagtgaccacgaaaaaggatgggggagggagttgctaccaacattaaacaacaagacttacctctcatatactcatcacttagctatttctcctaagtgttatactcgcatcatgagcataaagagaaggatagcaagggaacatacaacaaaggatgaagttgttaaagcacgtacacctctgaagaagtagtggttgtacaacaagtacaagtaatagagacaatatttatcttattcagagtaccaattgacacccgacaactactgcaccactacccgtctaacgtgttgatcttcatggtgcaaaagtaatcgtgtccctcaacttttgggactacttatattttggagccattagagctctctataaatacctctctcttccattgaagaagggattggaaaataatcattgcaaaggagtttagagattcaatacaacaccatttttctctattaattttctgagttcctcttaagcttttcatctttaccactttacatttgattttataagtaaagtttagttaacgagtttttaacgtcaacagtttggtgtcgtctatgggaacgacaagctcttgctatgttagttcctaaaccattcactataattttcaagatgtcaagaaatttccatcatctctgagaaaatagggttcactcagatgaaagcaagatggccaccatagtaagagaacatcaacctcctatcaccaaacagggccaaaggaagagtaaccaaagtgtggaccaccacacaaatactttaaaaaggcccacagcactatgtgactcaataatgacatcagtggtaaccccatcaataaaagtattcaactatcgagagggttatcttcggtccggtgccttccactatttgtgccaccaaaccccgacactttaaggagtaagcccagaaaggaaaagcaagcatacttagtgagttcaagctcccaggcttactgctacaaggaggaaataagcggcctaggttggaagaacaagagcttagaaactactgtggctggtatgcaaaaagtagtgagtagcatactcaaaggcaaagcccaagcctcacactttggtcacaaaagccactgagtagggaacgagatcttaactacatatgctggcaaatgtgattccatgtcatctactaataacacccgataagatgaacacggaaggattctatcgtgagacaaaagctcaatgaaccaattgagataactcgagcctacccactatgaggggattcattgaggtaagcactcgatagcctaaggaagaggcttcacccaagaggtcttatactagggggcacctcgcctgtggctcgccaccaagagcaaggtaagcagacaaccttatccatcagctttagtggtaagtcacacactgtttggacaagaagagtaccttccacgggccctatgcaaaccacacagaagacccaagttccacccgctaactcttgagagaggataagcgaaaggatgaatgagttggaggcaaaaatgcaagacctacatcgaaagatagctatcgctacgaagggggacttgaatgatgatgaggagtttgatgaagaatctcctctcttaaaggagattcaaatggaaccacttccatcaaactttaaggaactatagatgacaccatatgatggtattgctgacccaaagtaccatctcggtgcgtttaatgagttgatgaagatgaaaaggtgtcatgtaaggcaaagtatcaatgtttcatgatcacattaaaaggagccgtagataaatggttcaaacatctaggactggggacgatcacatcttagaagcaactttcagacgaattcctccaataacattatgttgcatgcaatatcattattgttgttgaaagacaaatgcgagtattcaaccta

SEQ ID NO: 222618 - DNA, 4843 bp, Cannabis indica
aaaaacttgggacaaaatattttcattcacttttacctcaagaagaaagtaataaaattaagaaaaaaaaaaaagaagaaagtaataaaaatcgctcaaagtgtatgttgatctaattttgattctgattggagttgaagagaagcagttgataattgaatttttaactttaataagctgagtcatccgatgacccaaagtcattaaagatattttgtcccatccacttacgcagaatgccagatggaaaattaaaaactccaacagttgactagatcaacaataacaaggacaatgacattgacaaattaataatttttgtgactagttacaaaatcaaagttatagttcaatttatttaaaatgatcgttttaataaataagttgtaatactttacaaattttagcttatgatcgtttcaatttgttttaatgattgttttaattttttttatttttcaatttaaaaataatttttttatatatacattttttacagaattttataaaaattctgatagtaactaaggaagcaatttaaatctcaatcaatattcgtataccaaccaacatagaaattaccggataaactacgggagtaactaaattgtaaatttagaaaaaaaaataaaaagtagtatatgtagtaattcttcttcttcttcttattattattgtatttttttgtttttttttctttaatacataaaataaatttaatgaataaaatattaaaaatataatatttaaattacctagaaaaaaatagaataactgtgaataaattaatcttatgtaaagatttgaagtaaagaagcttataggattgctccatatttatttagtgcatgccatactagtatttttttttataaataatactttgatattaaatatatatgattcaatatttaattgtacgaatgaatacgacacttcatgaattaagatctccagttaaaaattggtattccatactgtattaaatctattaaagtttaacacatcaactaatttaatttttattaaatatgttaactaattttgttgattttattagaggtttaattttattataaataaaaaagtaattgacatgtcaaattttgattgatttaacagagacattgctttttaacaaaaatcttgattcacacttcatatggtattaagacactactagatcgttagggctttaataaagctaaagtggcctcatcgtaattaattttctttttatatagatttaatcacataaaatacaaccattatatatttattttttaaaaaagaatacaatatatatagggtatacataaacaattacgttttttttttgataaatttaatcacaccatacgtcacttggcttggccctcccacttgacaagctctttaaacaaccctatttttctttagagttgccctcatcaattctccttctcgatgtggaacattgacgtatgataggaaattaacaaacttaagtttatctctctattgtttttttttttaaaaaaaaataataagtctatctctctatctaccctaccaaatccagtatatatatttttaattattttcttgaacaatgaaccgtatagcctttgaataataattaatatatatttattaggaagagtgctactgtcaacctcctgttacaatttgttagtcaacttttacgtctgaaaatatatgtcagaatatttattttcaatttttttttttcacgacggtgtttgttatgcttacaacatcattcctgtaaatttttgaaattttttgaatagtttacagtagtactgagaatacgtttgaagttttttgaacacgagtggtaaactagaaatatcatgaactactctgttttaggtactataaactattcagaatttttcaaaaatttacagggatgatactataactataacaaatatcgcttaaaaatatttcgacattgtcatttcaaacgtagaggttgactaaaaggttgtactaaaaaattgtaattaacactcctcattttttataaaaataaaacataacatacctggaacataatttttataaaaattaaataacattaaaattaggtaacatgatatttattaaatttaaaaaatgtgggttctcttaattaataaattttttctaaaaaaaagtattaagtttcttgtcagcgaaaataattttcctataataataaaattcattaatataatattatattcaaagtaaaatacattaaatacaattaaaattaactaatatataagaatttaagagtattttagttatattaaaaacaaaagttggacttatatgttaaaagaaaaattggacttccttaccaaaaaaaaaaaaataaaaaaaataataatatatatttagactaaaatgagctctaccgataaaacaaaaaatttaaaataatgtataaaggtaggacgaaaataatatataaaccatttatttgtcgatataataataacttgaaaccatgaaacgacacaattgtttaagactattctatatatgactcgccgtacgtgcatgactaaaacatcacgcttagaaaacttatataaatatgttgcgaaaaattatattgatatcgaaacacacgtacgcaaataagcatagatcttgtttaatattttattgtttaaatactatataactatcggggatataattcgcttattgatgcttcattgattgaaactggaaacccaacgcttcttgaatcatcaaactttagtcccatcgatggcatatctgcatctgttctattgtagaatgcaggttgtttcggtacagccagagtaattgagtaactattaaacataagaactatttgccttcattgttggtctgtcttctggatcttcttgaacacatagtagccctatgttgatgcatctcacaacttcgttttctgagtatgattgtgccactgttggatccaataattttaagggatttccctccttccaaagtttccaagcctgtaattataataatgcaactcaattcatcaataactcatcatcatcatcatcatcacatataatggatatcttattttccttatacattttagaatcaaaataaaattgtaaatcttttgatcaaattactcacatagctcaggaggtcctcagcataatccgattcataaaagctactgttctttttgccactgataatctcaagaaccaagaccccaaaactatacacgtcagatttgagggagaattgtccgtgcattgcatactctggagacatataaccactgcaaaaatgatatgacacaataaaacaatttactcaatgaataagttaaagataatgttgttataacaatatagctatatgtcttgtatttctataagagagcactaagtcgaagaacttactatgtcccaacaattctatttgtatttcctcgagtttgatcaacatcaaacattcttgccattccaaagtcagaaatctttgagttcatctcagcatctaacaaaatattactagctttaagatcgcgatgtataattctaagctgagaatcttcgtggagatatagaatgcctcgagcaatccctcctataatcttgtaacgtaattgccatgttaattctccttgtctatcagtgtctgcactcaaacaaatgctcagaatcagcacctagcagctagacaagtaacattgtaaataaattattcataataagacaggacgtaccaaataggaaatagtcaaggcttttgttgggaacaaattcatacacaagcaaagtttcttttccttccaagcaaaatcccaacaatctcacaaggtttctgtgctgaagcttagctaatactacaacttcattcttaaattcttctgtaccttgtccagaaccttttgatagcctcttcacggctatttcttgtccattaggaagtttaccctaagaataattaaattagttgatttgattattagctacttaattaaaatgttacaacagcgcatataacagatagttaaaatatacaataccttgtaaacctcaccaaatcccccttcacctaacttagctgagaatttgttagtggctgcttcaatagtagccaagtcaaattgcaaggattcaggggtagtaatatcatcaccatctttagctacacaaccaatcaaatgaaaaaaaaaaaaaatactaattaaatgacagaattcaaaaaaaaaatatatattttccttgcttagctataagtaaaagcaaatgtagaaaatatattaagataattttagatctattctttacctagagtgtacttcttttttgctctcttggttatgaaacagaatcccaatatgaatagtagcatagcgacaacaattggtacgacaatggcaacaattgttctggctgagatattgcttttccctggtaaattacgaatatttaatgagcacttatatataaagttcataatctttgcaagaacagagaattcgtttaaaacaggggataaaacaaacagaacaagactagaagtaatctaaccaaaaaagaataaaaattagatacaaatttataaataataataattattttcatgacctatataacactcaggtcatgtttgatttatgtttcgttcccgtttcattacttatcctagctttgattcttattcataaataatttgttaatttttgtctacatcaagccaaatatcatatattataacataggaaagatacaaacaagccagcaattaaggataataacgttatcttgctagtagccatatatgcatgatcttcggacaataagacaaataaaga

SEQ ID NO: 222619 - DNA, 1081 bp, Cannabis indica
tatatatatataatattaataataataataataataataaactttaaagcagccatagccgcaaataattaaataaaatatacacaaataaagtaaataagaaaaaaaatcaaataaaggaacaaataaggttaggagcacgtgagggtgagatgagtttggctttgatattatttggaatgaatgaattatagtaactcaactcatagctactttactttgagtgagttttcaactctcttttactattggctattgcctctctctctcctctatattgttattattattaacttagccaaaatagtattacaatcttcccaatatatatatggtggttattatattacttttcatacagagaatttgatctttttctaggttgatcttgtcaactagatttttccttttattttctttttcgagagagagagagaagatcagaagtacttatctctttaacaagaggtaattgattatgtcactagctaatcactatcatgtaccatgtatagttatatgctagctaaaaagctctccttctcctcatcacccgggaactaattaataattattatataattatcatctaattaattaatgagaattattatattttgatgttttactgaacaaaaaaaaaaaaaaaaaaaattaaaaaaaattacttttgactaaaatatatatagtatttagaaataagttgtcactaatttatgtttagttacaataattattgtgacttaaaatatcatttagttacaacaaattataattttagtgactaatatttttatttatagatcttttaaatttagtcacaacatagaaataataatttataattaattatataatttttttttactttaattataaattttggtgtgagtaaaataaaaaaaaaaaattgtattagttctgatggagtttaaatttcaactagttctcattaactctaaagtggataaattatgatcttgtggatgagaaacataattcaatacttattatttatttattgaaaaacgaactatatgaattgtaataattatatgatgctatatctattctatataaa

SEQ ID NO: 222620 - DNA, 1287 bp, Cannabis indica
actcaactattattccacaatactctttctaggactggcttccacaagagaccaacttccagaaaggacaattacagagacattttcatttaaagaactatacaacaaattttgttaaaaaaattcaattaattatgcttatttaaaataagtttcattgattaaaagtaactttaatttatgagtgcacattgctcaaatatttttggggtgaacacataaaacaaccacgagtatgtgtagtagtatgtgctccaaacaaggtttggttgggtacgtgacttgatcggaaaaagcaccactttctttggatgtagacaccactaacacctttagtagtcctatatacgcaaattgcatggcaccaattattcaattctttccattacattattgtatactctattaagtcccaacaaaggtattaattatgtaaaacaacgtgtcatggcttccattttgggccaatcatatgttagaagatcatataggagaagctacaaagacacattattgctcctcccccgcctaaactaatcgaaatcttttgtagtgggcagctcaagctagaaaacacccattgcaaaaaataatgatattacaatataaattgagtccacgtaacgatgacttgtgcatagtttatctttagtgggtgcgtgagtgtggggtactaccactacatttactacacaaggcaaccttatttagtattgagcactttaactaattaaaatgaaacacataaacaaagccctcttgatataaatattaaagtccaccattttctttttatctttataaaataaaaaagtgtatatatatatatatataaatttggtatcatgtgctatttaaatatagatttagtattataatgctcacatatattttgtatcataaactcaatttcttttataaaatttgatcaatgctatcaagtcttcaattttataaattttaaattcaaatttaattatttaattacacataattaaaaatggttttaaataaattgataaaattatattgattaaattttattttaaaatactaaatatgtataatttcaaaatataaaaaactaaataaatataacataccaaatatctttttgaagaagacataagtgactaaaaaatacattccctatacacagagttggccctaggcataagcgggctaggcccgtacctagggccatactttccaggggccaaaataaaaaaataaaagaaattattaagcttttatttgagtaaaatttaagtatattataagcaacaa

SEQ ID NO: 222621 - DNA, 4437 bp, Cannabis indica
cttgtgagtagatctaaaatcctggtaaaataactttcacatgagcttcatttaatattctcgcaggatgttgaagcactccctactatctttgtatgtgttcttttgtatctttttgtacttaaacaacatatcattgacgtagactttgatattgtttccaatttggttataggaaaataacagtgtttatgttcttcgtctggtgcgtgcatgctgatctaattgtagaggcatccatgaatgtgaggagtttatggcaagctgacgcatgcaccacttgatcaattcttagtaaatggaaacaatctttagggcatgccttgttgaggtcagtgaagtcgatgtaagttgtccactttccattccgcttaggcaccataatagggttggatacccaagctgggtagaaagcttccctaaactattttgttctcctataagctttcaacttcttccttgagagcttttaaaagctctttttcaaggagactgcgtttctattgtacaggcttgaagttaactttttctatgttgagggcatcatagatgacttggggctcgatccaatcatgtcatcatgctaccaagataagatgtcttgatttctcctgcgacaagccctgagcatctcacttaagacctccatcaggtttgttccaatcttgacagccttggttaggtccactatggttaggggaacttctctaagttcctcggtcggaccaactaccgagtttatttccccaaaataggggtcaatatggtccccatcttgagtacaccttcaagtgtctttaggtgtcgtctccatcttctctgtagtttgatctccagaggtctttatcgtctctctagctttttacaggagagtccttgcttgtctcgtactagtgccatagcagtagaggaggtcttattcgtcccttctgaagccattagcaatagaggagtttcttcttggaaagtgataatgaagcgttataaaactctcgggtagttccttgattgccaaggaaataaccaaataccaatcatcgttaggaacttgacaaacaagtggtacactgaggagatggtccgaaggtcataaatggcaggtctttcaagcatcacattgtacagagacttcacgtccaccactatgaacatggccatgatggtggtctgcttcaagacggtacccatagtaagtggcagcttgatcttcccacatggaggaatgtcgtctttgcgaaaccatacatgagttgtttgcatggttctaggtcttctaaagttaagcccattctgagtagggcttgcttgaacaagatgtttgagatcattgatcattaccttcgccaccatcatattaactatttgaacctcaacaaatagaggatggttgtgcgggtagttgatatgataagagtctgactctccgaaggtgataggttcacatcaatagcactgagacttcggagaaatttttgctacctctaggactttggctcatagttcatgtcaaagtgacaatgcatacctttctaaggtcgtcctttaattcctagctatatgagggcctccaatcacgatcaccaacctgcttgcaactagtgcaggctagagaggtgcattacccccagctggagcttctgtacatgccactgaagagcagcatgtatttgtctgatgagaaattatatctcatcctaaaactaatttcaatcattagaatcatggccacaatttttgtggtaacgactctcatcctgcaactaataacaatcattagtatcatgaccataattgttgttgcaacaacagaatttgttcaagtctctctttcctgactcattgaaaggaagaggtttgtgatacaacactgttgattgcatggtcatatatatctcctttcttggagccaagagaatggaataggtgatgaagtaaggctcataatctcttaagggctttcctcaaatcttaggcttctttcctatgaaggagttgccttgcttgccactgttgttagctctctttcctccgttcaaacctcccttcttcccataaccatgggcctcagtagcagggcctttagtgtctagcaacttcttcttgccaccctttgagcccttcgtccgggtgatgacttcttcaagtttgataaaaccatacgttctatctaagaagtcattcatggtgcatacccccttgagataaaggtcagacaatagaggactcatctccttaagtctagccaggagttccataacccttgcaacatcgctaagacttttggtcttagcggctacctctaagaaccattagatgtagtctttcacaggcccgtcttcctattacttgacatctaccaaatcattaggcttgatctagcattgttgggaaggagcgaactggttaccaaaagcatctactacatctttccataagttggaagagacttaaggtaccaccgtttagctaaacccgtcagtgtggcagggaagattcttcaccttacatcatccctcacaccttgtagattggtctgcacttcaaagtagtggaagtgagacagtggatcctccttcccggtgtattggtgacgggaagagttcttgaacatcaaaggaatgggaagagctttgattctttcagagagtggtgatcgtcattctctgttgagctcgaatttggacaacttaggtgcagtgatacccttcactaaagcagctaaggtgttgaattctgcctgattgacctcgtgaatggtggtctacatcctagatggagcttctgttacccggataaggtcttttctataagttcccacatccaccattaatttcttgtttaagaagacacacaagtctttttgtcttccaggtcgttcttgtactccggttgacagggtattgtagttttctcctcaccacggggtcatgaaggcaactctggtgaggcctccagaatcaactctagattttctcagaacgacctgctgcgggagtgttcattcaaagcatattaatggctacttccctcaaagtattctttagcatgataataagtgtgaagagaattgaattggttgctcaagttaaattcatctctttgaactagaggtaagtgctcgtactgttgtccatcagggccatgcgcaaactaacgacacaattcagccttttcatctcaaaagtacttctaagtatgaagcagttcattggtctttacctgccagatctcgtagtctctagttttgaagtagcatctcctactacttccttcaacttgagtagcaggtccctttccccttgcacggtgtcgaggcttggtatcttgagaatgttaaggatgacttggtggataagtcttgttggttctctcattgttacgaggttgtttaacatttgttggagggcccattgtttggtgacctcgagcttgagccctttcaggctcttgaacgaaggtaccttccctctaggagttctccacgcctggtgcttgtctagtgcctactaggttactaggtgtagcagtggtgttctgagcattaaaggtttcaccttggacactatttcccacatgaccagttggtcgatggggtgtctctctcaccaactctgaaaaacctcttcgggaagtagttctacgattacagtgataagcttctataattcattgagaaaggttagctctctgttgttcttactcaacacattagctttcaatgttcttctagtttttcatgaaccagtgttgaaactattcatgttgcttatcgagagagtctcgcagctattgttgcaagtcagcaatagtttggttgagctgagtgacctcaagatcagtttcctcagggtcgtctatctccacgtgtggctctgttggaatatattttcccacaatttagatttactaacaagtatgtttttaacatcctaaacaagaacttctaaaacgatattaaataaatggctccttctggttagatctctaacccttgtatcctttctgtagcagagaatcaccaaggtctgagccctattctccttctcttgaatttggattcttcacagctttacacactaagattgagtaccacttgatgtgtgtggcacatactccaatcactatagggtacgaattgaagagagaaagaaagagagaaaggaggattcgaaattggtatagagaagatggctcaaatttttgactgaaggaaagtgtttgcatcatctttttctttgaggccatcactacctatttataggaatccacctaggtttaggttagaattatttggcattaaaataataaaaaaatgggtaaattgtccattaagtggtcggccatggatatgggccccactctgtaattttgccattttttcaactatttatcttattttctcaaaaatggcattttttttcaaattccaaccactta

SEQ ID NO: 222622 - DNA, 7883 bp, Cannabis indica
tttatggtgttgttaagtagggaccgtgcatatattatagaggatgctttaatggtgtcatggtctatatgaaatgccaaaaatgatcttctaggattaacaaggtgaggtcttctccgcgtgagtcgttcttgatcaatggaggaatgctcgctctcatcgtttcaagacgttgttagttcattataatactaatagcagtgttgagcattaaattaaactaaaagtgaataagattaaggtgaacgtggatggagctattttttcagctagtcatgcctattgaattggttgccttgatgacgatgatgagggtcgaccgttggaggcttttataccttgtttaaagtaggttgtcttcaacccaaacttgctaagattattagcatcaaggaggctctaagttgggtcaaaaagaaaggatgacatgatgttattgttggaattggcttgcttgttgatgtccaagtgattgagaactcaattgttatgctttttttgtttggttctttagttttagattacaaaattttacttgattcactatttaatgttcaattttttttgtaaaacaatctgctgacaacgccactcattgtcttgttcgcgatgcgtattgttaattagattgtatttttgttggtagtaatgttccttccactatcaacgatgttgtaatggccaatttggttgttctattgtagtgaggttatctcttttttttttttcaaaaataactaaataaatgattaaaatagattttttaaggtttagataaaaagatatttgcggcgaaacccccttattttacgattttgttgcaatcgtactttttttgttgttaagtgtcaattaagtctgtaaagtactagctcaaaaatatgtgataatatatttctttagcttatttaatatatagtccaataatatatcgtcacgtgtttttgagttgacacttaatgaccaaaaaagggtacgactgtaacaaaatcgtaagataaggtacttttaccgcgattttttctattatggtcatatgtgtaacaattgtaaatattaaaagagttttgctctaaatatcttagataattaaaaagttgaatttcaattaatttggtttatttttagaagttatgtattattttaattttttaatcttctctataaaaatcctaatttttgttggaaaatttattatcgaattctatataaaaaaaaatggaaatttacaaaaatattggaattgaggttaacttttacaaaaatactgatacacgatttttatttaaaatactatttttttataaaacaactgtaaaatacaaaatagaacaactaaaaaaacagtggaacaacaaagaaaacttaccacagtacacaatattttttttaaaaaaaaaacacagtatttttgaaaaaataactgccccacggtaaaaaaagaaaaaaaatgtgaaaaattttagtatgtgatgtaaaaagctcaaaaaaaaaattctaaaaaatctttagaggcttttttattttaattttctatggttctaattttatgtccccaaaggcaaatctgttattaatatattatttttttaattttatatattattttatttatacgcttagggaagttatatttacaccccttcaaactataactacacctcaaaaatttaattacatatttaacctattataaaatgaccaaaataggtatctttaatttttattcttattattttatttcttaataaatacaccccacaacttcttaaaaaaaacgccgactccgtcaaggccagaggtccatctggcacttcaagacgtgagctccgtcaggttggtggttccttcgagatgccaactccgactcctttcctcaagtgatggcagcaacgacgttgggaccgtgcgatcaaaatttttgttttgttttgaccaaaggtggcatctttgggttaggttggcacggactcaccaggctaacaacttgagttcttctactccttggaccatcgacgtttgctcctcaaatcaacaatgtcacaaaccgggtttgttttgtatttgtgttttagctttagatctaatttttcaggttcatgaatactctcttttagttctttgattttgtgtttagatcttttatccattttatgttaaagattttatattgagatttcaaacttttatctttggtgttataagtgtcggtgggagtatttaccactgcaaccaacgtaaaatggtaacagggaagtgatgaagggttggttagtgcttccaatgactgagtggtggggggagagtggtggagcacgtgatggtttccgtttgaagaaagaattggaaacataatcaatttttttttaaatggaaatcttcattaataacagaatcatacaggattaggcatgtcaagagagatctcctgacttgcataagagggttcaaccccaatccacatggcactagctttgtgagtcaaagcataattggctaaagcatgagctactctattggcctcacaaaatacaaacgagataccatcaaacacaatcatacaacaataaagctctaatttgatctagcaaacaatcgacatcatggcaaccttcgtccttcttttagattaattgaatggcttgtaaactatccgattctatgctaaatctattgaatttgtgctgaattcccatctgtaatcccaataaaatagccctcaactccaactgaagtggagcgatctccctattaatcacaatagaggacgcaaactgagaccgtccccgactgtcacgagcaacacaaccaatccccacacctcctccacctttgacccctgcatccacatttatttttactcgtcccatctcaggtgccccccacttagaagtttcatgttgatttcgactccctttaatatctccccctccctgaaattcaaccaaatagttcctacaccagtccaccatatcgcttgcaataggagcagcccctccatgcactacattgtttctaacattccatatatttcaagtgatcaccataaaaaattcaaacctgttcttttcccactgccgagccatcctcatcaaaaaagagagcacatcctctccctgaatttgtttcatgtcctccttcaaaccacttgctgcccagaattccttacttgttttgcactcccataacgcatgcaatgatgtttcctccacatggccagaatgcttgatttttgtggaattttaagtcgccataatgccttccactagtccaccaacacttgatcatttgactgatattgttctgtagctaacgaacttgccatcctatagccgcttttgactgtatattcatcattcttgctatagtgccacattatcttatcctcgagttcccaccccatactaggcatagaaagtattagctccgcatcctccatattaaacaccgcacggataaagtctttatcccaactcccatccacaaatttcagatctgccacaaaaagattctccggaagaagaggcttatcatatatctcaaatgtgaccggtcttggaagccaagggtcttccaaaacccgaacattttccccatttccaactctccatctatagccattgacaatcaccttcttctcccacatcaaactccgccacacaaaggacgcatgtactccacatttagtctccaagatgcttttattggggaaatatgatgctttaagcactctgctacaaaggttattcggataccgaatgcatctccacacttgcttggctagaagtgcttggttaaaaaaaccccaaatcacggaaacccaagccacccttatcctttggtttgcataactgtgcccacttacaccaatgtatcttcttatccttatcagaagatccccaccaaaacctcgcagccattcggtgtatacttgagatagtcttcttggataggcaaaaacaagacatggcatatgtcggaatagcttgaaccaccgctttgatgagaacctctttgcccgccattgagaagatagagcttttccaccctttcattttagcccacactttgttcttgattcggtccgaaaattcctttttgtttcgtccaacaaagatggcaatcccaaatacttaccatggttctcaacctctcagacccccataaaagtagcaagctgttgtcgaacctcccttcccacatttctccaaaacaactttagatttatgatagttaaccaattgtccagaggtagccgaatatgaatctagaagtcctttaaaacgctggcagctctccatctcagcatcctgaaaaattaaactatcatcaacaaaaaataagtgcgataccgacagccctcgtcgaccaaactgaagtcctctcatacgaccctcaagttcctcatgttgaataagatttgagaatgcctccgcacaaaagagaaaaagaaatggtgagagaggatccccttgccttaatcctctttcaggaataactttccctttaatatcaccattaatcaggaaagaaaagcttactgaagtaacacatctcatcaccttatctacccaagctatgtcataccccaaccgtatcatcattgcccgaagaaaaggccattcaaccctgtcataagctttttctatatctaactttaaagtcatctttgtaccatttcgaaatctattcttcatgcaatgtagtccttcataggcaataatagcattttcatgtatcaatctgtcttgtacaaaagcactttgggtgtcggaaatgactgcactcatagttgtcctcaatcggcaagcaagacattttgatacaatcttataaataacattacacaaatttatcggcctaaattcttccactctgacttgtttctcaactttggggataagtgcaataattgtttcattcaagcaagccaaattagcctcatgattcagaatctccaagcacacctcaacaacttcattttgcaatttaccccagaacttttgataaaaaagggctggtaatccatcaactccaggagccttaactggattcatattcttcacagcattaatcacctcttctgctgcaaacggatgcatttgtacctcattcatatcatttgtaactttaggcctaactctccttaacatctcatcaacctgatccatgtttagatttgaagccgagaagagattcccaaaataatcctctatcaactttttgatcatagtagtgtcagtctgccatatacccatactatccactagtcctttgatctcatttttcttccttctggccgaagctttacgataaaaatatttagtattcaagtcaccccatttgagccacaatgtccggcttcactgtctccaatatttctcatccttctcaagcactacatttaattgtttctctaatgttttcaactccccccaaatactggaatcttgtcgaggcgataattccaaaatagccttctttaatttttttgttttaacctgtaatgtcttcttcttgtttttattccatacacggagagcatcccccaccttctttgtcttcaacttaaatcccctggagaagccaacacacttcttcattattccacaccctctccactatctctccacactctggttcttcacaccacgcttcttcaaagtggaatctactctttcgtttcaagcacctttctctttcggcaacattcggcatctctactactaacggtctatggtccgattcccaccaatccaaaacaagaatatcagctccatcaatattctgcaaccattcctcattacacagcccccctatctaacctctccataaccggattcacctcatgtccattacaccaagtaaggtccgttttagaagagcagaaatcaatcaagctacagtcatcaatcactttccgaaagtcctccatagccacatcccttcttattctacccccaaccttctccgacaaactcaccacctcatcaaaatcccctatacacagccacgacccatgaacttcctcctcaatattccttaataattcccatgaaaacttcctttgcgtagcatcaggatgcccataaaaacatgtacgggtccatggaaagaagtctttacccgccacctatcaagcaggtgaccaggtgaacttgagtcaactcgcacactcagctcctccaaccacaacagtaataaacccccactcataccaactctatcaccaacccaataattctgcccaaaatttaagtcaaacataatttctgagcttgtaactttgttaatttactttcagctaaaaaaaataatactcgggtcatgatcccgaatatgggattagagagtacgtaatgtccaaggattcccaatcccttggacattccaacttagtattttcattgctctcggcggtcttgcctagcaagactcccctctccttcagttgaaaagtgagatgataaatcagcataattagaaatactcacctcattgttagtctccacatcctctgttccaattacatcttctgaaccgaacacaaacgttttcccctgtgaagtagaatccatgccagccaaggatctcgccaacactcctgaattagcgtttgacaccatcgacattcctttaccatgattccttgcatgattcttaatcgacacttttttcctttgcccattagaacttgattttcccagcttctccccctccccattactgatattgacaaccctagaagaaacacttacctcctgatcactcaatatttgttttccctttgtaagtgcccttcgatctctctcttcctcaacctcaccatctttccctccattctttctttttttttgcttcactttcagtccccaccatatcctttctaagagtcgagtcccctatttgcacatgaatctcaactgtagtagccctattaattggtttattaccatctcccacgattggagacttatcaaccataaatgctccactaccttttacagttacatgattacgtataatcggagcctcctctctatcagttactagtgccggcggcgctaccacaacgtgtccatctaaattttccaaatcagtcaaccgctccctaactctatcaccattcctcctattttgttcatgaggttgtgatcgattctgactgaacgcaataaaacaattaggtgtggggtcttcatctctcgaccattggccatacttaggaacttgctgtccaccttctgatttttctatcaaaacctccttatggcagtctctcttttcatgtccccataacccataggcaaaacacagtgttggtagcctttcaaatttcaattggatccagtatctccttccaccacaaggtatataccttcccacaaagatactttgttttaatggaaacccgattttcatccgcacatatccgttcaagaacatcttattttcattaatccactgaatctcctggatttcaccagccatctcccctaaacgagtaacattggtttgagtaaaagctttaattgataatcctttcatcttcacccaaaaaataatcttggcaagctttgcatctctccattgtcccgaactaggccatttttccagcagtaaaagtcctctgttgaaaatccacgattgtttgctcaatactccattcgcttcctctcgactcttgaatgatatccccaagaaggaatcatctccatcttcttccaaaatcttaacttcccatcctccaatacctttccacattcagccaaactattgtagtgaataaatgattccttgtatctccctccttagtcaatcattcttcctacccagagacaagttcgccaaacgatgacgcagcctcctcattctcctcccaa

SEQ ID NO: 222623 - DNA, 1660 bp, Cannabis indica
gcctcatcaacagactcttcatcaagagacttggccaagttgcgcgtgcgtttgagcattcttctaaattcagcagcattgatacaatcaggacgttgaggtttgaacttcgtacccttgaagagcttggggcagtgtttgcagaagaacctacagcgaaacggagcggctgagatgggtgtaggtccgccaagattgtagaaaaagcctgggagaccggcaccacgtgttgagtagttccagttgtggctactagtgcctcggctgaggtagtaatgggccgaggaagcgaggttgcgagttgttcagccaccgtgactgttggaaagggtggtagagttgatggaggagtgttatttggtggaggcgcaggggaatgagcttgtggagtcaagtttgtggaagcagccacatgttgatttgattgccaaatagtagtagtggggggagaatggttaaggttaaaggtaggggaggggttagtggtgtgcaaacccatcaaagtggtttgtggttggctgaaatgttgaactccataggctgagataggttcattgaaagggccttcagtgattatgggagcttggtgaaatcggtagggaggggttggagccaaagaagcaggattggcaatatgaggacacagtctagtacgagagcaggcaatgtagaaaggattcgaagtgattcgaatttttgctcctagggattgatcataatgaagcaaaggaggagccgaagaggaatcacacttagcaaggaattcatggcaatgattcactatgtggctaagtcggccacagtagtgacaaaaatcgggtaagttttcgaatcggaattcaagccaaactggggcagccattccatggaaatggaagcccgttccacgcgggagtggctgagtaacatccatttcaattcggactcggagatagggaccccaagtctctttgagggatgcagtgtcaactgcgataaagcgccccaggacttcaccgagcttgtgtgcaagagcacgagatcgtttcaagaaggggatgcctgaaacttgaatccagaaaggggtggtgcttagagtttcagctgtaaccacagagccagcttctaatggggtcatgactatgagtttatagtcaaaatgccaaggctggccaatgagaactcggcgtctatctccgaagcaaccaaattccactgtatagaagttgggctctttttcaagaatgttaatggagaatctttcaggccacatctgtttgagacggttcttgaaggcttcagagttgaagtggcgagtggtcaatagcttgacggctaagaaggctgaaggttcatcacgaccatcatcctcaggatgatcaggtgtgtcagtgaaggaatgaatttgagtttctagggccgtgaggttaagagaggcagtgaaagtgttggacaagtcgtccattctgagtgcaggggtgaggatttgtctatgaactaaaatggaaagtctattgtttgtgcagaaatgaacaaacaaattatacagagaaggacagtgtgcagcgtgaaacaggggaataactggtatatataacctgaaatggtcgaagtatatgctctggccaaaaggatcacagtgggaaagtaaactctccatgtcaggagaataatcgattac

SEQ ID NO: 222624 - DNA, 3178 bp, Cannabis indica
catatttgtaagtttttctaaaaaaatgccatatttagggcaattaagttttttatgccatatatatcaaaacatatcttcattttcccatatttttggaaatagccctattaattgtcttagttcaatgggctgaccaaagacgttttagagcgtgttcataggccatgtgcgtgttaatacattatgtccatcctattatggcccaataataataccatacattaccgattatataattatcattatatactaataccaacactaagtgagcaacacttaaaaatgttggtccatataaaatattctaatattactacataattacacatatcattatatagttatttaatgtgcatttaataaaaaactcttgtgaaagcataaatgtaaagtttggaaaaaagttatatttggtgtgaattttcttattttgtttttatacttatgaattccataaataaaattttgggataattacacaatacactatattttttttgtaaattttttacatttttacgtttaaagatttttttttatatttttacgatattttatgaaacaacacgaaaacaacaagaaaattatataaaagtaacaggaaaataacattcaaacaatatcaaaacaacaacaaaaaataataataaattaacaagagtacaacataaaaatacatcaaaagactgtattttctgtaaataaaatcataaaaatatttaaattctatacaaacaaaaatttgtaatttttaggttgcccccagttaatagctaatcattaacaatttgccatcccataaatctgtgttttggcacatttatcctattccatatattcttcgcaaaaccaaccatgtgagactgactaaaagagagatagaagagatttcctttaaaattacctcttttctcagccttcttgacatcttcttcacctatcaccgagcgaagacgaagaagcttcttaaaataccaacttgcatcttatataaaagttgctgcccaaaatgtctgacccttcaagtatatagcatctatccaccgaacccaaaggttgtcttgttaactcgagatagcctaaatatacttggccatcagagcaacattccattttttaccctctcaaaacccaatgtctcctaacttttttgggagacaaaccttttcccaagagggaatgtgcattttgcttctattaccgttggagccccaaaaaaagtctctgcaacatttatcaatagctgcagtaactttttggggaagcaagagcagacttatccaataatttcgaactcccagaagaacaaaatgaatcaattgagccctacctgcaaaagacaaattcatgctagcccatttatgcaagtgcttacggactttatcaataataattccacaatctgagaatcgccattttgttggcctaagataaactccgaggtacttgaggggaaagcttccctcatccattcgaagaatcttcaggagcctttgtttgtacactgtggattttgctttgtcggccataagccccgttgcttcactaaacatctgaaaagcttcactaacaaacttgacagatttttcatttcccctgcagaaaataataagatcatctgcaaagcaaagattgacaagccctaaagacttacaaaggggatgaaacccgaatcccttctccttagacttctgaataagcaatctcgtcaggtactccacgatgagaacaaaaaggagcgaggatattgggtcgccttgacgaaggcccttctcacctttgaaagacccctgaattcttccatttaacataagggaataagaggctccatggaggcaactttgaatccaggaaataaatttggaaggaaaacatagacctttcaaaagatcatcaacaaagcactaatccacaatatcataagctttgctcaggtcgatcttcacgatgcatctagcagagatattcttccgagtatacccttttaacagatcttgtaagattaggatgttgtgagctagtaaccttttctttgacaaacgcaccgtgtgctacgaataaaaaaaggagaactgcaacataatacttggaacacatcatcttggagatacatttataaatggtgttgcagcaggcaataggccggtaagcaggtttatctctattccctctgtcctatgcctggtttgtagtttagcaaatgaaacccatcaacacctgtttataagactgttgtttacaccgaaaaagttgtgcaggaaattacccacctggtgtggctgtttctcttggctgagcaacatcatggagtggttcttccggccctcgaacaacctgcaagggaaggtgctaaacgcgattgttttggcgcctttatactttatttggagaaatagaaattaatgtatttttgaattgaaatgtaatgctataggatacattagcaaagagattaggcaggctgtgaagtataggctgctttgttgcagcagtaagggaaaacaaaaagtttgatgaatatattttcaatgtaatcaatagttggtagagggttgcttgttttggcgtctagttgttttgttgttgaactttgctggttttgaacaaagaatcctttcttgttaaaaaaattttgtaattttttttattatttgtgtgtattagtaaaataatgcctaaaattttcatatttgactctagtcccgtatagtttgttattatttctggctaattagtaattttcccccctgaactttgacatgtactaaatcgtgcccctaaacttttttgatcgttaaaaattccccccgaactattgagattgttaaatttaaagagttttatctaatttcattcaattttactgtttcagtgattgtttatgtactaaaccatgctcctcagactttgatatctaccaaatcatgcccctcaaactttgatatgtactaaatcatgccccttgaactttcatccatgttagaatttttttactaaaattagacaaaagtccttaaatttaagggaaatttgcggcaaaagtccccaaaaagtttgtgttgatacagattagtccccaacctccaaaaatagtggcagtaatcctcaagctcgacttttgtgtaagtccgttaattcgaaacttaactaatccgttaactttctataactgcca

SEQ ID NO: 222625 - DNA, 1897 bp, Cannabis indica
gattcctaggttggtcatgaaggctgacttctcctggtcttctggatgcatgaggatctagttataacctgagaaagcatccatgaagctaaggagttcgttttctgttgtggcgtctactagcatgttaatatgtggtaatggaaatgagtctcttgggcacgtcttgttgagatctgtaaattcgatgcagacttaccacttgccacttttcattttcacaatcactatgtttccagccagtctgggtactggacttctcttataaacccgtttttgaacttctagacttcttcatttacttcttggtttctctcaggaacaaactttcttcttttttgtctcctgggtgggtaatttggatatacctgtaacctatgaacaacaatctcatggtcaatactggtcatgtccgcatgggaccgagcaaattgatcatggttagcaattgataattcaataagtttaatctcatgtcggggtccagctgagcttcgatttggactttgtggtctgggaagtctgaatggatctggacttcatctagctcctccacgttaggttggtcagattggaagttgggtagctctcgctactgtaattcctatgactgtgctagctttgccttcattatggttcagtagccttctcttgaatctttctactcccctctaatttcttttggtccccatttggttgggaacctcaaagcttggtggtaggttgaaggtacgacttccatatcatggatccatggcctaccaaggatgacgttgtaggcagaaagggagtcaatcaccaagaacctagtgcacaagttgacttcttcagcatacacatgcagcttgatctctcccaaggtatttttctattcaccactgaatccaattagaatagttaccttcctcacaattttggattcgtcaattcccatttccctgagagcacttaaaaaaagaatgttagctgaactgcccttatcgacaagtatacatttagtcaaacaattagctatataaagaaaaataacaagagcatcatgatgagggttaagaatcctagttgattctgatgttgtgaagctgatggtctattctggtaaggaagatgttcttctactaaattcactggtcacccttttggtccagttggcctgacgtgcatgtttctttgcggccgactaggtgattccacttacttctgagccacctgttattacgttgaccgttctctcatgaacaagtggcctgcgtggtgttccgtccctctggttctctaccgtgtccctctgaccttggtaagtcttctttcctttgtcgttgaggtggtcaactaggtggtcccgttttatcaagttgattacttctaatcttaaggcaatgcactcttctatccggtggccatgcatggttgttgtggagctcactgttggaatatgtttttagcaggatctaaatttactgaaggctcaaatacaagggttagagatctgagcggaaggagtcattttaattccgctgcacccactgtaaggtttctcaaactttatatgtgtttaaattacattattttagaaattcatatttaggatgtttttttgaatgaatgaagagagaaagagagaagagaggttcgaataacatagggaagaaggctcaaatttttttgactgaaggcaagtgttttcatcatcctttgatttgaggccatcactatctatttatggcaaccacctagctttaggtttgaattattgggcattaaaaaattgataaaataaatggtaaaatagggataagtggtcggccatgaatatgggcccccactctgcaattttgctatttttcaactatttatcttattttctcaaaaatgccatttttttttcaatttaacc

SEQ ID NO: 222626 - DNA, 2874 bp, Cannabis indica
ataaatatataataaatattattataatatatatgaagttttaattgtatacaagcagttctatcgtaagagtatagactttatattataataatcacaggatctaaaatcaatggttaaaaaagcttccctactggtagggaacttttactaagtcttaccatagtcttgccctatatatatgttggcatatttttcacttcaaactttaggttaagtagatatatataaaaagcatatacaagagaatctattaatagtgacttgggctcaacaagcatgatgaaggtaaagctataaccctagtttctctttttttgagacaaagatatcgacatgtgggattacatataaaattattatatgtatatgatcacatagacgttttagatggcagtaatagtttcaggtgatgaccttaattatttgtagggaaaaagctagtgcctagtggtgatgagcatgcatatataccttttgctgtcaaaacgtatagtcacagcctgtcctaaataaactatatactttcactaatgagaaatgctaaaaaatgtgtacaattaaatataatgtttgacatgatttaataaaataaaaattattaactattcttaataaaagtttaacactatctaataaacaattttttttaagtaaaaaacttaataagtcttttatatttaattacgtctaatagcaattttttacttaaaaaacttaacaggtcttttatatttaattatgaccaatgatatgtggtttgtgcacacaacaatgacacaaacattcactaaaccattatacataaatcactcgtcatctttaattggttaaaaaattaatgtttttcttcaatgttttggtacataatttttgtacggatattattattactaaagtgtatctcataaaacctgtcacacctttaaatccggttatgaattttttacaatggcactgaacattcttgcttagttctctgcccaaagtgttcctaataaattctctcaatctcactcaaaccctagcaacgattatcaagtaagcaaaaaatgtaaagcatgcacacgaaagagaaaacttcccagcctttttattaattttttaaaaaggaatataaatttgatgcaagattcacacacgtcatgttctatgtgtttcacaacttacaaattcatatataggcaacaattataaaatctaatacaaatccaactaggctcatcttaaactaaaatatatatatttaaaaaattaatacatttaaaacataattgtagagggtttacttagatatttcttaaaatatcccacaatcttgcaacttcaatcctgaccacgcctgtccgaaattgattcaaatatgaatgatctagttgcttgagatatttgcccatgtcaaccaactactctacgattctctcaattatctcttgatagtctatccacattcgcacacgtgcttcacttgattctcacatgattcgttttcctacaattgtagccttattcaagcaaacaacccaccaaattcataaatggacctaacggatcccccactttgcacatctacaatgaacatggctcaatcttcaaccaacattgttgcccttgtcaaacaccttggatgaaccaccaagcattcacccactgcatctcgatcacataactcgagcattttcagtgtgtctccccatcttggttcactggggtgtaacaaaccctcccccaccacatgaagtcaacgtcctcatcgagagggtatttgaaaattccttaatctcgtcctcaaaccaccacaaactcacatcatgtgctcatgtaacatctacctcgccctcaccttctcactaaacaagaaactcagtttgtcgatttctttcgctcactccttttgacctcatggctaaaattttcttcattttctttgaaaattctacccttaaagcagaggacctctcttcatctaatatccctcgctatccccatgataaggcttaaggaaactcacatgaatatcagatggatcttcattttgttcaacaaattcaatttatatgctactttaccaatccttgctagaactttgaatgggtcatcatacttctaaatagggtcccttcttatctatgactttcttctaaatttgagtaaatttcaacaaaaccttctccccacttgaaactcaacatctctatgatgttgatcaacatatttattcattattttatgcgccatggccaagctatcccgagcttgattgatcgaatcttgtttctcccattcaaatcgataggcagttgcaaaaattccttgcaatttctatttgatcactttcaagagtgtcaagggttgatgtcccaatgctagctttgcttgactcatcccaatggcagaagatcgatgtatatgtatatgtgtatgtatgtaaattgcatgctatgctatgtgattcttatactatcaacactaatacgataacagtatggagtgcattgcactactacaaatattaaaattcgcgaaggtcctaaaaataatttttttggggaccgtcactacaaaaattaagtaactatttaaaactatcaagaaaaatttagtattcccgacggtttaaaattataataaacaaaataggcgatattttttaataaaatgcaaaattttaagagagccatatacctgacggtttaaaaccgtcacgtatagtataggagacggtttactatacccggcgattttaaatcgtcgggtataagggcccattaaaaaatcgtcacctacttcttgccacatatcccacgtgtccacctactttttttctattttccacatgcccacctatttattatcacctatttcttctccatt

SEQ ID NO: 222627 - DNA, 3702 bp, Cannabis indica
taattattgggtttatttgttaacgggagatcaaacctattaacatcgttaaatttaacagaatattcttttattttaagtatattctgttaaaccaagaattgccgttagataggcacttttaatatataaagatatatgagagaatctttacattatgttttgctctctttatagaacacctttaaataattaacttctctattttatctttcaaaatatatcactaaaactctattttttctattttaccttaaaattttatattatactatatatcgacttctttaaaatcacctttgtggaatctggtgtcagaggggatgccacgtcagattggtcccgatcggttgatgcttcgcaatctccctttgattactcttctaggggtatccgttacacaccctcggatgttccatgatttggttgtgtaaagcttccagattcatctgtctagcttttcccgtagcacaatcttgattgaatccgaaccccaatcacgttttattcttggaccgagttgttgacttatttgggccttatgaataggcccataaaagaatagagaatgtgggaccttacgcgtgtcacgtttccaaaaatacagataacaataattaataaaaaaacaaagtccaaatatagtctttcaaaaagatggacatatgcacaaattcgttacagagctccaaagctcaaccaagaaatctcatttggttctcccactaatatctagataaaacctacttaaaagcctcaaacaatgagaagaaactaaatttatctgagatggacttaaatagtctaaccatcgaaatggcagaaacacatctctttcaaaagataaagagtgaccatagcactcatccaaattgatgcaaagcaccgatctgatagccctaaaggctacaacaaatacaacccatccttaaggcagcgaaaaaaaaccctacaagacatcacaaactgagaaccaccactaaaaaaattcatctcagtaatgaactaaagattaatactaaatcgagatattacacaaagttaaacaggaaaaaaaaaaacaaaaagcgcacacctccttgcacacaccaaaacaaacatcctatctcagatgaactaataacacaacctttgggagtcccgtttggagtaccatagagggttcacatttgagactccaaccatgattgttggaatatttcatattcatggagaagccaatgataaacatttggggaggcattttcgccattaaattagatttaataagcttttgtagtggaggtgatcacaaaatatacagttagatttaaggtgtgtgatccaattaattatcctattttttacaccgtgacgtgacaatgagctggatgacacgtgtcctatattatcctacatgggtagaaggaagtattcctaacagcccataaatggttgatcaaaatgtgtgttacaacaagatgtccaaacagggtaatcaagagacatccgaccaaagtacaaactcatatgcaccgagcaagatatgtgagttggcaattttagagataattctcgtctcttccaagacacgaagataatacctacattcgtggcattaagtcagagaataaaggcaatatgccttaatttcccattccttgtattgtaattatagaattaatatagtttcctattttactcattatagattaagagaaactattcttcatgtaagaagctcctataagtagtggcataatctcactattaacggagaggaaaattaatccaaaaaaaatactcaagagagaaaagtgatccaagggagagaataactcagacattgattgtaagagctttagagaggaagaacacttcatttttttctcaagtcaatacaacaataaggggaataggctattaccattcttacagggtcgaacctctataaaatctggtgttctttttaccttattatttttaatttctattatttattttacctaatcgctttatcttggctcactattgttggctagaagcgaggccaatattttggtgctttcattgagagcaaaaatataagcttttatcttaatcttgacaggttaacaagatcgttgtacaaactcgaaggggaggccttactgaccaaggcaatccaatggtgatagatttgaacgtgcaaactcctggaaacacgagaggaccaccagggataaacctcgaacaaattaatacacaaccacccacggtaggccatggagcaacttcctctcttgctgggttcacaccaggcatataggagactgggaacaccagtacggtagctgatcaaaccactcctagcaccgaggtcccatccaccaataacactaaaaggctagctggagatgacactgaacatcaaaatctacgagaagcactagggcttatgccacgccataacaacactttacatcatgatcaggtagatcttttagcagttattaaccttgccttcaatgagcgaagacatcaattcatataatggagggatcgagagatggaagtcatgagggctcagcaagtagccattgacaatcgttccaggcaagccaccgtgctgatcagaagggcctaccaggttaccagtcagcaaccagcaactaaatctagttatccccctgagcgagtcgaaggagggtatgtagctagacatattgcataaactcatagtgctcaaccatccaatccaaggctacaagtctaaactgtgagctaaacgatagacggccagatcttgccgaaccgccccttgagaggatgtacacattcaaacaactatactaatacaaaggtctcaggccaacctcttagccaaacaggttaaacactaagaccacctagagcctaggtgttcgattggctaggcaccgtgcatgatctcaaaaatgatctaaattgtagaaggggactagacagacaaaatattccaccaaccgtctagccagatacccacactcaagatccgattcaaagaggtcccaatgtgacacaggtttgtcaccacgctggccaagttcatatgcttatgcaagtacaaatagattaacttaaaaacatggtacaaggcatgaccgacccaaaactcacagatctcaaactcggccgggtacgaggatcacgcttctcacctgatattaaggctcttgacttactctcgaagtttaaaatgccaatatgaaaatgtatacaggaaaagaagatcctttatcccatttgaagtactttgaaatgttgatggacctggaagggtaaagaggcaatgtacggtgcataatatttttggccacactcgtagaggccacccaacaatggtatttcaaattgcatccaagaaagtttaatttgtggatttcattctcctttgaattccacgcaccatttcttcctcccgttagcttccctcacacctagaagacctggtagaagtgaagcaaatgccaggagaacctctaagggcctacattagcaggtttatgaataaagtaacaaaagttaaaggcctgattgaggacagcagattagaagcaatactgggggtattgagcctttgggagaattatggtaagatatcaaaagattaactatgggattgatggctgagtttctggattgaggagatggactcattaaacttgaggaggcagtatagcgtgtggatatcgtaggagaaaa

SEQ ID NO: 222628 - DNA, 1648 bp, Cannabis indica
tccaaaagggttaacttttcttagacaaaaaaaaaaaggttaacttttaacacagaggatagatactattttgtgaggtaattaattaataggattcaattaaaaaaaatggctagagctaaaagacagcagcgacaaaatgataaaaccccagagatgatgacaaatatatggtaaagagtaaagaaatatatatattggccaatgaaattattaagtgtgcctcaatctgtcttattagaggacaagtacccattattctgccactcacggactcttattctatgtaatatgtttcgattctgtgactatgctttggctttgtactaattcgtttaggataatttgcctttaattatgctttaagtgattgatcatattagtttatttcggttgaaagctacaggtcacttggcaaagtcggcgttaaaaccttttaagggaatatatactattaatttagtgataagtctactgttcagagagacaccccatcccaaaaaataaaataaaaatgtttgttgcataaccaatacttacagctgttttattttttgtgcctgctttacactcttcagtcttatttttataatttaattaaatcttcacatggtctcaactcataatctatgggttgatcagtggctaagctaatttaagctttgctccataaccttattgaataagtagctaaagaaaatatatgttacggcaaccaatttaggatgatgagtatgtcattattatgactattaattgctcatatcatgagttgattaaaatatatgttttatatattgttgtgcactaattgggaattatggtgaagctaagatatgcgtaacctcctaactagtctatgctatgtgttgggttatttttatgcttatgaaatgttaggtacaaaatgcaatttgtatgcaaagacatgaaagtgatggtttgggtcaactttgagtagagaagaagggatattcaatgcagaagcatatactaactatatatatattactatatgaaacttagctttgaagaatcagaaagtatttatatggaaagatttcaaattgatcaagtcccaacgaggttggggatgaccctaaatgaaacaaaatatgataaattattggggtaataatcataagaaatatttttatatattgatgggataactttcatgaatatggtgtttgtttatcccaagtaggtggcggtcaaaatgagcagagatttttaaattatatttgtatgtatatagttagtagtcttagtagacagaaagtcgtattcatatctttcaaactccatgttatacgatacaaaatgtacaacaaaggagaaattaatactttcttcagaagagaattagtgttaccgtattacctaattaactttcattcattatttcactagatttggaaaaattatttaatgtgaacttgatttgatgtttcaaatgaaatggctgtcacggttatgttgtccatatctactaaaattatcaacaaaactctgtaacattgttacatgtttttctactaaaattctctaaaaagacaaatccatgatcagtttcgctgcatagtagttaacacttattttgttttctagtcattaaaattaaaacgtgaaagataaaattaagacc

SEQ ID NO: 222629 - DNA, 2253 bp, Cannabis indica
cgttcggccgcctcctcgcctctcccaaaatccctttcaaaagtaaccgcaacttctatgcaattatttaaaatttcctccaaacttctggttgtagccattccattttcatccaccacattgcacttcttcctcccactccgagttttgactccagaagatcgacgagtagaatacgcagttctaccctttggtttcctaccacggccattggatctcgagcatgaggcttcatctcccactccaatacaaaatgcctcttgggggattacttcagttttttccgttaatttctgctgcggatggttctcaggggatgtgaaagtagatacagcaggtatgggttgtaatagagtatgggctttcctttttctattattacccaataaatggttgatcatctcagataagtttggggggatagagagaagagactgctgggctttgtataaatttagaaagtcaggtttatacaactgcataaataacttttgggcttctgtatcatggttgggccaagatattggacacgcctctggaaaggagtgtgggttttgggataggcaaacccattcgtggggaacctctatgcattgggctaaagtagggcccaagtcaggaattaaatcatctctgtgatggttattagcaaagtcagggttaggcaaattcaaaagattacccgggacatttatcacttcatggtccccctccaaagccatgtgtaaatttcctcgtaccaatcatcgtactggatgcaggcgccacactcccactactcgtaccagcaatgtacgactgtcccttctcctccaaggttctcgactgacgtaagggttccgccgtatcaccacccttctgcttccctttctccgacggacctgcacctcccggcaaggacgtcgcaacttttctattccaaacaccccaacgtctcctcccttgcaattcccactccggtatctcttctagctcccatttgaggacccccttcccttcgaattaaagtagttactgtttcccgtatcacttttaatccataatccatagagaggaacagccttccctgacctcggcgtgaccatcgtcatgggagcatgacaaatcttatcccagtgagccaacttaccacagttaaaacacagcatagggagtttttcatacttgaactgaacccaagactcaggttttccatcagacttcaagaagaatcccgccggaatcggatgggcaacccaaacatcaacccacatcctcaagtatcctctacgcaccacttccgctttactacttccatctgtttcagctaactcaccaatcttctttgccactatctcagcattatcattagtgagacatcgggtaggcaacccgtggatttgaacccagaatcgagccaccgcgaactcccctgttctcacttcaccctccaccggccaaggtttaatgttcagcaataccccattgaccagccacggtcttttctgaagaacgaaagcacagtcttcctcattgtggaagaagaaacctagaactccctcttcacacttcttcatcttccatggtcctagtctgcgccaaacgcccgttagaatctttttgaccaccgacgccggcatgtctttgcatccaactatcttaccgacgcaagctttgtttaccaccacctcttcaagagtgatatcttcgaacagctcgaggagttccatttcaatggccccatctcttactagtgtggtgttcatctcctcatccaccgattcgacttgtatatccttaactcccattgaagccattgtagtggtaggaaataggaagaatacacccaaactaatagctagaaaacaaactctcaggaaaagactacactgctctcccaacccaaaaacagggcaaaccaggaacaaaccgacgcttacaatccaagctagactctacacggagccatttcgtacgatgcaacaagttggatttggatagttggatgtaggatttaatttgaaatattgatttcgaaaataggtaaaaaaaaaaataaaaaaaaaaaaataaaataaaataaaaaaatatttttcgggtttaaaaaaaataatatttaaaattaaacctacaattttaaaaaattaggtttcaagtaacctaaatatcatttcaaaaaaaaaatgccaacttgccttttaaatttcatgatattttaaaaaattaaatatccaataaaataaaaaaaaaaaaaaaaaaaaaacgaaaaaaagt

SEQ ID NO: 222630 - DNA, 1905 bp, Cannabis indica
atgttatatcgtcctccgacaggagccatgagaggtattgcttggaactgtagagggttagggcagacctctacagttcgggagctgaagtccctaatccggtctcgctcaccggactttctttcctgactgaacttaaagtcaatgccactcctctggtacgtacactcaattcacttcacttttattttcatattctaattccagctgttggtaatgcggggggaatcgattttggcttggaagttagggtttgagtttgaatgtattgcttgctcccaaaaccatattactggtcttgtttattcggaccctccgaccaacccttggcttctctcttgtgtttatggtcctccgtattgtaatgccaagagatcgttttgggctgagttcatgaaatttggagataggtttgggggtccgtggctcattctgggtgatactaactttgttctgagtgagtcggaaagagttggctcaaagggtagagacccctttattccgttcatcgcaaatttggttaactcgagggggctcattaacatgcctattaatggagacaagcttacgtgggacaaccatagagcaggggagaatcatgtcaagtctgctcttgataaaggtttatttaatggagcatggctcagcttattccccaaggctgttttgtgctcctcacagacatgcaattctgaccataggccgctatgtctctttactgatggcatgggggaaaaattcaaaagaagcttcaagtttgaagatagctggacccgggatgagaggagcaagctggtggttgatagcgcctggaaatcggtgtgttatccttgggctcctgctagagttttcaagaagattggtgcaactagggttgctctcttgcattggagtagatcccagtttggtaaagttgataacttaattaaagagctggaaggtaaactcagcgccatccagggactgacagtgggatcaagagattgggatgctgagtgcgaaattcggcgtgctctcaatgaggcctacgctcggaaagagttgcactggaagcagcgggccaggatttcctggctaaaggaaggggatagatgttcgaaattcttcttcctttcggctgcaatcagagggagacggaatgctatagaatgtattttaaataaagatgacgtttggatttccaatcgggagttaattggcaaggaattcttagagttctttcaaggaattttttcgggatcgaacaatgagcaggtgcgaaatttcgatgatctcattagggatagattgtctgctgacgatcaagctgagctagttagaggcccttcttatgatgaaattcgtcgaactatttttgctatgagtaaccataaggctccgggaccggatgggatgtctgtcatgttcttcaagcactactgggacactgtgggtgtggatttttgtgaagcagtctcggatttctttaggactggtattatgcacaaaggggtcaatgcaaccaatattgttcttattcctaagaccaaaaacccgaagagaaccaatgattttagacctatctccctttgtaatgttttatacaaggtcatttctaaaatcattgccaatagaattaaacctctgttgccatccattatttgccctacccaggcggcttttgtcccgggaaggaatattcaggataataatgtaatcattcaagaaatcatccattcgttcaacaggaaaaaaggaaaagaaggttgcttcgcgttgaagattgatcttatgaaagcctatgataagctgagttggaatttcatagaccaagtgcttgacgggtttggggctcctcaaagattccgtgggtgggtttcccagtgtagttactactacttctcttagcttatgccttaatggggg

SEQ ID NO: 222631 - DNA, 2188 bp, Cannabis indica
ttttttttgaaaaaatagagatttaattggttaatggcatctacaaaaagtagtagtagtaattagctaattagctttttacaaaagcagttcagactgtaatttaatctaatgggtcgaaatgtatgttatagtgtataaatacgagtatacataatacgtacgtatacgtaggtagtggattttgatgagacaaagggatatccttaaccttcttgtcacgcatatcctgtccaccctttctctccacgtggccacgtgacgtgtcttttcctcaatgggtcccaccattccagacattgacaatattgagacttgaattacatcaaagctgtctcccatttcttcctcttttttttttgaataaattttgtcactttcttcttttcttattattttattaaatattaagtaaattttaaactatgtaatgatatgtaatggttcttcttcaataatgttttttagtttacttattgagaagatcaagtcaagttgaagaaaatgttaacgttttctacatatatttaatttgacttaattttcattaagaatataaatcatcaaaacaagataagtagttggctttgttgagaaattgactaactctaccacacaagtgaattttttttttctactctttggttttgtaaactcatttaaaacgtgagtaaatttcaaattaatttaaacttaaataataatatttcatgtgtacgaaattgaaaactgttttaggataatatcgagggaaaaagttgatggtttcattccatagtgacttttttagcaaaaaaaaaaaaaaaaaaaaaaacgaaaaagaaaagaaaaatttaagttgttgatttgggcttaactccaagttcccaaagcccatttaacccactatgggttgggcttgttgtgtgatcactgatcactgtgatattttgttgacaaatttctctctctctctctctctttttttgggcagctaccaacatattcttattaaagcttcgaatgtacacataaaaaaaaactacatcattatgatttgtctgccaggtatatacacatattaatgacattgccttaaacagctaatgttaaagctttaattctaaatattatacacaatactggactataattgattattcaaatttagtaatgtgatgaaaacacaagaaagtacataattattaaaatatactaaatcagaagttttataaattgtaataaataatcaggaaaatagatgtaatatgtttttttttctttctttttttatatgtttgattaatatgagattttaaagtttgtgtagttttttttagcctccttacatttttaagaaacttaattttaacaattgatagtggtaattttgaaaattaatgtagtgataattggttttcttcgaattagtttcatattgcctgatgtataaaaccatactaagggattttgagataaaatcggatgcattttactatacaattcttaattttaatatgatatcagaacaattaaaaaacttttgtgcatttgaattttatttcggatctttcgaccaatgtgagcccatttttttgtgttaggatctttaacctgttacaaaaaaatcacacaaatttttggatgtggacacctagaaacttctttatttggtattgtgaaattttttcaaatgtctcgttcgatcctgtaatctcttaaagatcattcattgccaattgatttaacttttaagatggaacatcatggaccttaatcctaaattctaaccacatttgtactacctacagtttcatgttaactatattgacatgataatcacattttggtggaccacaatatttttaaatgcagtaagtgttaaaaatctaataagtttatcattaaatggcatttgacattgggcttctacataataaattcatatcacttaattgtggtagttctgtaaactcgcgtgttacatcgataacacgtttcccacagaaaatcactaatattaaagatataaattttatataaaataaaaattattaaaatggggtgcctttagaaaattttggggtgtaaataaaatttcccctaatattattgaaaaaagggtaaataccattttggaccatctgttttacaaaagttaccaattggaccctgtgttttgttaaatgataaaatggaccctgtattt

SEQ ID NO: 222632 - DNA, 2377 bp, Cannabis indica
tttataatagaagtcccatgtttgttacaaagctcgtttgctcttgatcaaggacgtgcatttgaatctggttatatctggagtatgcatccatgaaagtcatcaactcatgtcctgttgttgcatccactaactagtcaatcctcagtagtggaaagcaatctttgggacatgccttgttcagatctaaaaaatctatacaagttctacagatgccatttggttttggaacaaggtctggatttgacatccacgaggggtagaaggcctctcgtatgaaatcattagttaacaatttgtcaacttcttttttgagtgcgcctggtctctcaaaatctaatagttgtcgcttttgacgttttgctggatagttggggttaatatttagatgatggcaaataacttttggatttttcctaccatgtctgagtggcgctaagcgaactgatcctggtttgcccttagaaaaataattaattgctattttcgttcttcgtccaaatttttcccaatgtatacacactttatgggattgtttggatctaaaataacttctccaactgttcgattggtttgagttggttactttcattttggattctcggatccaattcttctacttctctctcattttcttcagttagaattaccattaattgatgattgactctcctattctgaagttccactcggtaacattctcgagtcaataattaattgcctctaaccactcccactcctaactgtgtagggaatttcaaggataagtgtttaatcgaactcaatgcccccagcccaatcaaagatgtcgacccattagtacattatacacggaagggatgtcaacaaccaaaaattattgcattgtgtcgctgataaaggcagatctcccatagttaacggaagctcaatgatgcccaagctcacaacactatctcctgtaaaatcgcataggcttaccatgcatggtctcaactttgtatcctctaatcccatcttttttaatgtgtctttgtagaggatattgactgaactcccattatgtgtagtactcttttcacccttttattggcgagctggaccgttatcacgaagggatcaatgtggtatcgcacatgttttgtatcttcttcaaagaagatagttggcggttcatttgacttcgctctttcaatggttctagagcaattgctgattgtccatttttcacttcatttatatacctctttttggcatttttgctatttcttacgaggtgcggacctccagaaattaccaacatatcctcactctcaacaggaggaggttgcgatctcagtttattcggttgttaggctggttaggctcatttccttgaattctcacatactgcctaaagtatcctcgctagatcaaattttctatctcatctttcaattgtcgacattcctcggtggtatgccctatatccttgtggaatcgacattatttagttgaatctcacttgtgcctcgcgtgcctcattggctcgagtttgcaaattgcaaccctgttttcattggcgaggaagatagttttgtgagtttcattcaactcagtatacactataaatatacatacttctcatgttttttttgttacttttttgttttttaatgattcttttgactcatcctttctttttgtatttgatccaccaagattgtctaattttgttgtgattgtgctcattgtttcttacttgagctgggtttacatcctgagccagtttttaacaacttcatttcagtcctggcttcctatttacgcacaaagacttgtgctctttcattaaactcgttaatattcctcacaaggcgaccctagagatcatcccataactcacctcctattatagataagtcagttgtgattcctgtttgaagtgttgttagtttaatactatcattcaagcaactgactatctctttcacaaggtgacccgtattgaagcactcaagtatgccttaagagatttccctggttgttgctttatgttggtcaaagatggcacttcgggtcgacagtctctttcagcctgaaattacttttgaaagtccctcgataactgttcccaggatattatggaatgatgggttaatttatcaaaccaactgcttgcggctcctgttaagaaagttgggaataaaacgcaacacaatttatttgaaacgttgcttgctcgcataataatattaaaattatttaaaatgagcgactggatatgtggtctcatcgtattgcgagacatgtgggggtcttaaatccctgaggaaattctgaatttaagatatctagatggaatggctcggtttctcgttaaatcacaacttgagaattttccatgttctccatcttg

SEQ ID NO: 222633 - DNA, 1525 bp, Cannabis indica
atatagaatattacataattgattttgtccagattcaatgaatataaaatattcatttatcagaaaatcaattatttatttatttccttaaatagaaatttatttctttaaatagaaatatatttccttaaataaaaaatattcttacataagaatgatagtttgaagaccgacatggaacatccggacaggttaaatgtgaccatctgagaagcttccagtgtgatagtgaagccaagtactcgggtgaatgcggctgaagcacaatttttagggatatttcccataaatatctcccatttaaattcctactttgatggagttaacacacatcgtaaagagataataggaaactagtttagttttccctttttattctaatttgttttaggaaaccaatcgaatgtatttctcccctgtaaatggtggagccatttcaccattgagggatccaattttggattttctaaagagtcgttacgctgtctaaataattgtaaactttttctttatgattattaagaaactcacttggtaagctcattgtgatattgataattctttaaagtaatacaagcaaaaggagagtaggttattaccataatcatggggccgaacctctataaattatggtgttcttattgcttaaatatattaattattatctattatcttattattttaattgactcattatcgttagataaaagtgaggtcaacaagatccattagcgaagtcaagccttccagatgttggacagacggctcgtccagaaaagatgcacctccgacatagcgtatctccagatagcatcgaatagatctttcaaatcagtgattaatgggcatctggatatccaactccgtaccataataatttattgtcaaatcccacaatatcaaagatttatttacaggatcatgttcaggatttgtatctttcaaataagaaaataaagtaattgtcaatcaagcatttatgtgtctttattatccacaaaagtatgccacaatttgacaactatcaacatgatgtggcatccacatccacatcatcagaagaataatgcctcatgggttggacttcaccaaatgagctcgaagtcaatgtatttttttgtatttatcccatcagtgggcaatgtatacatgctagaatcctagcactataaatataagaaaattcattcatgcaaagggttagaagttcattccttaagtgctcaatcaaatcttaggcttcaaacacttgtgtaaatcaaaaagattttttcagtcgtatcataataatattgactcgtggattagaagtcatgaatccttgaatcacgtaaaaactttgctcttattctttgtctataataaatttccttaagctttattatattttatcaggttttaaaaatttcggtaaacaattacattgaaaatgtaaccataatgattatattttttataacttgctacaacaagttgccaataagtttttttattaaaaaaattatttttagaattgaattaatta

SEQ ID NO: 222634 - DNA, 4003 bp, Cannabis indica
atacttgcgtgttaaaataccataacagtcaccttagtggtgcgggataatcaatccacattgtctgctcaaggtaattttgcttatacgcaaattgccccagacatagaggtggaagagatgggcaaggaccttgaattaccatatcatgaagttgaagatgaggtcgatggtgagggtagcgaaatagattcagtagacaatgctcaattagacgtacccattttcctgaaggacgtagtctcgcgagttaaaaagtctgatatgactacatttgaaaggctggatctaattcatactcctacctcaaagcccatgtcaatgcagcaacctcatcttccatttactaaccccgcgatcatctcaactcaaaatgttgtggtttcaattcccattcttcgttgtagggtgatgcttcctttccactcttttgtaaaggccatcctaacacactacgacatttcttccttccaacttacccccaacaattatcgcataatccttggattctacacaattgaaaattttagctatttttatgatttaaaaagcgttagtcatgataatggcttctactattttagtaaataagccaattttgagataaatggggtagaaggcatggtctccaatgtgagagattagaagtcaaaatgattttatgtgtttaagatgtctggggtcaggatacttcaaccgctgacctcgtatgtcgcatacttttacgcttagcttttattcttgttattttataaaaactaatatctatccatgttcgcaggtagaccgactcaatttgtattagacaaaagtcgcgtggaaatcgctgaagtactgagcagccttccaattcaagatcgcaattggtgtttgttgtgtacctctgcaaagctagagaacataagttgattccagccgacgctaaacttcagcgagaaccaatatacaaagagccttttgagaaacaagaggagaagatagacaagcgtctttccaaatagacttcgagacaaatattaggtaatatgacttgacaattactgataatgttaccttaatttctcaaattattacttctgcgtatctttttctcatatatgactttcctgaagcaggctccctctttcaatcgcaagccgaaggccaagattgtgactccctctactgcgacgccttaaaagaggaagagtgaagtcaccactactcctggggttgatttaccaaagaagcaccagaaagtggcccaggacaaagggaagaaagtcgtgatggatcctactaccaaagctcgtgacttcatggctttacaggagaagttcttgagcgacgactttgttgccaaagttgaaggggttcctatgaggacctctagtctcgttcagctgaacctgcaccgcagttcatgatggtgtactcacgggcctttggtgcaagtatcaaagatcttgaccttttgaagaaacaaaactcaactcttcaagaaggtctgaagaaagaaaagttggatattgttgcaaaagagaaggaagtcgaagatcttggcaaggccaaagatcaggcgaaggagagggccaaatagtcagaggataagaataagaagttagaggaagagaatactacccttactctcaatcttgataccgagaaggaaaacgcgaagaaagcttatgattaggctgtctctaactacatttataccacactgaccaagctgccagactttgacttcgcagttttcgaactagaggcggttgagatggccaatgctttttgcaccatgtcgcctactgagactcaagtgttaggtgggaacctttttccagaagttgtcaaagattcaaatgttgttgaacgcggatggcactagcaaagtcatagaagatctcaatgcccatgttgcttaatcctttcttatttttcgaacttcttttgagcggtacatgggtacttgcgttttttacttggtatttttaagacaattatatttatctttttaccttattttttatgaacaatgtatctttcggagatacccttttgcttctaagtacctttgacattttttgtaaaaaaaatttatgcgcatacaattgcaactcgattcctttaaacgcttaaacgcatattgtgttggtcgctgttttattcatgtgactatccttcacagcttggtgtgatgaacattttgatgttcatattcaaaagtaaaaatttcgatcaattttctaagtatttaaatgcaagaaatatgaaaatttttaaaatttcataagttttgaaattgataattcattggataatcaatagtacaatagtacaatgtacggttatatcccctatacttaggttatttagagtataaataaattaactaagtatatacatgcgggtactattaataataatacttcaagtgttctccattccaagctctatcgaagattgtgtcactgagattagataaccggtaagttatgtttttgatttttttttcagcaattaggtaaggaccttcccaattattgtcgaataccccatgcgtagagttacgtgcattgggcatgaatttttgcaataccaagtctcctactcgcaaacttctttctttaaccttggagttgaaacaacgggttgtgcgctattgatagactgcgtttttaatatgagtctgattgtccttttcttccaataaatcaagttaaagtaactgattttcttcattggtctcgatgttaaaaacatctcttctcaatgatctggctcctactttgactgggaccatggcttcgcacccataagaaagtgaaaaaggggtttcgccagtcgtggagcaaggagttgtgttgtatgaccacaaaaattacagtaattcttctagccaaatgccttttcgttccttgagcttaccttttatggtatgcttgatgattttgttggccgctttggtttgaccattgctttgaggatatactactgaaaaagctttttgaatcccaagatcatcacatagttttcgcatttctttacagtcaaattgttttccattatcagaaattaacttgtaaggaatgccaaacttacaaatgatcgctcgatatacaaactcgagtaattttaccgctactattattgctaaagcttcagcctcaacccatttggtaaagtaatccactacgaccactgcgtatttaaatcctccttttcccttaggtaatttgcctattaaatctatgccccagatcgcaaatggccacggactggtgataaaatttaaatggctgggtggtctattcacataggtagcaattcactggcacttgtcgcattttttggcgaaattgatcgcatctgctcataaagttggccaataatagccttgtcgcataatctttaaggtcaaggaatttccacctgtatagttatcgcatatgcctccatgtacctcccagaggatgtagtcgcattcattgccatcaatacacttgaggagaggttgactgaaactcgtgcgaaatagcttattgtcatatatcacatatcgagcagcttgataatgtaatctattggcttcgagcttatcacttgggagtttgctagtcttcaagtaggcaatgatgggagtcatccaagtgggttgttcaacaacatcaatttgcataatctctccgcgatcaattattggatgggtgaacacatctacaggaattacatcgagtaattttatttccatagttgaggccaatcgggccaaagcatctgcatgggaattgtaagcacgaaatattatactgacaataacttttttaaattcaaacaaaaactcacaggtataagagagatattcggccaaacgtcctccttgagccaaatacttgccattgacctgacacaccacgatttgagaatcactaaaagcttcgagatactcgactttcatttccagtatgagtttttgttgggttttatgccctaaataaaactctttacaatctgattagttatc

SEQ ID NO: 222635 - DNA, 2027 bp, Cannabis indica
caatttatttttatttaaaaaattatgtaatttaaaaaaaaactatattaatcatatttttttaaaaaagataataatcatatcttagtgagctaatttttcaatatatatatatatatacatatgtacataaaatatatataaccgagtaaattaaatacttaccacaaaaaaaaattagtaaatttaaatatacatatctatactagataacgtagccgccattcgtgcggtataaaatcaatgtggtatataacttatattaatttattaattatattataattttaaaaaactaattttttacattttaatttacgccttgttaattcttcttcttattattttaatgaaaaaaagttttaaaaacatttaaataattagtataactgcaaatcaccataattcattttatttttatttccttaattcctttgaataagtgatataaatgattaaaaatataccatctaccataaaaattaaacccaaaaagtacaataattatggtaaaaaataaataccgtcttcttatactttttaagttataaatacattacacatatatgcacatatataatacacctttgtttaagtattagaagtaataatatataacaaagtttaaattcctacattgcagacttgtaattaaaaataaggttataattaataatgtttaatagactacacttgcacacagatagtacaatacatttgtttaggcgttagaataataatatatatggtttaaagttaaacttgtaaacttataatcggttataaatttgattactgtttggattgtgctcttgaactaaaggtaacaacatatagtgccaaatatttcacaattaattatattttttattaaccaattaatagattatatatagactaccagtacttgaaaacttatttataattttaaagttattttgtttagtttatataatataatatatatagttttggttaaattaattaattagttattttttttatcgtataatattataaaaattaaataatttcaaattagtttttccgacgttgtagtttaaattaattagctagttagatatattttttaaacttcaaataacaaaaaatttcatacttagttagagatattttctaaaatttaaataaatactatatatatttagacttatagttagatatatttatatatatatatataaatggataaaaatagatgtttaaaattcattatgatacatgtcttcctgaattatctttctttaccattatcagttccaaatccaatctcacccaaacaaactttttcactttttttcatccaaagttgtttttggagtattttcataactatttattcatagataatagacaaatcattttctaaattttcttttatcaaatataacttcaaattcaatgagaaaaaaataataaacaaaatgaaagaactcatatggtatatatacatatatatatttacatattgtttgtaactaaatgtttgaacacttcagattaaacaactcaagtgcgcgcaagctaccgtttcgttgagcttctgcgcaagtcccgcaacctataggtctgagagagattgagggagcgagatagagaatgcaacgtgtgatattttaaaccaagtttaaataaaaataaataaatatctaaagagttatacttaattgatctgttaaatagaaaattctctaattttattcgtattatagattcatctatttaaaaaaaaatacctacaattaatttactgaaatatataatattaggagagaaaaaaaaaaaagtgaagagagaagaataataaaaagtgaaatatacttacacatattaattaattaataaattttctcctttaaaactttgatagttgatttttttctttatttgtgtttcagttataattatgaattattagtaatgtgccaaataaaaattatgtattttaacaaatgtgttctttctaaaattattattttccattcacaccatggatataagtctat

SEQ ID NO: 222636 - DNA, 3354 bp, Cannabis indica
aagtaaattaagtattttacattcacttcaatttatccaaaaattattgttatttttcatgtatgggtgattggatacatcaattttacccaattaattatatatacatatatatacatattttagttgatcaaatatttataaatatctaattttttttccatacatttaattttttttccaatttacttattatttttataatttttttatttcatagttcctttcaatatgcatcttaattaatttatgtataaatttaaattgagtgtaaaaaattgtagcactaagaaagagaagagacaaaaaattatcacttagaataatatattaaatttaatttaacttattagattattaaaaaaaaattatctacacattctattaagattataaataatattagtaatggaaaatattatcccacttttgccaacatgacatggcatgtcgtaggtaagaccgagaccacagtaatatagcatgtcaatagagggacaggcaaaaccacaccctggctggccaaggaagtctatgtgtcggtcagacccaaaacaaaaggtaggccaccgagcatagataaagagcatacaaatggaagcccaattgaatggtggagttcaagccatcttctggatgggtcacaactcggtttcagttacaagacaactccaacaacccacgaaagtagagattcaaccccaagttatctacctatcttttagggacattaatagttatttttgtaactaaaacatatgataaaagagtggttttctctatttttaggggatatttacttacttaaagattgatcatttgtaagccctaaaactatagggattaggcaaagtgaaaaaggaacctgaattttgatctctgaaatcctagagcactctaaatctctctcactcatgtgattctccagtcattagaaacttagtctattctctcatctcacttgttgagattctgtaacatttagttctcaccattgtaacattcaaagagagccataactagaaattacaaggtaaaatcctgtaatatgtgtggtattatctctagaattaatacaactaaaaggggagtgggtcattacccgctaaataagggggccaaacctctataaactgttgtgtcaactttattattactttcacaatttacaagttgtgattgtcagtcataaataaagctctgttgtgagttgaccaaatttgaggtcaatatttatgtgctttcattgagagcattatttgtcatcctgatcgatcatcatggttgtaactaggagaacaacacccgccagttccttgggtcttcctcaagatcctataacggttgatcccaatgtttgagttcctcaaaccacaagggcctcactgatttgactcataccgtcaatctagaaaaccttgaaatctagccaataccactaatcccatcgatcctactatcccagtgaatcctaatgatcagccctgccacccagaatagatccaccaacaacacttcaaacaaaaggtcctatcaacacaaaacaacctctacagagtgcgacttggattattccctagtattatacaggggaaacaaggcaaggaattggcgaaccagctattggcgagccccatgtgaacttgggagaggatatcaagctggtcaggcttagagaagttgtaggccaggtcacccaaatagaagaaccacgcgttattggttgcgatgctttcacccaacaaagaagcgaatttctacggtggatagatgaccaggaggccatcctctaggcccatcaggtggagctaaaccaccgtaacaaggaggttggtgacttgataaggcagttcaatgagagaactactaaaggaggaaaggatctaataagagatcctttgaaaggaaggctcatcaacagttcaggtagagcctacgagcaggttgagaatgggaaaactatccaaccaggtccctcaagcatgaggacagaccttcccttgcctaaagatgattatatcttactaaacaaaccatacggcaggagtagcctatacctggcacaaggaggtgatgagggacagccaggcattcttggagcaaaggcatcaccaatcggtcagcctctggcccgtcagcatattgatgttcctccacagaatagtcaggaataggttattctaaggcctatctttgacagactaggtcctgtgatgagcaaaaacccacaggacaacataaactcaaggaccaaaaactgaagtaactttgatctgccattgaacaatgattttagatagatagatttgccaaacccaacgaattagtacgattaacctcctgttaactcccagaccattctaggtggccaagggtgaacaaccagccaaaggttacccagcctagggttggccgaccatagccaatttcccatcctaggtttagccaaccaaggccagctacctagccaagggttaactggccaagaacgattactcagccaaggtttgaccagccaagggctggccaaccacgggctccagctcggccaagaaaggccattcagacaaacatccaccacattagatccctctgtgcaagcatcattagataaaattagagacttgataatgggcctagccagcccaaaatcgcaagacatagagctagaccggtcaatggggtctccattctctccatacattaatgcattacccctacctaagtttaagatgcggtatggaagatatatactgggagaaaagatccccaagcacacataaagtactttgaaatgcaaacaaaatgctaaaaagttactaaggatgtatgatgttgaatcttcctggaaactttatctaaaacagcccaacaatggtatttttgagctagtaccggggaggttcaattcttggacgaaatctcttaagaattctatacacaattctcatcctcgaggtagatactaccatcacaactagaagaccttgtcgaggtaaagcaaagacaagatgaacctttgaaagattacattcaaaggtttatggccaaggccattaaggtcaaaggcctaacatagaaaggtcgttatacgaccatactaggaggcatccttccattgagagacttctagaaagatattaagaggatctcaaccaacaatatcaaagagttcctatagggagctggtggcttcatatagttagaggacgttgtctagcaagcccataaaggagggcaggtcagtagcaggcagactcagggtgagatgcaaccccaagacctgcccaacacacaagctagtaccacaatgccgactaggccttcagtattaagaataatggaggcaaacgt

SEQ ID NO: 222637 - DNA, 1910 bp, Cannabis indica
tatttttatgttgtattcttgttattttattgttaattttttgttatatattattttgatattattttcttgttatttttatagaacatcgtaaaaatataaaaaatatatatatttaaatataaaagtaaatttttttaccaaaaataatattttatgtaaatttccttataatttatatatatatgcacatattttatgctatatgtgagtgtcgtgatagcattggaagataggagaataattggtaaacattatttttgatcttgtgatttgcaaaagcaatatatctgatcgaccctctattttgttaaattataagttagaccatgtaattactaaaatgatacaaaataatattttaaggtcatttttattaatatttatttttgatataaccaacttgaagctagtttatattatgtatacatgcaaaatatgtaactcgtttagtcataacgtcaagttatttattaagttttattctaacaaaaaatcaacttagatattattttataattttgaataacataggtttaaattatcatttaacaaaataaaaaatctaatcaataatttctacaaaatacataatccaaaatatatagtatctatcaaaaaacaatttaattggaactaaactatttaatgttaggttttagaaaatgaccaaaactaaattgaaaatgatcaatacaactaatcttgtagcttagtaggcggctttactatttttctctcttgactccttattaggtctctctctttcaaaagaaaatcttagaacactctcatctcatcggtttctctactttattttttaaaatattaattttatctcaaatttttacattataccatacattagtttctctatatttttttctatatcatttaaatattatatttttaatatattttattcactttatataaataattcataaaatattacatatatagaaaagttaaaaaaataatattaaaatatgttagctcaatgaatagttatcgctatatttagcttaacattatttattgagctaaaaaaatatgtaaaatagttaattatctcacttattgaaagctcaaatttataatttttttttctataatttaaagactgaactattttaatttatttattgggagtgtgataaagtaatgaaaatatattctttgatctaaacacacaaagttcatcactcatttgatttaaaactacaatttcatcaaaatcccaaacccaaaaaacacactaaattaacacagaaataatgacaggatcaaaaactataacccaacatgctcaaacaatccaattgaatctctttgtggtcttccacgaatatataacataatttagattgaaacccaaaagtgattcattatcataccattagttagagagagttgtcgagatcgaaactcagattatggattcgtctcacaatgggaagtttgagatggaaccttcgactcttcgagatagagactcagattagggatttcactttttgactgattcagattcaatttttttttaaaaaaatatatatatattgaaattggatcgggttagattcgatctgaaaaaaaaaaatttaagcggggtggaacggatctaattcgaaatttgataagtatctaaatgtttcatagatcagttggccatcagagctctaacctaatctgaataaatagattttttttaccattcctagactcttcattttaaaatacatttattcagactaggttagagctctgatggccaactaatcatttcaaaatatatttattcggaatataaaaaaaaaaatacagatttttctttccccattttttttcctacattagttttatagttttacctaaaataaaataaaacaactaattaattttgttac

SEQ ID NO: 222638 - DNA, 2630 bp, Cannabis indica
gtaaaaggccaataggccatatagaatatgaaactagtatgtctatgcaaataaaaatcataaatccagaatactaataaagtggttttaatcgtgtgtagctgcaggtggagtctagtttgaagctgcaacatctaagtttcaaaaaagtaggtcgaccatggcctctacaagctagccgccctcctgtttaggagcttggctgaccacctcctcagtagatgtgtcaaacataacctcgtcaaagtggcctgatgacgactctttgggttgggcgatggtctggtctagttgcatcctgccctcatacaattctcttccttatgctagtgttctttcaaggaaagaagctcagatgtaggagagatcatcattagggttgtacagcttaacctcgtataagttctttgaagacaagccaacatactcgtccgtaatggcttgctggccatcaagcgtaagcttcagtgctttatccctcttcccgagctctacctccaacctagaggtctcagcagcaagtgtgttgttctcttggtttttgatacgaagaatgtgctccaatctagtaatcatgccctacctctgttcaacaagagcctctacattggtgaaggcttccccctttaccagaatctcagtctcttgggctttaagcttctcccagagagcgccctaggatcacttggtcttgccatgagagtggctgaactttaatagggcctgaaatcaaaacaaaactaagttagtgccagaaaaaaggcatggccggccatagaagctccatagaatggctggccgaccagcttctcaaaactccagcattggttggccagctttgcaaagttccatacctggccgaccagcccttgcaagtacaataatttgagcaaaattagatgtgttaccgaggtcaactcttggagaccactagatgggaacctctctagctcgacatcgtcatgttcctcgagctcaacgatgggtaggatcttataatacgtctatgagctgcctctgcaactctttattttatggtagtatctgccccatggcaggatctctcggcgcccttaccaaaaggtcagcgtggaggtggggtccccctcaatggaggatcaataatcattggctggccaggcgatgctttccctagaggaggaagaggtagtgaagaccccgcaacatcactagatcgggtgatttgggtcaccttagccctaggacaactagaagcctcgcttgagggctctctagaaagatctctaagcctagaagccatatctacaaaacgaacgtaacaaagtcagaatacatgctacaaatattcaataaaataaaaaagcagaaaatttggtgcaaatcaattatcaaactaccatcatcctcaaaagtgaagtcatctaaactattagcaatttccttacctgtgcctctagacgtaggcaaggggaaagtgggcctggcagaaccctggccttcaggcctaataggcaaattggtgtccccagcaatgcctccgcaagccaagcattggcggagggatttttctcttctctccaagttcattgcaattctgaagagggggatgtcatcatccatatcaagagtatgtgcacgtccttggcaagcctcctcagccactgaagctccaagtggacctcccaacgggccctagccccaccaacaccagactctcggggatacagaccgtatctctagaagttggatgtacaggctagcctcattatattcctcctaataacagagaggtacatgatacgattggctctatcccgcatctggagggtggtgatggagcatttatatgttgggactctctaaaaaaggagatgacaaacttgctgaatgtcccaagcaatgaattagttcttggcatgtcctcccacctttgacaagggcgtgctattgctatcagctaaccactgctagcaaatctgcctaaagtagaagtatcttgttcggttctattttgggacagacttcaagtcaaaaaagtacctatttcgtaaggggaaggttgaggccagcctaattcgacgtaaaggatgaacatcgttgaaagctactttataccttttggggtgatttaggttgggcaaactaaaaagtatgtagcaatgtctctaaattaggggtgtaaaggaaatacttcccttgttcaatgtggcactctgactacgccatctagttgagggccagccgatgcgctcgttagtccctcaacgactactcacattggacacctcctaccgattcactctccctaatcttgctgagaatcttgatgataataatggatggagaggagatccatcgctcccgctgctccccctgatcaagaacttaaggctcggtagcccccccagaacgtggtctacactaaccactgaaggctgaccaagcctagtcaagggttgtctagcctcattgtattagcctagagggctgttgagaataaaagaacatgtcttgtattgtcccctcttgacaggtacaacctcctcaacctcaaactcactgtccgagctctccacatctttgtcagctataggcaccttcgcttggcaaacatcaggctcgctgcatacaaaatgggcacctaggaa

SEQ ID NO: 222639 - DNA, 2183 bp, Cannabis indica
atcttcctcatcaggagggattgggacttgttgccatttggagtattttggatttttaaagtcacggatcgtttgatatgtgctaagaagattggtggccttcaaattggcttcgttcaaaaggaagtctgtagattgcaatctgaatggaagaccctgtaggtttttatggcgcttggccatttcaggggtggggattggcctctttgtaatcgctgtcaacacaatagacaaaaataagtaaacatcttcgattaactaaaaactcaaaaccaagtttttcagaaaaaggtgaaacttacgtattatacaaaaggtttttgtgttgacaagggagagaccagtcgtccaaaaaaattcattcttaaatcttgttttggtaggcagcctcacgataatcctgtgatcattcgtacgggtaccgaggtagtaaaaaattctcgagcctcgcttccttgcaggagcaacttttacagaataaaaatagacgatttcaaagggagtaggacactcccatcacataattttctataagagttttaggccagccagaattctgtaagagcttggaatcaattaaaaaggggcaattccaagataattactgaattccttataatactctttcaaaggattaattgctccagccctgatgtgctcaaggctccaagtgcctatgccttatgagccactagcactagcgccatcacactcctcgcgaattaccctttctggtgaaaagcagctatattctctcgaagcgacggacctaggacgacatcctcgcctttgcttaatttcacaagcttgaagtatatttcccacataaggagctattgatccgacatttgatttaataagctctgctttgaaggttactgtagggtcttgtggggtctttgatgatttacgaggcttggtggacataatttcgaaatcaaggtcacctgatgaaaaagcaacagtgacttaaggtaaaaaaatgggtctcgctaatggaatagaagataatgattgaggttcaggcgagactacatctcgcaaatagcgacatctacccttagttatcacttgtaaaaatttcctatagcgactggaaactttatctttattggttttaatccaatggtctctaattttggcatcattgaactcaagtttggattgggatatttggattttggatttaaatggaagggctaattccttaggaaattctaattctagaaaatttggagttgaaatttcaaaaccacattaggacatttctacaaaaaataatcccaatttttggaagaaatttgtttaaagcagaaacctatgaatacgataaaactaaatttttctctctgtcaaaccctaggaattccccaaaaactagattgaaattatttaaaccaaacaaaatgaacaatgatgcaattagttataaaaataagaatattaactcaggaaaaagaaatacccagaaagaaaggaatgaatcacttactggtcagaaataaatttttgcagaaggaagaactctataactagagttgagatgaatgacaaaatgtaccctgagaattcctgagattgaagattaaattcgaagatactcgcaaaaaataggttaatcataaagaggccatgcaaggttttgagaaatcggggatgactttttgcagaaaagcttgaaagtttcgaaaggtagcaatggcaaaatagtgtttttttttttcttaagtataatactttaaagatgaacattgttagattaaaagaataaagatctaacggatgggaacatgtaagaattgatgctaatgatgtgccttgaaatcatgaaccgctaaaattcaaaacatgcaattttcaaatcgagattaagacaaaaatacccttgtaatcatttaaaaaaactctttattaaaaaagaactttttaaggggcaattgttatacccaaaattcggctacacttcagaaaatgacacgtgtcaagtagtgaaatatgaaccacctggtataataaatttatatcatttactgtgaaggaaaagtatgacacgttaaataaaagattaataaacaatattcataactcgctgactatgtagtcataagcgagacaaggatagaaaactattaaacctatatcgacgagacacatacctgtctcgaaatacacaggcccaagaa

SEQ ID NO: 222640 - DNA, 1550 bp, Cannabis indica
ctgcatcccctcgctacaatgtgggtccgcctatggttgcatgtgtattatgcacctgaggcgatctggtagggttaactgtgaactctctgggctcagggctggcggtgagggtatgaatcctccactaacacaaaattggaaatagatgtacgctgcaatgcaagagaccatccagcaggaaggtgatcagatcagagagctgagggtgcagcaagcttgacctgctttgaatcctaaccctaaccctctagcacctttattagtgccaccgaatgtgggaaatcatctggagtcgttgtatgaacagttcagaaagcagaagccgtcaatgtttaaaggtggtgctgatctactaaaggcggagcaatggatgaacatgataacatccatctttgatttcatgcgtgttgagggtaatgatcaggttggttgtgctatctttatgttgcgtgaagatgcttgtatttggtgagaaatcgtatttcttggtcatgatctgaataacatgacctgggttgccttccagaccccattctacaaaaagtattataatgaatctatcagtgctgcaaaggcaaaagagtttacacgactaacccagggcagtatgacagtgacagagtatgccaccaaatttgatcggttgacaaagtttgcctctgatgaaatgaccacaaagtttctggaacaagtaccttcctttgattgaattttcatataacaatagttatcagagtactattggcatggcaccgtatgaaatgctttatggaagaaaatatcgttcgcctattcattgggataaagtcggtaaactgagatatcttggacccaatgtagtttaaagaactagtgaggccattgagaaaatttgagctcgtatgcttgcctcagaaagtagacaaaaagctacgttgattcgaagcgtagggatattgagttccaggttgagcactttgccttccttcgaatattaccaatgaaggggatttagagatttggaaagaatgggaaaccaagtcccagatttattggttagtttgagattctagaaagggtaggtcaagtagcctattggctagccttaccccctgctttatctagagttcacaacgtgttccatattttaatgcttcagaagtatgtgtctgatacaacccatattctgagttacaaggacattaaacttcagacagacttatcatacgaggagcaaccagttcaaatcttagatatgaaagagaaagtgttgtggaactagactattctactggttaaagtgttgtggagaaataacaaggttgaagaagcgacttgggaattagagttgcagatgcgggagcagcatcctgaattgttcaggtaattttttgaggacgaaatttttataaagaggggatagttataatatcctgaaaaatgtaataatatttaattagacatgtttttattaaatatgtaattatatgggcattagagtaggattataatcttacttaagctaattaagagttaattagtaatataaataaaacgtaatttattaa

SEQ ID NO: 222641 - DNA, 3818 bp, Cannabis indica
ttaatcgtttgctcttcctcacttctttctctttctttatttattacattgccagttgactttcttctctctgtattacatttattgctctttccctcaattgatttcccatttattgctctagatccttttagatcgcctgaaatcttctcttcaggagatttctttgtcttttttgcattatcccttttgtcttttgtttatatcataaatagatgccgtcgttttgagctcttcaaggagggaggcgatcattacctgcactggctatggttatggtgtagggcttaggaaaggacgttttcagcatctcctctcaaccttcctcagtaagttaactgtctccaggtatatttctctcttcctctatttaaggatctgggtacttcgaagatcactactctgccaacttttatctttcaaactgtctgccactgttctgtgttttttcttttttctatttgatcctatggattctctggctcttaacatgactgaaatcttgaaccttactgatcgtgaagccatcgttcataatattgaggatgatttcaggggggataaccctcctctcaatctttctgccttgtgtttcgtgttcttacccctcgtaccattaaactggaatggtttgaggaggctatgaggaatgcctggattacccgtgcatctctaactttttcctcttatggatcgagtatgttcatggtggaatttgagtgtgaaggagatatgcgaagggttcttgagggccaaccatggcactttgaccattgcttggtcacttgtgccaatcctgctgggcttgacactttgcttcctaaccaactgcgttactcacccttttggatacaagtccatgcaatcccctttggccaaaaatctctcagacttgcccagctgattgggaatgaggttggtgactttttagaggttgataaggtcaccatctttaaagtctcaagcctttttcttcgtgtccgtgtcctggttgacatatctaagcctatccctaggggtattcttattgactttaaaagcatccatagggaaaaatggcttagtttcaagtatgagaacctaccaaatatctgctatcactgtgggatgtttgatcacacccttaccaaatgtattaggtatctcaagaagtgtgatgatcactcggctccccctcctttgccttataaaattcctttgaaagcccctcctaaaaccaactttaaaaggaatcctttcgatctctctaattccttccctcttgatgaacttactcatcctaactctaatgtggaccaatctttggctgctgctgtcaatcaatttctgtccacggaggatcatggggcggggtcttccgtctcagcccctctgggtactgcgagtgacaatagatctttgggaatggatcaagtcacctttccttctgaccaccagtctcattctgttgctatgaaccctgacactcgtgcccacttcggtgagaatcccactggggtcctttgtgatatgtctgctatgactactcatcaggttgctgctatggttcatgaaaataccactcaggaggcaagccttgaaaaccctctgcctcgactctctgagaaggctaagggtaaagctatagctggtgtcaaaaggactgcttttcttcctcaaactgttgtggttggggattccttgcgaaacatcctcaaacgtgctcgtgctggccctaccattgctgaagtctcatctgctatcaatgcttcttttgaacaggcgggtgttgcggagcaaccccgcccagaaaaatgattcttacatgttggaatgctcacgggttggggagtccccgagcattctgtaacctctccctttttgtaaaaaagactttacctaactttctctttgtaatggagtctaaatgtcttgctggttgtggggcaaacttttgtaatagattaccttttgaccatgtctttgaagtccctaggaagggtttaaggggggtcttttgttattttggaagtctgatgttctggtaaatattttgaactactctcctaatcatattgactgcattgtaactattaatgataatatatcaactcatgtttcttgtttttatggttctccttacgcgcatgataaaattcacacttggactcttttacatcgcctttatgataatgctcctaatctgccttggcttatttttggcgactttaatgactacttgtccattagtgatcgatcctctcctcacaatgttcccgcatatgctatgtccaactttagaaactttgttaatagattttctttgacccctctccaacccgtggggaattcttacacctggaaacatggccatctttgtgaaaggttggattggggcattgtcaattctagttggctcacccatttccctagggctgttctttaccatcttggattctatggttcggaccatagagttcttaagattgttttggatgatgccagtttactcacccctaggaataaaagatttttgtttgagaacttttggcttactgaatcttctttttttgatacggtcaaggatagttggagtacagctccatctcactcggcttccacacctctgggatctttcctttccaagcagcaatcttgtattgctgccatcaaagattggaatggttctttcaaaagtttatcctctcgcatacatacccttgagaattctcttaatactctttattccaatttgcctcttaatagggaggacattaagtgggcttccacgcttcaatccactcttgattgccttctgtataagcatgaggttttttggaagcaacgatccaaaatccattggcttaatgcggatgataagaataccaaatatttccacaataaagccactgctaggaaaaagaccaattatattcgaaagctcaagggtggggatgggcagcaggttacttccctttcggatatttgtcataaggtttgtgcctattttgataacctgtttaagtcccaaaactcggatgctactgctactaatctcatccttgcagccattgataaatccttgaccctgcaacaaataagttttttggattctccttttgaagctggggaagttaagcaagccctattccaactctctggagataaagccccgggattagatggccttaacccagctttctaccagaaaaactggtctgtcattggccctgaccttaccatagcagttctggatattcttaatggtaatgctgatttttcctccattaatgacaccctcattgtcttgatccctaaaaaaactaatgcctcaacccttaaagatttcaggcctattagtctttgctcaactgtttataagatcgtctccaaaaccattgccaataggcttaaacttgtcttaggggatctcatttcttctactcaaggtgcgtttctgtctgagcgaattatctttgataatatttacattgctcaggaacttgtccatgccataaatcatcgtaagcaggggaagattgggtgggttggtcttaagctggatatggagaaagcgttcgatcgtgttgaatggagctttcttacggctatccttcaacgctttcagtttcctcctcactttattcaccttatttttcagtgtgtgtcctcaacatctattcgatttaatgtcaatggacaaatcactgatcccattttccctccagaggcattagacagggggatcccttatctccctatctgttcctgctttgttctgaaggtttaactgttgctttacgtgttcaggaaaatttgggattatttaaaggcatttc

SEQ ID NO: 222642 - DNA, 2066 bp, Cannabis indica
ttttttttaaaaaaagaaatatattttagattcattttatagataaaagtgataagtgataaacttattgtttgatttattttatgtatagagcaaatctattgaaaaatacagttattaatgacaacgactttgaatatagttattatgttaccatgatagttagttacgttagttaaatgacaagtttgacgttccaactattttaccgttggtttgttatttctgtttttctgttatggcttctatctcttgtaatcctattcatgtatgtatgtatatatataaatgtaatgccaattagggaagagattaggcattccattttttcacttctccatctttcctctttattgttctcttgttcaattactctgttttttttttacagtaatctttcaatagtgatgactacaaataagatggtgtgatgacaatagttttaaaatcatataataagctttctgttgaatcatcaataattataatctttttttgtatttcaatttaattgatttaaaagaaatacatatattataaaaattaactgtataataatatatatctataattaattaaaataattaaaaaagttaagatctaccatattaattaggggaatcatcccatatattatttttaatttttatggtttggattgctccagtggttgctaagtgggttgctatgtagatttttgtaaaattaacaaaaaaaaaaaaaaaaaaaaactaggtttgaaatgtaaaaataaaaaacctctattaattattaagagtaaaaaaaagtttagaaaaatagttactcatattattaaaaaaatatatataaaatattattaaaatttgaaattgaatacaattttataacttaattattactaaataaaatataatcgcacgcgaaacgcggtttgtttcctaattacctaaaattacattaatatttcaacacgtacgaattttttttttattttacgttttgaacttttttatttataaaaatatctttttagtaaaaataataaactgtattttcggttgttttataaattatttataattacattatagttgtcataatgttatttaattttctagttgtttatgattcttttatagttgatttatatttgtcggtatgttgatttctcattattttttatttattttttttttacttttgctaagcaaagtgtatttttgtaaataaaaattttagactgtaaaattgtaaaagacataaaaataatagtatttatgaacattctcatcagaaatagaaaaaaaaaacctggtgtcttaatttaaatttgaattaggagactaaataaaatttaaaggccttaattcaaatttgactttctaaaaaagattcatttaaattaaattggatgcaaaatgtaatgagagaaattgaagaatacttcattttttaatacattaactaaatttactttcaaataaaatttaattcaaatatactttttttttatgagtactgtacccaaattatcctcacatactcaattaagacacaatttcaaacataatagatttgtgttctttgtagatggatgtgtaggtttgtaggaaaattcgggcaaaaatttgattagagaataataaaaactattgtgaagtgatatgagtaaaattggtagaatgattagtaaaaaaaaaaaaaaaaaaaaaaaaagaataaacataatagattttgaaagaaaggataaaaattaaaggcatatgcattaagttaaaagaggtatgtagtgtaattttcttaaatgtaatcgtacttgtgcttgcgacatttatcaaggaaaatttaagggtgggattatttcaaaaaaaataacaaaaacaaaaaaaaaaaattaataaaaatacagttttacaaaatctagataaagtatgaacaagtgacgtgacactctaaaattactttaatctcaatatctcttttctctttaattttctcttttttcttaattctttattcagttaataaatattaattattaattaattaaacaaaaagatcaataaaaaatttaacaaaaccat

SEQ ID NO: 222643 - DNA, 1904 bp, Cannabis indica
gaaagaaactccagcagactagcaatgctggattagaaaaaataatccgaaaacattaaaagcttcaggctaaaaaataattgatctatacattgcaagagcttgtggatattaatatgcagtagaacatataaataagaataaccactttttcttcattacaataaaatataacaaaacacgtgacagtacctctctagatcatggtcatacaacacagagttatctccactagtacggtacaggggtaaacccaatctggatattagaggtgccaatgggttctcgttgcaaactccatgcagccttaaatgttaacaagtatataaattagttaccaaacttttaaatgataaaaagtatcttagcatcaacaaaatttgggaaagccaagtttaccaagatgcgcctaggtcaacaggaaaaccaaatgagtaatcagtatgaactcgaccaccaaggcgatctcgagactccagtaccaccacctgaccaaaaaacaaaacacatgtacttaatagccttatctttttcttcctttgcctcaaacagttgagaacatatccagtaccaacacaaacaatttccataatgatacaatggatacaggaggaccagcagcaaaaatatacatgtacatcacctaacagattcacattgtacacatgattcacaaagataaaaagccaactctcttcaagttctaagtcacataagtatcaaacattacagcaaacaatcatttaaaaacttctagtcacaacaataagtccagcataaccatagttcaaaactttgaagactctgaaaaaacaggcctttaagcctcagcataactaccaatgtttttttaaaaaaatatattatcatttgtttagatgatagcttaggacatttttcaaaatatttaacaaacaataacataacaaaattgagatattccaaaatcaagtatgaaaaaaggatacacactatttccactagagatgttacaggctctatgtagtttctagttaaaaataatggtttatgtaacttctaattaacaaatagttcaaaacttacgcaagaaataaaaaaaaacacaaatattatgacatcgacttcgacagattccgttataaagcagacccacaattttgaatgtcctatatgcgtcatattttagttgcccatgaccaaattttctatttcatctttgtttaattcaacgccgacgcctcgcctcactttattaataaataataaatattgagcataaccagaacaggcagcagctaaatactggaatatgtcgtctgtcccctaataaaatatcaaaggtacctgaaacgatgcatcgtgaagagcacgcgccgccgcaagcccacccattccggctccgatgacgataaccgacggtgaccttgttttggttccccccatattcgagtcgcaaagatctacattaacacactagtattaaaacacaatccaaaatcggtagattaaattggaaccctcaaaatcaagccaaaaaaaaccaaattccattattacccccacactgacaaaatcattcaaaaagaaaatatctaacctctgcgtaattggtgattattcctatttttcgactccatggtttatacgattattattccgattaaaattataatcagaattaaaattacgattagataataagaaatctatggacaactgaggtgaataatggagaataaagatcaaaagacacgttataaaatgattagaattgggattcaatattattgtctgccccgatttcccaaaccagctcatacgattcacttttctttttcttcttttcttctacccaattttcttttctcacaaaatttactcttcttctcgtcgacttgcaccgaatccagagagatctatga

SEQ ID NO: 222644 - DNA, 943 bp, Cannabis indica
caaaaagttcacttgttactacatattggctagctgcgttattcacttgtgtaatggtaaataccccagctagagtgggttttagctcttatttttgttcgcccttcttcaataaggggaaatatttcttaaggtgacccaccattccacactataaacatttcattctattgcattccctgggatgatgcttcttacaatgaggacactcaggataagaagtatggcatccccctcttccttggtattcacggaacctcttactctgactcaagccacttggtgccaaaaaagttttttatttctgatcactgatggaatcaccaccctctctaccataaccaaaagtaggaagagtggtagtcccacaaacactaggagtccctcgcgaatcctacaaaaactcaactacaccttcagctcgaagagcatttcaaccatctcagcatatgtagttgtgtcatttgtagtaatgaccaagtcgtgtatgatcttggcattcaaacccgccaaatatttctctttcttactaaaatttgtgggtactataactgaagccggcttagcaagtcaatcgaacttagttgtatactctgtcactgacatagtctctccttgaaccatctcaatgaactcttttcttttagtactgcaaactgcctcattatagtacttagcattaaacagctcccaaaattcttctcaggtcattgtaatgatgtccctagtgagggaaaccatttttcaccatacgagggcatcctcctagaattgaaatgtggcataggtcatttggtcattaccggtgacacccataaaatttaagaccctttcaataaccgttagccactgtttggccttcataacattagggcctcccaaaaaagttaggggcacttgtttatgaaaccattcatcaaaggctccatgcagttactagcaa

SEQ ID NO: 222645 - DNA, 1845 bp, Cannabis indica
gcagtcgacttgggagaggtccctagtcctttgaccaagttgactccaagaactgcagaatggatgtttggatctggccaatttatttccaactcaacatcctttagtattaaaatccaagaagacaagaagaatccatgtctgaggcttagaaactaaacaaagataagacaacatcctgaaagtcaacatgtgcacctagagttttcacccagcgcttaagttaacattcccaactatggtttcaacttttaggttcgtcttagtaaaaatggctgaatttttgtacttatacatgaataagatatgtcacaaacatgttaaaagtattagaatcagaatcaaaacacttcccatttggagcacccggtcacccggtgccttgggccacctggtgatgcacccaatgcctaagttgacatgctgtcaacttggggcatttccaaccacaatattgatgatgtatcttgagaattttcttcgtctccatctaaaatcagaaaacaagtgctttcaagaaagaaacagatcaacttggaggccaaaattgggacccaacgcctaggttaacatggtgttaagtcctagcctctaggttgacatgttgtcaaactaggccacttccaacaacagttcagacaaagtcttccgtgaatattctctattttcatcaataattaaggcatgggtgctttcgagaagcaaacagagccatccgggggttagaactgggagtcagtgcccaggttgacttggtgttaggtcccagtgccaagccatttctaaacatttctctctttttggcacatttttggtttttaccaataattgagatatgagtgtttccaggaatcaaatggaagaattgggtgggaaaaattgggacatagtgcccacgttgacttggtggctaggcccagtacctaggtttgatatttttatcaacttggatcagttccaagtattttctccaaaaaacggtgctctggtcatcttccattttcataaataacaaaatatacaaagtgatattggggagcaaaatagatccattgggagccaaaataggggccccgcgcctaggttgacatgcaacctgatttgcatgtctagctctcaagcacaaattctactctgggtattcttcttattaggtcagaatcagggtaagagacctcgttcgcaatcttgaatgccttagaagtatcaaaacgaacaccaggaaatccgccgaggagcatccagtgccaaggttgacatacagcctggtgcgctgggttttgcttatctgatttagttctgtctcgagcatctgactatctttttggattaaacgagagctacgacttgcagcaattcaaattcacacttagatatttcccctcttcaacaaagtaaaatatcgataaattagttgtaaatcggaaagttttgagtgtgcccgattttgtagaaaagcaacatctctaagaactggtgaacgacttcaccaaaactatgaaaatttataagcgaggacaacatattacttaagctcaaaaaaataaatatgggacgttttcttcaatcacgcaacatactaacgtcaacctaggcgtagggtgttgaacatccttcaataaaacggctataactccctcaatattgattggaatgatgcaattcaacttgagctttaaagctctttcaagtcatgtctcaaactcatatcacaattctaaaaatttagagtccaaattttgtccttaagataagtgtgatttttttcagcaaattacttaaaaatgattaaactgacaagatttgagctccaaaaattgatgatcatcatccgaagtcattttc

SEQ ID NO: 222646 - DNA, 3244 bp, Cannabis indica
aaaattacaaaataatataattgtatatattcatcaagtagcacaacttggtcaccgttccaaaaaaaaaaaaaaaacaagaagaacaagtagcacaactatatctaaatatatatattacaaattatgaaatactcatatttgtgtatgttcttaatctagagtcctattagtgtgtcactatatttcatttttatttcatgtctaatttaagaatttcttggctggcttttgaaacactaagtttaattttacacaatctatatatttttatatttttggacgtatttaaaaagtcacggtttaattcaatttgtgtgtaattgaaaataattagacaatttaacatatttgtctgattatgtaattacagtataactgtgcaattgaaaataattgagggattataatgttcatgacccttcatgagaattgagtataattacattgtgtaattattataaaaaaaaattcctatataattactaattattctactaaataagatattagtaattcatatataattattacatttctaaagacaccttatattttaaaataaaatgtaattactaaacactgtaattaccaccctaattcttaattcttacataatttcttccaaacatattaacttttaaaagtctttcaaatgaagatacttttattctttcaggcctcagccattattgttgtaaaattattttagttttacaacaatatatttttgagaagttcaaagtctaaaacccaaattcaaagtttaatcaactagacttcaaaagttaaaagttgcagtaaaaatttagcaaaataaattattaaaatattttgaaggagaactcgaaatacctaagctcaacaaaatggaaatactattggcatttgattcataattatgcccatttgatatatcattttgtacacttgatacattactagaccataaagctaattggcttaaaaaagaaaagtcatacaattaactacctaaatatatgcataattatattgtatttgtttgtaccaacccctacccattattttattatttaatccaaacacaatcatataaaactttcattgttattttgttactctttctccaattatttcccataatagtaacgtttgacttaagaccttatgttataaacaatatgggcaccaataatttttttttaatataaaatttagggtacaatgaaacatgatctaatttagattgctttcaaactttagatatattctattctattctaaattttaataattgtcgagatcttaaaaaattaggtttcaatcatttcctataaataatatagaaaattattagtctggtttaattactactgtcttatgtttaattaaagagaaatagataagatttaaaattcaataacaagaattataataattatttaagtaatttttatgatttttcacgtgtcaaccatagcattattttgttagttgaactaaaaatgtctaatcattagacaagtcttttaaattaaattaattgatttgaaaagcaacttcacctaataataatattatcacatactattattttctccaatatccaatccaaacaatttccaattaataaattcagtcatttctatatttattattatttgattaaaataaaataaaataaaaaactcaactaaaaaagattaaatgaataaaagttcatattttagcagacactatagttggtgtagcaaatttcataataaactcaaaaattggtataaatagtgaaacaaaaatgagagttagatttaaagaataattatctatctcaactttctggtttttgtgtaaaattctcttctaagttctagcaatttctttattttatttttatatttgatccttgttctcttgccaaatcctacttttgaagaaaaaaatgtatagatgacaaaatcaacatcagtagtccatgcctggtgacattgcagatggttcctcatccttgggaagttccacaacaacagcttccgtggtagttaacaacgacgcaacgctacataacaaccgaacactaaaaacgttaagcttgaattttcgatttttaggaagaaaactaataatgtcgtgtgagtttaccttgcagcatcaaccaacgccgtcctaatgactttcaatggatcgatgattcccgcctttatcatgtccacgtattcacctgaatgatgcagagaaaagaataaatattcttgtctataataataaaggcgggattacatcacttttgtccgtactggtagagacgtttctagaatttatctcaatttttcttatatatgactgtgtatgttatagttatagtagacatagtagacactccacctgttttcgaaaaatttaaaataatttttagtgtcaaaaacaaagttcaaactttcaaccgaatgcttactatagctataatgtagaccgacataaaaaaaatgagttataatttcttcaaatgtcgaaaacatagatgtctcgtcaaatacttttggtaatgagttgaagacaaaccttttgctgcatcatatccgaggtcaagattgtcttgctccaaaagcctagcaacgataacttccccctctactccggcattagaagcaattgtacttaccggcatctgtcaaattcatcgagtaaagtattgatggacagattaagatttaggcctaatagtgaggaaataaatgtctttattgaaagtaaccgaagaaaatgagcaggaaaaagaaaatgttgggaaccttaagtgcattttgaatgatctgaacaccaatcttttgatcgaaatttgcagtctgcaacttcgaaagctccttcgaagcatataaaagggcaacaccaccacctataagtgtatgaacttattaatttaccgataaataatttcggtcttacaaggttaaaccaatggcactttatttaaacgagaaatgtaccgggcacaattccttcctccacggcagccttggtagcgtttaaagcatcggtgactctgtccttcttctcgctaacttctgtttcactagctcctccaatctaaatgaaatagtgtattgtataagaactgataaaacatggcccgattaacaaaacaaaatataatagacaacttcatttggagagaaaaaagtcaaacctttaagacagcaacaccaccggaaagctttgcaagccgctcttgtaacttttctgtatcgtaatctgaagtgct

SEQ ID NO: 222647 - DNA, 4170 bp, Cannabis indica
caactctacgtatattgatactgcgatcgatgtaatctaacatgattaataaacatgtatgctaaacatgtaaatacatatacatataattatactaatcttatctcatttcaaatttaggtgtgttgatcaacctaagtggaactactgctcgacaatttacaagcccctaaatcacaatatttgtaaaactgatgagtgacgcgctaaattactttttcggggacttaaaatcgaaactaaaagtttctctatcgatggataacatggcaataccctaaatactacgaaagtgggaaaaactagggtaccctaaaatgccccaaccggtagaacagttccctaaccaaaagaccagttctgtggggtttcctggggaccaactggaattctagttcctatatgtcccactgaatcggtcgaccggttcagcacaggaaacaccaaaaacaccacaattcaaccccaaatgattctaaaccttccagaccacatatttacaccacaataaatctaatccaagcgataaaaccaagaaataatcatagaaacacaaatcaccattaaagaccaaactttgagctctaaatctcaaaccttgtccaaacacaacaccaagccaccaatcaactcttattcaactcaaataacatcaatttgacttcagaatacaaaatcaaacaccattcaacatcacagaaccctaactctaaaatcatgcataggaacttagcttgaacttaagaaaaacaaagagaaaggttctatgatgcttaccttgaattgaatcactaagaatcttgctaaactaccttgaattgagctgatgaaattctaatttgctgttggtttttcttgagggttcgagaaagagagagagagtattggagagagaagaagtgattctagagtaaggataaatcttgttatttatctattacactcactaaaatcgaattatgcaacataaaacaatatcactaaaagacaaaagaatcaaatggtaaaaagaccattttgctcttgcctaaaccaaaaggcatccttaccacctaggggtaattttgtcaaaactaatacctcgaataatcccaacattcctaatgtctatctatattgccccgctatgactaaaatactaaaccataagaaaatatgattctatcagccaaacattacgttccactgttcccgggcataaaatatgaaaaacatgaaatttcatatacaacataaataatacacctaaaatttataagttcataaatcataactaaaagtttaagttctgaaataaaccctaattatctactaacttccatattaaaattaagcggtctttacaccactaaccctggagctagaagagaggatcaacttttataattcctttatctagattttcctccttttttccaatttcttcagttattacaactaccatttgatgaggctcgactctcttccttaactcaatgttgtagcattctcgtgctaacagcttgtcgcctttcgtagttcctatcccattctgagttgggaattttaatgacaaatgttttatagagctaatttcccccaacgaagttagcattgggtgatccataatcatgttatagaccgatggaagatcaactaccaaaaactcttgcatttgatttattgataaaggcgggtctcccattgtgagggggagttcaactattccaaaacttgcgatgctatctcccgtgaatctacatagattaaccatccatagtttcagagttattccttctaaccctattttctttagggtttctttctacaaaatattcactaaacttctattatcaaccaaaactcgctttactctcttatttgagagttgaatggttatcacgagtggatctgtatgaggaaactttacgtgcattgcatcatcattagtgaaagttatcgagggttcctcagtcttagctcgttttaacatttcaggtgaaaaagctaaagactaatttcttacttggtttatgtacctcttctgtgtagtgttacttgttcctgcgagatgggatcccccaaaaatcaccaagatgtcctcaccctctataggtagttgttggaaattttggttttgattctggttatggagttgattctgctcattccccttgttcttcacgtattgtctaaagtaacccctagaaataagacttttaatctcatatttgagtttttggcactcttcagctgcgtgaccaatgtccttgtgaaagcgacaatacttattctgatcctgtttattcctcacattcctcataggttctagtttgcaaaatgcaaccctattctcattcgcgaggaatatgttttctcatatttcgtttagctcagtatacacagtataaattaggatgtacttctcatactatttctgtttcttttttatctttgaatgattccttggattcatctttcctctttccatgtggctcatggctttcgctcgtgtttgcaacgcttgtttttgcattgcttgagctgggtttattcctcaagccatctttatatacttttagttcagatcgagtttcttcctttctaacatatataagttccctatcactaaattcaataattgatttgactgggcgcccttgtaaatcatcccataactcgcctccagcagtagacaagtcaatagttatcttagcctagagtgttgttaactgaataatgttattcaattttttttacttttgttgttgtcgtgctaaagtgactcagaaattccttttaggactccccagactgtttcttgatatttgtcaaggatgatgcctctggtcttctatccctcgtagcgtggaatttcttattgaattctttaggtagttgttcccacgaggtgatggaatgatttatgaacttatcaaaccaactacttgttgcccctgtcggggatgtagggaattgtatgtaacgcaagttattagaaatattacttcacattatggttttaaagttaataaaatatgcaaccgaatttgtggttctgtcatattgtgcgacatgagggttcttaaatccttttagaaactgtgagttcaaaatatcagggtggaaaggttttgggtcgtcctctgaatcataccctggaatcttcccatattctccatcctgatattttctgaactagtcctcaagctgaattatcctttgctggaaggagttatcaacagttgattttttttgctcatttgctcgttgagtatttctctttaatctctctctaagatatggtgcatttttatttatctgctcgtgtagatcatggtgccttcgatttatatggtctcacaagtcaggctgatcacacatattttggtgttgatcttgtttgtcatcataattgctcactgatcagcttggggtacaatctgatcggtaactttgaaagttactcatactttctccttcgccttggtattcatattgaggtgttctctccccacctggtgggttttcgcatgtgcatgacctcgaggatcgagtttgtccttgactccttgatctactttgggttgtattagcctctgattcttgtggtgattctcgggcaggtttttgcctttttaataagttagggaatctacctttgttcaagtaggtatacatactatctctttcttctctcctatgtccgtgtggtggacgtggaggacgaccaaacctgttaggcaattgatcgtttgtattttcattatttctttgagacgtttgctgtccccttgctcgcatttgccatgaagttgtggcaccctgattctggggacctcgtccatcaacaaggatgtcccttgtctcccctggttgttgctcttaggggtgagtgggattatttggctcatgttcttcgacattaagtcattgtgcccttctggtttgtgaaccatagggccttccacgcggtcatcgcacaggtttctcttcttgcactggcagtgcatcgttttgagtcgctcttgttgcagccatggcccattcaacctcctcataaatttagttggattctgtaagcctctgatggatttataaattttctaactccataatgaggacgtatcttgtggggtcatatgcatctgactcccttctctctcaagaatttcttcctcagggtcactt

SEQ ID NO: 222648 - DNA, 1443 bp, Cannabis indica
aggtatgtttcaaataaatataaaattagaggcaaatttgattaattgattaataaaagggtatttttcaacttacccattttatatatgtatcagcccttataaatttttgggctcgcttcgttattttccttttatttattcgccatgcaaacaacactcaaccaaactcaacatccattctcaataaaaagttaaaatattatcacattacaaacttaaaaatgaatttgaataaaaatattggcagcaaaactacatgaattatacgatttgtgacacttaaccatataaatttatttttaatggtaaaatacctaaattgttcttttgttttggtctttatccttccgtctaaaagatgttattaaatgtcacagtagacatatcacagtgtacctcctaatatacacgtaacaaaatttaagtggttcatattattttaaaatacaaaaataattaaagggttttgttccttcttactctcgaactctgcttgccatctctctcttcacagtagagctcgtcagagctaaataattaaagggtttttcaatctatttcttaatcattaattgttgacaaaaactcgcatcaacaataataatagtagtgtttagacatatgagtaattatcaagtactaattagaatagaatagggtaatttgtgatatgagtaattaacaagctctaattagaatagaatagaatagaatagggtactttgtgatatgagtaattaacaagccctaactagaatagattagggtacttactttgtgatatgagtaatcattcaatagttgaattaatatggttattgggacagaacagtggtcactttgaaacatagcccaccaagtgtagtggtttgtttttgtgcccttttttcaggggaattgcaaaaaaggggataccaaactaaggcagatatgaaaagttagggaccccaaataactcaaaatataaaaataggtgcctttttttttctttctttctttcttcttcttcttcttcttcttattcattttcatataacatatcatatagttggttttgggccctatgagttgtactacttctaatactcaactccttctttcttagctaactacattacaattgtacaattggacaccctgtaattcacatgctaacatctttatttttaggtcttagggtcccctcctttttatttttttagtgctttgtaatgtacatatgtatatatatttgtaaattatatgagtatatctatcaacatagggattcttttctctgataggtacagccatgtgttgatgaagatagtgtgatggaacttcttcatttttatctaattaatatatgattttttttaagattctccatgtcagtgaaaaagaaagcttcttctttttccattttcaattaatacaaagtttatttaacaaataaagaat

SEQ ID NO: 222649 - DNA, 2817 bp, Cannabis indica
tagcacaaggtgaacccaaaagaaaattgtaaggcaatcaccttgtgaagtgggaagaagtatgagggacctaatgaaaatgaaacagtggaagaagtggtttacgatcaaccagcaccgacaccagcagagaagaagattattgagggtctcacatcaaaagaagcttcttcacctgtcagcattgaccacaagatcccttatccacaaaggctctgaaagaacaacctagacagctagtttttgaaatttctagaagtaattaagaacttgcacattaacatcccctttgcaaagccttagaacaaatgccaagctatgtgaagttcatgaaagaaatccagtccaagaagagaaaaatggagtactatgaaacagtggcattgaccgaggagtgtagtgtaataattgcagaagaaactgtaacgtccccacttcaagcctccattgggcccttacacccacggaatgatggctcttatacatgagtacgtcactctgactgcttcatggaatgacgactcaccctatagaccaacacaagtgtttccagtgtgttttgtcctcactcgcatgcttcctaggaaggaggtcacccatcctgaaattacccaaggtcaagcacgcttatctgtggagttctttcgtgatggggtaccgaaaaataagatgaaccttgttggcataggtagcaccaatcaatccatttaagctctcttcaactatgtagtcccatacctacacagtctcagaatcatccagcttgaccttccccaggaagtgtgggattgcacatgttacccagtatttccccttacggatcacgggactactgactgtcacaatcaccccccttatggggtccgatgtccttgttaaccacacttccggctgggtcaaggctctgataccatttctaaagccctttctaacagggacgccacatgtgtgcttttataaaattagtcttttactaatttatataattataccaaaagtgtggttaattaaaatttatacatttgaacaaatgcataatttttataaaagttaagtattaatattatcaaaatatttacattcaggactaaaagtacttttacaaaataagtttatatttcaaatacattcaaaatggagcatcctgtccaccgggccgtggcatcgcgactgatatgtacattgctacagcaacctcatactcattgctgctcaaccttagcctttccattacctgcaccatttagcacccgtgataaacatgtctaaacaattacacaacatcgtaatcacacaatcttggtacttcataaagtacccttaccactcgttacccacgagctatatatgtcactatcgttgctcgatatagagagcgataagtaagaaacctatttgcggtttcaagagtaattactcataacagtaatgaccgtttcaaaccttcagttataattgagacttaacaaacataaattcaggttctcgatcataatcgagactataacaacacaattgttaatcacttaatcctaagagatgcataacacttttcttagctctgtccaaaataaggtgtgcaggcaaatctgagtggaatcaaagctttgcgatcccagtcctacgtcacgacaaccaaaactcattaaaagcctaaaacaaaaatttcagaaataaaaccctaatcgtaaaaccaaatgtaacctaacttccaacaatctcaaaataggctacacaacacataatcaatccaaacagacactaggtaccccccgagccaaaacaacactcgaagataaccctagaattcacccagtagatcaaccggtcgaccggttctgtcagaccagaaaaccttgggttttcgtcctcaatttcaacccaaacctcctccaaacctaatcaaactttccagtacagtgtaattacacaaatacaacatatttcaagcaccaatttacaacaattcaaccaattatcaatttcaccatactaggctcaaaaccaagttcttaaataaataaaaattgctatttttacgtttaatcagtcatacagcacaccacaaacatcatacaaaccctaaaataacttagaaataagctcaaaatctaagctaccccaaacaaccctgaaatcaccatgtttctaaccaaaacccattataaacaatgataaatcaccatagactaggagggagacttacctcaagaacacctaataggagtttaagcacaaatctgggctgagcttgctttagttccttctagggtccattagaggggagagaaagatatatggaatggttcttagtttcctaggtttcggttcttaattttcataacttagtgataaataaaagtaaataaataataacttatgtaattaatatcatttcagccaaccatataggacaaaatagatttctgtcctaaaaatgaccataatgcccctcataaccctaacttaaaagaaatcaagcgcaggggtattttagtaattctaagtaatctacccaaatcgacaacctaacactctaaactagttcaaaattaaatccaattcaatccatactttattatcgtgatatctttgaccacactgtcaagttcccacggttgccgggcctgaaatattttacttcaaaaatggtatccacgatacccacataatctagtaaaatctccgtaattaataaattacactttatttaatcattcactaaattcacaccatttaacctaagtaagatcataatcttactccattatcaaaataattacatatttaagaaaatatgtctaattaaataccata

SEQ ID NO: 222650 - DNA, 2285 bp, Cannabis indica
tgtttattggagaatcttctcgcacagatgttacttctcctgctgctactaatgaaactccccaacataaagtgaattacaacattcttcaatctgatgttcctgttgtctcagatattcctaccactgcaatttcactaagtccacacccttcacggcttgcaacttcagtcatctcagccatttcaaatcatgcacaaactcaacatagcagtcccttaacaaacaatgcacgagtcaacactgcagtcaaattagactcatctgcttcttcaaagattaaagaatcggtagtggatttatctgggatatttactccattgactgtcatggacttggcacccaatgcttatgcaacttatcctccaacaagtcgcacctggcagccaccaaagccaactcaactaaatatccccttaccaactcaatcatacattgtttccaagccaactcctactgccagtgctacacctcagagtggaaaagagaacttgtcacctaatcgacttcccaagagaatttctgaaggaactaatcttcgacaaactcttaaaagatgcaggggtaatccagcacaattgttttctcctttgtcagcagaaaatgaaccacacttggatgtttccattgatggaatggattcgactggtgtctatgacagcgatgcggagtctgagtctcagctccgcgatcaaccatgaaaatcttaagttggaattctcgtggtttggggaacccgagtgctttccgtcatcttaaattgcttgtcaaagagcaatccccacatgttttatttcttatggaaactaagttaggtcctaattctatttctcgttttcgtaatgtattacatttcaataatggacttgaagtccctcgtgtcggtcttagtggtggtttaatgttactttggaaggatgatgtaaatgtaactcttttaaattataatataaatatgtttgattgctacatggcttgtggaatgggtccgacttggcactttacagctttttatggtgcaccagctgttcataatcggcatcatacttggactcttttagaaagattaaaggatgttgcaccaactctaccttggatggttgttggtgacttcaatgaaatcttgtcaaacacaaataaatcaggtgggagtttgcgtaatgagtcacaaatggacaactttagacatgttcttgatcattgtcacctatatgaacagccctttgaaggtgatccattcacctggatcaaaggacgacttaaggctgacacaattaaggagcgattagactggtgctttgtaaatgccatttggggtgatttctttcaacaactcacaactaaacatttagattactatagttctgaccatagagtgatctctgtccaagtgctggaaaactcctcaacgcaccagcaacctcgtcgacaaacacgattcagatttgagaaattgtggttgcacgaggaagaagctactgatctcattcagcaacattggaagccggtttctgcaggagatgctgctgcaacttttttacagaatatttcatcatgtgctgattctctccaacagtggcatagacacaaattcgggaactttaaaaagaagatttcacaagtgcaaaagaaggtagctgatctgaataacacatctattcgaagctctgctgcaatgaatgatttgaaacatcaagaatcggttcttgatgagttgttggctcaagaagagacatattggcagcagcgatcgagagttgattggatgcaaaatggagaccaaaacactaaattttttcacgcttatgcatcctcaaggagacagcacaataccattaaatcattgacagatgataatggtaccattgttcattcaaaacaaggaatgactgatgtcattacttcctattttggtgctttgttctctgcaacaactgttaacactgaagctttgcaacatgttcttgctgcaattccaaccacagtcacggctgaaatgaataactctcttgttaaaccgtttaccagtgatgaaatctacaatgcacttaagacaatcaatccagataaaagccccggttgcgatggaatgtcggcaatgttctaccacaattattggtctattgtgggagatgtggtcactaaagtggtacttggtattttgaatgagggatatagtatggaatccattaataagtctctaatcactcttattccgaagattaagtcaccaacgggaatggcagactttcgcccaatcaatttgtgcaatgtcatatacaaaa

SEQ ID NO: 222651 - DNA, 1478 bp, Cannabis indica
gtatcaaaatttacaattatgtaataaatcacaagatagtaaaaattaatgtaaaaatgtcataaaactactttttatgctaaacaaatataactcaacttagtcttaattacatgttttgggtaattatagtcaaaataaatttaataattgtttccatatatattataaatatatatacatatagttgtgcacatacaatttatatatagggaaatcattctatatatgccttttaatttttttcttctatttttacaatttctttttttggttttttttatttttatttttatgattttggttgttctgttagttgcgacatggttttgcatggattgcgatgttgattgcggtttaattgagttgtgatttaagtagctatgtgagtgcactatatattctgtaaaaaaaaacatactttaaaaatatataaataaaaaaaaaccccacatatatttatataaaagataatttctccagtttagcatatgcaaaggaacaatataattccttatattagctttttagtatatcttcagataaaatatccttggatagtattatttaagtagagttattttgtgggcatgatatatatatgattaagtttttatacttctttgttaaaataaagaataataaccaaataattgcagcatgttatacaactaatattatatatatatatatatccaacgtcttttgaagtgtccaaaagaatcatttgcgaaaacccttttcatttgcatcgaatatttaaagcttttttacgatcttcaaaacactgaagatgaaaaaaaaaaaaacaagcttaccctataaaaaaaacactgtcgttttgaattgagacccacctaaagggcaaaagactgatgtgttttagcatctagaaaagacaagagtggtttaagcatggagacaaagtttccacaaaccttgaggctttcgcagactttaagaaaaggagagctaattacatggctcttttccataaggtcactgtcccattccactcctctttttatttatttaattttttttttctttttgcatgaaagtaagggaaatctcggatctagaagaagaagaacaaaaccccttaatgttttagatattggaccggggaaagaatcaactatagtcattgaatggaatctaatgatcatgattattatcatcatcaaaatatattctttccccctttgtgtgcttttaggggtttatcatttgaaagtaatgagattgagggatccaaggagagatgagaataagagactatatagtactttcatttcatgtgctgctgtagctcaattcagctatatacaaatgtatgtgtattgtgtatatataaagaaataaatgaaagaaagaaagaaagaaagtggtaccactgttgttgctattagtacgtaccaatactaattaagtacccactttcgtcgttgtatttatgtgtgtacatatatatatat

SEQ ID NO: 222652 - DNA, 2303 bp, Cannabis indica
gtaacttttgcaaaacacagattccaaaattacttttatacgtgtgttatagtatttataaaataatataatgcagattttttattacaaatatttaatataatatagattaaaaataagatttaacaaaataagtaaatgtgtgcattttctaaaaaaaaaagtgtgtacatctattgatgtttgcaagaacataattttagagaaagagattgaatcaagctcaatctcaatttagatgagtaactggtatttatagaatgagttttacaaacagtacatacaaagttaggaacaactaaccaaataagctgacataacaacttttacataagattagttaaaacagaaaattaacgaacctaactaacattatggcaaggcaaagcgggtcctaacaccccctcaagttatactggggcttgtcagtgttaacttggatcgaaaatgctcaaactgtgctatgggaagaggtttcttagaacatctatgttgagacatgcctaacatttagttgatctgcaataacgatctctaatgaaataaagatcgacttcaatatgcttggtcctggcgtggaagactggattggatgcaagacatgtggctctgagattgtcacaccaaagaattgaagaagaggagtaggtaaacctaattctgtgaacaaggattgtaaccagatcaactctgctgtagctaaggcaatggcacggtattcagactctgtgcttgagtgagctactactgtctgtttgtgtgaacaccaattaatgagattgttaccaaggaagacacaatagccagaagtgtacttcctatcataaacagaacttgcccaatctgcatcagagtaggcaactaattgaaagctttgtgaaggctggaagtgaagactgaggtcacaagtactgccaaatatcttagtatttttttgcaggctaaccaatgttcagaagttggagcttttaggagctgagagagctggttaacagtaaaagaaatgtcaggcctaaacatagtgagacattgtaatacaccaatcacactcctatacgaaagtagggtcagatagaggtgtcccatttgataaagagagcttatatccatgaatcatgggagtgggagtaggagtagcttctatcatattggtagaactgagcagatcccttatatacttggaatgagtaagataaattctattggcatttcttgtaacttcgaagcctaagaagtagttgacagtgcctaaattcttcaaggcaaactgtttgattagtaataagtttgtgaatttgggcaatatcttctactattattagaatatcatcgacataaactaggagaagtaatagcttgttgtttttcttggtgaaaaagagagatgtatcaactttttagttgtgaaatccccatcgaacaatatatgcttttagcttgttgaaccatacccgaggggcctgtttaaggccatagattgctttattaagcttgcaaacatggtttagaaatttagtgtttttgaaccctgaaggttaagtcatatagacacattcttgaagcttcccattcaagaatgcattgtttatattaatttgttgtattggccaactgttactggtagcaagagcgaaaatgactcgaattgttgatagctttaccacaagactgtaaatttcaaatattctaagccaggtgtttgttgaaagcctcttgcaataagctgagatttgtatctatcaactaaaccatcagagttatattagatgcgatgcacccatttctttgttaccacattcatttatggggaataaggtactagaatccaaggattgttgttaacaagagcataaatttcagtttgcattgcaggaaaccacagagggtcttgtagtgcagccttgagggatgtaggttcaagagaaaccttagagatggcagtaagggcgtttggtttgattatgccatttttttgatcttgttgtcatgggatgtgtgttattggaggcaattgtaggagggtgaatttgcaaaccagaaactggaatatgggtgatgaggggtggtggttcatgatcaatttttgtgtgagtagcttgggtgctaatattggctgcaggtgctggtgctggttgacttatggagggttcagtgggattgagaacaggcttatgtgtcggtaatggggataggggaatggatgagggaactattgagtaaaaggagcagtcgtgtggcaataggttctggttgagtgactggactaggtattatgtatataggttgtgtgttggttagaattg

SEQ ID NO: 222653 - DNA, 2627 bp, Cannabis indica
tttataaataaaaataagtttagattttttttttttagaaatttacccccatatgagatctgcctactttgatcccatgcttttgtaactttatagagagctatattagtatcccaacctatagtgatctaaatagtattatctttaggtattaatacaactaaaagaaaagtaggtcattacctgctaactaagggggtcaaacatcaaatttatacggccccactgttgattgatcaatttttgaggtcaacaatgtacattatgatttaaaatgacatagttcctcgtaaacttttatatttatagaaatctagtcattctgttatattccgtctcattattccatttatatcttggcaagtctttgtgaattagctattttgttgtcctaaactttgataactattgaatcgaacctcctcaaaacgaaaataaaaaagatttaacatttttttaataaatcttaaaaagttaatttaaattttaaaaaattatttgaattattaagaaaattaaaaaagaaatcaaaatattaaaaataattatgcgaattaaaaatgaattatttttactaaaaaccaatttagataaaaaaaaagaaacataatttaacaaaagagttttaattatgtaattgttgtattttagtacaatttttcttaacaaaatctatattttaagagtaagattaagtagtgtggaacattcatagaaaagaaaatgttaattattcaatttataaagtataaatataaatattttaatgaaaataattattataaatatagaaataaattgatgaggaatagaatcaatcactgttaaattagtaattacagtaccacatcatctacaatgaattattctatattttagtaataagtaataataatataataatataaaaggttgtaccaaatacaacggtaaagatagagaaaatgataaatacatataaataaattgatgagaaataaaatcactcgagtgattacaacaggtcatctacaacttattaattaataagtataatacaacttattatgtaataaataaataataatataataataaaatacaacagtaaaaaagttgttgtgatagaatacgcgccttgatttgtatatttgaattcatcatcactatttccttatttcgtttccctcctttacaacttacaacggtatacagctgtatatatgtatatatatatacacacagacacaatacaacagtactcaacaccaaaaatgtcacgtgggtagaatatagatgagttaaaaataaataacaatgtgataagatactacaaaaatttactacaattggattaaaaattaaaggctataaaaatgctcttacttgtgataacaaaagtgatggtctcacataaggaataccctatactttaatagaaatacttattataaatataaaaataaattgatgaggaatagaatcaatcactgttaaattagtttgagtaattacagtccacgtcatctacaatgtattattctatagtttgtaataagtattaataataataaaaaaagttgtacaaaatacaacggtaaatacagagaaagtggtaaatacatataaataaattgatgagaaatagaatcactcgagtgattacaagccacatcatttacaacgtattaactaataagtataatacaattaagtcgtggttatactttgtttccctattctgtaataaataaataataatataataataaaatacaatggtaaaaaagttgttgtgatagaatacgcgccttcttttcaattgacttgttgttgtattttagaattttttttaacaaactctctatattttaagggtaagattaagtagtgtggaacattcatagaaaagaaaatgttaattattcaatttataaagggtaaagatatatattttaatggatatacttattataaatatacaaataaattgatgaggaatagaatcactcttagcttgagtaattataggccacgtcatctacaatgtattattcgtattaattaataaatataatacaattaagtcctaatatacctttgtttccatattttgtaataaataaataataatataataataaaatacaacggtaaaaaattgttgtaatataatacgcactaccaagtttagttaccaacagcttataacatttaattttcctttaaaatttttgtattattttctcttcatactttataatccaatacttttataaaataaacattatatttaactaactaaccacgtgccttgcacgtgacaattaatctagtaataatataatacaacggtaaaaaatgattgtgatagaataggctccttgacttgtatatttaaatattaattatatatataaaaaatcaacaacaaatgttaatataatgtaattaatacttgttggcattctaactatagctattttatacatgtggcaaaaatgacatcttcaaatattctaattatttaagatgtgtaatttaaatgcttctatgaatttatagggtgttaaaaataaattatagaatattaatgaatttaccaaaattgtataaactgtatttgttacatcaaaaatatatgatct

SEQ ID NO: 222654 - DNA, 1982 bp, Cannabis indica
attttcattgaaattattaaatttaaaaatttctatttaattcagcttaatttcattaacgcaataattatccatgtattaaataatgtctttcaaactttaatatctattaaattatactttttgaatttcaacatgtactcaatcatactctctcaacttttatctacgttagtctttcattaataaaagtagacaaaaattcttgaatctagcaatttcaataattcataaagaaatatttttttttagaaaataatctcaaaaaataccatccaagagcaacgagctcaaaagagtcgaaagctaagagaattcatttaaaatagcatcagccaaaataaagtttcgaaatcaaaaatggataattaggccaccaaactgacttgcaataactattaaagcaaacttagctacataatcagctattctaaaacaatgactaaaactcacaacattgaaatgagaacataaaattctaatatcgtcaagaattaaacccatagaaaaatctaaagataacaaattattaagtttatgaactaaactttggcaatcggagtggagttgaatttggttgagactgagtgtaatgcattgagacatggcatttcgaattacaagtgcctttgtaattttagggacaataatgtcaggcaccttccaagcggcagaagcaaatacatcatcattagaattttgaatcaccatgcctaggccccccactacacctaccaaatcgatagttgcgtccgagttaactttgaacaacccatggagaggagggaccacgacatcggaattcaacagctgaacttcgaagatggttaatgcaacactgttgttatcagtgtggtaggcaaggagatagtcggctgcccaaggaccaacaagttccggcggcaacaacttttgttcatggactttcttgttacgtcggtaccaaattcttcaccaagtggtgaggatccattcaatttcatggagagggagatgttgaataaaaatgcaaatgaaattataaatgccactcacaatgacaaatatgtcaccaagattgaaagagtaaaattttgaaacttgcacaagttggctagatccccaaagagcatgatgagttatttctaaatgtgtagaacacattgggcaaatattgtcattaaggaagtcatgtctttgaagattaatcataatagggatccaactacatgataatattcaagtaaactttttaccttaggggttaaattaagaagaagcgatggacttagttacatcacgaatagcttgccaataaacactttttactgaataaaactcatgcttctcaagacaccacacaagtttatttggagtatctcccaaaggcctagatatagacaaaatggttggagtctcctcactgaaaaagttccaagttaacgatatgaaaagttaaaaaaaatatatatataatttggtacatataaatattttagaaaaaaatcttaatttgcatttacaaaattgttaaaaggtaataatagtttaagaaaaaggggggataataatactctaatacctatattgagttggtattattatttgtgtaatttaaggtggtttttaacattttttttaaacaaaaattaatcattattataaaaactaattaattgcaaagccccacttggtttgtattagtggccaataatattgctcatttattaatgacaatgacaaaaagaaaaggatagttttacacaaaatacttaaaagtaaaaaattatatatatatcaattatttttatgtttttacgaaattttaatttttaataaatttttagttatatttttttatttagtaaaaataatactatttttacatttaatttcatatagcaacaatgtgagaataattgaaaaacaatcgttcattttttttaagaaaaatgttaaaaaaaaattatagatccatatttttgtaaatatgaacttagtag

SEQ ID NO: 222655 - DNA, 2414 bp, Cannabis indica
acgaggaccaacctcgtctttgccctagtccgtcctcatcaagcgacgaactttctaattcaagtttcgaggattgggaggtgaacagtgaaggtacaccttcctcagaacccgaggtgcaatatcatttctatcccgaccaaattgtaggtgaaggctacagatgcttcatttcggaactcaaaaaggggtagagacgatacttgccgtcgagctagacatacattgtccggccagacgtagttgataccatccccgtgggccgtccaagtaccgatgcctttggcattcctattgccacttccgccataactgttgctaggcatacaacctaaacaccatccagggataggatgatgacccgcacaaaacaaactatgcaaagaattgctgcgactgatcctcacgtggctcggcttgccacgatgtcgagcgctgaacaggcccagcctgctgttgaggaagaggatagtgagggggacgacggaagtccaagagatagaggatcagggcgaggttcgtcctgatagtctcggtgaagccgaggaggagggagttgctcggccattacgcttcggaggttacaatgaagcaggggaaccagtgtccaaggtcggtgacgtccttgtggagggtgattattacgtcactgaagagtaggctgaggcggttcctcaaaggaggcaaggtgccttaggagctcggtgagtgtctccaccatccatagtaacccaggccaagttgagagtttagagaaggatggatatctaggcagtctcaagtgctttttcccttcttcaaatcaccggacaactagtccaagacaggaatactatgcttggtcaagtgctcacaccaagcaggatgcaatgctgcccttgtttccgtatttaaagaggattgcggactactaccatctctgcccgacctagttcacactaaagggcatcaaatacttatctgccctgttcatcctctatgcttcccaaggatagggtgagccgtcttcgcacgacaccaactagctttccgacttgaagttaactcccaaacagggcaggtcggggtacttctacttctcccgattggacgagaaatggctgaagggtactgtggactccaatttcagcaaaatagggcattttgtggacgagtactacttcgtgcagggcatggatatcatccacactcggttacaacagattccctcgtactgccgtcttcctttcacattgggactcagggagagggcatagaaaattctccaactaccagaagctattcaaaatatcactttcttgaccactgaggccaactttgtgaagtacaagctcttcccagaggattttgtgccaaagccagtgaaggagaagaagaagaagaaggctaagctgaactgagctgatgatgctgagcaggagaaagagctcattcaactcaagcgtgaggctaagttgaagggaggtgacggggccgagcagtatgctcaagaatattcagagcaggagctgtatgctcaagaatattcagagtaggagaagccgagcaagaagaagaagaagaaagcaccccggccaagagaacaccagtggaacacgctattaggattatggaacctggtaggcctgctcgaccatccacccctacagagggaaaaggaaaatctgtcctggtggagcaagaagactctttagatgatgatgtcccatctgtaattgttcaggaaaacgtccctgctcgcgtccagggtattttagcttgcatttacttctcttgtattatgcttttcacattatatcttcttctaactacattattttatttgtgcaaaattgtctcagaagatgctccaggccttaaagaaaagagtgggagacagttcgggcctatcccctctggccaagaagtctaaaggcagtgagactccgtccaaggagaaggagccagttgaagaggtcattgaccttttcgaggagcaacttgttgtggaccttccagttcagaaggtcttgaaatccaagagctccagaggagggagctcagataggtttgaacaagctaggaccccttcaacaactgtggcactgagcacggaggccaagaggggtaaagacatattccagtactatctgaaccgatcacttcctgaggtgagtgaccaactgtccgggacgaacaatgagttatccttagagctggtcttaggaggggtcttgaaggaagctactagggtaattatctcctctttttatctcattctcttatgtatagctcggactctaacatttttctgtacaggtcaatgtgaagatggcttatgcctatttctgagccaaattagttgctgccaagaacctttccaccaccaatacactatagagggagctgggtgtggctagaaagaaaatctgagg

SEQ ID NO: 222656 - DNA, 2044 bp, Cannabis indica
taaaaaaaatgaaacatacatgtaatgcacttaatatcacttaattgaacttaattaaaaacaaaaaaaaaaaaaaaactaaattatacgtgcattgcacgtaatatcaacctagtatataaataagtatggattaagtatgaatcgacatctaatatcctcggtaagagcacttattaaatatataaatccaattcgatcgtaaattaaattgaacattttataaacacccttagctctaagttctcatttcgtgtacatatgaatattttaatatatttattcgatttttcccatttatctctttaatattatttttttttaaaaaaaaaatacaccctctttattttttacatttacgcctctctcttataaattgatcctataggccatccctaccatcaggaagtattatttatgttgagaaacacttataatcatctgcattcatacacgcacatacacacaacaaagaatctccaaagacaacacacaagtactccatagaaccaaagacacaaccacacaaacttgagctctgaaaaaatactgttttattgatttaggaatgtgtttttacaagttgagaattttacacttagttctctatgatagaatatagagcctaatggtatttataactaactaaacactaaggagtaccaactgtcataactgtcgagatgtcacttatgacagttggacttacaacatggaaaaataaaagattacacataacaaactgaatacacgtttcaggacatataatttaataattctccaccttgaactgataaagtgtaccaggttaagactaagaatctgagacttttaagatgctaagacaatgttcaaattttgctgcaggcagtgtcttagtaagcatgtctgtaacattctcttcagttctaactttgatgatttgaaccttgccactggatagaacatcgtggatgaagtgtaacctaacatcaatgtgatttgttctctcatgaaagatttgattcttactgagatgtaaagcactttgactgtcacaatgaatgcaaatagtctgctgatcaatccctagttcccttgttatcccttttagccacaaggcttctttgacaacttttgtacaagctatgtattctgcttctgttgtagaaagagccacaatagcttggagattcgatttccaacttattggacactggtttagtagaaacacatagccagattgggatcttattgtgtcaaggtcaccagcatagtctgaatccacatatcctactacatttgaggtagtaggatatgttccatacatgagaccaacctcaggtgtcttctttagatacctgagtatccatttggttgctttcgagtgctctacaccagtttgtcccataaatttgctcaccctactcactgcatgactgagatctggtcttgtacagatcataaggtacattatactgcctacaatgctagtataggatacctttttcatgtagctaatatctactttattagatggagcttgtgaagtagatatcttgaagagttgagtagagggtgggataacagatttcacatcagtgaaaccaaatttgaatagaattttagagatgtaaccactttgagagagctttaagcttctcaattttttgttccttataatctcaatccctaaaattctttcaggtgagccaaggtcattcatttcaaatttcttgctcaagcttcttgactttgtctatttctcccatatgttttccagcaattagcatatcatctacatatatgagaagatagataatgcaacttgagtacctgacataaaaacaactatcatagacacttctcccaaaactaatttttagtacatattcatcaaatcttttgtaccatttgctaggggactgttttaggccatataggaccttttcaacaggcatacacggtcttctttccattttcttcaaagccttttagatgcctcatgtaaatttcctgttccatggagaaagcttcattgtaatcaattctctctctctctctt

SEQ ID NO: 222657 - DNA, 2039 bp, Cannabis indica
agttttatctatcgcttagaagacagaacaatagaaactgttacagcaggttcatacaaccttgtagcttgatcactcaattttgtgcaaggtaagtaactgcactactaactctttcagtcgcaaagaacttgttactataaatcactaacatcaatttgatggcgagccatcgaaagacaaaaaagaaccaacaacgaaaaaaaaaaactaaataaaatcatgccacacagaatatgactgaaatacttaaaactatgtcacagagaaaagactaaaactctcaaaactatatcacagagacaagacaaatcacagtagaaaaaattgaatctcaataacaaagcacaaccctgatcaagccgcacctatgcctaggaaaggtcggcgagcctagccaaagaaaaaagacaaccgcttgaggctataaatttaggaacgagaaatcttaattttatttttttgaatggatacaaaaataaaaatttaattttgaataatataagtatgtaaaaatatatatttagtaattcgatgttgaggtaaaaaagattaaatttaatttttttaaaacataaattaaaaatatttttaaaaaccaaaatttaattatatataattatatgcaagagataaaaataacccttgggtaaaaaagtaatttcaagagattaaaacgaggagaaaatattaatattatattgttgtaaatcacaaagagaaatacactgtatcattaaagaaaggaagtagaatgagaagtttaaagaacggaagaccaaagctctgaataagagaaatatagagcagagctcggggagaaagggaataacacacttaaagagctctggaggtgggaaaaggaagcgcgatgaacaacgaatgagatttaacagatgtcgacaaataagaatagaaaaagagaaggaagcatgcagtccatcacacctatagataggagactccctcattcaaaaagaggacagattcttggtcacaccagactagccgaaaatctttcaaaatgcaccctcaaattcacacttgatataaaaaaacaagcgatctaaatttgaatgagtgaatcgagaggaaaattgtgtaaactgattaagaactgaattccactagatcgaacttggtgtaacggattcaaagtcttaataacaatttattgttgagccaatttttggcatagtccgtgagaacctcttgaacgaaaagctaaagctaagatgggattaaaaatggtatcagagaaagtaacaactttaagtgaaggagatacatcaaatcgtgactcttgcattggaattagaaataagagagttgaattagagaattattgcaagagacaatgtaatgccttatcaatagggacaccataagtgtgattttataaactagttttaatagattaattaattattaaaatctgtgtaatattaaaaacttcataaaaataaaacactaaaaatggacatcataacgacactaaaactgtgttccgaggattcctattgtaaaagttttacaaagagactgaatgcgacaacaaccaaaatactaaatcaaaatacacgacggatacaactcaaacacaactcctgacaactcacacaggtcggtagggtcaatatgtacatttctagagaagacttgtcacctcatggctgacctagcttttctttatccttacctgcaccacatagcacccgcgagtcacaaggactcagcaagaaaagtaataacaatgatataatttattattctaatatcattatttatactcagacaatcagaattagatgatcacacattactcataagataaaatctaaattactactgacatttgtaacaatttagcgtcagtatagatgttcgataatacaaaactattataccaataatagaatttatattcaattaataatataaataatatatatgttatctcataaagtaactatctttattacatcacattgcctaatcaggcaagtcgatgctttaatatgataatcctgtattgcatt

SEQ ID NO: 222658 - DNA, 1743 bp, Cannabis indica
tcttctcagccatcccgacgagccatcaccagaattctatgagccccagaacccctaaacctctctctctttctcgttggccgtcgtcgttcaccataggggtatacggcggccacgactgaactctgcgagccccaaaaaccccaagtcccaatgtcctcgagcttccctcacccttcttcattatggaataactcaccggagccgagatttctcggcttagatttgagaaacttcagatcccttcaacaaaaatgacttccatactctttctccacttgtcgtgagctttaaaaccaatagctcgaataccctaaaaaccaccatgaggtagtggctccgccgctgtcagtcaccagagcttctccgtgagtttatttaactgatttgattgttgtgaaaattgtaatggattattgggatatttttttatgtgtattaacacgtttttaaaatgggaaacatctatattacagttgttactatgttgaaattttttaaaatgttaatggtactataatgagttttatgggttctaaaattaggtaatatcagaataaattatgatgatgctaaataaattataaaatgaacaaaataaaattcaaatttcattattaaaacttctaaaaaaaattcgtttaagtttaaaatcgatatttatactaattagtctcggttataaactgagacgataggaaaacactttaagtgtcggttttaaaacgatactaaaactcattagtctcagtttataactggcacctaaactctagctttttgtcactgtggaataggagtcagttctatgaacagacactataagtataagtatcagtttaaaattgacacaaaaagtgtattttgtagtagtgtttagaagaaaatgagcaacaaaggtaggaaatcatgtaatcaaatcagtttagttgcacaagaaaatcacatattaaataaaaaatattttgacacttaaattgccagaaaaggactttacagtctccccctttggcactttagtgaattaaaatatttttaactaatatgcacctgcaaaaacaaagttaacaaaaaacatacaattgaactccctctagaaacacaacattacactgaaatagaatgctaactttaaaccaaggtttaacaaaaacatcaacctcaactgcccctggaaaaagggtcaagagttgagtatacaaatcaataaaataaaacattactccccctttttgtttatctagaagagccaaagacaaataaaagttaaaaaaagtccaacaaccaaatacaaaataagttaaaataaaggaaagagagaacaaaaattatgccccataaagtttgatcacggcggacaattttttagatatttcttgttgaacctcctcgatggtagccaagcgattgttcaccaagatgacttcctgcttgactttctgcacatctgcagaagcagaaatggaacttacagcagcagcaaatggagttgcactaacataaaccttacgatgcttggggaaagctccatcaaagtactctgatggttgaaaattattccagtgagaggaggctcgagaaactcattcgaataggccacattcttctaaaaggaaagaactttatagattaagttagaaaaaataagcttgtggctatgttttttacctctaaggaaggaagcaatttgtcccatgatgagagaagccaaattgatgtttgcccctgtagtgattcaaaaaa

SEQ ID NO: 222659 - DNA, 1663 bp, Cannabis indica
aatgttcatttattttattttatcgcttataaatcatttattttatttgtttaaatagcaaaatatactacgcttcgcgtacggttatattatatttaatggtaattaagttatacagccatattaaaataaatttacattgtcaatcaccagctcggtacttcattttaaacatcaaaataagtagatagattatttcaatgttgtattttgatccatgtatatttgtatttatatacattgacgcataaatctaggcacaaatatctggcaaaatttgctcgctagaattataggaatgtaagacagttaagtataagtaagagagacacaacaaatttataggagttcacttccgtgacacgacagtaataaagctacgtctgcttcgagtttttatttctcacaagaattacaaagaattggctaagtgtgaggcttgaaaatctacagagagatactgatactctgaccttatgaaggacttaaaaagaatgtgtaaaatgagctagataagactctcattttatacagaaggaattacctaatttaaaaaaataattaagaaatacaaaaataaagaaagaaaaaaaatatattttgggatgatcttggccattgatgatgattcatgatgattcatgatgatccaatggtgaaattagactcttggtgaaaatcaccaattttcaaaacttgaatcttctccatcagatcatttttgggttgtctgcttgaaaaatcgcaactttgttgaggactaattttggatccgaaatcattagaattacaatgtgggtgtgagacatggcttattaaattttagaaataactttgaaactcaagtttatcacgttaatcagatcaatattgagtgagtcatgatcgttttactgaaggttttatgcaccctacaaccaagtcaagttgacacccatcgcccaagttgacattctaccatcaacctagaagtctggtgagtgccaaaacatcatagacatgtatttgttgacgcctaagttatgtcttgacactagttagtcagattcaatgttttggtgaagttgtttagcaattttcaatgatatcgctattttgtgaaatcgggaggactcaaaactctccgattcagccaatattctaccttatagaaagggtaaaataccaaagtgtaaatttgacctgtcacaagttgtagcttttgcttactatgaaaaaatagttgagtgcttgaagcagagacgatgctatagctgtatatccaaaaagagcttcactttggttttaagtgacatataaagaatttacttcggttgggataactgacgctatagctgtagatgcaaatagtgatattttttgcttaggttatgaaccgatggtaattgattttttaattcagttatgaatcgaagcaaaaaaaagtttttgcatcggttcataatcaaagcaaaagactagtgcaatgacactattgtttttgcttcagttgtgagccgaagcacaaaaaattttaaaaaaaatgtggaccaccggaccactgccgccatcaccaccatatttatactagttatagattcctccaccggcataacatcgacgtcgtggggtgtggtcagatgctaggcttggtcatctagatagatggatatatatatatata

SEQ ID NO: 222660 - DNA, 1323 bp, Cannabis indica
aacgtaccgacaatgctttcacagacaattcttttctattttcatgacatccaaacaatgtctaacaagtaaatctttccagtatggaagatggaagaaaatcaatttccattgaaaatatccatcggggtttctctttttcttgccctttccatacttgaaatccattttctcaacttcttcaagaatttgtcaccctaaaagtggcaaaggtgcaacttctcattctagagtaccgtcaaatgcttggtttttatttctgttagggtgtcttaggggaaaatattgtctatggcccatgtaacacattttgtatccatttaacaaccgacaagctcgtgtattggtacaacaaataggacaacattcatagcctttgctgctcaactcagatagattactatacgcagagaaatcattaacagtccctaataggacagccttcaacttacaaacttctttcttaaaaccatcatatgcatcaacaccatcttcgtacaactctttcaagtcatcaactaacagtggcaaataaacatcgatatcgtgtccaggctatttaggccctaaaatcattagcaatagcatcgtaaatttccttttcatcaccaacctaggaggaaagttggacataacaagaaacacgggccatgaactctgttgactgctaagagatctctgtgaatttactccattggcagatagaccaaggcgtagatgtcttggttcagctgcgaagtctggattgaaataatttacttttttccaagcctgtgaatcagcaggatgtcggagtttaccgtctttgactcaccctttctcgtgccacaataagatttcagaagtttctgcacttcgatagaactgcttgagtcccgaaatcaaaggcaagtaccacaatactttctttggaataagtttccagatctccttactcttgttggccttgtaccgtggcaaaccacagtccggacaagtgttcatgtgggcatactctttacgatacaaaatacaatcatttggacatgcatgaatcttttcatacttcaaccctattgaacttaaagttttcttcacctcatacgtcgactccaaaattttttttccatcggcaggatctctttaaaagtagatagaaatggactaaaacacttatcgcttactccattctttgcctttatgttataaaatttcactatggttgatagtcggcgtttttcacagccactaaataacgacctatctgcatctctaaccatgatatcaaatttttcaagattatgaataaactcttcttaaggtacatcaaccaattcttcagga

SEQ ID NO: 222661 - DNA, 2224 bp, Cannabis indica
aagtcatgctgaaatgacagttaaagtaaagatgctccacaaatttagcctgaaaattacacaatagacatgtattcatttgacaaatattgaatttcattagtcatctcttgtttgcaacctttgtagaacagctagccaaagtataaaacgatactttagaatggatagtctctcctaaacttgattagtccaatttactttctcataagtaggaagaatagccttataagcatggttgatggagtatgggtgagctaagaattgttgctcacaacaaaactgcttaattttgtccttcacaaccactatttgcctccaataccagctactctgcatgttggaagagtagttccatcaattttaacccttcaagtaaacattatgaacctatttcacccaaagattatcttgctttgaagaaatggcccacacatacttgtcaagagccgcttgattccaaattagtaacattctaaaactcaagccaccttctttccgagacttacaaagctttgcccaagatacataacctgaaccattatgttcttctttacctttccaaagaaaagctctacacatagcattaatttgcttcagtatcttcttcggtaataacatgatttgtgcccaataagaatgaatggatactaagattgagttgattaaagttactcttccagcaaagaaaatgttccttgagctccaaactctaatgtgagccaccattttttccaatatacacaagcattcaggagttaacagtctcttcgcacaaataagaatacccaggtactcaaaaggcatgcaactccttgtaaaccctgaagcatctagaactctttggacttcaacttcttccattccactacaataaattgcttacttggactcactaggttgtaaaaccaaagcagaagagaaaagttttaatcattggagcataaaatagatagacttgaaatcaccattgcagagcaacacatcatcagcaaagcataaatgattcaactgaaggccacaacacctctcttggtacttgaaaccatccatcctcctagctaaccttcatcataatccgagatagatactccatccccaataccaaaaaagcaaatggagacaccaggtcaccttgacaaggaccccttttagctccaaaaaaatctttacatttgcccattaattatcaaactgaactgagaagttcggatacaaatcatgatcaaatctataaaactctaaggaaaattgaaagcttgcaacatttcttcaatgaatccctattatgtggtatcataagctttcttcacatccaacttaatcatacaattaggcctctaattctttcttctataaaatcagacaaggtcttggcacaccattacattataagcaatgtatctatcatggataaaatcgctttgattttgagatatcaaatcattaaacacaagtctaagccgagagcagataagcgtttttttttttttttctttgagtgtagcgtaatggtattttacaatcatttaatagctttaatagcttcaaggtcctaggttcgaacccatgacctctccctttttcccatccctccctcaccactaagctagccttagtggctgagagcagataagcttagtcacaaccttgtaaataacattcactaacatttgcagggtatttattcttcaaaattaaaataatgatagttgaattgatttctttcaatattttacctgagtaaaggaaatttattcttattatttattgatctctttattatttattttaattatatataatttgtatataaaattaagaatatgtttctcatatttaataaaatgtataataaattataaattaattttttatgtacatataatataactaagtactatatataaaattataaatttctcataatatttaataataataataataaaaaaataataaaaaaaaacaacgggtacatgggttagacttgtaacctacttgtaaatgtacacaggttagacctgactcgtgagtattttaatgggttctttgtatagtacgggttcatgagtccggatccaaacgggtaacaagagtccgagttaaaccctaggcaaattttctagtcctacttttactaaattcgtattaatctctttaattcctaatactagtagttactatccgaaatttgtcctgttgtcatgtgatgtgatatatt

SEQ ID NO: 222662 - DNA, 2131 bp, Cannabis indica
taaccacggttttcctctgccaaaagtgatgattcttgatacataatgggtaggggctaatctaaaacaagtggtccctttctcttttttaatgctgacctcaaacccaaaatagagaagctatttatgcattcacatttagctctaacaatggttaccaaagtagacatttaaagttgtagaatttcacctggctgataggctctggcactcgatactttgcgagtgtcgatctcattccctattaaaaccaaaagatacaaagaaaatggatcaaaagagcttaatcatcacagcactaccaagaatggagcttaacgaaaaaaaacaaagtatcccattttcctacaaatagttttctttattctcatctctcaaaacaaagttaccatcatccaagaactcaaccaacggttctcgggtttgtaatttcgatgagtttgtagaccaaacaacaaggaactagatgagcccttgatcaagctacatcggtttgcgactcaaacaacaatttgaactgaaatgttgtaccaaattcatcgataacaatagtaggcaataaatctaataatggatcattataactaaggaaagctccaactatacaattgaaatgatgctatagcttgaaaatttacataaaaatttgtgatttgttgtatgaattctctatcgtgcctcgacagctgtcatgcttacattgcctgattggggccgattagaggaggaataatctgcatccaaagaatatgtgctattccaatatgctggcggtttgggttgaggcaacaacctctcaccactcaacattagaacgatagaagacatatcaggcctatcaataggcatttgttgcacacacaaaaggccaatgtggatgcaacgcaacgcttcttccatgttttcattcgaatattttagtaagcacttctcaataagcttaaattctttgccttccctcatcaaattccatgcctaacaaaatatttaataaaacataaataaatataccaatttcgctattaatgtgtcattaattaagtacttttcatatgtaaaacttaccaatccaatgagattgagactactatattcatcataaaaggatctacttttctcccacttactatttctaaaatcaacgcgccaaaactaaatacatcagattttattgaaaatagaccatcaaaggcatattctggcgccatataaccactgcatttacataataaatttttttagattatgaatattaaagaaactaggtttgttttttaaagatgacttactaagttcctactactttgcgtgtctttccttctatttggtctccaccaaaagttctagccaagctaaagtctgcaattttgggattcatgtctttatcaagtaacacattacttgctttaagatctcgatgtataattctcaatcttgaatcatcatgaagatagagaagccccttagcaattccacatacaatctagaagcacttaggccaatctaatagtattcttcgactttcatctgcaaatgttagtatttttctttaattcgaacaaaattggcaaattttacacaatagaacattacatgtgttaaaagaatggtgaaagagtgttaccaaaaatgaaatagtcaaggcttttgttggacatgtactcataaattgatagcttcatttctttatgagtacaataaccaaatatctttaagattctgatgttgaagcttagcaattagtttaattttattttgaactcattgactccttctccagaattcattgatagactcttcacagaaatttatgtacctccttccaaggtaccctattacatcacaatggtaatattcataatttgtaaaaagaaaagagaatgttatgaagcaagtaaatgagagagaatcttactctgtatacaggtccaaaaccgccctctccaagcttattagcctatgaaaaattattagtggcaatactaattgtatttatgttgaataatggaagctccatgtcatcatcttcactttgcttcctctcacaaaaattattagtggctgtgaagattaaaacgttggaaataataaaaaaaccctccttataaaatcttgtaaaaatagtgttcac

SEQ ID NO: 222663 - DNA, 1963 bp, Cannabis indica
acaaagaaaatgataagttaaccgattaatgataacaagagcattgctattaagcatcattttctcgacatgtcagcgttgtgattaattagtgatactctttaaaaattatcatattaaattatatagtactcgatacttagttggaccatatgttagacactactagtgcctttaacatttctctaataacaatagctagttaatcgaaataaaaataaaattaataagactacccgtatatgtcattaatatgttgtcaaatttcgtacatttttttcttgatttttgtacttcttttttcttctattatcttccacacgttaatatatagaaataattaataaaaacaatataaaaaaaataatcaatggatatacacatctacacatcttcttacaaagagttcttcataggtattttattattattatttttcttgaaagcgttcatcataggtatttagtttcttctagaaagaaaaaagtctctagaatatctcatttttctccaagtataaaaataaatgatcaattttttgttttaaaaaagtattaccatgtattcatatgagatttagcaattatttttataaacaaattgcttttctaaaaaattaaataaataaaattacatatttcttcaaatagttatgacttttataatttaaatttgatcaaaatttcaaatataactctaaaatagtttaaaaaattctaccataagttttcaaaatttaaggagatcacaactcagaagttttactatcttcaacttcatttttaattttttgaaaaataactaaaatagtattattaaaatttgaacttatttttatggtggtgtatgttgtatttaatgttattataaaatatcctaaataaatatatacataagcatgtacataattatagaaaaaattaaattaaaaaacattgtgcacactccattttaaaagctgcattgtagaaacacttaaaaattttgcacaaaactgggtggcccaaaccaaatgacaaagttgcactttatatatccttgtaaataaggattcatattccatgtgagactctttccacttcacacactctagaagactcttatattttgttaaaaaattcatcaaaattccaacaataactgtacataaaacctaagaacaagaaatatttatattaaattcggttagggcattattttttattattcaacaaaaacaaggttaaaatacatatatatatatatatatattatatgttatgtgtatataataaaaataggtcgatattattatatatgtggtagaattaaacttaaacatatatgagcgtagagaaaatcttgaccataataatatattaacatgagataattcaaagaagaagaagaacctttttgaaaaaagaagaagaagaagctatggtcgaattttgtatgttgcgtgcgtaggaagagaatttgacaattaaaagcgccggataatgttggtcatcccttacctcacgaagagcttttccatgatcattttattttataataatataataattaatttttggatttgtgttatctttaataattaattaatatgccattgacaagtatatatgtgaatgaaaaataatttttgtaaagtcggaataagattaaagtggatattgtttgtttccttccacaactactatatgccaaaatacaaaatacattttcgggatatttatgttgagatatattttaatattttaacaaaaaaaaaatctagttataatatatatcaatcaagcaaagggcagatgagttcaattcctcaattcaaattttggttggagataatatgaaatagaatgaaaaagaaataatttttaaactattcttttgtttaattgcattttaaagtattagaatgtcattccaatgaaatactctttctactattttagtgtggaatgactatttcattttg

SEQ ID NO: 222664 - DNA, 3068 bp, Cannabis indica
aagttttgatggagaaatgctaacagagtatttatagtgttttaacacttttataggatgttattgctataatttaatatcaagtctcattatttattccataaagatatgctaaaaatcttggtgctagcaatgctccttttgatgctatgttaaagatcaataataattttaattaactctaaagatatataatatttttcaaaaataaggattcgatatgtatgggttggattgtcatatatatattatgatcatattggggtttcatattcaattgtatcaaataatttttatcacgtgaattcattatatgaaattggaaggaattgatcattattagagaaaatcatccaacatcctaaatagttctccgaattaataagcccgttgaaaatgtaggataatttatcatgttgttttctctccttaaaaaaaaaaaaaaatcattaacccaattgtggggaaggagtcagagattcaattttattaattgtacgtgactatatgcacataaagaaaaatactaaaataccatggtgccttgtaagaggtaaagactagaattgtatgctagctagaaaacaatagagaaaaaaatgaaagagagacataatcttttaaaataaaaagcattaacccaattgagttagctcataactttatttataatcacgaagttattatagctaagaagaaataaaattacaataaaaataagtcagctatacactcactaaccaactaacaaacaattaattatttatgtaatagaaccctaaaatgttgttaacatctcccttaaactaaaaggtgttataagacatcatgaatttggacttcaaacatgtgaaccgattagtagtgagagatttggtacactacaagaaataaaacttttgccagcacacttttgcattggtgaaaggggttggcgaattggcattgacattaaaacttttgtcgatacaaaaacaaaaatactgcccaaaatgaaatgcgctagtaaaaattagacttttgtcagcagacatgcgcgctgggaaaaatattacttttactagtacattaatgtgctgacaaaagtctaacttttgtataaatacccaaaccacataaaattatccatctccatttcgtttgtttgatttattttcttagcttctactttattatattgagtttttgaaaatcttggtaaacaaaccccgatgagcttatttcaaggcatctacactttatgcaatttacacacatgattagactttgaggcatccataaaaccttcaagttgttgcatgagcatagtttcattcaatgtgccattgaggaagccattgcttaagttgtttggcaatccagttaagtgagacaactagtgtaagtgtaattctcacgatagcaagtttgacaatagggaaaaatatttccttatagtctatacttgatgtttgcaagtattctttagtaactagacttgactttaatctatccaaggtgccatctgtatcaaacttcactctatgaagccatttgtttccaatgactaggagtgtatggaaccaaagtccatgtgcctgccttcttaagagcagcaaattcttgttccatagatttgaaccattgcggatgttaaagagctactgaggtagaccttggttcggaaggtatgagggatttatgcaaggggtatttagttcccaagtaggctttggatttgacaatgccactgagagatcttgttctcatgccatgagttcgcgtttaagcaccagtattgtaggctgcagtagttcaacgagtattataggagggaaatttaatggtgggggtaggttcaataggtggacgttgctcatttgggaattgttcacttgtaagtaatgtaagtgttatttcttgagattcagtaacaaggggaatcttagggcaaaggtggagatgatgaggaagcacttggattatgtaggttctcatttaatgtgatatgtgtttcctcaagtaccatttggagggtagcatgaggaggtaacagagtagcagagttagtatgaactttaatagtagttgtttgaaaattagacgaggaaaataaatgagaaataaatacctctggtgctgcagatggagagctggcacggaaatgtgtttcattgaaagccacatttctagaaagcaagaaaaaggacgatactcacctcccaatcataatggacactttttattagaaaaccaaattatttttccacaaggtttttgaacttgattaagatattaacaattttatttttttgtgtcaaaggaaaaatccaacagtaacggctaaaataatcaagaaaacacatataatattaaaaaccatctttggatgttgagatgtaccctagagatccgtgtgaataagtgccataggttaagtagccctattgatggaactggaaaaggtagttaatttgtgactcttaccttgatggaaagctttgcaaagtttaagagtcttcatggaacaagtatatgtaatttgaggcaatagtttggttaaagtattatatgaagactgatcaagtttgcaataccaattatttatgtgactggtttagagacagaaaaactttactagaagaattagagaaaagacaaagatgtttttactaatatctttggtagtacaagatttaattgacttgtttgattgacaattacatgtgcaaatacaagactcattaaaattatttgaagttgtagttatgtaatgccttaatgctaagacacgctacagtaatttttcaattacagtgctatctttgctaattaaagaactttctcgaaaattgtgtcaataattaaaacttttatattgaatatttaactttaaaactttacataatcatttacaagttccgggatcccgtttctaaacttttatacaaaatacacaaagtacataactaggtcgcacaacgactacagaataacaaccccagatgtcttgagaccgaacactccaggtcgcgctgccataacatgtgcaacctcatcccagctcagactcactcctgttcagcttt

SEQ ID NO: 222665 - DNA, 2002 bp, Cannabis indica
tcactcacccgtcctctcttcactcaatctcttttctctctctttaaactcaaacacaaaagaaaacccacaaagctccataaccaccacactccggcgacccacctccggccaccgcctgacctcacgcgtcggacaaatcggaagcccaagtgtcggtgacctcaccccccaagcggcgccgctcctttcgtcgccgttagctcgggatcgcaagtcaaagtttggggtttcaaactttgaacggattttttggtcacctccggcgtccgtttgacgagacgttttcaccactaaactcagctcgtaaaggagaacaacctacactaaaccatttttcccggttcactattttttccggtgacatttttgtaactccgcccctttccggcgactttccggtgacatcatgtaccgttttgataaacagttggcatgggtgtgatctactcgtcgaagtggttgttttgatatacactacccttattttcggtgacgtttccggtacaccgatttttatcgccaccgattgttaatgtgcactgcttaggtgaggtttcggaaccccaaattttaaatgtacagttcatgtttaaaaaaaattaattaacaaaatttaatacagtaattgaaaaaataatagatgaggtactgttttgtcttacaaaacaaaatggttttttaatgttttcccttctccagtgaaagttagaaagactaataaaattagggcatctttttgaagggttgtacttactgttttgagtaaatgtaaagatgaattttatgcagaaatagtaattgatttttaataaacataatatattttagcaacagcagcagcaaaattcaatgtgagagaaaagaagaaaataaaaaaaaaaaaaaaacaagtggatgagggtatatatgcttttttgcaaatattattatgacaaaccattactttgtcagaaatatatcggaggcaatagaagtgtttgtatttatttttatttttgatagaaaattacaaatttaattattactaaatgtacatggttaatgaaaaggacctaacattgtaacttttatattggtacaaccagaagaactactctttctctatttatatatctatagtactcacatgggatgacccatgcattgtagtctacatcatctcattctcaaagtttgatcattagtagtaattttttatcttttttaccctaaaagctagctaaaacattattattattattattattattattattattattattattattattattattattattattattattattatctatgtttatatatatatatatatgatacatttataataagggtagcactcatatgaccatgtggtagcacatgtaatgtacaatattgtcattatcattaatttgagtcaagtatcatatatgtagtcttatagtctttttgtattttatttatttatttatttatatatttttatagccattattgagcaaagataataattattttggaggtaaatttgtatgtgtaaactggccctagaacacttcttgcttttggtataattaaatttgtaatgccttttgacctattaaattgccttttatttaaaattttcatttcactgccctttataaattagtggcatgattatcaattaagtacatcaaaaaaatatgtaattgtaaactctactatttttttatgttatcttagtttggggtatatctacacatataatctactttacaatataatgtagctgtaaattaatctcaacaaactattatatacatatatcatatatgagttttaaatcacaacaaaatttatgactttatataataggttgtgaataaaactactttgataacacaaaggtaactaaactacgtgctagctcgtcactaaataataacttcttgtattgtataaattgtgcaatcgtcaagttagattatttatttatttgataaagaaaagaagttagattgtttaa

SEQ ID NO: 222666 - DNA, 3018 bp, Cannabis indica
taggttaattttaaatttaccaagataattctaaattcaacttattcagtttacatgctttcggtttcaaaaacagtaaataaataaatacataggataatcttaatatattatgtttctattatgagatgtgtgataatttaaactctgtgagatttttatatatgacatgttattcactaatgcataggcatgttattaatcaattattaatgaatatttatttaaaccaataaataaacaatgataatgaactaggtataaattcagtatttttaattttagaacctttaaaattaaaaactaaattacaaaacaaatttccatagcagtaatgacatttttttataatttttgtaggattgtcgtaagctttgaatttttaattaaaataattttaattaattataactaaattaatatttaatttaatacaccttttaaactcttttaatttaatgaaaataattttggtttattaattcttaaataaaccctttatttaagacaaattaattatctataagttttgtcttaaaataataatatttattatttaatttaggttaggataacttctgtgttaatttagttttaagttttaaattttaaacctagaatcaattatatttatttaattcaaatgtaaatttaaaaaagcatatatcccacaaactctcttattttagtttaattattaaaaataataaaagtatattttattatttgtaaattaataattagaatagttattagttaaatttagaattcaaataataaccttgatatttatttaaaattcaaatataaataatatatccctaaaataatttcaattattaatattaaataattaataaataatttatagtgtatatactatacatacactatatattatatatacacattacagacataatatatacatatatactatatacaaaatacaatgtatatatacacttagggttcaagtaaacaaggaggaccgtccaccttggcctggccatggccggtgactctggtgagcaccttggccacggtcgaccaccttagagtccagcagcaggcagacgagaaggcatgggtcaggccttacccagtcgggtcttcgtgcatgggggacatctcatgtccatgcatgtgcatgcatacgacttctcgactcataaattgaggagccaaaaggtcttgtggccatcgactagtggttagaccaccatgccagcccataatatattcaatgtgaatcgtaggggatttaatttccttagtgtgattcgcctgcatcgacctgggcagaggggcacaatacccaaggtcttgcatggcctgggttcctctatgaacccgagctcacttgcttatgatatttttgatatgcatggccgggattcaagttgagctcacatgctatgaaaattacaaccaataaaaaaatccctatgtctcatattggcttacattatttttaaaaaaatagtacgacaaaacctacacctaattaaacaatataattaacgatttatcaccactcatacattcacaataatattaccatccattcacatacatatcacatatatttatatatataaatacaaaaatcccacacatatttaatgtatacacattcatagaagtgctctcgataccaattgttagtttcgtgttactaaattaggtacgcagtgaaagagtttcgtattatctgattatcattgtaccatagcctataggatctccatatgtgtgtacattaaataaaataataataaaaaaaataagtttagagtatacctcttgaagcctatcagggtatcctcaaaacttctcatgagttgtatcccttaatctagttgatgaggaatatgagatttggactcaaaccagtatatttcaaattgatctatcacatacaaggaatagtgtgggccattgtgataaaaagtataacctttgttcttattgtgttctcaacacatgagtaagaacaactgagagaaaaatcaatttcctttctgtgtaaagtgttgttttaatttcccaaattaggctcctatttatattagttaaatccctttaattaaatcatcatttaattgtttaaataaataaatatccatagtcgtattttgttattgatatttatgagtgaatctcttaactacttgacagaatatctccacagtcttgaaatatctttaatcacttttcaaattagatatttacctaattgaattaattaagtaattaattaaccaaaaaagataaattcaatagggacatgaacaatcataggcacccaccactgtctttaggacaaggttggtgtcttttatcctgacgacttttgtcttgacaaatcttatctcgacaaaatttatcttaagaattttttccctatttaattaatgtgaatttttttttatttattacaaaaactaaataattactatttatccaattcaaaatagatttgctttgaactccttatacaaatctttatccctacccttaatagtattttaaggtggtgattagggatcatggacctataattctaagctccaataaactagattatttattgagtctcatcaacaaaataatctcttgtttattaattccatgattactccactataaatatagaattgcactcttagtcattatagaattatatttactgagtttaactctattaatataatcaattctagtgattagccctccatgtgttggttcataattagttttggtcaatataatattttgcctttctcattagttatttgcctttagttccaataattcactactggaagtataattcaggatcctatctgaatttgtacacaacatttcagttccagaattaacacttaaagggaaccaatattcgatccgttaggaaaattaagattccataattgtacgtcatgtttgcaggaatccatgttattagattcccaaaacataagttgtaagaatttgtgggaaattattttacca

SEQ ID NO: 222667 - DNA, 2082 bp, Cannabis indica
ccaaataatgaatgcttaaaatatatggaaagtctttacttcagatttttttccctttattaatatattgtccaagataaaatcaaattcgatctttattaagagtccattttgtagcatataaatttgattaatgacttaattttaaattttggataaaatatttttgaatgaacttgcttatacgtaatgtataaacatataatatgttctgtctcgtgtttcatgttctaacctcggcacaaattattaaatatgttaatatcaatcaaacattattaggtattatatgaatacaaggccccattcacaatcttgtgtggctctaattattcctcaattcattgtctatcaattaatatataatctttattgttgttcagaaaaaatgatcattattacattaaaaaaatcaaacaatatcaaaaccatagtgttatttattttatttctatatgcaaccaaatcgctagcaataatggcattaatgatcataattccgcactaatggcattatttattttattcatattaatttatgataaggtccctcattagtagtaatgaccattgtacacgaatacaacactaaatgatcagatcatttgtccaattaattctactaaatattcaatttacctttaaaaataatgttaccgatttaattgaatgaacacaaataatataatactaataagtactgattattttatttatttacacaagcaaaaggaagaatgattatctccattaatataaaaataataattacgtaaatcgaaatacataacacgtggataatatcaatttattaaaaaaatgctaattagctatacatttgaaaaatattaaggtatccatcatatatatatgaaatatattattattagtgtaaattaatattcagttccatatagtttgatttaataaataatataagaaactattaataattaatggtactcttcattagtaagatattgaatactgtataatgtctaataataatacttgtatatatatggcatggattagaatgtaaataaaaaagaaatagacataccaaatcctctcttattattatcttcttgtatatttatcacatgtaaaaattgaattgtcacgtttgaattagtggataattaactagtgttacaaagaaagaaatgtggtgaagaagtgacaaacatattaatattattacataattacattttcaagtggtaaaaactgggggtagaattttagatcttttccccttaacaggagtgtttgtatcaggaaaaagacctttacaattatcctgatcatgatcaacatcctcaatttgacccatttcagttacataaatgggataggaaacgaggtggactccatccatgtccactacttcatcgccactgtaaatgttccacatttcctccccaatcctacgcattttcaaaacgcattccaagctgtgcggctctaatttaaggatgtcttcgtttgagcgccccgagcccacgtgctcgtaccataacgatgcacggaaggcacgaatgtctgtcgatcgaggatcttgttggtagcaacctatggcgatctctgtgtctctttccccatccatcgatcgctggtttatgtttgcagagcctatgaggatgtactcgtcatccactgaaaatcaaaacagagtttattgaattaaataataagttcttttcacttcaattctaaacttgtacataggatatgtgcaaaatttgtacacacctattcagaatgcttttaattgaacattaattaattaattaattaatacaagttatcaaatgataactaaaattaataatttaatttaattaaattaaattattttcaatttgtgtggctaatatttatttaacactgttatttgcaagcatttatctttggtacaatgtgtatacttttaggaaaatctgatttcaaaaaaatgaaaaaaaaaaaaaaatagaaggaaaaacagtataaagtaattaactggttactaactttggttacaataaaggtaggagtaactggtaaccctaaactcttttccaacattttaaacttttt

SEQ ID NO: 222668 - DNA, 1834 bp, Cannabis indica
ctcgtcctcgagtaagactaacaactaaaaacaacatgacctaaatgaaacaagtgaatcaagagaaacatgaacaacttccaagtaagataaataacatggttatgaacaaaatttttacttataataattcctctctgtttctcctcttggattatacttgcataagccttgtttacatttgaaagaggatcttggagcaagatttgagatctaacactaaggtaagactcgtgaaggccaataaggaattcaagcactttgtttttatcttgatactcccagatagttttcattgcaccataggtacaaacaggttgtggcttgtattcttgtagcaaatcctataattccttgagcttagtatcgtatgaagtgacatcactggatccctgagttaatgtctgcatcgatctcttcacttcgaaaaccctgcgcattcttttgatggaatctttcctacaaatcagaccaaatgcaagaagcatcctccatgtacattatactatcagctatactaggagaaatagagtttagaatccatgatattaccaaactattgcatcgaatccacaagtcatagttttcatcgtcgtcatcaggagctagaagtcttccatcaacgaacttgattttgttcctcgccaataatgcaatcatcatcgatcttcaccacgagctgaaattatctacaccagtgaggattttgggtcttaaagatgaagaagcattatcaacattagagagaaaatatggacttcgtggatcattggcaggaaatctattattttcttcaagaactgtaaattgattcaaatcttcagcaacttcattgttcctgttgcgagtttgagttcttcctcctcgtgccatggaaaggagaacaaaaatagaaagagaggaggatgaggagaagaagcagaaggaaggagctcaataattagtcagctctcataccattttagttgtagaaagagaaaaacaaagaatgaaatgaatggaaacaatttagttgtagaaagagagaaacaaagaatgaaatgaatggaaacaattcattgatcaatggagttcaatacacaatgttcttatataaagttcagacaactcaaaacagaaactaactctaacaaacttccaaactaattcacagtatacactacaccttaccaatcttgatagttctcgactaaaaatcaacaaagaactaaactaattaaagacaaacaaatactagcaagtcttacttcaatttataatagactaatgctactcacaagattgaattgtggactcatttttttgaggtaaactcttttaaatcaaactctttctctcacgaaaaaatctatcatctccaaccattgtcttcggttctcaactcgacgagatctaaaagagaattggttgataattgaaaaagcaattgatgagaatgaaagggagagtgccacgtggtttaatattctttgataagtataaatatgaaagaaaatatttaagttaatgattgttataatggatccaagaaagaaaaaaattagtatttccattctatttcattaaaattacaatatgtgtataatatgagaagtctataaagggatcaatatatatagagaacgctccttatatttcacacttctatatactaagtagtgttatataacaaaaaagtcttttgtgtttttttaaagcaaagctaggatatagataccatatgacatgatggacagttattatatattaatatataaggggagagagatcgaaaagactttctattaatttagtgaaataataattaagatggaataatttgcctgcttatata

SEQ ID NO: 222669 - DNA, 1288 bp, Cannabis indica
gttgtttgaatttatttatttgtcatttttttttggttacttggtcctctatcaatctattgtgtatttttttttattattatttgcttgtaatattaaatttattggatatgcttaactattgcaaagcaagttttttttgactgctgattgacattttcattcagctttgacacattttgcttaattagttaacattctaattaaaatcagtggaacataaaaaaaaatatatttaaaagcttataaggttccctctaattttatctttcacccttaagtaattttaataaagggttaattaaattttttgtccataaactttgacctgtacacatcaggtccttcgaactttgatatatgtactaaattgaaatcgtgtcttttaaattttaatatattctaaatcctgctcttagaactttcatccactttaaacgtctttcagtaaaatgaaacgaagtccttaaatcgaataatctctatagttcgagagaatttttatcaccttaaaaaatttagacacacaatttaatacattatcaaagtttaagacaaatgctttattatttagtaggtttgtgataaacataagaaatattaaaattcaaaatatttatttatttgtattatttttttgtgtcattaaattaaaattataagtaattatccacattttgtcagcccaaataataaatgctaaatatattattatatatcggtaggtacgtaaataaaaaattttgttccgtcagacaatcctggttatacaattgtaatttgttaaggtgggtgttgttcgacattacgaatactgtttttaacaaatatgtgtaactgtattttagttatatataatgaaaattgtaatttactagtattagcattattgataaaaaatgtttaaaattagttcacgttcatgttaatttacacaaatatatatttataaatttcataatttatactgtttgagattattgtggacattgtcccacattgaataaatggtagagaattgagtcatatataagaacatggactactccactcatagccaattggttttgagatggaaccaattctcaatatggtatcagagccatatcccttgcgagcaagtcatcctatccgatccgcacttatacagatagtgactatgtccactcagccaattgattttgagatgtgtttctgaagaaaaaaacaaaattgcatatgaaattcctaatcagaataaaataatccagtttatatctaattaactaaacatctaattatgtttatt

SEQ ID NO: 222670 - DNA, 2053 bp, Cannabis indica
tattaaaataaaataagtaaaacccgacattaaatttaactaatagcaatattacaactcacaaaaatattaggcactataaatatcttttagtatttttgttaataaataatgttcaatcatatttataataagtaaattacaaaatattgtaccacaaattcacttaatcacatcgtagacagtaaattataaaatttaaaaataataacaaaattatagatcaaaaatagtttagataatttaacacaaagataaatacgttttaagatttaggacacatgagttttattttcttgtatttgtatttctttcttattagggtgcatgatattatttttaatttcattttattttttataaataaccatatttctttgatgataatcaaaacttgcattggtcatgatataatgagtaatttcttataattaactcattttctgtttattcaaaagataaaataataataacaaaaaaaaaactcttgtatccatttactctcacaacaactaatataaatagctacaaaggttaaataaaatagctaagagttaaaaaaatatctacaaaatataactattagataagctaaaaaatttaccttataaatagtacttaattatattttttttattctttttataatataatttttgttacttgtaagttgtaagtgtatattataacagtatattatgttagctagatggtattatattaatattatttaatataatagtatgtatatggtatcgacttgtattaataagttgtgtaaaattaaattacatttaccatagaccttgactcgaactctatccctagacttagactctggccccaagtttgggtctaggttcgaggtcggggtttacgtctaaggtctagtctcgaaatcagggttggtgaccccagttcaggaccaagtccaggtttgggtcagttcaaggtccgagttcaggaccctgatccaagtctgggaccctggtttgtgtcccaatctagtgtccaggtctaggcccgagtccatattcagggtcgagatccgagttagggtctaggttcgaatgggtcttggtatagtgtttgagtgcgagtctaagttcgaacttggattcgggtcctgtaaacaactccaaaccctttctaagtattataatacaagttaatatgaatcattttgttatgtattaaataatacgattcacattatattaaattttattatcgtaataatactgtataaaatttaactaaacatatttgttatttactgcaatacatgtcaaactaaccgtacatcattattttaaacaataagtcaaaacaatttcgaagaaggctaaattgttaggtgatcatttaattggttttttttttcttaagcaattatatgtattgggttaatgggttaggtactaagctaattattttataaatatattaatggctcgatgacatgtggatacttaaaaatcatactttaaggttgtatatttttattgatggaatttgtccaaagacattaaagtaaaatattaataaaatttggaaggatacataaaatatgattcaaaaaattattatctattattaacagttgaaatatttaatatttttgaaaatatttacgtcgtaactatttaaaattttatatttaaatttaataagtttttagcgacaaaattattaaaatagtctaaatttttagaggcagttttatttcacgtggttcgcaaccgataagaattttgcacgttatgatttgacaaaacatgtcattcagttagacgatgagctatcctagttcgagaaggttctaaccgattatagatttatgcacgattaattcatgaataattttggtcactacgtaaaaaaaaattataattctagtactctaaagtattatgctctattatgtagtaaatagaataacacatgttgttatttaattaggtcagattataaatatttacaagctaatacaattaagtagtgacacattttgtcactcatagtcacaactaaccaacaaagactaacaaaa

SEQ ID NO: 222671 - DNA, 4575 bp, Cannabis indica
taacaactatttcgtctgattgaaaccttcgtctgatgcaacgttcgactaaccacctggcaaccttcgtctcattgaaactttcgtctgatgcaaccttcgaccaacaacccagcaactttcgtctgattgaaatcttcgtctgatgcaatattcaaccaaccacccagcaaccttcgtctgattgaaatcttcgtctgatgcaacattcgaccaaccacccagcaaccattgtctaattgtgtaagtgataatgtaagaggtattttggtaattaaaagtatataaaatgtataaatgttgtccacaccttatagaaatatttttataaataaagtgacaatttgtattttctatgtaataatttcttttaacaaaattcttttctaatttaactagatttatttaaatttaattttttttttgtttggctaactaatatatttaagtacatttcactatccttagttttttgaagtgagttccaacttggagcaacttcacaacaacataacatagattttgatcatataagaagggacccacaatcaaaagatcggacggttgataggtgtgtttgagtacatcctagggtttacccaaccctaacctctaatattaactatcacacctcacacaatctcaaccctcttttctctttcaactcttctctctctctctctctttctctctctatcttaccgtgccgccgtctattccggcggccactgctttctgccgtcggtttctccgaccatttatctcttttcatccttccctctcctctaatctatcccttaaccagaaaattaaaaattaaaaaattaaaaaaaagacaaaaacaaaagagagagattttatcaaacagtttgtgtgtgtgtgtttttttttttctttatctagggttttatctcggatctttgtcttgagttcttcctagggttttgattctgaataatttgaggagagggaagaaaaaaaaaagaaaaaatttgaaaaatttatagaaaaaaaagagtggaagtttgtgatggcccaagttcaatctcagcctcagaatgctgttcccggagctaacgctggtggtgcggccaacggtgggaacaaccagtttgtgactacgtcgctctatgttggagatcttgaccagagtgtcaccgatccacagctctatgatctgtttaatcagatgggtcaggtggtttcagttagggtttgtagggacttgaccacccgaagatcacttggttatggatatgttaattatagcaatcctcaagatggttagtacttttttctttattattgttcttattttaggtataaaaatcacttattgtgtgataaagctttattaatgggttatgggttatattatatgaatggactatggattcactgattgaagaaaagtgaggttttttcttctgatgttatgatgaagaaaatatataggttaagttatctatctatttgtttagtttgttggggggcaaaaaagagggagattaaggagttcaacttgaaatttggtttggttgcatagcttgcagtgatgctttacatgagtgtccttaattagttattctgtggtgttagtgagatggacaagggaatggttgttgcagtttatttgggtggttatggtaaagataggaatgcttctattaagcagtttaatagtgcttgtggcactgaaatttacagttacttaatatcgagtgcgttgtatctaggagaagtgaattttttacacattttttccttttataaacaataatctaaaatagagagatggaaagaactataaattggattgctatcaaaacaacgaagtatgaatcattaatctaatgaacatttttttgtacgaaaaaaaaatagggaagcttttcctatttggcattggctagcctatattcttagtctgttaagtttttggtagtcatttaggcagcttctgtactggatgagatagctatgaatttattattagcatttgtgatatgaaatctaaacaatctgcacaatgttaacatatcgagcaaaattttgttgcgaatatatcgatggagggaatcaattagacttctgctatggaaaataagtttgttatatcttgttctcatcatcctttgtagctctttcataatttctcttacacatttagttgaattcatgacagctgcaagggctttggaattgctgaatttttcttctttaaacggaaggccaattagggttatgtactctcaccgtgatcctagtattcgcaaaagtggggctggcaatatatttattaaggtatatgtccattgtctatttttgtattttgctgccactttaaaacatcacaactatctgtttttgcttacttcatattttgagtaatgatatgttcaccatcaatattgcacagtgataatttttttcttaacaaaccatttatttcatatgagactcactaaaacagtgccacaatagtgcatatattgtttttgtgcgtattttaggtgcacataccattgctcattttattttctcttgtcgagactaacttttcttctggctcaaaactttcagaatttagacaagggcattgatcacaaagcacttcatgaaacattttcagcatttgggaacatcctttcttgcaaggtagctacagacccaactggacaatcgaagggctatggatttgttcagttcgacactgaggaagctgcccaaaaggctatagagaagttgaatggaatgcttttgaatgataagcaagtctttgtggggcccttccttcgcaagcaggaaagagaaggttcatctgataagtcgaagttcaacaatgtttttgtaaagaatctatctgaatcaacaaatgaggatgacttgaatagaatttttggtgagtttggagaaattactagcgtagtggtgatgagggatgcagatgggaaatcaaggtgctttgggtttgtcaactttgagaatgtagaggatgctatgagggctgttgaggctttgaatgggaagaaaattgatgataaggagtggtatgttggtaaagcccagaaaaaatctgaaagggaagttgaattgaaagtcaaatttgaacagagtatgaaagaggcatctgacaaatatcaaggtgcaaacctgtatgttaaaaatttagatgatactgtcagtgatgaaaaacttaaggagctattctcccaattcggtacaattacctcatgcaaggttggtcatcgcatctgttttatgaagccttcacattctgatttgttaagtagatttcataacaatttttcttcttgagatgcggcaggttatgcgagacccaaatggagtaagcaggggatcagggtttgttgcattctctacacctgaagaagcatctcgagcagtaagttaataattccggtgtaaaaaaaaaaatggacacgtactatcataataacgtttcattcctgccaagataacaaaattatataataccaatttctaccttgttgctagctcttggagatgaatggaaagatgattgttagcaaacctctctatgttgcgcttgcacaacgaaaggaagataggagagctaggttgcaggtattttcagtttttcccttcctctctctttcctgttttgatattttattattatttaaacattgctggttttgtggaaactgacgggtgggttattgtttattgtacaggctcaattttctcagatgcgacctgttgctattgcaccttcagttgctcctcgtatgcctatgtaccctcctggcggcccaggtattggacaacaaatattctacggtcaaggcccacctgctatcattccttctcaggtgacatttcagtggactttcttcttttttgtttttttcattgctgctattagtttggttggtattcttacattggtttcttttctttaaatatagcctggatttgggtatcaacagcaacttgttcctggtatgaggcctggtggggcaacaatgccaaatttctttatgccaatggttcagcaaggacagcaagggcagcgccctggtggcagacgtggtggagctgtccagcaaaaccagcaacctgtttcattaatgcaacaacaggtttgttgtgctgtcttgcttttcatttctacctgtatgaaatgtttccatattttcatcttgaagatttacttttaataacagatgcttccaagagggcgggtttatcgttaccctccaggccgtggcctgcctgatgtcccaatgcctggccccggtgttgctggaggaatgttttctgttccatttgacatgggtagtggtgtgccaatgcgtgatagtacagctctttctcagccaattccaattggggcattggctactgcccttgcaaatgcttcaccagagcagcaaagaactgtaagccattgcttgcttttgcatgttgaataatttttgttacttttttgatgcacctcaattcccttttcctctgtatcattctagtgagatttaactaaatttttctcggtcgaaatctgtagatgctgggcgagaatctttaccc

SEQ ID NO: 222672 - DNA, 2602 bp, Cannabis indica
ctcaatatccctggaatcacacctcttctattctccattttagtgccaagcagctgcttataatagtcaataaaagcatcttgcattagctggggtcatgaactctctccccatcttgttgttcaatggataaaattctattctgccttagtctttgccttatacttgcatgaaacaatgatgtattgctatctccatctcggacccatgccacctttgccttttgctgtaaaaaagaattgtagtctttgtgcaccttaacatatgtctcccgagcctccttttcatgcctcatccaatctgactttggcttcatggacagcccccaacagatcagaaaaaccgtccctattgatgtctttcagaacggttttcaaacttttcaatttcaccaccacctgaaacatttttgacccatttacttgccttgaccaaatgtccaacaaactactttcaaacttagaatgagacttccaaattcgaaagtatttaaaagactttaggccactagcaacagtcgaatataaggagactatagccggtgagtggttgaacaacccctcattaagaaagacaacttcagcattctcatacttattcaaccagccttgattagctaacactctatcaatcttggaaaaaatccgatcttctccatgttgtttgtttgtccatgtgaaaaaattgtcgttgctctttatgtcttccaagttacagtaagtaacacattgcaagaaatccccattaggccaactcgaaacccgaagccctattctttcttccttagctaaaatctcattgaaatctcccgtaagacaccatctttcacttgtattcagttcacaaatatccctccaaagccttttcctttctaacctgctatttgaggcatataccacagtaacaaggctatcaaacataccatccattattgatattttaggtgcataaattggcttgtgcacctaataatatccacaatgaatcttaaaggattccatgctattacaatcttccctccagtatgccacacaatattggatgagaaacaccacccctcaaatacattagactacaagacacctaggttaggagcttgacttgactcttgtctcaagaagcccaacaaaatcaaccttttggtgactaataaattgcttaattagtctttgtttttgttgattgttggctcctcggacattccaacataagagtttatccattggagagagagggatctctccccctccagtattgccctcattctcagcatcttcagcctcttttcctgccaatacttgctgttccagatcagagtctaaggcttggaaagtgttttccacccttagagcctctgctgtgctagactgctctttccccttagtacctcttgtaactttaacaaagccatcctcatccactacctgttttggcctatgatcttcctttactacccaattcttctccactttggcattcttcttacaatcatcagtcaaatgtcccaggtcgtagcagttattacaagcaatcggtttccattcatacttgattcccacatgtgtgttgtttccatgctcattctcaaattctaacatatcgggaaattgttgatctatcctaacttcgataagaactttaggatagttcaacctttccctctcttttgtaacattatccaccataatcggctcccctacttgaccgactattttgaacaaagatctttgtccccaatatttcagatccaagtcttcaagttgaacccatattggaaccttttttacatcttctttcttaaaattcacatttgggtcccatgccttcatgatgacaggccttcggttaaagaatatgtagcccccttccagaatctgatccctatcttccaaagaattgaatctgatgatgaaaattccatatgacaacatcttcaccctatctatcttatccttccataccctgtttacaaatccctccagtacatgtaatcgaggattcacaccaagcacgtaacatacgatggaagcttgctagaaattaatttcctcctcaatatcatcaagcgtaattttcactttgtttgtattcacagactgtttaaaagaaggttccaaatttcgcacaataccagatctcaaaacaggagggattggggatttaccttgtttcacatcactgttacattggttgttggcctgcagaaactagataaagtccttctaaacgtcctcctgcctctgtataagctttagggatgatcttggagacagaggtttctagaataaatccacaagagaaggatcgtcttcgttgtctcctcctcctccgagacctcaagcggttcaactctggtttcctcacatcgagccccagtcaaaatagcttcctgagtcgattgagattgtttcttctttgatttcttgcccacagatctagccttcccttgaatcttggacctcgttttagccatagccaccagcctgaagctgcgagagcaaaacacgagggaaaagctaaccagtgctctttttgatattatatatatatatttatatatatacaatgataaaaaaaaattaattagagagagagagagaga

SEQ ID NO: 222673 - DNA, 1605 bp, Cannabis indica
gctaaatgtcgttgaatcacaatatcattaaatctcgctaaatcacaatatcgttaaatatcgttaaatcacaacattgttaaatgtcgctaaatcacattgctaaaaaatatcgctaaatgtcattaaatcagaatcaaattttcataatgattagcgatgtttagcggcacgtttgcaatttttagtttcatattgaaaaatacatcgttaaaatcattcttaaatatgcaaaatattgctaaacatcgctaattatcgttaaccttcatccctaactttagacttggtctatcattacaaatatatcgttacatatcacaaaaattagaaaactagaaaaaaaaaacgcaaaaaatcaacgaaacacaaaaaccaatgtgtagatttgttagaacaagaaaacgagaggtgcatggtggtgagcagagcacgttggtgagcgttgtgctgtggtgagtttaggtgttctttcatgagagagagaatagagagaatgagaggaagaggagagagaatggggaaattgaaatgagagcgatatttttgagtttaagtaaaataatagcatatttttgttatgggttaaatgggtagattagtttgggttccatgctttacatttaaaaatgggaacccaaatttcccttctagaatatgtcatttcacaaggtaattcttttgatccttgggttctaattgtctgctagggcgatcaggtctattatgtcatgtaccttcttgtataatttcaaatatttctctttaactattaaaaatatgaaggtttgaaaaggttttcaatgtgatcatatttaaatgcttcaggtcaatggtggtagtgctgagaggagtggattgggggatttatttgattcaaacacccaccacctaacaacttcccatggcagtttccttaagcactgggattggttgattgacttagaagctaaagagatacaggtgcaactttcgagatcatgatatgcaatactgtaccaatagctctgtacacaaaatttcaatgaagtcatttgttttacactttatctattttttcagctttctaaaaacaaaatctggtgatcacataatttgaggagtggtgatgatgctcgtcttttttctattgctcttcataatgaacttccacattgggagattaagaaagataacagatttatcttcgtttcatatgtcacagtgttccttctgttggtaagaagttatctgattgggattctctgaatgacccatcttctctggtaaaagattcgttgcactttgaaaagtggtacgagtatttacaatgtaaattcttaataaaagtgcacattaaattgtttaacataggtgtactaattcaaggctcttaatgtagagtcaccgatcatactctgcacataaatatgtatgtacgtacacatacacgcatgcatataattatatgatttagcagacatgtttgctcactatgcattttttggacataaacttatgatgccagtgtacatgtctatgtgaaatcgtcatttataaatccttggggaattactccatatactatttttaataacttttttttcaaatttattgtttgggttt

SEQ ID NO: 222674 - DNA, 2168 bp, Cannabis indica
agaaaaatggtaactcttgaactgtaaggtgacgacccattcgtgtttgtgggcaaggtttaaggattccgaatttcattaaccatggcatttaaggcagaaggtttaatataggataaatgtattaacctttgagttagtgtgacaaatatcgcaaagggaacattagtgggactgagacacaattttgtggtccaagggtttctagatgccttttcagaatgccctttaaggttagtgataaagtgggaaattgattttgaattgaaatggtaatgggaaagaaacttgtatctagagttctgaattggacggtaattgtagaattgaaagtggtgaagattccattgtaggaaatgttagggttgaaattgctagtttgagtaattcaatctggagtatgccaactttatttgtgaagaataagtatcctttgtccaggataaatgctatgttgaacaactttaaggggggattatcttctctaggattggtcttcgatctagttattaccaattgaagattcgaaaggaggatattcctaaaatagttttttttcttttctttcgtgctggtgacttcatgaatgactttattaatggtatcctgatttcttccaacttaagaaggcatttgagaggtatttttggatggtgtggtaatgttttggaagtcaaagcttcatactaaacataagaaacgcgagttttgctgatcccaactgtgcaatgaaggttagaggttttctgaaactaacagaatgctatggaatgtttgttaagagttgtctacgcccttagtggggtcaaatcgaaagaacaaaaatagaggttaaccattttactagtgctaacattgctagtcagtaaggagaaattttgattggatgaaatacttctaaatgaggattagatggtattttgatacagtccaggaaagttattgcatgttcttctaagagattgagaaagtgtgagagatagtagtccagttatgatattgaattgatagtggtggcttttaccttgggagtttggtacttttacttgtttggcggaactataaagtttatatgaatcataggagacttaacattttatcatttagaaagaatttaattagaaggcaacgacgatggttagaggtgattgaagattataatagtatgattccctatctttctggggagagaattagtagtggatactttaatctaaaaaggcctaggacaagtttgtaaaacaaaaaaaatctcaccaaagtttgctaagaatgccaccagaaaagagattgactttatgaagggagaacttgttaatgttacattgtagtttaaactgttgaaaagaaataaagtggccaagcaaggtgactccgaactttaaaagtacaaggaaaggtttgaaatcggatgaataaaggaccttttgaatttgtttaaaggaattttacaatatcaaaacaaggttggtgtatcagtcatataagggtattgaatataaggttttaaatgaatttcatactacaccatactcattctacttgggagtaactaagttatataagatcagtacagtttctttatcagagtgaaatgtgtttgtggcagattggtgtgctaatctatttgtcaagggaatagttcaaccccgtggtgctccgatagtagttatctcagattgagaattaaagtttacattcaaatgctgaatgagcctgtaacaagcaagtgtaatagatggaagagctatgctgatccaagtatagagatattaaattcgatgtagggaattttatcgttcttcaggtgattctgatgaaaggaaaattcataaattggttagaaaagggagttaagtcccaggataatcgatccgtttgagtttctggaaagggtaggttgggtagcttattagctagccatactccctgttttatttggaacttacatgtactcaatgttttagaagtatgaggtaaaaacgatccatatacagagttacaatgatatcgaatttcaaacagacttgtcatgaggggaacaatcggtacaaattttgaacagaaaagagagagagttgtggagcaaagactatgtcgctagttatagtgttgtgaaagaacaataagattgaaaggcaatttaaaggttaaagtcccagttgcgg

SEQ ID NO: 222675 - DNA, 2367 bp, Cannabis indica
ccggagggggtctctttccagcgataagggtacccccattccctcctttcatggtagggttcagttttggggctaactgctggatttttctttttcaaaatcttactattctcatgacatgtctgttcccacgactggagcgaaatcctcaagtagaggatctactaccctggccaccttggaagtgtgatgaagggacccgtagtctaggagaagtacacttgccgatccaacagctgggaggcggttgagttgcactcaactctaacttgcgcccaccaactggagaagaatgtcactatggccaagatcaagccttctgctttcagagtctttcaccgtcttcctagagacgaggagacgcccaaccataattactgtggcttcggagcctggagccagactcacctcatgtccggggcaatgctaccgctccaggattacttcatcaattgtttagtttttgttggccttgtgccttaccaactcatcccccaagcatatcgcctgctttcaggcttatttctcttttatgttgccagagtctgggcttcgcctagcccggctaaaatttgtatttttatgaacttgtatttgtccccaagaaaggagacaaacttagacggtttttcacactctgggcccatcctgctaatgagggtctggttccctttaacttccagaaaaatgttaaggaataccgtcaccgattttttttcttgttcaacttgcaagccattgagtgcccagagctgcttactaagtgggtcagggtaccgccgatgcaccgcactgctcccacacagcttttccttcaacacaccaaggtcttttccacgtacgacaaggatgggttgaattttggggacttggtcacgactgcacactgcaggagggccaaattaatcacagagagctagttagtggatgatttcaatttatccaaggttatgttcccaacattcgctctcccgactctgagaaggcgcttcaggcggacatcattgcttccgcggaggaccggtgtaagaagtacctcttcaggagggaacaagagttggcttacatcaaagcccaagctgatgcctggagggttcttcggattgaggccaaaaaagagcaggcgacctcccggcccaagcttccgttctcagttcccaacactggggctcctgatgccagtacctccagatctggtaagtccccactaattgttgatcacgtctcttctgttcgagattattttggctgtaggctagtagagtttgatgaatgtctccataggtttaagacgcccccttttcgatggggcaatcatgccaagggtttttatttttccaacctaggtcactttttaggccggtcccggatggggtccggtcctcccgcacctatccctttggatcattcggcctattaatcttccagctggttcctcccctcggacagctttcttggggacgacgacaccaaccttttaatgcatgctttcgctagggcagaattagatcgtcagggtaggattagttttattgctttgttcttccatgcatgacttctcgataatgttctaacgcccttatctgtttgtttctttaagtagcgaagccaatggatgagatcctggatgctctagcccaaacctacagtcttgacccagcactgcctcaggccaaagacctgatggttactcccgagagttcttcttctagcattcctttgggccaagtcgttttaatcgacgaggaggaggaagtagaagaagaaggcgagattctccctccattacaccggaagcacaaaggaaagatggtggagactaaggttgctaagaagcctaggagagtagacactctggctcccagctctgatatagggatcccgtccgaggtggatgagtatactgttcctccgggcatcttcttgacccctactcctgctgacgaggaaagaacccaactccggatcaccaagcataactatgccgcggcggagtacaaaaaaggggaacaccgaggtggaggccttgaaaaagattctgagggaggcccaggacagttttactcccagtgagtatgctgggaacatctgggatttaaatttggattctctgaccgaattgttcaaccgcttcattggacctactctggctccctttgccttagaattaatgagccattttgctgctggcctagttcaactccccatgaagaggtacgcagcctatgcttctaccaacccagtctactagatccaggacgtgagcgcggccatgatcgcggtaagttcctatctgttagaggtattttcaggcttcttttctttttggtgcctgacatcatatattccttatacatatattttttt

SEQ ID NO: 222676 - DNA, 1607 bp, Cannabis indica
caaacacttggcatcttcactcagcctgacctcttgcatcatgttgttgtctttggctagatgggtctttagattggtgcgtccatcatacaacttgattagggcatcttgaagttcaccgggagtagagcttttgtgatccttctaatgcatggcttttggtcctcatcctcaaagtcgatgagggccccactttgtttttgaaccgatttcgttagtgtagcaattttttgttccaatattttggtgtcactgtttaggagatctcttccacgaaccttatcattaagatgattcctgaggtcattactacatggcctcgccttttcactttttgctttttcatacttggcatccaagcgccttctgagatctattgtggacaaactgtcatcaaaatattatcccttggtcccaccatccaggttgacaaaatcactagggcagtatttccatcgcttgggctttggtacttttgtaccatccctttttggcgtaacagggcctttccaagcccagaggcatcgatggtcttctgcgcatgagaaggcctattggtcggattcatgcgtctccaaggaggtataggagcacttgggttttgggtgtcacctagttttgcctttcttttattttgagcaggagtaaaggttctagcattagtagggttttccttatttttttcgccaacacattccaccaagggatcatcgtctgaatctccctcgtctagatctccgaacttactacgaaggtggaccatagtcctcttcatcttttgagagaacttttcttgatgggctaattttcagtaagtctcaaacaactcattggacactcgaaccactttggggtcttgctcatagtagtagccatctttgtagtaccaatctttaacatactctccgtcgtcatcctcctcttcatcctcaacatctcagtcttcattaacaccatcatgttgtttgtcgaggttggcctctcgattatttggattggatgtatccacttttctcgcattgctcagctaggcgaggcttggagacaaagggtttacatcttccataatagcgtctatgccaccatcttgaggagtcttcttagaaactattcttcgtgtaaaaaccatggtagcagtaagactttaggtttacatctttcttcaactattaatgaaagcacaaaaatgtttactgagattttttgaaactaaatatttaagaactgaagaaataataaaatgcaaaaataaagagatggagattttttatgttgtttgggtgttaattaaccttagtccacgagtcagtctataagggcgtatttgatgtgtttacaatacttttgcagaaaaccctaattttgtactctcaatttttcttgaagaagaagaagacgaggagtaatattgacagagttttagatatgtaggttctaatcccccttcataaggaaatggaatggtatatataggctaagtggcaagtatgcatgcgcccatgacccgcctagggtttctactcaaagcccactaatggggtaaattacatgcaaaggagagctgactattgagtcccttaaaaacaattgtgcctgtgcgtgttgca

SEQ ID NO: 222677 - DNA, 1659 bp, Cannabis indica
ccattaacaatgagccactcaaaaaacacattttatctgtcactatcaaatttcactgaaacaagtaacctatcataaaataggaacagataatagagtctattgatcattgtttggtcagtagatatgtaacaaaagggtaaaaaaacagggagaaagcccttcaaaatctgaggcacccaccagacacaaaacacaaaacactaagagataatgtacagaactcaggagtcaaagacaaactataaatgcttttttgatgaaggacaaactataatacttgataccttgaatatgtacagtagtaatatgccatggagacttcattcatcattcaatacagaattgtgatgaatatttctgagccaatcatagatatcagccataatcaaattccagggaacaagggtcagttctgaggacttgttcaaagacctttcgaaccaccttccttcaacgattttcggtttagaatgttgatcataaaggagtctgcccatcaactgaagcatctccattattaatcggtttcttaaactgaaccaagatcatagtcatattgtcgcaaccttccccaccagcagttggtgccacacatctgtcgaaaactttctcacaaatggccgagagcttagtttcctgcattgtaagacagaagttagttctgttatacatcgagtgtgtgagtatgtgcgtgttcaaataagtctcagagaatttacttcttttaactggtctcgtacgtagtccacaagttgttggctagacatgcaatccctgaaggggaaagaaacaagaacatctgagttttgtagagatacatgaacaagaaaacaactcaaaaccaacatttactacattatgatttttacaccgaataaagaaaatggtatcggcacaaataagtcacagttttacaattcttatgttttattctctctaatattcccacaggggcattatgtattatcatagttttgtccaattgatattgagttttgttgaatgttcaacttcaatcaacaagaaagattagttacaagaaaaggaactaactcaccatatcccatcacaagctaaaacgagaaactcatcatcatcacatagctcaatctgtattgatagaggaaaaggcataacaatctcaaaatctcaaacaatatatttagtaaaaactcaatcacaaccgcatttttccctttaaaaaataatcctaattaattgacatgaagtgcagaatacacaatttcatagttcttaaactaacctacataaatgtaatatggaagtgaaattacatacagtatttatgtctggattagcagttacaatctgtttttcagcagtcaaatgtttgttttgtttgaattccacgtctcctgcaaccaacacattttaataaatcaatagataaaaaagatcatcactaaatctcctatctctattttcagcaacaaaacatacatacctatagctcttgtcaagttcaaacttccattgatccgaccaacttggatatatccaccggctttcagaatcctatctttctcaacttctaagtcgggcttatgatctttcgacaaattatatgcctgaataaaacctttattaaaacaagatatgaaaaattctttgccacacatcagaagtagtatggca

SEQ ID NO: 222678 - DNA, 3500 bp, Cannabis indica
acacctttaagatggggccatcatttttcaaatatgcatatttaataacagagcatcccatataaaaaacatgcatagagtctacgccacatattcttattaagatatataatatccacatgcattttgctttttttttgttcttttttaacaaaaatgtcccattatcttaagtttgatttacatattcaaatttagcaaaattttgctacactataaatagaacaatctcaacatcttccagtccacaccctctaccaaaaacaaaagagaaaaaatatatatataaaaaaaagtctcaaagacaatatgaaagcctcaaagctattgtcatcactcttcctcactcttatcctcttctccacctttttcaagccttcattctcagctgagctctgccgtgcaaaagacaaaaaagtcctccttcaaatcaagaaagccttcaaaaacccttatatctatagtggttgggactcaaaatccgactgctgcgactggtacggtgtgacatgcgatgagaaaactcaccaaatcaattcccttttcgcaaccgacggcgacttatccggacccatcccgccccaagtcgccgaccttccatacctcgaagaccttcactttcacaaacagcctaacatcacaggtccaatcccatttgctatttccaagctcaaaaacttaaggttcctcatgatcaccacactgggctcacgggtccggtcccggatttcctaggccaaatgaagaacctggagtttatttctctagcgttcaactccctcacggggaccatcccgagatccattggcctcctccccaaacttggtgggctccgtctagaccgtaacaagctcaccgggccgatcccggatacgtttggagacttcaaaggcactgatttctatctctacctttctcataaccaactctctggtaaaataccagcttcaatggggagaaaggatttcacgtatatagacttatcgaggaacaggcttgaaggtgatgcctcattcttattcggatcgggtaagactatgattcaacatgtggacttgtccaggaacttgttggagtttgatctttctaaagtgaagtttcccaagagcttgacattcttggatcttaaccataataagataaagggttctattccgacgggactgacagtgccagagttccaacagtttaatgtgagctataacagattgtgtgggaagattcctatgggtggaaatttgcagaggtttgattactcggcttatttccataaccggtgcttgtgtggagctccgctgccgaagtgcaagtagcagtaacgtaattatatggttgtgtggaagaatcgtatcttaataatgcttcgttgtgttgtgtgcacatcgaagaagagtgttggttgtttgtcattgtagtacttttgtgtcttctttaattgtgagatgttaaattgtgttttattttaagtaatgttacgtgaacattaaactgttctaatatttataagcgtgttgcatgccaaatttagtttatggtcatagtcatatcctacttgttttgtttagcacctctcctgtccattcacaaatcacccttctcgaatatcaaaaggaaaaaaaagggtcataattgggtattgccccgccggtaatacccggttgctattaatcattaataacggcagactaacacatccaccgctattaatgattaataccgccggaccattagcggcgaaccccgtcggtatttaatacgtcagattcaatttcttacacattaatagcggcgggaacccgccagtattaatgtttatataaaaaaataataaattataaatatatttatatttatatttataattttttttttcaaatttatattattaataaatattaaaattaacaataatccaattactacacacattatgaattaaaaagtattcttcataaaaattaaataattaataacatccatacataatttaaaacttaaataaatccaaacataattaaaaacttaaataaatctgagcttgcgatactggcggtgatggtaatatggctgctgggaagataaaatctccacaaattgtcgagtctgtcgttgttgtggtaaattcagaaattgttgttgttgcaaaacatttagagattgttgctgtagcaaaaaattcggggattgttgctgaaactgaccaggaaaaatatatggattttgtgcaccgaaaaattgacccggagaaggttgcttcattggaccgccataaagcatcggctgttgagatgaactctcaaattgaccaaacatcggctgctgggactgtgatcctccaaaaaaatcagagtagaaaaattgatttttttactctctttttagcctcgtagtacgtcgatggaatttaatttcctttcggaaaagtaagattcaacaatttcaataattcatcaaatacactgataggaatttttccacgaactttcaaatgcaataactttgctagaaagttaagtgaagaaatctaatggcatccaggatacaattcagcttcaatctcttcaaataactcgtcgtagtattgaaaagagtcagagttgttttgaacatcttcagttgttggtcgaatgaaatcttcaacaatggaaattatctcgtcgattttatcatctaaaattggctcaacaacttccgtccgtgcaacaacttctgtttcggactccccgtggtgaatccatttttgataaccatgatcaaaactccaatcaaatatatgcgcttccacaatgtgtaaagtctcaaatcgagtatttaagcatctaacacaaggatatctaatttttccattagaatttttataatctgaagccatcgccagaaaaacttgtagacactcccaattatctttaccactttttctccaagaagtccaagacttatcaatcgccatctagaattttaaaattttatgagttttagcaacgtgaataaactaattaaaatcttatgttattttatgaaattttatgagttttagcaacgtgaataaagtaattaaaatcttatgctattttatgaaattttatttgtaaattaaattaattatttatttttattagctagggaaaatttatcactttagtatattgcaaacaaagtgtacaccaactttgtttaaaatgttatttggttatatagattttatttgcaagtataccaaagttaattatatttgtaaaatattataaaataattaaaattttatgttattttatgaaatattattcataaatttatttatttattattttataatatttatttacgaatttttatttataaattatttattaaaattaatatacaatactattaaataaattcattttatttctccaaaaaaaaaattattataataattacttatacatgtattcaatttatttttaaataaatatatcaatttaataattacataaatatatttacaaaaataattt

SEQ ID NO: 222679 - DNA, 4256 bp, Cannabis indica
aatcccatgtgcccttcaaatatctcaataacatttaagggctttccaatgttccatgcatggattggtcatgaacatacttaggatgcttaaagcgtgagttatgtccggtctcgtgctcaccatcacgtacattaagcatccaagaaccatagcatagggtacatctttcatctcttctttctctttcgtactgttaagacattgttcctttgacaaaatgaactgtccccttcaaggaacggatttactcttcgcatcttccatgttgaacttttgaataatctttttgatgtacctggactactttaggctaatagttcattccttccaattctgagagacttcgataccaagtatcttttaaactggcccaagctctttcatctcaaattctctcttgagcttggccttaataattttgatcactaaattatcattgctcatgatgagcatatcatccacatagagcaataagaacacaactgtagattgctctaaattcttaaaatataagcagcgatcgtatgtagatcgattgaacccgatttgatggatacgtattgaatcttttattccattgtctaggggactgttttaaaccatacaaagatatattaagcttaaaaactaattcaactcctttcccttccacctaaaacccaggtgattgattcatatagatctcttcatctaagaatccattcagaaaagcagtctttatagcaagttgttcaacttcaaactccaaatgtgccgctaaggatacgatcaaccttataatcttgtattttaccacaggtgagacgatttcagtatagtttataccttccacctaagtaaaacccttagcacaacctgactttgaacctaacgggttcattctcattgattccctctttcaccttgagattccattttcactccacaatcttcctattctccgactttggcataactacacaagtcttattcttctgtagagaatcaatctcctcatccatggcttggagccatttagacttgtttccacctgaaattacctcttcatagcttctgggcttctcaatttcagtttgtttaactactgccagtgcaaatgctattatttttgcttccgcaaaccttgccggaggttgaatctctcttcgagttctattacgagccaagtgataaccttccaaacatgtctgtctaaacccttttggcacctctatttggttttcataatcttattcttccggctccacaacaacttctacttgtgcattgtcttctggttccacactatcttccacctgtgaaccttcttctgggggctttgttctgtactccacttccacacttacggtgtctttatttcctatttttcctaaaacacacggagacacactaccatttccaaaggtcaagtgatgatattctaactcattaaaaataacatttctagcaatcacaaccactggtttacccttcctagagatgtatattctataccccttggttcctaaggcataaactatgaaagttcccttcatagatctaggttccagcttgtcaatagattggtgtaaatatgcagtacacctaaatattcttaaatgtgttaggttggaggttctattataccacatttcataaggtgtgttaatgcttataaactcaggctcctattaacaaggtaggttacggttgctaaagcttccccctaaaatggttttcctaacccagatttgaacagtaaacatctaactttgttcaacaaggttcggttcatcctttcagcaacaccattttgctctagggtcttcactattgttctatgcctagtgatgccaaatttttgacacatcttgtcaaatttggagttaacaaactccaacccattatcaatcctaagattcttaattttaagatcagtttggttttccacctgagttttccaaattttaaactgttccaacactcatccttcgtggttaacaagtaggtccaaagacatcgactataaacttcaacttattttgtttccctaaaacacaggcttcacaaaatggtaaggcataagaatttaaactttcaattataccttgtttgtgcagttctttgaggccttgttcactgatatgtccaagtctgtgatgctacaatttcatatctgattctagttctttcaccatacttgcttctccaactggaacactttctccttggagaacatatagaccattgatcttttcatctttcattactaccaaagaacctttggtgatccttaggcttccgtgcatggacttgtatccgtatccttcatcctcgagtgcacccagggatatgaggtttcgtctaatgtctgaaatctgccttacgttcgtcagcaccttaattccaccatcatactgttttatggcaaccttcccaattctaatgacactacaagaatgattattacccattagaactttacctccatcaattgacttataatcaaaaaatgactcttgattaggacacatgtgataagtgcatctgaaatcaagaatccactccctgttcattgaagactctgagatagagaacaggtctttatctgtggagcagtcgtcactatcttcaacgattgcagtagagtctttcccatgatgatggtgtcggaagtccttcctatatccattatgagatttattgaagccttattgctccttgtacttcttttaaaacttttgcaagtgtctagactttccacagaagtaacatttccttgtgtccttctctttggactacgatcttgattgagagtgatggtgtttactctttgaactcactttcttcggtgatcttcctcttgccaaatacacttcttatttcttggattcttctccaactgtaatttgaaatctttcgacttaagtgcgacaagaacatcttccaacacaataacatccctgccatacttgatagctgccttaacttcttgatatgcgattggaagtgatattaacaagatgatggtctggctttcttcatcaaccttgtgatttatgttagcaaaacctacaataatctcatttaatttattaatattctcatctaaaaaagggatgaaatcattctaaaaccatataatttttctagcaaattgatcttgctagctatcgatggttttaagtataattcttccaatttatcccaaacttcttccgtcgtcttctctacaataagtttttttcgaaaactgtttgatagatacatgatgaccgtgtagtatgccatctcctccatttctattttttcctctggtttcttttctgcccataacttctcgttctcaagaaccttggagacgttctggtgcactaagattccttttagactttctctctatagcgcaaagtctccagttccatcaaacttctctaattcaaatctcgccattgatgacattcaagattcttcaagaattacagcgtaagaatcttgattctgtgttcttggtcgattacctagctccaatttgtgagaaaattaagactaatggtgcagaattaagatgatagaaactttaaacaatcaaacaattagcaatgacaagattaacaataagaacaataatcgaaaataaaatagggacaaatagagtatttgaaccagaaatggtaaaatatagaaaataaataaattaacaccaagatttatactggttcaagtccgatagatcaacgtgatctatggttctactcctgtcctggaatgccaccgtaattattctttattgattgagtaagaatatgtacaatacagtcgagacgagattctctgttgattctcacaaagtgtttcaactctcacactttacacccaagaatcttcttcatcttcttctctacacctctctctctacctctcaatctttttctctctgaaactctcaatctcgtctgaacaaagttttcaaactcgtgtattcagttctgcttccaatgataagtgaaggtggtatatataggcttaggatcaagatcctaaagtcggtggctacaaaaaacgaggttgttaagttagttagaaataactaacttaacaaactcttcttgtgcgaagtctcaacgccagcttaagtggcagggtctccatgaacacataagagcttccaaactcaaggaccaaggactcttgctgaagacgctttcacataggataaagtctgctgtagtcgactatctagatctaccattccaagagggataactagccag

SEQ ID NO: 222680 - DNA, 2336 bp, Cannabis indica
taataaattaagtaattgaattagaaataaaatgcgagtgatactttaaaatttgacaagattcaatttaatattaccaaattaatattaatatgtagtttcttaattaaggaaaaaaacttatattgactttaaagaatatatagcataattggttaattatactactattaatcaaataatttattaaatatatttttaaattaaaacaaatcaaatttagtgtaataaaaggataatacaactattactttattataattgtgagccctacatgcatatatatatatataataaaactatatttaaataaataatactaatttttaaaatttttcatccatcaaaattcaggcatgtattaatatcttttcataaactcttatatatatcaatgccaagtacatagtttttaaagattcagggggccacgacccctgttggggtgtatgtggctccgcccctgtatgtaatgtaatcctcattacatagcttttttaatgtaataggaattctattgtttaatgtaattatgattacaatgtaatcccataacatcacttttaaaagcaaagcacacattgtaatggataatttgattccattaccattcctattacaacaaatcaaacatgccattaattcaactctctctcccaaccaatgctaatcatgttctatttataagctctctctaggtttggtttagaattaaaaaagtcttggtcgaattctacatgtgggccttaagacttcgattattgccattttatttcatttaaataaaataataccacagtgtaggcaccacttatatagggatttgtttttgggttaattaattaattaattttaaaaaataaataattattcatttgaatttgaaaagtagttgagatattttcttaaatggttgagagattcccacaatctgttatagtatataaatatttataacaaaattcaattatattatttattcaaataatttaatatgatttaataaaaagatttaaatttaaataattaattaaaaaaaattttaattgggtttatttaatataccgtaataacaaattaaaaaaaattagtactaaatttctaaaagcctataaaaagattaatttgctaacctttttctccacatcactacattgctcatgtgctgagaatacaagaacttgacatacacttttatcctactagcccacactagttcttgtgtgtagtaaaaaatctggaagattgaggtgtgagtttgacgtcaccgttccgaggatacaacaaacgaaaagactcaaggataccctaataggcttagagaggtaaatattattttcatctatttactttcaagtttaatatatatacgtatggtggtcttgggcatatggtacaatgataatcagtaacaatttccattgcgtacttcatttagtaccgtaaaaccaacagttagctctagagagcttgttgtcagataaaagtgacacaatggggttcgataattaaagtcatggtagcaactgaaaatatcaataaacagaaattaactattggttcaatacaaattcatacatatattttcaaagcaattcactgatgcaccactttctgtttcagcttctaagagaattttttcagtccaatctgtttcatggtcgtcttataagttatagttatttaagtacatcctgcaaaattttgagagattcgaaaaaatttaacatgccaaaaatatggttcaaatattctgttgcaagtgagactcttttattttatacgtgtgtaaaatagattgtttgagctctattttgggcgtgttcaatttttttgaatttcttaaaattttgcaggatatcctaaataactacaacgtagaccacaagaaaaaaattggacttaaaaattcttccaaatgtcgaaaaagataggggtgcattgtagaattttttaataaaatatttaaaaatttaagaaaattctacaatatccccttaaaaggtgcacccctatctattttggtattcaaaataattttttagtcatattttttctcatggtcatttgtgttattgttatttaagatatcttgtaaaattttaagaaattaagaaatatttaacacgctgaaaattaagtttaaactgtgtgttgcacacatgactattttattttatacgtatgtgaaatagactatttgaacactattttttatattgtaaattattccgaatttctctaaagtttatagagtatctcaaataactataacgtacataaatataaaaaaattaaactatttttttgggtaaatattattttggaccttgtgt

SEQ ID NO: 222681 - DNA, 1549 bp, Cannabis indica
attgaaactaaagaataattaacaaatgtatattttgtgtgtataaaataacaccatgtgtatttttttagcataagatgtcaaatttccctttttaaaatgggaaagagcattgttattgggcacagtgatgcctagcatctctagatatgtcgtcttgtggttggctagcgatactccctaaaagttattatattaaactatatgggacccgatacttatttagaccaataacaatattgatacataagagggtgttaggcaatattagtgttttttttaacatttctcaataggaaaatgatcagttgcataaaatttattttggttataaatgtattatcaaaaaagtgtaatattataattaaagaagtgagtacattttttttgtaaagttacataattttttttgtaagagtacatgtacttagttccaataataaaaataatactaaaattctctacacataattatcttccaaattattattgtttggatgagaagatatttttatataaatctctaaaacaaaaaggtccatatatgccatacaatgtgtaaataataacaaattgaaaacaacaacacaaaacacaaacatatggtgataattattaataacaaacatcatatatacataagaagaaaattggtctacatttgttgggttaataattgcaattgagaacctagtacaattgatgagttagttacatatggggttaattttcaaagaattgccttcaaaccatgcacatttggtcaacatcatcatttaataattctttatgcccaaggattattttgttttgtaacacggatattttgttgagtattagtaatgatcagtactttttataggtggcggtttacgattagttaatgatattttttaaaatatattttttaatttatatgggatctaatacttaattgtactaatagtggtatgacaccgaaaaggatgttagacaccaataatacattttaacaattcacatctcacactccaccatgtggcaatctcatgatgtactcatcaaaatcaaaaatatttaattatataataatatatataagtacacatacacttaaatctcttttctaaattaaagattagttaattattactaatttaacaaatactaattaaaaatatataccataatgggaactacttgcatatgcagcattgttcattagtaataataacaaataacaatgattcatgggaataatattaattgatcaaagtacataataagaaaactaaaaaaacaagcaattaaagtgaaattttattttattttatttttcccttaaatgacaatatagttctatatggcttatactcattggtcagtagtaaaagctgaatatatacttacattatattatatataaatatatatacataaataggtgttatatatttcttctttcttgaagtgaaaattacccaaaattgatgtttcttgagttacagaaaagaaaacttaagtaataataattccaccatgtatttccactattgcaaatttggaatat

SEQ ID NO: 222682 - DNA, 2506 bp, Cannabis indica
aaaaaaaaaaactaaacctttgggcgaaaccaattatctgttgagaatgcgaaaacagtgagaacctgaatccccaacttgcaacagagatcgaccaaaactctcagcgaacgagcaccagcttcgtatcccgaatcaaccggcaagtctctgaggcgggcccatctccggttaccgtccatgatcaccgccacgtgcttcggcaacagatctcgccggattccgaccgtgaaatgggagaaacctccactgtctacatctgagcgcaaagacttgtcgttgccgttcccattccggtgtcggtactcctcctcgtcttcttcgaccaacatttggtgcacggagacgcgggggagagggagtgttgatctcggcacgtgtgagcttggcttggaatggagagaggggatgtgcgagtttggagggtggaagaggttgaatggagaaggaaccgccgccatgattgagtggagagagaagaactgcatttgtacggactgagtgagcctttgctttggttttaagggtttaagctgaaaatggttttagctgttattcattcataactttataatttggcgccataaacaattttattttagatcacaagctcatttgtttatcaatattagatattaatctaaaatagttagtataatcttaatcttaatttaatattgatccccttattttattttttaaaaaatatatataaacttttattaatttatcaaatcagtcaaaagataaggttgtatctcaacaggaacatcacccgtattaaactaaacactggatctgagaaaaaacaggatgctctagcaagactatgagcaaccttgttagcaaatagtttaataaaaaataaagaaacattgttaaagatgtaagaagtttatgacaattttctataataactccaaaagaagaaagcataggtaatgagtttcgaatagcttagaccgctaccaagtaatctgactctagctccattttctgccatagttgagttttaattcagtttagtacttcctttataccacttgcttctgcaaaattcagagcgcctataccaacaaaactactcgacttagccatcacaacttccccttgagagattcgagcgactatgccataccagaaaatagcagcatcaacagttaccttgattgtattcccttgcggcttaaaccaaaatttaacttcatcactagcttcaaacactggaaaagaagcctttgaacctctattttggactaacttatgggtgttcatcaaactgctcaaactaaccgcaccacacctgttacgccctaacaattaagcacgctacactaaccgattaagaaaccctaatcccctaaaccggctaaaaatataagcgtggaaaatttaaactttatttgaaacagaatgaaaactaaatttgtaacaactttaaactttacaaccaaaaattacatgttttgggatcccataattttacaaagtattacaagtctttttcacgagccgacttaagcggcaaaatcagagttacaaaatacatcactggtagatcccaacccgcttggtctagtgtgacccgaacatatacaagcatcgccaagcccttgcacttatggctgatcagtgacagatttaccctttcctgcacagtagagcacccgtgagccaagcccagcaagacagtataaatatcaataatcacaaatatacatttcacatacaatataatcatgccattttacttattgtctatttggcatagacctacgtgttacgttcaaacgcctatttatgtctatgtagcattgacccacgtgttactctcacacttctatatataataaggccttaaaacagttcatttcggttctagttatcgagtccaaccagattataccttgaatgcataatccttaatctcaatatacatatataacatggcatagcatttacacattaacaattactagggtaataaccctaggccattaaaacgctcactttagggtaataaccctactccctatttctaattactcacaaatataatattcagcataagatccaccgcgtataactctatgtgctaactactgtcttacttgatgtcccgcaaacgtggagattccaaatccccaggtgctcctgaccaagtgttggtaatcctagtcacaattttcgagattcacaaaacagggttaatccctaaattcatttccacataattataaaattagcattcaaattccagataatcacaaagagctcggaacgagctttccaacgatatgcgaaactcctaaaacagagtctgaatcccaaagatacgagcattcaaattttgcgttcgaatttgcccagcaacaaagaagcgggccgtagcattccccacacggggccacaacacatggattggaaacccaagccaccaataggggcgagctgcggcgcccgtagagtggggtcgcggctcatgggttccaaacccaagaaaccc

SEQ ID NO: 222683 - DNA, 1583 bp, Cannabis indica
ttttttcaaaaaaaaaaattgttagtttcttctttacttcaaaaagataaattatttgtttgtggattttggttattttgatgattcatagacttccacttttagcatttcatcttctttatgaattattttcttaatttttcttcaaagaaaagatttattatttgtattcaggttttgattattttgataattaaagagtttctctattacatttcatcttctttttggttgtcatagatatgcatatatataaatatatttatatatatgtatatatatattgtgaaagtgggaaagagtgtataaaagtgtagttgattataatgtagaagctcacgaaagttatcttggtactattttttttatttttttggttatagacaatttgcttcatttcagtacttttaaagagtcctccaattttgcacaatacaaggtatattaatgcaattaaaagaaatacaaaattttgaaagagcaacaaaccctcatgtaattacactttcatactagaatatattgcttttttatcttcttctaatattttattgtgaaagaacgcgagatgtcaaacaagaaaaggaagagtgtgcctgatgaagtaatttttatgattcatctaccaggtttggtttcttgtgtttttgtttttacagatgaagtttctcctattatgggaggcagtgaaacttactctcataaaacattgaagttttttgttagagaatgctttcttaattatgtgattttagtaatgggttgctttttcaagtttgattgttgcttcattttataataaacactatgaaagagtttcttctaagtacttgattatgcttttgcaataattgataatttagataaaaatattgttgttaaaatctacctattctcaagtttatgagctacaattttaatatgagatttaaagtgtgtaatatatatacatacatatttaaatatatatggtttatgaagcaattggttcatacaatgagcttgaaggactataagctcgatctaacttcaatgggagtggtacaaaaatttggtcagattttctctcacactctatattgatggtttactattaagtagattactaatataaattatgtgaatcattttatgataaaaatgatataacctcaattttttatttgagattaatttcaggacttttataattaacatcagattggatttaaaaatggatagagtatcatcctcaatagtacttaaattgtcaaaagatactctagaaccaacaaatgctgaagatattttacactattgagatctagacttggtggtgatgatgatcttcatggtttagaaaagcatgcttgcatcttcgttacaatttacaagtccaaaaatttggtttcctacattaaccaaacatttggtttcctactttagtatcaagactctgcttattatttatgttttttttttttgttggattcttttgttaattaaatatttgaatgtaaaagtataatgtagtttaattttattttattaagatatgccattgtaatatgggcaaataaagagattgaatgggagattgttag

SEQ ID NO: 222684 - DNA, 1578 bp, Cannabis indica
tatcaaaattataaatgttaatgtacataaattagtttttttagacattatttataagatcacgcgatgtttgtggtttcactaaggaatgccatcagcatctgttttttagctacagaatgtcgcagctggttcttgcaagtctgttcgaatggctggggttcaattaatggatggtccaacaacttcatcaactggagtatatatgaatttgtactactcattcaagcattgttgggaagattttgatggttatattgtctgcaataatctatcatttgtggaaggaatagaaacaattgtatttttttttattttttcaaaaactgttacttgtattagttataagtattaaaaaggatcttaagtatagattgtttttgctcaaaaatagaaaaagttccaaaatggagcttcacttgtaattaattgttgttagtgaggtcttttcttttggagaggctttgagagtgtatttgtttggttcgattaatgaagttttctttttgatcaaaacaatatatatatatacagtagaacctctattcaagaatactctattcaagaataacctctaatttgttataaaaaaaatgaagtcccaatttgggccagttataaataagaataacctctatattgtaattagttatacattttttaagtcccgtattaataaaatatacctctatataagaataattacatcttaaaaaaatatatacatatattttataaatttacttatgtagaattaataattttatttcaaattatagtacatgtataaatattatatgtactcgaaaataattttaatataatatagtattaagaattgtttattggtatttttgttacattgatattttttgatattttgattttttttttcaagtgtaactctatttagttataacctctcaattagaatattattttcttggtcccaagtgtattcttggatagaggttctactgtatatatatatatatatatactaaatattttttaattataaaataaatatttattatctatatcttattataatttattatacactaaataaaataataaaatattaaagtaaaaattataaacagtaatatatataaaataataaataattttattaaaaataatcttttaaattcatatgttgtaaatatgttttaattaaaaaataaataatatgaagctaaaattgtgataccataaaaattagatatgataaaattataactagattaatctattagtaataatgataaaaaaattaaattaataatattattaaggggttttttcattttttacacttcaaaacttagtttttttttttttgtatttttacggaattctacatagaaacttctattgcaactagcgctgcaacctaaattgcaaacaaaaaatcgtatagaaattcctattgcaactagcactgcaaccaatttagaaacacaaaactgtaaaaattaaaaaaaaaaaaaagttaaaaaataatatatatgataattctcttattattaattatatataaatttattactatatattttatatataaaaata

SEQ ID NO: 222685 - DNA, 1847 bp, Cannabis indica
aacattaaatgttatttctgatctatattaataagtaaatctgattatagtgaaatgagttttatttagggcataaaacccaacaatcagggcataaataaccgcaccaacctgcctactgcaccagctgcaactactggagttaatatcctagcgaatatagccccagtaataacgacacctgggacgactcaaggcaacactgccctagcagggtgtatcgatcaaggcatgcttttacaagcattgaagatgattaagcagaaaaggaagcccatatacaagttgtatgggacttctcctttcaccacggaagtgcgacaagctcgattacctaagggattccaattatccgaatctctgaagtataaaggtaccactaatcctatagattatttagaaaaatttaatactattatggaagtagaccaggtacctcagcttgcgaactgtcacattctcacggcgaccctggatgataatgctcacgattggttcacccaattgcctgaagcatccatttcaacatgggagacttttgtcaacttcttcctcacgcactttcaagccacgatgacctataggccaccctataccactctggctaacattaaacaagaggtcggtgagtctttgcaagattattttgaatgttttaatgccaaagtaataaaagtagagaaggccctccgagtcttcgctagtttgtatgttgataacagtgtcctaccaagaaccgatttctggaaggagctgcaggctcgaagacctgaatcgttggtcgagttttttgctatggcagagccgcataagaggattgaaaattctctagccgaactagagaaagtaaaggataaacacaagtcgcctgtactgcgatcacgatcccgcagtcctagaaggaaaaattccaggggcggagccccagaagacgcagtccggaaagacagcgaagtccaaagttggccaaatcccctccgaagaaggagtcgtctcccaagaggaaaggtggtccacgttttgtgaattacaaagaattggcaattccttggaccatatctatgccattgaagaaaagaacgaagccttcaaaaagccacccccaatcaggggaaaccgcgataagagaagactcgaaaaaattttgtaagtaccacaaggatattggtcacactaccctggaatgttggtttttgcaggatgaaattgaagagttaattagacgagggaaattcagcaagtataagaagaacgaggaaagtcatccccaagcggatgacaaagaagaaaataacaatgggagtggttcgagaactcctcgcaatatactgactatcatcagcagacctcacatcgcaggagagtccaggaaatcacaggagcgatacgccaaggaggccagagagaggccactcataaatgtgaataatttgagtgagcggccagaaaaattgttcaaaaaggaatgtgatgatatcacatttatggaaagtgatgccagatgggttcaccacccacatgccgatgcaatggtcatcgtcgctaacatttgaggagacaatgtccactgcatactagtggacaacagaagttttgtgaatctcttgaactttttaagcttttaagcaaatgggactacaagagaaggatctgcgacccgtcgtgtcgagtatctacagttttactggagacaccattgctttgaaggaaatgatcaaactcccaattactctgggaactgcacctgtggctaaatcgatggctgccttcgccattatcgaccaacactcgacatataatgctgttattggtcgtcctatactaaaggagatgaagattgtgacatc

SEQ ID NO: 222686 - DNA, 1964 bp, Cannabis indica
ggtcaaacaaggttttataagtacgtaacgacgggtatatatgtattgtcatccagtctttacaatttaattttaagatcatacggatctaaatttaaaataaagtatggataacaattatacaaatcatgaccaaagtgacttacgtgctgtcagacttttattattctcgatcatcctttatattttgttttacaaatgtttttctctttttagtatgtggacaaaaaggtgggttgcctgtctataaacaggaataaagataatggaaaattctaagttaggacattggaccctttttagctaataaatagttgtcacattggcaatttggttttaaggtgagaaacacttgattatttttaattttaatgacttttcattttgtttttactcaaacccgactcctccctcaccctttcgtggtctcactttctctctctccctctcatttctcatagcaaggccacgccacctttgatcgtcgtaagaccagatggaggtcgcatcatcggttcctgaaattcccacggttgtggtccttgacctgtcttcgtcgatcacgaccgtggaatacattttcgaagtcaaagcttcatggcttcactccagccacacgtcaagtcccaacgcaccaaacgagtttcaagaaaatattcctctcgtagcaatcctccaaatcccttagtcgggtccttcatgcaccgccattgatcaacaccggccgccgtgctaattggagattggatcatacatatatacatatattattataggatgaacttttcacctagaaatacgagcatagactcatatatggttgacacgtggatccaattcaccgttgaaaaaggatgacatgtcaataatagcccctttaggactattctcatatggttgaaatttgcaagaaggagtgaccagaacaaggtctagtcgcccactatgtgtagcatagtaaggtaaaaggaggactgagagaagttaacataagtcgcgcatataccgattatgtgtgatgaaaaaatattttccctgcgcccaatgagaagatcgcatctttacgagcgtgttgtcagtatgaatgaccaacacgctcccgggggatagtcgcagcattttgtatcataaagaaccccgagaacttcatagacctcatacgcgagtaacagtagagaacccgtaaattcatgttactctgaatatgaatggtcaatgtgcgacttcgatagttgcaccagtttgggtattaaataataacagtcgaaacttttcttatcatttatttttaaacatttgtatctgagttaaatataattataataatcttgtatgatcagttttatgaactaagggatcacttgctctatacataaatgagtgatcctatttgaataaaactaatcacaaatcattttcctaaagtggactaagcagtccgagctctggctgaaccactataactctctagtgttctttagttatttgttatttatatttgaatgaccgcattattattttgagtattcgccattctaggtgaatactcgcagttctctacgtgtgtgttcttgcttagctccaatactcgcagttttttagtgttgtctatttttctccgaaaacatttggcactagaaggagggtctttctaacaaaaatttctacaattttggaggaaaatcacaatggatgtaaaccagaatgataacaaaaacatcaatgtcaatgaaaacactgctcaaccaacaatggtggacttcgggtttgaaccctactgttgataatatttatggaggagttagacggacgaacactatcccatttaacttgttcccacagttcactagagtcataggagacacgacgactcccatagcggccactggcgatttcccgccaattacacctacccacacagctgagggtatggtataattgttagtcgcataatacacaattat

SEQ ID NO: 222687 - DNA, 1453 bp, Cannabis indica
tgtctaaactcaataatgtcccatgtaaactttcacatacatttttttcaatatgcatcacatcgagactgtgtcataataaattatccttccagtaagacaattcaaaaaatatactccttttcttccaactatatgacaactgaggattaacaaccgtctttccaaattttatttggtagccttctaacgtatctagtatcactgaaccactaaatggtattagagccaatcctttctcttttgtactgtcaaaagacttttcatcatttctaaatgagtggttattttctaaccaatgatgatgacccatataacaatgttttttgctatatatgcttcaaccacaaagaataagtgtcttgatgacaagacgggcatccatattttcctttagtgctctcttctgataaaattgcatatgctagaaaagagaaatttgaaaaattatgcataaaataaactaaatttttttctctaaatccatatgtattaaaattagccatatatgaccacatttccattttccccataatacccctcaattttgaaatcccaaacccatcagcctcctctctcttcctctcgctcaagccacgctcaaaatcaaacctcaaacccacggtgacagtgcagcaccctattcgacccacggtggatccaattgacgaccaaacccacgacactattgatgaggcaatcgacgaccggatccacgacctacacggtgaacgccattggagacaatgtcgaaagtgtgtttttttttttgtgagaaagtgttaaagactgattttatttgtgaaacctaaattttgttagatttagggaaattttgttaaattatgtcagatgagtgaaatgggaaaattttgaggaagaagaaaaagacccgatgggtccgatgctagtccaatatcagtccgatagtcccttcatctgattataaaatgttaaggtttgatgggtccgatgctagtccgatatgggtctgatggtcccttcatttgatttaaatatgctgaggtccgatgtgttcgatgtccaatccgatagggtccaatgtctgtttcctttttgcattgatttgttataggtccgattggtccgatgcccagctcgataggtagtcccgatggtcataatcaaggaattttttgttatggcccgatgcagtccgataccccgtctgatgtggtccaatgcctttggtcaaaaaaatatgccattagttctcgcttagtgtagtctgatgcccagtccaatagggtccgatacccgtccaatagtgtagaaaagaagaatttaattgtcaaatttaataaattattattttgttgatataggaaagaaaagaagagatttttattaattgagattatagcatttaacaagaatatgagttaattattgaatatatattttttctattaaaaaaatggaaattgttttt

SEQ ID NO: 222688 - DNA, 8558 bp, Cannabis indica
gaaaaaaaaaatgttatgaataataaataataaaatttttggacgattctacggtgcacccactaaaaaaagtgtataagttttttagtcaatttttttttatagttgtatatgctatatagttatttaagatattcggtaaaattttaaaaatttaaaataatttacaatatagaaagcaatgtttaaataatttattttacacgcatataaaataaaagagtcacgtgtaatatattgtttaaaacttatttattttcgacatattaaattttttaaaattttacatcatctataaagaatcacattaacaaaattcccttatgtgcccaaacatataaaagtatattgtacaatagaattttttaaaagtttttttctttaaaaaataaaagttgtagagaagcccatttatgaaggtctttactctcataagtcaagtcaacacatccaacggtggtgaatgcaccaactcatcagccttagataagtaaattacggatataccctcaacatcgcttgcttgttccaatttcatccctctttttatattcttctccacctgaacaaaatatacctctcatagcctcgcctgcaaacgctttatcatttctcttcttcaattttttttcttcaacaattacaaattcatcaataatatatatatttatatatatttatatgtatatgtatatgtattggctcttcatctagctcacgaccactcccgctctcgaaatttctggttccaaataggtaaatttcacctaaagaatcaagcaatcttgcaatttcatcgctcttcccagtttgatttcaaatactcagtttttattggggtttcactctttttatttttgaatatatgtgcttcaaacttcaatagatttgaatctgtgatattattgacattcttattgggatttgctactgtgttttgagttggattggagatattttatttaatgggctttattgataataatcggtaaataatgaactgggtattgctttattaaatttttacggattttatgtcaatggcgtttaaatttgttgttgaatctgattgcaagtgttttgtatacatacacacataaacactatatgctttcatgtttcgtgtttgtggatacttagtacttgagtacatggttttgtctttgctgagaaacctttgtctcttaacattgttttattctcaatgatcatgaatgaaagaaagagaagatatgcattgttcattttgattttgaatttttatgacttattgtgttataaacaacagatatttgctacttactagacttgaacatatgtggtatatattttgttatgatgtgattttttgatctcgtttcaatgatttcataacacgctttgaaataagaagttgaaagaatttaggcatgtgaagatgataggtgaatgaatctaacatcaaaagtaccacgtgtaattattggtgttttgttttgtggggaagtgacaaatgcttaagattgtgagatgaagacttgttattattatagattttcctaagtttgcttgacacaagattttaaattttaataattttcaatgtgtgactgtaagataagcaaatatcttaccttgtttttatttagtttcaggatttcgagatgggaaatgtgaagaataatagtattcataacgagaatgagcctgggacgagtacacaagattatgattctttggaccagaatgattctttaactgatctaaacattgtcagtgaaaggaaggatgcaaaaaccacaggagatgctgtcaataatactaacactgttccatatatctatagacaagatgttgtaagaagagaaactggtatgattggggttgtgacagaagttgctggtgattcggactctgatagcagtatcactgatgatgatgacgacggtgatgatgaagatgaagttgatgacaacgatgacgatggtgaaaatgagggagaagttggtgatgagagttcaaatctgaacgagagtgatgataaagatactaatagtaatagaggtaatttggagagtggcccacttcctgccgaccaggttcgagtactttggatagatcaaactgagtcaatgcaaagtattaatgggttaacagttattgatcgaggatttttacatggggattatgttgctgctgcttcagacccttctggacaggtgggtgttgttgtggatgtgaatatgtttgttgatttgctagctcatgatggttcaattgttaaagatgtgtcctctaaagaacttaaacgtgtgagggatttcactgttggagattatgctgttcttggtccctggctgggaagaattgatgacattttagataatgttacagtgttgtttgatgatggttccatgtgtaaggttatgagagctgagccacaacgtctcaaaccactctcgaagatatccttgatgatggacatttttccctactaccctggtcagcgcgtgaaagcaagctcatccactgttttcaagaattctaggtggctctctggcttgtggaaacctaatcggttagaaggcactgtgacaaaggtcacagttggatcagtttttatgtactggatagcatctgcaggctatgggccagattcttcaacttcccctgctgaagagcaaagtcctaagaacttgaaactgttatcttgctttgcacatgccaattggcaattaggtgactggtgtcttttctcctcatcaacactatcatcctttgttcctttggacaaagacctgtcaaaattagggcttcatgatcctgtcaacagtgaattagaatcaactcaaatgggtagtgggtgtgattcagaaggtagtgctccagaagaatcaaatggtaataatgaatccttggatcttgatgtggttgctccattggttggaagcaatgaaaataatccaagtaatggattaaatgaatctagctcttgtgctagttcgttgtcaatttcaaaggagcctattcatgaaacctggcctcttcatcgtaaaaagatccgaaaagttgtggtcaaaagagataagaaggcacgaaagaaggaggaaagctttgaaagagctgttttgatagtcaataccaggacaaaagttgacgtagcatggcaagatggtacaatagagcgtggattgacttcaacaaacttaattccaattgatagtccgggcgatcatgattttgttgctgaacagtatgtggtggagaaggcctctgatgacattgaagatgcctgtgaagctaggcgtgttggagttgtgaagagtgttaatgctaaagagaagacagcttgtgtaaggtggctaaaatctgtttgtagaccagaagatcctagagagtttgacaaagatgagattgtgagtgtatatgagcttgaggggcatcaggattatgactattgctatggggatgttgttgttagactgtctccagtatccgtttctgtagaaagggtatctgatagggaggaaccaaagcaacaaaatgggaggaatgatgtccaagatctagaaagttgctcaggatatgatgatgttgatgacacatctactgacacagcttgtgcagatttctcagatctctcttgggttgggaatataactggtctcaaggatggtgacatcaaagttacatgggcagatgggatggtttacacggtattttcatttcctagcttcttagtgtaaattttgtcctttttattttgaactgtttttttctttctaatttctcattatcaatcctatgatttggatttatggaaataatggcataaatgctacattactctccctcttttttgcaagaaatttatttattatagtcacctagaatgttatagtttcacatctctattgatagatgagttattagtttagggattaaagaatctaaagctactttaagtgggataaattataagtgaaagaggtgaacaatatgatgttaataataatactcagtaagtgtgagtgaaacagtacgaactcgtggaatgcttctgccagttatcatttggatactcttttttgttgctctgaataaaataagtaaaataaagtgcggacacttttgagcaattgcgtttgagatagtgaagttatgagttacttttattcttgattcacttttgtgactcttcagcaattttatggaggcaattccataatgtatcattgtatcctgtaatattttagtgttgattatctaattgtttatttgtttgatctattggtaggttggacctcaagcaatttatgtagttggccgagatgacgacgactctattgctgatgcaagtgaggttagtgatgatgctgctagttgggaaacagttaatgatgatgatgatgatggaatggatgatgctcttgagaatattaaagaggttcgtttctgattaaaaaaaatttaaactactagaacgacttacactcctggttgaggcgcgttgccattcactaatcctatagatgttctctttctgttttggggaaggggcttaggcggggctgttattagtaagagggtaaaataggtttttatcttaaataacccgaccatcaaaggcgagttctttcccccaaaatggcaggtcttgccttgtgcctctaactaatacttcattttaaggctataatattaatagagattaaagtattaaatatgtacttggtgaatcttttgttacaaatctatctttgatgagatgaatgatgcagtcattggtatttcaggaagatgagatggatactatctcacggttgatttctggagaagatgagatgagcagagagagtgattctggtagaaatccagccttctccgttcctttggctgcatttaggtttgttagcagattggccaacggattattttcacgaggacaaaaaagttcagatccaattggtttggagtccaaaggtgaagttgaaattgaagttcagcaggaagatgtgttggagacccctgaggatagagattgtagttatgatgccagttctcagaaatctattgtggttgatggctgtgaatccgagactcatcatagaaaaggagaggaacatgctggcataggtacctcggaaatgagggaggctgcagaaattttatgtactttgagaactgaagagcctgatgcttcagagtgtaaagagtttgacaattgctctttcaaacgatttgatatagctacagatcctttagaccattattttcttggttcaagcgggcaggtaatattctttgtcttttacactattgggtgaatgtggaatataaattagagaagtttgagaatctgagcaatgttaattataaacttcaagaagattgtttaagagattttctatctaatctattgaaaagttccttccaagtatttttcttcgtaataagtccagtcgtaactttaaagttcaaatatattttaaatttatgacactggtatgttgtgaaagatgtctctattttaatgctcctattacttgcttgtcgacaatttcagaacaacggaagaaagtggtttaagaaggttcagcaagattggagcatccttcaaaacaaccttcccggtaagcattttcttagctttttgagtaattacattattttgttacacttccatagtcatggtgcagttttggaagtcttggtataatgatttgactattttaatagacgggatctatgtacgagcatatgaagatagaatggatctcttaagggcagttatagtgggagcatacgggacaccttaccaagatggtctctttttctttgattttcaccttccaccagagtaccctgatgttcccccagtaagacatggactttgacttggcatcccttgatttggggttttcttttcgtgtgtaaagtaaattcatttttatgttgtctgacatggtttgttatattgcagtcggcttattatcattctggtgggtggcggataaatccaaatttatacgaggaaggaaaggtttgcctgagccttttaaatacttggactggaagagggaacgaagtgtgggatccaaagtcttctagcatacttcaagttctagtttcgctacagggtttggtgttgaactctaagccatattttaatgaagctgggtatgataagcaggttgggacggctgaaggggagaaaaactcattgtcatataacgaaaacacattcttattaagctgcaagacaatgatgtatctcatgcggaagcttcccaaggtgatatatctaattccactattatgctcaactcaatttaccaattttaatacctagttcatttctctgtttggcttagtaatttgttttcatgttgatgggatgtttaggactttggagaacttgtaaaagagcacttcaggaagcgcggtcactacattcttaaggcgtgtgatttatatatgaaaggttatcttataggttctttgactaaagatgcctcgctgagcgacagaagtgacccgaattcaacttcagttggtttcaagttgatgttggccaagattgtgcctaaacttctcttggctctgtccgaggttggagctgactgtgatgaatttaagcatctgcaacacccgcagtaatggccaatttgccaacatgttttcatccattgattcaaccaggtttacttttttttcttcatttcattgctgttctctcaagttcataggggaaaaaaattgcaatttctctagttgctcaatgtaaaagcttatggaattatatgaactatttgtttctttaattcgccttaaaaaaaaaaagaaacttgtgtttttcttgagacccttaatccattttaagaaattggggtttcttgaaacaactttttgttttgttttttggggatttggctgctaactaattgttctgattctttccttctttgcattttgagtctattctttgcattttgttttttagagagtgaaattttggttactaattcttcatttttttttcttcttttcttagttgtgtacaacaaacaaagctttatatacatttctttgcaatatataaaggtacatatgttctgtgttagttatttggaagcagtactgtaatctttttcctttcacttgtactattccaagttatgatctcttgtaacaattgcagtagaatccaaggatcctgagtacttgtgtgtgtgcatagctatatttacattttaataaagagaaatgctataaggtattggtgtatttaaatattgaatttcgtatattttaatttaataattattatagaatatagttaattatttcacaaggtgccacttgatgctctttaataagatctattataaaattaagatttaattatgattttttttttttgaattttgatgtgtatcaaattatactccttaaatttttctaaccgttaaatttttttccttaaatttaatatactcttgttttcagtaataaaatctaatgtttgaaaaacaatgaaaacaatctttgcattttatttaaatacattaagctgttttgagtccagtaaatattgttttggtctaatttttagttctttatagaaggttctaagtgacattaccaaatgatgttaactatttttaaagaatttgaccaatgtttttttatataatattataaaattttataatgcaccactatttgtttcagtattcgagagacttttttagtttaattcttttatgttcatttacagtatagttatttaagacattttgagaaatttaaaaaaaattaatacgctataaaataatgttcaaacagttggacatgtgactcttttattttaaggtaaatactattttggaccctgtgttttgtagaagttatagattgaattctcaggtttgttaaatgataaaatagaccttgtattttctaaaattgtaaaaataatatttttgagcttaatttttgacaacttttttttttaatataaacaactttaagacaattcttaccatggacagatacagaaagtgtaaacagttttgtcataaatacatttagatcggattattattaaattttattttgacaaaaaattagttcaggatcctatttgtactattttggaaaatacatggtctattttgtcatttacttttgtaaaacacaggtccaaaatggtatttaccttttattttatgagtatgtaaaataaactgtttaaactagggtgtgcataaattgatccaatcgaatgagaaccgaccgatccaattacaaccgaccgccaaacattgaatatccaattatgatcggatcagattggatgttatttttaaatatccaattggatcggatcggggtggatgtggcgtctaaaaattcaatacatccaacatctaatcgaactaatttatatttacatttagtttggatgagtaattagagattttatattgttatacgtcaaatcgatatgtatatatgaaaattaacattaaaattttactctttttttcttggattggatggatttagtccaatcc

SEQ ID NO: 222689 - DNA, 2180 bp, Cannabis indica
gtaggtggggagggtattatggggaaaatacaaaaagtgtcatatataactaattatgcatagtattagtttaggagaccaatttatgggtttattaagcatggaaattcaaatttccctatatcaatcaatacgtcaattggataaaatttattacaatgggaaaatgcacacagcaaaattcactagtttatgcttatcaaacagtttacaatggtcattacaaattttttctttcatttctctccaaaaattgctttggaactctctagggacttttcccttcctcttttggtccttcgtatactctttcggtgtgatgcacaaccacccttactcttctttctctttccttcattagtgcttttccttcatcattacaaaacattaatgcttcccacccctctctaaaaccgagaattccatttattgaaccttcaaaaaatccctggttatcctcctccctggcatctaatcgagcatttaatcccagtcgccattttcaggtggatacgaatcatcgtctcgattttgggcaggcgaagatctaggctagtgatggctagaattgatatagcatctctacatcttccctccactgttctctccaggtatgttcaggtgttattccatatctgtgttattctctttgtcttctcttagtttctccctctgcatgttgaccaccatgagcaccctcactgataaccctaaccactccatctaactcacagatgaggaggctttgatccatgactttgatcatgtctccatccaccctgaaccccaagccgattccttctgccttgttcttaagatcctatccccaaaaactatcaagcctgattggattcacaacgccatggctaggattgatatagcatctctacatcttccctccactgttctctccaggtatgttcaggtgttattccatatctgtgttattctctttgtcttctcttagtttctccctctgcatgttgaccaccatgagcaccctcactgagaaccctaaccactccatctaactcacagatgaggaggctttgatccatgactttgatcacgtctccatccaccctgaaccccaagccaattccttctaccttgttcttaagatcctatccccaaaaactatcaagcctgattggattcacaacgccatgaaggaagcctgggttgttcattgccctttcaccatctctgaatatcattctgggatgtttcttgttcgctttgggtgtgaaagcgaccgtagaatagtgatggaaggccaaccttggcatttcgacagttccttaatgatcttcgccattcctgatggttttgacaccatccttcccaaccagctacgttttatccctctttgggtccaggtccactacataccctttggttccaggtcctatggcctgactcagtttgttgctgacaccattggggatctcatcaaagtgcatctttcttctctttacgactctataacaccgttctattgggctttgtgctttatataatcttttctattcaattatcaataaagaaacatatttattttcattacttgtttagtgtgttattggttcatgtgatcattcatttgtttatttgatttgtaaattcatccaaatccttatcacatttatattcttatttattgtatcgttagcacagtgaaaagtaatcaagattgtgtgattaaatgtattcctatgatttatcagttgacagggtttaactgataggataatctacaatgtagtttacttgcaccttggataagtgctatgtcctttctagggcattggttaaagtaagcttgcgttggatgcatggagtatgcatcggaaggggccgatattgaatttgttcgttaaagttgaccaaatggttcttctcgtgatatataggttaaggacgtggtagtttaattgagtgggagcgctaatcatagataccgaatctatagcttctatctagatatagaagtcaaacaatgatttccttcgagcttggctaaatagagataaatggttgagtactcatttcagtgattatattagttcactagaatataatttataggtagctaagcattttaagaataaaatacattgaagagtgtaacagtaaattagtctctactcaatataaatcaactatagaggatcattgat

SEQ ID NO: 222690 - DNA, 1329 bp, Cannabis indica
tctgaggaattcaattgtacaaaatcgtacatattttggtgtgcaaaatgcgatttcaaagttcacatgctatgtggtttgttacctaaatctattacttgtgaatatcacatgcatcctcttgttctcgttgatttggctattgaaaatgagtttggagaatacggttgtgatatttgcgaaggtgaaagagatgcacgattttgtgtatatttttgtgaagattgcaagttcgttgctcatgtgcactgtctaacttctcaggtatatactaaatcactagctaatattaattatcattatactctctgcctaattttatttcaatttataagattagttgtgaaatgtttcatacaattatttagcttttaaattaatattctttgtgagcttttgaattaatatttgattagatagttaaccataattttttatatatatattttacttagtttttcttatttgttaatattaaaatttttttttccaaaaaaaataatgtacaaatatttttattttgaatttaactttaagattcatatattttcttgtttttttttttttctatcttaatacttcatggtatatcttatgttatatatgtatgtttttttttggaagaatattgttattgggtaccagtagtatctagtatctttagacatttgctttacgatacactacaagaattttgacaattaggggcggacctattaccggcggggaaggtccgcccctaataataaggttattaccggcggatttagggggtccgccggtattagtatttatttttttaagaaaattaaaaatataatttaaaaatagtaataccggcgggataccagtattagcggcggacaacccccgccggtatttacgaggcacatttaatgcgggaaaagaaccgctctttatttcaaattacaattagcggcggatcaataccggcggggatccgccgctaattgtaataaattattattttttctattaataccggcggggcccagtattagcggcggacccccgccggtattgttcggctatataaacacacaaacacccggttcccccatttcttccctttcaatttttttccccaatttcatttttctctcattttctctctgaaaaccgaaagcactctccaacccgcctcccctaattttttctctttgtttctgcctccggcttcgtctccgccagtgtcgtctccgtgtccgccttcgcctccgtctccgtttgaagtggtttaggtatttatatttaccaatatatgttttacagtgtattttttttagttttgttttttaatgtaaattt

SEQ ID NO: 222691 - DNA, 5958 bp, Cannabis indica
tgtgaaattctagtaacaacattatactaactaattcttcctctattgagttttgtaatacacgagtgtgtgtatatataaacctcattattcattaataaaatttataactttgtttactaatagataggcctattgggcttttaatggcgcctacaagggaacttgttcagaagattcacagtgatatagtaaagttcaccaaggtactaggccttacatgtgtgcctgtatatggaggctctggtgttgcccaacaaattagtaaattgaagcggggtgctgaaattgttgtttgtacacctggaagaatgattgacatactttgcacaagtggtgggaaaattacaaatctccgcagggtcacttatttggtcatggacgaagctgatcgaatgtttgacatgggttttgaacctcaaatcactcgaattgtacaaaatattagaccagatagacagactctacttttatctgctactttcccccgtcaagtggaaatcttagctcgtaaactgttaaccaaacctaactaactaactaatactaaactaagttgttgaatttccttaaaaaaaaaaaactaagttgttgaatgagaacgaatgggccaatggcgggcctctaattactaacaacaaggcccaattgaaatttaaagtacagttgaggggttttatgggaaaacaaaaagtaagagaggctccctttcgccccctttagcaaagcaacccatcccatatttgaatttaaaataaaaaaaataaaaaattcaaaaacgaaaagtaccgttggccaacgatcaaaaatccctcccaatttcattcatatatataatgcacacacagaattgaaagactctcaacaatctctctctctctctctctctcttgtttctatcgatcgatactgttccaagaatctgaagatggcaacaccggaggccacagtcactatgtcggccatggatgctttcgagaagctggagaaggttggagaaggaacttatggaaaggtgtatagagctcgagagaaggttactggaaagatcgttgctctcaaaaaaacccgtctccatgaggacgaagaaggtgttcctcccactactctccgtgaggtctccatcttgcgaatgctctccagggatcctcatatcgtcaggtaaactctcttttttctttttttcttttaagaattagggtttttgattttcagttgtttgaattgaatttaggttaatggatgtgaaacaagggttgaataaggaagggaagacagttctgtatttggtatttgagtatatggagactgatctcaagaaattcattcgttcatttcgtcaaactacggagaaagtccctcttgataccgtcaaagtaataatcatttccctattgttttgatgtggtgtgtggtttcattcattagatattgatcaagtagaaattaatttgtgcttttgcagactctgatgttccagctttgcaaaggtgtagccttttgccatggtcacgggatcttacacaggtcaaaatccatctctttcttcatatcattcattatactcttttcagaacttgagtgtgctcacatttctctttgcagggatcttaagccacacaatctactcatggatcggaagacaatgatgcttaaaattgcagatcttgggttagctcgagccttcactgttccacttaagaagtatactcacgaggtatattattattattcactagttctattcattaattatgtccttgatgattaaaaactcttggattgttgttgcagatattgactctctggtacagagctcctgaagtccttctgggggctactcattattcaactggagtggatatgtggtctgttggttgcatatttggttaggaatcatatctcttctgttcccttctcaatttttccctttttctccacactttatttatgtgtttaaactcatctctccttgtattaccttatagctgagctagtcaccacacaagcactcttcccaggagattcagagcttcagcaactcctacacatattcaagttcgtcgtactctccctttagtcttggctttttgaagtagtttgattttattatttatgccttgtcgtttattttatacttgcttgtctttgatttgatttttatacaggttattaggaactcccaacgaggaaatgtggccaggagtaagcaagttaatgaactggcatgaatatccccagtggagcgctcaaagtttgaccaaggttgttcctaacttggacaacgatggattggatctgttgagggtaagttatgtaatgagataacattattcacaatataaagatattgttaataccataatgacaagtttctcaaatttgattaaaaatattatccaacttttgcagcaaatgttgcagtatgaaccctcaaagcgtatctcagcaaagaaagctatggaccacccttactttgatggtctcaacaaggatgctctctaataactaaacaaaaccacaagagtgggattgacttggagacgggggttgctgctatatgctttctgaggggttgctatttgattttgcttttctcaagcattgttatatttctagttacgtgatagtaatagttggtggtactgtactggtaattgtaacaacttgataaacttgtgtgtagtaagaagacaaagtattacgcaaattttatttccctcaagttgtgggactcatttccattttactataaaatgagattcttgcaagtaaattcacaagcatagaacaaggacataaggctagatattttaaacactgacttaactatcaacaaattcaattcatgtacccctaatgagcctgtaagagctgccaagattaaataaatccttaatttgtttttacataaataataaaataaattgtaacacggcatgactcttgctgtgtccaaaagtggcttggacggactcaatatggtctcaattatcatcatgtcacaacaagccacatgaaatacgtgcaccaaatagtaagtgaaattgatgctaaggcatatgtccaaaacaagataacagagcattctttctctccggctccaaacagctgggtaatggttcctgagagagggaaaatcaaaggttttaatatatatacacacacaacatatatgaaataaaagagtttttattgtagtacctatgttcatagcaggtggtactacaaattggagaagaagaacaaactggtacaatggttccggctgcaccagaccgaaatgaactgcccccttaacgactaatatgcctgtcaaagggagcgctatataacgagctactacaatgccaacaactagagatttctggattccctcttctcttagaccttaaaaagacaacaacaacaacaaagttaaactgaagttcttagtagtttagtcatcttaaatgttgtttgcttctatgtgtatctacaacctctaagaagatttcctccaattataagtgtgagtgctggaatggccccatccctgcagagtttgggagaacagtttagatggttaataagatgtatattatatagagattttcggaaaaacatagtttgtaccccaacaatacagcagagtcttggatcactctaagtggagcaccacttcctatcaaagattttctgaataaaggaaccactccaattatgtatccaataatctacataacagaaaataagtgtgttaagagtagagagagtccataactaaatgatcaaaaatatacagaacagaattttgttgcctaaccgctccaatagttgaaggggccaacaatgccttgagatttaaccctctaaacagtttaaccaaacgttgttttatccctgaactttctgaattccccacctgcatacaattcagctcaagaagatgaataatgtgattgattttgaattagtaagagtattgttgtacaaccttagcagttgaagattcatcatcatgtacggtctttggcagtacttcttcttcacctgcaacatcctctggggaaggaagtagtagtggttcttctaatgaaccactagaagacttgatgtcgtttatactcattgaagatacacggacgatgttatacacatatgaccacaaatatactgctccaatctgcaaattcatcatcatcatcaactcgcatattacaagaaaaaacaacaaaacaggtccccgaacctaacttgatttcgattttaagacaagagaacagcagaaagttttagtttttgtttcagtaaatatcaataacattctaattaattgcagaaaacaatataagaaagaagcttacagccattgaaagggaaacataagccatcccataagtatagcagacatcagagtctccaaaggggcttcctttttctttacatagtgctgggattataatgaggggtaagttccccaaatttcctgtatgtttaaatcaaaacaagacttggtatcttaaatcttttctaaataaaaaacactaatctctattgggacttgagagtgagtgaataatgatctacatacctgcagcacagcaacccaaaatgaggcctctcaagtgttgaggtggtcttgtgaagtggatcacaacccatccaagtaatgaaccaataataaatgtaatgagaatatttacaggcataaaccacctaacacattccacacaattacaaatcttaatcaaattcaccattacaaaccagcaaatccaacaaaagattcttcgtttttctttagttacttacaactttatcatgctatcatatgttatggtatttgcgaggctggatcccacaagcgcaggactgaatacataaaaaacaatctgtatatggtgtggtaatgatttggtaattattagttaaacacaacacaaacacaattaattatatatgtatatatattttcatagatagatagattttgacttactgtgtttaaatatttgagcatctttccccaaaatattaactttatctaaagcaagataggaaccaagtccggtaagcaatagaactttcaagactggtatagatgctgtcacgaagagccccaaaaggtccatacttccttcctctgcaacttagaccttaaaagaagaagaagaagaagaaagggttaagggtcagcgatgagagtacactttatataagactagtaggtttagcaatagagagagagtaatgaaaccatgcacaaaaccacgtggcgggaacggctggttctgtgcgcagcagctaataattcttcataatattattatacattacatgcatatacatacagtcattcatcattcatgtcttaagcatatttaaaatgtttatattgattaatagctaaaaaagagtttatcccgctattatcggatgacccttctgtgattattagtctctgatttgatttgaattaggactacgttacgtactgaccccacaaattgggggtactgtttttaatctttttatttgttacatagtaattgtttttttttgttgaataaatatggtaatttgttaaaatagcagttcagcaaaaataataatatatataatacatcgactaaaatgggcattggttttgaacattattggaatatttgaagcctctttctggtaatgtattaatgtcatgtccttcttggtcttttactttctattttaggaattattttacaaacctaattttaaattattttactatttttataatttatttactaaaaatacagtattttgatatatttttttatgttgtactcttattcttttagtagaatttttgttatttatatgttattttgatactgtttaaatgttattttttgattatttttatgtaattttttattatttttataaaataccgtgaaaatataaaaaaaaaattaaatataaaaatataatttt

SEQ ID NO: 222692 - DNA, 3709 bp, Cannabis indica
gtaacatcccatagctcaatattgagaagtcttttgcctgaccagctagtacttcctctcaaaccttgactaactcagaatctttcaagtgtacccctctgattctgtctaataagtctgactggagtgttaggttatgaagttttccaaaagaaaattcaataccaaccctaaccatatctaaagctaactgaggagagatcactatggtactacaaacctgcccaagaccttttcttctcaaagcgtccgccactacattggcttttctgaggggatacaaaatcatccactcataatccttgactagttctaaccactacctttgtctcatatttaaatctttttgtgtaaagaagtagttgagactcttgtggtcaatatagatcttatatttttctccatactgataatgctgccaaatttttaaagcaaacataacagcagcaagttcaaaatcatgtgttaggtatcatacaccttcaactggcaaaaatcatgagcaatgaaactatcagattacataataatgcaccccaaaccctgtctgaatgcatcacaatataccacaaacatttcttaatctaatggaaaaataacactggtgtcgtaatcaatcgctacttcaactcttagaaatttgtttcacatttattagaccttacgaactgttagtttttcttagtcatttctgtcattggcattgaaatcttagaaaatacttcgacaaaacatcagtaatacactaccggtctaagaaaactttgagcttcagtaactgtccttggcctcggccaatttttaactgatttaactttcccttaatcgaccataattccttcttttttgatgatatgccctaggagaatacttgtcataaccagaactcacatttcttaaactttgcatacaacttatgatctctgagtcgttgtagaaccattcagagatgttgtttatgctctacttctgtaatgactgcatgattaaattatagattattaaggaaattaacattaattatcactattgtgttattatatatgattatatttattgtgggctctatttttataaaatgggcattaggttataatttctcaattttgaagattttattaaactctcagagtattatcaatgctaaatatgaaatatgcattttttttttctgattttagctcagtggtgatggaaaatacatctaatggccattaaagtcacataggtaaacatagaacctttttattttaggagacaactatatgtttgagcttgaaatatcggggttaggtgaggttatggtattggaccattttacccctaagccattttattatttaagcaccaaaataagggtaaagttggcatttgaataaatggaggataggtggattatccctttaagtggctactaaccactacttggttagtggataaacttaggttattattgatttacctagattaagacataatcattaaaattaagtttaagaaaaacctatttcttgatgttctctttctaactttcagcttcaaggggaaaccagagaaaaagcttttcaacatcaataattttttgaggcttcagctaggatttaaagtggttcaaatggaggtaaacctaaaaaaccatatcgtttatattgttgaagttttgttaggtttagggttaagttgggatttaggttctgtttttctatggtttcggttggggttcttttctgcgtattaatattgatgttttgggtttgtttgagctatttttgttgattaattttggatttgagcaagtttaagtttaagaactgaaacatggctcaataatggtgttttgagtttctgtgaataattgctactgcttttacttggaaactgttcttggatgatattacaggtgttttggaaagtttagttaaatttagggaaaattaattaagttttgaggtttttaccttttcctacagagaaccagttaaccagttctgtagaaccgattaactgtttcttcaagcagggcccaaggaactagttcaccagtttgagaatttagtttaccgatttgtgcagtttttagaccttttatttttgtttttcctcagtatttggaatattaccatgctagttatcaataaggaaacctctagttttaagtttagatcctcgagaaggtttatccaagttgtttacccatttttgtgaatgtgacattgggcttccgttcagcacgtgttttctattcgggtcgaccaacacgcttgaatttgaaaatgaggtaagattggcataaaggatgtatatgcatgtgtgtatgtatttaaattgcatgttggtatgctacagtgttaccaatactagtatgggatgagtacataatgcatgtggtacaacactcaaatggtacctgggagtacaatttagccctaccaacactagtacagaatgattactttagtgcatatggtatagaggtcgtacttttgttaagaatgttcttgagcatctgataagtcttgtaaataggcatatgggagcctaagtacaaatcggtattacattgtagattctatgtttttcttactgagtttattgactcactagtgttgtttaccatgtgtaggtaagggaaaggctaaagcggagaaccagtgaatcaagggcttggcaatgattataaatgttgcgacaatttagcttggagagttcggtcttaaagtattttggggttaaattttttagtcactgtgtgacatgctataaaaatgtattatgttatgaaaataatatttggaatcaggatcctgacttttgcaagaatatttatatacgtatatataatgataaaagttaaaatttaaatcttcattatttttgagaaaatttctgtagtgtgtctagtagaagggcgttacaatttttggtattaaaaccaccatgttgtttattgaagatcgttaagatatgtacaatcattgccagaggtgagcttgattcacggctcaataagcctttacttgtttattaatttgtttaatttggaaaacataaaggaagcatgttagttgttttaatgtgttgcctaaaatcgataaatgtggaactagggatgtatctgaccactgtctaacctacatgccttatgggttcgtaggccaagtcctataatatggatgcctagtgaaacacaagaggtcagggtgaaatggttgagaccggaggtggtcacggtggtcaaaaccccaaaaaccctcgtggacgcagcagaggtcgcggtcgatctcaaaggggtggccaatggaatcaacctcaggatcctcttaaattggagcaaaggtttgcagagatgcaagcccgaatgaaccaacaagaagatgaaatttagaggtttagacaacagagtcctcctgtagtgcctcctctacaagcccagctgttatggttccaatgttgccagtagagtaacctattgctggtagctgtataaagcctttatacaaacgatttcaaaagcaggtacctcaaatctttttagggggtctcgatgttatgaagtcagaataatggttgacataattgaaaggattttgaattttataggagtcatcgagattgatcgagcgacatgtgctacgttctagctccaggaaaatccccttgtgtggtgggaaatggtgtccctcactcgagacgtcactacaatgacttg

SEQ ID NO: 222693 - DNA, 1683 bp, Cannabis indica
agtcttattaatgatttgaacaatgtaatgtaatgttgatgtgcattgcaagacatttgttcgataaaatgtcagaaagggagcattttgatgataaagaaatacgagaaagcaaagaagcagagtaagatcaatgaaaactctcatgaagcaaccttccaaattacaagttttatttttattcgtttctatttttcttttctttcaatcaattattcaatattcattttatttacatcagataaatcaaattcagataagcaagttggcttgtcgtgagttgagcttggaatagtttgaaagttctaaggatgggagctaacattgtcgtcatgattcatgaagaatattaaaaggttgccattgagagttttatggcaatactttcgattaaataaacttcttatacttatgtgtaaatttcttcttatagattagaaatatatattctaaattttcttcaacattatcttggagaaagtctcataggaattaggattatcaacatgacaaatttaagcacctgcgaacatctatatttttgaaaaaaaaataaactaaagccagtagaatagtttagtacatctttcgtctctcagctctcaaaggttcttcactgtctttgttctttttttcttttttttttttctattctacccgttcttgtgtgtgaactttattttatttggcaggccaacatcaagagagcttattgtgatgcctagcaatttctagtgaacttaattttattcttgtacacatgggaatttaagattagtaatgcgatggttggatggttgctgcttctagtaattattattcttatagacaaatttaaatatttgaacttaagatttcttttcgcataatgtggtgactcagtacactttctggactgtgtaggtacacatgcccatagcaggtccacactggtctttttgttcatccatggtgagccactgtttgttggcaaacattatcaggatacggcaatttcagacttgatcattgttgcccaatcagagacctcaacttggaaaagccatatatggtgagaaatcattcttttcgttggtttgcatctaatcaaaaaggatagctggttattatatacgtaaatattttttgatgcataacaaagtactattagataattgaacttcaggcaatattgtaactgatgttttcctttgctgtacatgtgagtttatctttctctcttttttatttgagcagtttattatgtaatgtatatttgatttgttattatgttgatggaacaaaatcaaagatgagctcaaactctaagaaggctacattgaatatactcttgacagggcagggaatggtcagtatttgatgatgttattagtacttttgctatattattactagtaattaatgatgttatttgttgacttgtggttcttagagatcatcttttaatgtctcccaataagcagttcaagcaatactggcatcatagatcacgcatgcagatcctcagagaatgttttaagagtttgagagcaagtgccttcaattttttttttgtttccttattgtattgctagtttctttgttgttcatttaattaggtttgtattgggtagtttattttatttctcttgttcgtaactctgattcattgactctgctattttagtgtttatggacaaagta

SEQ ID NO: 222694 - DNA, 1483 bp, Cannabis indica
ctctctctctctctctctctctctctctctctctctctctcaattcaacacgacactaagtcaattttcttcatcacatgttcttaatctgtaacaccttattctcactattgtgatactgaagagagtcatagctagaaattacaagctctaagcttgtaatttacatggtattatctcaagagtaaatacaactaaaaggaaagtaggtcattacctattcatcaaggagactggagctctataaattcttctgttacttttataatttattgttgttatttacacgtagtgataatcatcaattaataaggctctgctgtcagttggctaaattttgagtcaacaaagagaaagaggtggcttgtcttagactgaccccttcacaatatatattgaaaaaatctcatttgtggtagaggaaaactatggctccctacaactctttgaaatttatctcagttcaaatcctagtgttattctacgctttctgatatgttcttttatatgtatttatttaaaataatgaaagttgtcaagcaagctggtatggcttcaacacatattatccaagtacctgactatagttatgttgttgcctcttttctctgttgttctctttagagtctccagcttataaagaaaaggctatggtaggtccatctaatccttctaatccaactccacatggtgttcccacaaccagtttcttaacattcgttttcaatgactcactgtcaaattcaaatatggaatctgcagggcctagaccatcatccaaattgagttttccattactttccgctaaaacatctgaaactccttgccccatttttcctttctcatcctttaatctctctatttttgagctgcaaagatctaagtttggaccatctaatagtaagatctcccttgcttttttatttttgcatggcagttgtaaaccctaaagattgtctcatttagttaatgccatatgtacttcgtgcagaaacatgtagggcattggatgaggaagatggtgaaagtggtgaaagtgagaatgattttgaagtttctgtaggaccataccctcgctatgaagacaatatccacaaagaattaaggcacaagcgagcaggaagaggtacttgttagacaatctttagggatgtaaatggggcggggcgggtgcagggattgctcccccacccccatacccgcttcttaaattcacccccatacccgccccaatacccgtttaaataaaagcgggggcggggcgggtattacccgacgggggaaggattcccatcgggtacccattacatatatatttttgaaaaaaaaaataatgtcttaaagagaattaaaaaaaataatcataaaaacttagtaaaacaataaacttaagtggcatagtgtgtatagtaaaaaaaagagtataatcaataaaaagcctaaagcatgaattattttaattgtaatagttattattttaaat

SEQ ID NO: 222695 - DNA, 1335 bp, Cannabis indica
tgtaatggccaaaaaagttcagaggcacaatttagtacatgtcaaaattcggggggaaaaattactattactacgagacatacgactcatattgttgtcggcttttaaaaatatggagttggctgggccaacacaaatgtatttacaactataatcttagtacacatgtcaaaattaatataaaagtagcggtatttaaaataataaaatagttagaaataatttcataaataatttacaattgacgttggtatgagaaattaatttaatttttttttatagaaattatttcttactttttttttggtgaataaatttattcttacttatttgagtgaaaattgccctaaaatttagagggcatcgactttcacattgtcgtgcttataccataccgtttagactcgattagaatgtgaatgtgattgtatttagttgttttttttaataaacaatggattttttttaaaatgtcaattaactaaaataatagtctgcaatttaattggttaatcttcccgttagagacacgactaagattaaaactagaaaaacgagtcaaataattaaccgcttaattcccacatcatttaacaaaaaaaattaaaataaaatcagatgaaaaagattgcagcatcacaattaactttaaaaatacatatatttagtttcatccactacccagaatacacaacagttaaaactgttgcagcaagttcattgtgtaaggtacataactgcacgactaagaaccctttcagtcgcagagaacttgttatttccaaccactaacaacaatttgatggcatcaaaaaacaaagaagaaccaacaacaaaataaaactacattacacaaacaagactaagatgaaaatgctcaaacatatatcacaaagacaatacctaaatactcaaaactatgtcacagaaataaaactaattggaaaagcaaaaatcaaattgtaattacaattcggaccaaattacatataaactcaagaaagatcgacagacctgacccaaaaaaaagacagcctctactagttataaaattaggaaggggtggcaaaacgtgtcatcgtgtcgtgttcgtgtcataatttatgtgacccgcttttatatttcgtgtcaagcatgtcaacccgtttttttaactcgtggctaattatctcaaccctaacccgacccgtaaaaaatcgtgtcgatctactgtgacccgttttgctattattgaagctggaattgtagagaaaaataataaatttgagtttcattagaaaatttatatacatttatctatgtataatgttaaagaaaattaaatttaaaattttt

SEQ ID NO: 222696 - DNA, 1751 bp, Cannabis indica
gtaagagaaaataagttgatattaaaggtgggaacaaagagcacattttgaagtgtaatatgcttgtttagatggactgtaccgatcccttttactggtatgtttgcaccagtaggaagcaccacatgtgtggggaaaaacgttgctggaaaaagtttgaaagaggcttcttgtggcacacatatgatgagttgccccactatcaatgatccatgaatatataggaaaaagatttgacttaccagccatgttggaagcagctgggagagtattgatgtcctcacgggtagcattttgagtcaattgttggctgaggagggaaatgagttgttggcattgtgtattcagatctgagttggatgttgaagtgggaatagcatctgagttagcgctggtgtgattggcagcgggtttggccttttcttgcttctttttatcaccatagccgggaggaaagccatgaaggaagtaacatttatccacatagtgacctggcttgccacaattagtgcaagagggtcttggcttcttggattttgggggaggattgtttgaaggcgcacgggcagaggcagctgaaggaactgtggaagagccaagagtgcgttgtctctcttcttgaacaatcatggcaaatacccttgagagattgggtaggggttcattgaggagaatttgagctcgaaccgaagcgtaggactcatttaaaccagtaagaaactgtaggacctggtttcggttgtaatattccaaaaaaactttcattgcaccacaagtgcaagaagtgttgggttgaaattcttttagctcatcccaaaggattttgagctttgtaaagtaagaggtgacggattgatcaccttgttgaagatgtgttaattgggtttgaagttgaaagattcgagggccatttccctcattgaatctttcttgcaaatcatgccacatatcggtagcaagatcaaagtacatgatactttgtgctatctcgggggaaacggaattaacaagccaagacatgaccatgttattgcaacgaatccaagaagggagaagggtgttaccagcgactgggcgaggaagagagccatcaatgaaggcagatttgttctttgccgtgagagccatcataattcctcgtttccaagattggtaattggtgccattgagcacggtggaaactaagactaatcctgggtgatctgcattgctgaggaagaacgggctagatacatcttcatgagccaatcgatcggctaaagaacgtcgagcctgaacaggaggatcagtagcaataggtgcaggagaggagtttgctggtgcgatcggttctggttcgtgctggatccgagatcttggattgttgttccgtcgagtagcgatcgaggtatccattaatggaggtgcggaagtagtgtcagggttagactccgggtgttgattctcagaagtagatgggggaatgccatcctgagaacgggttgtgggtctagccattgaagaaggatcttgattgtctgctgataccatatgagagaaaatgcagagaaaagatgaagagaacagagtaaattgctctgttagatctgttattattttccaaacagtatgtacaattacaagaaggagactcttatttatagtgagctgagttagttgggaataactaactcagctgatacaaagtaaaacagaccaagaattggttatatcagagtcggttgtaagggtagtcttgtaatattgtaata

SEQ ID NO: 222697 - DNA, 1914 bp, Cannabis indica
aaacaaaagaatcaagcgtaaaatagtcctaaaactagaaatgaagagcgaaaaactacccaaaaatacaacccaaaacttagaataaaattagcctaacaaattcccccaaactagatctttactcgtcctcgagtaaaactaaaaactaagacaaagaaataacgacacgacagataactgagcctccaaataattaaactaccactgccagctgtgcaacttcaatcaattggcaaaaccagaatttcaattcaataactctaggaattaactcggattcacaagttagaaaaaaaacatatgcagatgcaaaacactttaattggaaaacatatcacaatcattatattcttactaacgttccaccaaccaatgtgcaataagcttgcatgacctacctctctccactaatgtcaataacccctgctcggaatcaaaagttcttttttggttgaaatgtcatggcttaggtgaaaggtagataaaaggtcatttaggctacatcataccatacgcacattttaatccaaccaagcaccgccacaaatccacattttcacaaacttgtaagagattgagaacgttcactttatgtgcgtaccatcatcttatttttttttttcttttttattctttttgatatattctcttttttttttcattctttctttatatatatatttttttttgagaagaattagcaaattttttttttcttgtgatgatgaagacactttcactttacataactttcctcaatctcccacttctaaaataataccaactcataacacttcatttccccaaacttaattatacacatatggcataataagatacattgggaataaaagtaattaaaagaaacacactaggctcaattaagtggttaatattttgaaataggctaaggctcaactttgggtatactgaggacaaaattttacagtaagcttgataggctcaatcggtccaaagaaaattacctaaatcattttccaagcaacagccatcaaggatttttcttcaagagagtaagtcacgcatgttctattccatgtcaagcaacattccatagaccaaagtagaacaaaaatgatactttccaaaaattaataatttacatctatataaaataaaatttttgcaaggtatccaattcaatccaaaaagtttaggaattaagcacgcggtttaaattttaatcaattaaacaaataaacaacatcagttcaattaatcaattatcatctgctcaattatcaacacatgaaaatttaaaaactaaagctaaaccaaactaactaacccactaaaaaaaagacagtgaaaacataaaaacttttaaatccctccccccaaactaaagattcacattgtccccaatgtgacataatattcaaggtaagaaggacttacctgaacccccatcagaaggtgtttggcatcggaggctgatcgtagggatgaaagcaaggagggtatgccaagtagtttggatcctcgactctaagactccacatgttaatcagatgattcaattgccttacttgattttcgtcaattttactcctttgcaccatgtaaatctggatatggtagttctgctggataatgtagttgagttgagcatgcatatgttgcatcctcgcctcaagaggagtaggaaccgcttgaggcatttcttcattttaattttcatcttcggggacaggagtttcttgttgttgattttgacgagaaggaggcggttatccatactgatgtggtggcttaaatattcaaatcttttttgggaaacctgagtgcaggagataaaaaatgaggaactcttcagttatcgtgaaatttctctaggctcttttctctggtctctcgagccttgctcaggcccgcgaataaaatatataa

SEQ ID NO: 222698 - DNA, 1570 bp, Cannabis indica
atggttcttgcatgcacgtaggtttttgtgtgtgaaagatcaatgggggttctgtacttcttcaaccttccttcctggaagagaaggtctgcttgaagtctattacacacccactgatgtttcaccctttggtcttttaaagcgaagtcattgcttgaattttgtgcaactttagcctttcctcgcaggagccaaagtctgccacataaaattcagcatggctctccatgcacatggtttcttgtgcgtgaaagatgagtgggggttcaatacatcttcaatcctccttcctcaaagataaggactgcttggagtctgtcacacacccaacgatgtttaaccctttggtcttttaaagcaaagtcatattttgaattttagtgcaacttgagccttccttcacgaaagccaaagtctgccacataaaattcagcatggctctcacatgaatgtggtgttttgtgcgtgaaagatcactggcggttcgatacgtcttcaaccctccttcctaaaagagaaggactgcttagattctatcacacgcccatttatgttacaccatctagactttaaagcaaagtcatcgcttggagtttattgcaaccttagccttccctcgtaggagccgaagtttgccacaaaaaattcaacatgactcatgtgcatgaagttttttgtgcgtgaaagatcacttggggtccgatacgtattcaaaccaccttcacggaagagatggactacttgaagtctgtcacacgcctagtgatgtttcactctttgatctttctaaggcgtagtcattgcttaaatttgtgaaacttcacttcctcgcgagagctgaagtctgccacacgaaattcaacatggctcttgcgtgcacaaagttttttggttgtgaaagatcattggggttcgatacatcttcaaccctccttcccggaagagaaggacttcttgaagtctatcacatgaccagtgatgtttcacactttggtttttaaaagaaaagtcatctcttgaattttagtgcaactttagccttccctcgcgaggccgaagtctgttgcataaaaatcaacatggttcttgcatgcacgtaggtttttgtgtgtgaaagatcaatgggggttctgtacttcttcaaccttccttcctggaagagaaggtctgcttgaagtctattacacacccactgatgtttcaccctttggtcttttaaagcgaagtcattgcttgaattttgtgcaactttagcctttcctcgcaggagccaaagtctgccacataaaattcagcatggctctccatgcacatggtttcttgtgcgtgaaagatgagtgggggttcaatacatcttcaatcctccttcctcaaagataaggactgcttggagtctgtcacacacccaacgatgtttaaccctttggtcttttaaagcaaagtcatattttgaattttagtgcaacttgagccttccttcacgaaagccaaagtctgccacataaaattcagcatggctctcacatgaatgtggtgttttgtgcgtgaaagatcactggcggttcgatac

SEQ ID NO: 222699 - DNA, 1774 bp, Cannabis indica
tgtattttgttccccacctcacttgttggagcagcgagtagctggtttaataagtttactcatcattcgataacttcctaggatcagctgtccagggatttcaagaaaaatttccaggctgctaaggacagatgacccaaagcagcctcactaaccaatatagagcagaagctcggcaagacacttaaggcttacttaaattgttttagcacggctacagctagggttataaatttggatgacagcatccaacacacagcccttcaggcggggatctctactgatccattgactgtagggggcgagttgtgggatgacttacaaggacgcctagtgagaatcatcaactgagttcaacgaaagggctcaggtgttcgttcaaaaggaagaagcccaaaaggaaatgaatttgttgaaaacaagctcgggaggaaaacccagcaatgtttcaataggaactatttctacgagaattgataactcgggggcttctggttcgaagagaaaggacagagttaaggaaccgtctaaaaataaaaagaaaaaaaagaagcatgacaaatacgtgcaagtgtatactatttataccgagctcaatgaaactcgagtcaatatttacctcgcacatgagccgaaagtggctttcggtaagcctgaacccatgagcaattcgaggagtaagagggatcctaacaagtattataaattccataaggatattgggcatacaaccgacgaatgtcgccaactaaaatatgagatagaaagtctcattactcgaggaccttttaagtagtacgtgaaaagacagggccatggatacaaaccagcccagtctgcccaataacccaaacaaccaggggttacaacctattcccgttgagggagagaacatcttggttatttcaggagggccacatattgtaggagaaagcaataatgcccagaaaagatacatgaaagagataaaaaagaagtagtcggcctttaccctagaaccttcgaagaaggtgaaaactaaggagcgtcccattgtattcacggaagaatatgagaaaaacgtgaggtatcctcacgtcgatccattggtgattaccattcaactcgtcattaaaagaatcaagagagtattaatagacaatgggcgctcggtaaataacctttataaggagactctaaagaaaatggggctcaaacttgaacttttcatggaactgcgaggagaaagccttccatgagttacttttcaggcggcaacttgaaataccattattgggcggcttctgaaagggtggcatgaaaaacactgcagtgtacatctccttgtattccttgcagatccatttgcatctcgagctacttaaggtgggataagggatcttccttcccagtatacatcttccaggttggcatcttaaacttgtggggcaattccaggatattaagctcgagggagaaaggggttcaacgtgctcgatccagctcgagatcgttgttcctctgataggccaggccttagaacatgttttttagttcgtcaaattgtgcctgcatggctggactaacctgttcggcctcttggccaacctaagtcacatcagcatctctttgaacgagatttttagcacgggttccgggttgcacaattggcgcgtcaagctgatcttcctctcctctcctactgttcagatcgtttatgagatcatgagtcgttcccattctatcaaatacagaaacacctggttgcctcaatgactgattggtttggccaatt

SEQ ID NO: 222700 - DNA, 2610 bp, Cannabis indica
tgctcttatctgcatctattggctcagtttcacaaagccactactccaaaacatgcagctgctggtgtatcatctcaggctaaattttcaaaacctccccctgttcctgctgctacaaggaatcctcaaacatggcgatctccccctcctggcttgcataaattaaatgtggatgctgcgtgtgatcaggctgctggaaaattaggctacggtgctctaattagagatcatttaggtgatgttgttgctggttttcctaggccttttcatggttttttcactccaaaagaaatggaagctgctgctctatttcacagtttaacatgggccattcacaaccagctctccattcacttgattgaaacggattctctcttgctggcaaacgcaattaatactatgtcttctactcatcttgtaacttcttttcatgacttagtagaggacattacttatcttttatcctactttcctggagtaaaggtttctcatgttaaaagagaagccaataaagctgctcatgctttatcaaaatttgctcttcgattggatgaagatatttcatggttgggtgaaattccatccccaattcattctgttgttattgaagactctctcaattaataataacagtttttactcaaaaaagaaaaaagttaaatcgtaaaaataaaattaagtctaaaaatgaagaaaaaaatttgacaagtggaatgaaattatttcagattttttgtcactcctttatctcactaccgataatattatgacctttttttaaaaaaataaaaactcacataactccgttaatcaatagtggttagaaaatagacttttttttgttctttttgaaagtggagtagacttgcactagtttttaataatctaattagtttaacatatttttgaattaaaaaaatatatttacattactaaattatgagtggtatataatatcatccatataatgatatctttgtatatattaaaaatattaaaaataataataatttctttttaagtgtactactttattatatttttatttttttgaaaggtggtataataccttattaaaatagtaatgtatagcttttttccctacaaaaatatattaagaaaattttaaaaaaaattagaatattaaaatttcaataatgtatcatataaaaaataaggggtttttttttctagttttaactaaaaaaaataagaatattacaaaaatacttccagctagccaaataaataaatatgcagcccaaataaaaaaaaattaatacaaagaccacttacacacaccttcaactcaggatccatggttcctgagaaactatcgtgcaaccattgcgcaaccacggagtaatctaacgcaactgaaacgaaaatttagccagattgagaaccaccattaattccgatgacttcaactgagaagacgactagaatcaatcaaaacagtggttgtttcgaattcatgacaaaaaagtgtagaaaaactactgcgaaactaaaattcaaccagaaatccaatttaatttacataaaactaatactctgactataatttttagatccaaaaaatgcagatctcaaaaagttgatctggagttcccaaacaatccaactcaagtataatccaaaaaaaaaaagtacatcaatactatggtaaaatgtttatcctggtgtatttttgttattttccaaatttctaatggtgaatttgttcatattaaatcatgaagagacatgtagagagagttacgtacgtagaaacactgttctgattttcgatgtttcataacaattgcattacagttgcataaacattttgctaacagttatttcgtctcattgaaaccttcgtctgatgcaatcttcggccaaccacccagcaacctttgtttgatcaatcttcggccaaccacccaacaaccttcttctgattgaaaccttcatctaatgcaaccttcgaccaaccacccagggccgaccctaggcataggtgggctaggcccgtgcttagggcccacacttttcaggggcctaaaattaaaaatcaaaaaaattattaggctgttatttaagtaaaagtaagtgtattgtaaacaacaaatattcataacttaattggttaaggtgtatggcatattatacaatgtcatgggttcgaattccataacactctttttaaaaaaatatatatatatatattgaagggccccaaaatcaaattttccttaggcccataaattttcagggtcggccctgcaaccatcgtttgattgtgtaagtaatagtgtaagaagtatgttggtaattaaaagcacataaaaggtataagcgttgtccacaccttatggagatatttttgtaaataaagtgtcaatttatattttccatataataattctaaaaataaactatttttatatttttataatgaaggacaaaaaataataactcatttgattgcaccgctgttatccaatttttttgcattatgatgtggcagtatgtactagtgacacatgtcgattattctttacacttggctagagaaatattccgaacaaacttcaagcaatacctctgcacacacaaagtcta

SEQ ID NO: 222701 - DNA, 1605 bp, Cannabis indica
tccacattactagagcggtcattacaggttggcatgaatcttggtcctgatttttctcataatctgcctcataatgagaatcgcaacaatatattggagagtttggaaggtaatagtgattatgtggctttaaatgtccgtaaaagtggggatttctttgattctacctttcctactgtgattgactcaaaaagaaagaggccaaacaatgggctggggggtatcgtgggcccagaggagaaaggttacaatgttgttgtggatgtcatggagcatgacaatgcgggtactccaaaaaacgattttttggcgggtctggaatagccataagttgtataagctggaattgccgtgggcttgggaacctgcgggctagacaattcttagcggaccttgtgtcccaaaagaagcccaatttgctatttctttgtgaaacattatgtaataaggttagtatggagagaattagagcccagttggggtttgattgttgttttgtggtggataatcgaggtcatagtggagggttggcactgatgtggaacgttgtgaatgaagttgcgattcaggggttctctttcaatcacattgatgctaatgtcactctccaccattctctgccttggtgtttcacgggtgtctatggcgagccaaaacgagagctgcgttacaagacttggactctccttcggtctcttaaaaaatgatagcacacttccatggtgcattatggaggatttgaacaacttgggttctcaacttgaggagaaaggtggttgggacataccccggatggtctcattgcgggtttcaatggggttttgagtgattacaatttgattgacttgcctctgttggctacccgtatacattggagaagggaagaagtagtggggactggattgaagaaaggctcgataaagccttggtgcctcacgattggttggctctgtatgctcagccagttctttacaacctcgagttctctacatccgatcactgccccattcatttggtttttaaaggtgtgtttccagctacttcgtttatttcttttcgtttcgaaaacgcttggctccgtgagccattgtgtaagcaacttgttgaaggatgttgggaaggctcaggtcaacttactattcaagacaaaattcaaaaatgtggtgaggttttgggaaagtggggtcgtgacatcactggaagttttcgtaagcgtattaaccagtgcaaagaccagataagaaattccaaatggggtagggacccggtctcaattcaacaacaccaagaagctaaggctaagttgtcagaggtcttaggtcaacgtgaaattttctggaagcaaagatcaaagcagttttggctaaattcgggtgacaagaatagtaaatactttcattccgttgcaagctccaggaaaaaaaacaatagcataagccaacttcaagataataatggtagatggtccaattgggaatcggggttggagcatgttatcactgggtatttctaagatttgttccaatcatccaatgttgatataggcacgatgcttgatggagtccgtccttccgtgtttcgcgagcaaaatgatgaacttttatt

SEQ ID NO: 222702 - DNA, 1948 bp, Cannabis indica
taccactcattaccaccaccaatgatacagtctcctttctccaagtaatttgatagtgtttttatagtttgatcaacaggaggcccaacctttacaagcatgattattacacgaggtttttggattgattgaacaaaggatttaggatcatggaaaccatacaagggaagatttccttcttttttagcactttctaccgtttcatcaacttttgaggtggttcggttataaacagaaatcgtaaatcccttttcagcaatgttgagagcaagattttggcccattacagcaagacctgccaggccaattcttgttggtcccaccattcttcgttttcagcactttatatctgatataggcataaaaatgaagggaatgaaaaacttaaagaatctttggaaaaataacagaggaaatttagtctaaacccaacaaacaaacaacacttaccaaagggaataataatgaaacttgtaagcactaaatcaactagtatttttttttgcacaacatgatatttggattcaaattagattgacaacaacaaacgttaaaagattatactaaattaattaaagctagcaaatccataaaaatcatggaatgacatgaactatttagaaaatcaaattggtatgcgtgttttaaaatttaaagaatacattattacaatgcaccattttaaatgaatatatcattgaattaacaaaccaaatgtctaaaaacctaataaactataaagaactaaacatcccaaagacaatataaaaaattaatcgaaccaaacaagttgtttaacctatctaaagagcatgtacaactaatccatgtgcagcacattggtagtgcgacaagcattatcgctagtttttttttaagtttaccactatcatgatgaagcaagtagtttagttgggtaaactctgccccagtccaaagtttaaatacttataactgtacatataaacaagtgaaaactttgccgattgcttgagtgttcattaagcttaagcctgatataaatccacatagtactaatacccccacatgaactaaaacaacaaaccgtttatcacaataaaaagggatgtatgaaatcttgtgacaaccgaaaatatttacactgaaagccttcaagtttaatttacttgaagtctccgggtgcctaggtatccacccttaagttttcactgttttttcttattccataaaatacctatcaatttcacaaaaaaaaaagaaaccccataaatttatatccaaaagcacgcttttccatacaagtagatcaaaaattgctgggatacaatgagtttaaaatgaaaaataaataaaaaaaaattgaagatacataatctaacacactcaacacaaagatttgaagttaaaataagatcaaactgtattagataagtaaaaaattacagcaaaaaatgcatgtagacttgtcatcaagacacaaaaaaaccaaagggtttacctcagaaaatcgtaaaactaagaatctgatgccaaactcggataattttttatctgcatcatgaagaacaagaagatttttatcctagcaacatcttatattggcagagagctattgtagggacccatgaaaaaggtttgaagtggaatatggctttagccgttggatggttaatttagcagaaccgtgacaatgacaagcgaaagtgtctcaatgtagaggtggcaatataattcacttgttactgttagctttagttattcgattagaataggtgtggaaaataactttcaaatgggaaaaatgattagttctaaatccttgcacctgagttctctaccaaatcgtctggatttctggaccccatcaagtcgcacaccaatgctacttgatgaactccgaagcagtctacaagccgcatgtttcaagtggtttttagtcttgcgatctctcctttgaatggagttg

SEQ ID NO: 222703 - DNA, 1272 bp, Cannabis indica
aaaaaaaaataaaagtgtgttctgtaaattttattttaattattatttgttgatttatttaagttgggtctggagtcggattagtattcaggtccagagttcgagtccatggtatgactcaagggtccagggccgaggtccgggttcggagtttgaagtcggagtccaagtctgagttcgagttccaatgtctagattagggtcggagtccaaaatattaattataaaaaaaatatacgtttaaaaaaattttaaaagtgatttttttggcaattttttttttggttcaaaattttgattataaattaaaaaattaaaaagtgaaaacagtttaatagaagagagtgtctgcccatgttcatgctctatggcagttttttagtttctttcagttattttctacccactttccctattttatcttcaccaccacgcccatctctaatctaatacaccagatttgttcgtttggttctgcataattcaactcacttaccatccttgcatcagttcttcttttcatttcttcaatgaatccactccttaataaaatgaaatccacaatgtctttaactgaaaatgaaagcactattttggccatcactgatgatggttctgatactgcaataccacaagaattcatcctgattactcgtgttttcacaagtaaaaaagtttggttaactactcttcaatgacagatggtagaacattgggatggaaggttgaaagtaaacattaaagaacatcactctgatcttttcatgctttgcttcggctgtgaaggagattgaatgcgagcattggagaaggagtcgtggcacttccaaaaccaccacattgtcctacttgatccaccattgcagcaaaatgtgactcccgaaatcatgatacattctccattttgggtacaagcctatagactacctttcttgagtaagtctagatctttggccaaatctttggcctcaattctgggtgaatttctggctatccatgatgattctctaaatgaaggtcggggcccttttttatgctttcgggttaaaatcgacattacgaagccccttttgcgtggtcggatgattactcttcctaaaatcaaggatgagttttgggttgagttttgatatcagcgtttaccggactattgcatggaatgtgttttaattggtcatctttatcaaaagtgtcctatttttcttgagaaattggataatggattggaacctgaactacccaccggtctagaacttaagggatcaagattgc

SEQ ID NO: 222704 - DNA, 3030 bp, Cannabis indica
tttttttaaaaaaaaaattcaaaggctctcgactaaacctctttgaaaaaagtcgaggcgaaccgttataacaacctgaccaaacctttttgacgagaaatgggtcgaatcgttataacaccttgatcaaacctttttgacgaagaagggatcaaacaactataatttttgatttataacctatccgcgggagtggaaaattaaaagttataactcacgtacaaaactgaatactaacgattctcgcgagctaggaaagtactaaacgagacatcacaacaccttgataaagtacttaaaccaagaaaacgggtagataatataattattcatgcgagtaaattaaaaatatacaaagagataaaatccttaaagtatatttaagtttgcttaaggcagattataactgcaactgcgaagcagaatggacaacagcttgaaaatcataaagtttgctagattattaactacttaaacaagaagattacgagcaatggaaaaacccaaaagtgatgtacattcgatcaaaatataattttttacattgtgaataataatgcaagcaaatataattgtattaagttcaaataaaaacagtacaaggcatttaagataagaaaaacctaagactggttacaaaattgtctttacaaaaatacataaggggcaaaccattaagtcattctcctaagcttatgttgagaggaagatcgttttcatataacttgaaaaagaccgtctacacgtagctcgaaaaaagaccgactacgcatagcttgagaaagaccgggtacacgtagagagccttggtctctgcacatgcctcattccccacatgatcagaggatcccatttcctgaagccgagatctatttcccagcctcaagaaacctctcaacactgaacagaggctgatgcaaagatttcctagcacaggatagggtcttaagtttgctggtttctttgatagaaaccacgccaacttcctccccaaatttacctgaaactatgccaatcttcctttggaattctccatcagcctaaggaggatttttgaaatcgctcacaagatctatactttctggaatcacttatgaggatcggccatggcaggtcacggggttcccttggtttggattagtcggaagctcctcaaccttggaatccatcgttttcggctccagttgagacttaaagtttgtaggaacgaacggaaattggttggtgcatcttgttattatgaccctggaaagataaacttctaaactcaaaagggacattttgacaggagggaagtaatccattcagaaaatggatttcactaaaagagccagaaggtttatgaaaaatgacaagcatgagctgcccttttatatacgaagcacatttacaagaaagccaaagattaagaaatctaacagttgggaatcgtgtagaatatgaataggcgattcataatgatcttcgaaaccatacaactgccagaatcaaaggaggcatcctttccaagaaaggattttgatgaaaataccatccgtgattattaaaaagcactttttactattaaaaaaacttattaaggggcaattgttatacccaaaattcgactggaggaccatgtcaagataaagaaaatgtgaatcggtgttgtatctttttatggaataactcattaattgtgtaagtactagagtatatttgcaaccctctgactgtaaagtcttaggtgagtaatcaatgtacaactggtacttagagtattaacgaaaaaccatatgtggctgaaaaagaatagcgaggcaccaaagaagaataacacatacctcggttcacaaataagcagactaagtataaacgacgaactaggtcagagtataataatacgagacgaccatctcgctatgagaaaaattcctatagtttcatccaactaatggaagcgagactcacaaccctggcaaattagtagatttccttatatctgcaatcaccgtatgttgtcgatctcggataaaagaatggttccagctcaccattggaatcactacaattaagtttctgtcaagacatctccataatcaacagttaaagacatacgtttaatacacgatatttctgacccagtaaaagtgggaaaatcacagttgtatgactttcaaaattgtgcatcgcgtttatattttgtaatatgtaatcagatcccacgatttaagggatgataactgtaattacattttggtcagtcttgtaattaactgtcactatgcaattgtaaatagtggcagacaatctcaagaaaaggggacagaaaaaaaaactcttacgcgagaggccctgagaaaaagaaaatactcaaaaatctgaataagattgactcgtggactatgcagaattataactacaaaaccacgtaaaaaccccggtgctcttattttatttttctacaattttttccttatttttatttctgtgttgaatcatattcgtgaggctcaaatttagttaacgaaaatctgcgttaacaggttcaaaaaaatttcgtataatatgaggaagattgcaccagtactattttaaataaatataactttgagcggaagtatccttcgcaggagctagagcttgaggcattacccagttgattgttatctcagcttccttggttaggtttcaggtgtcaaacttacaaaaatctggacaacaattattaaatgaatataacttctattattagtagaatgattttatattaccaaatttctatattgacgtttaattgtgacagatgtgagtgttgatttagatttcatcttatgagcaatgtctaattgtttgtttctgattgtctgagtataaatgacaatatttgataaatttattatatgattgttgctattattttcttgccatgtaatatccgcttttcttgaagggtaattaatttatcatcttgaatatttatcaatatagtgtagtatgagattttttttagtgacaataaaatttcttttattttattttgagagtgtg

SEQ ID NO: 222705 - DNA, 2786 bp, Cannabis indica
tgtggtacgtgactgtgagtgtgtgagctttgtttggagcattcctgtgttgtgttttcgtcgtgggtatggtggtaaaggtgctctcctgatagaagaggatttggataataatatttctcttacgggtggtttgaatgtggaggtggaagatgaatgggagtctcaggtcgaggctgccagaggatggctctcttgtgggaagagtgctggccagaagacatcgcacgactaagtttttcaaatcagttttctccagaatttgggagaaagagagagagtggtcagtggaaatacttgctatggagaaacaatgcacggtggtaggcttgtcctttgacgataaaattcttccagaaaaagtgtacaagaagtcaacatggattttccatggtggcattttgattatagagaaatggccatctaatggtaaatgaaaagaagctagtctaaatgaggtggaatattggattaaaatgaaggggttcccaccaaatgctttgaccattaacaacgctaaaaggctaggaagtatggcagggagtttgaaagaggtgcaatggcttaatccgaatgtgatgatgatgagagatgttgtcaaggtaaagattaaatatcccaccaacagggctgcctttgtgggaagatatatcccaagcgaaggaagcaacgtgtggattcagttcaagttcgaaatactccctatgctctgttttaaatgtggtttctttgaccatgaacaagtggactgcgggttggaggaggttaaaaccagacacagttctggtgctatggtgccatattatggaaattggctaaaggaagacagtaaggtcaagcattgcttcgaattcttaatggctcatagcatcaagaagcggcaatggaaggtggaaggaaacagtttcatgagaaggtcccaaaccaatggtaataatggagatcaccctattatccaatgtgttttggaataggaggtaacggacaagttgctgaaggagcctacagaactgtagtcagctagagctaaaaaagttggtgagattcgaggttgctgcaaaggaaatagatcattgggagaagacacgagaaaaggggagttaaccttaaccattggagaagattcggtggtctatgggaacaaaaagaattttgttgaagtagtgcctagtcatcaaaagaggtgtcaggttaaagaaaaccaggttcttaggggtaatttggagatagaagaacgactggttgttcaaaaggaaaagttataggaacgacggagtagctaataaagaaacgactaaggctgggagtttcccctccacacgtggatttgaaagtaatttgtctgacacttgcgaaggaaaagaactagattcatcgaaaggagtgagagaagagggacgagaagagtgggcgccagagaagagacaagccagagaagagataggaatgaggacaaagaagaaaaaaaaaaagaacgctagaggaaagagatggcattagtgagatggaaattgatgagagaccggaggggaaaataactaatcgagaaattattcatgggaagaccaatgatgggtcatcatctactaacacataagatggagggggttatgccaaaggttggcacggggaaaagaaacaacagaggaaggagtccaaagggaggaaaaataaatcggccgaggagatggccagactcaaagctcaaaaatagggggcaaactcgacaaaaggggaagttagtagtgcgatccaggagaacactggtgaaggtaagattgatttttctaaccttgaagatttatcagtctgaagtgatgatgataaagcgacggaccttgctagaaaaggtcgccgatcataatgttagttttgtggtggaatgtctagggtctcggcaaccctgagacattcagtgcactccaggaaagagtattgtagtataagctgagtttggtgttcatctcatagtcaaaattgatgaataatcaagcgaaaaggttggcgcatagattggggtttgacaattttttttctggtggagagggtggggcttagtggcggtttgattctgatgttggagggggggattaaagattaaaattctttctcactctaaatttcacatttatattgcggtttgtgacttgaaattgagactttggaattttactgggatttatggcgatcctgtgaagaaccaaagacataattcatgggctttattgcagcggctaagtgaggaagctagtggtccgtggctcattggaggtgatttcaacgaggttcttcatgctaaggaaaaatagggtgggcgagaaaaagatgttagagaaatggagaatttttggaaggtgattaatagttttgatttagtggatcttacaactaaagttgatacatttacttggtgcaatgggcaaaaagagaactttatgcttcaaaagcttgataggtgtttagctaatgtggagtgggtgaatctgtttcccaaccgtaaagccttctaccttgagtggtggtgttcagaccacaaggccctagtactgaacacatattatgatagtaatatggaggattgttatacaaaacagagatccaagtttcacttcgaggaagtttgggcagaagagtagaaatgtggagatattattgagatggaatggacctcgagagattgttgttcctcggattgggattttaaaagcaaaacccaaaagtgtaagctccaaagttggaatgcaatgaaacagaaggagctttatgtaagtgttgggttttatgcc

SEQ ID NO: 222706 - DNA, 5316 bp, Cannabis indica
ttgccaaggggtatgatcaaacttcgggccttgattttcatgagactttcagtcccgtcatcaagccaacaactattcgactggttctctccattgttgtctccctttctaggcctattcaacaactagacatacaaaatgctttcttacatgaggacttaattgagactatctacatgcaacaacctcaaggctacgttgatgcttcttttccttctcatgtatgcaagctcactaagtctctttatgggctcaaataatctcctcgccgcttagtttattaaactcagtattgctcttcttgcctggggattcactgcctccaaagccgactcttccatgttcatttttcactctgcttccaccatggttgttgtcttgatctatgctgacgatattatcgtcacaggttcttgttcttgtactgttcaacagctaatatcatacttacatactcagttagtcgttaaagatctcctcccgcttcatttttttttctcgggatttagttcactcagtcaccttcaagtcttcatctatctcagaccaagtattttcgtgatttgctctctaaaactggactcttagatttgaaatcagttgccactcaaattgctcttagttctctttctatccatgatggcaccccactttccaatgcaacagaatttcatagtctcattggtgcactccaatatttcactttcactcgtcccgacatcgtttactctgtcagcaagctgtgtcaatttatgcatgctcacaccgacacacatcttcaggtggcttaacgtcaactgcgttatcttaacggcactactcatcttggccttcttttacaacctgatccacaatttaatcttcattgttatacagatgccgactgggcttcctgtcccgatgatcgacctagcaccagcgcatattgtatcttccttggaatgaatttgatctcttgctcttccactaaataaaaaattgtttctcattctagcacggaatccgagtatcatgctcttgccaatggagcttcagaagtatcctggattgaatctcttctctttgagcttggtatcacactctcctctgcacccttcatgcattgtgacaacatgagcactttacatgttgcctcaaatccagttcttcacgctcgtacaaagcatgttgaactcaattaccattttgtccgagagcgtgtcaccaacaagtcccttactttggtttttactccatccaatgagaagctgactgattgtctaacaaaactgcttgctgcctctcggttccaagatttacggaccaaactcatagtgcttctagccccatgagatgagtttgaggggggatgttaaaatataatcgattttatagttttttctttccctttttacccttttggacagctgtccattctttgtgtggtactttattgttcttatatatactctgtaatgttttcagtaccatcttgaggaatacacatttttgccttattatctctgtcatatagtttcgagacacaccaaagtaatagcgagcaatttttaagaacctttggataccttctggtgcactagaattcctttcaaactttttcttcatagtgcaaagtctcctattccattgaatttctccgatttgaatctcaccattgatgacattaaagtttcttcaagaattttagcgaaaagaatcctgattctgcgttcttgatcgattccaagctctgatttgtggaaaaattacaactaaagatgcagaatcaaatcaactaaactataaataatcaaacaattagtaatgtcaagagtaacaaatcacaatcaataatcagagaaaaaataaggatgaacaaagcattaaaaataaaaaacgattaaagtagtaaaataataaaattaacaacaagatatatactggttcaagtccaatagatcaatgtaatctatatgactctattctagttttggaacaccgccaaattctctttattgattgagtaagaacagtcatatgatttctctcaaagtattttacctctcacactcttacccaagaataatgttcatctacataagattcttcatacaaaatccaaatccaatctctctcttttctctgtacatttctctctctacatctcaatcttttttttctctgtctcaaaactcaacctgatcgttgtgtctaaaatgataagtgttggtagtatttataggcttaagatcaatatcctaaattcggtggctagcaagaagcaaggttgttaagttagttaggcaacaactaccttaaccaactctccttttgagcgagatctttacgttagtataagtatgagtgcttctgggagggtatcgggagggcttctggaatcacaaaccaagacactagttgaaggagctttccgaataggaaagagctagttggagtcgactatctagaactcttttctaggaaaaaacaactagccatctgaaactcctttccggagaaaggctagctttcttgaggacccttctcggaaggacatgaaagccttccaggacatgcttccgcaagtcaacagtttttcagaaaagataataattttttgagaccttttattttggagaactattccacaaataataacaattattattattattattataaaattttaatcacgagctattcatgtttccaattttaaagttgattcgtcttaaccaaattgagtgaagcaccatatgaatcacatcaaatggttgagctggtctgttcatcacgaaatgtctcttcacttgagaaacattattatacaatctcaagtattcctcatttggaatatcatttaagatgttcttaatttctggtatttttgagattgggatttgtatggaaaatttgctccaatcaagtacatcattaaaaggcaatgaataattattagagagaataaccgggacacaccctgcattgattgcctccaccactcttgggctagccacttcgtaaccacttggacacaaacaatacttagaatttcccattagcatggtgtagtttagtccttctggaagcttttcaaagacctgaatatcactgtctttgtctttccattgctcgaacaagattcttctaatgtatccatgaagcccaccggcgaaaaacgctaatattgtgcgcttgtgtggggcttggcctaaatctaacgggcccaaaaacccttttctcaaatagatttcaggtaacgaaacatctcttttaggttgaaatccttctgaattgttggcattgcataaaactcttatgaagttcttgaagagtcgaggtttctcatgtgatacttctggagcctgaatttcgaatatagaattagaaattacatttaactattagtgatatattcatgcataactcaatcatatttcgatgctcgaacaaactctacaggttttaaaaagtcgttatattagaataattataaattaaaagtaagtgtgcactttgccacttgctgaataaatggaagacttttggttagtccaatgttattattatataatgaaatactatagcagcacttctattaattactcacacgagtgacagactagatattctttctcacattttagtaacatggcttttttttttcgttattttcacattgatcaaatgcatttatttactattcacttaattataattttatataacatgcaaacagcataagtgccccatatttattatctagttgaaaaaaaacccgcatggcgatgcgttactatttactgaccacgatgacattatatatttatataatctatatgattggatgaagactcatgcatgcgtgtgggtatatatatatatgggcagaaagaacaaagaagtacgtagaagaaaaatgtaattaactcacccaatcatggcaggaaccatgaaatgatcagcaccattgctggcattccaaaatggatacttattggcgacaacactaacgtagtcattcataagtctatagagtcgatctcgattgtagtcagatgggtaaataacagggctataaataaactttattatgttggcaacactaatgggcataaaaaatgtgtgtgcctcctctggatattttgccctgaaaggactctcctcactctctatttcttccatgaattgtccttcaaccgcatagatgttactcattggtcccatgtggaatattggtcgttccccttctctgtagctccacactttaaacctcttcaccatctctatatggctcctgaatttgcccccacaaaaatattttacatatgttaaaactgaaaaaactaagtggcaatgtgccaaatagcaatgttcgaaaacacatagcacttatgcttatgtagaaataatctttttaaatacatttatatatatacttactgatgaaaagcatatgaatttctgtaaatggaacctgttggtataaaggtctcattcttatcagacttaaaattttttgaaacaatagcttgacgaattgcagctctagccttagccaaatcatactcaattctctccaatctactcttcttcttgatgatctgctcagagcaaattaaaatcacacaactaagattatctgcacttagcaaacattcaaatcataactaattgacaattaaataataagtacattattagtattatatacataattacttcatctaaatttacatataacataaaataaataaataaataaataaaagaatttcaaaatgatgctgacctttttaggagcaatctgatgatcattactaattatggttttgttaattttgtgcatcaaacttgagaggaaagagtctagtgaatgttttagtggaataattgtatcattggtgttggaaatattattaatgataatgggatgaggaggagaagtggtggtggtattaaaggtaatactgaaagaagaagaggaagagtgtatgataagctggttttggctcaaggttatattatgagagaagaatggaagaagcagaagaagcaaagttgaaatcaacaacaaaattgtggaacggcttaaggttgaagccatggctttgtctggtggccggaagcgaacgatttctgttgtgtttttcttcttcctgacactctttctaatactccattgtcatcaggaatatttacttaatggtcaaggaaataacaacgttttaccaaatatttgttgcatgatatttatagtatattatattagtgttattttgcatgcttaattaaaataacacttataaaacctatgctttttgttactataatact

SEQ ID NO: 222707 - DNA, 1800 bp, Cannabis indica
cagaataaaagaacatcatcagcaaaagcaagatggttgagtttcaattctgagcatctatcatggaatttgaatccctctttttccccaactttcaccatcagtctagataagtactccatgcccaagacaaataacaggggggagatcggatccccttgtctgatcccctcctagcttcaaagaatccatgaagagtactattaaacattagagaaaatttgggagtggtgaagcagttcataactagctttatgaatttcccatgaaaatttagaccagttagcatctcttcaagaaatccccattcaatcgtatcatatgctttttggaggtccagtttaatcatacaactaaccttattagccttcctgccataatgcctcaccaaatcttgacaaatcaagatattatgtcctataaatctccctttaataaaaccacctttggactgtgatattattgaagggagaatattattgattctagagctcaatagcttagttgcaatcttgtaaatcacattacaacaagatattggcctaaaatctttaacagaattgggacatttaactttaggcaccaaagtaatggtggtagagtttatttcctttagaatattacctgagtccaagaaggaaagtacagcctcgcatatatcacctccaatagtttcccaattatcttggaaaaagctgttggataagccatctggtcttggggatttatttccaggtatgctaaaaacagcctgtttgatctcatcatgtgtgaatctctgcaacaagtaactgaattcactttagggcctttgttgaggatgtgcttttgaacatgtctcctattctctctcttagtaccaagaagattcttataaaactcgagaaaggcctctgtgatgagagtgggatcagtgatcctattgccttcttggttctcaatagagagaatacggttttgtctcaatctatgcttgatgcaagcatgaaacaaggctgtgttagcatcaccatcctgaatccaattcattttagctttttgttgtaagaaagaagtgtaatccttctgtttttggactaacttctccctagctatgttttcctgtatatgtagagagggattaagtggttgctgctgtaactggttttgcaaaccatccaggtcggctttaatgttaagtagctgcttcagtaaattagagaaaccgtctttgtttattatcctcagcctttctttgaaccgcttcaatttagagacaatctgaaacattttattaccagggatactcatgttccacacttcctttaattggtcatcatacttagcatggaatttccacatcttaaaagtatttaaaacggccttttccccccccccccccacaccatttgaggatgtagagataaaattgctggagagtgatcaaataaaccctcattgagaaaaacagtctcagctagttcatatttagttatccaagattgattggccatgatcctttttattacacattaattaaatataactctaaaaaaaaattaaatgataaatactctcttttataatcaaggtaccaaatataatctcacaaaacttatcaaaattaaacttcttaatgcacataatgggaatataacttataaaagtggatatgaattaaagagtagtaaaatgaaggtaaaaattaaaatatgaaacaaaaaatgggtatagagtgtaatttcctcgattatttcaaaaataaataataataaaaaaacaaatatagtgttgtacggaattttaagtatttttataatt

SEQ ID NO: 222708 - DNA, 2722 bp, Cannabis indica
ataaatcttttcagtttgttccatctgtatgcttattgtaacatttatcttctagtaatggttgttataataatttatttgtattgtgcaggtagacgagccatcaaagtatggtgtcgtagttatggaagaatcaacagggaaagtggagaaatttgtagaaaaaccaaaactgtttgtcgggaacaaaattaatgctggaatttacttgttaaacccttcagttcttgatcgaattcaactgaggcccacctcaattgagaaagaggtcttcccagaaattgcagccgaaagtaagctctttgcaatggtgcttcctgggttctggatggacattggacagcctagggactacattactggcctaagactctacttagactcattgaggaagaaatcttccgttaagttggccactggcgcccatgtcgttggtaatgttctaattgatgagacagccaccattggcgagggatgtttgatcgggccagatgtcgccattggcccaggctgtgttgttgaatcaggagttaggctttcacgctgcacagtaatgcggggggttcgtatcaagaagcatgcttgcatttccagcagtatcattggctggcactcaactgtggggcagtgggcacgtgtggagaacatgactattcttggagaagatgttcacgtgagtgatgaaatctacagcaatggaggtgtggtcttgcctcacaaagagatcaaagctagcattttgaagccagagattgtcatgtgaggagggcttttttgctgcttaaactagcaaactgtgtttaggtagtaagttatctttgtttctgagaagggtttgttctttttgtttcttcttacttttttttatatataaaatttattttcttctcacagtgttaacatcagtttgtactggtccatctgatgggagtcataatgttgaagggtcagtgtcttcaatgagagatcatttgttgtgaaatgtgtaatcttatcttcagtgtatatataaataagtcaagtcagtttatctgcatatgtaatttatatttgttgattttttttaatgaatttgtcattttggcatttttctgtcttacatttgtgatgcatttatctttgtcttacattagtaatatagaagattcctaagcctttcaatataactttctccatacacccgtggttgcacaaggatgacttatcaagttttcctttcaggccatgtagggattgatttcgaccaccctcagagagatcaaaattattacttaaattaataaaataatataattgaaataaatgtaataataaagtagcatatttattgatatataaattttacatgatattaaatgttgtactaaatttaatattacatatgtttttggcacaccattaagaaaagatgattttagccaagaagttcaccaagcacgcttcaacctaaaaagaaaaaagaagaaaaagaggcccataatttaagtaataattttgatctttccgagggtggtggaaatcaatccctacatggcctgtaatcagtgtgcaactacgggtatggagaaagttacattggaaggtttagaatcttctatattactcatgtaagacaaagataaatgcatcataaatgtaagacagaaaaatgccaaaataacaaattcatttaaaaaaaaagttaacaaacataaattttatattactgatgtaaaatattaaaagtcattagtagtgccctacttagagatgttatattattactgatataattaaatattgagtttcacatacattagagaaaaaatatcaaatctcacgtaatttagtttgataatattacaaaatattgttagttatatttacaaagtgttaccgaaattactagtatggctaatgcttcaacttaaaatattagcaaaatattgactgaaaatgttaatattaaattttgttaatgattatagatagccgagaacacaaatgtggaacatctatgactctctatctcaccatggtcccctttataaagggctctcaaggaatcccaactatttgccattttttcacaactaaaggtcctgaaaatacttgcccatccttacattaacttcgcaagacattattaacgcggtatcataatagttttcaaaaaataaataaaaataaaaataataataataatgattctatttataaaatcaaatacaattgaccaatggtggtgtgtgtgtggacgcgaaatctaaatatacttaataaaaaaaataaataaataaataagtggttagcacattaagagccatattttttccacgtagggagcccaagaggataatgcggatcccttttatggtgcaaaagccattgaggaattatgttgtgtgaaagtgacaatcagatccatgagtattatgtatcattattgtttataatatatagtaatttcctttttttaatagggcattagtcttaggcatcatagtttatatcgaacttttggtcatattctgtgcagttaatttgaccaaaatcatatgatatgatactttagtatctagaacctttgaattattggtcacgtaaaccctaagatgatatttattcctaatcttaaaagtggtatttccaatggatgttataagatacaatgtgcctgaaaattacgacctcacccatttagcaacatgagtaggatataaaatggagattcttgatgcta

SEQ ID NO: 222709 - DNA, 1511 bp, Cannabis indica
ctagagaaagaaaaattaaacttaaaaattaaaaaacaaagtatcgaagaagtagatatcattaaatcaaatctgtttgacctcaaatcttgtataaagaggcaaagaaaagaacggaagagattgttacgaaacgctaaagaaagactacatccaaacctagcctaagaatctcttgaaatcaacgaaaaccagaagggatgcagagaatggaaagcaatagatccatggaaaaagttactaaaaattgaaatgaatctagaaagaaagaaaatactgaaaggaatcttcaaatattataccttttaggataaacacttggaaatctagaggaagagggacctgcgcagatgctcatcttcaccatgtcgtcaactaccatttttgctattctcttcttttctttagttttttttttttccaatccgaaaaatcgatggggaatgaatttgagaatgagaggagagactcaagcgcctggccaccgtctccttataaagacgccacgtgtgacgtttttctgtctccttctattatataattttcacaatatttctgataaataaacaacattatcatcatttattggattaatttgttaaaaaaagatgattttatatttatatatatttatatcacatcgctatagtatttgtgatagcctgtttgacaaatagttttttccaatggttactctgtatagctatttgactttctgttttcataaactgcaccccttatcaaaatccctgaagtaatgtaaagaaaaaaaatctcaaaattaataagaataatactaattagtaattttaatagtaataatattccttttgtggttaataataataatgttaattagtgaaatatagtatttcgaattttgtacaatgaaaagtaagaagctctatttagaatcttgatttatcctatcagaaaattacattgattttgtgctatttttttatgggagaaatgatgaaaagagaatagtcagaaaaaattgagtttatacaagaatgatggaggtctttattatcgtgacttatctctttttaacaaagttttaccgccttagctgttcatagtaatcccaactctcttgcaggaagagttcttaaggattgtgctttccttcctcaaactttttggtggccaaagaaaactctagatcctcatatttttgttatcacgatttataacatttaacctaaatattagacaacctacaacatgcatactagaattgaattaaaacacattaagtataagtactccgttgggattgtaagtcttaaaaaactctattcaatgaatcttatttactatcaataaatattagaaattataccttaattttgtcatatgctttgttcacatgtttattacatgattatattaatatataaattttattaaattttgaacatatagttatttatcattatagtgatgtcatcacagtgaaaaataattgtgattatatgtttcaaattatttagtcccacaattta

SEQ ID NO: 222710 - DNA, 1055 bp, Cannabis indica
tttagtcactagcggagaaaagtaagaatcatcatcttcaacagtggggcgtttgcctttagctttgttggcgagagatttaacacctattttttaaggttttttcagcaatggtgatgggaaagatgaagactgagtaatagctatatataacaattcaaagaagaaaataacggaaaaaacatgggcagttgatggaggaaagaagttagaggtgatggaggagatcaattttttttgaatcaaaagattgttttgattgtgagatattatttcaaacagaaaccaaaaatgagaaaatgaaatggaaactgaaaataaaaaggaaaatgattacaaaaagagagaaaattggttgagtgttaaacttgtcaaatcacaacatgcatgcaaagagagtgtgtaatggtatttttgtaaataaaataatactaaagttaaataagttagtcaaaccgtgtgaagatatattagtaataaaagtgtcaacttatatatattgcaactttatatatttctaataagtatattatttaagtgagtcaacaggacagatgttgtgatttcttgataagaaatatatacaagtccagttagggttgaccaactaaatatgtcaagttacataatacaaatacgaatatgacatcagccctagtcaattacaagagatgtagccactacaaaaaccctaatagctccgaagaaagggatattagcaacaaaaccacccaaattttaaatcttctaacacttaaccataaaatttaaatttttgggggaaaactacctaaactcccatttaaatttgctctataaccctctatccaaaaatcacaattaattgccatagtggactacccacgtgtacacacttgtacacgtgacaaatttttagtagcccacgtaatattaaatattaaaatattataaaaattaatttaaaaaatcataaaaaaaaatatgttttttcctttttctttttttttactttttccttttcttttacttcttcttctgaactggaaaaaaaaaaaactaagactcatccatca

SEQ ID NO: 222711 - DNA, 2398 bp, Cannabis indica
tcgattagaggctaaaaatatcacaacagttttagttagtaatattgataggattattgggataagttgattttagaattaccgaaagtattttgaggtactcgaagttgaccaaatactctaggataaaaaatttgttagtgattaaaaaatagcaagataactattataaataaatttttattaataatatttatattattattaataataacaaaattttaaaacttattagttaagatatatattttttaaaaacataaacatacgaacgaaactctccttctttggtgcgacaaaaccctcaccttcactatctaattttttttaattttaatctgtaacctagtaattcaagctccggtagtaacgggatagtaaatcattgaagatgaaaagcttaagataagaattgattttgttttaagttgaaaacaattagttttatatagtggcttatggagattctaacttcatggaattgttcttgagtagctatgggactagtttcgatgtttacttgtcgaatttgaggtaattttgagttagaaataaagtttggaagtttttatagcttaagtctaaacattaatggcgttttctatttaaggacttgattttaatttctattatgttatgattcttgtatctatggtatatatgtaccctgtgaagtttgtaatgagttggatagattttaatttctatttaatttctcgtatctagtgagtgcgaaatttaggattttcgacccttgccattacgaattggtccaccgcttggtgcaaccggttaaccggttcgttgggaagcggttaaccgtttctaagaatttcaaggaaattagaaaacgtgtttttgtcattacttttcattcgagtatccattttagacgttctatataccattttgaagcttgggacaagatctacaatatggtgtatgttttagagccaaaatataagttttattttattgtatttataccgtgaggttcggtaggaaccctaggttgtcctttgcgaatattaaatagtattttaggataagcacttattgaattaccgttgttgtgacatagggccgagatcatcaaaaatgtttctccacttggattggctgacacgcatgaatctagaataaaggtaagaaaaatatattgtattgcatagcatgttatgttgcaatgcaattattattgttgagaattgattgatattaagattaagacacaattattattgttacgtaatgaaaagattgcctgttaggtaatgataaaaaggttgtcttataaggcaatgatgtaaagattgcatgatcaagcaatgtgacatgcgggctcacttgattaggtgatgcgatatatggatgtcaagctatgacgtgagcttgcctgattaggcaatatgatatatggataccgagagaggtattcaggttgtgtctatgaggcaaccgttataaagtcatgactataaactgaaactgttgttaggtttgttcctgttaacagtgcctgattaggcacgggtgacagtgacatgtgagtgccacgatacgacacagactgaaaccgttattaggttcttcctatcggcaatgcctgattaggcacgagcggcagtgacatgtgagtgtcaggctatagcacgggctcgtcttattaggcgatgtgatacacgggtgccaggttatggcacgggctcacctgattaggtgatgcagttatgcaatatatgggttccaagctatggcacgagcttgcttgattaggcaatgcaagtacaagattatcatatcaaagcatcgactttcctgattacgcaatgtgatgtaataaagatggttactttatgaggtaacatatataattatattaataaatgaatatgacttctattattagtataatggttttgtattaccgaatatctatattggcgtttaattatgacagagttagtaataatttagattttatcttatgagtaatgtgtgatcgtctgattctaattgtcttagtataaataatgatatttgaataatgaattatatgattgttgttattacttttctaatcgagttcttgtgactcacgggtgttatgtggtgtagataataggtagagatgtttggacaaccatgagttaggaatcttctccaccaaatatacatatcagcttattcggcaagtggtgctgagttgttagaaactgtatttcaaatattctgaacttttaaatatattttagaatattattataatggcatgtcttacaatattttaattaggagatccccaatcctaaaaaggggactaggccatgatttcatgatttaaattagttggtaaaattttaatttatgtattattcattctattttaatttatata

SEQ ID NO: 222712 - DNA, 1346 bp, Cannabis indica
gagtggttccttgttctcaccgcctgtccacagaaaaatcccacctaccactctgcctgtcgtcggactttggtgcccaaaagccctgcaagtgagccacatgcaccgccgtcctccgctatgaaagctcccacacgctggcacgtgagagcaagtgcttatgactctagtggtcagttttggttcggtcgttcacttctagtttttcagtcgttcagtgctcatgtttttcaatcacttttctagatttatggctcacaaggtttagttctcctagtgttgggcttccgatccttttgttagtctctttatttttttgttctcttattggattttggttgtgagattttgattgatggctcgctatctcagtttgttcccaacttttttctcaatttgtttgcttctttatcggatttggatgttggtttgttgtttgagttagtttggtgggacgaacatagtatttataatggcttctaaaagactagttcttgtttttgcagatgaatatgccaaattcatacagtatcaagagtatgtctcttaagtattcatacagtatcaccactattgttgattctggtaaaacaaatgtatgttttctttcttcaagtttcaaatgggtcaatgattctggtaccacagaccatatgacaaataattctagcctcttttctaatcttcaacctcatgcttccacttctattgttaccttagccgatggatcaccatctcgtgtatctcgtgttcttgagtctggtacaattactcctactccaatgcttcctttgtcatcagtcttacgtataaataattattcttttaatttgatttttcgtgatcttaattgttgtatttcttttttatctgatctttgcttatttcaagatcttatgacgaagcaaaatataggtaaaaaacatgaatctggaggcctttacattcttgatacaccaatacttaaatatgttgttagttctggtgtacaatctccctttgaggcacattgtaggttgggccactcatctcttcctttgtttaaaaagttgtgtccacaatatagtaagttgtctataatagattgtgaatcatttcagttttccaaacatcatcgcactaattcaagccctagagtcaataagcatgctaatgttccatttttagtcattctaatgtttagggtctttctcctatcttctctaaacctaatttatgttattttgttacttttgtagatgattattctcatgtcacttaattgtttttgatgaaaaattgttctctaatttttgtgcctttagtgatgaaattcaaaatcaatttgatgtgtttgtttgtacttt

SEQ ID NO: 222713 - DNA, 1749 bp, Cannabis indica
attttgattcgacgctttttgtgctagtatagttagatatgtagctaacatatctaaaaactcctaattcgaaagtactttattatttgtaatgtatacattatattgtttcaatatgaaagcatatactgtttttagataaattattaaatagaatatgtagggttgggtaaaataatcactattcaataattttccctgtacatatatctggtaactttttgggtaatgcatgcatgagatactgattttgaaaatgtactataggaaaggccctaatatatatagatatacaattaaataatggaagataatcaatgttgtttaattaatccgagcacttcaaactgagcctcgatgatgcaagtatcattcaacagaaatccattgtctaatcgtttgaactttgccagcgacataaatgtaggaaaaccccatccgtttgaagaaaagaaaacattattagctgcatgtaacatcatcataattccaaaaattaaaataatatatataaatattttaaaggaagtttcaaactcttaaattattgacactcacgcctgatgccgcccaagtaatatattattaagctagcaattcactaagactatgtttagaaattgaattttaagaaaaaaaaaaaaaaaaaaacaaaacaaaaaacaaaaaagacatgaaaaatgtaggaaaaaaacagtgtgagaactaaaagaaaatcaatttttcatgttatataaatttttttattgaatccactttttttccattcaatttattcttttcgtactaaacatataaaaattaatttttcttttattattattttctacactttttaatttccctacattattcttatctctttctttctccttatcaaattctaacttccaaacatatagcctaaaaatggagaagacatataatatatatatcatcaaatctttgaaatcaatatatactcatcaagcattattggaattgtgatcaaattatcaattatatttattggattgcaaattaataataaacgatccatcttaagttttaggtcgcaaaagatcgatagaattcatttttaagaattcaagtcttgaaaatttaaacattagagaattgttgaaaaatcattcatctataattttaccatacagctagacttttaaagcaaaacgtgtatatatgtatgaatcaaattaaatagtgaattgtctcccacaatgatctcacctttttgctcaaaatcctttccattaatttggtgcttcaaacgcaaaacgtaattaacaaagagcttagtgtttggaggaagacttgaagtatccaattgtagaaacaatgaaatattggttccatttccttctccgaatccattaggataaatcacaattttcctgctcatgagatatatatatatatattatttatctatatatagatatataattttgagaatgaaaatatcattctgtatgtaacatatataccatatgtagtctccaccaaaaaatggttgagatgcatgccggtcttgggttatagctgaaaaatcaccaatcttccaagtattagtgcatttaattgggtcttcgatcattgttaaacactctcctttgattgtgtttttgaccacgaaaacctctgccccaaaagcacaactgccattgacaaggaatccattggaactatcattgaatgttttaaggtcaatatatttgataatgctccattttgtcttcattgcatgaa

SEQ ID NO: 222714 - DNA, 2457 bp, Cannabis indica
tgaatttagttatttaaatcaagtactacaatggattaaaataataatcaaatactagttttgatgtcaattcatactcttcatcttaattaagagtcagaacaaattaagtagtaataatatttataaatattacataataaagttttcaattgatttattgattctattatttttatgattgaataatttagattgtgtctaaaaatacatagttaactcattatttgatttatttgttgtggtagtggcaactacaagtgacatgcggtgacaataaatttaaatcatgatataaagataatatattacggaaaaaaagcacttaaataataataacaacactcatattttttttttctagaatctttacaccacatactcaaatttctaactttttttactattttattgtgggacggaatttttttcaaaaatactgtaagttttatactgtgtactgtgttaagttttcactgtttttccacggttatttttttgttgttccattgttgttttattgttctgttttattgttttacgattattttataaaaagatagtttttgtaaaaaaaaattgcgtgacagtaaaattgtaaacttttgcccaaaatccattatttttgtaaaaaaaaaactcctatttttctctatatataccaccttatttatttatttattttatattaaaatttttttaacaaagtgatttaaaattctatatacacattaatcataaacttcttaataaataaatgataatactttttattcctattagtatggtgtataatagcattaaataataaaaccggtgtataatttttttttaataaataaaattattactactaataagtaattagataatttgattttaatattagaataatttttttaaaattattatttattatagtgataataatcgttttatattattatactaacaaaattattacaagccgcacgaagagcggctatattacctatggtggtacagtagaaattctcctatattttataaatatgcttataaactaaagtaataattaagctcctatataatataggggaatttttactgtaccaccgtagattttgtccctatggtatgaggttgaaatactgaacgttgatcaattagaaaaataagattgtttaagattaattccaagtacaatatactatgttgtaggagataacttaataattatttttttttctcaaaatgcacacataatttcttctaggggcatctttaatggaaaaactcaaatttagtgttaaatcaacaccaaaaaattgttattttaacactaattttttttttcaattttaaccacaacactaaaaattacaccaaatattatattctttattattctattattttattaatataataagaatattttaatattaaatatttgttaaatccaataaattatattagtaaatattaaattttttaatttacaataagcattacattagtttttttttatatttattttcaagccttatgatatttttgacaagtattgctaaagctttgttgtaattgtgatagtttagttattggtgatagtccaaaccgcaaaaactgcaccgcatcgcaccatttttttgtggtgtggtttccgcgattttttagtttcgcggtgcgggcgcggtttgagaaattaaaaaaactgcatgtgtgagttggtttaagaaaatggtcaaattaaaaccgcactactcgcaccgcgaacacctctaatatttttttagcacacttaaaaatataaaaatacaaacaaatacatttataaaaattttgattaatatttatttataaatattcaagtttttttaagtatatattataattattaaaaagtaaataacaaaaaattagtgttgtctacagtgcccacctaaatatggtaggacactgtagacaaattttaccgtgtggttggagtgatttttgtataaaatcactctattattggatttttagaagcccattggagttggcctaaggcataataataatagtatcaaaaacgatatcattgagaaattaagttgttctcgtatcaatatgacaattaagagataatgagggtcaagaatggttagatgtggtgaaaatctctattaccgagtcagtcttttatttttagaataattcctgctaaagcattatcagagagatttagagtttgaagactaataatattcacagtaactttcggcaactcttcgatcattaagttattcgacaagtaaagaaaaaaaattaaagtttagaggctttgaaagtgactcagtaagtgatttgttggaaaagttgagcctttgaaaattatagataaaacccaaatcgagcgtaatctcagtgaggccaaattggtgacccaagaaaactctagttcaaaatcgggtgtctttgagaacacacttg

SEQ ID NO: 222715 - DNA, 1611 bp, Cannabis indica
gcttgaagcggggacgtttcaaatagttttttatttatattcttataaatttttatttttatccctataaattttatatttttttatcccacataatttaatttttattcctattaattatttatatggtttttattattatttcaatttattatatttttatcccattaatattcttttaacaatttttttttctcccactaagaactgtggctggctcagctacaatataatatatatttattgtaattaatataatatttatatatactttaacatcaatatgggaatggagctagctaagatgcctagtttctcatattttttttctggtatataaaatatattcattcccccataactcagaaatattatatatatacatatattcatccttaatttattatttattcatatgtatatataaggcttggtttataggttatgtatcttagaaaaaagtggacccctaaattagacgtctagtactatatatgtatatgtataatatatgtatgtataaataatatttaataaatgtacaaatataaatacactgaaacatattgagctgtattaaacaaatatctcaatcccattaattttgatttgcataatatgaagaatcataaattatactccttattgacacaatcatgtgcctctcacacattactttgaagaagacatgcatatatatatatatataattgtcacaatatacatatacatacaatatgttatttgttatatatatcttaatgtatacaagtcagttatatataacctatcatctttaactatatatactgtccataatgatgtaatttctgtaaacttaggaaactataattaccatgcatacatgttaattgacataagaccttgggatgtgtaattttaatgtatatcacatcatataaatttttatatataaatatcatcaagcaatgttaagtagtactgctctcttatatatatatatatatatatatatatattgattacagtatgcaataatttaactttggaacttaatacataattgcatggaaaaaaaagaaaagaagaaaaagaatgaactctcttaaagcagctggcagtagtactaatggcacccctgccgatcttctagaaggaccaattgatatatatgatataataagaaaaaaaaaaattattcataaatgaaattaaaaaccaactattcaattatgagaatgtcaaagggtaccagtgcctaacactcatctcttacgtgtcaatatcgctattggtccaactaagtatcgagtcctatataatttaatataataacttttaaggagtatcgctagctaatcgcaacgcgatatgtcaagaaagtattaggcaccactagtgtccttatagttaaatgcttctttaaaattattttgtaggtgtggtgtttaatattattagggttaatacattttgaattttgtgtttggtaaaaattattaatttgatcatttattttgttaaatgatataatgaattttgtatttatcaagataatataaataggactctgaattcaatttttgatatttttttttctttaatataactaacttgaagataattctt

SEQ ID NO: 222716 - DNA, 4776 bp, Cannabis indica
aaaaaaaaaaaaagcaagtaaaatccaaccaggcagcgcctattcatatatccataaaaatttcaaaagattataaattcttaatagtttgttttcaacagtatccaataagaaaagaactataccataaacttcaaacaaacaacaaactctaaagagtttgcttatcaaaaaactccaagcaagacattacctttacaaatcaaaaaactcctaaaaacattacaaactctaagtagtttgcctatcacaaaagatgtaacataaaaagtttattcttaatcagttacatgtaaactgttttgaaccattacatacaaaagtacttgaaaaatgcactactatcaacaatctactcatccccaccatcgtccttaactggcgcccttccaggatgttcaaatgaagatatgtatccatttacttgtttttccatgtcatgcacaaacaactcaacacaaagtttgttccggacaaacttcacatccaaaggatttggaatatcttcaatcaaaccatgtgcaaagtatttagagtacttgaaaatgaatataccacaatcactgcaatgaaacataaacaatgaataaataggaagacaaaaaaggttataaaaacaaaatattaaacaatcaatataaaacaaaacaactataataataataaaaaaaaaactaactaaagaacaattacctatgagtttgttgtggcagaccttgaactataaagatatcaaggggatcatactcacgcttccccctgaacaatcctttagacatgtcaatatccttcctgcgaccataaaaaccaacttgtgccagcagaattgggatcatcacagcaaaagccttcacaaagttgttcaagtttttaaatttgccaacagacagtgaattacatacttttaaacatctattctttatgtcaaatatgatcacaataaaatgtgccaatgaagcaacattcactggaatcaaaacataatcaagcaacaaccatggctttgaaacaagcatgcggaatccctcaatatagctagcagccctagaattcttaggaatagaaaagcgattctcccccttgccaagatagtttccatacaactcaaaaatttgagttgcaaaataacaatcagttgtattgactttcagcttgatagattgatcatacttaatcttcttcctcaggtagtaaaatgacatatcaatatgctgcaaaatgaaaaaaaaaatatcaaacaaaaagaataattgctttcttatatgcattccttacttatgcaagtatgagaaaattaattcctaagataaaactaacaaactaaaaaataacaattaaaaaaaaaagaattgaggatacgccttacaatatcaatgactaataatagtcagtcaccataatcatggaaagttataagtaaatgtctgatattgatatactaaatagtgagtataagactatttatgcactttgaaagaccaaaaaggtagcatatattaagtctgaaatgtaaattgcctcttcacaagtaacatagacaatgtgtatacataaaaaattatgtaagatctgaacttcataatttttattttcataatttctgatttagtgcaaagtactttgcagtaggcttttctttttattttgacaaagtgatcaaaagcacaataacataaacttcctaagaatggaactaatcatattctaagaaatgactaacaaaatagttggaacgagaaattaaagcactaatctcagtcaaaattctccaagtatgaaaaaattatcacaaaatatatgcattctttacttatgcaaatataagaaaactaattaattcctaatacaaaactaacaatctaaaaattgacagttaggatgttgaagagagcattttggtcctccccttgagtagtgaaagttgagtgtagaaatcaacaaaataagaaaggagagaagaagtacctctagccagggaaccatccttcagggtaatggatcttatgaggttatttttttcctactcgaggctttgtgatggaagaatttgctgtttttatccccagacttgagctaattgactcgagatctttatttccagtaaattttatttttgtgtaagagactatccaatttggattgtagagatttggctttggaaagatcccaggtagtaggattgttggattgaagaaagaggtcaaggtctttctgagtggtattgttctgctgtttaagggaattctgacctatgttccatcttctaatatcctgaatacaactattttgtcaagagatgaaatcagaaagggtgaagggaagattatatagtttggacttggaccatgaggagttgaccaatggtaaaaatgtttattagtgagccaataattttaaaaaatgatattgttaggattcttaggtttcctaaggtcatcgtctagagtgatctttgaagatctatgattagacccataaaacccaagatggaagagggaggccacgggaaaaagagactgtcagggattgttggcgatactccagtcgagccgctcaaggagtgggccatgcttccagttttatttgttatcaatatgagtgaggggtaacaagttattcttgtaaaggaaagactggaaattagttatggcatggtttgggggactggtattagtatttttatcgttaactgaaagatagtcattaaaatcaccataaataagccacagtaaattaggagcataatcaaaaagtctattcaaaagagcccaagtgaaaggcttgtaactggaataaggggaaccatagaaaccagaaaagtgccaattcatttcatcattaattaatattaacaatacaatctatatgactaagggagtaagttaaaatattaacattaatattattgttctacaaaagtaagagttctccccctaaaccgctcctaggaactttgaaagcattattaaaatctagtcttttcttgatgcgagtccatgaccagaggtgagcttggtttccatgacaaaaaataaaatgggttggtgtggcttcactaacagggagagatttcgaaatgcctgaggactccctagacctcgagcattccaacttagcagactcattttcctcggcggggttgcgaagcaacacccgccatttcttcgggggtaaagatggaggggacaacagaatcatcagtctgagcaactcgagcacgtttgagcatgctcctgacagaatttcccacttgagcgttttgcatggtgaaaggcctcttggttccaatagtggtagtggtggtggcaacatttggttcctggatagtaatgccactgttctggggcatgggagtagtggaggttggtggagtatgggcatcatgaagggctatcccttttcctttgtcagtgtgagtgatcacagaagtgaccataataagggagggtgagagagtggaaaaagccatattcaatccagcttgggggtatgcacttcagtaggagcagcggttatatcatgattgagggttgggacagtgaagtcagatgcaaggttcaaaaattgatcaactgcctgctgaaggccttggtcagagtcattgccatgggactgatattcatcaattggggtggaattagagagatcaaatgggttctttttaaactgggatttgacagggacacggaaggtttccttataaccaagttcaggggggactgcaaagttatcacatctcatgcggtatctcccacatttgttataagtgtggtcgagcatgccacagaattaacaaaagttttgcagtccctcatatttaaaacttagccatttagttttggcgatcttacaaaaacggatgttcataccacgcctaagaggcttggtgacatataggaggattttgatcctaaggtaaagaccgaaactttcaagtaacgaaagggggtaagtttctataaggtccccaagctcatcagcgatgaactgggcaagttggggggatttttggccaaaaggaatgtagtgagcttggatccagaaagggacgaaatagaattggtctggtgtgagggtgtcaaggccttctagattggcgaagatcatgaggtttttgtcgaagtgccaaggttggtcttccagaacccttcaacggtctccttcacactagaaggtggataagaacaatcctaagtgatactcagagatagtggttgggaaacggagagtccatgcctcagtcatggctttctcgatccagttaggcttaggatatttagaagtgagaattttgataacaagacagtgggaatcggaggatatttcagagttaagggaaacatgatcgaagacatggatgaggttttcttctttagtgagtgagagggtggtaggtgggttctgggacgaggaagacgccataggagaaggttgagaacttaggtaagtgaaagctagaaaaggtgtacatgcagaatcatcaacccagatctttaaatagtaaaaagtaaagtgaagagacaatatctggagatgaagagttttgttggagagagaaaagtcagtgcctgtctgctcagatcccgcctgaacttgattttcctttaaaatatatgagacaaatagagcaaaacaaaattctaataaattctatatattatatgtattttatgggtaatttctctcatatgatactacaaaaaatcttacttttagtcacaacaaaacttgtgacttaaaagtaaattttttttgactaattataaatcagcattt

SEQ ID NO: 222717 - DNA, 1674 bp, Cannabis indica
atttatgtatatgaatcacatataagtatatttgaggggctaatgtagaaaaaaaaaaaaaaaattagtattttttttaaaaaaaattaattacatttatagtatttattcaattaataatttttggttaccatacgtgtaatataaatctcacaagcaaatataaagaaaaatactcaagtctaattttctttcttttctttttttttactaacaaaatatggcaaaataaaaatcggacttgggccaaatatttagaaaaaataagatgaaaagtttcaaatttggtaggcatgagcaacatataattatataaatatatataaacaaattgatcatgatgagcttattggattctcaaaatataattaagacatcaaatcttgttgagttcatatataatatatatgaattgatcacacgtacatttttgtgtgacatattattattttaatttttgatatttaaaaaatatatataatatagatagatttaagtatttaattttgttaggtagattattaaattaatcatctacacacgtgcaatatggccccatatgtaaccttggtcgccttgactggtctctctatatataatatcaattaataatatttgaaccaaacattttccaccaatttagttttaattattttgaaaataattaatataatatatatattaattaataataatattaatataccaattgatgtcctgatcatgaagttaatctaataaaatctctccattataagagattaattatatataagtcatgttttttggctggttcttgtttaatttaatttgttttgtccaaggataatcgaagaagaaatgataataattacctaatataactgcgttaggtactcatgcttcatgcaataataataataataataataataataataataattaaatttaattaatattattattatttgcttttcgccaaactgagtaaattcaaaaaattgttatattcagctatagtggaagctgtcatttatcaaatttagcatgctcgtaagaattctgaaatataatggattataaaaaaaaagatatatttttaagttttatttagaaaatgtggtgtttttcataattaataaaaaaaataggtaatttaaaaaggaaattacttttgggccctaaactagataggcctaattaagcacaaatttagcccacctatatccaaaatcgggtcggctcgtaatagtgttttatggaatcacaagctatatagactaaaagaacagatgataaaagattgtgtaaaaaaatagagttttttaattaagaaaaattgcagcataaatactatatgtttttaattttatacacttagtatcttttttttttggcggatttaataccaaacattgtattttaggcctctcagttactactattctgttagttgtgactaagtgtacatgtgtaagatcgagattaaattcttatttttttaaatatttagttaaaattaagaacttaatttttttatctaatatatctaacttaaatttaattttcataaaattattttaatgaattaaaataaaaaaaattaaaaaagaaaatgggaataaggttgaaacaaataaccctaaatcttacaagctttcttcttccggctgccttcttcaaccaaaaaaa

SEQ ID NO: 222718 - DNA, 2566 bp, Cannabis indica
agagagagagaggagaaattttaatcccgaaaattgatggaagtgatttttaagattaagtaaacacttagtacagagacatcgactttaagagtcggccaaaaaaagattgaattaatgcttatggtcgttaatctcgagaatcaatgcttgcaaatctccgggtatatccacgcaactcggagaggtcaatcccataataactcacaagcagagttagtaagattaacttactaagttatagttattgggaaattttcataatgatgcattgagaattagatcttgtcataaatataactctttctcatctttctaacacattttgaatcgtctgatttcaaaatataatcaagatatttatgataaaaatactaagaccgttaaattgtgacaactggatgtgagagcccatgtgccaatgtgcaagacggtgagccattgtgcgagtccatgagctattgcgcgagctcatgagacattgctcgagcccatgagctgttggacaagttggggagcatttgggtgagtcgtggagcctttatgcaagtggaggagcatccgtgcgagccacggtggagcatccgttcgtgccatggtaacgtctatgtgaggggcttgcatgcgcagctgtgaggctgcaagacagcgagacggaggctcagatgcgagcgtgcatgcatgcaagtgcaaggctgtgaggctgcaaggcggtgagacgagggcttgcatacaagcgtgaatgagtgcgacgctacgaggatgcaaggggctgcgagatcgggccttgaatgtgagcatgcatgcatgcacgtgtgcatccgtgagcgtgcttgcaagcatgcgtgtgtgcgtgtgcatgcaagcccgttagcgtgaaagcgttacgaagtgccgagtatgttgtttggatgaagaagagtgaaggtgaaatttgaatgcacatcaaagagaatatcgttataggaggaatcaaaggataaggcgtgcaaaggagaagtgtacatccacgccctctacaagctctaaaagtaaggaggtataagtagtagaggcaacactcctgcaaggtctgaggacccaactgagagtacactgcagccacacttctatattcggggaccaactctgtgactggggatcacctgacaccaagcaaaggtatgagaagcaaggccacctcctgcacctgcgatgtgcagcctgaaagcgacacattgtcatcttgaggccaccttgtacttcaggccatataaattatttttcagatgtgagagggggttgaaaaattattcttgtaacttgacctcgagagagcaattaatatcattttctctccattttgagatagcattttgatttcatattttattttttttttcgtcttagatctgagcttgaagcatagtttgattttccgatcaacaagttagttaacgagttctcatcgtcaacaagaaaaaagagatgagcaactaacttaaaaaaacaaaaaaaaaagagaaaaaaaaaccactgaaaaactaaaaaatgaaaaacagtaaaaagaaaaaaaataaagtataaaaaatataaatgtaaaaattttacttaatcaaagtataaaagtaaagtttaagaaaaaattaatatttagtgtttcactataaaaaatagacaatgttatgtgaccccttttaccactgttattttatatttcacgttttatttacacgctaaatttattaaattgaaaaatgattatttttttttattcattttattatacttatacatgtaattttattttatttgttataattttattgtctttttacatatttgaaaaataataaattaatttttaatttcaaaattgtaaaaaaaagtaaatactattttaaattctgtgttttgcaaactgtttacatattttatatctgtttgtattaggaattgtctttaagctggttataataaaaaaaaaaagtatcaaaaattaagcttaaggtcttatttatataccattttaaaaaatacaaggtccatttaatttatcatttaacaaaaacataggatcccatccataaaatttataaaactacaaaatattatttacccaaaaaaaaatacaaaaattaagtcaaacctaggatttcttagtatatatattaaaattcaatggggtgtcattgattatgtaaatataatattattatagttatccaagcaaataataatttccatgaactcataggcgccactagttttgatcatgcatgtgtgtgcgcacataactttcaagcaatttcatgtgatgtaatattgttaaagagagagatcagttaacaaaatctcacttgcaaatatatatacaataatttttaggacagcggtccctccactaacccacttgtgtgaatatgcagagaaagctttcaacaacttttcttaattttctttcatcctcctctatgatctactcatcatcaccttaattaatttttataatttcaataatatattagtatctatttatctacatgttttgtttagccagcaattttaccatggaaaattaatggca

SEQ ID NO: 222719 - DNA, 2631 bp, Cannabis indica
aataaaaaataaatatcatctaagaataataatttaccatacaacaaaatagaaatataccgtacaacaaaatctatatactaacaacccaaaacaactcataaaaaattaaaaaaatttacataactttaaaataaaaaatttacatcaacccatatacgaagaggaagaccccccaaaactcaaccccctctagctgccacaccaaagtcgttcaaaggtggaagaaaggctaaggctcaacgggaagaaaaacaacatctggtactcaatggcacgatcaaacatttgacctcaaggtaaatttggataatcattttgttattattgaaaagaagcaaaaggcaaaaccgaacagcggtgtcacaattacggaggttgatgaagacagacaagagactaagaggattcaccgtcaggattttcactttggggctatggagacttgcccagaaaagtctccgaggacgccatgaaaatcctagcatggaactatcgtgggctcgggaataccgcgacagttcggcaattggcgcatcttgtgcgccatcatcaacccgacttattggtcctttctgaaattcggttgccacctgagaaattcaatagagtttgttctaagcttcatttcattgactcgcactatgtgccttcggtgggactctcgggaggattaggcatgtgttggatgaaaggggttagctgcaatattcaagtctcttctagatactcgatcattggagagatttcctcggaccccccgggaattccatggatcttagtgggcacctacgggccccccaatagtgtggataaagagctcttttggtttaagatgggtgactatgccctcaaaactactcatctgatcctcttcttaggggacatgaatggaactctgaaggatagtgaatgctttcattaccacgggagtgtgtctagatactcgttcgacttcaggcgtatggtggatagagcgggattgattgacttgggtttcctaggcccggccttcacttgggttaaagggagtacaaacccgtcaataggggtagccatgaaaagagctagacttgatcgtgggcttgcctcttcggaatggagaatcctattccctcaagcgatcatcaaccacctcgctgcctctgagtcggaccacaggcccctgctgctcgatacaatgggaggtgccaattgcaagggacgacagttcaagtatgaaaatatgtgggcgcgcgaccctcagagtttttgggtggtgaaggaagcttggaaacatagaaggcaccccaatcccatgattaactttcacaagaaagggaaagccactagtcgaaagctcttgagttggaataagacgcaatttaaacacttatctcagcaagttcacaaggctaagtcccaactcgaagaggcagaaaagaacataaccaatgtggctgacctcaaaaacgcaaaacaacagctctcagaagctctccttagggaagaaatccattggaggcaaaaatctagagttcaatggctaaaagaaggggacatgtgctctaagttttttatggcttcgacggttataaggcgtagaaggaactatatccaatgtatcaaagaaaattcggatggcgactggatacgagatcaggacaaaattgctcgctgctttcttaaccgatttaaggagacattcacaaaagaccacccaagccccgttcagttgagtccagctctgttttagaaagtcttgactgatcaagacaacaccttcttgaatgaaattccaagtgaagatgaagtgaagagagccattaatgatatgggaaaggacaaagcccctggccccgacggctatcccccaagcttctacatccaccactgggaaacagtaaatgaagatctcaccgagatggtggttcattttttcacccatcttgaactcccacactttattaatgacacttcactagtcctagtcccaaaaaaagactctccatccacaatcaatgactaccgacccatcgcgctttgcaatgtggcgtacaaaataatctccaagattattgctacaagattgagaaacatactaccgaggatcatatctccaaatcaagcggcatttgttcgaggaaggcacattgctgaaaatacaatgatcgcaagggaagtggtgcattctatgaataaaagacgaggcaaacgaggatacatgcttttgaaactagatttggaaaaggcatacgacaaactggattgggattttctcatttcggtgcttcatcaaattggtttcggaagtcctttcatagattggatcaaagcttgcatctccgtagctgaaatcaaacttctgttaaatggctcagttgttggtaaatttagtccggagagaggactccggcaaggggacccgttatcgccatccctttacataatggcagctgaagccctttctcgccttctcatcaaaaaggaaaatgaaggtgggctcaaaggcttcaaactcgctagaaatggaactccaataacacatttaatgtttgctgacgacatcatactttttggcgaggcgactgtacgtgaagctagatccctcctagattgccttgaatcctattgtcatagctcgggtcagaa

SEQ ID NO: 222720 - DNA, 1886 bp, Cannabis indica
ttggttgacaaaccatatcccaaagagactgcccctgcaccatgaaataaggcttgccctttccaaaggaatgctctacagatagcttcaatagacttcagaatcttttttggcataatcactatttgactccaataaggttggatagctataagaactgagttgatcagtgtgattcgaccagcaaaagatagattccttgaactccagcttttaattcttgctatcattttttcagctagcaattcacattctttcccagatatcttctttgcacaaactgggattcctaaatatgtgaaaggaagatcctgtctcatgaaccccgagagctggaatatcttgtttacacatccttgagccatattgctgcaataaattgcagttttacttgcattaggatgtaagccagatttgagagagaattgcttcaaagcctataacatatactctgcacttttgaaatctccatgacaaaaaagtagaacatcatcagcaaaagctagatgatttaatttgagaccagcacatctgtcatggaaatagaaatcattcttgtcaccaatcttctccattaatcgagacatatattccatacctagtacaaacagcagaggggacatggggtccccttgtctaagtcctctcttggattcaaagaaaccatgtaaggttccattgaacattagagagaacttaggagtagagatgttgttcataaccagatggataaagcttcaagggaaattcagacctgttaaaacctcctcaataaattcccattcaatagtgtcatatgtcttttggagatcaagcttgatcatacaacttggcttgttttcttttcttccatagtgtcttaccaaatcctaacagatcatgatattatatccccataaaccttccttttttaaaaccttcttgggaatgagatattatatcaggacggatgttactgattctagaactcaaaagcttagttgtaatcttgtagataaaattgcaacaagcaattggtctaaaatccttaacagagttagggcatttacactttggaaccaaggtaattatagttgaattaatctcttcaagaatgttaccagattccaaaaatgatagcacagccgcactgatatcaccctctatgtactcccaattgtcttgaaagaagctactcgagaacccatcaggtccgggggacttgtttctagggatgctaaagacagctttcttcacatcttttaatgtgaatttctgagtaagcagttttagttcagtatggaaatttgttgggcttaaatatttttttttttttggaaaaatgttgggcttaattgttaggaagaagaatattgaaagaacattaagtcattaatggcagatttaattttatatttatgtattggagtataaatgtaaaaattgagcaaaatatattatttattaatttttttgtgtcaaatatggctcaattttaacatctttcattataaataatcttatatatcattaatttacctatttatttaattcatcagctattatattttttgaaaataattactcaaaaaaattcaaaatacttaaaataaatcaatgaatgatgaattagcaattaataaaacattattcgttattatggattatttcctaaaatgaaaattgaatgatgttagagagagttctacattgctaatgtgtggaaagataatagaatatataagaggaatgggctactcctcccattgccaattagttttgagatggaaccccattcaccttatcctaaattctaacaaatgatttatacaatatttatattctagatgtataaagctaatttggcagagctgtactcatagaaaaaatagtatttttttttagat

SEQ ID NO: 222721 - DNA, 1327 bp, Cannabis indica
cttgcaaaatctttgcaagtatcagaccttccataaaagtacactttcaagtttccttctctctacactttgatcttgattgagagtgatgttgtttactcttcaaacttcatttcttgggtgatctatctctttccaaatacacttcttccttcttggattcctttgacttaaatgcggcaagaacatctctgccatatttgatggaagccctgacttcttgatatacgattgggagcgatctcaataatgatggcttgactttcttcaccaaccttatgatttatattagcaaatcctacaataatctcattgaacctatcaatgttatcatctaaagaaagagaaaaaattattctaaaaccatataacctttctagtaaatcaatcttgctaccaattgatggctctaattacaattctttcaacttgttccagactcctttttccatctaatctgcaacaagttttcttctaacaatattggattgagacatgatgatcatgtaatatgccacctcctttatttatgctagctcatttggtttcttctctgctagtaatttctcatctccaagaattttggagactttttggtgcactaggatccttttcaaactctctctccatagtgcaaatatcttgttccatcagactttttcaatttaaatctcgccattgatgacattaactgtttcttcagaaaatgcatcagaaagaatcatagcattcttgatcgattaccaagctctaatttgtgagaaaattacaactaaagtggagaatcaaatcaactaagctttaatcaacaaataattaacaatgaaaatatttacgatgcttaaataagaatcaaagataaaatagggaagaaaaaagcaatcaaaatagaaatgattaaaacaatagaattaacaccaagatatatattggttcaagttctctagatcaacgtaatctatggctctactctagttttgaaatagcacagaaattgtctttattgattgagcaagaacaaggtacaattacagtcgagttcgattctctgttacgattctcttaaagtgtttatctttcacactcttacccaagaatctactttatctacagaagattgttcatacaaatcccaaacccaatctctctcttttttctgtatttcactttctctacctctcaatctctctcttcaatctcaatctttaacctcgaagtcacccctcaaactcgtccctcctaaaatgataagtgttggtggtaattatagatcagtgatatggatccctaagtcagtggctacagatgataagttgttaagttagtt

SEQ ID NO: 222722 - DNA, 4364 bp, Cannabis indica
gtcatatattgttgtagaaaaaatactaaaaagtgcttatataattattggtgtgattaaataccgaatcttaatagagtaatttccgatatagatatgtaagtttaactctcagttacaaataaatacctaagtttaatttttagcgataataatacttaagttataattttggaacttctgtaggtacctagttaaataaattgacacgtgacaatctctgattggtcaaagtcattaaatttgtattattttaaaaaaattaatttaaatataccaataagagaatgacacgtggatataatagcttaacatttaacggttaggtacctacagagttccagaaatataacttaagtattattactaaaaattaaacttaagtatttatttacaacagagagttaaacttaaatatttatgccgcaaattactctaatttaatattacgcttctagaaagtgctaagcactactggtgaccaataacaatactctttaatttagaataattggtgatgaaacctcaaagctaataacaacatgtcacatgtattcaagtgtacacaatagtagtgcaattgttatttaatagtgagatttaagtgacgtctcaaatttacaaacaaaaataaaaataaggaagtattaacaaaacaaaaaaggaaacatcagaagaagtaagtgtttaaaattaaaagattaatttacgacataaatacttaagattaactcttagttgtaaataaagacctaagtttaatttttaacgataataatacctaaattatatttctgaaactctgtatatatctaactgttaaatgtcaaatcattatctaagtgtcattttcttattgatatatttaaactattttttttaaaaaaaataaaaatttaatgacatagaccaatcaggaatttttatgtgaaaatttacttaacacttaacagttaagtacctacagaaatttcagaaatataacttaaatattattaccacttaaaattaaacttaagtatttatttacatttggaagttaaacttaagtatttatttgcaattaagagttaaacttatatatttatttgtaactgaaagttaaacttaagtatttatactacaaattatttaaattaaaatatatggagatttcgccaccaaatactctttattttattcttaattttaacccttcattctccattggttctttccttctttttttctcaacctcacccatccatttagtatattacatgtattttatatataaatataataaagaaaaaaacaaataaattccactcaatcaaagttgaagtacaacaaaggaaaaggaagccaaaaagatgatatttttattaatcactaataaatgaattgaattaaaaatatcaaagtggatttgcataggaaaagaagaaaagaatccaattggtctagatttttatatactccaattacatctaaatcaaattggaatttaataaaagggttttgttcaatggaaatggaatgtttgtgatgcataccattttggagaacaagatatgtaaaaatgtcacctttcatttttttgatagattataccaatttggtggtttatcatgaataaatagagaagcattatcatgtattagtaagaacaaaataatttgatagtggtggtcccctattaaagttttaatctttataatggtaatctcaacttagaggacatacaatcaacaacaacacatgctaaagcactgtgatttgataagtagacaaaattctgcttcatcttttgctttctttaaatcattattattattattattattattattcgatttaataattgaacagttcaaaagtactcaaaggaaaaaggagaggaaatgatcagatcagagattattaatattaatattattattaatcatatcagacaacacagaaacacacaaagatattatatctatggaatatgattattgatgagtttcgtttttttatattttatcatgagattgctgcaaaaatatttgaaagaaagagaatatgggaggaccactcacttgacaacaaaagatgaaattaaagagaataagatttaaatattaggtatgttttgggatatgagtccagttagtacctctttttgatacctccatatgaatctcatctgaatggagctaagctaggagactacaccattccaagagaatccaaggttgtggtcaataaccctgcatagtggaaaaagttagaagagtttcgattaggctaccaatgaaacccgggcagaaggaaagtcgatttttcgagtcttaccatttgaagtgggaattagaagctgccctgttattgcaaaattgaaacatttgatttaaaaccaaaatttgaacaacagaaaaagagttcagctcttaattggtgttacatcaacaataagagattttaaaccctttgaaccttcatagtctttcttgctcacctccaactgcaattttaccaacacttgttaacattaattctaaatatatataattgagaaattatgttcaaatcaaaatgaagatataaaaagttcagggattaacagggaaaaagttcaagaattttgaacctaagcatcaaagaacttcattatgtttcattgttttgtatacaaaagcacaaaaattccatcctaaactcgaagcatttgactaaaatatattagtgtcattgaagagatctacaaagttacattcaggttatgagaagcttatttatttagtttgctcttcacaaaaatgacaaaaaagaaaactagaattagtattcccttttacaataagattgataagtcagaccaatgttctgtttgagaattaccatacccgtgtggtttcggtgcagaactgttcttcaatatcaatttatgaggatgatttatgacctgaataagtagacttttctacagctgaagctgatggttttgcagggatgttttacttgtttggccaagattcgaaattgcagaatcagtgtctggacttgacttgatgttaggaatttaattagccatattttgtcttgattgctgagtatcaccactcatctattgttggctgcataatggtacgtttaggggttctgtggaagccagttttgggagttgaccatgctattgtacatttgacttgctgaggtaatcttcatgaactgaactttaagttgttcacctgagatattcaaggtgttgacaagcccaactaccgagaaatatcatcccaaggaagatttttgcagatccactggactaagcttaagccaagaaaacacctggttgacccttcatgccctatatcatcaccaagctaaggcgttggtatcttaaaaagattatctaagtcagagagaggattcatcatctgcataatagaaaccaaggttagtcacttatcctatctccacaagtccatgttcaaaatcagtaaagtcagatgttaaaacaaaagtgaaaaaaaatggtgatattgtgaatctattgactattacctggcatttctggttgctctggatgctttgatctgtacaatggagtgaaacagataaaatatggagctgtagcatgttcaatctctcagttagcaagcctattattttggttttagaaaatctaacacgacggtattaatctaaatcaacccatggtgtattttgccaacaattcacaattggtcaaatagaggctttagtacaggaacagcaggaggccacaaattagtagttccaaaagatttggttcttccggtattgttttttcttataaattgtaattagcttcctgtaagtccagttgttatgctttgtgaactctaaaaaggcctctgaattcaagtggaaatcccctttacccaaaacttcaaacaccaggggatcggttagtactttcggagagctgttcatgttcatcaagctaagaacaaagtctaaattccttcctagtcttctctccaagtaagcatccacaacacatccataagttactatgtctggaacaaccatctcatgcttcatatgttggatgctaagatgaagatcccacaacatagtcattcttgaaaatgctagggcccgaatattgaaggtagtgatgtctggtctaaacccggattctatcatcctcaggaattctctttggagggttttcatcttgaagttggcagcatacgacaacaaaagaagattccacaagagatttccaacgtcctttctgccaagacccacctccctcaaaaactcactgagcctgtaaagctttttctgcttcaaataggcaagcgctaccgctctgattccatccttgtcaatcgaatatctagacctct

SEQ ID NO: 222723 - DNA, 1948 bp, Cannabis indica
tgaagaatttaagaacacttgcaccaatttaaagagctagtcaatattcttccttttgagatcctcatcagcaattttaaaactgtaaattcaataaatttgtctactattattataaaattccaaaattatattcaaaaatattcttgataattatatatataaacattctcaataatgaatcaaaaataattttgactcatttacataaatattagaacaaagcatagaacaaaaatactatacacttttgcaatatttttgtttttgagatcctcatcagtaatcttaaaactgtaaattcaacaaattttttctattctttattataaaattccaaaattatattcaaaagtattctcaataattatatataaacattctcaataatgagtcaaaaacaattttgactaatttacataaatattagaacaaagcatagagcaaaaaaaattatatacctttgcaatatgatcacaaacgcctcacccaaaactaaaaaagaaggtacagcatttagtcttggaaactaacatcttcaccttaaaagagaaccttgattgtgtttgtacaattttatttggatatatataaagagaaagaatgatataagaagtccaacttctaaattgcacacaactaatacatagtaaacatataaagaggggagagaaagggttatataagagatggatagtcacacattataaattaccaccaattacaatataatttatctatttattagttcgtttctataacctataattaaatgatactaaattgtaagagaaaaaaatatatttatatatatgttattactattcgttttaaattttaatattaatataaatagatataaattgctagtttgtttttataacctacatttataggtttaaatgatattaatgtaagagaagaatgtatttatttgtattattactcttattattttttttatttactttaatatagatagatacagattgtttggtattaaatagaaagaataaattaaaaaaatgagagaatgaagattagagaaagaagcttatttagattgccacatgtcctcttttatactttactttatatattgttatattgatttgaataattggtaagttgagattcataatttaaaataggaaaatcaatgttttatgtctttactttctgattaaaatcgttgtttgtctgtttacttttctgttattttattatttcattcttaatcattatttactttctattctctaattaaagcataaaaccaaatagtataataattagtgaaatttaataatcaatctatgtgggtttgacaaccttttaattaaaactttgatataataacaatgtatggcagtaaaaattgtgtatcactcacatacctaggtctgggtctaaggctgaggtccaggcctgggtttgtggccaaggttaggggttgagtcctgggtcggggtccaggttcgggtccgaggtctgagggctaggttagggtcacgggtttggattcaacggttgggttcgggaccgagtcccgtggctgtgtatgggtctagatttggagctaggtatagatctcaaattttgaatttgaagtccgaggttagggtccgggtgaaaggttagggtttggaccgagattcgggtcttagggccaaatccgaattcatgtcgaggtcctggggccaggtttggaccagggttaggtttggatttggggttttggtctggggctagagctaggtcccgaatccggagtctggggtggggttaggttcatgtcatattatggtgtagagtattgaaatatttttttagtaaaaaatttaaaaataatttttagaaaacattagccaaacacaattaaatttttaaaatagaaaaactattttctattctcacttttaaaaacacaattctaaaaacttaaaac

SEQ ID NO: 222724 - DNA, 1143 bp, Cannabis indica
tgatcaaggcgtgtcctcagatctttgtgtttagcattgagcttctatcttagatcgatagaggatcccttcaggaagaaccctttggttttcttggctctttatgtacggacacgctccttcaatctcctcgatcttaggggctagtttttcccttgggaaacctatcccttgcggacctttccctttcaggagatcaaaatgaactgcccgtggatctttagccttattatttcttttgaggacaaccgtagggttctccttcgtagcaggttttcctagaggatacctgatgggactaggttccctacacttttgtttctgaccttctttgggctgagatggctctatctcgctccctttttgtacagatgggactgcatatgagtccacttgaatgctcgcattttccattgcccttttcatgacaatcaatatttcttgcatccttttattttgctctttttattctaccaactcaacctcgtggtcgacaaccttttgccttagtgcgactaactctgtatagttatcttcatcgtaaccttcatattcttcttggctagaatattccggatcattagtatccccttctccttcatcgttcaccctagatgtcacctcttcttcttaaggatccttggggtcatctgggtgttgtgggcgcgagatgtttctagtttttaccattattttactaggctacttatgacttcctacaactctcaatgaaagtaccaaaatattgaccgaagttttcggcaacaagtaactagaacagtgtgaagtacttaatgaatgttagaagagatgattttttttgtgtggttggggtattaatgagcgttagtccatgagtcactatattatatgagagtatttattacagagaattttccaaccctctcccatttatgtttatcattggggtatttataggcttatgatggtggtaaaaaggccactattgtcgtgtttgtttacaccatgcttgacacaaatttccaaccctggcttacgacataattgcctacataagagggtttaggttgtctatagaagtttagtgtgatgtgatttatcctttatttgtgacttgatggcacattcatgcagtcgtcgattaacgtacgagggttcgtg

SEQ ID NO: 222725 - DNA, 1223 bp, Cannabis indica
tctattatttattttcaagcctttcatatttttttccaatcatttttttttaaatatattgaaatcaataacaattttaataaaatagtttgagttttttagtgtcttgtaaaaaatataaccgtatgataactatttaaaaatatttacaaattgcaccttttttatttgttaggggcccaaattttccaaattgtttaagatgacctgtgtgtcaatacttaattattgatttaattttagttggtagagtataatattttatgttgaaacaattaatatgcaatatttacttcttaagttttccgttgaaaattttattcaattggctttttatgttgtacttctatacatcacttctaatttgttattattatattgtattaattatttcagatgcctcgaccaccattgtaatgagaatcttctacgacacttgatgatttgaatgtagtgtctcttagctattttcaaaaaaatatgtaagttagggtgtggttttgatttggttgtttctctatatttggagattatatatttctttatattttacaataatgtttctcttgctttggtcacaaaaactctgttacattgagatggtactatatactattgtgtgcttggcccaattatgtttgtggctacaacttgaatttttctaataattatgcgtggaagtggccttatttgttagtatatagattacgacttaaattttgtcttcttttcttttaggatttttacaatctttaaaaaagtatatcattctatcttaattaatttaaaaaaacatgattaattgttatattttgtaagaatatatatttatacacaggcaactataatagggttctcacacgtcctattgggaacatttatgtttttatgttttatatgacatgtttcgtcttcgaaaatcacaataattattacgatattgaaaatatagctctaaatagtaaactgcatgtgtattagaaagaaagaaaaaagcaagtcgtgcaactaatgtttgaatatatatacatatgaattttacacaattatataagaaaattttagctataatctttctaagttttataataaaaatgttcctaccaataagaacaaaaataatacgatcttactctaaaattttgcactatataaatatatatatacatatatatatatatatctcaaccaataagaaaatacccttaattttttttttttta

SEQ ID NO: 222726 - DNA, 2377 bp, Cannabis indica
taaaaaaaagaattaacaatatattaatgtggccatatacctaaaatagcttaatataaagttaataaaaattgtaatataatttataagaaatcttttttcataatttaactaattttataagtttgtcatattgaactaattaagtaattatgttaataaggtggcatccaatcgattgtgatagcttatggaataaggtgtggaaactaaaagtactcccaaaggttctcaacttgctttggggagccttatctcactgtttgataacattatctcagctgcatattaaacatgttcctatgcaaaagacatgtcccatgtgtaatttggcagacgagactgagtttcatgttctggtttcgtgtccttttgcagctcaatgttgccaggtagttttaccagaggatcaacatgtgggtatcgcacatgttttatattttcttcagagaagatgattggtggttcattcgactttgctttcttcaatggttcaggagcgaatgccgattgttcatttttcacttcatttatatacctcttttaggctggttaggctcatttccttgatttctcacatactgcctaaagtacccttgcgagatcaaactttctatctcatctttcaattgtcggcattcctcggttgtatgccctatatccttgtggaatcgatagtattttgttgaatctcgcttgtgccttgcttgccttattagtttgggtttgcaaaatgcaaccctgttctcattcgaaaggaagagattctcgcgagtttcattcaactcagtgtataccaagtaaatggatacatacttctcatgttttttctatttctttttgttctttgatgattcttttgactcatcctttctttttgtatttgatccaccaggatatctactttcgttgtgactgtgctcgatgttgtcgtacttgtgctgggtttattttccgagtgagtcttcaacaacttcattttagtccttgcttcctctttacgcacaaagatttgtgctctttcattaaagttgttaatattcctcatagggcgaccctggaggtcatcccatagttcacctcctgctgtagataaattgttgtgattcctgcctgaagtgttgttagcagaatactatcattaaagtttctaacttttgcagcagctgtactgaagcagctcaagtacgctttaagagattccccaggttgttgttttatgctggtcaaagatgacacttcaggtcgacggtctcttgcagcctgaaactgctttttgaagtccctcgacaactgttcccaagatgttatggaatgatgggtgaatttatcaaaccaattgctcgcagctcttgttaaggaatatgggaataaaatgcaacacaagttattaaaacattgcatgctcgcatatattaaaattgtttaaatgagcgaccagatctgtggtcccatcgtattgcgagacatgaaggttattaaatccttgaggaaattttgaatttaaaatatttagatggaatggctcggtttcttcgtttgaattgtaccctggcaatttgtcatgttctccatcttgatactttctgaatttatcctctagttgaattatatgtaattggatgggatccattggttgctgatttgcattttggttaagctgattatgcaaatcgggcgcatttcgatttaggtgctcgcgaaggtcaggctgccttcgatttaatctctcgcgcaaatcaggttcgcgatgcctttgttcatagttacgtacagatctggtctccaagtagctctcggacaactacgtgagttacgtatgctttcttggttagtataataacgtcgagatctacttccatctcgcatttgtctacttgacctactatgcccgcgggattgcgattgtcctgtgctcgagcttgcttcatctcgtgttggtcttcttcttcagaagagattggacacacgtcctctacttaaatatgtgtacacattttctctatccgcgcgagaaggatgctaaggatgtctcgacataagaccacttgacattggttggtttccagggtttctttcattatcacaaggaaatccctggttccctagtcgaggttgtctcacctcttcattcatgcgagaaaattctagcatgtaagttcgttcattcccttggttaggaaattcttgggaagtttgtggaacatctcgtcgatgttcttgattccttgtattattaagatttggttgatttgctttatccattgggacatcccttatattctgaggttgttcctcttgagtatttggtggattctcttggtttgcttcttgtctcctggtcctggagcctcgtggtctccttacagtaggatca

SEQ ID NO: 222727 - DNA, 900 bp, Cannabis indica
cacctaacttgccaaaaaaggactttacaacaactaaaagattataattgcgaagagtctagtgtagatctaacacttgatgattaaacatttgaaatcagctgaccacctatggttgacaacatcgtggacgaaatcatatcatcccgtgaagacggagaaggattatggattgattgaactattaatgcacaaatattggtttgtttgtctattaatttgtatttttttaaaatcaatcaaaactttttgtggtactttaatatatgatttgtttttgtttttatttgtaggttcgttgattatagatgacgattttttcctttggagtcaattcattggcgaagaaccacaacctgaacatgatttagttgaagttgaagtagaacccgaacctgaacctcaaccaaagaaaaaaggaaggagagcatataaaggcaagaaacatataaaggataggagcgaaggaaaaaaaaaggaagtcgagttcaaccaatggagccaattatatggtgagaatgggactcaaattattagcaagattggcctctatgcaagaagaaattttccattggcgtacaaaaattggcatttaatgtcgggagaaaataaagatagcttatggacttacattacggtaatattatgaaactgattctatatagaatatgaaatttaatatttgatgtaattctaattatcgttcataattattgcagtctatgtttaagttgaacccagatgataagcacttagtgttaaaaattgctggagatagatggaaagatcataagacaaagcttacaaataaccacatttacaaatagaaagacaaatctcctaaaatgctcgacaatcctccagataattttgccgactgctacaaacctgaagactgga

SEQ ID NO: 222728 - DNA, 2979 bp, Cannabis indica
tttactcaagtataaaattgaccctttgatactaggtggttgtatttcgatccttttttcaagtcaataaaattattatgtactttatatctgtaacagcctcatgaggagtgaagaagtgaaagaaaagccaaccttcaatttattactacatgcatgtattgaattagtgaatttgcaccctgattttggaggtgaagtggtatgtctttgcacttttatttcattttctttcaaatatgctaaaatcagtgcttttattattactattattttcaatcaaaactgtaaatatattaaagcaactgtgactgtaatacttgaagaagctgacaaaaattataagtaaatggaaatttgatgtctatttatattatttacctaatcattataagtaaagaaataaaaggttgacaaagatgtggtcatgccttgattaccagatgaatgttaagaggagatgaaaaaaaaatgttagataaagctgaaatattttgaattgtaattgtttaactgaaacttcttcaatgtaactgatgctaatcttgagaggaaaatatttgattgttttgttaatcttgagaagtaagcaaattgtgttcttcacttctccttgtacatgtattcggtcacacaggtgaactaacaacttatatatctcatcattttaaactagtctgcatgattgttgtttggaaaatggattataatctatttgttcaatttttttttctataatgttacacatatgagctaataatcttttgtatgctaggctgaaaggcaacacactacttaatgttacaattgagaaaagtacatgttaagcaaaaattttacatttagaatattaaaataaatgtaaaacatgatttcatatatgctaaatttatagtataagattttaattaatttaagttcggcccatttaatattataagaataatttaattacaatctttttgtttacaggaaataatcttttgatttcaattacaataatatttaaataattgaaataatttaggaaagatttggggtgagtttgaaattgttgctgaactcagtaaaataccttctttatgaagaatcaagtcatttgtagttcgaaatgaggtattttataatttgaattaaagaatttcgatagatgaccattttttggaattcttcgctatttgaaaattttaaaaaaattcataggtggatgaccttttatggaatttaaaaaatttaaatttttaggtacaatttaatacatgttaaagttatagaaaataaatctaaattaatctttatattttggtaactagttcaagggcaaactctcaattaatttgtctatgattatttttctcttctctttttctcgatatcctgttgacctaccgtttggatgacattgagtacattcgaaaagatgagcaaaacaaaccctaagttctcaaataatttaatcatcaaggtaggtagacccccaatgtagataacattgccatgtgaatttggagaaccaacttcactacaaaaacagcatagctctctctctttgaaaccaagcatttacattatttttatacatagaagattaattcaacacatattgtctctgcattagttgaccttattaagtgtaagcatcaaattttgcaacatttagttatacacaaaagttgtacttgtactgccacaaatggttctcctataattttttagctgaaatgcaaacttttatttactcttctttctaagtctaattgaaatcttccaatattgagtggcaatataattcttatgaaagaccaaaaaagaaataaaaaaaaaaaaaacacaaatttaagtcaaatgagaaaaaaggttagttgcaaaagcaaagtcacattcttggtatgcgtgtagggacatttattagtcttgtttggaagagattcctttgacttttttggaaggaaggagtggagttgggtgaatcttaactcaactacaactaattttggaagactttttccttagtttattgtttaatttaataatcgttttcccatttgagtaattgacctttcttctagatattataattttaaaaaggattacatatatataagaaagaaaatggaatttgattaggtattaagggacttacacctttgacttttacgtgctaagacgtggtactagactactagtagaatagataggaaataatgaaaaatggtaaaaagcatgagtggtgtctaatattttaagtcattattattattagtttaattaagtatcgggtctaatatgatttaatgtagtaatttttaaagagtatcgctagccaaatgcaagacgacatgtctaaagatattaagtattactgctgtccaatagcaatgctcaaaaataatagatatgatgtttttcaaacgtaatatgctaaaagttgtttcggtattattggtgtaactagatattaaatttcatataacttcaaaagataatttttaaaaatcatcattaactaattataaaacgtcacttattgaaagtgatgggtactattcgtgcccaataataaattatttattgactaattgacttgctttcactctattgattttctttttcattttatcatatattgtacttctgtctcattgtaaattttatatgtaccaactaagaatttgtctatttctcaaaaaaaaaaaaaaataaataaataagaaccttgtctagttatattgaatcttatcacatatttaaattgatagaaaaaattaccattttcactttctatgattttatagtatgtttaaactacatataggtgccgtttggtaacacttttgttttttaattttttaatcacaaaatgaaagtaaaatttttgtttttaaaaaatttaatttttgtaaaaacaaaaatagcgttctgtaactacttttgtttttctaattttaaaaactagaaaataaaagtagtgttctgtaa

SEQ ID NO: 222729 - DNA, 1274 bp, Cannabis indica
aaccaatgtaaggtttcttaaactttgtatgtgtttaaattccattattttagaaattcatatttaggatgttaaacaacatacatggtagtaaatctagatcctggtaaaaatatatccaacaaaattaacattaacattcatcaatgaaattaagaactcatgtctcgggttttaaaataatccttaactaaaagaaaactactaagaactaggcattataatgaaaattatagtaaatagtaagagtttaagcagaagaaaagaactatgataacgaacacttcaaattcgcgatctccatctcttccttaatctctctctaagtttttatctcatttgtagcttttgggttctgaaattcgtagcctaaaaggtcctatttatagtgcttaaaaatatctcactaaaaaaaagatatctcccttttaaaaaagataaaaattttgaaattttctagtatttgcttcctcgccgcgaccacgagcagcctcgctgtgcccacgacttcctcgtcgtggccatgacttcctgtcgaaaaaattatatcacctgattagtattatgatcataacttcttaatacatctaagaattggacgattcaagatgtttcggaaagctaagaacaagatctaaaactttcatgttgagctccaagtctagttctacttctaaggtcgtcaaaattggtaattaagtttcaccttgtgaaatcgagctcgccgacttccattattttctaccaaaatgtgctatcattcctccaaatgattctcaatacctgattagtctttaaaatagtctaacaaattataatctaatcaataatttaaagaatcaatttagtaatattaatacataaattggtcatatttataagacaaatatcgactcatcatgccttaaatatgttcatggtatgtctagttcatgtcccaatgaaaagtttgacccatctgcactaagaccgtcctaaatactgaaaccctagttaggatgtccacctaggtgtttagtgaaaccctaggcgtccacgttggcttttggggtataagttcatgtaattttagctctcgacgcctggatttggttgttccctgtcttcatggtgcaaaatattgaaagatagtgagttggaaatgagttatcgatgtttgaacttcaattttgaagttcccatagtcaacctgggcgtagggctagggacctctcccaagtcaattgctatgactcaagactactaatgtaatacccggaattaagaaatggatt

SEQ ID NO: 222730 - DNA, 6316 bp, Cannabis indica
ttagggtgttaaacaacatacatgttagtaaatctacatcctgaaaaaataatccccaacataaacaccttgagtacgtcggctaagatttctaacagatctaaaacaacctattctacaaaaagaagccattaaaaccttgtttctttgtgttcttcaaaacccatagtccaaaatgtggaaaacagtgccaagattcaacattttttaactaaaagccctacatttacctatcctaacatgcacgttcatgcatagaggttgggttttccttaaacccgaggcaaggagattctttcacctctaacaatggtgtaaattcaaaataatttgcaaaaacacataactcttaaagaaaaggatagaggtaaaagagacttactcactaggtgaatcctgggcgaggctggacaatgatgaaaacaagttgtagattttctcttgcacagtgagaagacaaaggaagaagcttcaggtttcttgaagttgttcttgatttttctctttggaactttttagggagtaaaaaatgaaagtaaaagtctaaaggagaaagaagggcctttcatttaattactttcccccccaaaaaataattaaatgggaaattgattcccaataatatcatcatgggaaatggaaagaacaaaaagagaaattatgagggagtgcagccgtcaggatgttttctcacaaaatatgctttaaaactgctcttatgggaactgacatttaatgttcagttgaagagacagaagtgcaatcgttcacttctgcacggtacaatcacttgagcattaatcacgtggacctcacatgcttgccagcacccgtatgggtatcaaaagtccccatccagaaaaatattcgtacagggacttgggggcgaatgttatcccaaagtttgcaaatttgatgtgacacttacatgtggcataatccagccaacgctttcacccagcagaaaacctccgggcagaaggatgcctggcaggttcgtatgggtagtggcagccataaattacagatggtctattgagaagcacctggcaaactaccaacctgctgaccagagatggtaaaggtcataccttgcaagggtgattgtacaagctaattctctaaaagaagacaagtcttatagaaggcctgggcgggtagtgaatatgccaatcagaagagatgccaaaaataccgaacaaggctacatgagccttgatttcttcttcaaaaggcatccacaaatatctccaactgaaccctacaaactcggatctagaaaatctatccgagaataaatgagcttcaacagatcgtaactacaccctagaatataaggatatttattctttgtttacttcttttacggaactaaatgtaacaacctccccctataaatagtgatggcattcacaatgggtggggacttagaactgaaatctcatactcacatatctaagagcattatgctgaaacacattctctgtaaacactttgagagtcgaagctagaaattactttgtcttccttagtgatctggccgatattatcttacaagtaatacaactaaaggggactaggtcattacccatatacaagggggcgaacctctataattctttgtattatttacttattatttttaattcttcactagtgattaattagcgtttattagacaccgaatcagttggcaatttttccagtcaacaaagatggacaagttcacaggggagaataatttttgggctagaggcacttgatacaaaaacacttgatgccactggagacaaaaagaaaaaaggagaaattcatatcaaagctgattttattgagcctaagagatgaagtacctcgtgaagtctcaaaagaagagacattggtctttgggataaattgattaagatttactttaaaaaaatctttagttaacaaattatatttgaagaaaaagttctacacattgcaaatggatgagactaaagaactaaggaaatacctagataagtttaacaagattattctggaacagaataatattagtgtcaagatcgatgaagggagctaaggtataattcttctctcttccttacctaattgtttcaacattttgttgatacaatattgtacgacaaacaagtactaacaatggcagaagtgaagtgtgtacaactcaaatgagactctaaagaaatcaattgagagtggtgaaggtatgctcactagaggcaaaccaaaaaagaaagatctaagaaattataacagttactacatacagaaaaatcattcaatgatccaagtctaagttcaagtcagaaaagaaatgttactattgtcaaaaaggacattacaagaatgagtgcaaggctctcaaggcaaagttgatcaaagaagaaaggaagaacagagggatgcgaatgttgtttctaaaggctaacagacgtgatggtagtctctagtaaagcctgtgaaaaggagtagaacatcccaaagagatccagtgttcatggtattggctctggtctgttgtcatcaaaatgtttgatggcatatcaaaagcaattcgaaactttagaacttcagaactttaaatattttacttgagaagaatctactatcaataagatatttagctcaaaagtagttgcaccattaatatggaggtggaagtctgaaaatatcaaaaggttccattgttatgatgaagggcaaacttaagaacggtctacatttctccctttggaaaaactgttattggtaaagctgcaccagctatatcagaacaagagacaaccaagttggtaaaagaggactgcaacaacttgagaaacagtcttttgaagggcaagcttgatggtaagctaggattttgtgaagaatgctagttatttcccaagttttatttataacaaaatataaacttttgagctagagtcatgtcccaatcctcgccccatccccgttaagaaaaccggtgggttaaattgtcatccccgcactagcaaatgcatatgcaatgaatttggcccaagctaatatttttactaccacacactaacatacgtgaacttgatttatatgagaagagcactataaatgaatatcagcaaaatttaatattttctccttctaccccagcaaaacacaccaccctgcacttttctttcttttctttctatgcattacatccctctcaatgagctttcttgaccctatcacgtcacaaattggaaaaatgccaaaacttttatttgaaactatattgaaatttattcactccaaggatcactctccgtcctcacttcagatggctcaactacttctgtctccatggcctgactagcacttgcatccgattctgtagtctcttcaccagccccgtctgccttttcttcgtcttctaatctaccccatcttcctccgagggccattgccatcatctcgtatattttgtttcccagctcagctggactgtcaggctgcaagatgaataggaaaagtaagtgatgaactccctaaaacttgtgcaatatgacatgaaagttgaagaaaaaaaacaatatcgatcttcttacagtgaatccactggagatcagggctgtatcatacaggagatcgacagctctcttggcatcagcactgtctggggcattcttgcaagcagcctgcagaaagaatattccatgtaaattaaacagttaaaagtgtttcagtttgtccacgagatatatatcctgttctaacaaccgatttaaagaaattatattttaattcttggcagtgttgcaagtggaaatcattattcttacattctcatttttccaaaaccctattcagaagaatttagtaggtaaaaaacgtcacaaaataatcagtgcagaatctaattgctcacattcaagtcttttacgatgggatggtcagcattgatttccagtattctccttcccctcatgaactccaaacttgaagtatctccaagtgcttgagctttcatcaatctacacagcaaaataaataatttatagttgtaataataattgataaacgagtgaaaaatctgaaagttcataactaacctttccatattagcagaccatccaaactttccggaaacaagcacacagggagatgaactcagacgatttgagacttggacttttgctaccttgtcaccaagttgttgctttatccaatcacaaagaagagtgtattcttgtttagtttccctttctttgacctcatcctcatcacctaataaaaatagtattaatcaaattgtgtatggaagaagcacaataatagaatttaacacaaacagaaacactaattaaatatgtatataaaccaaccaagctctagatcctccttgctaatgtcaacaaacttcttttctttgtaagtctgcaggttctggatggcaacttcatcaataggctcaattaaatacaacacctaagagaaaagaatttcagttaactggttgaaaaatttcactacaatatcaacaacttctttccatcaatggccattgattacaactccaacaaaataatcatctcaaatagattgtcaaggattatctttcagaggttgtatcaactaatatgttcagaagattggatcagtcttgaatacacatacctcaatatctttctggatcaacttctccaagaagggagcagacttagcacttttcaggctgtccgtagccaagtaataaattgccttctgattttcattcatgttttcaatgtagtcatctaaacttgtcagttcttcctcattcttcgaggagtaaaaccgcaagagtggggtaatgcgcttgtgatttccagtatcctcaatgcaacctaactttataaacctgccaaagttctcccaaaattttttgtagtcctgtaatcaagttcaattactgacacgtcaaaaggagactcaaatgcaacggaagaagaaaaacaagatgcaattactgccccgacctctttattttcactttcagaaatatcttggatcatgtcaaatgtcttcctcacaagtctctttctcattattctaacctgaaaataataataagaaaatgatgggaaaatatgtgaaaattaattgaactcaaagctctttgaacataggaagttgtttatggataaaaaattctttcatatcatatctttccatttgaaaaaacacaaaattgtttagttaaatagattagagccttacaattcgactttcttgaaggatttctctagatacatttagaggaagatcatcagagtccacaacacccttgacgaagctcagataccttggaaactgcataaagaatctcagattaattatcatttcccaggattcatacaataaaacaagcaagcatcaaagtacatatctgcatatcctactgtacaattgacaacatgaattgttttttccacgcaataaattgctaattaaaaactttgcacttagtaaaattttgtcaatagaagggttttttggaaagcaacactcatgctactttagggaagagagaacaatcaagcaaacaaactaccaaaattctagcacagaaaaaaggctatataagttacaccagaaagaagaacgggtgatttcacaatatggcagtaaccatatagcttccgataaaaatttgtgggggaataaataaataaatagagaggggaacttactagctcgccatcaaaatcatctgagataaagacacgcttcacatataaacgtatgttctttgttttggggttgactacatcctcgttgttaagaggccccattccaggaacataaagcacactcctaaactccacctcaccctgcacagtttgcaagatagatttacaaatccaagccaacatgtatacttcaagccatacccaaaccattcagtacctcagttgtgaaatgagtgtatccaataggatctaagaaatcattgaaagttttcttgtagaattcacagtactcttctttctgaacttcttttggacttcgcatctgcaacagaacgagaaaagtgttcattgcatgatatttgtatgccattgacaaacaagcatggcaatggcacagcaagcaacctttttttaaaaaaaacaggcaaaaaatttggaccttgagatatgttgaaagcacagacaactaaactagcttacccatattggttttgtttcattggctaattcccagtcccaatacttctcagtttttgttgttttcttcattttcttctcaccctgggaaccaaagttagtaaaatcaccaaaacattattttaaactaagaaaaagct

SEQ ID NO: 222731 - DNA, 2079 bp, Cannabis indica
tgacattgaagtttaccacactcagcttgctgccctcttgtttgcctatggttaaggaaaaatgacaaaaatattgacagtgaggatgagaagctcaacacatcttctaagagtaataaagactaagaagtagggtcttctgatggggagctggttttatgaagtaggttgatttttacatattaaatgatcagactttcttatagatgcttttgttttatttcttgttttatgctatattttaatttctgtatgaatgaatgtaatctttttttagacaatggttgttcttttcttttttttttcgtaatttagttcttaatgcttttgttattagtgcaagttttttaatgatgatgtagtaagtgtttttacttaacatcttggtaattataattcaatatgacatgtgtgtatgatctttctatctttttttattataaacttattacaacttaagaaaatcagttattccaccgttaaaaaatatatttattaggaattttaataacaatgtattttttacaatagcacacaactatttagcaactattatgtaacttaaaaaaaaaccatttcaatatgtgaaaacttcttaatcttgataccaaaagtgttatgaacttataataaatgttttaaatatattggattggcacacaacttaaacaaaactattatgcaactttcaaaaaactaatatagtaggaatcttaattgtagtattttttaacatggctcacaactgtctagcaactattatgcaaccttaaaaaaatcattccactatgggaaattaatagcaatatatcaacgtaaattttcatgttataagagttctcatagaaatttaaagattcaaataaatattctctctattaattttcttatttgtgacatgtctttcagttgtgaatttttttgccacagttgttgcacctattatatttttgtttcccatctacctataaatcttcttttccttagtctttcggatctcactttctggtttggttacagaacaatgatatctttgatgttttgagatacacaccatgttttgtgattgtgtgcaagatatattgacccactatatgttccaaaccatattttggttgtgtaatactgtgaacaataattttaaacatttaagttcatatctttcatcacaataagacaatgagcacatgggagttcgtttgtttggaatctgttgcaactacaaattttttcttttagattgaccatccatgaccttatttgttgtaccacttaaaccatgttattgtttattggtttcatctaaagattttgtaatgataataaatgtattttatgttgacaaaacgaaaaccaaactacaatgaaactgttatgaaacttatagtttaatgaattcttacattttctgtcaatgagtccataaagctgttgattaccttcttcttagcagtaggtgtcaaaattgttgtcattttttatgctttttacctgtttgtgtatgtccattattgtatcaaagctcttaataagtccatcggtgtagtgattggtagttcagtagctgctaagtttgttgagtttagagattcaacaatgttagaagtgatagttgtatatcagttgtgtttgttgtggtcctttcaccatttgtggtatccaaatagttgtaaatacggtctaacacgcttatctaagctatcaaactcgctcatatattattcaaaaaaaaatttctgtgtatgcttttgctgctgcaaaaaatggtttattgagtttgctgacattcttcttgaaggttgatttaaggttgcttgataggtggtaaacacaatagccgtgagttatgtctagaaatacatgagcagctaccttaattatgctcttatgtctatctgagatcaagcactatgagttgttattttcttaatctacaacagagaatgctaggggaaaaatgtgtccattggcatcttgtgtacaggctgagagcaatgtccctccatatgttgattttaggaatgttccatcaaccacaattatgggcatgcacttgttccatccttttattgaaccatc

SEQ ID NO: 222732 - DNA, 2518 bp, Cannabis indica
gtggccttcgtcaaggcgatcccctctctccatatatgcttctcctctgctcggaaggattctcttgcctcatacaagaggctgaaaaagcggataaaatcaacggtattaagtttggaagagaaggtctcaaattatctcacatcttcttcgccgatgatagctttgtgttccttgaagcaaccccaaccaaatgtagatgcatgaaatctatattagaagaatactccttcctgtctggtcaacaaatcaatcttctgaaatcagagctgtgtgttggaaggaagatcaagcaaacaaatggaattatgctggcagctgaccttggggttaaattggttgactgccacaccaaatatcttggactaccagcaacaattgggagaaggaagaaagaagtatttgagtccattcggtccaagattcgggataaacttcaaggttggaaagctagcttattctcccaagcgggtagggaaggtctactcaaagccgtaattcaagcaattccaacttatgtaatgagttgtttctgtcttccaaaggagctaattaaggacatccatgcaatgatggccagattttggtggggatcatcggagtcaaaaaataaaattcattggggaaaatgggacaaactctgcaagccaaaggataaaggaggaatggggttcaaaaacttagaaaaattcaaccaatccttattagcaaagcaagggtggaagattatcaacaatcctagttctttgctggcctgtgttctcaaggcttgctatttcaccaactctacattcttagaagctaaacttggaggatttagctcctttatgtggcgaagtatattatggggtaggaaaataattgaaaagggtgttcggcggagggttcaatcgggtagagaagtgcgcatcaatgaagacaaatggctgccccggtcctccaccttcgctcttcgcactcttgtgaaagttaatcatgggacaactttggatcaaatgaaggataatgaaggttggtggaaacaagataaaataactcaaacattccacccgaatgatgttccctttattctaggtatgactccttgttttaataacgctaatgatgatttagtttggcactacacaccgaatggtatgtacacggtgagtagtggttataaagtggcaaccttcaatgagataaaagcagggccatcctcggacgagaatcataggaaatggtgaaccgagatttggaagttggaagtccctcctaaagtttgaaattttgtttggcgtatctataatggttggcttccggttaacatggtgcttaggactcggggaatgaagatagaaccgtggtgttgctgctgtgggactgaggaagaaacaatagaacatgggctatggtactgtccgtcagtaaaggaaatatggcagcatttttcgatgtggaagaccattaaaaggtggaaaggcgaaactaaggacatgctcatgactatatagcaacaaacaactcaagcagattttttaatgttcatcatgctctcttggctcatttggaataggaggaacaaaaaaagactcaatattcatcttcttcctaacaatttatggtgcaggtgggctcaactggagatggactctatgatgcacaacaattccaaaactgaaaagcagctgaagccgactcccacatcagatggtgggtgggaacctcctcaccctgggacatattgcatcaatagttatgcgagtgtgcattgtaaagaagcgaatctcggattgggggctgttatcaggaaccacacgggggctgtgttggctgctgaaatcaagcagcaaagaggctcatacacggtagaattggcggaggttttggctctaagaatgggcattcatcttgcttccaaagtgaaggcctacccgttcatcatccaaactaactgtcttcgggcagctagctatttgaacggtgattatcaagccaaaacggattggagcgcgctgcttgacgacattcgagagtcccctgcttttggccattgtgttgcagtaaagcatatagggagaaagaacaaaagggctgctcacttattggccaaagaggcattgttttcaaattgtaataagttgtggttgggagaatatcccttttctgcgtctgccggattaatggcggacttgctgaaacttgtgtaatccttttgttagttaatatacatatttcaaaaagaaaaatagaagaaaggaaaatttgcggtataaataccatatatttttaattttatacatttaaatattatatatattttttttttgcgaatttaataccaagctttgtatattttaggtctctccgttattactattttgttagttgtgacttagtgtacacgtgtaaggtccaaaataaattcccattttttttaaatattaagttaaaactaaaaccttaactttttaatctaatatatctaacttaaattttagttccataaaaatattttaatgaattaaaataaaaaaaa

SEQ ID NO: 222733 - DNA, 1116 bp, Cannabis indica
ttggttttaattatgagctaaactttttgaattagaaatattaatgaactattataatttgtagttaatgtttgcaagaatgttttaataacttaatatttggatcagtcaatatttatttacattgttgagtgatttggtattacttctcaaatagtttatttatcaattaacgcaaacttgattgatgaaattagaatcaccttgcatgacaaaaatagaattgagctttgacatttttgaaattaattggcaataagaatatgttaattaattagaaaattaactcataaaatttttgggaaaaggattatacaagtcgaatccctagtggactagtcatcacattgctttacacctgcattttaccaaaatttgcatattaggaagattgaagaattttagcttgtttcttcatagttttggttgccttcaaatcttccacaagaatagtgggcatctccactaatttgactaatttgccctcttcccacctctccctctctctcaaaatagaattgaattcattttggtttcaagtttcaacaaggcaagaataggcatatagagtatatagctaaggtgaaatccttatgaagatctcaaggaagaaacatgagttcccaactaaacaatatctcagttactcatgttagaaaagccaatgccattcaaaacattgttttcaaagagtatatgagattgctcaaagatgtacatataaaaaaggaaataactcagatcatataagcttagctaaataccagttcatctgccaaacaaggaaacacgatccttttgaactgcctgcgttagattcatatcgaaaagctcgcaccttataggcatctccatctcataaaagggattcttcaagacataatctgtgtatagctcatagatgcttttcaagagatcttccatgtgctgtgtcccaggctctgagaccacaaagaattttgtccctgcaaaaataaaacaatctaagaaattcctagaaaatggaagatgttcactactcaaatttacactacaaaaacagaactgttaattatggtctaacaaaagcttcaagcaacatttcacttccaaggagaactttacacccctatactt

SEQ ID NO: 222734 - DNA, 1555 bp, Cannabis indica
gattctatcgtgtttgacctgtttttatttcatgtgaagttgcatcaatctgttttcgacctgcgcttaatttttccaaccgtaacctttaaaactctgtggtacatctagggtttcaccccggtgcccaagttgacatcctcgactaggtttgtagtttttgggaccgtcttagtgcaaaatggtcaaaaattacatcgggacatcaactagatacaccacaaatatatttgaggtatcagaatcaaaatcagagcaagttgatttttgagcaccccgggccccgagcaaccagtgcccaagttgacaatatgtcaatctaggcgccttccaagtgtcaaatcgaaaatccaacttttgcatcttctttgtcttcatcaaaatttgggaaatagggcattccagaggaaaacaacaatttttgggtacatataacagggcccagcgacagccgacaaggttaacactaaggattggccttgtgcccaagttgacattttgtcaacctatgccaattaaaatggatttttttttttcaggaatttttttgagtaatcttctttgtattttagaaaatattgagattcaactatttccagggactaaactaaattttcgaagggcaaaaagagggacccagcgcctaggttggcacctggggctaccctacgcccaggttgacatattgtcaacctgagctgtttctgatcaagtttagcaaaaagtgtttccagaatttttctgtcattagaattaattaagactcaagcaaacttagggagaaaatcacaatcttgagtccctggaaacaaggcccagcacccaagttgacctacggttggccaaagcccaggttgataatcaacctgggacggtgccttcaattgctcaaatgtcaaatttgatgtgaccattgaattaaaaatggtaaaaaatggggtaggaaacctcgtcctcaagtttataagtcttagaagtatcaaaaacaaaatcctaggagttcgggagtaagtacccaacacttaggttgacaaatggcctagtgcactgggttctgcttatccaattctgaggtcgttttgattgtctgtctaatttttcactaagacaaagatccatgaagttagagaagccaaatttacaactttgcatttctcatttcaagctcacctgaaatgaagagtttcgagtctctcatttctccaaaacagcaacatctttgaggaccagtgaccagcttcgctagaacacataaatagactaagtgatgtcaaaatatcacttaggcatcttcaagtacattccatggacatttttacacttacccagcgtccaagttgacgtcatatgtcaacctgggcgctaggatgtcaacttgggcgctggatgtcaacctgggcgttggatcatgaattgcctttagtaaaacaaccgtaactcactcaattttgatctaattgatgcgattcaacttgagttttgaagctaattcaatgctctatcaagtcatatctcagactctagacataattctgaagctattgtcgtcaaaatt

SEQ ID NO: 222735 - DNA, 3199 bp, Cannabis indica
ccaatttcaagttctagtaagtggagaacttcctatagacaaaactaaggcacataaaatcttatactcaatacctcattatacgatggtcgaggggaaattgtacatgagaggttattccatgtctctctaacgatgagtgttaccatcagaagcaaataaaataattagagagatccatgaaggattttgtggagatcatgcaggtttgtagagcctatccaaaaagattatccgtcaagaatattattggccaacaattaataaagacacacatgaattcttcttctttgacttcatcctcagcatttcctgtttctttcttcttggtttgctcgtattatgctaacatctctccagccttgtctcccagaaagctcagatccatccctgagttggcaaaccaagctccataaatggatcgcctagcgattgtgttgaccctggttttggcatcgactttagcctcttcaagctttctatcagcatcgaccttggcttcctcgagatttctatcaacctcagcctgggtagtcttgtttgcctcttcaagctcctggatcctcttttgggcagtctcaaggttagtctggagagtcttttgttgctctttagcctctttcatgattccagagatctccgattgtgaatcagaccattgcttggcaaaaatctcacgatgttccctagacttgaaaagttcggtgtcaagcatctctacgctttgaagacctctctgttgagccgcaaaagataagagagatgcatgtgagaaataaaaccaaaagaggaaatgtaaaagggaaagtataaaaaaagggaaaagataagaagagaaataaaaactaactgacaacatgaggtcataactcctcttcacgagacttttgaagctacccttattaattaactcccagtcgcattgttcgaaagttttgtctcttcacgagacttttgaagctacccttattaattaactcccagtcacattgttcgaaagtcttgtagtgctgccagttgttggtagcatgcagcgaacagatctgcgagccttttatgccaacatagataggtagggggcaggaaggctctaaaaatgccatctcaggataagaaccagaaacttaacttggtgaatggatcctagggcctgttcaccaacgctcgcaacaactggagcagcatagttatctggagtaggggtgcacacgggtcgggtttttgggttttcgggtggttgggtttgggttttcaagcttcgggtattggaaatgcaaaccgaacctaatttttgggtgtccgggtgcgtcgagtatcgggtcgggctttttcgagttgggcgtagtcgggttcgggtcttgttgggctaagcccgaatatttaatttttaaaaatgccatttttttatttttataatataagcaactaatagtatataactatatataatatatacaatatataacataactcatacatacaatactatcctataaaaaaagcaacagcatatataatacataagtaattatttagtatatataataataataacatattataaataaaaatatatttgcattgattacacatatacatatgttgatcatcgtaataaatgaataacttaataaatatgaatgtatactgtctactgtctcgtgagtctctcacgaatatgaagagtccttttgtttgaatatgattaaaaaaatagaataatattaattaagtattgacaagtgttaagccgaccaatagtcttttttataaaatatgaatagtttttttttttcctgaatgtgattaataagtaattaagtattattaacttttttttaaaaaaaaaaaggttacgggttacgggttacaacccgacgaaaaaaactacttatccacactcgaacccaaaacccatttggaggttttttcgagttcaacccgacccgactacacaggtttttaggtgatcggttttttttggcagcgggtcgggcaggtggctgggttttttgggtttgcgggtctaaatgtgcaaccctaatctggagacttttctgcctcaatgctaagttgggtcgaggtttgtttcttattggcagtagttttggttctttttgtaagactctgtagtggatcctgaggcatctcttgttgaagttgctcgcttcttggattttttgacgaggggagtgggactacgcaacctgtcttcgagatccaaattcatatctgcgagacaaaatatatatatacatcaacacttgttcaaaataaacaaagaaaatagggagagatagcctcccactaagaaaaattaccataatcatcatctgatgatgaagaagaactataataacaactaaactccctagaactagtgatcatgaaaatattaaaggtgtttaggggagacaagtcccaatctggatggctcgccctatcaaagttagttctatattattcggtaatcccaaaattagaactattacagcttaattgtacgtgatgctcgagataccaactatcgaacctatggacaatacgatctacacaattccagatgtaaaagttgtactggctatccttaaagttaataaaggtagtgcgctcagccctaagtacgataggagaccatccacaaataccaaaattattacctagggaggcaacttttccggcttcccgaggggttacattcttcaagtagtgggagtgagcaacataatccttctcttcctcgtcagcaggaactggaacctactgccagtttgagtattttgagactttaaagttgtaggtagcctagtcgctgccgagaagattggaggtcttcaagttattctcgtgtaataagaaatcaacaactcgtagatcgaaaggaagaccaagaagaatcctatgtcttctttcaatttttggagtcacaatgggcctccttgtaatcgttgttaatacaacataaacaaaataagtaaatgcctacaattattaaattgaaaactcaaaaccaagcttttgagatgaggtaatacttacgtctaatgcgaaacatatttgtattgatagggatgaggccagacatctaaaagaagtcatccttgaattcggtcttattgggcagcctcagaatgatcctttgatcatttgtgtgggtctcgagaaagtagaaaccacctgctccttgcctcctcgcggg

SEQ ID NO: 222736 - DNA, 2204 bp, Cannabis indica
aatgacacgtggataatgacttaatacttaacgcttaggtacctacagagttaagtattattactgttaaaaattaaatttaagtatttatttgcaagtaaaagttaaacttaagtatttctgccgcaaatttctcgataactatattgttaaaaaatcaatattaacaaaaagaatcggtaaccatttatatgttttacaaaaagatcaagatccgattaatactttaatttgtacaatctcatatatatatatatatatatatataatttttagttaaatcgaagctataaaatttgatcgattagcctataatacataagagtggctaattaattaatactatacatataacatgggtttaaaaaattcatttgactttgatcacacctttttattattatttgcttcgaactaaaaattatagtacgtggacttcacgtacgtatataatgactgcgtcatgatgagttttataataattaaggatgtctttcttaattaattaatttcacttggctcttgatccaatacattcatgcatgtgcatggatactaatctagtttttaattttaaaaaagactttaatcccattgtgtaaatttctcttattatttgttttgtctaactaattattatttccctaattagtatcactcttaattagattaccctaaccggccttatgcctataaaaataatcttcatgtgatggaagaacatatagcacactaagttctattggtgcggattttgtctaaaagcttattttttcttactaccaaacacttagggaacaaagtgaaaatctttttaggaatagacaagtttagatatttttctagatagtgctcaacaaatagaaaacaagtgtatgtcaagagtgaaccaaaacctataaggataccgcactttgaaatacaagcactctatacctatgattgttaccatctcttaattaggtataaatagacttaattaggtgatttagaggttaatggggatatgttagaagcaatgccaacgttcaaaaatgcacacttataaagctgaaaaatatatagtagctagttactagttaccagtttcttcaacttttgtcaattgttctccaaaacattccaaatcactctcacttaattttatatcaattatacatgttataaatgagcattggaaaattttctaagaccatctccaatagattgtgtatattttggattaaatttagttcaaaatatactataaaactatatttggccaattttttgtatttgtgcttcaatgcacaaggtgcaaattgactataaaaatcaatattaccattgatgctcattataaaaatatatatacaaaataattaattttatttatattattttaatatcttataaatatatcttattcaaagtcaatgaatagtattaataagtgacaatgtaattaaaaaggtaatacttattgtcggcgttaaaatttggctaatactatcttttatgccaaatttggtacaaattttagcttgggctaaatttggcacacattttacatcattattggagttaaattttagcaaaatattctaaaaatagcaatacatcatatttataggtctccattaaaaatgctctaacagctagaaacatctccctttgatttcataacctctacatgtaattacgtacttaattacaaataataaaatgtagtttttaagttacaaaactatttttaaattttgtaattccacatatgtgttagaattttatgtgtattattaaactatatattatataatttaatttctaaatatataatatatattaattttatattattatataatatgtcacattttaattttattatatatattatttgttaaataacaaatagtttaacctaaactaattaaagattaaatgttttcaaaataataaatattttctaacgctttaaataaaatttcccaagatcccacaaaatttcaaacttttgcaagcatccttttgtctataattttttgtgacactagggtaaagggattttacggaagaagctagattaaatttttctaggttttggggtaccccaagccacttataattgactaaaaccctaaaaaaagggtgtgacagtcagtagtacccgtgaatccgtaaaggagaaatacagggtaagctgtgcaatcccacatcgcctg

SEQ ID NO: 222737 - DNA, 2877 bp, Cannabis indica
tttatttaattttatatgggttttccatatgcagtattattgaattgaattggagtgagctattattattagtttctttttatccatttaagatttgtatacaactctacattatttcaattgtatctgctccttaattattattttgttatgtgttacaacctcatcttagctttcttcgtttgtttgttgttaacttaatgattaatagtaagaaacaatgttgtttggacactgaaaagttctctttcaagaaaatgtgaatatgtgtagagtgatcagcagaaattggctatgggtatagatacccatattttttttcccatcattataatttatagcaaaaccagatattgtatcgaatattctttctatgatctttattccttttgctatttgttgtggacttactttataaccctctgcaactcattaacggacacattgattttattagctgacttttactgagaatattgttttcttatcttttacagggtttgacatggcttctccctgaaagattttctacttcagagataggaccggaagcaggttttgtgaaactttggtaacatttggctacttcttgtgcttagaaattaagattaactaggatttctaagcattgagaaatttcttcctaataaaagtaaaagatagttctttgtagaactggcttcttagtaaacaaactctcaatgcttttttaatttctaaacgaagaatagttttatgttcaattaaaggggaaaagaagtgttatttcgtttatgcttaatagataatttgagtagactttattttttctaactttgtttctctgactgaaaaacccactattaagtgttttcttaaataggcattttcaattcttttttgtggattctaaaataatttttagatatcattttgaacttcggtgatttactgcagtaactgctatatttggcataattacggcaatcaacgaacacataattgaaacagctcctcccccaaagcatgttggacctgcagagcctaattcgttcccatatccattgtgtatatctgctttgaaagaattggaaacattggttgaggttgcagctgaagattattttggtgagaagaagaaatggaattttattgctcttatggaggctaccaagtaagaagaatctattatttattgtacgcccaaaaattgatacgctttagctactttttttttttacggtttttaacgggttataatgctacacagggtgatagttaagttagctttgtttcggagtagtggatacaagatgcttatccttggaggagagacacctaatgacgataagcacttaaaaccttcacctcctcctcctcatgaaattgatggttttgcaaagccggtggggaaccagagacctggttacttgaggaataatcatggacaaaacccatggaatctagaaggaagagcactatctgcattgaatagatttggagaaaatgcgaggactgtctccaacccagcatggttacacagggtgcaacgtcaacatgcaataattgagcccccaagtaactactttaaatgaaactcagacaaatttctattgttgctgctgtaaagttatttgttgttataaagttcctctattttttttttcaccacaggtccagtggttgagaggccaaccctttccaccgtattagctgaaaagggtcttcccggggtgttgtttattgcaggggaagtgttatttatcacaagaccacttatctatgttttatttattcggaagtatggaattcgatcatggattccttggtttctttcattctctgttgacttaattggttcgggaattctttctcaagtcacgtctcaggtgggtggtaaaaaaatggaagattcatctttcagcaccagaacaacaagaggtaagggatcttaaatgctactctgtagacattgtaggcctgtttgattaaccatacatgatacatgagtcttaacttgcgattttaggaagtcactgtccattgttaattatttctttattgattgagtaaagctaaatttgtttcaatactatggtatgatgatacagcttaagagacgcaaggtgttgtgggcattttaccttgtgagagatccattttttaccaagtatatcaggtacaaatgagttccagacatcaattcttgtttaatgtaaagtcttgaaatcatatagttccctgacactaattgttcaatatattaggcaaagactggaaagaactgagaaggttttggaaccagtacctgctattgggtttcttacaggtacatgacctttatcttcttcttttcaatctccatttgtatatctcttatagtagcaccaattttgtttatatgttcaaaaattgatacttcttggtatgtgcagggaaaattgttgagcttcttataggagctcagactcggtatacatacacatcaggctcataagatgaaaacccgagtgagctaacaggttttggtggtagaagaaaggaaaaataggttcttatagttgcccctcaactttggggaatagtttgtgttctcgactctgatatgcttaattattttcatatggttaaagaaacaaaatgaagatttagatgccctagctgtatttgaataaacaaaaagtttaataaaatttttgaagctttgcttagtttttgttttgcactaccaggactcacttattggcacagcattctgttaggcaagtcattgaaattcttttgggagcagattgaaactcacctaaatgtatagtttagtttcagagtcccaaaaagattcccagtttggaaaactggtttaagcttttaactgactgtgggaaaagtctgatgtta

SEQ ID NO: 222738 - DNA, 1737 bp, Cannabis indica
aaataataatttataattagtaaatttttttgtagtgtaagaaattctaatatgtatatagagatatatattttcaataattaattacttgattttctaattctatttaattaaatatatataatttaatggcttaatttcaactagttcaacctcaagttgttataaatacaaaaataaatagaactatagattataagtaatagctaaaataagtaattataggtggatgagatgttccaccttgtctcatgggagaagctttattaataaagactttaaacaaaaataataataaataaataaaaagtaattttctggttaggtaattaggtttaattaggaagttttttcaaaaatattaaaatatttttttatattttatttataattgtatgatctaaagtttttatttacaaaaatataattttaaagtttcaaaattacaaaaatataatatttttagaaaaagtaagaaaataactaaaaaataataaaaaattaacttcacaataactataaattaattataaaacaacttcaaaaaataacgaaaaaattaatatcatgacaactataaatacactaataaacaataaaaaaataaaataatatcgaatagtttagtgatcaattagtctatatttttatgagtatcttcactcttccaaataaagtcatagctgccattgatagaagatgcagagaatttttatggggtaccactgggaaccgatcgaaactgcattttccttcgtgggagaaggagtgtctccttaaaaagtatggaggagttggctttcgcgagggtacgtaaaaagtgcaataaagctttgatggcgaagttcctttgggccattgctagaaaacaagatagtctttgggtgaaatgggtaaattctatatacttaaagggccaaaatgtttggagctattctatcaagcaagatgtgagctggtatttcaaaaagcttatgaagatacgatctagtactaatgagatttccattttgcatgccgaaaaaggaggtaagttccatgctaaacttatctataatttacaagtggaagctcaggaagtgaagtaaagtagagctatttggaacaagcttattattccaaaacatagattcatcttatggcaggcttgtaatgttcaactcctcacacgagatcacttgagcaaatttctaatcattccctctactctctgtccagtttgtgagaatgacatagaaacacacacacacctcttctttgattgtgtgtttgccaggaaaacgtttgttgagattggaagctggttgggagttgtggactggccaaaggatgttgagcacatctagcagtgttgtaccagggcagggggccccttgatttcaagaaccgagtgataaactcagtgcatgcagcttcgatctacatgctttggaaaaatagaaatagatgtatttttgatttagtttgtacttcccctcttaagttgagcatggagattaggaagatcactcattatagattcttgagtttgacttgtgatacctctaaaaagaaagataagtatatttttgatgaaattaggagctggtagtttcggtttggggctgttgctgtatttgcaggttctttttgtggctgttgagcctttaaattttgtattgttggtgctgctgcctgttttgaataaatccttttttaaatagaaatcaaatagtgaaaaataaaaataaaaatcta

SEQ ID NO: 222739 - DNA, 9644 bp, Cannabis indica
aggccctaggcgcgggcctagccgaccttagcctacagctgacctagagttaaagttaataatatagagagagagacacacacagaatttatagtagttcactccccatgatgtcgtgatagtaatgaagttacgtctacttcgaatttttatttctcatgaaaattacaaaagaattgactaaggagagagttcaaatttctagaaagagaaagtagaaagagatactctaaccttatagagacttaatagaatgtgaaaaataaactagaacaactctccttttatagtgaaggggtcctattaaaatattaataaaataatacaaaagagaaaaaactactttgggctgatcttggccattgatgattatctaacgttacaaaattgactcttaataaaaattgtcaatttttaaagtttgaatctcgttcgtcagatcattttcgagtaatgtgtggacaataattacaactatcttgggaatagattttggacttgaaatctttagaattgtgatatgaatatctcattcgtagtttttatgttctttttttattcaagtactccatatcatataaaaatgatataccttaaaaatgaatatatgaaaaaattaaactaatgcattttattttttttctttcctttcgttatataccgtatcacataaaatagatatactactcttttcttcgttatctctttcaccaaaaataaattgaagtttgtttcatccaccaatcattcagtcaccagcaaataagaaggcgagatggtctagaaacaagagaataagaagaaaatagaaagttaaggttaattatcaaaaatttatttaattgtaattttatcatccaaattttaagtgatatatcattttactaaatatttataaaaagagacatttactcacttagttttatatttaagtgggccaaaataatcctaataactatcatttattgacttaaatatgtacctaaattttgaatatgcttaattacaaaatcatcttcttaatatatgtaggctcaaacacctataattttgaggaaattacactctataccctttttatattgtcctctttcatttttaccctcttttttaaagtctatcatttttacctctttttttaaacattataccaattttacccctgtcacttcaagatactctctatgtgactctcttatgtcagggtattttgggtacaatacacataaaaagaagtatgtttcaaataaatataaaagtagaggtaaatttgattaattgaataataaaaatggtatttttcaacttacccctacaattgccatgttataaattgctccagaaattataatattaaaatttagaacatagattccattaaaaataataataataataataataagagcattactattaagcatcagtggtgtctagcactttctcgacatgtcgcgttgcgattggttagcgatactccctaaaagctattatataaaattatataggacccgatacttaattggaccaatagcgatattgacacataaaagggtgctaggccccactggtgccttttagtatttctctaataataataatcttattcccctttccttcttggtttttattttccctaaatgcgtaagataatcttttctttttcaaagaaaagtcactataagcttgttgtgataataaattaaagaaaagtaaattgcattattgtatgaatacattttacaatattgcattaaattttaatatcagcctcatatatgaattagccttaaatcacgaggacactttctttcaaaaggaaaaataaaaacaaaacaaaacatagttttgaaataaaatatgtagttgaaacttgaaggaaggaagatgcagacagcaccaactaaaaggccaaacaacttattattatttaagattgtgaacacacaggcacagtctcatacacccattcacatcattctccttagtccttcctattatcctacacacaccctccttaaatattacactatctaccaagtcaaccttcttcaattcccacccaaaaccatctttatttttatcatttcataagtaacaacttgataacatcatttcttataaaactaaaccaacattaacttattttaatccaccacatcaactcacccaacttcccaaatgctactctagtctttgtataacattactcattttataattaacatgcatctaaatgcataaaatttatgattggtatcaattacacgattaaaaataatatgttctctacctaattttttattatttcatattaaaaagataatcacattatgttgatccctgcacccctttttccatcttaaatgaacttaaggatgatgtgtcaactctaaaaaaaagtatttaggacattgttattggactacaccagtaatacttaatactttttataagtggctttttacgatgacttagtaatattacctaaaaattattttttttaacttatataagacccgatacttaattacaccaataacgatatgataccgaattttttttaacaattctaaaagtacttatacctcatttcttttgagaatctttcgtagctgctacaacatgctactacttaaaagatcaaacatgattcatcttcatagaagttatgatgagattccaactttttcaatcaaagatgttataatttatacctactactactacacacaaaaggtagtttatatgattttaaacgaagagaaatactaaacaattcttagtaatactatatcataattattattaatgcaattaaatattaatttttacacagagtcgattttgaggttattgagcttggcatgcgccttggacacccgaattctcaagatcttgaaattgtaagaaaaaaaatcatcagtttataaaaaaaatattaaataataacaaaaatataataaaatagtattattatagagaatgttatttttttttattgtagcgtaatagttatacttatttactagtaatttagagcatctccaaatatgttctctaaacacaatccttagttgaaatagggagtaaatatttttttttaaaaaagagctccaaccaaaaaaaaaaaaggctcactataatagagaatggatagagaacttcttctttttttgcaaattcttttttgtattattttaataaaaatattattacttttttaattatttaacaaattaatttatatttaataaattaaaagaataaaatattattaaaataattaaataccgactaaaataagatgcataattggggcaagaataataaaattaactctctattctaatttttttagctattttagctcaaatttggataaaaaaataaagaacaccttagagatactctttggggtattgagtttgagtggtagtaacatttctaatagtactctctattataggtaaataatgtgtttagagaacatgagaaatgagttcaattctaaatctcaaattttatatttttttagggtaaatatcattttgcaaaagttacaaattgaatcctctatatttttcagaatagtacaaataggactttgaattgattttttttgttaaaaatacttcgatttaaatgtattatgataaaactgtttacattttctatatctatttgtgttagaaattatcttcaagttggttatatatataaaaaaaataattgttaaaattaagttcagggttctatttttactattttaaaaaatacagtatctattttatcatttcacaagacagaaagttcaatcggtaacataaggtctaattaaaatatatttaccttctttcaaaaaaaaaaatgatatttaccttttttttaaaaaaaaaattaatatatagctaaaattattaaataattattataaataaaataaccactaattattagcatgtgagagactactagtattagtaatagtaatgtagcattttattaatgtcgtacgttacacgtagtgaaagcgcgtgggaggaatttgatggtatgtggcaaaagagtccaccaataccctcatttgagccagtccaacacgctaagccaacaaaaactcgtgacgagcccctccttagctctcggcctaaccaaccccccacctttcccaatttttgatggcttctcaccaagacgacgtcgttttgcccggagaagaagacctcgactcctcctcccaagacgaggaggaagacgacgtcgttgatgaagatgaagacgatgatgacgaggaaaacgacgacgttttacctcgaagcctcctctcctccttccacctctgaccgtttccatgtcgccgttgctgtgcctccttcctcttccaattccgttactgttgctcttccggctgttacaaccaacggcgagcctctccatcttcatcatcgccatcctcctcctcctccccctccttctagccttgttaccaccgtgatcgctggtgcttcagcttccgatccttctgctgtttctgatcggcatggaaacgacatcgtcttggctgtccaaccggaggagaaaaagcctgctgcttttgatgactcgaggaagctatttcagaggctgtggactgacgaggatgagatcggactgttacaagggtttcttgactataccacgcagcgtgggaagacgacgcatcatggtcaaaacgacactgctttgttctatgatcagatcaagtctaaattgcagttggatttcaacaagaaccagctcgttgagaagcttcgaaggttgaagaagaagtaccggaacgtgctcaacaaaatctcgtctggaaaggaattctcttttaaaagccctcatgatcaggccacttttgagatctctcgcaagatctggtgcgacttgggccgtattggtcccgaagataatgccctggaagacgaagatccaaaccctaacaatcccaattttcacatcgaggtcaaggccgaggatgccgggggtttcattctcgagaagaaaacaccaccgccgaggtctcgtaagcgatcacggccgaaacctgccgtggcagcagcggacgaccgacgctgtacgaatgatggttcgcctccgaaaaaggataacagttacaatcacggcagcggcggcggcggtactgctaacacccccattaaccttaacggaaatgtccaaggattgatagaagagaccgtgaagagttgcttatcgccattatttaaggaactattgggtagcgcaatggccggcagcggtccgggaccgtgtgcggcgccgagggtgtttggtgggcttgcattgaatccaataccgttgaactttggcgggtcgtcaatgaatttcgggtgtggggaagtggtggacgagaagtggaggaagcaacagattttggagttggaagtttactcgaagcgattggaattggttcaggatcagataaagactgctttggaggatttgaggtcgagaggagggccttaactcttcaaatggcgaggtttttggaatcaaagatgacaactttgttggtagagcctcagaggggtcttcgagtttttttcttcttctaatttagccttctggttcgtataaatttcctctgatcacttattaatggttgataatatagtgtagcttagtatttgaatttggaatatttgttatccttaaattaattgataaaaacccaaaaatccaagctggttgaataatgattctccttaatgactgtgtagtcatttgatagtttgtttataggttttcttctttttagattctcctcgtgactgaataatgattcttcttcttttagatttgtgtggataatagataattttattgaaaccttaattttttcgtttctgtcttgtggcgataaacccttattcttgtttgtgtttttaacatttgagtctgtgaataggtgatctattctagaacataccaaagaagaaaacaaatacatgctttagcattttcaattcaatgatatgccttgcaattcatgctgtagatgaattatgtgattatatataatgtaacttaaatggagtggatctgtcaagtcagaaactttagactcaagaatctgagttgcaccttcttttttatagtaatgactctatgaaattattattctttaaccccaacaacttttcaatttataaaaacagaaaaaatcttttgatatgaagttctgaaccagtgctgtgttcctcttactttgactagttgacaacatttgaactgcaatattaaattgagggaggtgatgtttaatgccaggacgatctttttcatgtctcattatgtttatgttacatctattcatctagttagtaaatttatggtgatgaaaacatgtcttctgggttttgcttttagcttttgtaatatggttaactagaacaaaaggatggtcattattgtaattggaaaaaaaaaaaagagatactttttgtgttgatatcatcagtcttataatcgaggtgagtgtcactacaaaaacggttcgtgaatcgtgacatgtcacattcattcatcttttctttgccctcctttctcacgggtcttgacaattattgtattttcagatacgattaattatcacagttatgatttcaacttggaggagaaaagaaaacaagccaagaataacatgttacatttttattcaacacttggccatggctttattaactatacatataagattgaacttctaatatactttttttatatgcaataaaaaatgtgtaattcctatcccaacatgtgactctagtctgaatgctgatttaacaagtacagttttgaaagcaaaattctattgtctaaacgattcaattcatttacaatataatgaatagggtttttttatatatagatttaagtttcatctagaactatggagtctataataaccataattatgcgactaaaagcatcagagtttctattagacaattttttttgccccttttgaaaagtcgagcactatcctcatctggttgttttgcttaattgattttgcgttctcaaacaattaaaacaactgtaagcttgctgacataagaggaggataagaaagaaaggagaaggcttttgaaatgatattagccaacccaaatatcctcaaaatcatctctttaatagtggccatatgttttttcttcacatttcaaggaatctaacctgttattttgtgagagcatgcatttctatcaattcaaacataaccaagaaaagaatgacaccgaagttaggtaaatacattgggatcatatctaagttagaagtatacacttttttgacagaaaagaaagaacttagaaatatacacttgatttcaaagaagtcggttgagctgtagaatgatagatgctgaaataacttttgacttttcattttccattaatagttcataaaaatgaaagtcttcaacgaagtacaaagatgaatttgattatttctgagagctccccataattaaaaaaagagaagaaacaatcagtacattgcgaactttgccttggtcttctcgaacacttgttcagcaataacagcaccagttccatcagctttcttgatttccaagtgagctttttgataaaatccagtgcctctcaatgcatctgcaataaaatcatcaaacccgattgcaatggcagcctcagctttcgctccataaaccaatctctgtttcaaatggagtagagaaaatgaacttgtcaggaaattttgtattgttcaacatggagcagttataatgacagaagataaaatgtgtaaaccttgattcttgagagatgaatagctccaaagcacatcggacatggctcgcaagatgcatagatttcgcagtccgagagctcaatttgattgagctttttgcaagcctgcaagaaagtccattccaagcatgagagtaacaacaacaatagaagaatcactaacaatgagctaaatccagggtagttcagttcaatcaaaattaaaaaatgcaaacttgaccattgaatttaattctcagaaccaagtaaaaaagaacacatctcttccagacacttgtctagtcattctcatcagttgtgtgctatattattatcccagtatgcccagcatgagcaagaccccaaaagagtagtgtttggaataatcaatagaatagacagagcagaacaataagttttgggaagcaattcaacaagaagtgtccaataaaatccaaacaattttctccccacagccacataaagagatatttggtcaataaaattcaggagtcaattctccacataaagaactgtcacatttgcacaactataaatcaaggaatcagtttacaatacagaaattcattggtttcatagtctaacctctcttattgcagtgacctcagcgtgagcagttggatcagtgttatgcaaaaccatattgtggcagctcactattacttcattgtttcgaacaacaacagcaccaaatgggcctccatgtccactgtcaactcctttgtatgcttcttccacagcttttgttaagaattcatggtctctatcctgtacaactagttacacaacatccaaaaataaatctgacacaaactataaaggttcgatctgtttgcaaactcatgcttcaatagaagaaactatagcaatactgactagtttatgcctttatggtaatggtcaatggattagtaaagcacaataccttcatggtgagcagcaaatgcagatgcgacagaaatggttccatcaactacaaaggaaaaaaatcaaatcaataaaaacgccaaactgacatcagatttttattttccaatcaaatgggagtttcaataaccacaacattatccaaaatttctagttgatccgttactaaaatggtgtagctaaagggcaattcgtatgaagcgaaagtaagcaacttttcataaaatctaaagggaacattaagctaacaaactaaagagtctatatctgatatattagcagaaaatccaaatcctaagagtttcagataggaaccttcctaaaaaaaaagtcttcaatttgatcatttcagttcccatcaaaaggcgatctctcatgaaaacataaatacatagtagaaaaatgataagttctataagaaaatggaggaaaacaaaaagacttatacaaatccaagacgtaaaaaacttgtaattcaatactataatcatattgtacaccaaatcgcgacaaaattatgttcacaaagtatggatcttgagaaacttcccccaaaggctaattcctaactataattagcacacaatcataagaaaaaaaaaacaaaacaaaaaagaaaatcgaaatggcatggcacaaaaatagatgcaaaagagaaatacccagatactaaaatgactacaaagtagagaaataatgacaaaaactaatacctttagcgtcctccatgatgggaaattgaaatgaaaatgaagaactcagaaatgggtggaagaaaagatggacaaaagagagaatagaaaggggaaacgtaaaacgtgaaaatggaatgggaagagagctggtccacgagtcttatatttatagtgttggcatttagtgaagagagct

SEQ ID NO: 222740 - DNA, 1274 bp, Cannabis indica
atttataaataagttattacattaattaattttttctaatatgtaattataaatttataaataagttattacattttatagaaattataaattatagttaataaataaaaaataaaagaaataattatttgaacaaaaaataatttttttaaaagagttgaccgagttgacctggtcaactcgccaactcggtcaacccagccaatcgaaattcgccgacccgctaacccgccaacccgttccctattcgggtccaagttcagtttcatttttttgaacccgaaacccgtgaacccgaaacccgcaaacctgaaacctgataaacccgcccgatgttcagcgctaactgtgtggccatatatatctcttctcttgaagccaaaagaatggagtaggtggtgaagcgaggctcataatctcttaagggcttgcccctagtttaaggcttctttcctccgggagagttcccttggttgccaccattgttggctcttttttctccattcgagcctccctttttcccattgccttgcaccttagtagttggggcttcaatgtgtggtgacttctacttgccaccctttgagccctttgctcgggtgacagcttcttcaagtttgataaacccatcttctctatctaataagtttttcacggtgtagactgccttgagacgaaggttagaccacaaaagactcatctccttaagcccggctacaagtgccataacccttgcatcctcgctaagacttttggtcttagaagctacctctaagaattattgtatgtagtccttgaggggcttgtcttcctgttgcttgacatccactaaatcattgggctcgatttagagttgttggaaaggagcgaactggttgccaaaagcatccactagatctttccatgagtcaattgatccaagggagagcttaatgtaccaccgttgtgctaggcctgttagtgtagcagggaagattctacacctgtcatcatctctcacaccttgcaaatcaatctgcatttcaaagtagttgtaacgccctaataattaggcacaccacgataactaattatgaaaccctaatcccctaaactgggattactagaaggatgagcgcgggaagtttaaactttgatttgaaacaaaatgaaaattaaacttgtaataactttaactttacaaataaccaaaagatacatgtctcgggatcccgtaaatattattacaaaatattacaagtctaattcacgagctgacctaagcggcaaaatca

SEQ ID NO: 222741 - DNA, 1626 bp, Cannabis indica
atgggttcgcaggctatgtcctactaatagacgcacagaaaaatacaaggattcaaagtaatagggtcgagactagaggctgttagggaaattaaattccccgaaatccccttgaacgtggcagaggttgtggaatgtttcagggtggtcaacatgaaaacccacctcaagctcctctaggttgggagcaaagatttgcaaaaatgcaagatcatattctccaacaagatgaagaaattccgagagtaaggcagtagggtccttttgcattgcctccaccacaagttcaggctgctttaattcttgcgatgccagcaaaacaacctgttgctggcaaccgtataaagccattgtatgagaagtttcacaagcgagcacctccagtttttctaggaggtccggatgtaatgatggctgagcatggctcacggtgacaaagataattatgaatttcatgggggttgttggaaatgaccgggtgacttgttccacctttcagttccaggaagacgcgcccgtgtggttggaattagtgttcctcacccaagaggtcactcttatgacttgggaagagttttgagattttttcaacaataagtattacaatgaggcagtccggaaagctaagtggaaagaatttatcaagttggtttctttaacctcaaaagttaaacagttataagcctaggggtaaaatggtcaaaaactataaccccgcacaacctttgtatttattttctccaaaatatatcccactaagaaataaggttctaaacttacccatgtgatcaaactagccagccatcgcgtttttcgttgtcgctgtgcaaaaattacaaaaataacatatttcacatataattcaaataatacacttagagtttatataaaatatccagggttgataaattataactctaatgccctttccaaaaatgggacccacaaataattaaattcataagtaatcataaaattaccaataattaattctaattgcctttactaattcaaattaaaaatgtggtcattacaattaaccccccgtaaaaaggattttgtcctcgaaatctaatctgaataactctgaatattgagtcctcatatgggactctaactcccaggcggcttcctccaccttgttgtttctccagagcactttgaccaaagaatatgggcttcttccaaagaactttctccttcctagcaaggataggaactgactgttcttcgtaagataagtttggttgtagttcaagggcttcgtaagtcaagacatgagtctggtctgaacatatttcctcaacattgaaatatgaaatacattatgaacaaccaatagcgctggtagtaagactagctgatacgctacctacccgaccttcttgagtatctgaaatggcccaaagaacctaagacttaacttacccctcttcccgaagcatctaatacctttcactggtgaaacccgcaggaaaacatgtttccctacctgaaatgtaacatctctgcgcttcggatcagcataacctttctgcttactctacgaatttaacttaccttacaacatctcatagggagccatccctattgtacacttgtagctattgttgtaggagaattcaa

SEQ ID NO: 222742 - DNA, 2307 bp, Cannabis indica
atacatattaatatatacaatgaaagataacatgtcatagtgtaaaatgatagtcatgtaataccaggttgtcatttaatacctcaaagtataaatatatgatatatactcaattgcaatttatattaaaaaaaaagaaaaataataataataataaatacctccgattataaattccaactaagctctttccattttataatttttgaggcataataactactaataatgatcatatatttaaatgtaacatttagtttgttattaagattctttagtttgtcagttacaaatctttttttgaataaatttgatgagaatgtcagttacaaatctgaaagattaggtatatacataataaagtttatcattatgttataatatttttcctaagatgtttttgtaattaagtagatattgttgtataattgtgttaaatccccatattttattatagttgctcattgaagctattgtccaattaaagttaatgtatccttgattggagagagagaaatgaatggataaataattggagttgggcctattttgttgggcttgccacaattttcatttacaccactttgttcaaaaataacataaaaattaaattaaattaaatatttccaactacaataattttaccattaaaattgtgaaaataattaattaaattaattttatgtacacaaattaaatacttaaaatatacaaatttgagctttaatcacccctcaaaataaaaatgataaagattcaatatttttgttagtaaatcttaaaaacttaatttagatcttaaaaaaaatattttgaataattaagaaacttaaaagagaaattaaaatttcaaaattaattaagcgatttaaaaattatttagatattaaaaattcaattttgtaaaaactaaatttcaagggaacaaacttgagtctattttgtttttctcaaaaaatgaagatttgtttaagtaaacataatatttttttagtttaatttctatttttttaaataatattatatttttattgaatttttaataaattttatttatttgttaagatatgagtttataaatataaataaatttgatttttctccaaaaaatcttagtttgtttaaattatttattggattctcattaattttaatttgattttttaaaatacgtgtttataaataaaataaagtttgaaaatatttttttaggaataatttaggtttttttacgtaaagttaatatttgtattatttttttttgaattaatagaatattataatttttaaaattatttatttttaaggggacaaaattttgtattggtgaaagtttacggggtaaaaatgttaatttttaacgttaaaagaaataaaatctaacagaatgcgcataattatgtaacttatattttaggaagaatttttaacaagccatatattttagtggtaaaattagataatgtcgaaagttcaaggagtataaatgctaattattcatacttttattattaaaatagaaaataacatacataattaattagtaatcgtaagtttggctcccttaatatctaatcctagtttcgcctcttttatttttgaaaaaagctaatcaaactttattaacccttcaaactctgctaccaaacaaggtagcaaatcagttaggacatctcctatactaaaattacaatcaggatataaactaatatctcttgcaaacgaatgagccactaaatttgctgaaacatactttaaatcaacaagtaaaattttacactctttaataacctgaccaaataaagagttcatcttaaaggagtttcatattgcttgtaccaccacaaggcagttgatttcgaggaccacagactgccaccagttttgctttatccaactaagggcctccctaacgccaatagcttccgctagctctggcttaacgactccatgatgtagcttaataacacctcccaacataaaaccatgctcatttcttgccaccaaaccaaaaccaaagccttggcttcctctaaaaatagatgcgtcaacattcaccttgagttcattcatcatgatttgaagattgagcacacaccaccgctcaacaccttctcctggtaataaaccagtctaaagttcatcatgatttgaagattgagtagccttccattgtgcaaggtaacttcccgccaatgcatataaaaacggagcatttgtggacttgttctgccatactttttcatttcttgcactctatattgcccaacacaaagttgctatgatgcatcatttctcatcgttaat

SEQ ID NO: 222743 - DNA, 2096 bp, Cannabis indica
aagcttagacattgcttgaaaagatcaaagagaaataattacaggaagtaggacagagttcaagtagcccttcaattccttgaagggggattgaagacgtattgtactcctagtgatctttcttgcacgaaaaacaacgtgcatgcgagagtcacgttgaatttttatgaaacaagctttggctttcttggatgaagactgaagttgcataaaaattctagcttaaactttgcttgaaaggatcaaagagaaagcatcacagggagaagaatagacttcaagaagtccttctattcagagaaagagggctgaagacgtatcattcccccaaggatctttcttccacgaagaacaacgtgcatggaagagtcacgttgagattttatgaagcaagcttcgacttttaggaaggaaggctgaagttgtataaaatttcaagcttagactttggttgaaaatatcaatgggtgaaagagttattgggagtaaagcagacttaatgtagttcttcccttctaggaaagaggattgaatacgtgcagcacaccaaatgatctttcacgccctgacatgcagtgcgcatgtgtctccggagtcatgggaatctctaggaggtgcatggttacacccaagatctcctgggcaatctatttcctccaatgaagtgcaaggcaatttatggtttctgaggcaaggactcagactccaagtaggttaagtagtggatcgtcaaggattctttactggcttataatgtcttgagttgcccttcctgatgcaacaccaagattacagccatataaggccataagaagggcattgagtgaactttgccaaaggtggtctgctctgtcaacagtaccataaccaggctcattggtgacccaccagacgctgacagtactgatggtctcctctcagccgatgccattatagatcgatttttgaactacttcaccacctagtgcaaaggtaggggaagtagttgttggaaaacagatcaggccctcacgccagcaccggcgtcagagtctctagctggatagagtcattacatcttatgacccctcctaaatttgtcatcgcaacaacatgggttgtagcttctttgtttagccccaccacctctatgctcgtgcatggtgatacagtgggggatcggaatctaaggatattgtcagtcaatcctaccccagagagttggctgggtagatctaagcttttgggacaaaaatcaatgtagtagttgcttaaggacgcgtgcatttgtttttgccacttttctcgtgcagacgagcgcatcaggtcttattttatgaaacaccttaaccggtacatttttagccattggttagacctcgacatgagatcatgaggtcttccttcttttcttgcgtgaacctattttcttataggctcacggaggtaacctccgtgcatacctctttcttcaactttcaatgaaagcaccaaaatgtttaccgagttttttagcaaccaaatatgtttagagcttaagaaagtaatgatggcgtaaataataaaataataaacaagatatttttgcgtggtttaggcgttaactatccttagaccacgagcccattttattaggctcatcggtcgatggctatttataaaaatacaaatacaatggagttttccaccgtgttcctcttgaataagaggaagcttagtaggaatattcaagagttaatagtggggttacagtaatgtgttttcttgatgaagaataagtattcaatcagaaggtaaaggtccaaaaaaaggaatccctctcattgtgctatctgtgagatatttataggccaattctcttacatgggtcgttgttggataggtcaccgcgaggatgaattacaaccgttggatttgtaggtggcatatttcccatgtggcttttaagggtgtaatatcgtactggctgtactggccaggcctcaaatgcgtgtcaccctaaagtcattcatgtttgaatttcattttctccaagtcggattatttagctcagtacacacacacacacacaaatttgataagaaatttgtgctgcaaatcttttactgaaactgaga

SEQ ID NO: 222744 - DNA, 2405 bp, Cannabis indica
attaaattattattttttaaataaaaatttaatgacttggaccaattaggaattgccacgtgaccatttacttaatacttaacagccaggtaccaacaaaagttttaaaattataacttaggtattattactgccaaaaattaaacttaggtatttatttgtaattgggagttaaacttaagtatttatgccgcaaattactctattttatgtccggtaacagtgaaacgcgacgtttggccgatagagtcacattttttatggtttggtatttgagtaatagcgggataatttagatagatattgagaatgccgagaatattcaaagtattaaaaatgacaaaaatacccttagatgacaaggttactttttgatttaagcaaggacaaaatagtcttttgctatatactttcctttgtcctctagtgggttaataataggctagtctaatctgatttgtttgtatatgatattagataataccatagataaagattaattttattaaattagaaattataagataaatcaaactctctttctcttcaactctttttctctcgacatctttggtttcatctttggaaaaccagctgaaaaatagggtttttcaactctatttttggtgttctagcaggatcatagtgaatccaatccaaagtaaaactctcaagctcatttttctttggtttcttaggttgtaagttaggtttctatgcatgattcttagagttagggttctgtagttgtaaatgatgttcgattttatatttaaatgatgctttgatgttatttgagctgttttaggtctgaattgagggttgtttttgtgtttgagcaaagtttgaactttagagctcacactttgctctttcatggtgatttttatttatggggttttattcagttcttttgcatggtttgtgtgcattgtagccttattaggtggtctggaggttttggtacaatttgggatcgatttgtggtgtttgtgttatttttggggattcctgtacagaaccggttgaccagttcagtatgacctgtaggaaccataattccagttcatccccaggcagaccccacagaaccggtttttcggttgggaaccggtctactagttggggcattttagggcaccctaaattttccaatttttatgatatttagggtaattccatgttatccgtcgatagagaaacttttagttttgattttaggtccccaaaaaattaagtgatttagcgagtcactcacctgttttacgaatattgtaacttgggggcatataaatcgtcgagcagtagttccactcaggttgatcgacacacttgaattcggaaacgaggtaagattagtataatgatatgcatatgtgattacatgtttagcgtgcatgtttagttttgattttaagttcctgaaaagtgatttagagagtcactcacctgttttacgaatattgtgacttaggggcctataaatcgtcgagcagtagttccactcaggttgaccgacacacctgaattcgaaaatgaggtaagattagtataatgatatgcatatgtgattacatgtttagcgtgcatgtttataaagcctgttagattacatcgatagcaatataaatatacgtagagttgtattagataccgataaatgtatgtttggctcaagtactgattgacgctatcacatcagtacgactagagtatgaatagagtactgagtataggttaatattatggtcgatagtactgttgtatgtacgttcttcactcagtatcgtgtgggacgcggggatagggatatggttaggtgtatgggtgcctaatcgtaatccagtttatatctatgttatgattatgcttttcttactgagtccgttggctcacagatattgtttgtatgtgtaggtaagggcaaagctaacgctgagcagtagtgagctcgagcgaatggagattgtacatgtcgggacagttagacttggagcgtacgatctttagggcaacaggctgtattttgtatagtcactaggcgataacttttgtatcaagtattttgaatcagttactaatattttaaagtcggtattccaattatataaaggttatttatttttagattaatattaattaagtaaactcatgtcagatttaaaatacatattaattattctaagaatcaatagaatataagacatatctaattccattggatatgaacgagataatgggtatacggtctttcacaaattagtattgattattacacattataaagtccataacaaacaagatatttattaaacttattcaattagattacttatttagcctaatttaaaatattagctcaaataaattagtggcttttatactacatactaaaatttttaatt

SEQ ID NO: 222745 - DNA, 3055 bp, Cannabis indica
acacatactcctgcaacaagtcgaattagatagtttgatgtaggatttatttaattttaaattaattaattattttgttagacgatcagttaatataatggctcgtaactttgctagagcctctatattatttcttgattgtagcttcagtttggagtctgttacaattgacttattagcttgctcagtaactgagacttttagctagtaaatttacgattttctataaaaaaaaatcagagaaatactaaaagcactcatggtacagtataatatcaatggcatgttagaggtgttagagcatctccaatagtaaaaaattaaaggatgcttgctgaggtggatatatgaagtggcaaaatattgagatgttataccattggaggaaaaagaatgtcattctaagaatatgtgtgaatgttatacagtagcattgatgctatcattattttttttaataaaaaattaaagctaaaaatttaacattgctaaatattaagaaatatatacaattttaataataataataataaaaaattatatatagaataacaatggttacattttcagacaaaaatatatataatagtaaagtaattataaatggatatataatactttaattaaaattaaatatatatatataatattaaagtattacaaaaatatttgaattgaataatgttgattttaaaaaaaaaagattttttttttagaataagttctgttattataaatttaaagagtcatttacaacaacagaaaatatagcaggaggaatctcccctaaccaaatacaatcagtatccatcactaaagcttgtttagccaaaccatgagcgggttggtttgcatcttgatgaacgtgagatacacaaacattaagaaaattagatcatcaagaattaagtccttaaatgataaaaagcttgatgataaaacatgtatggaattaacaagcaccaaggaatctgtttcaactaattccacttgaaaatgcaattgtcctgccgattgtagtgcatgaaacatagccttagcctccatttcttgtggcttaaaattgcatgttgctggttttgatagtgcagccaaaacctctcctcttgaatctcgtatcaaagcaccatagcccatcttgttgtgtgaggaaagtacagtagcatccacattgagttttaatttaccagcaagtggtggtttccaaggcaaatgatctgctacagtttgatcaacatttacaattgatgttcaactagaagcatgctgaaagttgcagatgtaggccatggaatttgcataaacatcagccggtttcttgtgtgatttttgatgttcgatattgtttctgtcggaccaaatagaccacattgtgcatataatcttttcaagatcagatttggtatgtaatgtcgaaagatggatgaggaaatcaccttcaaacatttggttggctgctacaaaatcaaatttaaaatttgagaaacgccaaacagttttggcatgcttaaaactgaacaaagcatgtcccacctattctcaggcatttgtgcataagctgcaagtattagaatttatgatctttctctaaaataaatttgctgcaactggtattgagttgtggataactcgccaagcaaaaattttcactttagaaggtaattttaagttccaaaatgatttccaccaagttgctaaagattgagagcttgagaagttatcttgtgaggccaatgtataagccaatgattgaacagtatacactcctgagccattgtaatgccaaacccaataatcactcttagcactatgagaaagtagtagtttgagtatattttctacatcaatagctgagaaatcaatttataatttccccacattccacacataattctcagtaatgtaaactgcaacccaattactgtctaaacttgaaaaagcaactggtgtaaaggtgttatgggcaggtatccaagggtctaaaccactcctaatttgaagaccattaccaacttgtattctcaaacctttaaagagtaaatctcggccccaacacataccttgccaagtcaaagaagttacactagcagaggaagctatcaaaaaatcatcattttgaaagtatcttgctttcaatattctggccaaaagtgtattagggttttgcgaaattcgccaagcttgtttagcaagcaaagcttggttaaattgaacatatgatcgaaaccccatgccccttccatttttgatgtacaaagaaacttccatttcttccaatgagttcttttcttatcatgtgttgtaccccaccaaaactgagccatcattgtgtctatctctttacaaaacttggctgatagtttgaagcaactcatagcatacgttgggatggattgaaccatcgctttaagcaaaacttcctttccaccaatagagaaaagtttatcattccaagcatgtaacattttccaaatatgatctttgatatcagcgaacaactgagttttattctgctcagaataagcaggtaggcctaagtatttttcatgacactcactaataggcatacctaaaatttgagagaaagaatgctttgtatggttagatgtatttggagagaaagacataactgatttatcctcattaaggagctgtctagaagcgtgatgatagatatccaaagtcctcttgatagcaccacaagatctatcatttgcttgacagaaagtctatcatcagcaaaaagaaggtgtgaaattgttggacttgttctggagatagccaaaccctttagtcatccaacagattcctcatattgtagaagacgagacagacactcagagcaaattaaaaacaaatacggtgagagtgggtccccctgacgaagaccacgttgagggatgactaagcctgtgacagtaccattgatgaggaatgagaatgtgtttgagtgcaagcaagtcataatgagagtaatccaacgaatattgaaacccattttccccataacagctgctaaataggaccactcaacacgatcaaatgccttgctcat

SEQ ID NO: 222746 - DNA, 2573 bp, Cannabis indica
aaattataagaaagaaattaaagtataattaatatattagttaaccagatatttttacatgattttccagttaaatttgcatactccacgagtctatcttattgaagatattttctgaatattcaatacaatatataattaatcgtattggcagttatttacatttaaattcaaaaaataaccgtttaatgaaacgttgttaattcccacatttcattagatcacgtattggatagcaattaataattgcataactgcttgttattcttatcctttcaatggttaatgccaatttggacaatagcatctcagttggcttgtcgatggtcaatgttgattaggacaacagcatatttgtatatctccaagttgttgtccttgtcctttaaatgtagaaaaaatgctaagtgttagcggatgatttgtcaatttcctttttaatagcaaagtgaatgtcacacttatttatgattcgaggtttcattgcattactacatttattcttgagaataaatgagatcttcttgggcctgtgtatttcgaggcaggtatgtatctcgtcgatgtaagttttaatagttttctatccttgtctcgcttatgactacatagtcagcgagttatgaatattctttattaatcttttatttaacgagtaatactttaccttcgcattaaattatataaattcattataccgagtggttcatatttcactacttgacacgtgtcatcttctgaagtgtagccgaatttcgggtataacaattgccccttaaaaagttcttttttaataaaaatagttttttaaatgattacaaggatattttgtcttgatctcgatttgaaaaattgcatgttttgaatttcggcggttcatgatttcgaggcacatcattagcataaattgcccatcttttccaattcttacatgttcccatccgttagatcttttcatctttaaagtattcaacttaagaaaaaaaaacactattttgccattcctgcctttcgaaactttgaagcttttctgcaaaaattcatccccgatttctcaaaaccttgcatgccctctttatcgttaacctattttttgcgagtatcttcggatttaatcttcaatctcaggaattctcagggtacattttgtcattcatcttaactctagttatacagttcttccttctgcaaaaatctatttctgaccagtaagtgattcattcatttctttctgggtatttctttttcctcagttgatattcttatttttataactaattgcatcattcttcattttgtttggttcaaataatttcaatctagtttttgggtaatttctagggtttgacatagagaaaaatttagctttatcgtattcataggtttttagtttaaacaaatttcttccaaaaattgggattattcttttgtaaaaatgtcataatctggttttgaaatttcaacgttagatttcctagaattagaatgtcctaaggaattagcccttccatttaaatcgaaaatccaaaaattctaatccaaacttgagagaatataacagcttttcaccagaaagggtaattcgcgaggagtgtgatggcactagtactagtggctcattagggataagcgcttggagccttgagcacattagggctggagcaattattcctttgaaagagtattataaggaatccagtaatcatcttggaattgccccttttcaattgattgcaagctcttacagaattctggctagcctaaaagtcttatagcaaattatgggatgggagtgtcctactccctttgaaatcgtctatttttattctgtaaaagttgttcctgcaaggaagtgaggctcgggagatttttactacctcgatacccatacaaatgatcacaggattatcgtgaggctgcccaacaaaatagaatttaaggatgaattcttttggacgactagtctctcccccgtcaacacaacaaccttttgtataatacgtaagtttaacctttttcttaaaaacttggttttgagtttttagttaatcgatgatgtttacttatttttgtctattgtgttgacatcggttacaaagaggccaatccccacccctgagatggccaagcggcataaaaccctactgggtcttccactcggattgcaatctacaaacttccttttgaacaaagtcaatttgaaggatgccaatcttcttagcaaagatcaaacgacctgtgactttaaaaatccaaaatactcaaaatggcaacaagtcccaatccctgtctgatgaggaagataaggactatgtagctcgtatccatttgtgaacaaagtaacccctcgagaagctgaagatgatgcatcccgaggtaataactgtggatggtctcctactgtacttaggacagaatgtacatcactagtaactttccaggataaccaatataagttttacacttgaaataatttccttatagaccgtataactcataggtttgatagttggtgttatacccaaaattcggcgaacacatcaaaagaatacacgtgtctagctgggaagaat

SEQ ID NO: 222747 - DNA, 1629 bp, Cannabis indica
tagaacttgaatattgtcacctgctttatatatctaattatatggctagattaattgcactcatagtgttttagacagttaacttagtactaagagatgatatgctcacaacaactgtgcataacttttttcttttcgaacaatgaacatttcaatgaaaatagccaaagttcaatacatccaataaaaggatggaaaattttccatccatacaaattcaccatccaccctgatagcatgaatagcgaatccattagcgaccttattggccgaacatcaaacatgaattagagatattttaggaaaattaaataataaacttgcaatatcttctaaagaatatcctaaggcatcaatacaatacaagaatctcttaaagaaagcacaaaatcaaaaccaaaatcttataatatgtagaggctgctcaagcaaaacagaccagtccaaagccgccaccatcaaagctatagcttctggtttaatgaccatgaaaccccttacaaaaacattataggacatgatgagaataggcatagacctaacaactgtaataaaaattgaggtattaaatggacaaaatttagggtcctaaatggaagggataaacatcccttcagttgactaagaacatctgaaaggtataaacaaataatagtcattaggaagcaaattggagatataccaacaataaatactttaatatattcattaaagcaattaaagttgactttatatataaaatttaagattaaagagattatcaaagaaacacaacataaaagtatatcttcaatatgtagtaatatattcaaataaagactaggtctaagcgatccacctacaccactcttgtgaagactttacttgatttataatcatattattaggacactttcaaggataaatggctagaaaacaatgaaaacccccttagattaactaggaacttttataaggtaaaaacggagagcagaaatcagaaaaaaacatatgaaaagtaaataggagtaataccaacaaaaaaaacactggtatataatcattgcagcaaataaagtagatattatatataaaactctagcttaagagatgtcatagaacaacctaaaagtatatagtatgaagtaatatattcaaataaagcctggtgtatgtgctccacctacaccactctctgttaaagactttatattatcatactaataattaagtgtcaaggttaaacgactaacaaacaatgaaaactctcatctaatctgtccaaatttttaaacacactgacataacaggatttttcattcaatcactttgttaaagatcttgtgaagtcactgtatagaaatttggtgcatactttgtggatacactacattaaaatgttatattatggttttcattatcaggatgtatggcacgtcggtgactctgtgatggaacaaagagtcgttccagttgtaatacgcagttttcttaattacttttatgatataccattagacttttaagaagccagttttaataatagctctcttgatatattgcttttggttttcacaattcaaggggctagacaacttatttcaaagtgtaaatatttttaatttttgtcagtgagactggcaaaactgg

SEQ ID NO: 222748 - DNA, 2056 bp, Cannabis indica
gggcacaaaacccaacagcatccacactgctgcaggatgcccaagtctccatgggcagttttgaggcgctccaagccacctggtccaagagctcctcggtgaaaggagcggcctctcgccccaaactatagcccagtccgttctctaaggtcttaacctctacaacctgcctcgctagaggcgctgcgtgcatgtcatctgcaagcttcgccttgtagactaccgacatcacggttgctcaccggcagacttgtagcctctccgattccagacgcccttttagggccttgttcgcctccttctctctctgcatttcaagatgatcgaagggaatcgccctccaagggatggtaaatcccacagtaggcatccaagacgaagtcggggaagagccctaggctggcccagccttagtgagcataaggaggacagggcgatcccctgatcctcccatgttgaggtctgataccacaagtttttacgtcttcctggtagaggagctactccctgccgtctcggaagggccagctttattcggagtagagatggtgtacctatccacaaattggctcaacaaaaaaagggtcatggcttaaccccaaaatttctggaagccaaattttgtagcaagtgcaccacccaaggcaccttccaaagctcttaaacatataaacggaagaacttactgattgagggaagggtgataggataaaaggctctggtgcagcgttatcggtggaaacacgcaacaaagagaaagggaactttaaaagcaatggtgtgacgagaaagaagagtgataaatgaattggctgttgtaagtatttatgggacgactggaaggggcacatttcacacgaagtagacgcttcaattcatcccaagagataccatttgattggatgtgagaagctgaaagagtacctcgcttcccaacagatggctcccatcattacatgcattgtgaagaacactcagaaaatgaaaagactgcctaagtcgaatcgccgccatttcaagcttcccaggaacacccgcccagcacgtgcgcaaaaatccaaaaatcagcatttaacactctgataaaaaaatgggagaaatcatatacgtgcgcaaaaaaattctcagaagaagatattacaagctcccgaaccatggcatgtcccgaaagcttggggtaaatgttatctgcatttttgcctacacaacacgtggaccttaattaaggagagacgagaaatcattaagccatccaagggcctcattctgtgctcccggaggataaaggccctaaccttgcggaatagacctccgcgaaagaagtcctcccgaatgtaggccacaagggagatatccgcgagttagcaactctctcccctctacaaggcgggaccttttgctcccgcaaagatcatggaccttccatcaagatgtattggtctggggtactcttttgacccgtggaggctcggtccgcacgtgccaggctgagggcccaccgcttgctcctttcctatgtacgatagaggttgtctctcacaccacatagagcgtgcatgtcctcgtgtattgtgcaaaatgatccaacgactaggagcacgagtaagtcaaacaagaaaggccttagagtgacacgcatccaaagcaccaccagtacatccagtaccatctgacaacggtatagaccacatggaaaatataccacctaccaatttgatggtggggatttattcttatgaggatacatcaacggtggtccttacgaagggattggcctataaataccccccaaagacacaaggcaagggatcggaacctgaacttcttctcctttgatcccttcaactcttcaccttgagactgaacacgaattctctgtaaacacattattgtagctccattatgaattcttgaatattcttactaagcttcctcttcttcaagaggagcacggtggatcggagtaaaagtccatcatttttgtatgtgtataaccagtcaccggccaaagagcctaatataattgactcgcagactaaggataattaacgcctga

SEQ ID NO: 222749 - DNA, 1152 bp, Cannabis indica
gtgttatttttgttttttgttttttttacattgttagtgtaattaatattttgataggacttggggttcaaaacccactacaacttatattatgttctttttttttttattataactgatttttaaattattgtgtattgtatgtttttactcactttgttgtagaacatgttctatgtaatttacgactcaatgttgttgggatggattttcttcgtttttttttttttttttaattagaatcaatttttgagttatattttgtgtcttttatttttaattatattgttctggaaccagttctattttaatttatttctcaagtggttttttatttagtcatttcagaaaatgattattgaattatttatttcagaaatcggttttttatttaattaatttaaggaatgatttttaatttagttattttgagaatagaatttttatttagttaattcaagggatccgtttttaatttatttattttatttaactggtttttgtgtgtaagtttttatcttggttgttttataaaattaatttttttgtctcaaatttttaactatttgataaatataactggcttcttcatattatatttgggttattatttatttttttatggaactgattttgttcatatttataatgtctcagtattttttgaaattaattcctacattttttttaaaaaaattataaccggttgtatgaggtattatatgttattgaggtattttattatgaaattagttttttttttaattatgttctagtattccagtgttttataattgttattgtaattataaccggcttaagttattatgtgttatttttttatttattatgctatagaactgattttattttaattattggttttgagttatttcgtgttatatatttttattcattataacactattatagaacccacactattttaattataactaatttgagttattttgtgttatttattataaccggttctattttaattataatcagtttgagttattctgtgttatttatttttatttattaactttttcagtaacttttctcttacaaatttttcggcacaagtgtttactctagcgatttttctagtattataaattttaccaacttttttattaatttttg

SEQ ID NO: 222750 - DNA, 1283 bp, Cannabis indica
tacaaagggttgcgacaaatcactagagggagtctaaatttgtttaagtcaattgcttttgtaaactttgacactttactaattgatttcattctttgggcgtggccccgtggactagtagtctttgaaagaataccacgtacaaatctcttgtgtcaagtgatttaattttctgtaattatttttatattctgcttattctcgtttgtttctgcaaaactaatttctgcaataacagaattacattctgctgttgcagacgcatatagttttatatatattatatttgtgtaatatttattgatatttgcaaaaactcaattttttcagttatggtgttgagattgttctcacatcttatacacatttgtgctatttactatcttatggcttacatgttgtttatagcattgtgttgtaatcttattttcatttccctattctctattttatgtgtatttttgcaataaagttgtaacaatatttaatctattattttgtccttgtattattcttatgatatagttgtattttttattttggttttctattgaagcactaatatttctaacaatcaaaaatttatcatttcctacattccttcaatggaagaaggtaagttaacatgtgacaatacaagagtaaaaaatgtgatttattatgatttactattttatataatagtaatatatattcctatgtagggatataaactttaatatattagtatatgttatattaacatagtgatatataatattgttatttttttttgtcaaattagttgtcaaaatattttttaattttttgtgaatatttaaagtgaattaaatattattttcttgtgagtaatttcatttttatggctatcattttcatttaggaaagttttcataaaagagaaggaattctctttgcgaaaagtttgattaaacgagttatttttagaaaaattgacttttccttttgctagttgctcttttgagttttgatatgaatgtagtagattgtataatctttatatggcaagtattaaattccaaattgtaatcttggacttatttagaaagtttcctaatttgtcactgagtgcaattatgtcgctgtaaatcaagacttattttaagaaaattttgtacaactataaaaacgtgttatggttatctctagggtttctatatgctataaataggacctagagagcagccaagcttgctcatctcttctagtctcatattttcatatattagttttatgagaagagtgtttttttttttttttgt

SEQ ID NO: 222751 - DNA, 1983 bp, Cannabis indica
tttgttctatccctagccgaacctcccccctctctctctttctctcaaaattgctttgctttgaatgttccttgtaattgaattggtggtattgaggcttgggatttagagcttggttttgtgaaggtttgaggtaattttcatctttgattctgaacttaattgctggagtttaaagttgtttaaatatgcttaattattgttttgctcttgaatgcatagtttaaaaaaatagatgaaattatgatgcttatgccattccttgtagttagatgggattcaaattaatgttgtgattattggggaacttagactgacttttaatgagtgaatttaagttttgaatcttatttttataattaagctgaaagtatggcttgatgttcaagtttaaaggtatgtatttgagatgaatttttctcatgtggtgagcttgttattatagtgattaaacatgtgatatgaagcttgtatactatgattttgagctttatgtatgtgtttcaactctccgtatgtatattgatgattttaatttatggtttgagggtttgattaagttttgagcatgaattggtgtgtttgagcatgaattttcgaagctgaaatgggaatttttcgggtttggaactcaggggccgcggcccgcccctgttttgtggcctgggattcgaactcaggtgtcgcggccccatgtgggagtgccgcggcctgccctcatgttggatagcatgcatatttgttagggcgttacagtctcagatgttcagattttgaaatcttgccttgtaccatacggataagtcaaaattattaatcattaagtagtatgtgagtgaggccaaagacctacaatatggtctcctcaggagaaaacactgtgcatataaacacatggcttctacagacttgtatcagtaaagaagaggaaaactaagttggttgtaagatcgaatgttgtgatcacaagaagcacaagagatacaacttgaaaaagtttgcctataagtattatacaaaaattctccaaaacctcatttgggataattccttacgagaagaatgtttgacgagccactctaattgcaagaagcatcccaatggtatataccaattcatctacgttatttgcgaggagaaaaagtattgaacagaatgacatttcgataaatgaccactcaatgataagattgaaagtggcagttatttggcattattcaaatttagatagttattaatattattcctacatgttaaaataacatgaaacgtggtgaatgttcatgtctcatgaaccatcatttagataagaacagaaagaataactgccatagtaaattcctataaatagtgacaaaaatcattgtaatgactacagcgcattcttctctgatagagagaaattttgctaagttttatcttgcaattagaaaattcgtaaataagagttacttgtggagtatgtaaattttgttagaaattaattttactaggatttggatttactaacatgtatgttgattataattatataatttaacatcctaaatatgaaattcttaaaaacgataaataaacacattagggattaagaaatccttaccgtgataacagcagaataatatgattcattccgtttagatctctaaccatcgatcctttttgttaccaagtatgatcaagatctgaacttggattctccttctgcgatgattgaactacatagtcttcctcactatgctgagtattactttgatatttgtgggtaatctctcaacaccaaggaacacaaaattttgagtaagaaaccaagagaatttcaaaaataatgaatagaataataatagctttcttttttattcagattttgttagacaaagagagagttaatagtctttgcatcaaaggcgagtatgttctatttataggaagatactaaggttaggctttagtttcaattggctgaataaaataataaattgc

SEQ ID NO: 222752 - DNA, 1278 bp, Cannabis indica
cagcatcaccgacacattgatctatcgtgatcatgatacatatcgagagtagtgttacaagtcagtgccaaaatttcaaaaaaaaaactcttaatttttattaataatccttttgtgaaaataaccttacatataatttttaagcaatttgtacaattaataaattgataataagctcctatattatttcaaagtgtaatagtagaacaagtggtataaaattatctaatttccactaatccatcttatttgatagataagacctcattgtttgttttattcgcaaagtgaactgatttttcattcttccttttcaagggtattattaataataacatacattaaatatagcactacaactaatatgtaagaaaattcttaagcagggtcatcattttagcttaccaaagacgcatttcttattttcggtatatagaaaaattataatctataatttttatatgtagtaggcattatgcccgctttcaataattcaaaataatttaagatgtcgaaatataactcaaatagtcagttgtatgcatgtttgttttattttatacgcgtacaactaactattttgagatttcgatcaatactgtaaattattcagaattttttaaaaacgcacaaaatatctactataactaatatataatttttctaggtatcgaaaacaaacaacgaccctccggtaaggaaaaaagtgatgtgaccacacttaagatgctccctagctatgttaaaaatcaattggtcttgagaaactccatgatataggtattgaaagcattgcaaacgactttgaagcccttaaagccagctgctttggccaattcctcaaactctttctgtgttctctctttgccaccatgaccaaccaacatgatcatatcactatgggctgtacacttagaggccaagctcgagtctggtgcaaccgaaagaatgaactcggctacgatcacttttccatgacgaggcactgcgtcgtagcagttctttaataattttaagcagtcttcgtcgctccaatcatggcaaatccactgtaattaatttcaatatattcattaatacagataataattttctacaatgtgacaccctttgtgtaggttataaaaattaataatttgatatatatttttgaaaaataaatcataatttttgaaagagagaaattgtatctttttttaaaagacgcaccttgatgaaaattgcatcaccttttggcacacttacaaacatgtctcctccaacatgggctacacctat

SEQ ID NO: 222753 - DNA, 3660 bp, Cannabis indica
aaataatacaataaataattgaagaaagaaaaaaatattattaattattatttgaaattattattatgtatattctattaatgtaataaatagtgttgataattaaaaataattattgaatgcaatatattatattagtgtttaagaaatcttaataatctaactgcaatttgttcttaagttaattcaaaaataaatcaaaaattaatgttcaaataataaaacaaacacaacttaaatttgtataaaatagaatacatattattagtcattgttatctgtctaggtgaatgttacgtgccgagccacgtattgttaattttatttaaggttttgttttttttaagattttggtaattaaagtagtataattatttgaacaatttcttttataaaaataaactatatgtcaatatatttagtaagtaaaacatagttcgttttgaacaagtttataccttgattcttactaactaatgaagattacttatcaaaaaaagaaaaaaaaaactaatgaagatttaaaaaaaatggaataagaaaggctaaaataaataaatcaatgaaatcatttttctgcatttttctacatagttagtttggaaaattttgtgtcatagattcaaaatttatggttatctcacaaaatagccaaaaaaaactcaatatttggaggcttaaattaaggccactatgtatatcattcaaaactccaaaccacttctcacatgaccaaatccggttggttgccagcagttgtcatggatgtgacatggaaaccttctttcaacttctcatttatccaattgtattgaaaaaattcacttactttgtaggattgttgggtgtaagcattgattttgtttagtaacaaaacacatcatacagaaacagataaacaatatccggtctcgattcaaatttatacaatattaactcattccctttctcaagcaaaaagtaataatccactctgagtttgattctttgatatgtttaaataaattacattatttttcataatatcactattataagtatgttgacaggtattgtttctataccaggatggccatagaaataaaataaataatctagcctgattcgaacattcaagaccaggcaatgaaacaaaaagctcacattcatgcttctataggttatagctaataatcataggtgcaagcacactattcaaacagtaatagtatttttgatattgatttatatgcagctaaaaaaattaatgttacctttggacataaggacacactattctaccaatattaatggcactttcaattcatatgcatccaaaataattgatgttacctttggacataatgactaaagaactaccgttagttgcaccagctattgaactgatgtagtaattcttttcccattcttctattatccaatcctgagaaataaaatgagcaacactcactatgaaaagcccagcaacatgatttaattatgccagaatatcactataattaataatctacaatagatcatagtaggtcctttatacaataccttatgcaagaaaaatattgacagctcatagccctgcaaagaaaaagcagttctagcatagtgattaaagtgatacaccttcattggagagtatcttaagaaaagagcatgaccatgagcaagctctatgtttttctacacaacgtcacttggaaaatcacaaaatctcactaatgaattatcaaagtaaacttttaatcagtttataatcaaaactaaagtactaaacttgtttcttcatacaacaaaatatatagaagtggagtcagtagctgacttgaatttttgtataatgaagctcttcctcttcttccttttcaacctggttttttacacttacaaattgaaataatgcataaaataaacaaaaagtatgaaattaagttagattttgaaagcagaaaataaaagattggtttgaaaaaagagtaatataaataaaatttacaattagcccaaaaaaagaagaaaacaacacaaataaataaaaagggattttccctcagatgagaaaaaaaatcttcaaccattttatatagtaaatgttcataacttctttcatccgcaactaaaaattcacgttctccaaaatctacataagtagatatggatttgacttttgcattcaaaaacacttaacccaacatgaattttctcattttctcttaattcattattgacatcattaaaattaaaataaaaacactgacttgctatctcaaagtcgtgtaagataaaatcaatagcattgagacacatacgaaggccgctcagttgcattggaaaggtcgctaccacaaaattctgtctcatgtattctaagttggtgaatagctgagttgagtcgaccgctttttttgtacgagttgacaacgagtccactcgaaaaaatcttgccgctgtaacaataaataataaattatatatttaaatcgattaattatctaatagaataaattaccagagattcagaagaaccattaatatgaaaaattccaaaaatcattaaaacctacatttaattcatgcctcatcacatgagcaatttgctcagatggaaccagattagttaatgaaataagagggaaaaaaggaaaaacaaactgagaaaaactcaccattggttgaaagaaatactcaccattgagaaatactataaaagagagatagcgagaaggaagccaaaaattcgacagtcgctgaacaaaattatgcagattttgttcaacgaaacgactaattaagcttattcaaaattgttttgtcatttacgtagttcacggctgaagagaagtttaaattgttggagttaagttaagattttaaaggtttaatttatatttaggttttatttagattttttaagagttaacgatagagttaacaatagacttaaatttaactaaaatttaaaaacgaaaagttactcaataatttctcataaataatttaacaatagatatataaatattaatttttttcctagatatattaatattagcttgatatattatttttaatataataaaaatataacatgttcatatttttattaaaatattaaacaatatacaaagataataaataatataattattgttttggagaaatataattatttattactaaaaataaacttggtacacaatatttatttctttttattttaggcggtaaatttcgaaatttttcctctatattttcaattccctaccttaattagcacttattcagttgagccttcattcgcatattagtagtctctatcatcttcttctccaaatgaaattctctatcagctttttctcacaaccttagctcactgactctccttatcctcaccccaacagactaaacccaaccctaacctctacttcacacccaacgacgacagtggcaaaaccccaactcctatctctatcggcgactccaaccccattcgaaccctaaacgaaccaaagaggttcattttctcacaaccatttcgcaccatctctagccctctaagatcgattttgcaccccacctgtgtgcgccatctcttagccctcttagattttgcaccccaaccccctctcttggttaccgcagaggctgtttctgttggaaattatttta

SEQ ID NO: 222754 - DNA, 1874 bp, Cannabis indica
agaaaagatggtagaaagaatatcttctaactaaatacaacttatccaacactaaagcttatttagctaatccatgagcctcttgattcgaagcacgacgcacatgagaaacacaaactgtagcgagataggataattgatgttgaatgtccctgatcaaacctttgaaagaggaccgattaggtgtggaaccattgatggagttagaaaggattagagagtcaatctctacataattccaaattcaagttaaacttttagcccactgcaatccatgaaacattgctttagcttcaatttcttgagaccaaaaacaaccaaccattggtcttgacaaagtagcccgaccaaccccattttaatattgtataatgactcctaaaccgatctctttgtttgatgaatcattggtcgcatctatattcattttgaggcagttttgttgaggaggttgccatggaatgtggtctgcatcactagaaatcagcatagttatagcaggagaaagttgatgttggagttggtgataattcttcaaatacataatagctttcatatagatttttggtgccttgtgggtgtttttttccatgattgaaattgttcctgtccgaccaaatataccacatagtgcaaaagatcatttccatctcaaattcggtgtaaattttggatagattatacaaaaaatcagccagttcaacactgtagcagcttgaaaatcaaatgcaaaataagtgtgcctccaaactgctttagcatgcttatactaaacatggcatgtccaactgattctcaagaattggagcacaagctacaagcagccgcagtgagagttttattctgaaaaagcaaagatgctactggtagaccattctctatttctctccaagcaaaattttttacgttacccaaaaaattttccactaggtttccattgagctagagcagtgagactcttcttttttagctaagaacaagccaacctataacccgattgtacagaatattctccttcattgtggtgccaaatccattcatccttagcattatgaaatgggatagaaatggaaaggatataatcaatatcaataggtgaaaaatatgcttgcaatttatccaaattcaaaactttatccactctgatataatcagagactttgctagtatcacaaccagtgtatcgaagtgggagaaattcagtattttaaggaatctaagaatctgaaccacatacaatgttattattgtcgccaactttcatatgaagacctttcactaaaagctcccgaccccaacatattcctttccaagttatggatgatataccatgacaatcagcccccataaagttattattgttagaatacctgcccttgagaaactagcttagaaatgaatttaggttttgaaaggtgtgccaagattgttaagcaagcatcgcttggttaaaataaataaaatcacggaaacccgttccaccttcaactttagacttgcaaagaaacttccactttttctaatgaatttttttcttatcagttgatgtaccccaccagaatctagccatcatggtctaaatttgcttacgaaagtttactggaagcttgaagcatctcatagcatatgttggaattaattgaacaactacttttaaaagaacctccttgccaccaattgaaaaaagcttatcagaccaatcatgcattaacttctagatacgttcctttgtattgttaaacaactatttcttatcacgtttagaataaggaggaaggcctagatatttttcatggcactcatagattggcatccccaaaatttgatggaaagaaagcttagctgccttataggtgtttggagagaaagacatg

SEQ ID NO: 222755 - DNA, 1437 bp, Cannabis indica
aaaaaaaatataaggtacttaggttttgtaaagtacaaaccaagtccacaccacacacatattagataaatatagcctctcataactctatttgtactagtaataactcaaccacatattacatatcttttattttttatgtacctagtctagttttgtatttatatatacaatagtctatagtataggacatatggtgttatattttcacagtgagtgctaattttaattttttattataaatttttaaaaataaaaaaaaaagaaaacaaaaaattcatagcagttatccttatagttacaatattattcctgtaaatttttaaaaaatttttgaatattatagagtgccaaaaataagtttgaaattttttaaacaatatactacattgaaatatgaagaagttaattatcgatacggtaaactaatcataattttttaaaaatttagatacttaattttgtaattataacaaatatagtcataaaaaagaatattatcacatgtatttttaaatataaaaattgactgaataattaaataagaagttgaggacagtacactctttttacaatattaatgaatgagtacaaaatgattatcatgatgcggtacatttcataaaattcaaatatttcataaactcttacatgcatgtttcacacattttatttaagacgctatattattattattattattactccaaaatccctatatacgtttaaaaatatatgtggtttaatttattcaaaaaaataaaacattttaagtttttagataatttaaaaatcaactattcatgtatctttaagaatatttttattgaaaaaaaaaactataataacttgtttaattattgataaatttaggagaattattttatatattattttattttaacttttttttaaatttatagtttggattgctccattaattttatgtaaattttgattgcgatttaagttactctattaattattataaaagtttttatgtgaatttttgtaagaatatatatataaaaaatatatatatatatatatattttaaagtacaaaaataaaaaaactctaataattaataattttataaatttgtaagaaaaaaataattataaatcgtcattggtcaggcatgtcaaatatacactagtaacacattcttttttttctttttttttttttttttttttttttaattttctagttaaaaaatatattacgctctgaacatgactattacaaatgataaaaagattatttgtaatattattatttttcttttgtacagtttttgtcatgagtttgtttttcgtagccacatataaaacaggaaagtttacaataatataaatttttgcgtttaatttataataataatgtgtcacgttatgtgacgttttttgacgttttttgattttttttttaaaa

SEQ ID NO: 222756 - DNA, 1775 bp, Cannabis indica
ataatgtctttacataaattctatcaacaccatatatgtatgcaatatgtatatgaattctatcaattctatcccagtttatccattccctatcaacgtcccttatcttccccatactaagacaatgtatcctagacttaatgacatattttacctgtgtaacaaaattatttacaatgtatcctagacttaatgacatatttcacctgtgtaacaaaattatttaccgtttgaacctcttgattccacacagctttgtttcgtacgtgctttccatatcatgtatacacatgaattaaattgaataccatgatataaatatcccttctcagttcactcatcatgcttcatctaatctagttcaatatccctttaaatctatataggttactgccaaaaatcagcctatgttaatactctcttgagacaatattgattaaacgcacatttgaaaaaccgatgttcgtgtgtctcaaggtaagttccttacatagatcgcagttcgacataataagattttactattaattagtgggttttattcattacaccaatttaaaaataccagttcagatcatcaaatttaaattaaacaaattatatcaaaacagagacaccgagtgaaaattaccatgaaaaaatgaagaagcggcccaagtagtggttctgccaataactaagcctattccaaactagagacatcgagtaacaccgttaagtaccttttttccgacggctaacagggtggttttgagagcgaaggtaactgattatgggactgacggttatggttgtaagatccatgtgaaaaatgcaaaagattgtgggaaaggtgtaacaactgaagttgatgtgcggaaaattatatcaaagcttatgtggttgaaagaattaggtgccttcgggtctattgcggttaagtatttttaactacctattttttctttttaactaacttctctattcaaactcatcttttccctcaccttttcggttttttctggtttgcctttcgccttcttcatctacttttggccatcttttgtggatctctgctctgttttgatgctcctttacctctctgcactgctggttgtcgatcatggatcccattacgaatactctcaacaatactttatcccttacggaggaagagggttctgtttttgccttactagaggaggctgcaacttcgtctgtctcgacttctgctcatttgatttttgcccgtgtactcactgataactatgtccataagccaaattttattgaacaaatgtctggtcactggaagggtcgttatcctgctgttgtttctgcttatggggaggagttatttaaagtttcttttggttgtgctggggacaagtttagagtgatgaacaaagagccatggcatttccaaaatcaccttatcgtgatgcactcaccaactgctctgcaaaatgtctcaaccaatgatttgctattcacccccttttgggtgcaaatatacagattgcctttcttaagcaagtccaagacccttgcaagagctttaggaaatctcattggtgagtttttgaatgtttattaggattcacttgatgaggggtggggtcctttccttcggattcgtattaaactgccagttaataagcctctccctcgtggagaaatgatcagcctccctaaagttcgtgatgagttttggattgattttcggtatgagcatcttccggaattttgttttgagtgtggattcctcggacatccttttgaaaaatgcatcaagt

SEQ ID NO: 222757 - DNA, 1272 bp, Cannabis indica
ttcgtaatcttcagtctttgtttctcgcatttcgttttgcaggttcatacgtgacccacgagacaaaccactttgtttatttctacttggatcagaaagcagttttgctgttcaaatctggctaaggattgttgactaagaagagaaggtgatgagagctgtgattattaatgatcatatgattaaatagcacttgtatgtattatttgaaatactctaccacctaaaaccagtttctgaacattcttgtgcttaacttgtatattttaatatccacttcctttggctttggactttagattatatgactttccatctttctattcaattatttttacttgtctatattgcaaaatcaaaaatcacaataaacaattaaacaaactattaggagcattcgaataagacattggtgtctagtacctcctagacgtgttgtcttaaaattggctagcgatactccttaaaagttattatattaaactatatcggaccataaaaaaaaaaaaaaaattatatgagatctgatatttaattggataaatagcgatattgatacatatgagagtgttaggcactattggtatcttttaacatttctcaattattagatacttatttcttagtgttaatgggctgtcccaaaccacgtgactcgtggtcactttcaaaataatgagtggggagtaataatgtatattagagatatttgtagcgaaattctcttaacatttataattgttatatatgatcctaattaaaaaaattggcagcaaaagtatcttattttacgattttgttataatcgtattattttttaattattaagtgtcaattaagtttattaagtgcaagttcagaaatacgtgacgatatatttctttaatttatttaatacgtagtctaataatacgtcgccatgtgtttctgagttgacacttaatagccaaaaagtagtaagaccgcaacaaaatcgtaagataaggtatttttgctgtcacttttttttttaattagagtcatatatataggcagctgattttgtaccctgaaatgcaaaacacggaatacattccgttgtacggcaggtgggtcccaggatatgtaataatgtgtgtgaatttatttatgggtcccagggtatgtaataataggtctcagggtacgtttccattttttaaccctaattatccctagatcaactccagcccttagatcaaataactaccccatctaacggctgccgtacatcacagaatacattccgtgaaa

SEQ ID NO: 222758 - DNA, 2633 bp, Cannabis indica
gatttaatacatcttgacatatgaggacctcttcatattactagcatagaaggttataaatatttcctcactattgtggatgaccacaccagacatacttggatttacatgctaaaatccaaatatgatgtgcaatacttaatcccacaattctataaccttgttcttactcaattttccaaacctatcaaagctataaggtgtgataatgcaaaagaacttaacattaagtccttttatgttcaaaacggtattcaagtatacaattcttgtgttgaaagacctcaacaaaactcggttgttgaacgaaaacatcaacacatattaaatgtggctcgtgctttggcttttcaatcctccatagccttgacatattggccatatcttgtccaaactgctgtacacttaatcaatagaacacccaccaccttattacaaaatttaacaccttttgaattattacataataaaccccctgcctatgaacacttaagaaattttggttgtctagcctatgcctcatctttgccaagtactagacacaaattttcaccaagggctcatgcatgcattttcataggctaccctaatggaatgaaagcctatactcttctagacttagcaactaacaaaatttttcaatcccgagatgttgttttttatgaacaaatttttccactcaaagggtctctaaatacccaacaattggaaactcttttttccacagctcctgtcactccttctctatatactgctgaacctcctattattggacacaattcaccagcacctatcacttcttcttctaaaccagcagccacaccagctgctgataccataccagcagctcaatcggctacacctgatacaccagcagaaaaaccagctgaaaaaccagctgaatattcacaaactgatgcacagtctccagcagcacctgctgttataccaacagttgttccctctaaaatttcatcaacacaggatctgcaacaatctccaattaaacaacatccacaaatcaccaaagcaggaagaaaatcccttccccctgctcattttaaagactatatctgtcagtcttctactcatcaccctttaataaaatacctcaattatgacaagctaagtattccttttcgaaatgctatttttcatgcatatactgaaatcgagcctactagtttcaaacaggcctccaaattctcccaatggttaaaagctatggacaatgaattttttgcacttaagaaaaacaacacttggtcggttttatccttaccaccaggttgtcaaccaataggcaataaatgggtttataagatcaaatataatgaccaaggtgaaattgatagatacaaagcacggcttgtcgccaaagggtattctcaactacatggcattgattatagtgatacctttgccccagttgcaaaatttaacaccctcaagcttttcttagccttggctgccattaacaactggaccctccaccaaatggacattgataatgcctttcttcatggggaacttaatgaaaaagtttacatgactctccctaaaggttatgtccatgagggggagttacctcccaatcctgtttgtcttctacataaaagtctttatggtctcaaacaggcttctcggcagtggtttgcaaaattaagcaccaccttgcttgaacatggatttcaccaattggcctatgatcattctctcttcatcaaaaaatcttccacaagtttccttgcacttttagtctatgtcgatgacatagtaattgcaagtaccaatgattctgaagtcacttcctttaaggctttcttaaactcaaaatttaaactcaaagacctcggccacttaagattcttccttggccttgaaattggaagatccaaaagaggcatttcggtttctcaaagaaatttcactctgcaacttttaaatgaaactggtctcctcgactgtaaggctgtttctactcccatggatgccaacctttccttaagcaaagatattcgacttcaggtcaatgatcctacctcttatcgaagtctaattggtaaactcttattcctcactatcacacggccagacattgcttatgccgtgaatagacttagccaatataatagtgatccacgacagccacatcttaaagcttcctatcgaattgtacaatatctaaaaggcactccaggccaaggcctcatgtttcactccacctatgcctcacagcttcctgcagaacgtcttctccaaattcaagccttttctgatgcagattggggcacctgccccgatacacgacgttccataactggtttttgcatattcatcggcccatctctcatctcttggaagtccaagaagcaatctacaatgtccaaatcgtctgccgaagctgagtacaggtcccttgccaatacaacttgtgagatcatgtggcttcacaacattcttactgatttcagcatctctacatctcaaccgacaaccattcattgtgacaatcaagcagcaattcatatttctgtgaatgcagtcttccacgagcgcaccaagcatgttgacatagactgccatatagttcgagaacaagtcaacaaaaatcgcatcaagctctcctatgt

SEQ ID NO: 222759 - DNA, 2443 bp, Cannabis indica
ggaaaccatcgcgcaaccacgcaactacctaatacaaccgaaataaaaattcaacgagaaagagatccaccattaatttcggcaacttcaactgagaagacaaccagaatcaatcaaaacaggagttgtttcaaattcatagaaaaaaaaagtgtaaaaactactacgaaactaaaattcaactggaatccaatttaatttgcataaaaatgtactgacttcaattttcaaatccatgaaagacagctctaaaaaagttgaattggagttcccaaactatctagctcaagtatataatccaaaaaaattacatcaatactatagtaaatgtttatcctggtgtatttcgttgttttccaaatttctaatggtgaatttgttcatattaaatcatgaagagacatgtagtagagttacgtacgtggaaacaatgttatgatttttaatgtttcatgacagttgcattacagttgcataaacattttgataacagttatttcttctgatgcaaccttcggccaaccacccagcaacattcgtctgattgaaaccttcgtctgatgcaaccatcgcgcaaccatctagctattgtctgattgtgtaagtgatagtgtcagaggtattttgggaggtattttggtaattaaaatcacataataaaaagtataaatgttgtccatactttatgaatgtatttttgtaaataaagtatcaatttgtatttttcatgtaataattcttttagcaaaattctcatgtgtaatattttttttttgaaaaaggaaaaagtcaagtaaaaggaatagtttaggtcggactaatttagtaagtagtttgaattgttcaaatttacaggaagaagacagcgtgttttacaaggtgcagtttaattgtagctaggaaaattcttgtaacttgtaagtcaaatagtgtttcttttttaattaatcatgaatatatttgttcgtagttcgaaattatgtgcgtataattaattatttttttagttttcttaataatgtgttatactatacaatattattgatcatttagttaaataaataatcttattttgaaaaaaataatatttaaacgtaaagttaaaaaaagtatgaaaatatattaaagaaggaaaaaataacaaatgtgtaattttcagaattaatgctcactactataaaaacaaacttttagaagtgtttttttttacttcagcaaattaatattttaataaaaacacttacgagtcagttattttagaataagcgactctataggtaataattttttcaattttaataaaaaaattctacaatgtcggttattttgtaataagtgactccgatgataaaaaacatatggcgccaatttattttataataattgacgccatatgtcttcatataactcttttcaactatcgtcaaacctcaaaataaccagcagcctttctcctttcaaacccacaaaaccctcgcccaaccatccctttcttcctcatattttttcatttttcatctgtttctaattaattttttttaaaatcttgcatttttcatacctaaaaacatattcttagaatttgatcgtcttttgtttgattttttagggtaaactgagcttagaggtggtggacgtggttttagttctgactgtcgcttttggtagagaaatcgttgaatctcaactccattgttaaggtataaatctattctttaataattttattaatgtaaattgttttattttttattttgtaattttttttaggattttcctatattgttaagattgtgttcttatggttgtgcaaccgaattaatttggttggtgttggtagccgaattttggtaataagataaaaatctacactttaagagtatataagtatgtattctgtgtgttttattgaatgtgtattgtatgtatatatattttgttattgtatatatgtattgtgtcgtatatgtatgtatacaaatattgtaattatatatattgtatattttttatgtattgtatatgtatatattgaatattttaaacaaatagttttgttaaatgttgtcaataagaatgagatatgagagtattaaaataaaagttttgaaattaatttctaaaaattactttagaaattaattctattttttatcattttttattattttcaattttattcatgtatttttattttttttttagttgcgagtaaatagttagttacaactacttaataagttactaatttatattcccattgatgtatatttttattacaactagttactcattagtaactagttagtaataaattaactcgttagtaactagttactcataaattatataattaataagtagttaaataaagattttttttaattttgtagtatttttttatattgtagattgtaagttcaatttgtaaggatctgactta

SEQ ID NO: 222760 - DNA, 2422 bp, Cannabis indica
ttttttagtttataaatgaattgctttattttgtttagtgtttctagaaaaaaattgtggtgtagtttgttttattttgtggtttacacctttgggtgtttttcatttgtacgaccagtatggtttgcaatttttatgtaagccaatatggttttgttgtttttgggtaaaccagtatggttgtgaaatggttagtaagaccagtgaggtcattttttgttggtatgataaattaagtttgtgaaataaagttttatttgaatacaaaattaattttcttgaatagcaagattggaaggtttaatgataacttggagccttttgtcttgatcgacatagtatggtagtctgacaaacatggcgatttagcatatggtactctcatcaatgttttgaaaagatacacacagatgcgagtggacttttcaactttggaacctgctttgatcttagttttaatttttttttatttctgttttaatttcttctgctagtaaaaaaaactaaaatttggtaatctcttttaaataccaattatgttagcaataatagttttttattaggagaagaaaactgttatagtgagattttctcacctagaaactcgagacgggactcctatgaaaatgacacgtgtactcactctcctcgtcgaaagcagagatgtcagtgagagaccccttgagtacaaaccttgcctgaactagactcagcaagatgatgtgaccatgacagagtctagtcgcaattgtatggctctcatagagtaggaccaaggaacagtttaagactcgcatataccgagatatatgcgagttcttttgagatcctcctgcgaattgtaaagatcaattctttactctgagagctggttcaaatgacccaacaacctcgataaaccgataaaggactgcatgccttaggttgccgacttattacagggtgtctgtataagcgacttaaataggacgtagacatcctagactcgattaagtcttgtatgaatcttaagcctgcgagcttatgcaagaatatgaacgggcaactcgcatagaagtcgcatacgttgtcgtatttagtgaattaagctaaaactgtccttcatttattgtacttacgtttttattaattttattgttgtaattcaatgtacaaacggattgataatgaattcaatctctgtgtaatcaaaagacacttgctgtgtatataaaggagtgatccaacatgaaatggacaagacagagaaatccttgcaatagtggactaagcagaccgtgatctgactgaaccactatattcgtttgtgttcttaatatttccagtttatttctagcatttttgttcttagttctaatactcaccactctagactgagtactcgcatactatttgctcatcttattattgtatcatttattctggtgttgtctaaattccttcaacaacatttggaaacgtctatgggaaagaaatactttgttgattttgaaggaaaatcactatggctggaaatcagacgacaggagataacaaaaatggatcaattaatatcgaaacaatgaatgttccactcccaggtaatggaacggctcccgccgataccatcaacaaaggagtagggtgaactaccattactccttttaatctactccctgaaactgccgctcacactggagaaacgtctacactggcggccacagtggggcgattcccacctatcacacctgtcgtggtatctgaacgtattatctagttgaccacagcccaatataacacattacatgatcaaatgcgaactttggaggctgaggtcgatggaaggaccaggactcgacgtcctcctcaagtacaaacaacgtgctcacacaaccctcaggtaactattactagacgaggaactaaccgcactcgtatggaacgcaggaccgagtaggaaggactcgacttgaatcatcaaccgccaagagattaagtcgcacaaaatttaaatcgcgaggtacagcaggaagaggacccagagcgacgcaacccgcgtagtagggctcagccaagaaatgaagtaaatgtgctgaatctggttcttcgtcctcataaagttgcactcctagtgtttataccaggtcaggttctgtggagacaccgcgaggagggaggtaccaagttcacaggggtgatcttcgtgatcaccttaacgcaatttttagggcgcggtcccaaacgccgcggaattgcgaagagcctcatgatccccaattgggcgataaaggcataagtaatgataagaacctgacatatgttgtaacaccctaactagcataggcgtgttgacgtgattattaacatactatgcagctcgttgataatcaacgaggttaataaaaaaaacatgattaattaaaattttgcttaattaattaaa

SEQ ID NO: 222761 - DNA, 2897 bp, Cannabis indica
agagagagagagagcaccttcaaagatatcctcgtaagagggatcacaaactacaacaagtttcagtcacttcaatcagttttagaaaaagtgtagaagctgcagggaaacaactcagaattatcctcaagaacacaataacaaatgaataaaataaaaggagaaagaatgcgcgaacaactcaacaattgtctaaatggtataaacactataaaggtctcaactaagccactaggtttggtcttctggtgagggggagttgggtattaagcacaattgagatgagaccaaggtttgaaccttggatctcgtagtgttgagagattcctagtattaattaagcaccatgtgtgccaatgatctaaacacgtatctaggaccatggaatctagataaataccacaaagaattaagaaagttacttttacttccaacaagtcataaaaactcattacgttcacaacattagtgtgctggaccaaactcaaagctcaaatgatacattttgattcattattttaatgataaatatcaatgtgaaatcattacacaacaaaattgttgcatgttttatggtttggctgattttttttctcttgactatttcaaatccgaagttttaacttttaaaagttaaactaaagccaggattaccatacgaacacgacttcatttcgaaattcgtaaaaagaaagctgaagtatcatctactagtgcaaattgaaagtaaaattgagtttcagtgaatttacctatacagtgcaattggttgccctaaaagtggaagatactgctttggcatgttggcctattgtacaagataacaaaaccatacgatggtaggtgagaaatcaacagcctgcatgcaatagggacttacgagacatatgggaaataaccagaaaaatataacaactatattacaagacatccttgctcaaaggaaactgcttttctacaatagcagtggagagttaagacaaatgtatgacccttctaattttgtgataaaatgtttcttaatctctcctgatacaataacaattttcaggaaatggaatataatagtaaattgaattgaattgagttaatacaataacacaggtctcaagggaaatgggtcatagaggaaaacgagcaggacttacccccatccgtttacccttcccacctgccagaagaaccaccgaaacgcttttcttttccacaacaccaggcttctacattgttatatgtataatataatataaataatagaacctattacgacaaagagaatacatttttatatctgatgaaacataaatcattgtttcgaaaagaataaattttgataagtcatagaattcgtatgtctgaatcttacttggccaacatttgcagagcagcgagcgaaccttatcttggaaattctgcatttccccctgaatcccacctcatggactaaacacccaagaagataaaaaggaaaaaagagaagaaaaagtgatcgtaaatacacttccagacaaaaatgagagtgcaaaataagcgaagtttggtggcataataaaaacaacccaattcccaattcgtgttatgatgaaaacagtgatcatgtgaactgattttgcggggttggagaagaagcttgaaatacttgcctgggcatcgaacaatggattgagaggatgggcgaatagaaggaaatagtagaggagcagcattgtaggaagaagaagaaagagaagcagaagagaaagtaaggtccattgcaagtaacgccatgttgcgtttttctctactgactttttttcttttcggaaatggagaaaagtgttataataaattaaggtatggaagttgggcagccacacacacacacaagcatttaagggcctattgtctaccctattattgctgctctaagttttgcccccgcaaaggtttggtttcgattaggcattccattcaatttaatttttgaataattagtaattttgccttttaaatttgggtcttttttatttttacacatcaaaacaattttttttttttgtatttttacgaaattttacatagaagcctaattgcaactaacactgcaacttaaattgcaacaaaaaatcgtatagaaacccctattgcaactagcgttacaaccactttagaaactcaaactgtaaatttgaaaaaaaaaaattataaaaatagtataaggggtaattcccctttaaattttgaacaatattaatttttagcgattaaaatatgcggcttggaagaattaatttagatcgtgcctctcaaaataaaagtgagaaagattaatatttttttagtaaatcttaaaaattaatttagatcttaagaaaaatcattttgaaagttcaaaaaattaaaaaaataaattaaaattttaaaactaattaagcaatataaaattatttagttttcattaaaaaattcatttagatattaaaaatttaatttgtaaaaattaaatttaacggaaacaaacttcagtatattttatctttatcagaaaaatgtagatttatttaagtaaatataaaaaaaaaaattagtttaatttataacttcttttcataataattttatatttttattgaattttcaattgtttttcattatttgttaagatataagtttataaatatattaagtttgattttttctttataaatcttaatttatttaagttatttattaaatttttaataattttagtttaattttttaagataggtgataaataaaataaattttgaattcttttaagtaaaattaataaatttttttatttaatttaatatttttatccaattgtttaataattttttattattattttttgaattaatagaatattactcgttaaaaataaaatattataa

SEQ ID NO: 222762 - DNA, 868 bp, Cannabis indica
cttactcacatccatcagtttatgcaaacctcttatttcttccttttattagattaaagaaaagaacacacttttcagtggacatggagacgaatttgctaagtgtagcaataataaggctttgcacatctcttactcgtgatggtgattataagccttgcaatgccttgatcttttttgaatttttttcaatccctcttgagttgataattaatccaagaaattttcctgattggatgtcgaatgtacattttagagggttaagcttcattcgatattctcataggttgttgaagtattcctttaagtctttaatgtggtctttagatctctttgacttaaccagcatgtcgtcgacatagacttccatattgtttccaatcaattcatgaaacatacggtgaccagtctttggtatgtagcacctatattcttcagtccgaaggacattactttgtagcaataaagctcgatgtctgtttggaaactagtgtgctcttcatctagtgcgtgcgtgaaaatttgattgtagctggaataaacatccatgaaggtgaggagttaatggctgactataattgatctattcggggtagaggaaaataatctttaggacatgctttgtttaggtcagtgaagtcaacagaagtctttcacttaccattcgacttaggcaccagaggagtattggatacccaaactaggtagaaagctttcctagtgaaattgttctcctataacctttcaacttcttccttgaaagctttagagcactctttgtctatgttgagggcatgacaaatgacttgggggtcgatctcgattatgtcctcatgcgagcaaggaaaaatgtcttgatttctcctga

SEQ ID NO: 222763 - DNA, 2171 bp, Cannabis indica
tgtccacacatagcaagtcaagtactcaatcatagtgagtaagacggtaggtaagtcaaacctgaaggagagaaagagatccaagttcaaatcttgataatgctctacggcagaaaggaatcaagggctagagatcttgaacagaaggagtcatattattccgctgcaaccaatgtaaggttttctaatcccttatgtgttcattttcattattttagagatatatccatatttaggatgttaatgaaatatactttttagtaaatctagatactagtaaaatatttctaacaaatatttaccgagatttttagaaaataattataagaaattagaactgaataaataaatacttcaaagagagaaacagaacaacacttagaattttttacgtagttggagcattaaagagccttactccatgagtcgatattattatgtattttagctagaaaagcctttggaaatacaatgcgtatatgttctctgtttttccctgagcaaatattgcaagagaatttaacccttaatttgaaggatttgttgggtaattgtagagtttacaggaattacacttagtttccctctccctttaatggggagtttacatgaaaaatacacaagctagggttgtatttgtgaggcccagcccatgaggtgatcggtgtgcagactaggaaggttgaacatgatcaggctgtcattaccgtgtcctataattgtgaattaattactcgatctttcttttaggtagtttcccttttagcttgatatgatcttctggccgagatttgtggaaagtaactctcttattctgtgcagattgacaaatgggaaactacttttggcctccagattcatgctaatgggtctcttcggctacgcgaaacttgaagttctcccaatacggattgcacttggcgaaagcttacttagttgtgcaccacgattgccttcccggaaggccaacttttatattgggcttggctccaattcttgttgttttagggcccatagatgggctttggtcatctgtcttgtgtccacttgtcccttagccagaaacactaaaaaatatttaggaccagccaaataaggtccttgttccaaagtgggataaaagtcaatacctcacccattagggacttgaattcctggtaattcaaaaactcatctttaactcatttttattgtgtaatttttcttttttaaggtcaaaccaaacacaacccttgtccttaaatgtatcttcatctattaagtgctaaattaaaaagtgggataaaatattccaacatacttttttatccattttttattttaaatcatgtataaaagtgggataaaaagtctcatttcttgtagtgtggatgtccataattggacaaatattaattttgacgcatggtttatggagcgcacgactaggcttggtaatgaatctttggaagaagcaatggtggtgtgggaaatatggtgtgcacataatgatgtcatttggcaacataagtcaccaacaacaggttttattgttctttcagctagacctctacttgataaatttttatatgcacaattaaggactcatagttccttgtcttcacctacgactgttgtaagtgctcttgtgcattagactttacttggtatttctcatattaaagtaaatgttgatggaactttatttgaatcagttggttggtctagaatgagtttcttagtgcgtgataatggtggtcaagtcctggaagctttcatcgtgggaagaggggccacattaagccaaaaatagttaaaattattggtatcaaagaggtgttaagttggatagatagacaccaatgggatcaagttctactggaaacggacaacttagtttgtgtccaagctaccgagagtaatttgcatatgccttgagaatttgatttgttggttcatgactaaaggagttttttaaataatcttagtaatgtttatttacattttgttgaacgatattcaaataaaattgtccattgattaatgtgtagctcttgtctctcttcaggtaggggtgttcattggatcacatccaatggatttggacccaaccgatccaatctaattatttattggatattgaattttgtcatccgatccaatccaatcgaattgagtcatccgatccgatc

SEQ ID NO: 222764 - DNA, 3399 bp, Cannabis indica
cttgatgtctcgggagagacctgacacatcccggagtgcctttaagctatgctcgcttccgggagtaccttgtactccgggtgcatcatccgggacccatgcgaataatgcttcctggtgtcatacaaagacttagcagttcttctcaagtaatttgatccacgtgtcccttcctgattggtccacgtacattgggcgattttaggagcaacaagtgccattatgaatttatagtgaagtcaggaggaactaataaattaaaaaatttacttggtaaattttagatctacttattgggagcttgattatataggcacatggttcccgcactagttgagattatattggcttgtagactcaattaagtgattttaatcaatcaattagatttctaaactagactatgtcttttttatgaatttttactaagcaatggcttaattgagaagaaagagatgatttagggtttatttgttaattaagagactttgtaaggtctaattaacaaatagataattattaaatagatagatttgacatttataggattagaattaaaatatgacatttgtgaaagaaaatataagttgttaaataaaatgacaaaattaaaacttgtagggcccacataggagttcggccataggggtttaaattaagctattattttattttaattccatataatttaaatcctaaccctatatgaaattatataaatagaaagagatgtctcttatttcataacctgttatcagactactttgtcagacaaccatgaaaataaagagagcctctaagatttcgaaatcatcctctccctttcttcttcttattttcgtgtcctatagtgagtgagtgcttgtccacacatttcaagtaaatactcaaatttagtgtggaagattgtgaagaattccattatctaaggagatccaagttcaaatcttggtaatactctgctatagaaagaaacaagggttagagatctgaacagaaggagacattatattttgttgccaccaatgtaaagttttctataactttatatgtgtttatttcattgttttagagaatttatatttagaatattagattatagttatataattaacatacatgttagttaatctagatattggtaaaataaatttcaacagtaacaaccctaaatatcttcttagaaaaaaatcaacatactattcaaaatttatgttatttaaaaaaaaaatatatatttaataaaataaatatctaacaagataaaatggtaaataactgttatttttctaatctcataatttaatttaataaaatatattaaaataactaaattttgaaaaattgataaatatatggttagatttcaaaaatatctagattattttttaaattatattcatattttaatgtcaaataagtccattccatataattaattaaataaataaataaaataaaatatctaatcttataatttaatagaataataaataatacaaatttaaaaaataaccataacaacaaatttgtagaaaatatcaattttcaaattcaaagtcttctaatatttaaaattaattaaattataaacaattaatttaaatatgataattagttttcaaatttaaaaataaaattctacacaaaaatctaccaaaattcgaaattgtaattccatgaaaaatgacaaaatttgaaaaattaaaaaaaaaatggtgaaaatcaaacaatatgcattgcataatgtccatgcgcgtttaaaggggggttgccaaggaaataggctacttgcagcatcatttggagcgcaggggctcgttcatgttgtccaagaaaactcgaatatgtgtgtctaaaatggggattttgtctgagctggatgcgtaagcatctcattccgcgcatgcgtgaagggtggaccctagtcaaaattttcaaatcttcaaaatatcataactttttcaaatttaatcaaaatttagttatgtaaaaggttaatttacttaatttttaaccaattattcaaataaaataatatcaaatcaaaaattagattatttttatagaaaatttcgtaataacacaatcaatcatcaaaaatcacataaaccaacacgaacacatccaaatcaaccaaatatcgttttaaattcatatttcatgaaaataaatcattaccatggctctaaggccagttgttggaaatattttaccagtatttagatttactaacatgtatgttcgattataattctataatctaacatcttagatatgaatgtcctaaaaataatgaattaaacacataaagttatagaaaatattagattaatggtagcagaataatatgactcattcctttcagatctctaacccttgatccattctattgcagagtatgatcaaaatttgaacctaatttctctttgcttagtgaagctcataaataagacataatcttattcagaattctaattgattaataaaatcaatcaattgagtctacaagataatattatctcaactagtgtggtgaccatgagcttatataatcaagctctcaataagtagttctagaatttactgaataaattctctatcttattaattcctcctcactccactatagattcggaattacactcttgataatatagaacactatataccaagtacatatacgatataaattatccattgtttcaattcaaataatcaatgatcatctattgatgatttacattgagtatggagaattttaccgttttatccttcaatgtattttatccttaaaacacttagctacttataaattatatttcattaaactaatataattactaaaataagtactccaccatttaaactcatttagccaagctttaaggaaactatcgtttaacttctatgtatttatagaagctataaattaagctataaattctaaatctatgattagcgctcccactcaattgcactatcgtgttcccaagatgtaagtatttggccaatctaattaaatatctttgatgaacaagtcaaagaacacatgcaatacaattaaaccagaatttaatcatcttagaaaaatattccactgtacaagtgtaagtaaaccaaattattgattatcatatcagtgtgacttcagtgtactgataaatcatgagactaattagttaaatcacataacttgattattttctactgtgtagataacacaataattatgaataacaatgtgataaggatttaatagaatttatctattaaatatattatcatgaaataagcatgtgaaccaagcattatactaaacaagtaataaaataattctcatacttttattgataatgaaattcaagattacattgaaatagagttttagttagggca

SEQ ID NO: 222765 - DNA, 1122 bp, Cannabis indica
taatgatatttttatgaagcaccgtgaaaattatgtgtaaagtgtaaaacaaaatatgtaaaaatgaattataaattttattggtttttatatttttctttatgcaaaaatatgttttttttttttcaaaagattattgtataggaaaattagagaagaagttaaaaaattaagaaaattaggtaaggggaaccagatagccttatggtaattagaggggtaactagttaccataaaagataattaagtatttaaatttaaaaaaaaaactacatttttacaaacttatattttaataaccataaaaatgaaaaaaaatgttaacaatccttatttttattaaaaaaaaaaagagagaaaactacccatttttattttctattttattttttacatttcttttattactttttaatttatacccgattttataagtcatttcttcattatgtgtattgaggattctaattttaatctattctgtggttatatctaataaaaaataggtttattaattaaaattattttataattatatttaattaatatgtaataaaaaaataataattttcaacttatccttttaaaaaaacgttacttcaaatccataaaaatgttaaaacaactctagaaccatattcttgtaactcttattgccttaaaaatataaatgttaactaataaaattgtagtttttgtataattaagctgtaaaatttgaaattaatgtttaaaatgtcatacaatatacgttaatacttttctaaaattttatttgagaaagtaacaagttggtttctaaaaaagattccagaaatgaaaaggaaatgttaagtatattttatactatggttttaaaacaagaaattaaccgttctagtgtgaagaaataatttgccagaaacagatagacaagtaatttctgaaatataaataacaagagatcatatacaatagttgtataacatagaaagttacctccatcatcccagtgtgaacagctgaaaccatcaaaggctggaaaggaaggcaaaatgcagaaaccgccatcagcatttttggattttcttctctaagagctcttgacagacactgcaatttttttatatatataattagaaa

SEQ ID NO: 222766 - DNA, 2275 bp, Cannabis indica
atattgcgatggatttcgtggttgggtgcctaaaaccacgggaatgtatgactcagtatgggtaatagtggattgtttcacgaagtcggcacatttccttccggtgaaaacaacttattcggttgaccagtatgcagagctttatgtaaagaaaatagttcgccttcatggagttccaaaatctattatcttggacagagatccaaaattcacttcaaaaatttgggtaagttttcagaaagctatgggtaccaaattgaaatttagcacagctttccatcctcaaatagacaaataatctgaacgaacaattctgatacttgaggatttgttacaggcttgtgtcatggactttgagggttcatggagtaaatacctgcctttaattgagctctcctacaataatagctaccatagcactatagggatgactccctacgaattactatatggtagaaaatatcgttccccaattcattggaacgaaactagagaacaaaaaatacatgggccctgaattattttagaagacaaatgaagtagtagacaagatcaaagctcgtatgtcggcttcccaaagcagacagaagagttatacagatctgaagcgtagggacattacattttaggcaggagagcatgtcttcctgcgagtttcacctatgaagggggtcaagcgctttggtaagaagggcaagtaaagtcctagatttataggaccctttgaaatacttaagagggtcgggcaagtggcatatcgattagctttgccaccagcactgtcagccattcacaatgtgttccatatttcaatgctgagaaaatatgtgtcagacccagcccacatttttagttatgaagccctagaattacaatcggacctatcttataagagaaaccggtgcaaatcctggatagaaaggaaaaggttcttcaaaatgaaaccatagtgtttgctaaagtgctttgaaaaaatagcaaagtgaaggaggccactcgggagctatatttcgacatgaggattcaccacccagagctatttaggttagatttccgacaacgagaaaacgaagaacagcccaatagtaacgaccacatgatttaataaagggttagtagggcaatagaatattaattttggttattattgattatatgtgaatatttatattgtgtttattgtgaatcccatttttaaaaatgagcattaaagttataatttctcaattttagagattttattaaactctaagtatattaattatgttatatgaaaattttatagtttttataatttttgcccgacggcgatggaaaatgcgacggatggctgaattagtcacgtgggtagttaaaacctttttagttagagggatattcattaatgacatttaagatatcgggattaggcggagttatggttttggaccattttatccctaaaccatttattaagttagacacttaagagagggcatttcggtctttttatttagaggaataggtggcactttagcatgttggcagctggcttttagttatgtaagagatcaaggtattatctcttagttattctaagtggaaaattcaagaaagtaaacagaacaaaacttcattcttgtcactctctttctcttactcggctgtaagaaaaaattagaggtggagcttgtaacttcagggattttggggggaaattagctagatctcggagtagcttgaattggaggtaatcctagaaccttatccttagcatattgatgacattgttaggtttagagctaaatttgggaattagggtgctatttagttgaatttggtttaggggtgttcatcaaacctctcaaactgcccgcaccacaccacaccgtaaaaaaaaatgcggtttaaatttttttacggtgcagtcgcggtttgaatttttcctaaaccgcgcggtgcagtgcggtttgcggttttgaattgttaatgcggttcaaatcgcaccgcaccgcatattataaaaataccaacttttatatttatttagttcaatatgtgaatgtccaacccaaaacctactaattattgtattgttgaaacttaattttttttttcatatttattttcaagccttgtggtatttttgacaagtgttgctcaagctttgttgtatttgtgatagtttaattatttagtgatagtccaaaccgcagaaactgcaaaaactgcactgcactgcaccgcaccattttttacagtgcagtttttgtgattttttaattttgcagtgcag

SEQ ID NO: 222767 - DNA, 1432 bp, Cannabis indica
ttgttagatttaaaaatttttgtctaataatatcaataaagaacatgatttagtgcatgtgaaaattcaagagtaaaaatttagcctattaaataattacaccaaagagtatgttacattttgtaatatttagcaccttagcatttcttatgtatttatatttatttatccgtatagactgtatagctattccttgatttcatagactcttgctgaaaggtttggatcataagagttattggtgcatatatttatatgtacatatgtatactccgaagcttagcttgcctaattaaaaattgttttctcttaaaaagtatataaagatgggatatatctatcaacatcagagattaaaaaatcatctagtcattaaagtattttctctagtgacatgtcgaatattctagattattcttgaatcagaaaacaaaaatatattcattgagtatattatactacaatgtattatgtttaaagggatacgattttgtcccggtactagctatcacggattccgtggtacattagctagatggatctcacggtatattagatgagtgtcggtgtacgttattattttttaacccgtaattacccctagatcaatctcaaccctcagatcctcatctaacgactgacgtcacgggacaaaatcgtatcactatgtttatatatatacatcaattgttagcagtaataaagattggtaaagtcatattcgatgaaaaaaaaataatattgcagtcatgttcaaatgattcagtttccaacaatatgtacaaaaaaaaatcacaaagtctaagtacgtacgtcatatcaagtcgatctgatcgatctagaaccttattaacgtacgtacgaagacaaaggttgaattaatacgtattcgcttggttggagttttagtttctagatttattttacataattctgcttatgttttcggaaactatggatagtgtagtataattatatactgtacatatagctaatattttctttacgtattcataagagcattgcttggtgtgtgtggcgccctatccattggttagcaataatttttaaaagttatttttttttaattacacaaaaaaaaatatatgatacggagaaggataatagataccaatatcttttaagaattttagtgtgcatataattatttctacaattctcaaacttttattctttattaaggaaaaaagtagaatttataatttttttttaatgtattttgaatccctgatatcaacgtgatgtagtataaaaggtattagtaatttattggtgtctcgtaacaatgtttttcaaataatgataattaataaataacatttattactttgttgaaaagatgagaaaaaaaaagtcttttaagcaaaaaggtgaaaactgttgaatctattttatttatcgtttttttttt

SEQ ID NO: 222768 - DNA, 1124 bp, Cannabis indica
tttttttaaaatatactaaaatataacaatatactacttttttgttactctattaaaaatagaaatgctctaatgatcttgaattgcactagtagcttaattatgaaaggtgatcatagattcttaaggatttctcaattatataagacactataagtttaacttaatattctatatgtattgcgcaatagtgtcataaaactattaatatcactacaatatgtcatatagtgagataaaactattaatgcaatttgatataagatcacaaataattaatttaataaaagcattgttattaggcactagtggtgcttagaaccttttccatatatcgtgttgtgattgaatagcgatactccctaaaaattattatattaaattatatgggacttaatatgtaagagggtgctggtgcccttatcatttctcatttaataactatagtaatacttggtataatttactattattttataaacatataacttactacgttaatacctatgttagacaatccataattctcattagcattttattttaaaaaaaaaaaaaagttgaaatgtgtaactaatttgagtaatgaatgattaattattacctgaggaattatggtgtggaggagaagacttatgatgattctccatgcacttaagtagatacttaaaagtctcaatctcacaaggaatggtgagaccaccgccatggtcgaacccaaactcctcctcagctttttccaacaacactttgaacaaagaatgactaagataactggtgggtattatgaacctccgaagctccggtcccacatacaccgccaagtaacctttcggcacatccggcggtggctccgggctctgacagctctcctcgtcggaatcgcagcaaatcacctctgtcaacctcctattgatcgccggagatattcctcctccgccattggtgttttcttccacctgctctttccggggttcctcgtttggctttggggtttggacgttaagtgtaacggattgccatttctggaggatttccttgagccgaacgatctgtcgtatgccgttcaacttggtgctcccattgtcgtccatggcttttaatagtaataataagagattata

SEQ ID NO: 222769 - DNA, 1333 bp, Cannabis indica
ataagacttcaatgttcgatttttgttgttccagaccaactttaaccgaatatattgtcttttgcaaacattttattttttagtattttcaagtcttattttcctagacacctatattactatagttatcaaaacatctaattattatataattatatagcaccaagtaattttttaaaaaatttttgattacttgagacaaataaaatactaaaattccattaatttataaatttaagatttacatactctgaataaatcggcagttataaacatacaatcattggtaatatggtctcaaatatttgttgttccaagtattttttactagtaacccattcagccatgctagtttataaacccttgatgctataacaacttcaattgcgtatggaccttcccaattcgggtgaattaatctcactgtaggatctcttgtatttgctaatactcatcttaacaccaaatctccaacgtttaagagccttgacgttactcttttattgaagtgtcttgttatcctttgttgatatgcaacatttctcacttgagatccatctctcatttcatctagcaagtcaaaagattcttcgagtaaatgtttgttcttatcttgatataaaactattgcctatgtgatgagatgttaacttcgactagaagcattgcttctgagccaaaagctagtaagaaaggagtatgacctgttgctatttttttagtggttcgatgagtccaaagtacctatggtaatttatctacccatattccttttagtgtgtcgagtttcttcttaatagtatccttaagggtcttgttgactgctttgacttgtctattagcttaaggctatgagactgatgaggaactcttaatgattttgttccacttgcaaaagtcagtgaataagtcattcccaacctgcgtggtccctacaaaagccttcgtggatttcctttatgatactctcagcttctgctggtaatgcacattgaagtaatggcatagagtatcctctacgatacaactttccctcgacaattgtgtatctaggtatcttgtacatgagtttccttgtctcatttttgtttgatggaagttcgtcgttcaatagataattcatgatttgtgtcatccaatttgaattcgcattaaacatttctatgtgtgcttcttctatctcacaaatacttggttcttgtaaattttcaatgggaactaagttgaggtcattgaatttgaactgtgacgtcagtttggccaatgaatcagcgttggaattgttaggttttatgccctaaataaaactccatttcaatgtaatctattttat

SEQ ID NO: 222770 - DNA, 1915 bp, Cannabis indica
tttttgtgcgattaataccgtaaattcaaatcggttttatgtgttggtattgtgtgtgcgattttgtctgataagtcatgatagtgcttgaacaatcataagtgtgttgtgttcctgatggtatgcaattttttggcaacatttgtgcgattttatttaaatgttttgcgatctttgtgcgattcctggttgttattttgcgattttgtgcgatttataatccaataatagtcatcttttgtttgtaaatgcagatggctccagaagagacattagaaggtctaattaataaatatatttaaatgataattttatttgataatgaattataattattaaatagaaaaattagtatttgaataactagaacagaaaaataacattattgaagaaagataattttgtttcatcaaggaagcaaaataatggaaaaaatcaaactcaagggccttatagggagttcggccatgagtggttattttatgtcattggatcttttaaatcagtccatttagttctaaccctaaccctagtgaatgcctataaatagaacatattatcctttgattcagtagacacaatttagactctctcatgtctaacaaactgaataaaaagaaagacaattatttttgtatttaaaatttcaaaaaattctcttgtttttcatcataaaaattcatgctccttagtgttgagaacttgcccacacaaatcaaagtaatactcagcatagtgaggaagactgtgttgtcactttgtcatcagaagaagaatccaggttcagatcttgatcatactctacaacaaaaaagatcaagggttagagatcagaacagaagaagttatattatcttgctaccattaatataaatttttctatgccttttatgtgtttaattcattattttaggtaattcgtatttgaaatttagattatagaattataatcgagcatacatgttagtaaatctagatcctagtaaaataatttctaacatttttgtgggtttttttaaagatctttttgttctcctcataaatgacaattctttttacaacaacttatgtggtttttttttcttttggttatctttttcttttatttttttttcttataaatgattttttaggtataatttttcgtacaatatttgttgtggtgaattatttttttattattaatagaacattattatttgacatcttaagatgcccaacactatgcatatctgacacttaatgattgattagtagttttctatattattcattgaatcaaaatttgtgagactcaatattaaaatacaccagtatgtcaccatttatggtgtttagcacatcccttagtattttcatcatcatctccgataaatagtgtatagtttgagttaaaaaaaaaaagtgagttaatattatatttagcctaaattttgtaataatgcttcaatacatttatggtaaaaatattaaatttttattaaaagtatataaaagttcaattaaaaatataaataaaatgtaataaatgattaattacattaataaatgacaaatgagtaaattaaaaaaataatatttattgtgttgtaaaatttaatttatgctatatttgtgtcaaatttagtacaacttttagtatgtgctaaatttatatttaaaccactttatacatcattttagtaagggggctattatggtagggattaggtattttgcctatcaatagggatagtaatttatagcccttgatttaatccaatggcttaaatcaactcttgaagactacaccaaaattaatatattttttatttataattaatctttaatattattaattgtaggttcaactaacaaactccaaacctaactccaaacctaatatttttatctttctattttatttttatttaaa

SEQ ID NO: 222771 - DNA, 1098 bp, Cannabis indica
gacaataaagctataacgtcttcaaacagcaaacaccttctcataattaaaagttgccgccagagctagcaaatctaaaaaaacatcgcaacaccaaacaaaaaacatacagttatagcatgtatttttaacgttgcctgaccatttttatagcatgtatttttaacgttttatgaacgttgtgcttggttttaatagctgccataacctccaaatcacctatataagttcataaacgtccaatgtaacattgggaacatctaaggggccggctttatggtggtcattcatgttccaaataagaatgaaaattttataaatagagatcatattattcacttgtaatatgtagttgaaatcacttattggtaagaatcttgtgaggatatgcttatccttagatattaggttgagcatatgaggcttgaaaattcttaaaagtatttctagagtttccctacgcatccatatgagagaaaaaatgatttttatgataaaaaattttgagctttggtcaaatttattgcgtgttattctttttcttctcctctataatattcatttataaatgtgttccacaagtgtcatattaaaaaatattattgaatttacgtacaaataaaatataatctatgtaaatgtattatcaagcaatccatgaaagaaacaagcatagtattacgtcagactttttgcaaatatatataagatataaagaaagatgctcaatgatgttatatttaaagtaattaaaggttttattttatattctatatataatatggctttattcttttttagtataaagtttatttattttagagtgattgttacaagtagtcatatatgtttaatgttaatattaataataacttccacagtcgaaaaaaaaatgttattattaaaaagtgatgattatataaacgttgtcaaataattaaaatatttttgcatgtatctcctataattagctgatggttataattaaataaatttaattataaatattaattttgaaaatattaaaagcatgtttggtattatttttgtttttattttcaaaaattatttttagaaatgagaacaaaaaataatttt

SEQ ID NO: 222772 - DNA, 2014 bp, Cannabis indica
tttaattgctatagcatttgctccacatttctgtgctcattcctatactctattttgtgtttgtcattgtgtacttggtcgagttttcttcaacagttagtatcagagcatcaggttcgaattcaccaagaacagttcaagatcttgacaagatcaagattaccagacaactatggcttcaagacgttttgaggtagataagttttcatgattttgggctatagaggattaaaatgaaagcactactggttcatcaaggcatcactaggccatagacaaagaagaattgaaagaactgggtgaagacaaaaagaagatcaaggagatcgagattaaagcacacagtgccatacttttgagcttgggagatgaagtggtcagagaagttttagatgaagggacaataatagggttataggagaaacttgcttcaatttatttgaagaagtctttgccaataaagtctacttgaagaagaagttatgtataccttgaagatggatgatacaaagaatctcggaaactatcttgatgaattcaacagaatcattcttgatctcagcaacatttgtgtcaagatcgaggatgaggatcaagggattctattattaagctacctgtaaaacgttatgaacattttgtggattccatactatatgggaaagaaaccttgaaaatgtcagagtttaaagctactcttaatttaaaggaaattaagaagaaattagaagaaagattggacagcgatggtgtaggaatgtttggaagaagcaaatgagagtccaaggataccaagaatggcaatcacaagtcaagcaacaagggtaaccattcaaagggagtagcaatggtcatagaccaagatcaaattctagcacaaactcaaagacaggaaaacaatgctactattgcaagaaggaagatcatttcagagatgagtgtagggctctcaaagcaaaactcaacaaagaaaagaagaaagattctggagatgaagtttgtgttcttgatggatatgagtctgctaatgttcttgttgcatcaagtcaagccacttgtgatgagtggatccttgactcaagttgttcttttcatatgacccctaacaaacatttcttttgcagtttttaagaacaagacagtggtccagtcttgttaggtgataacaaagcctacaagattgcttgaattggttctgtgttgatcaaaatgaacaatagatcagaaagaaccactagagatgtgaggtatgtccctaacctaaaaagaaatttttgtttattaatgtactaacacttaaaggctgcagtatcaagactaatagctcacttagagttctaaaaaaactctacagtggtgatgaaaggaaatctcagaaatgggatttactatctagctggtaaaatagtaattggtagggctgcaacaatagtgaaaaatgaaaaaatggaccaacaaagctatggcatattggaaaggactacatgagcttgagaaacaaggcatactcaaaggtaaacttggtaagaaattagaattttgtgaaaactgtgtttatggtaaaagtcgcaggttgaaattcataaaagccaggcatacaacaaaggcaatactggattaccttcactttgatctatggggtgcatccagaacaaaaacaattggtggagcaagctattttctgagtatagtggatgactatacaagaaaggtttggattttcttactcagtaaaaaaatgactctgataacacatttgtcaattggaaaaccttgatagaaaaccaaacaaataagaaaattaaattgttgagaactaacaatggtttggagttttgctctgatgagttcaacagatattgccaagagatagggataagaaggcacaaaactattatcaagacaccccaacaaaactggcacaacagaatgaatgaacaaaactttgatagaaaaggtgaggtatatgctgacagttgttggtctgggaaaatagttttggggagaagccttg

SEQ ID NO: 222773 - DNA, 1694 bp, Cannabis indica
agaatatttatcgcgagccacataggacaaaactgcccctaaaaaatttagacaataaagctataacatcttcaatcagcaccctattaatgatttgttgttgattattattggtaaataccttacttttgattcttaatatatttgcttcaatgttacgtttttctttcaaaaatattttataggctcaataatttttcttatcacttttttctcttaaatataataacatatttcatataaatcaaacatatatagacatccatttcaaaaaaaaaatatataattatatatacatatgtatgtgttttaatttaatttctataaagatgaaaatgacataaaaatttgaaagaccttacattgagaggtaaatttctctacccacaaccctactatataggccatattgccctttacataagaaccaatgggccttttggcccattaaaaaaaaggagaactttccaagagggtttggaaacttggacttttcagttttgtggctatacatccataataatgggccgaaggaactatttgatctaaacacccaaaaaggagggtctattggtttggtatgttccttgtttatttataccaactttttaatttatatacatagaataaaaaataatttaaaaaatacatttaataaatttatgcatacttataccgatcttaagccaacacagtaaggtaatattgatgctgtgttatttgatttggaggaaatgcatgattttggtagggttgttcaaaatcaccacggtcaggtcgtggctgggatttcagactgcgagttgggcgagttcttccagagattgctgaagttgtgactctcaaggaagtgctttcatggttgaagcgtgatttcctaggtgttaacattatcgaatctgattgtttggtattgctacaagctgttagaaatttatgttttgtcatccacttttggtggcatcgtgaggattgtaaacaacttttattgtcttttatagttatgtttctttacgttttgtcaaacgatctgttaatcgagctactcatcttatggctagagcgttttatttatatgtttttttcgaagtctaatttctcttttgatgttgttgacattgttaaagctgaattggtctagttgaataaaatttaaaggtaagagaaaaccaacacaatatgcatacgatgaattgaaatatttcctacaaaaataatagtaatataaaaaaaaccatgttgcttccccgcagtagcaacatcaaaacaacattatttcgtaaataaaaaaaaaataacattcgtatttttgttaaaaaaattaaaatccataaacaataaatgaaaaaacactaaattcgtaaaaatacaaaatttttgttatttttgtatatttatgaaataatccctaaacatgccactaaaataggttattttgaaaattaatccttaattataaaaatatgaaaataagattatgggaagcaaaattctattaaaatgtgaatcaacgtgcacaatgttaaaaatctcatatttgccaaacctatttaaaaaaaaaaaatacatatttcatatgatttcctctaaaaaatcttaaacgaatgaaagcaataacattagggatcatcaaaacactaatgccatacattccatgaagcactcgctgtttctcacccacaactcacgatcga

SEQ ID NO: 222774 - DNA, 1568 bp, Cannabis indica
ataaaatagattacattgaaatggagtttatttagggcataaaacccaacaaaggatacaagacactactgtaacttatcaaactaagactaggggcttatttcaagccatacaaggcttgtgtggagtatgcaaaccagatatggtgctaatggattttcaaaaccaagaggttgtgtcatgtacacttctttttgcaaatctcaattcaggaaagcatcaagttatctcatagtccaattcttggataaacccaaggccaataccattctaatagtcattatttcacaacaagactgaatgtcttagtaaaatcaaatcctagttattgatgaaaccctttggcaactaatcttgccttatattttttgatcgaaccattaggattttccttaactctataaacccaattgcacccaaatggttgtcttcttgcaggtaaaggaaaaagtgtgtatgttccatttgtaacaagagctaagacctcatctctcatggcacagtttcactgctcatgtagaagagcttccttaatggtggtaggtaaccttgacacaatgtataccttaggcttaaagattacagacttagatatactctgcatgtcatgatagccaacaagaatggttaaagttgtaggaagaattctggtttaagagctttgaacagtgggaacagattcagtagtgggagcttaaggctcaggagctggaacaccagtactatattgaactaaagttggaatgggagctaaaatactaggtgccactgatggctcttgagaagtaataggaataggtcttgaagtggtagcttcatctctaatttgtttcaagtgataaaggaaaatcagtattatttgaactagacaaggcattatcagtatgtgtagaaaactgagtgtgaggtgaagagcactcaagattatgatgactagatgtaggactcgattgagagtcagagatattattttgtatagccaaaccagattttgagttaggtgggatcgaaagaagttgtgttttgagagttggaatgtggcctgatgtagagaactgttgctggataggagaatgagtttaagtgctagttttggcatatggatatgtatgctcatcaaaaataacatccctgaatatataaaacccacctatgcggtcaagacacttacatcccttgtgatttagactgtaaccaaggaaggtataggttgttgatctaaatcctaatttttgtttgttatatggccttacgttgtgaaaataagtgcatccataggttttaaatgacgtgtaatctagtttgtagttgaatagaacctctaagggagactagttgtgaagaacatgtgttggaagcctattatgaatatagacaacatatttttaaaaggtcttcatcctaaaatttcaatggcatagatgcttcagctaagatggttattccattttctacaatgtgactgtgtttttgtccatttttttttttatgagtggttgagcaaagatatttatgaatgactcctagtcattaagatacttagtataggtattgtattcacctcctta

SEQ ID NO: 222775 - DNA, 1169 bp, Cannabis indica
agaactttattaattagcactcggtgggttttattatgttttggaacttgttctatcctttatataataattagacacaagagaagagagcaccacaaaatgatacacgtgttgtgaaaagagaaaaagtagtatgctatatatattaattattttaaattatacgtttttgagttataatattgtccacaatctttttcaaacattatctatatgtagagacgagaaaagaggttgatcatcttcatcggccaccgactgattaatatgatggaataagttcaaaagtttcggcctttattattattgattacttggtcgtatgacctataattatcatattagctagactgctagagaccttaggctgccactgttttccaggatagttcttttatccttccttattattaagacttctattgttttgacttttcaatggttgaaaattcattaacgtgtggggtttatataaatttcaatgaaatatgtgtatcctattttttctttttctatatatccacactaaattaataatgtgtattggcctgacccatacaattgtcgcgtggctaactttcttatgtgctattctattttggtgtgctgtattgaatagaaacaaactttactcttcccaacatttctactcctattattaaaattggtcatgcatgtatatatgtttaattgttctagaaaaaagttcttgaaagtactctactttatatatgagaaatgttaaaaggacaccagcggtgtctagcacttttttatgtgtcagtattgttattgatccaattaagaattacgtatcgggttctacataatttaatataataatttttaaaaagtattactagtcaatcgtaacgtgatatgtccagaaggtaccagacactactgatacctggtagcaatgctcttaatatatattgaccgacttcttcgaatttatggtagctgaagaatggtgttgtgtgtgggggcttgtttttctattatttatattatttttcttacaagtttcccttgaacgttcgtatatttaatatagatatttatggtgtgtttttaacttacactacaataaaaatgatttttcccgagaagaaatatatttttctgtgaaaataaaggatcaaatttgaatgatatctcagatcctc

SEQ ID NO: 222776 - DNA, 4200 bp, Cannabis indica
ttttaattttccgaaattagtttaaatttccaattcaccccccctcttggaaacatatcttgggctaacagacccctcggtggaatgcgtcggaggaaacaccaggaaaaaccctaccaatattggaacctcggctcctgcataggtacaaagggaaagcaaagttaagtgaccctaagaacccatatgctcttatacctcctcaaaaaacacgaatcagaccaacatgccttctcaagcgtagaaggcagccaacgcctccaggcttggatgcccttctgcccctaaaagccatgtagccccaaaagggacttgtacaaagtaccaaagtccaagggaagaaaaatctccctagtgattccgtaaaccaagacggtggcacaagaggatagtactctgacgatagttggtccacggtggatctcagaaggcgtttggataacaagtatgagaaagcaaaaagcgagaaggcaaggccacgtggtaatgacctcagaaaccacttaaatgacaaagtccatggaagagatctcctagacagtgacaccaagagattggaagaacaaattgttgcactaacaaaattagtctagaagcaaagtggggcccttactgattcaaaagatgaggatccggagccatgcatcaaaaggatcacggaagctttgctcctaaagaacttcaaaatgtcccaaatcgagttgtaagatgggcgtactgatccaaagactcatttagccaagtacaacaagatgatacaggtagcaagagccaatgaggacattaagtgtttatgcttctccctgacccttaccaagtttgttgaagattagtggaaaagaccgactcccaggccaatccatttctagaaggagttacagtctgccttccagaaatagtttattaatgtctacgactatgacttggaaatgggttccattaccaacatcaaacagcaggccggagaaagcttgaagagttttatcaagcaaatgatagaggcgacagctaaaactaagctgattgatgacatgaaacttgtggccctacaatctggacttgcagttggttctcccatacggggagatgcaaagaaggagagccaaaacgttgtctgagttcatgactaaggcacaaagcttcatcaatttggaagatgcttatcagcaagcatttggagtccctccggcaccagctcctgttgcttccactcacagatttacctcaccagttccaattcctagaacatagtatacctcgacagtctacgaaccatctgcatccgtacaagcacccatgcggactcatttctctagttatagagcgacacagaccgaatgtagtatcactcccgaacagtcaaaagtagaagttccaaagcacaacttgagttaatcccaaaacaagagaggaaagggtccgagatgaagtgagacttcgaagaaagcaaagaaagattatgagctaaggtacaccgagtactccagtctggtggatactcgagataatgtgtatagaggaacctgcaacatgatccactacaaaaaaccccccacggatgtctcaaggggagaagtttaaaagagatccaagtaaaaggtgcgagtatcacaagaagtatgacactccaccaatgaatgtaatgacttgaaagatgaaattgagatgttggtcagagcaggacatttggggtaatgggtctggattcccatcatatatcatggtcaggggatcgctcacagacaattggtcattctaggacagcagggtaccataaatcctctgcaggggtagtcaccctcaagctctcggagtacaactttcagcactcactgctccaccatccccaactacagtagccatcttggctttgggaccgggaaacctatatccctcaggactagctttgccaccatttgacaaacacgtggctatggtctctagaggaccacaccttgtaggaagcaccagaaactcttagaagaggtacttgagggagttagacagagagggagaaacatgtgttattgtgcaatcatcagcccagtgtcctcgaacgatgaatttgcctattactttcacaaaggaggatgtccaacacgtgcactttctccataatgaccccttgttcattgaagcccaaatagccaacaaaagattttatagggtcctagtggataacaaaagctcaatgaacatcctgttcaaatttgcaattcaggcgattgggctcacaaaggcagacttgtcaccttgtcccatcatgctacaaggctttaatggggacgctttaatgtcgatggaaaaatccaactctctatcacccttaaaggagaaaacaatgtttgtgcctttaaacattgcacttttatggtggtggattatcccacaacatacaacacaatactaggacatcaagtcttggtagattttggagcagtaacttccataaggcatatgtgtatgaagttttcctgcgataatggatgcattggagtggtcaggggtgactagaagagtaccagtagttgttataatgtctctgtccggtttgtgtttatggttcgagaagaggcacctattgctcctagaatggagattcgagcggaagttgaagctgtctgagaggattttgaagacaaattagaccccagtgtggggattgagagaatgattgaatcaatggaggatgtacaagaggtcaacattcatgatgtagaccccaccaaaaccatcaacgagggatgaaacttacctccgatggtgaaagaaaacatcgtggaatctgtcaagaagaattaggatgtgttggcgtggagccattctgatatgacagggattgactgcaacaccatttgccatgctttgaacaacaataaagatgcgacaccagttcaccaaaagcatagaccatcagacctcgtaagggcagaaacagtgaaagcagaagtggacaagctgaccacgaatgacttcctcttggaagcattatatcttgtttggcttgctaatccaattttggtccctaagcccaatggcacattgaggatgtgtattgacttcccaaacctcaataaggtctgtcccaaagactgcttccctctttcgtgaatagatcagatggtggatgccacctccgggtgctagatgctcagcttcatggatgcttattctagatataataagattaaaatgcacatagtcgatgaagaacacattagcttccaaacggataaaggtgtgtactactacgaggtaatgccatttggcctaaagaatgtcagggcaacctatcagagaatggttagcaagatgtttaagaactagttgggaagaaatatggaggtttatgttgatgacatgttagtgaaatctaagacatctagagagcacagtacagacctcgaggaagacttctcgattttttggaggtacaggatgaagctcaatcccaagaagtatacatttggtgtctccttcaggaagttcctaggttttatcatcagctctcggggaattgaagaaaacccaaaaaagattaaagccttcattaacatttcatcccacaaaaggcacaaggatgtgtaaagtgttactggaagaatcacaaccctcaataggttcatctcgaagtccacagacaaatgcatcttgttcttcagcgtgttacgaggaaataagaagtttgaatggaatgaggaatgtgaggaggccttccaaaaactaaagaagcatttgaccaaagctcctatcttatcaaagtcagtgaaaggtgaagatttgtacctttatttggcaatgtctgatcatgccataagtgttgccttagtgcgagaagaaggaaagttctagctaccagtgtactacgttagcaaaatattactaggtgtagaatccaggtatcccttgattgaaaaattgaccttttgattactagttgcctctaggaagctcagaccctacttttaagcccacaccatcaaggtactgacgaatcatcctctctgccaagtgcttcaaaagctggaggcatccggcaggctattacaatggaaaatggaatttagccaatttgacattcaatatcaaccatgggtgtcgatcaaaggtcaaaccctagctgactttgtggtggaatgttccgaattaagtaacctcctagacaagctagtcccgaaatcacctacctggaaagtctat

SEQ ID NO: 222777 - DNA, 2883 bp, Cannabis indica
ttaatttatttatgagaaaaaaaaaggaagagaaggttgataaagccttaaagactggtgaaaagtgaggattttgatcagttgggaaggaaggaacaatggcgggagttaatcccacaaaccctcaaaacccaaatcccaatctcaatcaaatgcaaccaacaccaccaccaccaccaccatcatcatccattgcagccactcttcttattcgtcaccttcccgaagccattccccaagacactctttctcgactcttctcccactacggtgcttcctctgttcgcccatgctcctccaatggcaggtactctatttattcatgtataataataaaaactccccctttttgttagttccaccaatttgaactttttaacggtttttctctctacagattgaggaactgcgcttttttagattttcaaaatgaagcattggcctttcaagctcatcgtcaattgaatgggtatgacttaaagctcatattttgaataaactaggggtggcaattcaggtcatgacctgcacacgaacacgactcgagattttactggtctacactacacgaaaattatgcgggctgtgttcatgttttataatcttttcattttcgtgtcaaccatctaaaataaatttaagaactccaagatgacactataaagtataaacaataatttagcttgttttatgaacttttcatgccacgggtcgtgtttcgataatttaagacttcaacaggcctcgaacacgacacgccaacacgaattttcacccctagaataaacccactttcagttttgaaaaattatgaggttctttttttttttgaataggttgaggtttcttggtaaagttttgaaagctgaaaaggcatctaagcaaccccagaatgatgatgataataaagctcagccaggttctcatgaagctcaatcatcagttctgaacacttgttactctaaagaaaatgcttctgagcaagtttcgaaatcggggtctgtgcctgctcttgaacccattgcacctagactaggtgtggattatccatttcctccttatcttgagtatgtgagcatttctttttgcctcttttagtaacatattgaaataacttaataccatgtttagacatatgtgctttgattagttatcaatttcttttgcatttgaagttgagagtcagagtttgaatatagatgttaagtgtaggaacacacttgatgattatagaatttgaagtagatattggagtcccaatttctgagataaatttttgaaagatgatcgatgataagttggagagagcagaaactggtgaagtagtaaagatcaaagtaaggatggcactttaagtaattggaagagggtggaggaatatttagaaacgatgaacttaaagctaatactctctatagaattggaaaggggaagtggtgaagaaagttgttatgaaagtaatgaaagagtaacagaatcagagttgtaaatgaggcatatttttatcataattaaaaagaaaactcattttttgcaaagtgccagatttttgatccaatagtttcacttcaagtttgtataagatcatagctaaagtactctctttgaggcttagagaagtatgatagatacgattttaaaagctcaaggtgtttctattgccgggcgataaatcttagacgaagtactaatgatattgctaatgaagtagtgtaatactttagagttttggggaggaagggtttgatttcaaaaagattttgtttatttttcttctcttatgctggagaaaagaaactttgttgcgaaatggcaaaattaggtatatgtatacatttcttcattatccctttcagtatttgtaaatggaaggtcaatgggaagatttcgtcggtttataggattgaagcaaggggatcttctatgattgtccttgggggaggatacattgagcattggttgttaggagggtgttattgctgaactttattcagcttgaggtggtgtttcaggcaaagttgcatgctgagttagttttatatttgcagaagggtgattctccataatggaatttttcactgatgaataccttttgtcattttttcaatgtcagataacttctttcaattagtttattgcctttgcctgtcttcttacagacctctcatgtacctagtataatgtatgcttgaaaatgtccgaaagtaatatctatgttgtctcccttgtatagttatgattatgtttaaagtatagattttggttgatttgattttactgaaaaagctttttctacagatatgcctaccctccaccagatggtaacatccttacaaacatcgtaaatgctctgattgctgttcctcgcttttatacgcaggttcgtttaatctcatctgaagctactattagaattacagtttccatgagtttatgaatggcattagaattaatcttaaacagttaaatagattcttaacatttaaggagcaccgagcattaccatattacttacaagtatgtaaaaacaataggtcttgcacttgatgaataaaatgaacattccagctccatttcgaatggctatgccaactccgcctctaccaccgttagcaccagtgccaccaccaccaccaccacctccccctcttgaatcagcaaagcaatcattggcagaatcgtctagtgaagagtcagagatggagtcttcagatgaggtaacatttgtagcttctgggcagaaaaacaggaaaaagtttcaatctttatgtctaatttgcttcttccatatcttccttttttacacgaaagttcatgtatgtacacatttaaacatcttatttttggttcgtgtactttcccctgcttttcaactcagatctt

SEQ ID NO: 222778 - DNA, 1417 bp, Cannabis indica
gtgggctcttatcatcttagcaagaaaactcaagccttacttccaatgtcatactattgcagtaatgactttgtttttgctaaaaaagagtgctacacaaacctgacgtatcatggcgactcatgacatggagagtagaactaagtgagttaggcatataatacctctctcgaatagcggttaagggacaagtgctagcagatttggtaataaaaattgttccaaaacctgtttgcaacagagaaaaattcaaaaaccaagaatggataccaaaagtctatgggtcatctaatgtctttggggtggagtcagaatagttattttgtcaccaaacggagaaatgcaagagcaatcactcagactaggattcaaagtgaatgaagccccaattcaagggattagactagtcaaatagataggggcatagtaaatctcagtttagtttgattaccagttaatcgtgcaacaagtcgaaggggattttaaagccaaggaataaagaatggttagctatttggccctagtgaagaaattagcgtcaacttttgaacattttcaagtaaaccaagttctgtgagaggcaaacatgcccgccgatgctttggccagactagggtcctcttccccacttcaaattacccgaatgataccattcaacttcatccccgagcctagcatctcactagaaaaagaaatccaatgcacataaacaatgttggaacctccagaagattgtagataaccaatcacataatatttaaaggaaataagctatcgtcggatccaaaggaagctagaaaggtgatatcacgggcctcgaggtacacactaatacaagatgaattgtatagatgttgtggtatttttaacacacaagtatatgtatcgttttaataagtaatactcaagtaagtgagatcgttcctacgaggactgtagctaagtaccaatcaattgaattcttatttctatttggcaatcgaatagataaattttaaaactaaataaactaagaaaaataaataaaacaaataaataagaggtttaacaatggttcgaaatgagggatgtgattttaattgtatctatctattatggtctaacatgattcaattcctattatgaaattctatgtaatagcatgtttactcaagtaatttatagtctactcaaatatataaatctcagttacatgaaaattttccactcttgtgataaattaaacatgcaaaaggtattaaatacataaaccctataagctatccaaaccacataggtactctcgtcctatatcgaaatttgttcctatttcactatagcataattgacactcacttatcagatttcgtatcaaaatcataaataattaattgatggccagacaattaaaagaaataagtacgaatgaaatagaata

SEQ ID NO: 222779 - DNA, 3747 bp, Cannabis indica
taactaatcagattgtaatgggttttatttaggccacaaaccccaacaatacattcagctgtgatgtgtccgtgatcgctatgaaattcacattatttggtcatatcttttagagcttttggctttttaatcttcccagaccacttgaattttgttgaccgaggtttttggcaaccatttaaatgagataatgatgacagcttttgggataattaatggagatgatttttacatggttccggcattaatgagccgtagtccacgagtctttgttattaatgagagttcatatgcagagaatgttcttggtgagtttttctctctcacttttcatcgaccccctttcccatttttcttgtgggtattaatagagatttgtggggatagttcaaaagagataacttgtctttgagagccagcaatgtatgagcacaagtttccaagagatacaaaatagggcatgcctaacttatgttgtaggtatcttagggattaggtgagattaatctttatccttccttgattgatgtgactcttcataatggagtcgtcgctagcccttttgattatcgtataatcgccgtaaatgaggcttacgttgtctgacatgtcctcttatgggagttcccaaacactttccccatgctgtattaaatgtgaggtgattttttgaatgtcctcctcctcccatagatgtgttatcatatttctagctcccggagaggaaggacatgcttttgtgcttctctgcgggctcacttcttgaactacaccattttgtctgtatacgactcaactaattctcgggtgaggtgtccttttggtctatgtgtcatacgtagccgtggccacgtattttgggaaaaaaccaaggcaacatttacccctaagtcttatttagtaaaaggtaagtatgcggcctatgatccttaataaatatagtggcatgtgcccctgatgcgtgggtcgcatttatgattgtcatcattgatttctatttccttttgcaggaaacgattcgcttcatgtccattgatagacctttgcattaatgtcggtgtcagagaggcactcaaacgtttcaaacatcctttctcctcttcacacctgcccatcccattcattggatcatggaattcgaatcgctacgaattctcaccatatgatggtgtctgatcacagcttccttgcaccccatttggcctataagagctagcactttcctttactgggttactttcaccaccttgcaattttcaacccagccaacacctgcgaaaaaattccagacacctccgactacctcttgctattcctccgccgttgttagacaaagttctaccaccggacgccatcaacctcttccttaccacctttgtgtaagtccctgttcatatttttcctgctttttccgcatgttagggcaaaataagaatggtgatattctcatttggttgcgcttgatttctgtggtatggtggttatggcaaatttcatggtgaagcttccccaaagtggggcgtctgatgaccactgttgtttgttgttttatttgtatgcctactgacgtttttctttgagactagaaagtggtgatctcctatttattttccatcgagtgttcgaagcaacttccactatcctcttttttttcttcttttccctttatttttgtttttagggtgttttacacccgatgttttcctaggagaatctcttgattccctttctttggcaggcatccggagggggcctctttccagcggttaggggacccccattccccatttctatcttagggttttcttttggggctaagtactggatttcctttttaaaatgagtgaagttctataggaccttcacgctcgcggtttcttcgaattcgaccaaaaaatcctagaacttcaccaagtccacgccatgtctacccccacttctactagagaaaaatcttcaaagaaggggccaaagaaactggccactttggatgaagtaacgaagggcccagtggtctacgaaaagttcacatgtagtttcaatggctaggaagcagatgaattacactcgaccctaacctgcgcccatcagttggagaagaccatcactattgtcgggattaaaccttccattgttggggttttccatcactatcaccttccaagtaatgaaggacccaaccacaactacaatgcatggtgccaaacccatctgatgtctggagccatgctcccactccaagactacttcatagattttatagtttctgttggccttgcgccttaccagcttattccacaagcttactgcctactgtgaggcttgtatatcttttatgttgcaaagaattgggccccacccagtctgattgaagttttatatttttacgaactcctgtcgatccccaaaaaaggggataagtttaaagatggtatttacaaactttaagcccaccctgccaacgagggtctggtgccttttaattttcaaaagaatgtgaaggaatatcgtcaccgatttttcttctccatcgactttaaagccttcgagcgtccggatctactcacggactaggttagggttccacccatgcaccgcaccacccccactcaactcttcctaaaccatgcataagtataagctggctataacaaggatgagttgaacgtaggagacttggtcacgatagtcaactgctggagggccaagctaacctcaaaaaaaccaatcggtggatgacttcaatctatcgaaggttctttgcccccatatttggaatcttgagaccgagaaggcgctctagagggacatcatttcttatgcggaagaaaaatacaataagtacatatttaagaaggaacaagagctggagtttgcccaagcgcaggctgcttcagggaggaccctaagggagaaagctatgaaggagcagacccccattcgtcctaagtttccttttttcgattccctaactctagggcccctggtgccaatacttctggaacttgtaagtcccctttaactattccccacatcccttctgtcaaagattacactggccttaggccagtggaatttgacaatcagttgtataagttttggatgccccattcacagtggggtgacaatgccaaaagtttttatttttcaaacataagtcattttttgggtcggtcccggataggttctggtcctcccgacgacaccagcctttttaaatatatacctttgactaggacaaaattagaccagtcagggtaggattgttccactgtgtatacttgatgcatggcttttgatgtatctgactccttatctatttttgaacaacaaaacccatggatcgacctcctggatgcccttgcccaaacacacaggcaagggaaatgcactggtttcgcgtcttcttccgtaaaagtaataggttgatccatgagtctgggcctttgtgttgggagttgagtgacctcccacacttcatcgtgttttagggccctagcttaacactttaactcattcctgggggttcctcaaatatgaggcccaccaaagatcatggccactatcccattcagccgaggtggcaatctgggcgcctactgaagaaggcccctccgagaggtacttgtccctcaggcataccccccgttcctcttggaggtaatgggcctcctattggagccgggtttaagtgcggtaacctaattttgatccatttcatacaagtgacctaatcggattaggttc

SEQ ID NO: 222780 - DNA, 2284 bp, Cannabis indica
tctacaatcaagagcaaaaccaagaacttttgaatatgtcattggatctacttgaagaaagatacaatgagtcgctaataaccaatgtagcttaccaataccgaataacggatactttaacaaaagagttcgaaaaagattgtttaaagtaggagatttagtattaagacgtgtatttgtaaatacgcgagatccagcagcaagagtgttcaacccaaactggaaagttccatatgttattgaggctgtcgtagaaatcagggtttaaaaattagcttggcttaatagctcgctaataaataatcactggaacagtgaacatttacgaccttattaccagtagttttattatgtaaatattgtatttatctctataatggctgatcattgttatgaataaaattaatctgttcaagtaattacaaagtttatttccttttaaattacttgggggcatatatgcgtacaataactagattctacctagaaatatagactgtaatgccaaaaatctaaaaattaaatttttttcacaaaggaaaagataattgattaaaattgtctttggacagtataaagtcaagaattgaaaaactttttctttaaaagaaaagactaaaatagcagttgtaagtgagattttttctcataaaataacagaaagctatatgtgatatgagtaaataacggctcgcatgattgtagcatgtattgtaaacgaaacacaaatgtgccttgagaaataatacttatgctaaaaatatgaatagaggattaactcttcatataaaaaaaatcaaaaaatattcaagttagttttttaaaagaactattcaaaatatttaaagtttgtgttaagtgtagtagattacaaaattgctcgtaaataatatagcaaattataaactgctcgcgaaaaacgtgatagattattaactactagtctaaattatgatggcaacgatggaacgcttgtaacccaagaatattctaagctaaatcgagtaagaagaatgtttgattgtaaatttaaacgcaatgagataaacataaataacttgaaaaaagcaggataaaatgcataaaaataaatatatagatcagcaatgttggctatccaacaaagcaaaagtcaaaatgtataaaaaaaaatgccacaaggggcaaactattgtctcggcataagggccatatttctaaaaatatataataaagtctacatagttaggagacttagttggttctttttctttgacttcatcctcagcattgcctgtttcttccttcttggtttgctcgtagtatgctaacatctctccagccttgtctcccagaaagctcagatccatccctgagttggcaaaccaagctcgataaatggatcgcctagcgattgtgttgaccttggttttggcatcggctttggcctcttcaagctttctatcagcatcgaccttggcttcctcgagatttctatcaacctcagcctgggtagtcttgtttgcctcttcaagctcctggatcctcttttgggcagtctcaaggtgtctggagagtcttttgttgctctttagcctctttcatgattccagagatctccgattgtgaatcagaccattgcttggccaaaacctcacgatgttccctagactttcaaagttcggtgtcaagcatctctaccctttgaagacctctctgttgacccgcaaaagataagagagatgcatgcgagaaataaaaccaaaagaggaaatgtaaaagggaaagtataaaaaaaagggaaaagataagaagagaaataaaaactaaccgacaacatgaggtcataactcctcttcacgagacttttgaagctacccttattaattaactcccagtcgcattgttcgaaagtcttgtagtgctgccagttgttggtagcatgcagcgaacagatctgcgagccttttatgccaacatagataggtaggggcaggaaggctctaacaatgccatctcgggatgagaaccagaaacttaacttggtgaacggaccctagggcctgttcaccagcgctcgcaacaactggagcagtatagttatctggagtaggggtgcacacgggtcaagtttttgggttttcgggtggttgggtttggatttttcaggcttcgggtattggaaatgcataaacgaacccgatttttgggtgtccgggtgcgtcgagtatcgggtcgggctttttcaatttaggcgtagtcagattcgggtcttgttgggctgagcccgaatatttaattttta

SEQ ID NO: 222781 - DNA, 1247 bp, Cannabis indica
tttaagcacaatattcaaataattcaaactcaataagatattttatacaaaaaaaaaataaaaaattgagacaaagcctttcaaaaaatcaaagcttctgctacctcaagcacgaaacaatcattcaaatatcaactcgatgatacacgaacaacgcctaacttatctctataccatgcccaagccactgcaattgctcatagaacaaataatatcatcaatattaattttgagacaaccacggggggtccatttgggaaccatcggaagcgaaggaggccgcaactcaggcctactagaagagacaaccctgtcggctgtaatggagaggtagtcgctaccaaacgctacctattgttaaggtagtcacgagtccaataatcaataataagcatatgagataaatcaatattgttatggaccattttaatccttttgtaccaaattctccacataattgtcataactaattcaatcatctctttagcaaggggattagtaaatctatgaataaaggtaggaaatgatgattagtttcttcttccaatccacacaaagaacataacccatcaaataagagaccatgacgtgtcaaattgattttagtaggaatccaattatgggatacttgccaagttaccaacccactgacgactaccaacccaagatctccgaacgacgaacaaagccccatgaatgtaagtttttcattttattttattgtattatatgtaattcttttttttttttgtacaaattgtattatatgtaatctaactagggttgaaatgtataattttatttataggtttgttgattaggaataaattgtatgattaatatttgttatttgtgacttgatgttaaatttagggtcgaaaacgactggatctgagttttggacagaaaactaattttttcccaagctcaatggttataacctgatgtcttcctgttgttaaatgagtgaaggttgaagacgaaggtccgatggtagctcgatgccacctataaatgtaggatatggtccgatagtggcctgatgccacctataaatctaggatatgatccgatagtagctcgatgacacttataaatgtaggatatagtctgatggtagtctaattttagtccgatgacttcctgacgagcttaatgaatggagcttaatatccataaatgtagaatatgatctgatggtggtccaatggtagccttatactaccattttcttacgtacaaaaaca

SEQ ID NO: 222782 - DNA, 2684 bp, Cannabis indica
tttttttttcaattttgttggccattttattagtttttttttttttaaaaaagaaaatctctcttatatgtactctatttttaaatatatatataggatttttcttaggtgagagcactacttttgcactcaatatatgagggcgttttctttgtattatgattggttgtatttgggaggtgtataagcttaaagtgaattatagagcagtgtaaatttacttctttctcatctttgtgattatctttgatttatattcttttaaaaaattagcatcatcaccactttttgattcaaatcaaatctaatgaaacaagcaataaagatcaaaaccgttttttcacttcatctttaatccatatttatttttaaaaacaaatcatcttcttcaccaacaaataatatgataccaaagaaaaaatatatcagaaaaataaacaaaatatcataaatcaagaaatttttctatttttttagacccaatagttcatagaacttgaactccaattatattgattatacaatcacatctcttcattcaaatttaatttaatatatacaccttgaacatatacaaaaaaaaaataattagatctgacataatatataacaggttatgttcatatttgaaatactttttaacaaagtaatgtctcgatcgttcaacaatgccgatagaaaaggtccatcatttaacaggtttttcctcgaggagaagaagatcattaagttggagatgaagagttggttccttttcatatattgttttaatttattagttttattatattcttgtttaattttttacaaaataaaataattgttatttgctacgtggggttgagttggttatgattttttttttataaataaaataaataaaaattattaatcctctataaaatgcctcattgtaactaaataaattaacaccattagataccatcactacataatttaaaaaagtgagcatgtgtgcccttaaagagctctgtggcagttagtttaatcttttatttttaactgttttaactacccaatattcatcattatctctaattttccttcccccgtataccataacctcttattttgaattttaaccgttccctcttttttctctttgaatttctgcacctgcatttcctgcattcatgttattcccctgctcttagttatggataatcttctacatgatatgaatcatacattaattctaactgaatctgagaaggaagtttatacacttcctgatggattacacaatggcagttcctctcaatcgagccatgtcctttatgctcgagttgtatcttcacgagatttcaacaggaagacttttcgaattaaaatgagtagcttttggaaaggccagtaccctgctacgatcacagaccatcattccggacttttccttgtttcctttggttgccttggagatcttaagaaagtattgttgttggagccgtggcatttccagaatcaccttatagtcctttcctcacctactgcacttcagtcgcctacaccagaaaccatgttccttactcctttttggattcaattgcatagattgcctttcttgagtaaaacaaaagctatggctgaatgggcagggaacctccttggtacctatgtagatgttcatgaagactcattgaatgaaggttggggtccatttctccgatttcgtgccattttagacatttccaaaccattacttcgcgaaaaaatggtaaaacttaaagactcggttgatgaattctggttagaatttcgttacgaacgcctaccagagttctgttttgaatgtggcatcatcggtcatccttttgaatcttgccatcattttttggaagaaatctataatggacatgaaccttcccttgcatatggtccttccatgattggatctcctcttcctgaatctgggtatgatcgctacagaactgatttttttaagggaggagcatggcctttaatgacccgtcttgccaagaaatcttttgccaatgctattcctaatctgtccaagagaacacttcctttgcctcccaatatgactaacagagaatctgccacctccgcacactcaccctctcatttgcatgtctcaacttcatctttcccatcaaatcctatccctccatctactgcttcatgctttaattcatctgatgatgtcccagtaataccattccctgcctatctccccataacacctatgattgcaacttatccaccaaatactctccctgttcagtcagcatcacgcacaccatttgcacctgttacatctcctattttgcctccaaatcatagcacaattgtttccaccaatccatctgctactctgctgtcatcctcacacaatttgaaaggcaaagctgtacttatttctaaagatgaatgtgagaatattaatcctaataagcaatttaaaagacaaatggactcagaatctcttcgaaatgttctcaagcgttgtcgatccaatgctattcaaatccagtcggattcttcagcaccgagtggtatttacccgactcccacagtttccaacagcagcttcttggattcaaaagagtctcagcctgaaagttcagcggttgttgctccgcaacgccgcgctcagccatgaatctcataagttggaatgcccggggtttggggaacccgagtgc

SEQ ID NO: 222783 - DNA, 3150 bp, Cannabis indica
ttttacaaaacacagggttcaaaatgatatttacccaagttttttccatttttggttaagctaattggcaaaatctgctcatttagggttttctctctaaacttattgtagtcgtcgtcatcttctccgaccaaggcttaccgaccattcttggtatgtgggatggctctagtcgggcttatgttttagacgccattggtctgtgatgtggttctttctttcctttcgagttttctgcttttcccttgaaatttttctttttggctgcttggttttgaggcctttctgtcatggatataccttcgtttctctggtggtcacataagcagggtcggccctaggcataggcgctcgtgcctagcgcctacactttcgggggcccaaaaaaaaaaataaaaagtttcattagatttttatttaagtaaaattaagtgtattataaacaataaatatttatagtttagtttgttggggtgtatggtataatatataatgtcatgggttcaaatctcatgacactctttttcaatgtttttttatatatatttctaaaggccccaaaatttaatttgtcttggcctatattttttcagagtcagccctgcacatatggtatggatctagtggtgttcgactgtgtatcatgttttgggttagagtctttgggtctgactcaattaccgtgggggttggactgtcatgccggatatgggttggtgatggtgatttggcagagtttggtggttaccgatgggggcttaggctgggtcgaggtagtggtttggggtgtagaggggctacaactagagaaatttctaggggagaggtgggtatcgaagatttcacaaattggctttatttggtcatcattgcattttttatttctatgatgttattattgatgttttgttttcatcctttatgtctattttttgttttcaatataatggtgttgcaacaccactttgctattatttttataacatggttaattttatgtatggtaagaacttgttgtcttgtttcctggtgggttgtttgtgtgcagaagattggctcatggctctcacgcgtaggtgacatggttaccactctccatattcagatttcggagattctcatatgactattagcctcatgttttatggatcgattctttaataagactgtcttaggcatggttagtcatgttatttctttttattcatgtttgaataatcaggttgtcattacctaatttttattagaagatctttggctgatagtcattgacaggtgtgatctgtcacatatttattcagattagaggtctaccattctccgcacttctttgatgcatattagtcccttattgaacgtatggttgtgctgtggtagttcgagatcttgataagtaacaattttcttgtggtggatgaggttgtgcatgctatggtccagtctccttgggtgtcggtcctagacggacatagttatcatgggagacggtgcaccatctttccagccgatgtcccctaggttgaggtccctggcgagcatagttatttcaggagtcctcttgcttgtctcgagggggttgaggcaagtcttgacttggaaggtgactaggaggtgactccctttgtcgtgacctccctctttgggatggttgatgtggtggtggtgcattagtacgaggaggctcaagatgccttattggtgatgggggaacttgattggcgaaggagggttccaaacatgatttcttcccccctcatcaacaccaatatccctaggaacaggagacatttgagaatgtgagactacattattgtgtgttgtgccccgttcctcacggtagcctctccgtaagggatgtggagtatcattttgagggatagtaggttcttatgcgtccctccgaatttgttgttgtgtaggagggggtgtattgttccttttttcctcacgacccgaggtttttacaaattgttgatgttttgatggaggacactcactcctcctgccatgggtgtcgttctcatgagaaggccattgtggtatggtattacgggtagtatcatgactttgggttgttcgtgacctagaactctcttggcttttgacatggtgatgtgtagaacaacttccacggggtcgctcccttcttgccgtgccgggatgcccgcgggctccacgtcatggtggccttgtggcctcttggcaccatatctctcttgccactctctattgagtctaagagtttcatcctggcgttggcacaacaccttattttccatgaacacctcatgaacattggtggtttgcctcacaccctgagatggtgatgatgaactaccagcatctcggacctgaccttcgtcgtcatgcatgggttgtttgcctgggcgtcgagaggtcccattgcaagcgggttcagcaggttgaaacttttcatgttttcttcattcatggggtcaccatggtcttcctcctcataattcatccgtctcgtagtcaccatgatggtaagtggtgattaacactcgtgttcactgctctcaatgaaagtaccaaactgcaaatatccaaaagcaggccatgcaaaaatccaacacttggctagacaaggctgcacaacagagactacaaataagacgagagctagaaagtccctatctgaccggatgtctgcacagggacttggggggcaaatgttatcccaatttttttctcatgacatggcatgcttacgtgaacagaatcagtgccacgtggcaatacacctcactaaaaggagggtcaagtaaacacctgagcaaatgaagaccccgacactcaaacagggatcaaacgatagagtagctccctctgaggagctggccggctacccttggcgggccagccttggacagcaccatggttggccagcctggccatcacaagggcctggccagccaggccatcacaggggcctggccagccaaggagtgcattgtaggcttttctggatagctctgcacgtgcacaacagatatggctgcaaattgggccctaaaaccccaacagaatggctgaacaatatctagattcaatggcactttagtcttttgtacttatctaacaaactatgtaaatatttaggatataaacttgtaatctagggtttag

SEQ ID NO: 222784 - DNA, 3956 bp, Cannabis indica
gataatgttcaagaattggcttcaaacaaccccactcaaatcccatctcgctatcttcagcccgaaaccctacttgatcaaatttccgtcgtagaaacactggagctacccgtaatcgatatgaccaaactacttgatcatcgccatcatgaattggaaaaactacatttagcttgtaaaaattggggattcttccaggtattataacacaacttaagaattgtattatatatcatatttttatatagtttgttttaattttattaaaattatgttacacaaacaatttaatataatactatataatataataaagcgcgagttcatcatgactaatttttcaatgatgatgaggcagctaatcaatcatggggtttcagaggaagtgattgagaaaatgaagattgatatagaagaattctttaaaatgccattagagaagaaacaaagttatgcacaacaaccaaacagtattgaaggctatggccaagcttttgttcattctgaagaccaaaagcttgattggggagacatgttattccttatagctctacctctctctcacagaaatatgagatgttggcctattcaacctatttcttttaggtacaaaaactaaatcttcactatttccctacacctaaaacaaaatatgattgtcacccttgataaatttttcagagaaaatctagataaatactcaagggaagtgcagaaagttgcagtttgtgtaatgaaattcatgtctagaaacctgggactgaattctgaaactctagctagtaaatttgaggatggaacacaagggatgagaatcaattactacccaccttgtgttgaagctcacaaagtaattggtctcactccacattctgatgccactggattgactctgctgctacaagtgaatgatgtacaaggtttgcagatcaagaaaaatgggaaatggatagttgtgaaacctgtgccaggtgcattcatagtcaacattggtgacatcattgaggtaaattaagtacgagaaaattacacattttatctgttttaactttttttcataaaaattatttaatgaaaaaaattaaaattaaaatatgggaaaaatagtttacggtactaccttatattgttttgggtaaatactattttaaactccgtgttttgtaaaagttactaattagaacttattttgttaaataacaaaatagatcctatatttttgaaaatagtaaaaataagaccctgaactcaattttcaacaattttattttttaatataaccaactttaagataatttctaacttgaacagatacaaaaaaatataaccagatttgtcataacatctctaaatctgattattattaagttttattttgacaaaaaatcaattcagggttctatttgtataattttgaaaaatacaggatcctttgtcatttaataaaacagaagttccaattagtaacttttgcaaaatacatggtctacaatagtatttatcctattctttttctttttttttttgttagcttttttatatatattaaaaaaattataaaataactattttgaaaaaaagccacactttgtaaaaatgaaaatggatactctatattgaccaagtgtttgttgtacttgtacatatcattaccaaccaattatgtatatatgtagataatgagcaatggggagttcaagagcatagagcacagagctgttgtgaacccagagaagcaacgtatttcaattgctgcatttcatagtccacatattaaaggcattgttggtcctttaccagatctagtaaaaaaacattgtaaggctaattataaaactattagtacagaggattacatcagacttattgtcactaacaagcttgatggtaaaacccaactagattttctgaagcaagaagactagttacttaaataataataataagaagaagaagaagaagaaataatgttatatactatatagagcacacactgtcattttatggctcaatgatttgaaatggcacctgctaaaagggtttttttttttttttttcatttcctcaaactgtgtacagatgataaatgggagtaagagttaatatcagccattatagtcagtgtccatttatattattcacaagcgtttttatgggattaaataattaattacaccaatattagtatagtggcttaagaatgtttaaattaaaatagaatggtctttccttccatttcaaaatggaatagtcactccatcaaaatagtagaaaagtcattctaatgttttaatatgcaaccaaacaaaagaatgaaatgaagattgtttccttacctttccattctatttcattacctccaaccaaatgtcaccttagagattgtgtaaaaggcctatcactttgttagcttgaacaaaatgtggacacaaaaaaatatattattttttattcactaaaaaaaaagaaaatttagggatgtaacgggacagggcgggtgccgggattgctcccccacccttatacccgctttctaaattcaccccatacccaccccaatacccgtttaaattaaagcgggggcggggcgaggattacccgacgagagaagaattcccatcaggtacccattacatatatattttttaaaaataaaaaaaatgtctcaaagagaatttagaaataaaaaaacaatcataaaagcttagtaaaataacaaacataagtaaaatagtgtgtatagtaataaatggagtaaataaatacaaaattggtaataaaaaataaatggttcagtatcattattttaaagcagttaagtgtgattataaatatgcatcaccacatacatttttatgaaaactaaaacatctaattactataatcaataaaaaacctaaagcatgaagttattttcattgtagtagttatgattttaaaacttaaatatatacatatattatatcgagatgggttcggagcgggtatctattctcccgccctcgtcccgtttccgactcgggtatgaacatttaaatccatacccaccccgcccccgtcccattagaggcgagtacccgcagatagttgaacccgcaggtataattgtcattcttaaaaatatcagttaaaaaaaaaaagagagagaaaataatttaatttgtgctaattttattttttgtggtcgtggtggtattaaaatttaaagtatatataaccacgtgccattacttatgaatattaaaatcacccaataattgtaccaataataaaagtaggcttgacccttgactccaaagatgtctagtgatcttaccataacaaaaaagcaatggaaactaagtttagctatggaggttctctcccagttgagagtgttcaagatctagcttcaaaaaaccagacagaaatcccaactcgctatctccaacccgaacccgaactccatcaaattcctgtcctagaatcacttgagctgcctgtaattaatatgaccaaacttcttgatcatcaacatccattacaccatgatgaattggcaaaactccattcagcttgtaaggaatggggattctttcaggtaataataaactcactcagcttaatttataatattaataataatttacctcttagatgcaaattgaggattcaaagcatctccaatgaagatacaaattgatgatctattgttaaaatataactcattttgtaaaaatttgctctaatagtgtgccaaaagttatctaaatttgccacataacaaaagttgatccaaatttagatcacaatatgcattttgcatccaattatatatttacttttatgctatttttaatattttattaataaatttagttgatgcattcaattataaactttttatatttaatttttattaattaatataattaaattaataatagagttattatatttttatacttttaataaaa

SEQ ID NO: 222785 - DNA, 1246 bp, Cannabis indica
ctaatgatgcaaacattattgggttgaagtcgcatgattgtcacatacttatgcaatgtttgctacctattggggttcgagggtatttggataagaatatttcaacgacaatcattgaactctgcacattttttaaacagctttgtgctcgaactttagttgtggaagatatgagaaaagcaaaagaacagttgatacaaatcatgtgtaacttggaattaatatttcctccggctttttttgaaacctgggtctcggttcgaaaccaggttcggatccgtgtctgggtcccgagttcgattccgtgtccctgttcgtgtccgtgtccgggtctggagtcccaggtctgagttcgggtccaagtctaggtttgggtctcggcacctgattccagttcgtaactcgcattcgggtcttggtctgggtcccgactttgagtcaaatttgggtcccgggtttaggttctagtctggattcaggtttgagtctctttcgggcccaaagtttgagtctaattttgggttcaggtcccgagtctcaggtttgggtcttgtaccgaatcggacccactggacccggacgagttctggttcgagtccgtaggtgtcggtccgagtcatgagtcctagtctagctccggagtctccatcccagtccgggtttgggtctcgggtcgggatgttgtgtttggatccgggttcgggtctgggtctgggtctaggcctgggtcccgggttcgagtatgggtctggtctcgggtcccaagcgagttcggtctgagttcaggtcctaagtctcaggaggtttgggttcgaggtttgaatcttggattaatttttttttaatatattgaaattggattaaattatatcatatctgatccaaaaaaaaaattaggcggggtggagcccaattaatccgagattcagtaagtatctgaatgttttggatgagaagtaatctgtcacatcggagccctgacccgctccaattataaatttttttgacatccctagatataatattgttattagtgcaactcaatatatatcaagtcgtttataaaaaatcactaaatattataaagccacacttcatcgtaatgttaaataccataaatacttcataacaatattcttctatattatatataagctaggctaacgtgttagtctttttcttttttccttcttttttcttaaagctaacgtgttagtcatgcatgcatatacaatattatatttat

SEQ ID NO: 222786 - DNA, 1534 bp, Cannabis indica
ttttttaatttctaagagtactatgttaatgtcactacaagaatgtacacttttactggcataataaagtatacaattaccgacgcaagtcaacaaatgcgccagcaataggagtcaccaaaattaatccagttctctcttttgtcggcgccatttcttgtcggtaatagtaacttgtgctggcaaagtaccttaaatttgccggcaaatgttggcaatccaaccgccaaaaggtgggaacttttggcggttcgaatcaccttttgccaaggaacttaaatgcgtcggcaaaagttaaaaaatatttattactttttgccggcgaataaatgcgccgacaaaagtgttgaaaaaaaggctgtcaaattccctcgtagtgaaaaaacatgcgcgccaaagtaggtgaaaacttttgccgcgacgcacttaattgcaccggtaaaagtattgacattttaatgaatcgacatgttgcatcaagttttggcttttgccggcgcacaattgtgccggtaaaagccgtgaaattttttggcggtcaacttcccgcctaaatgaaaacgtaagtaaaaattttgatgggaacttttgacggcgcactaatatgcgccagcaaaagttcccacattaatgaaacgatgtgtttcatgtttatttgttcagcttcaacttttgtcggtgcgcctaagtgcgccggcaaaagtccaagcggaataaaacctgggacgaacccctcccccattttcctcttttttttctctttcttcttccttagttttctctgcaactcctccgacccaccaccgccgccagcccctattttccccataaactaccattttcaccatctcaagcccttattttctccaccggatcagttttttctctttttcttccttttattttcaattttattctaaaaaataaaaaaaaaaaaaactaccaccagactccaacgaggacgtgccaccgcaccttcagcaaccgctgcttgagcctccgattgtacgttcttcgcatttcatcatttcagtcaaggtaacctatattttatttattttagctttaggcaaatggttgcttcttgcttgataaaagaccattcaaggccccttctgtaaagaaattgctaaagtattcgttcttcaagcaagcttgatcaaatgactatatccaaatgaagcttttagagggacttccttttcttggtgaccgcattaagactttattcaatagttctattctttattttagatggcactttttctttatttttcgcttcataatgtttcctttaaattttacaaaacacatacattgttcctttgaatttttaagaaacaaagaataaatgttatatattgttatgacttatcataaattatttctttacattaaggataactactgcatgagtatgtatatattgagattaacgtactttttattattaagaacaatatacatatcataaggttatagacacaactattttacttaccaaatacaccgacacacaatttacttttataaa

SEQ ID NO: 222787 - DNA, 1140 bp, Cannabis indica
cataatttagtacatatcaaagttcaggggacaaaaattctaattaacctaaaaaaaaatagtataaaatgttgtcttttttatgtacattttataataacaaatctctcagtattttttttaaaaaaaaaattattattgaacgatgatgtgatgtgataccaatttggataatattatttaaacaaaatataatagtcttctaataactcattcattgctcattattttattgataattaatgattctcttctctctctctgttttatttttatgagtttgtatatattgcacatttctatttttaggccatatttattattctccactagactttgatttatatttgaattgtacctttaagttagggtataaatgaatataacaattatgttatttgatataacggttgttaattataaaaaaattaaagtacatcaaatcaaacctaaaaatatatatatatataaccttaaatcaaaatatataaaacaaaccttaatgtaaggggacaaaatctattccctacacatgtaatcctttgataattaacaagagccgttaatcaaggattaaactagactaattacaaattaatatgatctagagtgttaggtttattcaagttaacgtacataatggaggatatcattatattacaaattaaacctaaaaccatcattaattatattagatttactttcaaaaataccatcctttaattattcaaaatccattaaactaaccaaaaaagtgatccgagatcatactatatgtagttgcatgtttctttagatttagatatatatatttttaggtatgtttatagtgcactcttaaatgggtatcttcggtggacttatatatttcaacaataaaagatttaattttttataatcgtgtgtacgttatagttatttaggattatctgtaaaattttaaaaaattctaagtaagttaaaatgttgaaaataagatgcatataatttcttgtatacaagactggcttttttttttttatacgtgtggcattgtttaaaccttattctcggtattataaactattcagatttttttaaaaaaatttataagtagaattttataaaaaatttatgattagaattttttaaaaaatttat

SEQ ID NO: 222788 - DNA, 1983 bp, Cannabis indica
atattaaactttacttactctactatcatattcatttaatatgaattatgtagtaagagtttagaattatacaaaatattatatgagatttgattatatatcactattatttatactttactttattaatatcaataaagttaaataatataatttccaattaaagagacttagttaatttattgaggtgagtagtaataataataataaaacaaaatttagaaagttttttttttatattatgattaagtgactaaaaaaggtaaatgagatagtaaaccacaaaatattaaactttgcttctctactatcatattcatattactaatatgaattatgtagtaagagttagaattatcacaatattatatgagatttgactatatatatcatattattttatactttgactttattaatatcaatgtaattatatatgtttgtaaggggcaaaagtggtatagtaatatcacaccattatcacacttttataatagtaagatataaataatattattattaataaaaaatttattatttataattatcttattattttttagccattaagaaatttatacttctagggtgctaagtcaaatcctgtatagtcttaattacttcaatacatacactatcaatttatcataatattcccgtcaaatctaccaatgaaacctattatgatattttttttgcccccgattgagtctccaaggtagccaaacttaaaaatatttttattccacatatagctcaaattacattcacacatgctatataaatctccgtaatttataaattacgcttatttattcacttatagcgaatttaaaaattatgttaaactagattagtaggataaaaatcccacttaccacctaattaacccataatataattataaattctaattacttaccattaggcttattgagatattacaaccatcccttctttataaaaatttcgtcctcaaaatttacctaattattttggggatatagctcatgcatttgcgactctaattcccaagtcgcttcctcataaaataagttgtttagagttcaatatcatcgtaactcaaaatacatgtcggatttgacacatactttctcaacatagaaatgtggaagacattatgcaccccggacaatgcgggtggtagagctaaccaataggccacctggcctttctggtccaatatttcaaaaggaccggtgtatctagggcttaattttttatttttctaaatctatgcacccttttcataggtaatactcaaaagaaatactgagtctcccatttgaaatttaatatccctacactttaaatcagcgtagcttttttgtatgctcaatgaaatgagcatacaactcgaactcactctatgattttataagttccttggaacttttcggtccatcgtgttcttttatcacctgtgttactccagtgaacaggtgcccaacatttttctcgtaccacacttcttaaagtacctttatcaaatatgctcacaacacatttctattattccattgatcctcccagattacccatctttcaaaaatataaaaaaaaaatattatgctatcttcacttcaatccccatacttctcgataaccttcattaatccttaacatcataagcaaagatatcaactttgagatttcacaagagtagactattctttttgtatgaattcaatatcctcatttatcgtataaattgtttacactgatagacaacatgttagttcggtatgtccaactattattactcggtcgaaaccgtaagatcccacagtacataattcataattatgtctttctattcctcctatgggacctcctaaactgatgtactgacttaacttattaacaagttaagtattcgtttctaatagatattcaattagaacatttcttacttccaccccttttattaacctcttacaattcctcatcaattttgttcac

SEQ ID NO: 222789 - DNA, 2000 bp, Cannabis indica
tacttgttctgctccttctgcaggattagatatatttgctatcacaagtaagagttcttctaccttctacaactcctatcattttacttagtaaataatcacaggagcattgtcattaggcaccaatgttgttcttaacatggttataattacagcagcattgccattaggcaccaatattgttcttaattgtgtcattatattgtcattagtcacgacgagtgtcttatagcatttctcataatgacggatatatagaattagaatttttctatgaagttttactattgtcaaatcgtgcctactaattgaaaatatatctttgtttttttttctcagtgtcaaaaaaggactatgaagtatttaatgttgttgaatgcattttggaaacatcaaaccttcatgactcaaagtataagagtgttttattcaacttcaactacactcataaagcaatattcaacgatttatacagcaagaaacgggtttgttcttcaatcctatcacctttattttcaattttgaaatctaaatttggtttatttaacgcaatagtattaaaatattaatttagatcaatatcaccttcaatttacatttagttattcgacaatttgattatcctattcagatttccaactataacttgagaaggaaggttgtagtgttgttcattacagatttagaccctgagctcccacttggatttgaatatgcaactttgaagagaatataccatgaaaagtgcaacaacccaaccaagagtgagagtcaattcgatttagtttgggtaccaattatggatcattgggctagtgaggatggtaagacttttgaaagccttagagaacacatggaatggtattcagtgcaccatcctttgatggtgcctctcaaagtaataaggtacataaaagaaaagtggaactttaccaagaagcctctaattgtggtgatggatacacaaggcaaaattgtgcacagaaatcctatccatgcaatgtgtatttggggtacccaagcatttccttttagtaccgatcaagagacattgatgtggaagaatacaaaatggtcaatcgaccttataatggacaaccttgagccagatatgcttaattgggtaagaattttactctatgagcatgaaattaagtacaactacaaacttattattaattatgttttgttttaggtgcaagagaataagcatgtgtgcttgtatggaagtgaagacatagattggatcagaaatttcacaacggtggcaaaaaatgttgcaagagaagctaacattaccttagagttaatttacgttggaaagagcaacccttatgataaggagaaagttaagaatgttatagatataattgtacaagagaacctaagcagaacacttgagtgggacaacatgtggtacttctggatgcgacttgagagcatgtccaaatctatgaaacaacatcttaagcccaagaatatgatgaatgaccctgtaattaaagggatcgatgcaatgcgtggctatggctggggggcagtgatcggcatgggacttagcaagatggttataagcactgatattttaatgctcaatgccttagtctcatatgataagtggaaatcaaggaaggacttaatcgggtttgtgcctgcattagaggagtacctcaattcgccgttcaggagtatcaggagtcttggtgagtcatttcataaatacccaatttttctatataataattcgggaaaatcatatgcaatgcactccactatacctgtagtggaacttactttctttcttttaacatatgtatggtcaaattttttacccatggtacagagacaaatgcaacgcccttcgtaaaaaaatggatctattttcaaatgcaaataaatagcatttgctctatcccctccattcaaagtgttacggtgaactgtccacgtatacacacttgtacacgtggcaaatttttttagtggtacacgtaatatta

SEQ ID NO: 222790 - DNA, 1721 bp, Cannabis indica
ttattcctcgccggtaaaaggaagttttaccggcgcagttactatacgcgccggtaaaaagtcctttaccgaccaagcttcccagataatctttgccggcgcacaactgcgccggcaaaagctggttttcttgtagtgtatattgtactgcggtcaaataggttgaatataatatgcatgttaaatcagtttgaatatcttaaatattcatttgtagtgaagtaattaaattttgtgaatacttatactgcggtcggatgggtggtaaatttttgtatttttaaatattattgtgattgttttatattatttgagattgttttttgttgttattaatagctttaaattttttgagaacgttcaattatagttgttatatgctgctgaaattttggtaaaattaagtttagttactagttagtaatttagtatactatacttagttactagttattaattttctaagtctcgaggcgtttgacgcataagccacacaaattagttactagttatgaatacaatatgacataaaattcaaacataccaaagatgtatcataaaacttaaactaaagtaaagataattatgtttctagaactagaaccctaaattctattatcttagaacacacttgactcataaaattcaaattaaaatattaatggaaaatgcaatgatgattagaaatcatctaagtcatcatcgtcacttgttttatcttattttagattattttttattgttattaataaatttaaatttttttagaaatattccattatagtcattatgttatcaaaattttagtagaattaggataaaattatttgatataagtttttcttaaacttggttgttagaattttctgttaatttttgttatggataaatcatgcatgtgaaggatgtatgcttggaaagcaatcccgaaggagttttccaaaagagtcacaatcaagagccacaaagccacttgagctggtacacactgatgtttgtggtccaattaaattaaccaaactcatttggtaaaagtaaatacttcctcctctttattgatgattttcaagaaaggtatgggcttatttcttgaaggagaaatcagaagtgttcgagaacttcaagaaattcaaaggtctagttgaaaaagaaagtggtcttcctattaaggccatgaaatctgagatctgaccgaggagaaaagttcacatcaaatgagttcaacaaatactgtgaggatcatggaattcgtcgtccattaacagtgacaagatcccccccaacaaaatggagtgccagagaggaagaatcgaaccatactcaacatggctcgcagcatgctaaaaagcaaaagaatgccaaaggagttttgggctaaagagatagcttgtgcaatctacttggtgaatcgctctccaacaagaagtgtacatgagaagacacctcaagaagcatgaagtgaaagaaaacctggaatttctcatctcagagtctttggaagtattacttatgttcatgttcccgatcagaagagaacgaagcttgatgacaaaagtgagaagtacatcttcatcggctatgacttaagatccaaaggctacaagttgtgtgtggttattacctttttagtctggaaaaacctgacactatatccctacagtgacacgcaaaaaatgagtgtaataagtttcagtgacacgtgtggagtgtcactaaaaact

SEQ ID NO: 222791 - DNA, 1196 bp, Cannabis indica
aaagtcaaagacacaatctttctctctcatcttcgtcttttccacgaaattactcatctgggtttccttcattttcccggaaaattcgtctgaagagagaaagtttgctcctttttctttctatgatagtttttgtttgttctgggtttgctttgcttttggtgtttgtttcctgggaaaatgaaaagttgagagaaaattgaatagttttcagttttggatcttcaaataaataaataataataattttaaggttttaatggttgaatagtgttattaatatttattcaaacttgtattttgaccaatgtgcatttattattatcatttggtcatggaaaaaatgtttggaaaaactatgaaacctcaatttggaaccatttaagacaatcacccagatattaataataagacaatcacccagatattaataataatcatgtgatcaatgcatgatcaaaccacctcgcaaataacacaacacaaagatttgatcaagaacagaattaaacaattgcaaatcgaacaaatcaactatgacagaaaacagtaaaaccagtaatgcataaaccagtaatggaaactaaagtataacagaaataggcaaaattatcaatgacaagaaaataagagaagagagatcaaacacaatcaattacgaggttcgaacaagtgatatgttaatcacttgcctactcctcggccagaacagccccagtggctttgaatctttattaatgctagttgagagagaattacaagttgtttacaaggtgttttcactaacacatacactcaagaagccatgctttaattacaactcatctcactagaactctctcacagttttactgtctaaactagctctcaaagatctttctctcaaccttgtgccaaatgattgtaactaatggctatatatagcctttggccttgtgtcttgatcctaactgtcataactgacagttaggtaagttagttagagttagttgctaacttcttagccaaatatatagacctctattagtgaccaaactcaacaattatccaccttggtcattaatagagagcatgatgatgaacagggactgaactggacttgaatcctcacttagcaattgaggatgtttagcaagtctaggcaaagcctaaacttggctaaactaacatattttgtcatcatatcaacagggttc

SEQ ID NO: 222792 - DNA, 1752 bp, Cannabis indica
ggtaaaataatttccaacatgacacacatccaaagcaccgttagtacaactagtacgatctgacatatcggtaaagaccacatggaaaatatgccacctaccaatctaacggtgggggtttatcctcatgaagattcagcaacaatgatccttgcaagggaccagcctattctcctttaatcccttcgtctctccatcgaagaagaactcttcataaacacatggttgtaattctattaaaaattctaagatattcctactagaaaagtccatcctttttgtatttgtatcaacattcaccggccaaagagcacaataaaatggactcgtggactaaggataattaacgcctgaaccacgtaaaaatttgttgtctatattcttgccatttatacttttattactttcttaagctctataattatttggttaccgaaaaagtgctttcattgagagctaaaaaaaaaaacatgcatggcggttaccggcgcgagaccacctggaaaaaagcccgtgtaagaaaagaaggaagacatcctgaccgtacgtcaaagtacggccgaaggccatagatgtggtgttgcccaaaaagagacttgatgtttcaacctactcaagaaaggaagcagtgaaggcaagcagtctcaaaacacgtgctgcactgacacctatcctcaaaagctcagatctggccagccaactatctaggtgtaggatctgccaccggtatcctcaggctcagatccactgccacatcactgtgtgcagataaagtagcgcaagaggtgctagggccagacgaaggagcgaagacacgatgcagttacgacgactaactcagttagggtcattagatgcaatgactctatccaactagagactccagcgctggcatcgatgcgagggccagatatgtcttccagccactagtttctctgccttttccacaggtggtaaagttgctcagaagtagatatagcaatggaggtgctgagagcaaaccattagtaccatcgacggctactgggttaccggtgaggcctggttatggtactgtttgtaaaagcagacaacttctggcaaagtttgccccatgtcgttcccgcaacctagtgtagctacaaccccatagttatatcaggggaagcaactcgagacattataaactaattagggatcccttgcgacatgcttgtcccattggaagtccgagtcttcgctttagagaccctcaaatgcctgtgcctcgccgaaggaaacagattgcctaggatatcaaaaggtgtaagcatgcaccttaccgatgtacccatgcacatcccaaacctcccccaaactgttctctagacatggaagatcattgggattgtcgcgtgtcttcaaccgtctatcccgaaagaggagggtagcttgaagtcagcatcactcacggaaactcttccacccaatgatctttttctaagcttgaatttttatacagttttagccttctatctcggaagtggaagctttttacataaaaattccacgtgaatcttgcatgcacggttgtgtaggaaagatcactgatggtacgatacgtcttcaaccctcgttccctaattggaaggactgcttgaagtctatcctacccctcgtgatgcttttccctttgatcttttcaagtgaagtctaagcatgagtttttatacaacttcaacctcccttctcggaagctgaagcttgttacataaaaataagataagatataat

SEQ ID NO: 222793 - DNA, 2413 bp, Cannabis indica
aatggacagttttaagtagttcagctctaatccactgccagaacagccttgattgcttggcacaatcttattccaatatttgatgatgatacaaatggtagcacactcgaaaccaaacttagttgcttaacttctttacaaccaaatacaagagagctacaagatggcagctctcaaagaaactctaatacaattgttctctcaaacttttaaaaccttgttaacctcaacttacaaggcaacaagctcaatgattccataccaaataccatgagtacaatgaataaccttttggaactccaacttggagaaaatcgaccgagtggatacattccaaagatgccaccatatttgcagatcgctttgaatagcaatcgttttgaagggcctattccagaagtattggatctctcagataacaatttcttgtgatatttcagaatcatttgctaaaatgggatccttgacacagttgttgctttcaaacaataatctctctggagtcattccaaagtttaattctaaggtcatggttgacaaaaggaaacaggattttgatttctgttatagagccaacaactcttctgccatctagggaaaatatcttagtggttgtaataactcttctagttttggcttctgtattggctgttggagcaattttcatctgcataatgttagtcttgggacgaaatggcagggttattcagattggaatgataagatatttaattggggcagccatgatagatttggaacagagcttgaggtctttggcaacctgaacaatgccaatgttctaacccctttggcctatgttttgtatgctgacaaggcttatctcttctatgagtattcctcaaagggcaccctttttagctcgggaatgtgctttggactgggtaatagtattagatacagtatagcagtaggagtagctcaagaggccttgattttcttcatgggatttcctctggtccaatcctccttcatttatcaagcaggggtatcattttgaagtccttaaaagagccccaggtgggagaaaatagaaatggagctctacaagggtattgatgtatcaaagagcacaggatgacaggaactcaagaagcgtttcaactatagatggttctgtaggtaatatccctccaggtcagtaaaatgtgaagtcaacttacttagtccaactgcatactaaatcatattccaatacacatgttcagatatagaagtaattggaaatttttttaaaatgatagtttgcagagtatacatatacacaatgagggtgagaatggctgtaaatgtttttgcattgcagctttggagtaatctgctgggactgctaacagtaacagcaaaacagcagttaacatgcttgattttagcaataagttcagtagaacatcattctcaactacaaaccagatgcttgcagacctaaaggttttctattgattgtgtttgcatatttccggaagctaggctgaagattaagagtgttctacacatgattgtcaatgcaagttaagaggaaatactcactgatttttacatgtaaaatagtaatttgagtttgtttagtttctactatactagggatggtgaaaatttgttgttagctttagaactcttgtataataatatcttcacttttctagcaagtgaaaaaacagaaacataattgaaacgttaaaaaagattatattctgtagtgtaatttatttcgtcctaaattagccattctcccatatctatttcacattgacaattagagaatcatattagcaacaagtagcttatgttgctaacttataaacaacagatctaatcgaaacagaaaatcactcaattttacatattatcatggatagtgggctattagatccacgtgaacagtagcaccaaaaaattaatagtaagtgatataaaaagactgccaattaagtgagtaaaagcattgcaacaataggtagaaaatttgtaaaactcccatattcatataaatcaaatctaatccaactttcatgttcaataactgaggacaaaaataataaaataaaaaacaagaactaacataaagacatgatactaaaacaaaatcttaaagtagcaaaaaaggtatcttcttaagaatcaaaacaagagtttgcctaatcgaaaagtgagaatcccatatcatcatcactctcttccttctcttccttcttctcctcagctggtgcagcctcaacagcggctcgaccactgggggctgcggcagcagctccaccggaaaagacggcaccaccaccacctccaccaataattacctgcaagataagaaatttcatatttaatatcaacatctgattaggttttccaatatttaaaaattaactatttaggcatttaaactaaacatcgaatc

SEQ ID NO: 222794 - DNA, 2256 bp, Cannabis indica
gtttgaacttagataatttcactgtgaaattattccataggggtttttggtttacctgttgttgaaataagatgtatgagggtgattgaattaccttttttgatcattgtgggtttgaagggttcaacaggctgcatttggaagaaatagttatgggattgggataccagttcccatttgaatttcttttaagcctaaagggaaacacctgaatatgggctttagggtggttgaacaaaaggaaactgatatgatcttggatgatttggggcctaaaagctattgggaggccaatatatatttgatactgtcaaattcgacatttgtagtggattggtatttggctgaggatgttgtaaggcataatctagagccaccatcatcaaatttggagaagtgcactttggaggagctgccataagattgtggatttgttgtagatgtagttgtcaatccacatggtcatcatgacctcaatgacatgttctacaacaaatttcgcaagtggggagatttagtagcacaatgggtggatgaagaggttgattctcgtgagtgcatcccctaaccgagaaatactattttttgagacaataacaatattatcatcatcatctgagtctgagtctgaggaagatgatggagatggagatgatgatgaatatgatggagatgatggtggagatgatgatggagttgatggagatgagggtcccgatgaagactttgaggatacgatagcctttgttgaggagcatttagctcatttggatgatgatggaggcatgccaagattcccatacaacccacgcctaatgcactacaaagtcctcctctaccagatgttgcaccgactgccaggttataattatactttttttatgcatcacatagattttaatgcattaaataagttgatattattgataaaaaatgaataagttgatactacattttacaggaaattaagtgaattaactggtgattcagaggttgtgattattggtgtaaaagaaggtttagaggagaccccaagatgtaaaagactcagagagaggaggatgaggcatgattcagttgcacccaaagatatgtaagctgaccaaatgatccaccaatcccaactgaaattgaaccagacattatctcccaacttgcatttgagtttccaacccaatctgaagttgaattttatcccagtgtgacttattccaaccccaacctgaacaccaaacagatttctaaactgagccacaagcagacccccagccaaaccaccaaattgaggcacagattgacccccaactagaccaccaaaatgagccacaaactgacctccagccaaaccaccaaattgagccacaaactgacctccaaccaaaccaccgaattgagccacaaactgaactacaaactgcaccccaaactgagccacaatctgaactacaagttgcaccccaaactgagcccatacaacaccccatactaaacctcaagcaacaccccatatcgaaccccaaacaaaatccgagtcacaaactgaaccacaggttagaattatgtttttttttatgcattttatagattttaatacattaaataagttgatgttattgataaaaaacgaataagttggtattttaaaactgcatagattttaagttgatactttgttttctttgatttataggaattaagtggattagaggatactcgtaaaagattcagagagaggaggatgatgaggattatacatgattcagttgcagccaaacttttcagctgcacccaaatagagccacaaactaaacaacaaatagagccccagacagaactacaatctgaaccacaaactgaaccccaaatagagccacaatctgaaccacaactgtaacccaaacagcccaatctgaatcgcaaatacaaccacaatttgacccccaaaatgcaatcctaacagcccaaacaacatcccaaactgcaacccaaacaacatgtcaaatagcacccgaaactgaagttaagtttaaaatgcatgaggaggagtataatactgaaccagatgtggagatgaatgagaatgtgcaacataagaatttttcttggtggggaaggaacactgagttggttcatgtaaatagttttgaagaagaaggtgatattggtcatgaagttaaaatggaaggtgttgttaatgatgaagagaatgaaggtgcaactccttataaggttccatataatcctgagacaaaaatg

SEQ ID NO: 222795 - DNA, 1801 bp, Cannabis indica
tgttagattgaaattgcaaggaacaataagagaattgaatttggtatgaaatattatttgtggatgtctaaattatcaaattaattattgttgtattttttttattatattaatttagtttcgtatttttttagtcatgtttttatataaataggagttcatcaggggcggaggtatacattaggctatagaggccatggcccccccttaattttcaaaactatacatagtaaatgtataatatataatatataatatatactgtcactcctatcatgaaattgatgcggttctctatggaagaaatagataaaattgtaggtttatgttgttgacttaatcagtaatatatgcctaagtgcaaaattataataattttttaaatgaaaattcaatatttcataattgtgtatttttaattctctttatttgaattaaacataaaatgagcttttattatacaagtgcactaatatattacttatatgtttcagtatttagggaaattttttaaatctaattattttttatatagttgtgtatatattatagttattgaagacattacaaaattttaataaatttagaataatttacaatatagaaagtagtgttcaaacagtctatttcatacgcatataaaataaaagagtcatgcgtgcaacaaaatatttgaatcttattttcagcgtgttaaatttttttgaatttctcaaaattttacaagatgtcttaaataactacagcgcaaaaaaattaactaaaaaattattgaagaatgcatcggtacaccataaaatttttcaatactgcatatacatgtattaattacatgtatataaatttgtaaaatattagtatgtaaaataaataaaatagaacattcttaatattaatgaacacacatctcatattcttttccattttagaattacaagtaaattttgatatagtgatactttagtttcctaactttattatcggtgtatttttattttaatttcttgattcatattttatagtttattcattactgtataaaatatatttataaaaattaaaaatacaatattttttttcatcgacatatgtacttttcaaaaaaaaatttagtcaccaaattccacaattaattttactgtatgtgttatttgatgttggccccccctactattcaatcctggcccgcctctggagttcatcatctattaaaataaataactgaaaaattttcattcagtttctctttctcttttcatctttttcctttaaattcttatagactttatattattttataacaagttatcactactgcctaagctcaagagtaaataatttttttaaagttgttgaattatttcaaagtcacgatacactaaatatctatattatttatatatgtatataagtttttattctcataaaattattcttaaatttatttatatatatattatatgctcttattgtttatctatgatatatatatgatagagaatatatataaattattatgcatatatcctgaaaattatgcgtcttcgataaaattttacatatatcctaaagatttaaaaacataatattcatcttataattgattgaaacactacaagaaatgtcacttttaccagcacagttcgctaatgttacttttaccagtgcatttcgcaaactgcgctcgcaaagaggtcaaagttttaccagcgcacatttgtagtggctaaaatctaacttttacccgcgcatttacgcgctgggaaaagtcatttttgccagcgctttttattttatgctg

SEQ ID NO: 222796 - DNA, 4320 bp, Cannabis indica
aacatgacctggaccctagaacaggtccgggactgtgagcagaacctggacctggactaggacccagaactagaccagaacccagccccggaactcaggctcggatccagtcccaaacctagtcccggacccagactaggactgagactcgaacctgagctcgaactcgaactcataactcgatcccgaacccaaaccacgctcctgacctaaattgggattcagacttgtatattgacacgaacttagacccgaataccgacccagacccaggcccagaccgggatcgaaacacacgacttggacccggacccatacctaaacccgaacctgggacccaaaccaaggacccaaacctggacccagactgagatcggaaaaacccgtacccagactaggactaagactcggaccccaaccccaaccttgacccaaacccgaacccggaaccaaacccggaccccaaaaaaaaactggaactttgactaggacctggacttgagacctgagactagaacctggaccaagaccttgactaggactgacacctgagacctgagacccgaacctggaccgggacacagactgggagtttgacctaacctcgtcctaaaccctcgcagggacttcagacccccgatccagacagggatctagaccctgataaggacccgaacatgaacctagaccaagattgggaccgagacctggacccaaacacacactgagagctggactaaaaccatgactcggcacccgaacccgaacgaggacccagaccaggatctaggaaccagtctttaatgggagaccaagaccagggagctaggccccggaacccagacccagatgtaaacttgggactcgaacccgaacaaggacctgccctaaacccaagaatctgaagtcggacctagacccaaaccggaaacctcccttggacccatactaggacaagaacctggacatgaacccataccacgacaaaacccaaacccgaacccgaacccaaaagcagaccggaactcgggatctgaactcagacccaaacctagacctacacccagacccgaactcgaacccagactaggatcggaagccaagacttagactcagaacaaaacctggtctcagacagagatcaaaacttgggactcagacccgaacctagccccaaaccaaggacaatatcccacacctggagcccgatccaaacctagaccgagatccagaccctaacccaaactcagaccagtactcgaaccctgacccgaactcgaacccaaactcgaactcagaattgcaattggacctagaatcagactaggactaggacaaggagcaggaccaacaaccgtacccgtaccccaacccaaataaaaatctaaatttgacccaaaccggaaccaagactaagacccaaacccgaaccgcgattaagacccaaaaccgaacctagagcgggacccaaacctagaccagaacaaggacctggaccaaaaattaggataaggacctgggccacagaactaggactgggacccaagacccgaccccagacccggacttgaacctaagacccagctcgtgaccagacacccaaaatgaaattagaccgggacccaagatcaggatctagatcgggacttggggcttggaccgaacctgtagtcggtgtctagatctgggaccgagccctagaccctaacccagactagagcccaaacccaaacccagacccgaacccagccctagacccaaacctggacccgaacccgtaccttgtgaccccaaattggaactgaaaccagaagtagactgggacccaagaataggaccggaaccaggacttggacctagacctaaagacgtaactggacttggacctagacttggaaccgtaactggaccaggacttggactccaacccagacctagacccgaacatcgaccaggacccgaatccaaacccacaccttgactcggttctaaacctggactcaaactcagaccttaacatagaaccagactcgggacacagaactagggttgggacctagaaccgcacccaagtctcggtcttgaacccaaactatgacctaggaccctagacctgaaccagaaccagaccgggacacgtgacggggatccagatctgggactcagaccaggacccaaacctggaccctgagctagacccgcgacctagaaactaaaatctgaaaaaaaccgctacaccaagacccttgaataagactaggaccgtggaccaggacccgaacttggaactaaaaccaaaacagaactcagacctagccctagacccaaactaagaccagaactcgggcgtagacacggtcgtgtaccctgatcgataccgagacctgtacctgaacccggacccacgacctagacctccagacccgactaccagacccacgactcaaacttagatagagatccatatacgaacttggactcgaacccaaacccaaacccaaactagggattgaaacttagcacatatatccggatcgaggaccgtgaccaaacccgaacatggacccagaccgggacctaggacctagacctggatggggcacttggacctaggccttagaacctagacctagattgaaactcgagacttggacacgaacatagacctagactcgaacctagatctggacctagaccaagatcgaaacctgaaccccgacttggaccaggacttgaacctcgattgggtcctggtctcggaccggaacctaggactcagacttggatgggggacctggacccgagacatgggcatcagaattgggaccgagtcccaagacccaaccccagacccggacctaggaaccaatctttggtgggggaccaagactagggacctaggccccggaacccagacccagatctaaatccaggacccgaacccaaaccaacgacatgacctggaccgaggaatctgaagtcggacccaaacttagactgtaaacctacccttcggactcaaaccaggacaagaacctagacacgaacccataccaggacaaaacccgaacccgaacccgaaccaaaaatcaaacccaaactcgggatccgaactcagaccaagacctagaattagacccaaacctagacctacacctggactcaaacttgaacccagaccaggattggaacccaagacatagacttagaaaaaaacctggactcagacaaagatcgaaactttggactgagactcgaacctagaccgaagcgctggaccctatcccacacctggagcccgatccagacctagaccgagattcggaccctaacccaacctcggacaagttttcaaacaccgacccgaactcgaacccaaactcaaactcagaattgcaaatggaactagaattggactacgactaggacaaggatcaggccccatacccgaacccaaacccaaataaaaaatctacatcgagacccaaacccaaactgcgacgagcacccaaaactgaacatagagcgggacccaaaccaagaccagaactgggacctggacccagaataagataaggacctgggcaacagaactaggactggacccaagacccgaccccagccgaggacttgaacctagttcccaactcgtgacccgggacgcgaaatggaaccagaccgagacccaagattgggatcctaatttggtctcggggcttggaccgaacccgtagttggtgtctagatctgggacccagaccaggacccggtcctagacccagacccaaacccggtcctagacccaaacgtggacccaaaccttgtgacacaaaattggaaccgaaaccagaagtagaccgagacctagtaataggaccggaacaaggactttgacctggacctggaaccgtagttggacgtggacctagacctggaaccgtaactggactaggacctgtactccaacccagacctagacccgaactgcgacccagacccaaatcgcaacccagacctcgactcaattctgaacctggacccgaactcagacctaaacatggaaccagactcgggacacagaactagggttcggacctagaaccgtacccaagtctcagtcctgaacccaaacttggacctaggacccaacatatgaacaagaacaagaccgggacacgtgacaggaatccagatctgggacttagaccaggacccaactctcacacaaggcccaaaagagaggaatttaaccttaaagtgaacaactgttattaattgaaaataaaatctatgaaaaaactatgatattttatttagcaa

SEQ ID NO: 222797 - DNA, 1881 bp, Cannabis indica
aactcaaagtagacgtagctctaatcctgtcgcaatacagggagtaaactactataaatttgttatgtctctcttacaattacttaacaactatatcattctcgtcaatctagcaagcgggtgtggcttagaaatttagttcagatttctgagtcaacacctttattattcttctttaatgtgtttttacatattaactaggtgtgaccaaatccctcacattccttgtactgaatactctttttattagtttgaaaaggtataagaggagaagagttatcttttgatgccttgccattaaatttcttattttcaattttcttaatatatctttgaaaattctttgcaagcattaccatttcactatcaccatttttcatcatctgatgcttcttttttcagtacttttgaaagcaatggtcttctctttttctttggaagccctcagtttttccttttgactaatcttttgattcaattcaaaggtatgaagagagcctatcaattcttctactttcatagaactgaaatcatttacctcttccatagcagtgagcttagcgttgaacctatcaggaagcactcaaataatttttctaaccagaacataatcatcaagtttctaagagcaaaatattcattagaattatcaaataacctttcataaaactcaaatagtgtttcagagtcagacatcctaagatcatcaaatctagtttgtaacatgacaaatcaagatcttttttacatctccagttcattcaaactaagtttgaagaattatccaggcatctttagcataaacacaagtagaaacaagtttaataaaaaattttacaacactattgaaattagcaggaagagctttattattataactagataatttttcttcttttgtatccctaaaaaaatcctaattttacctttgtactctccatgccttctcatcttgtgctttgatgaaggctctcatcctaactttctagtagggatagtttgagtcattgagaagtggaggacgagataccaaacttctttccgctaagaaagacatttcacacaagaaacaatttaaacaaaaattaaccacaagatctcactaagggtttagtgaaccacttatacaccaattgaaattccatttatatgattaccaaattaattaactaaatattgtattgttatcgagatgtttaaacaaacatggagactaattaacttgttgaattcaagttattcacataacaaagaaattctctctaaacttgaaagtgatttagaatttgatacaccaagagagctaattaaaaccaatgacctaagggtgtctttctacactttagaaaccctttaggttgtggaagaagaattaaaaaacaatccgccattaaatggaaaaacttctcaaaaaaggaaagtcaaattttgttcatatagattgtcagtccgttcaaacaaatacattgaatctagacagaaatgcactaaattaatagtcttttttgcaataaatgcaccacaaaaataaataaataaataataaatgatcaatgacaccaaatattttacgtgattttatagttaaaatctatatatttcacgagtcattattattagggatattttttgggataccgagtatgatatcaatatttgaataaagatttttctctctctcaaatttgtcgtcccttttctcatgggttctgcccctatttataagaatataggttggcagttatccctttgagattgattcaattgcaactgctaatgaaacgtagataatcccaacgtttcatttatttagacatgagataatatctaataactactcaatcgctccttatttttatccattagacggttatgctaact

SEQ ID NO: 222798 - DNA, 1151 bp, Cannabis indica
atcagccaaaaatctgtcaaaaaagtttgggcaataacaaccttattattcatacgataataagaaatagcacgactatgtaaaggacgatcctaataaaagatcaaaacacaatacataggaccataacaatcttgatatattccccatatctgactacagagttaacaagtcttgtggaccaagcaaaagcgccaagaaccaacaatccaccacaacacaagactaaaatcctatactgtaaataaaacaaactctactacaaaaatatagcagagtagtgttgtaagttgtaacaccgttattaaaattaaaaataacaaaaacgacattacaaacataaatgttttacttaggtgaggacatcacttttgcttttatcgtagggacatttttttttattttcagtatatatacatatatatgatgatataaatcataattatagtaggtattttgttcgttttcgggaaattatgagtaatttaaggtgttgcaaatattattcaaatagtcagttgtatgcgtacctgttcgattttatgcacgtgcaactaatttttttgaactttatttttgacgccgtaaattattcagagttgctaaaaaacgtacaatatgtctactattactacagtgtacacaattttatgtaaaagaaattggaatataatttcttttaagtgccgaaaacataaaacactcatatggtagggcaaaagtgatgcttgtacacttttaatgggtattacccatgagtaggtattattagaaaaactggagtttctatacttgattaagctatttaattaaaaaatatctcttattttcacaatatatcatcgattaagagagataaaagatattgagtttgagttaaatatttttaaaataaatattttttttgttaagaaataaacatatttttgatatagtgtaaaatgtgatattttttattaaatagttaaaaatcagcatagaaattcaaatgtgtcttttattattggctcttagacaaaaaagttctaataatttaatatttttaaaattgatatttatacttattttttttttggattctttttatttttaacacttttaaaattagttttttttttttttttttttgtttatttttacgtaaattctac

SEQ ID NO: 222799 - DNA, 1824 bp, Cannabis indica
agagagagagagagtttgtggaatgaaagggacgactttgtgagagttatgattattaggtttttaagtgtattgggctgaagcccataattagttttattttttattatttttttttcataaatgcattttttgcatcggttgtgcgctgacgcaaattagcgtcagtacacaaactacgtaaattattgccaaaatcgacgcaaactcagcgtatgttctcaactgacacaaagtttgcacattaattttttgcgttgtttttgtaattttaatgacgttaaaactgacaaaaaaaactggtttttgtaatagtgtgttctacttatatttataaatagaaatgtcttcatagacttttcagggtataagccctaacattatcccactaagtttacttttgagattttaataagatcttttgtcttcacaaacaaaaagataaagaggtttcataattaagcaaaaaatgtatagttgatttgatatatttattttaaaattatgtgaaacccgttattaaaatatactaaccataatatattatatttttggggtgtttgccactatatatagtgtaaaatttatgttaaattttgttcaaaaaaaaaatcagttaatattataattaacccttattttgacaattgtgcttcaatgctatatgtgtaaaattcacttaggaagtcaacaaaagctttaaatttttattgaaagcatatgaaaactctattttttcttaagaactctattaaatataataattatattaaatatataaataaaatataaaacgttatcaattacaataaggagtggcacaagaataaataaaaatgctaaattttgtgaatttgatataatatagcaagtaccaaatttggcccatattatacactattattaaaattcaatatttttatggtaaaaatttatggaataattatataacacaccatcttttgtaaaatatttacattttatgttcaaagaatgtttttttttatatatatatatatttttacggtttttcaaaaaataacacgaaaacaacataaaatcaacaagaaaactacataaaagtaacataaaaataatatcaaaataacaataaaaaatagataataaaaaatcaacaagattacaacataaaaagactgtaatttatgtaaataaaataaaaaaaatcgtaaaaaatatttaaaaattccgtaaaaaccgtatttttgtaatttttttagttgttttttttatgtttttgtagaataattccaaaatttatagcactttaatagaaatgttgataaaaaaagtactaaaagggtagtgtattgctatattttagcacacttaattaacaaaaattactattttaatggtgttctaaaatgtgtattaaattttgcacatacttaaagttgtgctaaatttggcacaagatataatattgtgctaaatttggttcacaataaatattattttttatttatcataatgctactaattattatgatttattgacttttactatactttacaatctttatttactatattattatattatcattatttaaacaataaaacataataatttttatatattcttaataaaataccaaataactgtcaatataattaattattatttttttacttattttacaatttgttcattacaattgtaaatagtgggctaaatataatacaaatttattttttgtgtcaaaataagcacaaaatttaaatattacattggagatggtttaacatgatgctattcttataaatttctttttagaggagtgctaccgtcaacttcct

SEQ ID NO: 222800 - DNA, 3300 bp, Cannabis indica
tctacaggaggaggtttgaatcttggtttctgggttattggcgaatttggctagttttgtccattaccttgttgccttacatacatttgaagataaccacacgagataaggctctctatctcgtctttcaactaacgatactcttccattgtatgccctatgtccttgtgaaatctatagaattttgttgtgtccctcttgtgtctcgcatgtctcatggactcaggcttgcaaaatgtaaccatgtgctcatttgcaaggaaaatgctttcccgagtttcattaagctcggtataaatagtataaattggcatgtacttatcgtgcttcttctgttttttcttatctttggctgatttcctagagtcatcttttctcttggggttagagccacctggattgtcagcctttatcgagacggtgcttgctgagacagtgctgggtttatttcccgaaccagtctttaacaatttcatctcgttcctcgcttcctcttttcgtacgaacacttgagctctttcattgaactcactgatgttttccaccgggcgaccctttaagtcatcccacagctcgccccagctgttgagaggtcagttgtaatccctgcctgaagagtagtaagctgaatactattgttcaagtttctaactctagcagcggttatactaaaatgacttaagtaggccttaagtgactcgcctggttgctactttacgttagtaagggaagatgctttaggtcgcctgtctcttgctgcctaaaattgtttcttgaaatccttagacagttgttcccaaaaagtaatttagtgatgggtgaatttattgaaccaactactcgctgctccaatcagcgaggtgaggaataaaatacaacgtaaattattcaatacgttactggctcgcattatagtattgaaattattgaggtgagcgaccaggtctgaagtctcatcgtacggcgagacgtgagggtttttgaatccttggggaaattcagaattcataatgactggatggaaaagcttgatctcttcatctgagtcataaccaagcagtttttcatattccccatcttggtatctcttgaatttattttccaactcactaattcgcaattggattggatcctcttgctttcgattgacattgagttattggcgtaaatcaggtgcattcttaagcgctcacacaaattaggttgtttccaatttaaatgttcacgaagatctggctatcttcgttcatggttgctcatggacctcgtatctgagtaactctcggattgactgttcctcgtattactcatactttcttgatcatcactacgccgaggtctatcccctccttgtgtagatcaattgtgagctcatgatcttgaatgtcccgagctagaacttgcctcatcctgcacaagccttctccttcgggaagaattaggtacacatcctccatttgggtatgtgtacgcttcctcccttctagtttgagaaggacgctaggggtgcctcggcgataacccacttttctatggttgtgtcctaggatttctctcgttcttacgagggatctcctgttccctagttttgggctgccttatgttctcgttcctacgagaagattctttctcgtcattattttcattcccctggtttgtgaatccctggggtctccgaggtacctctcgtcgaggtgccttattgtttggttgttcgtcttctggaacatccccagtttccccatgttgttcctcctaagtgttttggggattttcttgagttgtctcctgcctcctagttctcgaacctcgaggtctaccttgtggccttctcactccaggatcaggttggtttccaactaatcgtttcattggttagcctcagccaaacgttgtcggagttggcaattttctaatttaaccaacgatacatacctagttggatcataggcaccctcacccctaggtacagaaccacaagcattagtattggtttcctcattcccaatttttgggttttgatcatgtccacgttggcttcttctcgaacgtgttgttcttgaagtgggtggtctctgtgaacctataggttctttcctaggacgactgttatcgttttcatcatgatcagccgtgaaaaaaaattttaacacgtgggctttgaccacgtccaattttaacacgtgtatagctaaatgtgggaataaccgtttgttactcttatcttttaagtagtggatacggacgtgggatataagcatctcgctagaggcatctcgctttgtacatagatgaacgacttggtttatatgtattccagcaatggcatgagcactggtgtacggagcaaactttagaactgctctttgaccataaggccttgcagactggacaatcatgtcctccaagttctcaggctacttcacttagtcattataacgtgaattatacactaagtgttccaatagccaattagcctcgtcaacacttccttacacacagcgaggtagatgcctcgctatgcattgtctgtagctccctcgggattatgccttccgaggcaagatggtttctcgccaatacatgaattgatagttagtgtatccttatctcgcctaaggttgtacagtcaacgagttatgaatatacttaattctatgattaatgagttattccattttgcatttaatgatataattatctatgtatctattggttcatatttcacgagattgacacgtgtcactttttgaagtacagtcaaattttggatataacaaatatgaatactctttataaaattaaagcattcaactcctatcattctctgtagggaatgatgaacagaaaatatatgtcttatgtctttaaataagattagtcatgttcattgttattcctatatttttatgtttcaatacaattttcgaaaagtttatttgggtattcaaaatccgctataaaattgcgtcaataataatcatttcaataattttgtagttgtattgatataaataaaatatttttaataaatataaaatatttacttcaagaaatatttacccaaattaatatataacgatattagattgttcttcattgtcatcaaagaatataaaaatatatataaatatgtgtattcatctcttttattatatttcagtcaattatatgacatgtttacataattttcaggatatatgcaagattttattgagaatacataatcctctgaatatatgtataatttatataatttttttctttcatatcataggcacaaatatattgtaaatatta

SEQ ID NO: 222801 - DNA, 8107 bp, Cannabis indica
aacttatatcgctatgtcttattcaatgaaaaaaaataaaatagaaattatctttcggagagatggccgagtggttgatagctccggtcttgaaaaccggtatagtccaaaacaaaggactatcgagggttcgaatccctctctctcctttttcttggtgaatagattagtttcgttagtttattgatttcagtattataagtggaatggctcggctattccacttagccgagccagaaaaaaaaatagattagatataaaaagaaagaaaaaaggaagactttaaaaatattaccgactcgcccaacttactaacttacttaataagtagggtggaatcaaattgattcctacttcaagcattgggtctcctgtcttaattaagaggagtcatgaaaagaacaggttctaaatcacgatcaattcctttttcaaatcccgctgcagctgcacgagcccttcccgcgtgccataaatgacctacgaataggaagaaccctagaacaaaatgagaagtagctaaccaacttctaggagagacataatttactgcattgatctcggtagctacaccacccacggaatttaaagaacctaaaggagcatgagtcatatattccgcagaacgccgttcttgccaaggctgtatgtcttttttcagcctactcaagtccaaaccgttgggaccccttagaggttctaaccagggagctcgtagatcccaaaaacgcatagtttcccctccaaaaataacttcccctgtcggtgaacgcattagatatttacctaaaccggtaggtccttgagcggatcccacgttagccccaagacgttggtctctaactagaaaagtaaatgcttgagcttgagaagcttctggaccagtgggcccgtaaaactcactaggataagcggtattattgaaccagacaaagcaacaagcaataaaaccaaaaactgataaagcacctaaactataagacaagtaagcctctccagaccatacaagtgcacgacgagcccatgcaaagggtttggttaagatatgccagattccaccaagtatacaaatggaacctaaccatacatgtcctccaattatatcttccaaatcgtccacactaacaatccacccctctccaccaaagggagatttgagtaaataaccaaatacaatacttggactaagggtcaaattggtaatttttcttacatctcctccccccggagcccaggtatcatatacacccccaaaataaagagccttaaagactagaagaaaagcacctatacctaacaaaattaagtgaatacccaaaattgtagtcattttatttctatctttccatacataaccgaagaatggaaaagattcttcaagagtttcaggtcccagaagtgcatgataaataccgccaaagcccaatactgcagaggaaattaagtgaagtactccagacacaaagtatggaaaggtatctagaacttccccgccgggccctaccccccaacctagagtagctaggtggggaagtaaaattaagccctgttcatacataggcttctctgggacgaaatgagccacttcaaataggttcattgctccggcccagaatacgattaatccggcatgagctacatgagcccccagcagtttaccggataaattgataagtcgggcattcccggcccaccaagcgaaaccggtggtttcttggtcacgaccagctaaagctaaagttccattaaagagcgtttccacggggtagaacctcctcagggaatataaggttttcatgaggctgatcttgagccgccatccaagcacgaataccctcgtttaagagaatatttttggtgtagaaagtctcaaattcaggatcttccgctgcacggatttcctgagaaacaaagtcatacgcacgtagattcaaagccagaccgactactccaagagcactcatccataaaccggttactggtacaaataacataaagaaatgtaaccaacgtttattggaaaaagcaaccccaaatatttgggaccaaaagcggttagcggtgaccattgaataagtttcttcagcttgagttgggttaaaagcacggaatgtatttgcaccatcaccatcttcaaataaagtgttttctacggtagcaccatgaatagcacatagcaaagcagcgcccaagacccctgcaactcccatcatatgaaatgggttcaatgtccaattatgaaacccttggaaaaagaggatgaatcgaaatatagctgctacaccaaaactaggcgcaaagaaccaaccagactgacctagcggataaatcaggaatacagaaacaaaaacagcaattggaccggagaatgcgattgcattataaggtcgcaattgaacagatcgagcaagttcaaattgacgtaacatgaaacctattagtgcgaaagcgccgtggagagcaacaaaagtccacagaccgcctaattgacaccaacgagtaaaatctccctgtgcttcaggaccccaaagtaacaacaaagagtgtgctaaactattagcaggagtagaaactgcggcagttaagaagttgcatccttccaaataggaacttgctaatccatgggtataccatgaagttacaaaggttgtacccgtgaaccaaccccctaaagagaaataggcacaaggaaagagcaatagaccggaccaacctacaaaaacgaaacggtccctccgtaaccagtcatccataatatcaaataaatcattttcgtctttggtaaatttaccaagagctatagtcatagtgatcctcctatttaactacttcaaccatttcagtttcgaacactcgatttcgttttcagagtggttgaggcttctattatttttgtatgatattttttttcgaatgggtttctaatataaaaaaaattattggtctgtaacccgaccaagttaactcaattcggttatcctttcctattcttaataagcatttgaaccatgaattgtcttattattcatcaattctctatctgattttttttgaaagaactgctcaaaaaagaagtgtgatcccccttctcgctaccgatagatccctgatccctagacatattcctcttgttccatcacctaatcttatttcttattcccgactcccgttgggaaatttttgaatttttatgtatttttcgaatttagatgtgtattaaagtattatatattttattactttatagtttactctttcattttcttttaaatttcaaaatttcctattattaaattcactacaatattcaatttcaatctaataaataatattaaataaaataatagtaaactataactgaaagcctctttctcacacccattttacatcacattgtctggaataaaaatagttaaaacgtctcttattagaataaacccttttttgtaaaggaggggaatagtaatttattcctcgaaaacatctaggaaaaagaagatttaatcggcaatatcgacagattcccgcgtagtcaaaagaaatatgaaaaaaaaagccccactgttccaacgttgaatttgaatatttatttgaatatcagaatagtggatatatttctgattcaatgggttaggtccacttacttttttctttttttaatttctaattgatttgattgcaataatagaaaataggaatatttggagattcaagtagacaacttgttttttttatcaactgaatattattcattatacattataatataataaacataataccaaatgttcaaccttataactagaattactatactaattagtatagtagatatagtataattcaataaaaattttatttttctattaatttaattaataaaatagaaatattgtttgctacttttttattttatttcaaatatcaacaatatctctattcttccttcaactatgaatactcccacgggagttttatgaaaaaaccaaagccccttatcggatttgaaccgatgacttacgccttaccatggcgttactctaccactgagttaaaagggcctgtttgattcaattcctgaataagccactagtcactatgtccttgtttaagtgtatatccatattatatattatatgtatataaatacatcgtatacgttataatatattttcaatatatagcggttcactcaggaatgcgcaatttgatttacataatcagttacgtaatcagtatagggtatactttaaagtataaatgagaagtaaaaaaaagtttattgatattggatttgataaatatcaatgcaatgaattgtttgaagccagatcctatcctaattgacatcataacgaaattcatttgattgatacatgtacctacttcaacctagatcaaaaatatttcctcgaatcattaataaagcgatttggcttgtcccccaatacaaaattattaatttttagagaaaaaattttttaaatttaagaaaaataaagaaaatatatttagttatggaattatagaatgtcgatgaaaatgaacgagtcatgaatagaaataatcaaaaattctatataatcgtgaagaaagatcctttgcattgagccatacgcttccattatattgacaatttcaaaaaactattcatactatgatcatagtatcatggcggtcgggcaagtatgcccccatcgtctagcggtttaggacatctctctttcaaggaggcagcggggattcgacttcccctgggggtagggtactacgaaaggaagttgatcgtggattatcactaagcctggattgattcttcccgggtcgatgcccgagcggttaatggggacggactgtaaattcgttggcaatatgtctacgctggttcaaatccagctcggcccaataattcgccgatctgccatgaaatgataaatcatttgttcttctccataaatgctcgataccaatcgaaaaaatcaaatagaaaatttttctattctgatatatcttatccttaccgttatcgctatttatttactctattttatttactctatttctttatttctttttttttcaacaagttttgatcttatcttgctaatcttgctaatgatctagattcctatcaagatctggaaatgtaaagtctaaggaaaaaaggaaagaaaaaatttttcattgaaagaatgaaatcataaaaatatatattgtagactgtacattttattatgttatttcctggggattgtagttcaattggtcagagcaccgccctgtcaaggcggaagctgcgggttcgagccccgtcagtcccgatagatccaaatccaataaaaaaatagagcaataaatccttccattttttgtgaaagggagtacaaacaggaggatttaattcccatttaattcccaacaggaataccttttctttttatttttttaatttcttctattgtttgtttgggtttgtttacaaccaatgtaagtgtaaaggtgattagatgatacttcatcttttgattgtacaaagagggcgataggttatagaaaagaacgggtggaaaagaatgaaaaatagaaataacaagagagcaaagtaatttttgatcgtaattgtatcaggaatttacttttgaattcggtatggataaaagatcctcctatgttatactattcaattcttgacgatgaatcgatttgtcagatattgttattcatgatattgatccgatttgattacatcgaaatgtaattcatcccgttgaatttacacacaaaatatttatcatctctatgggattaaatcccgagttatttcgaattaaagaaaaaagaaacgatgaaattatggaagtaaatattctcgcatttattgctactgcactgttcattctagttcctactgcttttttacttataatatacgtaaaaacagtaagtcaaagtgattaatttgaattaaacttgtgaatttttagttcttatcaatgattgaagagaagaaatacaataaaaaggatttcaatttcgtgttttaaatgaaatgagggaactagaattagcagtattctatgagatactatctagtatggtagaaaaaatatttttctaccatactatactagtattgttattgtactctataaagtttgctctatgaagatagagattaatttaatatatatattaatttaatatatatcaatcgacattattatctttatatctctagaatagatatcaattccatatataatgtagatagtagtatgtttcaattctatttctttgtctttgcttcagctatttgatttgtcttgattccaatcaatctgaaatggccgcaagactgctcttactcctacgattctaattcctagaatttcttattctttttcattttaaatttgcattatatgtccgatattcatcgaaagaaagaatcaaataaatgaaggaaaaaagaagggtttggggataatataataaaagaaaatcaagtaattttcttgttcttattccacgaagaagtaattgattgagcagttgacagaagatccagaaaaaagtaaaaagggttttgttcttccttattgtccatatagaaaatttatgaataattcgattagaataattttctgaccgtttgtagtccttttacttcctgaaatacgaacataggaataattgcaatatttgtttgattgaaagagttcctatattatttatagaatacattaatttactagaatcctatacaatagaatttcgaaatgaaaatattttcaaatttcattttaaaatagaaatcgtgacataataaaaaataataaaggctttgcccaacaaaacgatctataaaaaaattgaaagagttttattcctaaactcaattagtaatacttctagagcccacttcttccccatactacgagtgaaagggaaaatgtaaagactaccattaaagcagcccaagcgagacttactatatccatggaaattatgtcctcgatttctaggaaggaattattcaattattgttcactaataatagtagaatcaccggtgcagagtcaaaaggggattttgatccaagaccattgataaaacaataaatccaattaagttcttaataattagaagatttcgagtataatcggaaaatatttagcacaagcaaaatacgaagagactgcctcggaagtatcagaagtcgcaaaggaatgttaagttaataatatgtccgaataaaataataagacctattttttgtcgcccttcatttcattaagataaagtataaaaatttcattaagataaagtataaaaatatagactcaagatagatcattatctaccgcatacccctatttctttttcatttttcccatttatttgatctaaatcttaccagtgccaattttcgctataaaacaatggaagacgccctattacgttcttgacgttatcaaaaagtaaaaatttctttttttacttacttaacttataatttaatttataacttataatttaatttataaataaattaagtaaaagccaatttttaatttaattaaattactattgaatataggaattaaattagattactcgtccggctatccaatctaattcaagacccaatcagtcgacaccccattagtagtggaagggctatcatatccaaatttaccagttttttttcacgactatagtctttccttaaaccttagcgaaaggatttactgcattttcattttagagaacaaaatatccccagatacttcgaatcaagcaagtctcaagaatcctttttctgcgcttgcttctgctggaaaaaatttgacaagttatatcagcaaaacagaacaaagtatttcgattcttttgttgatcaggcggcacccggatttgaactggggaaaaaggatttgcagtcccccgccttaccactcggccatgccgccaaaatgctacaaaatagatgacaaaatttcttttttttgtacttgtattttgaatctcgttttctttaatccctttcctaaaagaaatccttccttttctttttttgtttggattggatcaaccccttcgattg

SEQ ID NO: 222802 - DNA, 1595 bp, Cannabis indica
aagagaaagatcacccaagaaaggaagtttgaagagtaaacaccatcactctcaatcaagatcaaagtctagagagaaggaaacaaggaagtgttacttctgtgataggtttggacacttgcaaagattttgcaagaaataaaaggagcaataaggcttcaacaaatctcataatggagagaggaagactctgctacaatcacagaggatagtgatgactgctcgacagatggagaataattctcaatcttagaatcttacatgaacagggagtggattctcgattctgaatgtacttatcaaatgtgtcaaagtcgagaatcattttttgattataaattagttgatggaggtaaagttataataggaaatgatcattcttgtagggttattgtaacaagaaggttgtcatcaaacaatgtgatggtagaatcaaggagctgacaaacataaggcacatcccagagcttatatgaaacctcatatccttgggtgcacttgaagatgaagaatacgaatacaaatatatttacggaagcttaaggatcaccaaaggttctttgatggtgaggaaaggagaaaagatcaatggtttatatgttctccaaggagaaactggcccagttggagaggaaagtatggtgaaagggctagaattggatatgaagttgtggcatcatagacttggatatatcattgaacattgccgaactgtacaaacaaggtacatttgaaaatttaaattcttgtgccttaccattttctgaagcttgtgttttagagaaacaacataagctaaagttcacttcggtaaggcacacaactaaaaagatactcaaataggtgcacactaatatttgggggccatacaaagtgcctactcactctagtaagtaatattttctttcaatagttgatgattatagtaggtgtgtttggacatatagagtcataggcttgaaaacctcttatgaaatgtggtacaacaaaactccaaacataacacacttaagagcatttaggtgtacaacatatgtacaccaatctattaacaagctggaacctagatccgtgaagggaacattcctaggttatgccttaggaaccgaggggtatataatttatgtttccaagaagggtagaccaaaggttgtgattgctagaaatgttattttcaatgagttggaatatcctcacttaacattcgagaaaggtagtgtgtctctgtgtgatgcaggaaaaataggaaacaaagacactacaagtgtggaaatagagtacggaacgatgctcttagatgaaggtccacaaatagaagtcagtgtggaaccataaggtaatgcacagacagaggctgacacggagctcaaagataacgaagactaaatagaggtgccagaagaattcaaaaagacatgtctagaaggttatcagttggcacgtgatagaacccggagagagattcatcattcgacaaggttcacgaaagtagacttaatagcatttgcactggcagcagttcaatatattgaaattaaagagcttagaagctatgaagaggcaattttaagtggaaacatgttggaaattatttt

SEQ ID NO: 222803 - DNA, 2186 bp, Cannabis indica
gatgaaagaatcgggcacaaagtgaaattccatgctgcaactgatttcatggactgcatatcgcactgtcaattggaagatgtttaagcaacagggaatttcattacatggaccaacaaacaccaaggggatgatcgtatcttctccaagattggcagggtaatggctaatcagtcttggttagataattaccctagtgctgaagttggttttctgagtgaaggcctttttgatcacactccagctattctaactctttatcctcaatggcaaggagggaagaagccatttaaatactttagaatgtggaaaaagcaccctgggtttgatacaaagctcaggggaatttggacacaaagatttcatggctccaaaatgcatcagttggtcagtaagcttaaagcactaaagctggtttttaaggacattaataagaagggattctctgatttacaagctgctacactgaaaaaccatgatagaattggagagtattcagtagaaattacagcaggatcctttaagtcatgcactgttagctactgaacaggacgtgaggaattgttttctgccaatgcagaaagattatgcttccttcttacatcagaaagctaaaatatcatggatacagaatggagattctaatacttctttattccatgcaagtatcaaacaatgaattaggcagaaccaaattcactcgatagagcaacaagatgggacaagagcacatgaacctcaacaaatcacagatgcttttgtgtcttactaccagtcttttctggggactacattggaagggaggaggaaagtatcaaccagaataataaacagaggcaccactttatcccagaaccaagcagacctgcttacacaaaaatttactaggaaggaggtgaaacaagctgtatttggaattcctagaaataaagcccccggtccagatggtttttcaagcttcttctttcaagataattgggagatggtgggagagaaaaagatttattgggcataacatcatgatatgccaagatctagttagaccctatagtaggaaatcaaacaaagctagttgtcttatcaagcttgatcttcaaaaagcctatgacaccatcgagtggaatttcataaaagaaatgcttcttggatttaattttccaaagtccctcattaatcctgtgatgaattgtgtccgcactcctaaattctcacttatgtttaatgggactttgcatgggttttttaaagcaaagagaggccttagacaaggcgatcccatgtctccttattatttgtcttaggtatggagtacctctcaagaattatggggaaaattggagagaagcaagatttcaaattccatcatagatgtgctggaactaaaataaaccatcatgcttttgcagatgttgtactcctgttttgcaatggtgattttagaagtgtatactatatgctacaaggcctcaagctttgttcattaacctcaggtctgcagccgaatccaacaaagtctgccatttatagcagcaacatgtcaagaacagaactgaagaggattgtgaatgcttctggttttttagtccaacaactacctttcacctacctgggtatacctatatctgctccaaaagaattttagtgaaggagtgtgctattctagctgataaaatgacagccaggattaaggtatggagttctagaaacctgtaatttactggcagagtaactttaattaactctgtattgctgactattcactcatactggagtcggatcctcttactgcccaagaaagtaatccaaagtatagaagccatttgcaggaactatctttggaaaggtcatgctatgtatcaagagcctggtcctgtggcctgggaatccatttgtcaacctaaatcgcctgggggcataggattcaaaaatgtttcatcttggaataaagctgcaatgaggaagtatatatgggctttggctaacaaggaagacagtttatggttgagatggattaatagtgtgtgtctacataatgaggaatggttgagatggagtaatacaaagagttgaattgttttggccaaaaaaggtctccaaggatgacaaaagagtggtttttaacattgtaatgcaaccaattattttacttgtacagaacagattgtatagatacataacttaggcct

SEQ ID NO: 222804 - DNA, 1902 bp, Cannabis indica
gatttttaaaatttgcatccgatccgatccaattatgataggatatccgtatctattggatcggttgggattggatcggtcgattgggattggattggatgactttctgcacacccctacaaataatgaccgcatttattttacgtgatgtgtaatcagacctgacgatttcaggggataatcgttgtaaagattacagtcaaccctataattaactgcctactatgtgattatagatagaggcaagatatactgaaaaagggacgaaaaattcgtaagagaaaaggcccttaaaaaaaaccatcaaaaatctaatcagatttactcgtagactatgtagaattttaactgtaaaaccacataaaaaatccttcgtgtttatcctttccttttattttctttattgttttttatctttgtgtgcaagtttatcatttaggctcaaattttggttaacgaaaatctgcgttaacaatagtaaatcaagtctcaagagagtatatggcctgtagagaaaagatgatggcctatctaagtaagatctaagatccgctcgcacaatttaagggttacaccctcaagaagattctaagggaagaaaatacaactactgatgccttggcacgacttacgagcagcacagtgacaaataaggccaaattagtcccaatccaattcctagaagagcccagcatcaactgtgcggaagaggtcgaaatgatagatacaacaccaaattgaatgacgcccacaacaacttatctgaacattagagaacttccaaacaataggaacgaagctcataatgatgagaaaagctgcacggtatatcatagttgaaggtgtgatgtataggagaggcttctccatgtcattgcttagatgtgtaataaaagaagagactgcacgactcttgtttgaagtacatgaaggattttagcctttgctatgattcttgactctttgagtcataaagaatatgaggctcatattcaagttttaaaataaaaacacacattgggcttcaaaacttacctttgccggtttaggaggtcttgcttgagacctggccggccctaaggcttaatcatgggagttggctagctttagggttttaccctataaagctagcctattcatgtctgggtttggtgaccctggccagttcttggctgagacgtgggaccgtggccgaccctttcaaggcttgagaaccttggccagcatgggctttggttccatatgggtatccagtgttctgtcctcttgttacttcggcaagaatttggctttgtaggcatatacaaccttagcctcatacgtggtttccttggaaactctgtatgaagcttaatggtgagtctattatagtcgaacgtttaacttaatactcaacatggcttggttcccataaggaactctgccttagccgtagcctagtacatggcccctatagaagctctctctagttattttctggctatgcagttctagcagggccttggccttatgcatgtgaaccgatctcatatccggccttagggctttcatgttcttactttggcctataggccctctatttttaacacaactattatttagcctcaaagccatctatgacggacatatgattgtcctagctatcttcttatggccttgacatgtaagggtctagatttactatgtcaagccgaagtatgcctgcacgacttagaggcaagtttagtagcttattttaagccttaaaatttctgcataagttctttgtgccggttcaatgcattgtacggtatgggcgccccttaagcgaccatgcaggcaagtctcttggtcacttgctattcaacaagttttaagactttgcataggttcttcctgttggaatttattttaccaggatct

SEQ ID NO: 222805 - DNA, 1388 bp, Cannabis indica
caagtgtgacctcagggcgttcatggacccatattcgatcaactcgaggaggagagagtgctcaacgagctaataatcgagaaagcatgggaaccagtaaatcctcaagtcactcgaggaaaaggtccatgagcaagacgaggtatgtatgtaggacacaatcaatgagtagaacgaggtttgtcagtaattactcctaaccggatctacaagagcacttgaattagaaaaaacttgatctttgccaacaactcggtccaaagcaagaggatcctatccaattgcgaatagacgagttagaggataagttcaggagatatcaagtgggggaattagggagacaatctggatacgacttagatgaggaactcgagccgtaccatctagataacttcttgggaacaactatccaaggacttcaaaaaacaattccaggccgcaagggatagacgacccgaggtgtcctcgctaaccaacataaagcaatagccaggcgagacacttaaggcatacttaagtcgttttagcacggctgctgcaagggttagaaatctagatgatagtacacaacttactgccctttagacggggatcactactgatctatgaaccgttgggggtgaattgtgggatgacttacaaggtcgtccagtgaagaacatcattgagttcaacgaaagggctcaggtgtttgtccaaaaagaggaaggttgaaaagagatgaatttgttaaaaacaggctcgggatgcaaacctaacaatatttcaacaagcactgtctcaacaagagtttaaaactcaggggcctctagctcaacgagaaagggcgattctaaggactcgtcaaaggataaaaagaaatagaagaagcacgataagtacgtgccagtttatactatttacacccagcttaatgaaactcgggaaaatatttaccttgcacatgagcacaaggttgccttcagcaagcctgagcccatgaggcatgcaaggcataaaagagatcccaccaggtattgcaaataccataaggacattgggtacacaatagacaaatgccgtcagttgaaagatgagatagaaagtctcatcgctcggggtcacctcaagaagtatgtgaagagacagggcaatggacataaccagcctagtttgtccaacaaaccaaaaaacgaggggttacaacctcttctattgaaggagaggatatcctggttatttcgagagggccgcatatcggaggggagagcaagaacgcccaaaagaggtatttgaaagaggtaaaaaatgagcagtcgatatttgctcccgaaccttccaagaaggtaaaaactaaagaacctctggtcatattctcgaaggaaaatgagaagaacgtgagatatcct

SEQ ID NO: 222806 - DNA, 2490 bp, Cannabis indica
agtgctcctttggagtcggactcgagtaagtttcttggttttattgtcaatgctcgaggaatcaaagccaatccagagaaaattcaagccctcctcgatatgaaatcgccaacaaaaactaaagaagtccaaagcgtcggatagccgcactcagtagatttgtttcaaaatcaatatacaagtgtgttcctttcttcaacatccttcgaggaaataagaaatttgaatggacagaggaatgcgagaatgcctttcaggagttaaaaagacaacttgcaaaacctcttgtactctgaaaacctatagacaaagaagaattaggaatatacctagctattatagagcatgctgtaagtgcagtggtgatcaaagaagaagaaaacgtccaacatccggtatactacatcagcaaaagactagttgaggctgaaggatgatatccgctgatagaaaagcttacttactccctaatcttatgaactatgaacaaggaagttaggccttattttaaagctcatcttgtttggctatacactgaccaaccattacgccaaatattacaaaaacccgacgcttttggacggttactcaaatgggtagtggaattgggtcaatacgagataatctttcaaccctgaacagcaatcaaaggacaggatttagcagaattcgtagttgagtgcacaggcaaagaagaaagcatttcaaagggaaacccagagccagtacaagaacctcagccaagcaacaatgaagacaaacctacctggaaattacatgtggatgggttggctatagatcaactgtccggtgcagggatcgaccttatcacgcctggggggcaacacttgcacggggcggtcaaatttgggtttagagcctcaaataatgaagcagagtatgaagccctcatagtcggtctaaaaattgctcgggagtcacatgttgaacacattgagatctacagtgactcacagttgttagtaaatcacgtgtctggagagtacgaggcccatggaaaaaatgatagcctatttaagcaaaatacatgatctacttccacaattcaagagctacgtcctcaagcaaattctaatagaagaaaatacaatcgcttatgccttagcccaacttacaagtagcaacatagctgataaggctaatataatcccaatttaattccttaataagaacccagtatcacctgtgtagaagaaattgaaatgattgacgcatctccgaactggatgacaccaatagcaacctacctcaatactggggaacttccaaataacggaaatgaagctcaaaagatgaggagaaaggctgcacggcatatcatcgtagaaggagtcatgtatagaagagggttctctatgccactacttagcttttgtctgaagtacatgatggattctgtggcaaccacgcagccgggcaaagcttatcaaagaaaatactaaggcaaggatatttctggccaactatgattgaagattcaaaagcctatgttaagaaatgtgataaatgccaaagattttcaaagataccccgtgcaccgcccaaagaactaactcagatgcaaagtccttgcccttttgctatttggggaatttatctaatcggacaattacctaaaggtaaagggggagtacattatgtagtggttgtagtggattatttcaccaaatggacaaaagtcgaaccattgccaacaattacatctatgaaagtgatagacttcgtggtgaaaaacataatatgccagttcagactcccatacaagatagtctcagacaatggcacacagtttgacagccaattattcaccaattttttagcgaaccatggaatcataaaaagtttttctacagtagcacaccctcaagaaaatggtcaagttgaagcagtcaataagacacttaaagatactttaaaaaatggctcgaagatgctaaggggaattggccagaagaactacaagaagtactatggtcttaccgcacaactgaaaaaatagtaaccggacagactcaattcattatggccaatggttatgaagcaatgttgcctgtagaattagaacctccgtcccacagaagattcacatatgatcaagaagctaaccgtgccctcctcgcagaatcacttgacgaaatcgaagaaaaatgagttgcggcaaacctaaagttggtggcccatcaacaaaagttggctcattacttcaataagcaagtaaaggcacggaagttttttgtgggagatattgtcctcagaagagtgttttctgaacaccaaagacagcaaggcaagtgtgctcagaccgaactgggaaggaccatatcaagaggttgaagtactagactcaaaagcatacaaacttggatggtatgacaaaaatatgaaactcattctagtaaaaggtattggaatgggaaacatttaagaaaatactaccagtaaaagtaccaggttggatgaccactctaa

SEQ ID NO: 222807 - DNA, 3059 bp, Cannabis indica
tgaaccatgcaacataaattgttatttctgatccttattaataagtaaatctgattatatgaaatgagttttatttagggcataaaacccaacacatacttgtgagtagatctaagatcctggtaaaataatttccaatagaactatcctagtgtcttaattcaggtgattatggatcaacaattagctgacatgcttgaatttgaggatgaatatggttcaaacacttcggttggggttaagtacgagtggaaaccgatctcttgctcacactgttttggtgttgggcactctgctgcagaatgtaagaaggctggtatttctaagcagcaatgggtcttgaaatctgataataggaaggctctacaggttgatgaagagggttttacaaaggttaatagtgtgaaaaagcatgctgaaaaaagtaagtctgttgctggtgccaatacaacggaagtgaaaaattattttcaggttttagacttggaagattctgttactgcaactgatataagtgtgcatccggatataattactacagataatgaggccaatacaagagggggggggggagaaccctctctcttcaatggataagttgctatgttggattgttcgaggggccaataatcaatccaagcaacaattaataaagcgattcattaatttgcaaaaggtttattttgttggtctcctcgagactagagttaaggctccaaaacttgaaaccttatactcgaatgtatttgacggatggtgtttttcatctaacatagcttggcatagtggtgggaaaattgttatagcttggaacccgaatagatttatggttgatatcatcaaatgtaccaaccaaatgatgcatttgagggtctcaactactgaaggatttaatagttttctcaccactgtgtatgcttcgaataataaaggataaagaaggaatctatggaaggatatttgtgccttatgtactaatgagtattggtgtctaatgggggattttaataatattttggccaaggaagaaagaattgggcatagagcaagatcttatccggattcagactttcttacttgtgtgaactcttgtcatttagaagatgtcaaagaaaatgggaacttttacacttggactaacaagcaaccgggtgaggatagaatttattctaagatcgacagagtgctagctaaccgaacttggatcaacaaatttgagttagctgaagctgtttttcttaatgaaggcttgtttgaccactcacctgctatcctttcactacatcctgatcatggtggtggtaaaaagccctttaaatacttcacaatgtggaaatctcacccaaagtatgaggaagtactgaaggatgtgtggaaaacagaaattaaaggaaatagcatgttcaaagttgtgtcaaaaatgaagaaactgaaagctgctttgaaagatttaaacagagaggcttacccgaatcttcatagtgctgttattaaggctcaattggaccttgataacacccaaaaccagctgcagaaacaacctctagactcggccttgcaccagcaggagaaggtaattcgtgagcacttattggaagtccagaagtcttattcttcttttttacagcaaaaagcaaaaattgcttggatgaaaaatggagacaccaattctgctcccttcatgcttgcattaagcagagattgagacagaataggattctctccattgagaaaaatgatggcagcagagtcactaatccctcataaatcacagcagctttcttagaattctatcaaggactccttggaaccacaatgggacagagaagacatgtaaataggagtattcttgctaaaggacctatagtggcatctgaacatgtggagaaattaacacagaatttcactaaaaaggaggtcaagcaagcggtatttagtattccggggaacaagtcccctgggccagatggtttttctagtagcttttttcaagacaactgggagctcattggtgatgacatatgcgatgctattctctcattcttgaactcaggtaaaatattgaaagagattaattctgcaattcttaccttagttcctaagatgagatgtcctaattctgttagagattttagaccaatagcctgttgtaatgtgatttataagattgcaactaagcttttgagctctagaatcaataacattctccctgaaataatctcacaagctcaaggtgggtttgttaaagggagatttataggacataatattctgatatgtcaggacctggtgagacattatggcaggaaagcaaacaaacccagctgcatgatcaagttagacctccagaaagcttatgacacaattgaatggaattttatagtgctgacagggctaaattttcattggtaatgaattgtgtcacaactcctaaattctccctaaatttcaatggagcattacatggcttctttgaaaccaagagaggaattaggcaaggggatccgatgtctcctttgctttttgttctgggaatggaatatctttctagattaatgaagcaggttggagagaaggaggattttcatttccatgataggtgtgctgagctcaaacttaaccatctggcctttgctgatgatgtcttgttgttttgccatggagatagtaagagtatcctttacatgctacaggccctgaaattattttctcttacatctgttttgcacccaaatccaggtaaaactgccatatattgtagcaatatgcaaaatgaaacgatgaaccgcataatacagctttctggatttactaagcaggatatgccctttacttatctggggatcccaatttgtgggaagatctctggtaaagaatgtgatcttttagcagaaagaatgacgactagaattaagagttggagttctagaaacctctcttttgctgggagaattacacttattaactctgctctagatgctattcaggcctattggagtcagatgatgatacttcctaaaaaaagtattgagatctatagaatcaatttgtagggcatt

SEQ ID NO: 222808 - DNA, 2424 bp, Cannabis indica
tattgatgagattattagataaattaattttagaaataccggagtattttggggtacttggagtcgaccaaatactttagaaatataaatttcttagtagctaagaaataataagataactattaataataatttttttattcatattatattattattataatattattttatatatataaacaattatagtaaatttatatatatattatataagttacagtaaacataaacgaaaacgaacaaacaaattctcgttcttcccctttcgtcaaaaccttctccccctacatttatttttcttcaattttgaacctcattccaagtgatctaagctttagtagtagcaggatatcaaatctttgaagagggaaatcttaatgtattgtttaatttcattttaagtttaaaaataattagttttgtatagggttttgtgaattagaatagttatgaaggttctaaccttataggattgttctcgagtattgatgggactagtttcgatattttcttactgaagctgaggtgattttgggttagaaattgcgtttggagctttttaaaacttagtatgaacgttaatgatattttttatttaagggctcgattttaatatttgctatgtaagcatggtaatatttatgggtactatgtgccttgtcaagttacgagtgatttgaataagttttggtagtgtttcggtgagtgcgaaaattgagattttcatgtttcgtactttttagaaattcttaggagatcagaaatcgtattcttgtcataatttttgactcgggtatccattttggacgttctatgtactgttttgatgcatgcaacaggctctacaatatggtacatattttagagccaaaatataatttctattttagtgtatttataccgtggggtttaatagaaaaccctagattatcgtatgtgaatattaagtagtgttttgggataaacaattaattgtttaccgctgttatgatatatgggtcgagatcgtcggggatagttctccacttaagttggccaacatgtatgaacctagattgaaggtaagaaaaatatattgtactgcatagtacgtcgtttgtaatacatttagtattgtaatatatgatttgataaatattgagatatagttaacattattatataattaaaagattgattggttgagtatcgataatttgattatattatgcatgtaatatatggtcttacctgattaagtgatgcaattttcgtggcgacgtactgggtataagtacgggtgtcagtgatatatgatgagtaccgagcatagctacaacctcacttgattaggtgatgcgatttttcttgcgatgtactgggcgtaaatacgggcatcaatgatatatgatgagtaccgagaataggtacgagctcacttgattaggtgatgcaatttttttggtaacgtattgcgcgtcagtacaggcatcaataatatatgaggagtatcgagcgtaggtacgagctcacctgattaggtgatgtaattatatgatatatgggtgcaagtttttggtacatggtcacctgattaggtgatgcacctatgcgatatatgggtcctagactatggcacgggcttaactgatttggcaatgcaatacaagattatcaaattaaggcatcgacttgcttgattaggcatcgtgatgttatgaacactgttacattatcaagtaacatatatatgttatttatattattaaatgaatatgaattctattattggtgtaatagttttatgttaccaaatatctgtatactgatgtttattcgtggtagatgccagtagtgattttgatttcatcttatgaacaatgtgtgatggtttgattcttattgtatacaaatgataattttcgaaaaataaactatatgattgttattattacttttcttgctgagttcttgtgactcacaggtactatgtggtacaggtaaaggcaaagaaaagataaattaaccatgatatgagagtcttctccatcaatgtacatattgacctcaccggcctgcatgccgagttgccaggagtaattttgagctggctgtatctgctgtgtattttgattttgtgtttaaatggttgtcgtgtatatttctttagcaaaactttttctaacagacacgtggcgttcctataaagttttttatgttatcacgttttttaataattaattattctattagaattaaactagtttataaaattatgcacgtggcgttcctataaattaggacgttacagacgtcgtggtggacctctgacattcttggtgttatttttgttgtggctccaacggctttgtggtggtgtttttgaggtggggtttttggctgaagagcaatagaaaataaagagagagggagagagagaga

SEQ ID NO: 222809 - DNA, 2172 bp, Cannabis indica
gattattaatgaagtttggagagccaaagagaatgggaagcctattgatacccttactcatttaatttccaattgtggaaggagattacatgagtggaatatcactcaaaaaaatgccacttttgctcgttccaaggagttaaaaggaaaaattgattggctgtccaaatcatcaaatttgatggattgggtagcccgtcaaaagttggaaaaggatcttaatggtgtggaagaaaaacgggagatgtattggagacaacggagtcgggcgctttggttaagacatggtgatcgcaatacaaaatttttccacttcaaagcttcggctaggcggaaaaaaaatacaattttggggctgtttaatgacaatgggaatttgtgtactgatgagaattaaatcgcagaggtggcaattaattatttccaaaaattgttctcttcttcaactggtggaattgatgttaaagaaggacttcgtggaaaattccttgccgcattagtgaagccgataacagagcactcctggaacctttcaccagcgatgaaattcaagcttctttgttccaagttcaccccttgaaggcccctgggaaggatggattaccgggtctgtttttccacaaaaattgggacttaattaaagccgattttaccgctgcctgcctggatattttgaatcataattcggattgcaagaccataaatgaaacccttatatgcctcattccaaaggtaaaacaaccagctaagatgtcggatttccggcctattagcctttgtaatgtggtttataaggttgttttgaagtgccttgccaatcgtatgaaacttagtatgaattcagcaatatccgaaaaccaaagtgctttcattggtggtcgaattattcaagataatgccatccttggtttggaaagtcttcattgtatgaggaaaggtcggttcgggaatggaaggaagatggcttttaaacttgatatgtctaaggcatacgatagagtagaatgggatttcttggaagcaatgatggagtatttgggctatgatgtggaatggattaagaaagttttgaacagtgttaaatcggtttctttctcaatcattttaaatggatcgatcaaaggtctcttccatccgagtagaggcttaagacaaggagaccccctttctcctttttatttctaatctgtgctgaaggtctctcatgtctcattcaggaagcggaaagggctgggaagattcatgggttacggtttggaagcttggatctaaggctctcccacttatttttttgcagatgatagtcttatctttctagatgctactatggaggagtgcaaggcgataaaagaggttctgggaaggtatgaaactttatctggccaatgtataaactttgagaaatctgaaatgtgtgtgggcagcaagatcaacacagccgtggcggaaactctagctaattacttgggcgtttctttggtgaaaaaccatactaaatacctgggtatgccttcttttgtgggaaggaataaaaaacaagtttttggcataattagagataaggtggaagctaaacttcaaggttggaagatggggctcttctcccaagcgggaaaggaaattttgattaaagcggtgatccaagctatcacttgttatatcatgagttgttttagaatttcaaaaggcattcttaaggagatggagagtatgattgctagattttggtggggatctacatctaataaacacaagttacattggggtaattggaagaaattgtgtagactcaaggagcaaggtggcatgggctttcgggatttggaagattttaacaaagcgatgttggccaagcaaggatggaaactcataaccgaaccagctagtttaatgacaagggtacttaaagctctctactttcctcaaggtaattttatggaagctactataggccattatgggtcaacagtttggcgaagtatactttggggaagggaaatcttacttaaaggctctcggtggtgcgttgggaatggtagtactattcgaattaatgaagatgcttggctgccaagaggcatgcccttttctcttcgcacaaaagcattgcttcccgaaggtactgtttggaatttattttaccaggatcttagatctactcacaagtatgtt

SEQ ID NO: 222810 - DNA, 1764 bp, Cannabis indica
ttcaatctgaatgtgcctttgaagaaaaataaaaaaaaagtttaatgtaacttgaagtgatgacctaaaagtagtgaggatgaaaataaaaaagttgctttaacaagtgttttgcaggaaaaaggaaaattcatatgtttaaataacactttgactgatgtcaataggaaagaagatggatcagactcagatgattcaaaacttgatgataactctttggttgaatcttacaaggtaatgtttggtaagtagttggaaatttgtgctgaaaattgttccttggttaaagtcaataaagatttgtgtcacaacattaaagatcttgaagaaaagaaataaatatgaatctgaattgattttaaaagagtctgaaattacctctttaacaaagaaacttgaaatcttaatagaagtgtccaaatgctaaatccaggttccaacatttttgaaaaaaattcaaaatttaggtcaaacaagtcatgttggtttaggttttgtttcgactcaatccatacctaataccaaatttgttgatgtttttgtttctggaagttctatctctaccttgcagaattctgttattttagcaaaacacactgctgatactgaaaagaagtaacacggtaagtttaacaatttcaaatggaatagaagacgattcattcctatgtgccatttttgtaggataaaaggtcacattcgacctaaatgtgttactacgcaaaacatgtttaaatccaattattttggaaataaatatgtttctcaaaaataaaaaggggttgtaaaaaataaatgcttggtaggctcttcatgttttaaaactattgcttctcacatgtggtattttgacagtggttgttctagacacctgacaggtgaaaaagattatcttgacaacattagaccaatgcattatggagaagttactttcggtaacggtctagttggaaaagtcataggaataggatctcttaattttgaaggtcttcctatattgatgaatgtcatgttggttgaaggactaaaagctaaccttcttagcattagtcaaatttgtgatcagggttatactgttagctttgatagtaaccattgttatgtttataatattcttgatgaaattgccttgcaagggctcaaatctagtgacaattgttacactctcattacttatgctacttgtcattctacctttgataatactactgattatggcatgaaaaacttcgtcatatttatttcaaaaatctaaaaagattgtcaagtgcaggaattgttcaaggattacctaaattggataatgaatctgtgagaaaatgtggaccatgtcagctcggtaagcaactaaaaatttctcacaaaagtgttcctcatgtgaatacttcctgagtcctcgaacttcttcacatggatttaatgggtccaacccaggttgaaagcttgattggtaagaggtatatttttgtgtgttgataaattttctcgttttttatgggtagactttttgagagaaaaatttgatacttttgaggcttttaaatctttgtgtttgaaattaagagttgaaaaaaaattgtaacattggtaagattgttcgcattagaagtgaccatgggaaggaatttgaaaaaatactgtatatgatgagttttgtaaatctaacattatttttcatgaattttctgctcctaaaactcttgaacaaaatagagtggttgaaagaaagaaccaaactctaacagaaatggctagagtaatgtt

SEQ ID NO: 222811 - DNA, 1990 bp, Cannabis indica
tgtttaaaattacattgttttagaaattcatatttaggattttaaataacatacatggtagtaaatcttgatcctagtaaaataatcctctacaatgttgtcaaccaaatccaaaatggattggtcaacatctacacgatcgtatgtaaatttataccccaaaacttttccttcacaaatctcggaatgaacctgtgaaaaaacaataacataaataaacaatcaaaaatgcaaaaaataacctgttatacttgaaaagtgatcaaccaatggcggggttgtgaatcagatgcttgccatgtctgtgcacaaataagagtaaaaagcaatagaaaacagattttttttatagaggttcagccccctgtgatagcgagtaatgatctactcctcttttagttgtattataccaagggaattactatccaaatcgctatacgtgggatctactacaatgtatgaatcgaagtctggcagaactccagtgttggatagcctagggtgttgtacaacctaggcttgggcatgtgagaggttgaaggagagagggaaagagtctgacacttagagagtttgagagttctagcttagaggaggcttaggcaacttaggttttcagctaaaggttaaggcctttatataggtggcctaaaccctaggtttacaactcaaattccttgaaaataggatagttaccttgatatttacaaaagaccaaagtgcccttagattctagatatttctcagctattctgttgggcttttggggcccaattttcagccattcttgttgtgcacgtgtaggagaggcatgtgggacgtacagtggaacccttggccggccatggccttgtgctggccaggcttgtcaaccatgatgctatccctggcctggcttgccatggggtcggccaggggtggctggccagctcttgagagtaagttagtctgtcacttgatccctgttttagtgctagggtcttaatttaccagatgctgacttggtcttcattttagtgagttgtactaccacgtcgcactagttctatccacgtaagcatgccacgtcatggggacaaaaatagatataacatttgccccctaagtccctgtgcagatgtctgtacggatagggactttaccagtaaggttgatgttgtcgggactatagttacctttgctaaataaaaagtggtgcgtatgttgaagcaatttgtattgactttctgatctcattgcgatagagaaataactcctttacgtgcctttttgatgagttggtgatgtatgtgagaaaaaaggggcccacatatacataagtgagttttggggggaaacccttttttcactttcattttcagttttactttctctcactagaatttggttcttcaaaaatcccctcctctctaggtggtcgaatctctaggcttcaatctccttggaatttttgtgttatttcaaagatccaagcttctcatcttcgtcttcattagaatcttgttgcgggtaagctttctattccctctctttcacttgaattaattgattttgccatggatgcatgaacattatttcttgttttgaacatgatttgattcttatgctagtttttagcccattcattattttgatccgcatgatagccctaggataaaaaaagtgtgatttatagatgaaaaagaacagaatatgaccttcattgtaattcttggctctttgagtcatgaagaacatgaagaagatgtttgagttcttcaaaaatcatgtattttgatcaatgcacatgcttgccggccaaggaggctttgtttgaagcctggccagccatgggtggtttttatggggtttggccggccatggggatgtccctaggctggccggcctatgcttggaacttggattcctggtcggcctctaggctgggtcttaaggtctagcgagcctttaggacctcgaaccctggatggccaaggccaaggctccaagc

SEQ ID NO: 222812 - DNA, 1078 bp, Cannabis indica
agttgaggacaagggtgacaatgaatttgatcagtttgacgctctcttttacaataatgatcctatggtagatttgaacaaggttggtgatatggagttgcaagttgatgaagttgtaaaggtacctgctttgaggttagaactacctccaaggaaacagagtgcataacaagaaagaagaacccctcgtagtgaaaatcaccaaacactaagcactagtagcagtcggccaagtcctcctcgtagtattataccatcagattttgaagtttgtacaaaatttaaacccttcttgtgtggacaagggaagacatagagaaaaataatatttatacaacttctcttagtagtacacctttagggaaaatacacgttggaaagttgtacacaaacaagactgaattaaaaaatgcagttggaagatttgcattggaaatgaattttgagttcatggtgaggaagtctagcaccaatatattttacttaacttggaagaattcaaattacaaatagagattgacagaaagaggaagaaggcatgttgtgacatatttgaggttactgtgttccacaacaaacacacatataacctagattctagacatgttgataaccgttaagcagcacaatgggttattggacaccttattaagggaaagtacacataagatggaactaagtacaaggtaaaatgcatacatagggatatgcttgatgaatatagaatcaaaattaattatgagaaggatgaaggtgtaaggaaaatgcacttacatatgttaggggcacaccagcacaaattgcacaatcttatacgaagttacctggttacctgtacatgctgcaacaaaagaattaaggtattattatagacattgaggatgataggttcaagtattgtttatggtcactggatgcttgtgggatgggatttaagctttgtcttcctgtgagtatcgacagaacattcttgaagacaaagtatgggaacacaatgttagttgttgtagcataagatgcaaacaatcaattatttcagattgcctttgcaattattgacagtgagaatcacgactct

SEQ ID NO: 222813 - DNA, 3709 bp, Cannabis indica
aaacttaccattatatcttttctaactcaatatcatttagatgatcttagatcagtagatattgatcctgagatggttaggttctggcttaaatatattatatatgtattttgagttgtcgttaaagctgactaaatagatcgacccaatacttatatcttgaaaacatggtagtacaattgagtgagagtgctaatcataaatatggaatatatggctttcataactaatagaagtaaaacaataatttccttagagcttggctaaaggcgtttataatgattgagtcctcatttcagtaattatattagcttcccaaaatattatttacaagtaggtaagtcttttaaggataaaatatattaaagggtaaaacggtaatctcgtcactattcaatgtacaccatctatataggatcattaattgtttagattgtaacaatggataattcacatcgcatcaatatttggtatatagagcattctatataattaggagtgcacttctgaatctatagtggagttaagaggaattaataagttaggttacataggcccatggtccccacattgttagggataatatcatcttgtatactcaactaattgatttaataagtaaattagaattcaaaaatagactatgtcttatttgagaattttcaccaagtttggacatttttgagaagaaaagagaaatagggatttatttgttaactagtacacttattgggtttaattaataaatatatttaaattatattttatttgataattagttataattactaaaataattttagtatttatataattagaagagataagtggtaaaataggaaaagacatggtttttcatttaaataaaataaagtgacataaatctaactataaagctcatgaggaatttggccctagagttagatttcagcccatgtctctattttgagcctaatctcatctaatctagccctaagatactcttttataaagaaagtgatgagaagagagaattaatctaagtttccatcatcagactactcccctctcttctttctttgtatatttcgaaaatcacatgtattctctctcaaaatatttgttccaaaggtattttgagtattagcccactgtgatactcaaacctttgtgaaagactgtgtctatcgaagaagaagaagatccaggttcagattttgataatgctctgctacagacatgaattaaggcctagagatctgaatggaaggagtcatattattttgctgccatcaatgtaaggttttctataactctatatgtgtttaattcattgttttaagaaattcatatttaggatgttagattgtagatttataatcaaacatgtgtgttagtaaatctagattctcgtaaaacaacttccaacactaccaatgtttggtgctcactgcccaacaccttaaggtgcactttagtatttctctatacataatggctagttatcatcttggtcataagctttttatttttggagggaactttttaattagatttatttttcaaaggggtgactactttacatcctaaatttcgaaattttaattactaattaaattaaaactactgcgtaaatttacaaataaactgtttcatgaggcttcatgagccctccccacccacctaccatgcatggtggccgtatgtgtatatagttccctgcatgtccatatataaatacaaatatttgtttggcactaaacaagcacacgtagaattagtacttacaatacaatatacttttcgtaagaacagaaacaaaagaagaaataataattgatacgaatactgtatgaagagtgaaaatatagaatagaatatgattttcttttcctcagctcaatgaatgctgggatatcaatttctttatatagaagaggggccaagggccatttacaaaacgtaagcaaatcagctcagttacagctgacaaaaaataaaggcaaaaaaggaatcttttaatacacaatgattatatcatcattaaaattctaacggtataatctttcttggtttcagccattcatgatgaggtgacacttgtccaatcattggaccacaaccataacagaattgatttatacaatcattctttgatgatttgatggagagtgagtactcttctgcaatgcagagcacaataaacataggtgcatttcactgtttcatttttcttctttaacatcccctctcaaacgcaggggcgagttcatgactttgaagttttcaataaggaaatgaaactgagaacttgtcaagccttttgtcaaacagtcagccacttggtctaaggatggtatgtatcttactttcaattcttttctaagcactttacctcaaacaaagtgtatatcaatctcaatgtgttttgttcttgcgtgaaaaacagggttagaagcaagtgcacttgctcccaagttatcacaccaggtgacaacaattttaagagggaagttgatttcttttagctatgtatcaatccacgaaatctcagctgagacatgagctaatgcacgatattcagactctgcacttgatcttgacactgcatttttctttttggaggaccaagaaacaaaagtgttaccgagataaacacagtatcatgctactgattttcgatcatcagggaaacatgcctagtcggcatcaaaaaaaccaatgatgtcaagttgagagtcacagctaatgcgaaggcctttgttcatacttcctttgaggtatcttaagacacgctttgcaccactccaatgtactattgttacagcctttagaaattggctcagcttgttaatagcataagagatatctggacaagtatggcagagatactgtagacctccaatggcactcctgtaagctgtgacattttgcaatggttctccatcattcaaggacattagctttcctgctgtagctggtgtaggacatggtttgagattgatgaactttgttctttttaatagatcttcaatgtatttggtctgagttaagtagagacttatttcatctctgtatacttcaattcccaaaaagtagtgtaacgatctgagatccttcaatgtaaacttttaattgagtttagcaataaaaccatttactttcttgctattgtttgtagttacaattatgttgtccacatagattagagccatgatgatggtgttagcattttggaagaagaaaagtgaagtgtctgcttttgagtttttgaaattccagcttaataacgttgacttcagcttgtcaaaccaagttctaggagcctatttcaggccgtatagagacttgtttaatttgtagacaaaatgttcttttcctttctcctcaaacccttcaggttgtgccatgaatacatcctcctcaagtgtcccatttaaaaaggcattatttatgtctaattgccttatgtcacagcctttagaaacagctattgcaagaatgattcttactgttgaggctttaataactggagtgtaagtctctccaaaatcatttcatggcctttgatgacagcctttagccaccaaccgtgctttaagtctttggagagaaccatatgagttgaacttctctctaaacacccatttatttccaattagattctggcgaggtgcaggaggaactagaacatatgttttgttaaccattaatgttggaaattatttta

SEQ ID NO: 222814 - DNA, 2301 bp, Cannabis indica
ttaatttgaaaaataaattatttattacaaaataaataattactattttgacaattcaaaatagatttttttggactttcataaataacttttatcccacctcttgatagtatttcaaggtggcgatccgaggaccatgaacctataattttaggatagttaacatgataggagtttgattcttcgaaggtgataggttcacatccgtagcgctgagactttggaggacgttcttctacctccaggacttcgactcttagctcatgtcgaagtgctcttggatacctttctaaggccttccttgaattcccagctaagtgagggcctccaatgacaatgtccaacctacctgcaactggcataggctgtagtggagcattgcccccagctggagcttcaggtcgtacataccgctgaagaacaacagtttttttctaatgagaaattctatctcgtcccgcaactgattatactaattagtatcatgactgtaatcgttatggtaacgacataacttattcatgtccctcttccctaactctttgaaaggaagaggtttgcgatacaacattgttgactgagtggttgtatagatctcctctcttggagccaagagaatggagtagatggtgaagtgaggctcataatctcagtttagtcttatttcatgtctttttagaagttcatatttaggatgttaaatagcatacttgttagtaaatctaagatccgggtaaaatatttctaacaattgacggcagtataaatctcgggttacccaccactgacacaggagctggtggtaatatttattctgaaggagttgccggtgccagttgtctcaaccgacacaattcatcttcttgacgaagtatgatactttgcatttctagaaacatctgttgccaatcggcaggcggattagatttaccaactgccgcattatcccccagattccgcggaggcacagacagtgccggtggattggtttggtcaacaccaggctctacatgctcgccctgtggtctagatgattgcagagggtctattttcacaaataaccctataatcaacaacctcgacgagtcaggcaccaataccatacttacggacttattaccttaaaccctaactcaaccattttattggttattaaataaacatttatcaattaatacataaatcatggctttcatatcacatatatactagatgctcaaatactgcctaagatggaaagcggtaaataaataatcacataagcaattaagtatttactctcaacacttactgcaccacgagtcgagcttgtctctgacaatgattgtacatgttcagccgatctacaagaagtttaaaaaccttggcgctctgataccaaactgtaacaccctaataatcaggtatgctacgacaaccagtaatataacccaatcctgctaaactgggattactagaaaaataagagcggaaaaaatttaaactttgattacagtagaataaaaatataacttgtaataatttaaaccttacaatcaatccaaaaagacaacatgtttcgggatcccataaaacttttcacaaaatattacaagttattttacacgtcggcctaagcggaaaaatccgagaatacaaaatatatccactagtagacctaattcgctgggtctagtatggcccgaaccgaacatgtacaatccatcgccaagctctcacactcatggctaattactaacatatttaccctttcttgcacagtagagcacccgtgagtcaagcccaacaagaaagtataaatatcaataactacaataatgtatatatcacataattattaatgtccttatacttattgtctatttgacgaaaacttgtgtgttacgctcacatgcctacttatgtctatgtggcatagacccacgtgttacactcacacgtatatttataataaggccttagaacggttcatctcaattttaattaccgagtccaaccaaattatgccttgaatgcataattcattacttcaacatatatagcaaggcatagtattcaaaattatttaatcagtagggtaataaagctaggccttataactgctcacttcaggataataaccctaatcctggttctcatttaatcacaattataatattaaacatgaacgccaccgctcttaactctacgtactaactactgtcttacctaatgtcccaagtacgtgaagatttcaaatccttgggtgttcctaaacaagtgtcagtaatcctagtcacaattcctgggattcacaaatag

SEQ ID NO: 222815 - DNA, 2447 bp, Cannabis indica
aatggatccatgcatggtttttttgaaactaagagagggcttagacagggagatccaatgtctttactgttatttgtatcaggcatggaatactttagtagattaatgaggaaggttgggaagaaaaaagagtttggtttccatgaaaggtgtgctgatatggaattgaatcatttaagttttgcggatgatgtcctaattttttgtagagggaacttcaaaaggatctacttaatgatgcaagctctcaaattattctctatcacttcgggtttggtgcctaataatgctaaatcagcagtatattgtagtggaatgagtgagaatgaggttagaagggggcttgacatgtccggttttacaaagcaacatgagccttttaaataccttgtagtgcccatttgtgctaagaagatctcagctactaattgtagtagtctagtccagaaaatggtagctagaattaggatttggagctcgaggcacttgtcttttgcgaggagattggtattgattaaatcagttcttctctccatccatatatattggtgccaaattatgttccttcttaagcaaataattaaggagctcgaagcaatatgtaggagcttcttatggacagggaaaagtttgatgaatggagcaggggctgtagcttgggaaaaggtgtgttgctcaaagaaagttgggggtctatgactgatgtatattcctcactggaatgcaacagccatggtgaaacatgtgtgggcaattgagaaaaagaaggacaatttgtgagtgaaatgggttcatagtgtgtatattaagcatcaatcttggtgggagtacaaagctcctttgaatggaagttggtattggaggaaaatggttgagcttaaagacaaaatcaaaaactatgtacaacatagtgagttctcagcacatgattacaaaattgtggagggccaagcttggtttgctcaagagttcgaaaaggtgccatggagcaatgaagtgtggtctagattgaatacactgaagcatagttttgtactatggctagctatgaagaataggctcaaaaccaaggatcgattactcaagcatggatcgattgacatagacacttgcctcctctgcaactcggctgctgaaacagcagagcacctattttttggctgtgtttttgctgcagaatgtattgaacagatcaaggcctggtttggttggaatacaagagagagttcacttcaaagcatcatgaggagggtgagaaaagcaagttgctccaggttcaaaaagagagtactggctgctggtttagcagcccttgtatacctgctctagaagacccgaaatgagtagcagtgggaaggaaaaaaatctagtgtagctgaggtaatccaacaagtaaagtggtgtgttaagagtagagtagtgtctatatggcctaagaagattaaacaaaaagatagagattggtttgatttgttataagtaaattgtatagaaaagttaaggcctactttattaggtgcttataggttgtaaagttttgttttgtggtgcaatgaaattctgaattatataaaaaaaaaaatatatgaaaaacagttaaccttttctcaatgatgttgaacattattaatacctaataattaatgatcctaatatataataaaccaaattttcaaaagaaaaaaatttgagaaatttatagccaacactataaaccaaccttttagcaattcataattaacctaataatgcacgttttttttgaacaaacctaattgtgcatgttcgagcaacttagttacattagaattttcctatatatatcatctcaaaaatatataactaattataaatacaacaaaattaaaagttataatttggagaatatgagtggagaaggaaaggtagtgtgtgtaacaggagcttctggcttcatagcttcatggctagtcaagctcttgttacaacgcggttacactgttaaagcttcagttcgtgatcttagtaagttttctttcttaatctctttttggtttattattaattcaagagaaatgttataattatatgattcttagaaaaataaaataaaataaaattttctttaattactagatgtcatcatttttatataaaaaccctaactaaaaaaattaataattatgtttacacttgtaataaaattattattttggggtaaaaaaattaaaagaagtgttctgggctttttttttgttaaaaaaatatataggaaattttatggtgcatgattatccttttcgttttttcggtcatacaatatgactacatacaatgtagttatttaagatattttgtaaatttcaaataagttcaaaaacatgttatgtgctggaaaataaggttcaaaatgaaacaaggaatagaatgtttgaactttgctttctatattctatattgtaaattat

SEQ ID NO: 222816 - DNA, 1472 bp, Cannabis indica
ggtcgagttcactcgttgagagggagaaacaaaattgttatccttctagtggacccttcctaacatgactaataattcgcaattctaccaattatctaactctgaaattgatttaatatggcatgccctatagtgcgggtctcattgccacatggcttactcatgaactaccacgtattttaggagaaattccaggcaacatttactccccaagtcttatttagcaattttgtaaattggggcttgaaacttacctcctggaatgctgacatcacattctcgtaggcaacacgtgtgatagtctttaatgttattcaatactttttctcgattttggtgaagtcaattcgatttctcttttactttagtttgatgctctcattaattgttgggggtcagattggtgcttgaataaccgtctgttcatactcatgcttttgacaactttgccctagccactggatcgttggagttttttcacaagtttaaagtgagaccgtcgaatgagtgacgacccgagtcacccttgttagtctataaaatccatttatctctctcttcttcaaattttcaccttcacacttctttaaacttcaaaccaaccaaaattctaggcactctagattttcttttgctctttctctgatagtgtcaagctcagttttatcgtgtcgcgcaccaatacttgtaaccacccaagcttcttctctttgtaagttgcttgccatatgcatttattttattattgttttttatgatatttttgcataaatacaatatttatacaatatggctattatttgggtattatccccagccttcttcagtttacttctttaggttggggcttccatgcctagggtttatagaactcaccatttctctctcccttcgctccttgtatcatttcttcttgtgcatggtacaattagcacagaaaattcccaatttatgaacatgctagcattcggagggggcctcttctcagcagttaggagacctccattcccttctttgtttagggtttgatatgggggctaactgctgagtacattcttattttttagatgagcgaagtcttttacacatttgaccgacaaattttggaactccattccgagaccaagatgtcaaatcctgtagttccatcaaatcttcatctcaggcattggctccacaatatcccgtagtgcccttgttagtcgttatacaaggcctagtcccaattcctaattatgtccatcgggccaccagttgagaggccaatgatcaacagtcatctgtgggatgcgctcaccatctagaaaaagttgtcgaggagaacgagatcgtttaacgcccaaatgtgactttcattagtggtggttgtagtataaatcgggtggttgattccacatggaggtaattatggacaaaagcgttaagtgaaaaataaacacaaaaagttgataaaaagtaacaaataagtaacc

SEQ ID NO: 222817 - DNA, 1302 bp, Cannabis indica
aaataattcttacaacttctgtttcgggaaactaataatgtatatggttgggaacttgatttacaatcatggaatcttgactttcctaacagattgaatgtttgttccctttaagtgttaattgatgtaggaagacatctaagtgaaggtgttacatataatagagattatatatgtcatggaccaatatgtaattaagttgtatttatcaaacatgtcttttactataaaaatataattcatatcacaataatgatcagatagtagatcggtttgaattcttagtaatcatgaactcttgtttatattatgagtttcttcaattcactgtttaaagttttttcgggaggataattcttacaacttttgttttggaaaactaataatatggatgactggaaacttgatttacaatcatagaatcctgactttcctaacagatcgaatgttagttccctttaagtgttaattttagaactgaaaagttgtgcacaaatttagattggatctaaattatactttcataagtgaattaatggtactaaggataaagaaataattgaaatgataaaacgataatttgaccaaaactaattatggaccgacacaaggagggccttcaattaattgtattgattatatcaatggacactacaattaaactcactaaatataattcaataactactatgagttcaattctatatttatagtggagtaaatatggaattaataaatataattattttggtcaatgagatttaacaaataatctaatttattagagtttagtattatatgtctatggtccccaaattgccaccttgaaacattgtcaagagtatggataacactaaataatgatgttcagaaaatctattttgaattgaaaaattagtaattatttatatggtattaaataatttattttagatttattatttaaagtaattggagagacaaagtgttgtcggcacaaagaaaatactattatctggttaagacaatggtttcattaattactgtgtaataacacaatgaaaaatgcctataaaagatgagctccactgaatttgtttttttggattaattaattagttcaaaagataaatatttatttaaatttgaacttaaaactgactacaaatatttaatatgcttaagatattttctcaaagtggtagagagattcttaggaagcaaacactcttcaaggagatcgaagagagttcaagcacttgaagttttaacaagattcgattagaaggtggaacacatcaagcttgcggcatacaataagag

SEQ ID NO: 222818 - DNA, 1326 bp, Cannabis indica
aaagaactctattgaaaagagctcttcaaaaaatctcgtcattcgtatttttcattccacacatcatccagaacaaaaggaaacccagccaagcaaaatgtcgaagtatgggtgattgtatccgacaattttgttgttattaagataacaaaaattattttggaaaagtcgttggaaaaagaaacaaagaaatttcttttcgttcttgatgattgtggaaggaaaaatatgaacgggtttttttttgaaaatttctttttaatctgatgcaaaagaaagtaagataattgtgacaatcacattgaagattaagacaaatgttcaaacttatgagtttaaaaccatgtcttatgatggatgttggcttccatttgaagaacatactttcgataatgtaagttttgataagtttcttgaaattgttaagaagtgcaaggtttcctttagctgtaaaaccgatggctggtcttttacgaaacttgccgagacatgtactacaaagtgatgtatgggagttaccaaactgttgcgatattgttgtagctttgtggttgagctatcgatttcttcccccttatttgaagccttgtttttcttatctatcaaaatatgtcccaaaaattacgaatttggtgatgttgatagaaaaagaataattttaatatggatgacagaaggtcatttgcagcctcaaatatgtatgttattcatattgttgtattgaaaattatgctgagttacagactattatatgtgttgcataggcagttcctttaaattgatcaatttctggtggaagaattggtgatatttaacaatttcattgagaaaactgaagtgaatacagattagtttgaaagctgaagaagctttggatatgggaagaggggatggagctcgctcggcttctgatcagatcttaacttcttctaaggtaatctttgtgttgaattaagaaagctcggaaactcaatgtggatgttttagactgatgagttttgaatttatggtttagattgaaaacgcacaaagtgaagagaatgtttccacggcggaggtgagtgcaaagtcgttagagcatcatgaagaagagttggaattgtgaaaggcggctgcactgcagatatgggatttcgccgagaacaactcgaggagaaaatagagtctaaaaggattcatcttaaagagttgaactctaaactctcaatggtactaactcttttatatatgatagtcttaacatgtttctaatccaataaatttggttatttttaacttgagatctttgtaggtctcttgattcttatcaaatgtagcaattttaac

SEQ ID NO: 222819 - DNA, 1631 bp, Cannabis indica
aataattccaacagaaacttccctgcttgttcttgtgattgcacataacagtgcattatttggctagagcaatattgaatatctacagaatatacacttggctaccaagctacaactattctacctttatctatccaaggattgttagtagaaaaacaccaaccttgaaagagacttgaatacaaagctcccatattcttattctgtacttttgtttctaagaggctaacaaacccagcctatttcgaatgaatcaattgcttgatttcattgtgcttatgctgactattaacccctcttacattccaacataggaatctatccatttgaggaagagggatctccctcccctcctgtgttcatctcattcccaatccctgctattcccatctcaatcccaacttcttcaacattcccagattcagcactaagggattcaaacatattcctgactgttgtctgttcggattccttccttgtattgattttcttgcccttattgactttatgaaaaccctctacatctataaggttctcttcttcttttgttggtttctttggcatccatacctgtttgacaggttcttttttttattctttcttcctgcactctgatgttttatgtccaaattccaatacaattatagcatactaatggcagccattcatatttaacatctaatgtcacttcatgatcaaactcatcaataaaagaaattttctcaggaaattcttgcgctaagcttacctgaataagaattctggggtactgcagcctatcccgattcttagtcacattatcaacttgcagaggttcacctagctggcctacaattttgaacagagaagtctctccctagtacttgatgtccaggccttttagttgtacccaagttggaacattagtaacctcttccttagtaaaatcttcaataggattcaagggcttcataaccattggtttgcgatcgaaaaacacatacccttgctgcatcactttatctctttgctctagattctggaacctgatgatgaatatgcctttggccagtagtcccaccttcaccacttcatctttccatagtcttctcacaaatccttccaaaatgctgattggaggattagctccaataacatagcagaccaaggatggctgccagtaattaacctcatctgcaatatcctcaaaatcaatcttaattgtcttcctcacttctgctttccctgtttccagacctgatttatcgaacgaggactccagattcctcacaatgctagatctgagaatcgggggagaaatcctcttcccagtgctaacatcttgagaagcacgatttgtaatcgtgagccagtccaaaaaatcatgtcgaatctcactctgtctaatgataagtgcctccgattcctccggtgagaaaactttctcaatgtactgttccattggttcctggtactgttccattggttcatcagcatcttcaacttctaattcttgtatccccaatacagcatccatagatctagtcttaatgactctatccgaggatgagggaccagatttcttgcccttcgatttcccttttccggccatttttgctcttttggccatagctccggtgagaacaccgaaa

SEQ ID NO: 222820 - DNA, 1016 bp, Cannabis indica
ggtcccaggtcctggcgcaattcttggtcctcgttcgggcctgggtccttgtattgatcccagtctgggtccgggtctgtgttcggttccgtgtcttgatgcggtttttgatcaaggtccaattcctgttccagggtccttattctggttcttgttcctatttcaggtctcggggtccgagtttgggtttgggtccctgtctagaaattgttccaggttcgggtcttggtacgattgcaagatctagacaccaacttcggggtgggtccaagccccaggtcgtgggtcaagatccggatcccaatcttgggtcctggtctcattttccattcggatcttgggtcctagtctatgtccgtgtctgggtcagggtctgagactgggttgggtctttggtctcagtcctagtcctgagtcttgattctggttcgaattttgagttttggtccccaatctaggtctgggtcctgggtgcaggtttgagtctcccatcccggtccaggtcctgggttcgagtctaggtccaagtccgtgtctcggttcgagttcgtgtcctaatccgggtccgcattctaatccgggtctgggtcagggtcctagtcatattctagttctcggattcaaacccagactcggactcggaccctggtctggggtactggtctgggtctgggccagggtcttagtccgacttcgggtttgggtttgagtccggatatgggtcctagatccaaacattgactacgggtcaggtccatgccctaagtctagatctggatcacaatctcgagtcctagtctaattccacttggggtcccaggtcccggtctgggtcctagctcaagctccgggtccaagttcatatcctgggtctcagtcccagttctgatgcccgtgtcgcgggtctaggtctgagtcctaggtctcggtccgagtccaggacctgatcggggttcaagtcttggtccaagtctagattcgggttccgatctcggtctgggtccagattagagttc

SEQ ID NO: 222821 - DNA, 2748 bp, Cannabis indica
atttgcaaaaacacggtttttcataatatcatctacgtaaacaagaagcaccacaaatgtgttgtgtgttccgcgagtgaagagagtgtaatcagcttgcgattgagtgaatccctcttcaagaagagcatcggtgagtttcttataccattgtcttgaggattggcatagaccatagatagatttatggagtttacatacaaggttgtgacccgtgattgaggaagggagttggagaccttgtgggatttgcatgtaaacttctttgtctaagtcaccatttaggaaagcattattgatgtcgagttgcaaagtgtaccattgcttgatagtgacgatggcgagtaagattttgaaagtgaccatctttgctacaggtgagaaagtgtcaaaaaaatccaagccttcttgttgagtgtatccctgtgctacaaggcatgctttgagccattctacacttccatcgctgttgtacttaattgtgtacacccaacgacatcctaagctcgcttgttaggtgggagaggcaccacagtctaagttttgttggtgatgagtgctaaaagctcattgtccatggcttgaagccatttcttgaattgaatggcctgcttgtagctttgaggctcgaattcagctgttactgcaagaacaaacattttataagcttttgaaagtttggaataagagatatattttgagatgggataagaggtggaagttttatcttccagtaggtttttacactcaaaatcttgtagataactaggtggccgtgacactctagtagttcttctaggcatgatgtttggtgtaggtgaaggatcgcgctgagttgagctttcttcatgctcctcagcgtcattttctggtgtttctgctgcaatatcttgcagaataggatcaggggaaacataactgggatgttgcaaagggtaattttcaacatgtgtgttagttatatgctcgtttgggagaatgagaggtaaaaaaggattaatattatgactagttgtgttaagtttgtgaaaaggaaatacatgttcatgaaaaataacatttctagagataaaaatctgttttgtgtttagatcatataatcgacaccctttaactccccttggatatcccaaaaacacgcatgtccttgcctaaggctcgaacttagttctatgaaaagtaatggtaaaggcaaggcatccaaaacatcttaatccatcataatcaggttgtttaccaaatgaaatctcataaggcattttgttctttagattcggtgtaggcgtgcgttgatttaaaaatcagcagtgagtagacattctgtccaatattgtatgggaactttagactgaaaaagcaaggctctagcaacatttagaaggtgtttatgttttctttcagcaacgacattttgcttaggagttttaatgcaagaaaagtcatgtaaaataccatgtttagagaacaaatctttgaaagtgagttcaggtgcattgtcggatctgaaatgtttgaaaacacaattgtattgagtttgcacataagaaataaactcaggtataataaaaagaacatccgatttttgtttaagaagataaatccaagtaaatcttgactgatcatcaattaaggtaagaaaatatttgtgattagagtgggaagtaacatgataaggcccccatatatcacaatgtataagatcaaagcaatgagtagtaaagcttttattattaagaaaaggaagctttctttgcttttctagaggacagatatagcaaggttcaacattgtgcaaatcttttgttttacaatgtaaacaatcactaagcaaatcaagacatttatttgacaaatggcctaatcttccatgccaaatttcagcagatgcgaaggcattgatagaaacagttgtggtgtccagaagatagagaccattagccgattcacctttgccaatcgtcttcttggtgtgtgtttcctgtatgtgaaacttattagcaaagaatttgagaacatagttattgtcttttgtcaaacaactaacagaaataatgttatattggaaagtagggacataaagaacttcctttaaaaccagattgttgttgatgcgtatattaccacatttgtgaaccatgacatgattattgttaggtagaattaatttagttgaattgatagaatgaacactttgaaaaaaactcaaatcagaacaaatgtgtctagtggcacctgaatccactatccaagatttgtttttaggcaagaaagcacaattggttaacacgatacctgaactacctgtcgagggaccgtgatcggtggcaggcagacttgtagtttgagatgcaaggagattgagaagttgctggtattggtttggtggcaattgaggcagcagtgtattgttgtcattagtatttgaaccagcttcatttgaggtctgaaattgattagcagctgcctctttgattttcttgctttgttgtatccaggcgaatacccgtgtatcttatagcacttctcaatggtgtgtctgtgcatattgcagtgtgtgcaaaagggcctgccacgtttttgtgcttgattcttgggaggttctggtgtccctaagtttctttctccttgaaaggcaaaagccatgttggagttgggatcggcagaaacattttgcccccctctttgattctcttcctgtgtgactaaatgaaaaactttattaatctcaggtaaaggatccataacaag

SEQ ID NO: 222822 - DNA, 2562 bp, Cannabis indica
taccccttgcttgtcaagttctaccagtcctctttcactcacatgtcccagcctaagatgccacattttaatgctattttcaagagatttttctatcactggtgctgcagaatcagtgatagtatgaccatcaagataatatataccatttctaagttttcccttaacaataacaagtaaacccctagtaactttcagtgtaccatcatctatcttaacagtgtaaccatttttatcaaaaacaccaattgagagtaaatttcttttcagtgtaggtacataccttaactgtttcaagactatgatttctccatcatacattttcatctgaacagagtctattccttcaatcttgcatgatttgttgttgcctaataggacacttccaccttgttcttctgacagtgtgctgaaaagctttctgtttggagtcatatgaaatgagcaacccgaatccaatatccactcttcaccagaattcatacttgaggcaacaagtacatcaacagattcatatccatgtggagctagatcagcttcacctttaaacttgtttttcttgttttgctctctctttagtttggctttgagagcaagacaatcatccctaaaatgccttctttcttgcaataatatcattgtttccctgcagcatatcttgaaccagatttggctttgtgtcccccttttccatgatgattcttgtttcctttatactctcttttcatgcttctgcctattgtaaacagaccttcaccactcgattcaatcttgttatcttctttcctttgaatctctttagaacttagtgcagccttgacttctgtcatggcgagagagtcttttccatacagaatcgtgtcaacaaaatgttcacaggctttaggcagggagcttagtaggataattgcttgatcctcatcatcgatcttaaccccaatgttacataaatccagaataatcttgttgtagtcattaagatgtcttcttaactctttggattcatccattctcagagtgtagagtttcttcttgaggtataatttgttggccagagatttcttcatgtaaatctcagaaagtttgtcccataatcccaaggctttccctcacttgaaacttctcttaagacttcatcacccaaacttaacagaattgcactgtgtgctttggtttctatttcaaacttctttttcttgtcatcaatggctgctagagcttctatatacaaggcctctaaaatactttgatgaaccaacaatgctttcattttaattctccatagaccaaagtcattggcaccattgaacttgtcaatttcgaacttcgagctcgacatccttgatcttcttggtgagttctttgaagaacaaatttgattcttgaatttccgagataaacctcagctctgataccaatttgtggaggctttaactcccaacaagaaccaacacaacatcaagaataacacacacagatcaagaacgcatttaacataaaaccagcaacataaaacagaacttaaaccagtaaaaaaacttaatgaaagcactaaaagacaattagaacttacgtggttgggctacacaatcaatgtgatcatgagcttaatccacaggagaaagcagccttaatcatggctgtggtgatgagttttattgatctgaacaaaggtacaaaatagggataaaacccttgaaaaaaaatagagtcttgctccttacaaagtgtctctcaaatgactctctcttacaatctcaagagaggccaattacagctctcaaaaaacactctctcaatcctaactcaaccctctgattttctgtctcaactcaactcaaataagaggccttcaatatatacatatatatatatatatacagttagcaactaactaaccttaactgtcaaaacattaagttagttggaggaagttgctaactatcaaaactgacagtgagaccaaattcaagaggtcaaacctcaacaattatttttatttgaacatataaattcaaatataataaaattgaatctttgaattaaatatttgtttagatatttaatttattattattattttgtttaatctaatttatgattaataaatatatatataatttaaatttgagttcaaattattttatttatatttttttaacagaaaatcaaatttaattatgtattgattaaatttattcaatttaataatttattttttcaattcaaattcaaattcaattttagttcaatgatacttgtaatataatattttattaacatttttacaaagttgtcatttgtatataaaagtgagatgtaaatatatacaagtacaaaatggcatcgagtcaatttctcaatcaatatttataatcaatcaactattttatctatacatttttcaagttcttttaaagtttaggttcttttaagaatttttaaagttttataatttttatttaaacatgaaccatctatatatatacataattctgttgttaagtacaatgatgtggcagtttaatattttaggattctaattttctaaatttgtggttt

SEQ ID NO: 222823 - DNA, 1631 bp, Cannabis indica
ttgaccttcgaattgaaatagcgggaagttggctgctcataggtcgcattcctcaaatgagcctaattgcgcttctcttctaaaagattgagttgaagcaattgattttctatattttcactaaggctaaatacatctcttcacagggatcctgccccaacctcgactggcaccatgacttcgcacccgtaagagagcgagaaggggttttcactagtcgtggattggggagttgtattatacgaccataggacttgtggaagttcttctggccatacacccttacgctcttcaagcttacccttgatggtatgcttgattatcttatttactgcctctgtctgaccattgctctgtggatatgcgactgctgaaaatgctttcctaatatccaactcatcgcatagctagcgcatctccttacagtctaattgttttccattatttaagattaacttttatggtatgccaaacctacacatgatggcactgtacacaaactcgcgcaatttagtagcagtgataattgtgagaggcttggcttcaacacattttgtgaagtaatagacagcaactacgacgtatatcactcctcctttcccttttggtaattcaccaattaggtctatgccccagactacgaaaggcaagggacttgtgatagagtttagctaacttggtggtttgttgacatatgtagctattcgctgatatatgtcgcatttctttgcaaaactagatgcatctgcccgcaatgtcggccagtagtacccttgcctcattatttttaaagtaagggaattacccccaatatggttgccgtacatgccaccatgcacttcatacagtatatattcgtagtcagtcccatcaatacattttagaagtggctgggtgaaacttctgcgatagagcttatcgtcgtcaatgacatatcgagcaactcgatatcgtagttttctggcctccactttattttcaggaagaactcctatttttaagtagtctattattggggtcatccaggtgacctgtttgacgtcatcaacttccatcaccacgtctcgactgatttttggatgtgttaatacgtcaacatgaattacatcgagtaattctgcttctcttgtcgaggcattcgggccaaagcatctgaatgagagttgtgagcacgaggtattctagagacaattattttcttaaatttctacagtaactcacaagtgagggcgaggtatttagccaaacgacctcctctagctaggtattctccgtttacttgacagacaacggtttgggaatcgctgaaggcttgtaaatactcgattttcatctcaagagaaaattttaatcctacgcttagagcctcatactcagcgtcattgttaggcgtctaccttggatgctccatcaacatacaatttccacccttcattgtttagtatgtcaggataaatttgctcttctgcgatgatggccacttccttgcttggaaattcgagtatgaaatctgcaagggcttgtcctttgattgctaatttgggtttatacctgatgtcaaactggattaactctactgaccatttcaataatctacttgaggcctcgggttttgctaaaacttgcctcaa

SEQ ID NO: 222824 - DNA, 2605 bp, Cannabis indica
aataaataaaataaaatgagtattcaatggaattttctttgtttttttgggaattacctcatatactatttttttttaactttttttttcaaatttacagtttgagtttctaaagtagttgcaacgctagttgcaataagggtttctatacgattttttattgcactttaggttgcagcgctaggtacaataagaatttctatgtagaattccgtaaaaaaaaaaaaaaatgtttgaagtgtaaaaatgaaaaaaaaaaaccccttttgtttaatagaaaataataactattatgatagtttcattatcacagttccatatatgcaggttttatgtaatttttttagaaattaacacaaattactgttcaaataatttgttgtaggattatatataggaatgtattcaacacttttcatttttttttcagtaaaagttgtctcagttccgatcgtgccttaccagagcatcaatatttcgtcaaattctcattgtaaacagttttgtatatatgtagtgaaagtttatgttcttatatttcttgtcaagcaaaaactaatggagggtttttctctctctgaacatggcgattggaaactcccctatgctctctttggaagagcctattcaacagaggtgctatgaaagcatggctcaaatggaggatccgctatcccgaacaagcaaactaacggtcacagatgaggaaggctgggaaatcaatgaggatggggctgaggatagaggaaagttgtgtctcattgggcgactatgtactaggaaaccattcacccgttctttactaaagaacatactctgtcggctatggaatttgggggaacttgactgggatctgaaaatcaagaaaataacagacaaagctctgttcttgatcctctctttcaaacagaacaatacgttagaaaggatcttgggaagaactccttgggttttgaatactgggttcctgatattagaaagaatgaatggaataccctcggattgggagacgacattgatttctttcaccatctctgggctagtgttgaacttaccaatcaaagcaatcacgaaaactaatatgcttcgatttgctggtatggcaggagaagtgatggacatacaagaatcggatatcaatcgtatcacaattaatggattctttaaattcatagtaaagaactccattcaatccaaaatgttcccaggatatttgtttcctcatgaaggacgtcgtatatggcttcaattccaatatgatcagttaccctatatgtgcttcaattgtgggaagattgggcatgaattgcactaatgctcagaaattcgagatactttgacgaaggaaaatggagaagtggctccggcttatggtgcgtggctcaaagtagacatgatggggagaatagaatcaaataacaaaagggagacacatcagacgaaccaaaccaatggccaaggaataaaaaacataccaccatctcgggtgatagaacaaaattccaaagagggagaggatacaattcaacaagcaaaccaaatgaaaggtagcccccttcgtactccttacattaataatcaacaatctattacacacaaagatgaaactattctaaccatcaactctactcctccttataatactcgagatgaggattacatccaaggaactatgaatatcaaccaggaacagaccgaaatgaccatcaggaaaagaatgagagcagccatggggaatgaggcaacaatgagtccaaacataaatagatcttgcaaggccagaaccagtgagagtgaaagtgtggagttgggatcgagcggaatcctctttgatgtccccgtgacctttgatgatgggaaaaacattcaccgggaaaggcagcgggaaaagcgaagaaaatttgtgccaaaattggggattccttccaagattcaagcaactgagactaaagaatggggtaccagatttgatactataacagggaaagtttctatgccaaatgattcaacctctgagcagattaatgaagcggcaaactctgcggagcagggtcgctgaggacaatgaattcaattatttggaatgtccaagggcttggcaacccttggacagtgaacgctcttgccacacatgtgaaagactttaatcctggtattgttgtcctctccgaaacgcgttcgaaaagccattaaatggaatcgatccgtattcggttggggtttgaggggtgcttttgtgtagatgccaaaggaaaaagtggggggctggccctcctttggaaggctcctttctcggttcaattaaggtccttcaatgactaccatattgatgcttggatcaatacggaggaggatcttaattggcactttacgggattctatggggatcttgatccttctcaaaggagacactcatggactcttctgaaaaggcttgcaagaaacaactttgggtcgtggatgtgtgggggtgacttcaacgaaatcagaggcattaatgagaaacttggaggaggagggaaaccgaggtacctaatgaagaattttaatacaaccattgacaattgtgctcttcgagaactagatgtggaaggcagtaatttca

SEQ ID NO: 222825 - DNA, 2170 bp, Cannabis indica
gacttacttaatgtcaatgaaaaacataaatattttgcatctcactagccttggcaacttgcatgatgcggttgtatttggaaaaatggtccctagggtccatccatccttcgtacagttccatctggggcatcctaaaatgctccgacaatggtgcatcagtaattctcttcacacaaggctctgtatcctcttcctctgagtcagatagacaccactttgttttctagaaatctttctgtgatcttcatcaactcctcaactttacgttccaggcattgagtcttataatttgaggattctcttctgcgaacacgatcattgatgtggtttatcaaatcatttccacggggtcttactttttcaactttggctctttccttcttggcatttaatcttctttggagatcattagtggaaagacttctgccattatcatttgatactagatgcacttcttcaacaccttcgtaatgattactggaatcactaggaggaggtgtttcttttcaagaccctatattttgtactctggcctctatcttatttttctgcgtgactctgcctctagaattggtttggtaaccgtgcccggaggcgtggttccctttcctcttctgttgatattggtcagcagctttagacttcttagattgttttgcaaaaagagtcttcttaggtttttccaaagcaattcctttgcctttgtctttatgaactcctaaagtccttgggtctttcgaatctactttctcaagtgcatctgtggttggcggagctagcacgtcaggagatagtttagttagggcagtcatcacagtctccattctggtcatcttgccaagtaacaactcgttgaattgatcctgtcgagttaacctacttttggccaattgaagttgttgtgggatgatgaccacatggtttgactcatctggatagctcttctctctagcgttatcatcatcgattttgtcctaaggatcgtcttcatggatatcctccggtacgtcttcgatgttaacttcagcatcctcgaaactactttctctagacttcgcatcctcaatgatgggatcgtctcgattccgatcttcatctcgacgacttttctaatgactagtcacctcttgggagtcactagtatctccagctttggcattagggccagtgaaatgaaggccagatttggttctagtgagagccatgattactcggacgtaatctgcaagtggtctcactgctttctccagctcttaataaaaacaccaaaatatttgcaaaatttttggaaatagaataaaaataataagaactgaagaaaaaataatcaaaagagaaagtataaaatgagacaaacaatttttaacgtggttggagcgttaactagccttagtccacgagtcagtattatttagtaaatcttttgcttgaaatgccttaagaaatacacaagatgtatgttctcaaatattcctgagcaaagtttgcaagaggtttcaacccttaatccatatgattagtgaggtatttataatagtttgagaattacattaggtttttcatttccctctattgggaagtttacagtaaataatattcttggactttcttgtgaaagccaatccatggagaagacgatctgctgactagacggatcgaattaggattgatttggtcaacatcgcatacattgttgtgagcaattaatctgaattaattgcataatatttattgtaggaagttttcccttaaatcttgatacgatgcactgttgtgatctaacaactagagtttccttatttgtgtgaaggattataaagggaaactggaagggtcttccaggaatgcactatattgccactttggtctcgtagtaccgaagatgtctttcaggtacggcttgctgagggcaggaggctttacgagtgcagaactaagatacgttcctcgaaggacatacctagatgggcttggccgattttatctttgctgagggtcctactgataggttctgactgatgacctggagtccatgtgtccaatgtcagaaatgcagataacaaatagcaatatgtggagaaataactcttagacatctgtaaaccaacttaaatatcaaccaattgaatatattcatataactaaccatgttataaaagtttttttt

SEQ ID NO: 222826 - DNA, 2406 bp, Cannabis indica
aagctgatccgtgagaggacgggcaatgctaccatatccttgtacaaacttacggtaatagtcggtaagacctagaaaaccccgtaggtccttaatggtggatggagtgggccatcggagcatcgcctcaatcttagttggatcggcagcaaccccttggcggatatcacatggcccaaatagtcaacttgagcttgagcaaaaagacactgcttcttgttggcatacaagcgatggtgacggagtcggtcgagaaccaagcgaagatgagttgcatgagctgctacagaagggctatacacaagaatatcatcaaagaaaatcaagacacaatgacctcagaaatcttgaaatacctcattcatgagagcttgaaaggtggcaggggcattggtgaggccgaaaggcatgactagaaactcgtaatgcccctcatgagtccgaaaagccgtcttttccacatctcctggtgccatacgaattcgatgatacccaggcttcaaatccagtttggaaaaaacggtggcaccatgaagctcgtcaagaacaggaatgggaaacttgtctgccacggttgctcaatttaaagctcggtaatccacacaaaattgccaactgccatctttctttttcaccaataaaaccgggctggagaacggactagtgctaggctgagcaatgccaatacgaagcatctctcgaaccatcttctcaatctcacctttttgaatctgggcgtagcggtaaggacgcaccgatatgggccctgtgtttggctttaaggtgatggtatggtcccgtaagtgttgtggaggcagccctggtggtagctcaaaaacatatttgtattgctcgagaagctgactaataggagcagggatcggtgagtggtgttgatcctcggccacagacaacgccacgacatgaatcatatatgcctcagccctttttttcgactgttaacatcatagccttcaaagagatgggtgacttacataagctcgggtccccttgtaatgtcacccatgttcccgccatttcgaatttcatcaccatcattttccaattgacttgcatatttcccaatgtttccagccatttaattcccaaaataacatctgcgccccccaactccaatggaaggaaatctgtgatgacccgaattgctcccaaatcgagctccacttgagaacaaattccctcagttctcaccttgccaccggtgcccagaagtatcccataacaagtggtggccgatatgggcaggcctactgccgcaacaacttccattaaaacaaagttgtgggttgctccgctatcgattagtacagtgacggtttgattgccgatttggctagctaatttcatggtgttggcggtggagatgccaactagagaattcagaaaaagggtggcgagagtctcttcggtgaccactgtctcgcctgaatctggtgagagaggagggttttcatcaggcgaatccaattcttcttcgtccgcagtgagaagaatttgaaggagcttctgttcacattcacggccagggtgaaatttcttgtcacatctgaagcaatgccccgagaacgtttctcttggtactccgcctcggtcaaccgtttgtaagaggtgccggtggccgatcgagtgcttccggtctcggatgtcgttgaagccgtgctgactgaagaaggagaatatggtcgttgctgtgaaactgttggtaggattcgtgaaggaaaacttgagtaattagaacaggctgctgaactagacccaaaagaatgctttaaaggcgtttgaggcgtacgcctcgaggcacgcctcggaacgaggcattcaaaaaacgcctttgaggcttagcctccgtcactgtccatgaggcttatgcctcggccttgtgaggcgtacaccttgaggcttaagcctctgaggcgtgttaggcttacgcctcagctaattgagttattttggacctttttgaaagagtttcattaggcttttttaaagagtttcactgtgtctttttaaaagagtttaagtgagttttttttaaacttttcttggactattttgagttttattttgtaaattttgaaaacccaaacccaaataaaaaccctaaacattcatcactttccatcatcccttgcacaatactctcctcctctctcccttctcttcacgcttgcaatagcaacaccaacacaaggctcttctctctctctctctcttggaacttggaatatgtcttttaatctttatgtttgaaactttagatttcaaatttatcatttgtctattagttaagattttaattttgaaccttttatgtctttagttatattttaagacttatagctagtactttcatgaattgtacgactttattatgaaattatgtgt

SEQ ID NO: 222827 - DNA, 2513 bp, Cannabis indica
gtagatcttgatgttattatgctaactgagaatgtaatagtaactcatgaaattatcaatccgagagttactcagagacaatatctataagcaactatgaacaaaggcagactgaccttcgtgagcacctaaatcgaagacagcctgaccttcacgagcgtctaaaaccaaaatacaccttatttgcaccatcaatttaaccaaaatgaaaattaagcaacaagtggatcacgtccagctacgaataatttaaatagaggataaattcaaaaaatatcaagatggagaacatggtaaattgccaggctacgactcagatgaagaaatcgagccattccatccagatatcttaaattcagaatttcctcagggatttaagaacccacatgtctcgcagtacgatgggaccacagacccggtccctcatttaaatgactttaacactattatgcgaccaagtaatgtttcgaataacttgcgttgtattttattcccaacctccttaacaggggttgagagtagctggttcgataatttcacccatcattccataacatcctgggaacagttgtcgagggactttaaaaagcagtttcaagctgcaagagaccgtcaacttgaagcatcgtccttgaccaacataaagtaacaccgtggggagtctcttaaggcatatttaagtcgtttcagcacggtcgctaaaaaagtcagaaacttgaatgatagtattcaactaataacacttcaggcaggaatcacatctgacttatccacagccggaggtgaattatgggatgatctccagggtcgccttgtgaggaacattaatgagttcaatgaaagagcacaagtacttatgcgtaaagaagaagtgaggactgaaatgaagctgttaaaaattggctcgggaagcaaacctagcacaagtacggcaatagcacaatcacaacaaaagtagacaatcctggtggatcgaacacaaaaagaaaggatgactcaaaagaatcatccaagaataaaaagaaattgaaaaaacatgacaaatacgtatcaatttattcggtatatactgagttgaatgaaactagctaaaatatcttcctcgctaatgaaaatagggttgcattttgcaaacccgagccaatgaggcactccaggcacaagcaagattcaacaaaataccgtcgattccataagcatatagggcataccactgaggaatgccgacaactaaaatatgagattgagagtttgatctcgcgggcatactttaggcagtatgtgaaaaatgaaagaaacaagcctaaccagcctaacaacactaataactcgaacaatcagagattgcaacctccccctgttgagggcgaggatatcttggtaattttgggaggtccacacctcgtaggaaatagtaataatgcccaaaagagatatataaatgaagtgaaaaatgaaccatcggcatttgctcttgaaaaattaaagaaagcgaagtcgaatgaaccaccaattatcttctctgaagaagatacaaaacttgcactttatatgtgtttaaattccattgttttagaaattcatatttaggatgttaaataacatacatggtagtaaatctagatcctggtaaaataattcacaacaactaccctcagagccatggtaataatttactttcataaaatatagatttaaaacgatatttgtgttgaattggatgtgttcatgttggcttatgtgcatatttgatgattgtatagaaatcgcaatttacgatgataaatatttctttatttcaatctgaaaaatatttttcctagaaattagatgaaaaattaataaatttaggcttttacagaactcaatttagattttttgtgaattggttatgattttttgaatttgaatgaaaatatctgaaactgagaaacacgcatgcgcgcgcggacaagggcttcacacggcttcagacaacccaagaccgagttttctcgaacaagggctatcctaagcccctcctgactaagctttgcccctcaagaaggctgccagcatcccttttttcacacaatttggccccttatgtgcgcacagggagtatgcattgcatactcccctgcgcaatcttgtttttgtgatatcttttgattcaaaaattatttttcattgaaataaaatttaaattttggtagaattttgtgtaaaatcaaaatttttaaataaaattctaattatcagaataaaagtaattttattaatttcttaattaattaaaattagttttagatattagtagcctttaaatttgaaattttgatttttccacaaactagccttatggttaattttaaaatttttgtattagtttttttttattttatttattttaattataagatcagatattacttatttattattaaaatttgaaatgatcttattttgatattaaaatattaataaaatttataaataatctatttaatgtttcaaattttctaaccatatca

SEQ ID NO: 222828 - DNA, 1948 bp, Cannabis indica
gacacgaattgatgatcgtggaagagaaggtacactgctgcctcagtttcaaaatatttcttttttataccgaatcacttgttaactgtattagataaccgattttaaaaaaggtttctttattcaactagatttgggagaagtgtgcactattatcatcctgagctttattttttctcctatagagtataagatttctacggattcatgttttgttattcctgctgttactgttacagtaagagaatatgtatcaaccttaaattgttcataaaattaaattcttagtcatctttgtactatgttaacagtgactgaggttatctgggagggtgaggatacagcagcagcagcaacagccgaaaaggctaaaaatgatcaagcagagaaagctggcagtggtacagtcaagaaagctgagaataatagtgtccccagcaggtatttgaatttgttgataatattttactgatattccaatactaatacttctttttattgctaccatgttatttatttacttctatgtttcataccatgttcaattttggttttttcaaaataaatatagccaaaccagctttgttttgtatgatttaattcaagtgagggaaagggtgtttgtatctgtatgtacggtcaacatcttggccgaagagcgtaattccttttgcattcaaaatgagggaaagcatgttaatgcttcttcatcttgtaaccgtctttgaatgaggtttcccaaacatacatgttaatggaaggctgtgactcactcgtttcttctgatttttataaatccagaccgccagcagtggctaagaagtcacccgcagttggaggaaacactgccccgtcaaatcaaacaggtaaaggggcaaacaagaaaaccggaatcaaggatccgaagcaaggcaacattctttctttcttcaagaagaaagcttgaggacgagatggaatggaatggaatggaaagcctttcaaattctttagttattttcggttggattgaattgttgtccatgtgatgtagctcagatattgtgaattagttagtgttttaaactttggccattttgatggctttgttttgtacatatttcctttgttagaattttcctatattaagtgtgagtgagtctttttcaaccttaattatctagtgagatgttcttgcttttggtttcatattctaataatgctgaatatattttccaatataaccttactaaaaaagaaatcatgtatcaatttatataatctatcatttaaaagtgaagttaaaaaagttataatatgtgaaaaaggataaaattctactttttctattttactttaaatttttatattacatcatatatcattttttttaaatacatcactaaaattttaatatattttattcatttcaaacatataatattgatatttatacatatctccatataaaaaagtaaagttaaaacttaaaacaacaaacaattaataaaagagcattgttattgggtaccagtagtgcctagaacattctacaagtggtgattcacgattggttagcgatattctttaaaagttattttcttaagttatatgggatctgatacttaatgacactaatggcggtaagacacgaggaggctggtaggcactaatagtgtcttttagcaattctcttaaaatatgtttagagtaatgaatagtattctataaatgtacagcatgaatagtaaattttaaagaaattttaaaatgtagtgtgttttttagtttggctctttaaatattttagagattctctattttaaagcatttgatgtaggtgctcctagcattattttttactttaaaaaagttttgcaaattgaccaaaaaagaataacgattgttacattttggcacagagaaagagaaagagggaattagagtttttttttaaatgttttttttt

SEQ ID NO: 222829 - DNA, 2495 bp, Cannabis indica
gcaaatcgtaaggcttgaagtatagcatccaattccgcttctagcactgaccttccctctgaataactcagcaacacatttgcaaactcctccccaattccacattgcagaacccccgtgcctacttccccatctttaaccgaagcatcaactttaaagtggccatcccactcaaagtgattcaaatcacccctttcttccagaactgagttttccgaaaccacagagtgatctttgacacgcacgttcttaaactcctgagcacgcttcagaatcctgcaacaaatttccaaaacatttggcttgtggcccttgactctgaattcatttctgctgtgccaaattacctcaacaagagaggcagtatagaacatcagcatctcatcttgcctattaaaaagccacatcaggaactcctccatattcgaagcttgcacagtatctacccttaacccccaggggctgctgaaccagatgcttctagtaaagttacaatctttgaacatatggataatagtctctgtctcttggccacagaaccagcaaattccatccacttctgaccttaagccccgccactgaacaggcaaacaaccagaaatacatttccataacagtaaggcttgtctcgggtgaaagtgcgctttccaaaggtctttccatatctgtttctcaggatgtattcgctccttttgagtccaccagtaggcacttttaacagaaaaacgaccatttttactgcctctccaaaaaagaatatcatccctatcctgtaaaggcttaatccgaagaatggcatttgccaccggttgagtaaaacactggtttatgacattttcatcccaaacacaagaatttggcatgaataagtcagcaactactgagaaagagtgtgtaagggcgtaagtgaagctatccctaacaacttcaggactaaaaccaggaacccaaggtgtcaaccacatatcagaattaccccttcccactatcaaaccagcacccgaaactaccacatcacgaccattaagcatccccttccataccatagagtctccccgtttcgcttccacattccagaaactcaaaattttgcagtatttatctcttagaatattaacccaaggcctatctgcattattcaacatatgccaagcaagtttagacagtagagctaagtttatgtccttgaagcgacgaagtccgagtccaccattacgctttggctgacagatctcgctccaactctttggagcaaaatagcgatttgagtccacagttgagccacctcctttccaccaaaaccttgcaacgatgctgtccaattcagaacaaacactcagagggactcttgaagtagccatagagtacgttgggataccatgaagaaccgaactaataagagtgagccggcctgcttgagacagtaattttgttttccatccttctaacctccccaagatttttgctttgaggaaggaaaaatcctctcttttacgggcagaagtaaaaaaaggattacccaaatatttctcagttctagataaactgcccatacccaaagtcgagaaaattctattcttcatatccagagacgacttcggtgaaaaaacaattccactttttgccttgtttaccatttgaccagaccacctttcatatttctccacacaggtcttgaaagcaattgcttcttcctcatttgccttgcaaaaaaagacggcatcatccgcgtagaaaatgtgtgaaatgggcattgactgcttcccaatcctgagtcccgtcaattcacctctgttttcagcttgcaaaatcagtttcgaaagcacttcactacatagaatgaaaagatatggggatagcgggtccccctgtcttaaaccacggcctggtttgaaaggttttaacggggcaccattcaacaaaactgaaaactgaattgtagttatgcattgcataattagattgcaaaagtgattgcaaaaaccattcgcctccaacacttttcggacaaagctccattccagtcgatcatatgccttattcatgtcagttttaatcgccataaatccaccccttcctttcttttttttcaaggcatgtaaagcttcagaagctagaaccgaacattccgcaatccaccgtttaatttcctcattccgttagatgcttctcctcttataataggaaaactaaccatgcataattctttttatttttttattttttatttttttaatttttaaattaatttaaacagataagaatgatcatataaatattacagtactactactgaaattttaaagcaaatccttgataatatctctctgttttgacctatatatgtacatgtctaaatgtaattcttatcaattaaactttaatatttgtttgtttacactataagtttttttttaattttagtgataattttttagtcgtaacataatttttttgttactaaatatgatttttatttataataaaaaattatt

SEQ ID NO: 222830 - DNA, 2259 bp, Cannabis indica
tacccaactgcgtataatgccattactagggcgaccgaccctagtggatttcagggcaataaccatcatcaggcatttgtgcatgaagtacccatgtgacaatggatgcactggcatgatcaaagtcgattggaaaagcacaagaaattgctacaatgtctcaatgcagactatgttcattgtctgggaagagatgcttatttccctcaaagcaaaataattgatggatactaaaatcgaccgggatgattttcaagataaattggatcctagggttgggacagataggaatctagaaccaatggaggaggcaaagcagataagcattagttatgaagatcccacaagaactattagagttggaagaagcctacccctgtccataagagaggacatcataaacacggtcaaaaggaatcaagatatgttggcatggagccattctaacatgacagggatttatggcaacaccatctgccacgctttgaacatctgagaagatgcaacccccatcttcaagaaaaagaggcctttagacccagttagggctaaaacagtaaagacagaagtggacaggttgactgccaatgatttcttgcgagaagaattttacccagtatggctcgcaaaccctgttctgatttcgaaacccaatggctcattgagaatgtgcatcaactttatcgacttgaacaaggccttcccaatagattgttttccgcttccaccgatagatcaaattgtagatgccacgtctaggtacaagtttctcagcttcatggatgcatactttgggtataatcaaattaaaatgcacatcacggatgtagatcaactagcttccaaaccgataaaggtgtttactgctacaaggtgatgccattcacgcttaaaaatgctggagctatgtatcggtagatggtaaattaagagaaattagtgagaattccataagaaattttgacatagaattgccgtgttgggtaccaatttgaataaatggaactattatatgaacatataacagtaaagttaggaataatagaaacaaacagagaatttgtcaaaatatttccctccgtctattagagttagtcccacattgtgtgaaaataaattattatatataagataaataggttactccttctattatcaattagtttcgacatggagtcctatgtacgttatctcaaattctaacatggtattagagccggttgtgatccattgtgagctcaaagtatcgctcgtccaaaaagcgaatcacaaatgagtcgtttgtgattcgttgtgagcccttgtaagtgtgccaatttttagcatatacctcattccaaattctaaaccctaccaagagggtattttagaaatgccccacatactatacatataaatatcctcaccggtgggtattaaagtaaattcctactccaaaaaattcaatatctatgtacatatagatagacatacacacaccatatatataaataacaagcaaaactataaatccataacattagaaagaaaaactaagactatatatattgttaattatctttggtagataacggtagatgcaagacaacaagattataaatgaaacaactacaactcccacatgactgtgtgtcagtcggctaaattacatatgaaaattacttttacctgacaaggaccatgtaagctgcaatttcgaagactaaagaggccatgacttaagtttgaaaatgagctcgactgagaggcgggtgttgatttcatgagagagactgatcggtttaaaagtgaatcttgggttgagaaaatggcattggtccagtgttgcactgaagtaaatgaaaaacaaaagatgaagaaatgggcgggaaagagtggccgctagcaaaaggacatcaaaaaaatttctttttgatagagatgaaaagtctcttattttactgttgcaataattggtagaaatgccaaaatgtctttaggttattacaaagagatgtatatatagggaaaaggagaaagaagcccatgaaacaaagtgggtcaaaaaatagtgcatcaggtaatactaatatgggccagctaattctaataccccatctctagatgaaatatatatttttttaagttcatcttggttacaatagtgtgaaaatagccagtgaaaagaggcttggtaaggatgtcaacaatgtggtttttggtggtgacatgaattagttttagtgtgccctcttggatcttctctcagacaacatggca

SEQ ID NO: 222831 - DNA, 1823 bp, Cannabis indica
tacaaatattgattccgattatttttcatttaactcgattaatttcttccattgattattctgattctaattacagtttagtaaacgtgtcagtaatgcattccttacaaaattggtggggaaagttctccctttcttttcttccttatttaatcaagttctacatttcttaattttaataatttaagtaaacaaatgtaagggaatgattaccttactatttattcccattacttattagtaaacatgccataagggtgatggattttaattattttattttatttttaaatattaaatatatcatgacaattttgttctttaaaatatatattacaaaataactaccatataatatagtttaactcaaaagggcaatttattcaatttaagcattccgattacgtttcctaataaaataaattagataaatcacaactattccatttccaaaaaaatttagtaaacaacatattacaaatattgatttcgattattttcatttattccgttacatttctccattaatttattctgattccgaatactgtatagtaaacatgccataaaccccaaaacccaattcccattcctatttcccggcccattcccagccccattcgcattcccattcccatttgcattcgcatttgcattcgcattcgcattcccattcctattctcattcccattcttggcccattcttactcccattctcattcccatacccattcccattcccaaccccattcccatcccattcgcattcgcattcgcattcccattcccattcccgttttcatcccattctcattcccgttttcattcccattcctattcccattctcattccttagcccattcccatttatattcccattccaattcccatgccccagcccattcccattctcatgccccagctcattcccattcccaatccctattaccatttccattcccattctcattccccagtccattctcattccaattccctaaacccaagaactccaaaaccccaaaccccaaaccccaaaaccccaaaaccacaatatctcaaaaccccgaaccccaaaactcaaacaccaaacccaatctccattcacattcccattcgcattctgattcccattcccattcccattatccaacccattctcattcccgttccctggcccattcccatttccatttgcattcgcattcctattcccattcccattcctcggcccattcctattcccattcccataccctagtccattcccattcccacgcatttgaattcccattcccattccccgacccattcccattcctattcccattccctggcccattcctattcccattctcattctcattccacggcacattcccattctcattcgcattctcattcccattccacgacccattcccattccacgacccattcccattcccattccccagcccattcccattcccatttccattccaattcccattcccattccatgacccattcccattcccatttcccgacccattcctattcccatgccccaacccattcccattcccattcccatttacgttcccatttacattcacattcctattctcattctcattccccaaaccattgccattcctattcccattcccattcccattccctagcccattcccattcccatccccatctccattcccattcccattcccattcccatcctcatttccattcccattcgcattttaatttccattctctaactcattcccattccccactcctcggcccattcccattcctattctcgttcccattcct

SEQ ID NO: 222832 - DNA, 4149 bp, Cannabis indica
taagacaaaaaatcaatgaaaagcatggtgacttacgagaccatcttgacaagaagaaacacgcgctgccagtgtctgcgggcgcgttgaatgaaggaatcctggctgagttagccatactacgcaaagacattgctagggtctcccggagataaaaaagggatgactcagattccgattgcgaggaccgggagccatgtgcccggcacatactggatgcagagctccccaagaactttaagatgcccgagatggcagcttacaccggagatttagaccccagtgaccatttgtcctggttcaaccgggtgatgactgtcatgagggtcagcaatgacgcaaagtgtttatgctttccactaacgctgagcggttccgctgaagaatggttcaagaagctggaacccaaatcagtagactgcaagaacaagctacaagttagcttctggagacagtttgttgcaacgagaaaaattaaccttgaagtcagcgccctgactaatataaaacaattgcatacggaaactctaaagaactttaacaaaagattcaaagaagaagctttaaagaccaagaaggtggacgacgaacaacagctagccctcctccaggctgtgatccgcacggggactcctttttggaacgaactaaaaaagagggagcagctaatctccaagatttccaaaaaagggtccaaaagtatatcaacttggaagaagccaaaatagtggcttacagaggatattacccggccgaagtgtcaggatatgcacaactcccgggagccatgcctccggccactcctcaaatgagcgacatacaattctccgctaccccaggatataatcagagcctcgccttggctcctgcatcatcacactttgggacccccatgggcaatccctcggggatgaacgtccaagccctgtctcagtccacgcttgccaccaacctgacaggacctcctcagagttcccggagtaagaggtcctcaaagggcagcacctggactgaggacaaatgacaatggaggggatacacccctcagtacactcaatacacggagcttacagacacgcaggagcgggtatactttgccactaggcaaaatacacattaccgaaaaccttctcccttgtatagggatagttcccagagggatcccagctaaagatgtgaatatcacaacgacattggccatagtaccaatgaatgcaagagcctaaaagacaaaattgtgaacctaatccgactaggtcatttatatgaatggatcaagaatcgattaccccatcttaacccggctctagtaggaggcccattaccacatggagcaccagggggtatgcccggagaacaagcgcctggggtaccccccggaggagcactccctcagtaagtccttggattaccaccaagaccaaatgggagagtggccatgatcttcggcgggccccatatcgaaggaaccaccagaaacgagctaaagcattatgctgaggccataaaacacgatgaagtgtgggaagtcactcaactcccagcacaaaggccccgactcatggaccatcccattaccttcacagaagatgacgcaaaactagtgcgtttccctcaccatgatcctttggtcatagaaactcccatcgccaataaaatcgtggcaagaatattagtagataatgggagctccatgaacttattgttcaaagaagccttcacggccataggcctcatggatagggatctatcgtctagtggctcccagctcataagatttaacgggacaacacttatcccaatagggaaagtgagacttcctgtcaccctgtgcctagacacccccaagagtactttcaaatactgcaccttcgtagtagtggattgcccaacaacgtacaacgccatccttggccgaccagccttggtcgatttcggagcaatgacctccatccggcacttatacctcaaattccctactcgggaagtcggagtggggacagtgatggcaaaccagggagaggcaaggcaatgctacaacgtcacaatgcacttgtctgtgttgatggtgcacgggagtgctgaaccaagtttaatggaagaagacgagttggatccccgtgtgggatcagaaacaaatgtagaacctatggaagacactgaggaagtaagtgtgtgcgacctcgactccaccaaggtcatccgtctaggaaaaaacctagaattggaggaaaaaagtaagattgtcaaagcattaaaggtagccatagatgttttcgcgtggtgccaaggggatatgaccggcataagcccccacgtgattacccatgtcttaaatgttaacccagacatgccaccgatacagcaaaagcgacgtcctcttgatccagtaaaagtggacgccttagagaaagaggtagattagatgttaactaatgacctgatccgggatttgtactatttagaatggctggctaattcggtattggtacccaaatcgaatgggacatggcgggtttgtatagacttcactgatctcaacaaagcctgctcaaaagattacttccctttacctcgaactgaccaaatggtggacgccaccttaggattcaagctgctatccttcatggacgcctactctggatacaaccagatcaagatgcatgtcgcagatcaagaatgtaataacttcaggaccgacaagggggtattcagttacttggttatgcacttcgggttaaaaaatactggtgcaacttatcaaagaatggtaaatcgaatgtttaaaggcctcctaggaagaaatatggaggtatacgtggatgatatgctagttaaatttaagacatgcatggaccatgcaaacgacctcacagaatgcttcgaagtggtccggaggtatgggatgaagcttaatccgaagaaatgtacttttggcgtcaaatcgggaaaatttctaggattcatcgtcagccaacagggaatagaggcaaaccccaaaaaaattcaggctttactaaatatgccttcccccaagaaacacaaggatgtgcaaagcttgattggaaaggttgccgccttgagtcgattcatttcccggtcaatcgaaaagtgcatcccgttcttcaatatcttgaagaaatttcaaaaattcgatggacgaagtgtgaggggcattcaaaaaattaaaagagcacatggcaaaaccaccagtactgtcaaaaccagttcacgaaaaggacttgttactatacttggtcgtttccgagaacgctgtcagtgcgaccctagtctgggaaaaggacaaggtccatcatccggagtactatgttagcaagcgcatgataggagccaagacacagtatcccttaatcgagaaactagttttttgcctcctgatggcttcgaggaaattgagaccctacttctaggcccatcccattaaggtacttacaaaccatccgcttcggcaagtcttgcagaagtcggaagcctcaggaagactccttaaatgggccatggaactgagccagttcaacatacactatgttccatgcatttccataaaaggacaagtcctggcagacttcataacgaaatgcaataaggcagaggctagctcaagtatatcggccccgcagataccagcatggaaggtgttcgttgatggggcatcaaatgaaagtggatccggcgtcgagataacaataatatcaccggacggacttcggctccaggccaccttgcgcttcgcattcccagcttctaacaatgaagccgagtacgaagccttaattgcagaactaaggttggcaaaagtcataggggctacaagggtagaagtcttcagcaattcacagttagtggttaatcaggtatcaggggaataccggacgcgtggagaaaaaatggtcgtttacgtggcaattgtcagggaactgctccatgagttcactgaatacataatggaaagaatctcatgaggaaagaacgctcacacagattgtttagctaagttagcctcggatagcaaaatagagaaacaggggtggtacccgttgaacacctcgcggagccaagcattagaatcaaagaaacggtagctgcaaatgagcaagaactgggttggatggattccatcatcaaata

SEQ ID NO: 222833 - DNA, 1617 bp, Cannabis indica
gcacctatacctgtacaaagcatttgataaaaaataaaacaaacacaattgcatgatgattataaataaaggatgaaattcattaagaatagcaaaagatttcaaactcaggattgaaggatgcccggtctgctagttgttcaaaaaatgaaaaatatattccaagtttagagaccgcttggtcggtcatcttgtcttaaaaaaggccttatggccgaacagaaaaaaaaacaataaaagagaagcacttaaacggcaggagtcccaggctctttgtatgggtcaggtggatttgaaggggcctgagaaccgtcattctggtcggaaggagcctcaacactctgataggtaggtgaggtggaaatggttgcctcaggctccccgtaggccgcctgagcagcgtagtagtcgagaaacatgtctttggaagtacccaagtaatcaaagtttgccttaggattagctctccaaaggtcataaaatatctcaagaccagctgtctctaaggcatttaccttctccctgagcctcaccacctcagattttcgcttctcaacctcagccccaagctcctcctccttagctttcttctcttcctccaacctacgaagaagggtcttgagaccctctcttttgtcttggagactggtcacttcccgagttaaggaagcaatgtccgcttcgagttgctcggtggatggcatgtcctgcagatctttggtcagtttggccactttggtctcaaaagcaaggagcttcttattaacctctcccagctctatccgcacagccccaagttgaacccgggcttcctcagtgtccttcttggccaagtccacttccgttcgcattgtgtcggaaatggcaaggttcttagcagcagccaacttagctcgggaataggcatacgccatcttcagaccagtctgtgcagaaagaagacattaaaatccaaactagttaaagagaagtgaaagggaaatggtagaaaagacttacccgtcaaagctctttcaaaactcatcccatgaccagctctcaggacaagtcatggtttgccccagctagttgctcgttcacctcagggaccgaccaaatcacatagtgggtgagcaacctctgccttttttagtcttctggtgcagtacaagaggtgaggtaggggccttaacctgttcagatctgcttttgatcagctcagatccacccttcgcctgttcaggtctgtccgaactacctcctcgagaatctttggacttagtcacttttgagacaggagggtcaacgacagtttgttcttcagagaggtcaattaccacttcagctggtgccttatctctggatggggtctcaacgcctttggacttcttcgccggaagggacaagctggagcttccccccactctcttcttcaaagcctcaatcattttctgagacatttctggacgaaataaaaataacatagtcaaaaaaagcataagaaatatgaaggcatgataatcaagaaacttaaatgcaagatggagtactctgcccactggcaggagcatttgcccgaacaagcacgaacgtggcatcgtcatctgaggaatcatcctgctcctctaggatggcttt

SEQ ID NO: 222834 - DNA, 2325 bp, Cannabis indica
tatttttgtttccaatttttttttaaaatggctatcacccgttcatcctcatcttatcccccagttcagaaaaaaaattcgaaaatgggcttgaaatctctagctaacaaagcaaagggtaaacgaccagttgttaaagaggaggattatgattttgctcctcctttaaccaagcgtgggaggccacatgctaagaaaaaatcgaagctcagtgtggaagagcaaatggttgaagaaatttctagtaaaaaagctagtgttgctgccgaagttcgaacagaggttggttttcagtttcattttcgtttcccatttttttgaacattttagtgtatttccagattttgtgttttttgttcattctactttgtgaaattttagggtttcctttttaaaatttcgtttgatgttgtttaattttttaggtctttaattttgttttgagtaggtttttccggttcctgctcttgcagctgtttcagctgatgccatggctaaaacaagatccaagaatcttggaaaacctaaatctgcaacgaaactctcaaagaaagctggaaggaaggaggtaactgaggcggtacaggttggcttgatggaaagaattgctgaaattgaagccctggagctttcggatgaggatgcgagagacgatgattctgctccaatcgatgtattccaaccactttcaccaaaatcgtctctggacgcgattaagaggcaggaagatgttcgtagtgactttgcacacttcattcaggcaaacaaccaatgcaacagtgatattgcagctggtaagaaatcgatccctcctattctgaggtctaatactgtagttcgaaatcttgagaattcttttaagcatgttaatcagaatgtgaacaaagttaggattacaatggatgacattgaagatgaaattcatttttggaaatcatccatagtgtgctatgtgttaggagtgaatcccccactccatgttttggatggatttgtgcacaggatctggcaggggaaagtcgacagagtgaaaatgctgtcgtatggcatttttattattcgatttcactctcttgaggacagggattaggtattaaatggtggatacatcttttttaatagaaggccggtggtgatgaaaccttgggacccaaatgaaaactataagaaagaagatgtgcaaaaggtaccagtttgggtgcaactagagggactagaattgaagtattggggtcagaaatcactcttcaagattgtagctcaagttggaaacccgactatggtggatagtgtaactagagacagagagagattgagctaccctagaattttagttgaggttcaaatggatcaaaaactgtcagatttgctggagtttgagaatgagtttggtatgaacacttcggtggggattaaatatgaatgaaagcctatctcttgcacacattgttcaggggttgggcatgctgcggcagagtgtaaaaagaacatcaatgggaagcagaagtggattgttaagagtgacaaaagacaacaacctcaggtagatgaggaaggttttactgaagtgcaaactaagaagaacagtggtaatcgagataatacagggaataaagttgctggtgctggtttgactattaatactgaagtggaaaacatgttctaggtgcttgaggaagaggaattgattgctggtgctaatgattttgaacaggctgatactttgtacaagtcaggagggggggagagccctctctgtctaatggataaattattagcctggaatgttcggggagccaacagtcaacataagcaacaaatgataaagcaatttatcaattctcagaaagttgagtttgttggtctccttgaaacaagagttaaggcttcgaagcttggagccttatacttgaatgtgtttgtaaattggtgtttttcatccaatatagcttggcatgcaggtggtaagattgttatcgcttggaatcctaatagataaactgttgacatccttaaatgcactagtcaactaaggcatttaaggttgacaacaactaaaagatttaatagtcttttgactgtggtttatgcatcaaacaatagatatgaaagaagagacctatggaaggatttatgtgagctgaaaagaaatgagcattggttgttaatgggggattttaatgatattcttgctaaagaggagagaatagggcatcgggttaaagctcatccggacacagagttcttgcaatgtgtcaatacttatacttgtcaaatggaagatgtcaaagcatgtgggaatttctttacttggtcaaacaagca

SEQ ID NO: 222835 - DNA, 1070 bp, Cannabis indica
atatttatatttatataaaaaagtagaagaagaaggcactaaatatataattaatctaaaacatatatatgtataagaggagaaaaatatatatatatgtactcactctcaattttaagtgtaaattagtgggaattactatatatgactttaacaaagcataatatcttgtcaaaaagcttatttctcatatctctaagcactaaaaaaactatttaagaaatagctttataaattatcaagccttgtattttctagcaagtgcttagaaaacttgtgtgcacaaataagcaccttagacctccatatatggtcttaatcccatagatgttaccagccaaaatatagctttaaatggagataggaacgttggtgagaatgatgatagaaacatctcccataaataatttcttaagttccatgagacatatcacttgaagtgataccctcaaaccatttaccgttaaatgtcactaaaacatcgaaatctctcatttagtaatgttggcgattgtgtcgcctggacctaactctgcataccaattttgacttcaaaactcctctttgagtaaacttagcacctaacgttccaaaactcatttagctaatgtaaatgaatattttgacagtttctcaaaaacatctccatttaatttatttaactcacatatacaattactaacttaattgtatctttatcaaatgtgaatcataaattacaaattcatttcaaatttgtaacctctcttatgttataaaagcatgacaacttttcatatactcacttattagtatgttacatatatttaatttacatattataattcaaaattatataatgtccctagcctagcgagttctcagctatcatatctcctcgaaagtagaggtgaagccagaaataaaattaaagtagagtaaattatctatttttataataaaatactaacaatatttatggtgcatatacaccctttatgaagtgtcactacaggaaatgtcacttttaccagcacagttcgctactgcgctggtaaggtaaaagtaacttttaccagcgcatttcgtaa

SEQ ID NO: 222836 - DNA, 1764 bp, Cannabis indica
gaatacaacatgtaagcataaatcatttctaatgatttctaatctttttattgttgacaaatcagattagattgtaacgggttttatttagggcataaaatcccaacaaagagtacatcttttgatctcaccaggtggagttagatcacctaacaaagaagctagtgacttgataaggcagttcaatgaaattattgtcagaagaggtcaggatctcattacagatcctctctaagggagactagtggacaaatcaggaagggtctataaatagacagtccaaccaagttcctcaagaacaagaatagaccttccccaacacaatggaggacaagtcttgccacaaagatcgagtggcaagaatagccagactctggcaactgatggcttagggtgctggccagggatatttggatcaacaacacccccgattggccaacacttttcagccaaccccttagtggtgcacctctagctggcagtgaattcttatcccagaacattcaggagtgagtaaccttaaggccaatctttaactggctaggtccaagaacgactggaaacacccaagacgacaacaacttgagcagtgacaccaatcacttcagatacttcgatccacctaactttagcaatcggtgtgatctaccccctgtcaacgcacaggttgtaccagctaataagggaagaataggttgtcaggctctacctagcatagggctagccagccaagagtagatgcccataatagggctggctggccatggccagttcccctaccaaggggtggctggccaatgccaattgtcaagctttgggcaagccgaccgtgaacataccctctcttagggtatggtcggccaagctctagctaatccaggcctacaacccaatcaagaagggccaataaactaggcttcgaccacagcagatccttctgtccaagaatagttggataaaatatgagataaactcaagggctttgttggcccaaaactatcagaccttgagctggataggtcaagaagctcacctttctcggcatacatcaatgccttacccttgcccaagttcaaaaggccaacttggaagatgtacacagggaaagaagatcccttggtacacctaaaatactttgagatccaaacagatctctaacaagtatccggagatgtgaaatgctaaatctttctagcaaccctagctaaaatagcccaatagttgcatttcaaggtttccctaggaagatttaattcttgggaagaattctcctgagagttctatattaaattctctatctcaagataaataccttcatgactggaggatcttgtcaaaataaagcaaagataagacatacctttgaaagactacactcatgggttcatggctgaggccaccaagttgaaaggcctggtagaagaaggtcgatatacgaccacactcagaggcatcttaccattgagtgaattgtagaaagatattagatggatctcaacgaccaacatgaagaagttccttgagcgagctaatggcttcataaaaatggaagaagctacctggcaagcctagacaaacccagccatagagcatcatgtttctccaaatgttgttcgacgtgctgaccattgtagacgatctctgtcaattctctaacaatgagaatattaaagagcacaacaacgatggctcttgtaaatataatacaaaaaaagggaaattcaacgattctcatatgcgatgaagtctaagggagaaggagga

SEQ ID NO: 222837 - DNA, 1439 bp, Cannabis indica
agacctgaaattgctttcagtgtcaacaaagtgtgccaatttatgcacaatcctcttcaggtccattggctcgctgttaaaaggattctccgatatgtcagtggctcattgaatcatggtttgcatctcaaaaggtccaactttcttgagcttcaggcctactgtgatgcagactgggcaactgaccccgatgatcgcagatcaacttcaggctttgctgtgtttctcggtccaaatctaatcacttggcaatcaaagaaacaacacaccatctctcgatcgagtacagaggcagagtatatgagtcttgctagtgttgttgctgaaatcacatggctgcagtcactcttctctgagttacaaattcatttgcctcgaaaaccagttgtttggtgtgacaatttaagcaccattctgctcacacagaaccctgtccttcatgctaggactaagcacattgaattggacctttactttgtaagagaaaaggttcaacaaggtctgatttcagtcaatcatgttccagcagtggatcaactagcagatggtctcactaaagcaatctcaagcaacagatttgccaactttagaaccaatcttaccattgaagatgcttcaattctaagattgagggaggatgttaaagcaagtaatcagttggaagttggttagcattctgttattgtttgttattgattagttgttttgttagcattctgttatctgtttttacagctgtattttcgtttcttattagagattgctactggttcatactgtatataatggctgtgttcagccctttcaatacaactctttcttcaacctttgtcctctgtttcttcctctttactttcctttgcttcctttctttctttagctcagttcttcatgtctagaaactttaacaaggtgtcaaatagtttacccaacctcctatctcatctttcctaaagaatgaactattagacatcccaataggacgtttcccagtcttatttacatccatatttttcaaattctcaaagctacatagttgcactattcgttgtggaactccgcaatgttcctcctcttttgaaaatggaaatcctaaagaatcagctatctttttaatgaaaaagacatcgtctttcttaagctcttcgtatttcaaaaataagatcttgtaaggcatctctaaacttgctttccaaaaccctaaaatatggtcccaaaatggcccaaatgcatggattcctttacaaaacatatatcaaagcactcttccaaatgacatggttcattgtcatcctctccaaaaattctatgagcaaagtgccaatgagaaacaaacacatctaatggatttctacaaatgtatatacaattttacaatgagagtactttatggatggtggtaatgaaggatgaacatgtgtattcaaaagtcttggctt

SEQ ID NO: 222838 - DNA, 1660 bp, Cannabis indica
tacaaaatcaaagaacatttactcttaaataaatggccttctaggtagaccccgcccaaaggttcgggtgaaatgactaagtactcaggtcgaatgaccacctctgaaagtataatttcttttaaatgcaatttgttttgtttaaattcaactaaagattggattagatcaacataatagcttttatgtaagttactacggtaataaaaaaatttcgaccagtgaatgaataaagatgtctatttaaattctgattgtgtcaattctattagcaagttataaatttaccattaaatgcgtacaaagatctgctcgaattcaaagaaccgaacagaaaaaaaccatacttgtgaaatgcaagtgaccaagagtcaaaagtccgctcagtcacttaaggggcaactatacccgtacaaagcattggtaaaagtaaataacaagctaaaaaaacaaaacaaacataattgcacagacaattatcaaaacaaggagttgtattcattaaaaaaagataacaaagcacggtaaattcgggattaaaggctgcccagtcatccagttgtcttaaaaatgaaaaagataatccaagtttaaaaaccgcttggttggtcattttgtctcaaaaaaaggcctatgggctgaacaaacatatatataaaaaagaaaaatatttagacggtaggactcccaggctcttggtacgaatcgttttggtctgagggggcaggaggttcaacactctgactagtagggatttcgttgctctggttggttggagatgtggaggtagttgccttggggttctctttagccgtctgagccgcgcagaaatcaagatacatgctcttggattcaccaaggtaatcaaagtttccttcagggttggccttccaatattcgtagaaaaccttaagagcatctgtcttcaaggtctccacttccttctcgagctcctcctcccgagtctgcttattcttgacatcttccccagtttggaaagaagagtctggagactctccctctcgtctttaagatcattgacctccttagacaaagagacattatcggcctcaagctgctcgcttgagggcatatcttgtagttctttggtcagctcctcaatattggtgttagcagcaagaagcttcttgttcacctcctcaagctcattcctcacttccccgagttggctccttacgtcctgagtttccattctggccacatccacctccctctgcagtgtgttggggggggcaaggttcttggcagcaactgatttggctcaggaataagcataagccatcttcacattgacctgtatggaaaaatgttagagtccgagctacataaaaggggaatgagataaaaaaaaggagatatttacccgagtagcttccttcaaaactgctcctaggactagctccaaagatagctcattgtccgccctagcagttggtcactcacctcaggaagtgatcagttcaagtaatactggagcatatctttacctctcttggcctccgtgctcagcgctacggccgttgaaggggtcctagcttgatcagcccgtccaagctccccctttggaactctttgacttcaggcctctgagctagaaggtccacgagtaggtcgctcctcacgaaaggtcaatgacctc

SEQ ID NO: 222839 - DNA, 1991 bp, Cannabis indica
gattgataatgaattcaatctctgtgtaaattaaaggacacttgctttgtatataaaggagtgatccagcgtataatgggaacgagacagaaatccttgcagcagtggactaagcagaccgtgatctgactgaaccactatactctcttgtgttatttatatttccaatttttattaagtattttctgtccttaatttgaatactcgcccttctaggttgagtactcacataaactcccctttatattattatattttgattttggtgttgttaaaattccttcaccaacatttggtgccgtctgtgggaacgtaatacttggttgattttgaaggaaaatcattatggctggaaatcagacaactcgggataacaacaatgtatcaatcaacatcgggacgatgaatgtcccacttcctgggaacaaaacacctcccgtcgacaccataaacgaaggagtgggacgaacaaatattacacctctcaatttattcccagaaactgtcgctcatgctggagaaacatccacacttgcgaccacggtggggcagtttctgcctatcacacatgtcgtggtatcggaaggcattgctagctaactaccgaccaataaacgacattacaagatcaaatgtgagctttacaggctgagattgatggacgaaataggactcgcgtccacctcgagtaccaaccactcactcggataaccctcaggtaactaatactagacgaggaactaaccgcactagaagggaacgaaggaccgactaggaggggattgacttgaatcagccaacgctgagggatccagccgcatgaaacctcggccgcgacgtacaacaagaagaggacctacaacgatgtaacccacgtagcaggcccagccgcggaatgaggtaaatgacgccgagtccgactcttcaccctcacaaagttgcactccaagcgtttatactaggttgggttcggtagagacaccgcgaggaggaagataccaagctcataggggtgatcttcgtgatcaccttaacgcaatttttagggtgcgttcccagatgccctagaatgatgaaaagcctcgtgatccccaattgggcgatcagggcataaacaatcttgccaacccgcctgccgcaccagctgcgactactggagtagttatcccaataaatatagctaccgttgtaactacacccgcgacgacttagaacaacgtcgtcttaccaggaggcatcgattaaggtattctattgtaggcactaaagataatcgagcagcagagaaagcccatttacaagctgtatgggacttctccctttaccacagaagtacgacaagctcggtggcctaagggattccgactatccgaatcattgaaatataaaggtaccactaatcccatagactttttgaaaaaatttaacacgattatggaagtagaccaggtaccttagcttgcaaaatgtcgcattcttgcggcaaccctggaagacaatgcccacaattggtttagccaattgcccgaagcatctatatcgacatgggaaacctttgttgacctcttcctcacgcatttccaagccacgatgatgtataggccgccttatactactctggctaatattaagcaagaggtcggtgagtcattgcaagattattttaaatgttttaatgctgaagtaaccaaagtggagaaggcccccgagtctttgttagtttgcatgtttattacaggtgttttgccaagaaccgttttttggaaagacctacaagctcgaagacccaaatctctagtcgagttcttcgctatggctgagccgcataagaggatcgaaaattctctggcagagccagagagaggaaagaacaagcgtgagtcacttgtgctgcgatcgcgatctcgcaatcctagaggaagaagtcctcaaagacgtagccctgaaagacaacgaagtctgaagttggccaaatcccctccgaagaaaga

SEQ ID NO: 222840 - DNA, 2468 bp, Cannabis indica
taaacttgggttatatttttcatattaagacaattggctgaccgggtagcttttaatctcgaatttaccgtgctttgttatctttttaaatgaatatcgtcccttattttgataatgatctgtgcaactatgtttgtttttttagcttgttatttacttttaccaacgctttgtactggtatagttgtcccccaagtgaccgagcagacttttgactcttggtcacttgcatttcataagtatggtgttttgtctgtttggttctttggattcgagcaaacctttgtacgcgtttagtggtaaatttataatttgctaatataattgacacaatcataatttaagtagacatctttattcattcattggtcagaatatttttgttaccataataacttacataaaagctattatattgatctaatatgatatttagctaaatttaaacaaaacaaatttcacttaaaagaaattgtactttcaaaggtagtcgtccaacctaagtatttaatcatttcatcagaacctttgggcggagtctgcccagaaggccatttacttaaaattaaatgttctttaattttgtacttagagtggtcatccgaccttgtacttttattggtaatacttttctaaatgttccccattccaataccttagaactagaatgagtttcatatttttgtcataccacccaagtttgtacagtcctgattctagaacttcaaccacctaaaatagcccttcccagtttggtccgagcacaccagccgtaatttaaacctctgtgttcagaaatactcttctaaggaccatatctcccacaaaaaatttctatgctttcacttgcttgttaaagtactgagctaccttttgttgatgggccaccaacattagctttgctgcagctcatttttcttcgatttcgtcaagtgattcagctaggagggtgtggttagcctcttgatcataggtcaatcttctgtgggacggaggttctaaatctacaggcggcatagctttataaccataagctatagcgaatggagtttgtccaattgctattttttcagttgtgtggtatgaccatcactactacaaattatacttttggtgtcagttttaaactgacacttatacttttagtgtcggttcatagaactgacacatattccaaagtcacaaaaagtaaaaattttggtgtcggttctaaactgacactattgagttttggtgtcagttctaaaccaatacttaaagtatacatatatattttttcttttagtgtcagtttaaacagatacttaaagtggattaaaattaaaaaaaattataaaatcaacaaaaagaaatttaaaaacataatataaatattatttacaataaattaaaataatttacttattacatataattaaaaaaaacctactattattctacataaaaattataaacatatttattcactaccacaaaaatatataacaaacctaaacaattaaactaaatcaactacataaaaaaataatccatatgtatacatacataacaaacttgcattagcactgtagcttgataaaaaaatattgaaaaatacctcattctttattgacaaattctgcaagagcttctatagtacgagggctttcatacctaaatcatgaaaaatctaatcagaatatataaaaagtattattataaagagagcaaaaaagaaaaaatttatctaatacagtctgcagattaaagtacatggaatatgtaatctctatatttgtttttgttttggtgttggttttttcttctttggtgatgaaccttggcctcagcactcatatatcatgaataatatgttcacaaactgctaacctgacattgtggtcaatctttttgactaaaatttatgtaaacactataatgtgatggaaagaggaatgtactcactttttgggttcgagtgacccttttgaaaaccactcaagattgggatatgcaaaattacaatacttattgcaaatgctcttgtgctcgtcacaatccacctaccacaaaacatcaaaacattctgattacagcttaaaacaatggcatgaactataatatgaaagaaattgcaataagttcaatattaaaccacttgttctgaacttcatgtcttcattagaaattcagtgtagagaaagatccctcaaattatattagataacttaacaggtataaaattgctccaacactagtaaccaaaatacaattacatggaaaaatcgcatcaactcatgaaataaatcacaaccacctaaccatccttactaataaaatcaaacggtaaccatatagtatattaataaggatataaaaatgtcaactcacctttccaattagaatagattttacttacttaaaacttgctccaagcttctcatattcaggtgcaagttttttacaatgcccacacctgtcattccaat

SEQ ID NO: 222841 - DNA, 4891 bp, Cannabis indica
aaatcacgtaatacgcctaagttagttagggtgttacacttaatgtaagctaactcctgctccctcctaaagaggtagttctgataccggtcttccgctgaggtgataatgtccgcccggagtgccttttcagcatttggggtgcgagtgttggggcaaaggaccttggataggttgaagtcgtccaccgattggctctccgtgatgagcttagcattcctgtagttcaccgttgtgactaagtcccccacattaagaccgtttttgtcatatgtggagaagaccttggcgtgctgaaggaagagttgggtaggagcggtgcggtgcatcggaggaatcctgacccactccgtgagcagctctaggcgttccacggcttgaaaaccggaagaaaagaaaaatcgatgacggtactccttgacattcttttggaaattataagggactggaccctcattggcaggatgggcccggagtgtgaaaaaattgtcttgaaatttatcccccttcttggggacagacacaagttcataaaaatataaaatctcagtcgggctaggtgaagcccaacctcgggctacataaaaaataaacaagcctgaaagcaggcgatatgcttggggaatgagttagtaaggcgcaagaccaacaaaaactaaaaaatttataaagtaatcttgaagcgggagcatggctccggacatgaggtgggtttggctccaagctccaaaaccaccgtagttgtggttggcatctcttcctctcgaggcagacggtgaaaaaccccagaagcggacggtttgataccagccacggtcacaatcttttccaactagtgggcacaagtcaaggttgagcgaagctcatccgcctcccagccattcgatcgacaagtatagttctcctggacgataggaccctttatcacttcctccagggtagcaagagtaactgcccccttgcgggaagatttggttccagatgcagaagtagacatttagttctgtaaaaggaaaaatccagcaggtagcccataaaccaagccctaatgttaaaagagggaatgggggtcccctaaccgctggaaagaggccccctcaagatgtttgccaaagatggaaattctagagattttcctaggcaaacatcgggtgcaaatatctcaaaagcaacgaaagcagagggaaaatgaaaaacacagaacgtgggaacaaaaactgtctcatatcctaagtaatctttcgacagaggagtcgattgcaaaaatagaagaaaggaagtaataaaacacaaataagaagagggcatatgcaccatgcgaccgttttcgccaaagccatttcccagaaatcaagcacttaaccaaaagttctaccctaacatgcacatgaacaaacaaaaacataaagtacccagaagacttacatgaaggttgaaaaatggaggttggtgttgatcgacggtagaatgcagactgacagcgacggagaaataacaattaaaaatctatggtttctggaattttctctcggaagtgttcttggggtgaaatggcgaagtagtgaaagtaacacagtgaaggaagaaggctggcttttataaaccaggagaggtgcaaggcagctgtgatcaggcgccatggtacagtgggaatcgtaatcgattcgcattctagaaatccaacggttgggatgaatgctcaccagggcggttaaaaacgcttgagtaccttttctaacaccaattaaatgcgtcggatcattaatggacgagaagggaatcgttgcttggaaaaggaaataaatattaatgatgactgacataaatacagcccaggcgcttgaagcacgtgccgctaaaccgatgagccacccggaggcaccaaacaagcctcatttattctccaccaaacaaggcttgggggtaaatgttacccttcattttgcccaaaatacgtggacctagataaggatgacacatggacctgagaggaccagctttcaaagaaatcaactaagtcttagacaacagaggagcgcctctgggaaggtatctcccagaggagacatgagaaggatccttacgttcccggaggccatggacatactaaggaagctccaggaggtactggactctattgaacaatcacctcgcatttaatgccgcatgggggaagacgtattgaaactaccataaacgatatgacagatggcgtagccatcctttttcagctattacgctatgattaataatgctagtgacgactaccttatgaggaatcacatcaatccagaggggataaaagattaaatccacctaacccctaagatacctacagtataggtcatgtatttcctattttgtatctgttgggaatatgtgcccctattaagcctgcacagaaagacaagtgattcattcctagggatcaccccagaaaagcactataaatacccctacaaacacactgagacaagggtcgaggattctgggtgaaaaaaggaatcaaagagagaaaataggagagaaattcaccaagaacattctctgtaataaatactctcattaataacaaagactcgtggactaaggctctttaatgccccaaccacgtaaaaatcccatgcatgaaacttcctacagctttttctatatattatttaattggttgccgaaaacttcggtcaacagttatcaattggactctctgttttgttaaatgacaaaatagatcctgtattttccaaaattgtacaaataggaccctgaactgattttttgtcaaaataaaacataataataatctgatcaagagatattatgacaaaattggttacattttcagtacatgttcttgttagaaattgtcttaaagttagttatattaaaaaataaaattgttaaaattaagctcaatgtcctatatttaccattttgaaaaatataagatctattgtatcatttaataaaacagaggatccagttaataatttttgcaaaacacaggtccaaaatagtatttacgcaagtaatatctatagttttgtttacactactcgaagggggacattgtttcttattgttaaaagctggtgaggtttttgactttgggtacatcattattatgacttttcatacccatgcaatacactcaggcacaactaagccaccttaatttggtgaattatatagtgtgattcaagtccaatagtctatatgctttgatctccttttcttaatattttcccgttgaagtgcagatttagttagttatcctcactcaagagtcatacttttacaaaattaatgtttatacttttttcttatattttaaagactgttatatcattcacttatgtaattatgatttgcatttcaagctccgttattcttcaatagcttttgaaatgatgcacttacgagacctttacctttactcttgcattcttattcaattcttaaatggtgttcctatttaatggggtattttgatgacttaagaaatggtgtacagctgagtggtgttgttttacccctcaatttattatattcctatttttctttttcaactgggtcattggttgctgttagattttcatattcatcgctaaaggtttgttctttattacgcttgcacatggcctgtcaattgtttctgtcttttctactaaatttggtacaacattgtgcagattaatttgggatatagaaaacttggttgtaattctattgcgttgaatatttctgtacgttaaacaatccaactcaggtgcaaagggatgaagtacttgcagaaaaaaactatagaccatagctttaagttcatcgtaacatatagctcaaatagaagatgtttgaaccgtaaaatgttctaagcactaatttgagaaacactagtactgtttctgtttatcaaaagcatgcatcttagtgcttcaacttatttctgaatagcatactaaaaaaaaaaactaaggaaacatagaaagttgggaagaaaagaattcaattgcaaatctctttcaagagcttcaatttccccatgagatgactcatttcaactcttaatactaagatttaattaaaaacaccaccagcagaacctcaatttaataaaaaatattgttattaggcactattggtgtctagcaccccttatgtgtcaatatggcttgatcttttatttcttagagaaaggaaataaaacaaacaaaaaatatatattttcaactattccaaaatcttaaaaaaagacagtactaccttaaagcgcagtaaacttccaccctttgttctagagcctaaacaaagcattaaaattcccataattgagtattgatgtgaaatatgaattactttctagaaatttaaataagaaaagcccaatcactatgagaacatttaccaccgtagaatataattatcatgtatagaattatatcagccaaattgcaagacaactcggtaggtaagaagggtaattgctacattccatctcttgctgcctttctttaatttccaatagtgttctacttaaacctctttcaacaatgctttgaagaaagattgtgaataattaattagattatttaatatttaatttttaattttaacgtcaaaattgataatggtgcagcaaaattgatgaaaatttcttatacttcaaatcaagccaaaggttattggtgttatatatcgtgctttaaaagtttcaaaattggtagtggggcaacacatcaaacaataaaaatgtaactggggcatatacaagatatcctgcttctgatgaagaagaaaggtgttggtgatgatattgcagaagacttaaacaaactgaatggaatcgttagaggtagagtccacgatggagagtggtaacgagttgacgagg

SEQ ID NO: 222842 - DNA, 2074 bp, Cannabis indica
tatttaattttctgtctttaaaaaaaaaactaaattttactatcggttattacacttttacatgttagttaaattgttatttaattatttatcagaaaaccattggagggactaaaattaacgccttcagttcttgaatgtaactaccaataaaaaaaaaaaaataataataatgtaactgaaaatgtttttgaagaaaatgtaaactgaaatgttattatcaatttaaaattaaaaaaaaataaaatattttagggtgattctacaatgcactactttaaaagggatgtactgatgcactctctatttatttcggtatttatatacgttatagctatttaagatattctacaaaattttgagagattcagactaatttacaatataaaaaataatgtttaaacagtccattttacacgcgtataaaaataaaatagtcacgcgtgcaacaactgtcagaatgtaattttcggcatgttaaattttttccgaatttcttaaaattttgcaggatgtcttaaataactataccatgagaaaaaatttgactaaaaaattatttcggatactgaaagagatagagatgtatcagtgtatctcttctaagggggtgcattataaaatttcccaatatttttttatacgtgatggcctttttttttcttatatgcataaatttctaaattatatatacacgattaaaataaattaaaaaacttttttctttaattttttaataaaatgatcgaaatttttattgataataattaagaagtcgacaaaaatgtattagtcatcttacaaggaaggacataattctaaataattttattttttaattgtagtgtacagtaaaatacaataaaaccaaacatacatttggaaagattgataactagaattcaaaattcttaaaaacaaccttctaaaattcctaaaatcaacttaataaagaaagaggaaaatagagttacgaaccaaaacatttaaaaaagaagaaaactcctatatcttttttgttttttttttggttctgaaaaacaactcctacatataaagtgaattaaaagtagagatttgacatttgctactgtttgcttcactttaaataaaaaagtcgaagatatgtattattaaataaaataatatgtaaataaatatttaaatttaaatttttacggtaataatatttaaattattatttttttaaaaattaatttaaatatattaataaaaaaaaataatagtagataataacttgacatttaatagttaattaagtattattatcataaaaattaaacttaaatatttatttaaaaataattaaaaaaaaattaattaattgcttctcaagcagttaggaggcaccaatgaaatatgatttgtgacaaatgaaattaatttagtaaaatatatatatttatatataatataaagaaacctcacaacgaaatgaatcccaaaactctacaatgtaaaagataatgaaaattattctaccgaatttaaatatcaataataagtgagtttacggtttaccattttctcttcaaccaaacttagaacgaaacactcaaacacaatataggacaaaaattagataacctttgctcattatgctaagattccaatattgttgtttctttagaaaatcacatataaaaatcattgtattgtatgtatcatagtttaagaattaatttgtattagtttagatttgaataagtggatatgataaataagagtttaatggttattatggtaatagtgatgatgattagttattgatttagtatatgagaatagtttagttttgaaaagagaattgtgtgtaaagaagcagtaagcttttattgatttagctttggctttttggtgttgtattacaatttagaactcttatgcctatttatagttgctgcctttcaagcatttgaagttaaaattattttctttagatttttctatggattttatccatacacttctacatatttttaagcatgtataattagaaaattttagattaaaattttcaaaaaaaaatgcttttattctattctatttttca

SEQ ID NO: 222843 - DNA, 1121 bp, Cannabis indica
gcataaaacccaacaataactaactcagctgaatataacagaaaatacaaagaattggttaacagaaaatgaaatgagggtagtctcataatagcccccctcaggctgtagtgtagatgttccaaatgttcagcttggagacaatattgtgaaaaggtgttggtagcagagccttggtaaaaaatgtcagccaggttgtgttgggattggacataaagtaacttgaggatgccttgttgaactttttctcgaatgaagtggcagtcgatctcaacatgtttagtgcgctcatggtagacggggttttcactgatgtgaatggcaaccgtgttgtcgcaataaagagaagtaggtttgttaagtgagatgccaaagtctttgagtaaggctaggatccatgttactttggaggtggcattggccatggctctacattcggcttcggcggaagagcgagaaacaacctgttgcttttttgatttccaagatactaaggcttgtccaagaaagacacaatatcccgaaatggaacgtcttgtgtcttgacaagcaccccaatctgcatcggcaaagaaggacaattgaacattcgttgaggatagacttgtctcagcgaatgcagagagttgggaagtagaagtggcagggaagaagatgccctgtccaggagttcttttcaaatattgaaggatcctatgagtagcttgaagatgtggcactcgaggacatgttagaaactggcttagatgattcacggaataggtgatatcaggccttgtgattgttagataaatcaatttgcctataaggcttctatagacagtaggatcgggcaatggtttgcctttatctttgctaagcttgaggttaggttccatgggagtagaagaaggcttagcgccaagataccccgtgtcagtaagtagttgaagagtgaatggtcgttgagatatggaaattccattcttggttcgacctatctcaagtccaagaaagaatctgagggttcctatgtctttgagttttgaattttttatctaagaaaagtttgaaatgtgtgattgccatgtcatgttgctagctacgattatttcatcgacatagatgaggctagctaggta

SEQ ID NO: 222844 - DNA, 3191 bp, Cannabis indica
cctcttcttttattgatgtggagattaaagtggagggtaaacctccttggaggttcactgggatgtatgggcagccgaatagaggaaggaggcaggaaacttgggacttgctgcgtgacttgaagcagcgatcttctcttccatggtgcgtgatgggcgacctcaataatgttgtttcccatgatgataagcgaggaggtaatcgctatcctgaacgtctcattctcggttttcaacaagctttatttgattgtgatttacaagatttagagttggttggatacccctacacttgggagagaggccgtggcactaacagttgggtggaggtgcgattggaccgtgctttggtgagtcaatcttggcttgatctttttacttttgctaagctttttaatatggacttttcaacttcggaccactgtcctattttgcttgatgcttcccgtggcgtggttcaaccttatttgaagcattttcgttttgaaaatgcttggctaagagagcctctgtgtgtgcaaattgtgaaagatagttgggaggcgaacctgaatttgcctatctctgataagatttttcagtgtgggcagcagttacaagattgggggaaagagtatacggggaattttaaggaaagaattagcaattgtaagaaagaagttagcaaatggaggttgggaagggatgaaaattcagttaataaatttgccgaggcaaaaaaacttctttctgaagcctatgcccaacgggaagttttttggcgccaacgatccaagcaactatggcttcaagatggggaccataatagcaagtattttcatacatctgctacttctcggagacgcaataatttgattactcagttgcaagataacaatggccgtttggttgagtggggctcggggttggaagaggtcatggtgaactattttaaagatttatttgctactgctgctagtgattggacagcagtaacatctaatgtacagccgagagtttcttatgatcaaaatattgagttggttaaggaggttacggaggaagaggttaagaaagctatgtttcagatgcatccagataagtccccgggtctgatggaatgaccccgggatttttttcagagatgctggcatattgttggtagagatgtgtttcggctggttcatgaattctttgttactgggtcttttccgacaagcttaaatgccactaatgtggttttgatccctaaaaagaagaacccaaggtctatgggtgatttgcgacctatttcattatgtaatgtgctctataaggtgatctcgaaggtgttggcaaatagattgaaggttgttctcccttatgtgatttcggatacgcaaagtgcttttcttcaaggccgcttaatctcagataacattatgatagcctatgaagttatgcattatcttaagaggaaaacaagaggacgtgatggacacatggctcttaaacttgacatgagcaaagcctatgataggcttgaatggggatatattcgcgctattctcttacagatggggtttgctgaacgctggattgatctagttatgaaatgtgttacgtcagtttgctataatcttgtacatgggggaaaatctatggagtcgattacaccctttcgtggtattcgacagggcgatccgttatcaccgtacttgtttattatatgtgccgaaggtttctctagcctaattcatgcatatgaaagccgtggtttgatcaggggatgtagagttgctcgtggagcgccttttgtttctcacatgttgtttgcggacgacagctatatttattgtagggcttccgaggaagaggctaatatagtcttggagatgcttcgggtctttgaaactgcttctggccagcgaataaatttcgctaagtctacagtgttttatagctcaattacgcatgtcaccatgagggattccatatgtgatctcctaggcatttttgaggctgatgaaaatggtacttacctgggcttgcctagcattgtggggagaagcaaaacagccattttgggattcttgaaagataagctgcgtaaaagaatccaagggtgggagggccgcttcttgtctagagcggggaaggaggtacttttgaagacggttgcccaagcgctacctaattatgctatgaacgtgtttctccttccggtggatacttgtaaggaaatggaacggcttatgtcgaagttttggtggcaaacgggctcatcccaaagaaggcaaactagttggatgagttgggagcgtatgtgtaggcataagttggagggtggtttgggctttcggagtctccgtgattttaacatagctctcttggggaaacaaggatggcgtctccttacacaaccttcttctcttgtggctagaatatataaggctcggtactactcccatgggtctttcataacggcaactgttggggacaatccgagcttcatttggagaagcattatggaggcacaaccactagtattgagtgggattcagcgaagcattggatcgggttcttcggtgagtattctacacgacccttggcttgattgtgttgagaatccgtatgttacaacttctcaccctgcattacaaggccgaactgttgattctctgtttgagattgataggcgttgctgggatgtggagttaattcgtgacatttttgactctagagatcagcaacttatcttgtccatccaattgagttcgacttctgatattgattcatgggcttggaagtttgattctcaaggagtatatacggtcaagagtgcgtatagaagattgagagagttgaaagcggctgctgttgatcatactaatgctggtttttggcgtaagttgtgggacttgaaaattccaccaaaaatcagcaacttcttgtggcgtgctgctacaaataccttgcctacttgtgtacagcttcagcatcgacatgtacctgtcagcagagtatgttcacggtgcaacttggaagatgagacaacgatgcacgctctggtaacatgtcctcattctcgggcctgctggaaccgatcgggtgccaatttgcaagccactgatgcagctggttttttcgactggttgctggtggtttttgagaaagaaagtgtggccactttagaggaagttgcagtgataagttggtcgatatggaagtcc

SEQ ID NO: 222845 - DNA, 1762 bp, Cannabis indica
ctgttaagtctatatgtattgacacttttagacagttagataaaaaaataactaacttaacttccaatgaaatatataaaaaataaacagaagtgctgaactgatgctgtagcatcctgttagtgactaatttagtaagctaattcccaacactttgaacagggagcaatggaacaaaataatatttatgcattaatgttgtttagcggagagctttgaaccccctccctttaagattcattatccttcttgtaatagggggttcatgtatttggattacaaatacaataatgcccctaacgttcattatgggaaaaactagagtaggattgatgtccactatcttaatttatagtagggttcaattattttgcatttccatttccattgtagtgtatgacgagttatactcattacgttgttattttgaattttatccatctaacgtgatatgtccacataagccaagacagaatacatgtggaatataaccttgtcaataacaagacaaggactccttacaaggtatggcaaaactgtcaagcagcaagcaaaaggagtgaaagcgagccgtcaaggagttgtaccaacatatctgactatccaagggaagtctataggccagccaggaggagctcatgtggttggctaggatctgggcacaagctggtcgaccaaaatgactttcagaccaagggagcttccgttcgaccaagggaacctgacctcttgatgcgtgtcgtaagccacaacaaatttactaatatttattttcaatacctccaattattttagtataattgtaagtaagggtcgatcccacgaggactaagtttatttaattactcaaaaattagtgataaaagttaaaaaaggaggttttgaagtttagagtaaaatatcataaataaaaataaaactaaattaaaattgagacaatgatatgagaaattagttaaaagttattcgtcgccctcagtaatcattcctcattcttattaataaatgtaattttaattttcaatcaaactattaatcccgcagataaagctgaagcagtcaattatccaaattcctattacatgtaatcaaggccaagcgctcaataattaactcttttacctaagtggtaaatccacgaagtatgtaatttattaaacttaataaagtttttaagatttatggagatagattaatttatgcaacaaattattatagcatataattcatttaacctaggttctattcttcatcacaattaaaatacttttgataatattaaaaattataatttatcacaaacacttagaatcatagactattaggtgaataataatcctaagatgacggtagattaaagtaaaacctaatttagtggccatttaaacaagaataatcatgacattgaacatagaaaaatagaagcaatttgatataataaaaaataaaaattaacattcaataatgaaattaagaatccatgtctcggattttgaaataatcattaactaaaaggaaaatattaagaactagacattataacgataatcataataaatagtaagagtttaaggagaagaaaagaactatgatgaagaatacttcgaagccgcgatctctgtctcttccttgctctctctctaagtttctatctcaatttggtagctctagggttctccaattcgtaggctaaaatattctatttatagtgcttaaaaagatagatgaatccccttaggattaggatttttttttaaaaaaa

SEQ ID NO: 222846 - DNA, 1865 bp, Cannabis indica
tgatctgcttgcacaattcaagacatatgctcttaggaaaattcaaagagaagaaaacacaattgttgatgccttagcccgacttgtgagcaacaatatagttgataaagctaacttagtcccaattcaattccttgaagagcctagcataatctgtgcagaagaaattgaaatgattggcggagctccgaattggatgacaccgatagcaacctacctcaaaattggagaacctccaaatgatagatacgaaactcggaagatgagaaggaaggcagcacggtatatcatgatagaaggagtcatgtatagaaggggtttctctatgccactacatagatgtgttacacaagaagaggttgcacgacttttgtctgaagtacatgatggattctatggcaaccatgcagtcaggcaaagcctatcaaagaaaatactaaggcaaggatatttttggccgaccatgatcaaagattcaaaatcctatgttaagaaatgtgataaatgccaaagattttcaaagatacatcgtgcactgcccaatgaactaactcagatacaaagtccttggccttttgctatttgaggaattgacttaatcggacaattttctaaaggcaagggaggagaacaatatgcagtggttgcagtggattatttcactaaatggacagaagccgagtcattagcaataattacatctaagaaggtgctagactttgtggtgaaaaatataatatgtgaattcagactcccatataaaatagtctcggacaatggcacaagtttgacagccaattgttcactgatttttgcatggacattggaatcataaaaagtttctctgcagtgggacaccctcaagcaaatggtcaagtcaaagcagtcaataagacacttaaagacactttgaaaaattacttaaggaagctaaggggaactggccagaggaactactagaagtactatggtcataccacacgactaaaaaaacagcaaccagacagactccattcgcaatagcctatggctatgaagctatgctgcccgtagaataagaacctttgtcccacagatgattgacctatgatcaagaggctaactatgccctcctagcagaagcacttcaaagaaaaatgagcttcagcaaacctagagttggttgcccatcaacaaaaggtggctcggtacttcaacaagcaagtaaaagcatagaaaaattttgtaggagatatggtcctgagaagagtatttctgaacacaaaagacagcacgactggtgtactcggaccaaatttggaagggcaatatcaggtggttgaagttctagaatcgagagcgtacaaacttgggcgacatgacaaaaacatggaactcattctagtaccaaggtattggaatggggaacatctaagaaaatactatcagtaaaagtaccaggtcgggtgactactcaaagtacaaaattaaagaacatttactcttaagtaaatggccttttgggcggaccccaccgaaaggtttggattaaacgataagtactcaggtcggaggaccacctttgaaagtacaatttcttttaactgcaattggttttctttaaatttagctaaagatcggactagataaatataatagcttttgtgtaagttactacggtaacaaaaatattctgaccaatgaatgaataaagatgtctatttaaattctaaatttatcaattctattagcaagttataaatttaccattaaatgcgtacaaaggtctgctcgaatccaaagaaccgaaaagacaaaaaccatacttgtaaaatacaagtgaccaagagttaaaagtctactcggtcacttagggggcacctata

SEQ ID NO: 222847 - DNA, 1892 bp, Cannabis indica
aaaataataataaattacctaaaacttgataatgacttattttattcctttataaataaaaaattataactattaagataatctgtggttggaacacaactctttctctaagctcctcgaaggttggtggaaagatgcaagtgcaattggatggccaggtactaaactcatgtgcaagctgaaaaaagtgcaaaaaaatatcaaggaatggagcaagtcggtttatggaaacaacaaggtggccaaaaatgctttagaaaggaaaatattggcgctggataaaatagaagggagtaatttgtgggatcaagctcgtgtagaggaaaggagaaatcttaaaagggaatggcagcggtatatagttgaagaagaaagaagtctatggctgaaatcgaaatgtaaatgggcaaaagaagggaatgcaaactcaagaatgttccataatttattaaatgcaaggaaggcaagaaacactatctcaagaattgttggctcgacacttgacaaggaggaagtgatagtagctgaactaattgacttcttctctaaattatacacatccgagaggagaccgggatggggaattgaaggcattgagtggcagcaaatatcagaatcattagctacagatttagagagatcctttgaaaaagacgaaataaaagatgccattttcagttgtgaaggtaacaaatcacctggtcctgatggatttagtttggctttttttcagtcaaactgggaactcctaaagaatgatattttggaagtcttcaaggcttttgaaagaaagggcagaattgagggaagcattaatgagacgttcatctgtcttataccaaaaaaacttaatagttgtttggtaaaagatttcaggcctatcagtctgacaacaagcgtttacaagataatcgctaaagttctggccgcaaggcttcgaggtattttgggggaaacgatttcggtaacacaatcagcctttgtagaagggcgacaaattttggattcggttctagtggctaatgaggcagtggaagattatcggtgtcgcggaaagagtgggctggtattcaagattgatttcgagaaagcttatgaccgagtagagtgggatttcttagatctggttatgtcaaaaaaggggtttggggaaacctggaggaaatggattagaggatgcatctcgtcaacatcattctccttattcgtgaatggaagaacaaggggaaacttcaaaggatctcggagccttagacaaggtgatcctctttcaccttttctttttacactagtggtagatatacttggaaggatgattgaccaagctgtgaattcaagtattttctcggggtttgtagtgggcaaagataaggttcaagtcagccatttgcaatttgcggatgatacgcttctgtttgcaaatgatgaggcctcacttcaaatattggtaagaattgttgaggctttttgtgctatttcaggattgaaagtaaacatgaataaaagtcaagtgctgggtatctctatgcacgagagtgtggttgctgagtgcgctagtcagattggttgtgaaatggagaattggcctatgtcatatcttggaatgcctttaggtggctcgcccaggaaaaagttgttttgggcacctgttttggaaaaatgtgctaaaaggctggatgggtggaaatcctcttttttatccaggggggagacttacactgattcaatcggtgctttcatctatactatctctctctttttaaagctccaaaagcggttttactctcgttagaaaagatgatgagagattttctttgggaaggaggtgattcaatgggtggggatcatttggtggcctgggaggaggtgtgtagacctaaacatgagggagg

SEQ ID NO: 222848 - DNA, 1457 bp, Cannabis indica
accctctgctcactgaatggctttttcaagcttgacaaaaccttctacgcggtcaataaaatcactcatcgagtctactggcccattcttccttatgtccttccaaagctcgccaaggacctcaatacccccaatatcgcagacaactttccatcttcggttactcgtgcaaccttagtcgcctctgtcatgaatctgctgatgtaggcttggagagtctcccctggtcttttctttacttcgaccagatctcctaggtgcaacggaagttggtgaaaggaggagaatttttcatggaactccgaggagaaagctttccatgagttgaattttccaggtgccaatttgaaataccattgttgggtggcttctaagtgggtggcaggaaaaaccctgcaacatacgtctgctcatacttcttgcaggtccatttgcatctcgaaatacttgctgtgggataagggatcttccttcccagtttatatcttccaagttggcatcttaaacttgtggggcaattctaggatattaatctcgggggaaaaggggttccacattctcagtccaactcgaggtcgttgttcctctgatcgatcaggccttggaacatattttttagttcgtccaactgtgcctacacagctggactaacctgttccgcctcttggccgacctgagtcacatcatcatctctttgagcgggattttgagcgcgggttctaggctgtatgactggtgtgtcatgctgatcatccacccctctccttctactcagatcatctcggagatcatgaactgtccccaaacgattaaatatagaaatctccggctgtctgagggattggttggtttggctcatcaactgcccgccaccgttaactttgttggaattattgggtatgacttctcctgatgaattactagacaaggtctgcccgcctaccgcttggcccacaggcggaacttatgactggggattaggcggctgaccatttatagtctgagaggcgttcatcattgcattattgtcggtctcgcctagggggatgacggttacaggctgttgtccagttttctggtaggccttttgtattaacacagtggcctgccaactacggtcatcaatgactgcttgttgaccccttaacgtttccatgtccttgttgggttttatgccctgaataaaactccatttcaatgtaatctctattcttttaaatatcaataaagaaacagaagtatttatcactcatttgtgtgtcatttggttcatgttatcatttacttgtctatttgatttataaattcatccaaacccttttcacatttatattcttgtttattgtgtcgtcagcacagtggaaagtaatcaagattctgtgattgaatatgtattcctagatttatctgaatagagggtttaactgatatgaaaatctacaatatagtttacttgc

SEQ ID NO: 222849 - DNA, 4136 bp, Cannabis indica
tcggttgatataaattgttttctaaacattacctatatgtctctccagttgtggatcgatcccgaagacaacctcttccaccagccctctgcggacttacttaatgtcaatgaaaaacataaacatttttcattatcactagccttggcaacattcatgatgcggttgtatttggacaaatggtccctggggtccgtttgtccttcatacagttccatcaggggcatcctgaaacactccggcaatgctgcctcaatagttctcctcacacaaggctccatgtcctcttcttcagagtcggatacgacaccactttgttttctaaaaatcttttctgtgatatccatcaactcctcaattttacgttccagtcattgagtcttgtcacttaaggattctcttctacgaacacgatcgtcgatgtgatttctcaaatcatttttgtggggtcttgctctttcagctttggctcttttcttcttggcatttaatcttctttggagatcattagtggaaaggcttccgccactgtcatctgacaatggatgcacttcttcaacatcctcgtcatgattattggaatcactaggaggaggtgtttcttttcgtgactctagctcctatactccaacatctatcttgtttttctacgggactctgcctctagaattggtttggtcactgtgcccttaggcgtggtttcctttccttttctgttgaggttagtcaacagctttagactttttaggctattttgtagaaggagctttctttggttcttccacagtgattcttttgcctttgtctttgtggacgcctaaagctctaggatcctttggatttgctttctcaggtgcgtctgttgttggaggagctaacacgtcaagagatagttttgttagggcagtggtcacaacctccattttggtcatcttactgagtagcaacttgttgaattgaccctgccgagttaacctactttcggcagttgaagttgtcgcgtcatgatgaccatagggtcttactcatcagactggctcttctcctcagcattgtcctcagcaactttttctagagggtcgtcttcatgcatatcctccggcgcgtcgtgggtattaaattcagcatcctcataactactttctccagattttgcatcctcaatgatgggatcatctcgattctgatcttcgtgacgacttttttaacgactagtcacctcttgagggtcactagaatctccagctctggctctaggactagtgaacgaaggccatatttggttatggtgagggccatgattactcgaacgtaatctacaagtggtctcactcttttcttcaactctcggtgaaagcaccaaaatatttaccgagatttttgaaaacagaataaaaataaaaagaaccgaagaataaataatcaaaagagaaagtataaaatgagacaaacaatttttaacgtggttgggacattaactagtcttagtccacgagtcattatcattcagtaagtcttttgcttgtaaatgcctaaggaaatacacagaatgtatattctcaagtttgcctgagcaaagtttgtaagagacttcaacccttaattcataggattcacggggtatttatagtagtttgagaattacattaggttttccctttccctctactcgtgagttagtaaacaattctcatgggctttctcatgaagcctaacccatggagaagacgatctactgactaggcagattcgatttggattgatctggtcaaccccacgtacactgattgtgggcaattaatcttaattaattgcataatattggttacaagaaatttcccctttaatcttgatacgatactctgttgtgatatgaaaattggagttttcttatttgtgtgcaggtatataaagggaaattggaagggtgttctaggaacacactgtctttcctctccggtctcatggtaccggagatgtctttcgggcacggcttgctgagggcggaagactctacgagtgcggaactaaggtacgttcctagaaggacatatctagatgagcttggccagttttatatttgctgagggtcccactgatgggttctggtggctgacatggagtccacatgtccaatgtcagaagtgtggataacaacatgatcttcattttaggtagtttcttcttttagcttgatatcatcttctggctaagatttaagaagagttaattccttattctatgcaatttgatataaaggaaaactacactaggcttctgagaacacgttgtctgccttttgaaaatgcggtactgggaccgcttccatgtacgggaaatccttggcagaagctcatctgagcgaggaacgaagatatgctttcctggaaggtcttgctgggcccactggtaggctttagatgctaacttggagtccacgtgtcccttgccgaaaatgcggataacaagtcggtttatactacatattttctaacctaatgtaaacatcgagttgcaaaattctaagtgcaacccgctcaatttaaaaaaatagtaactcgactgatggcttggtcggtttggtcgagttaacccgtccaaactaacctaaggtatatttttcaaaataaatgaaatttgaacacataaaccattatagagagtgtgtgtgagaggtcaggtcattagggttttttttttatatatatatataattgtattatatattattgtttatgttataataaaaattgaaaagtacaaatctaaaaaaaatgatattagtcgggttaaattgggttatacttatttttaacctgctcaattaatagattgagactcaatggtgaagcatgtaaagaatgtttggtaatgttatcatgtttaggaaggagctaactgggtgtcaaactaaagagtaatattgacagcaaaatttggcattgaagatatactcatttctttttccatttttgttttactgaagtcaaaataaataatatattaaataataatgtgtgtgtccatgtaataaatttgaagtgttcttaccgttggagtacttttagaaataagagtaccaaaaatgatattaaagagagaaaaaaattacctttttagatcatgtagagtgttttttgatacttttaaaaagtacttcctcatacaagggtgtttacgacagaatcagagcattgctattaagtattagtggtgcctattattttttataggtgacgtttcacgattagttaacgatatttcataaaaattatttttttaaaattatatgaaacttaatacttaattacactaaaaataatactagacaccaataatacctcaaaacaattctcacataatcacgctgagcattgctattaggcaccagtggtgcctagcaccttctcgacatgtcgcgtaacgattggctagcgatactccctaaaaactattttgttaaattatatggaacccgatacttaattaaaccaataataatattgacacataaaagggtgctacaccactagtatcctttagcatttcttaatcacacgctatggtttatacatatttcaaatttcaaaacactaatactcaaaatcaataattggatcatcaattaaatatgaaccacacatttatcaaaaaaagaaaaaagacgaaccacatttttatactgtctcattaataaaacaaagtaactaagccctacgaaccacaagtttttagttgggaaatgaaaaatctagtcagatgtcacattaaaccggtttaagtcaaatttatacttccaattttccaacgcaatcgttaacactgaaaagacgaaagctataaattatttttctatttatagttatattcagataaaaatcaaatggttttaagcatctctaatgtagcaattttttcattttcgacattttttattctaattattaaattaatattatgttattatttaattagggaattttttcattttttacactttctaaaatagtttttttttttttttttttttagttatggtttacgtaaattttatatggaaacccaaattgcaactagcgctgtacttaaattgtaacaaaaaaacgtatagaaacctttattacaactaacgctgc

SEQ ID NO: 222850 - DNA, 1899 bp, Cannabis indica
agcttgttttcaacaagttcatttcgttttaggcttcttgcttctgaacgaacacttgagccctttcgttgaactcattgatgcttctcaccggacgtccttctaagtcatcccacaactcgccccctgcggttaatggatcagtagatatccccacctaaagggttgtaagttgcatgttgtcatctaaatttctaaccctagccgcagccgtgctaaaatagcttaagtatgccttaagtgttttgctgggctactgctttatattggttagcgaggccgcttcaggtcgtctatccctagcagcctgaaattgtttcttgaaatcccttgataattgctcccaggaagttattgaatgaagagtaaacttgttaaaccagctacttgctgctccaacaagcatgtggggaacaaaatacagcgtgaattattcgttacgttactcgctcgcattattgtattaaagttattcaaatgcgagaccagatcagtggttcagtcgtatgacgagacatgcaagtttttgaatcccaaaggaaaaagggttctcattatgtttggaagatacggctcaagttcctcgttagagtcgtatccagatagtttccctaattcccccacttgatatctcatgaacttatcctccacctcgtttatccgcaattggaatggatcctcttgctttggaccaagctgttggcgaaggtcaggtttcttccgattcaagtgctctcgtagatccagatgagagtaattactggcagaccttgtcttactcatagatcgtgtcctactcatagactttgtcattgagtggctcacggatttactggttcccatactttctcgatcattagctcgttcagtactttctcctcttcgagttgatcgactatgggttctcgaacgcctcgaagtcatgcttgcttcttcacgctctgttctttcctcccaagagcagtttgtcgtatttcccccatcagggtccgtacgagtcctcgctctatggatttgggaagaatgctgtgatttctagcaggtgacctttgttctcccgattgagtcccaagatattcctcattctcatgagcgatgtctcgtttatcagtttctggttgtctcccatctggccgttcatcctgatttttagggggtgtctcattttccccaggttgttcttaccgggccttgtcctgtctcctggttcatgagccacgaggtctgcctcatggtcttctcactccaggttcaggttgattttgaggttgattttgagcgtttgtcccctgtgccgtcctggccgaggctgcatcacattctaacatagctttttcacgctacgcctcttccagacgacatccccggtgacgattttctgtttcataggctccttctcccacagattgggcacctccacgattgagttcttcatccctcgttccggggttatgaccattcccacgttgaattctccttgagcgtgttgtccgggtactaggaccaacgtcgggtggagttcactgggaacgtgtggtccgcgcactggggccaccctcaggttgagccctcctggaacgggtggtccttctagactacgggtgggtagatcttctggaacctatgggttcttttccagaacgatgattggtttcttcatgtggggtgttaacattttctgaatttttagccatgaaggagatggtttttcttcaaaagaagggagggtttttttcaaagctttttgacagaggctctcaatgaaagcacgaaactgttaacgcaaattttcgttaactaaatttgagcctcacaatattgatctcacatagaaaaaataaaagctataaaaataaagatatgaacacagagttttttacgtggttttgtagttaaaat

SEQ ID NO: 222851 - DNA, 1604 bp, Cannabis indica
agctttgcagcaaacacaccaactaggtgagatggatgtgtatcgcctcctcttttgcatcttatcatgaacattcacttttcctaaagacacaagccacccaaaaactttgacttttgacggaacacaacttttccataagggccttacccaatagactccactgcaattcgggtttgctgtaaacaaagagaaggctgacttacaagaaaaaattctggatgattctggtttccaaagtcggctatcatttgagatattgaatactctaacatgttccaccttttgcaacagctaggagaggcttgggatctcccactccagtaggttccttctaaatttgaaatcccagctttctactcgccccccaagctgaccttcatcgacaatcagatctttgatcgacacatttctatccttggaaatcactgctaagtcagggaaggaccttgaaagagaggagtcaccaagccaaacatcttcccaaaaccgcatactggctccattgcctaatttgaattgtactaaaccaaggtacttgtcatacaagtcagagatatccctccatgggcctttgggggagacaagacttccttttcttgtgtcccaaaaattatcagcctttccatatcgactcaacaccaccttgtgccacaacgagtttggttctagaggaaacctccacaaccatttcataagcaagcccttgttcctcaactccaagttcccaattcccaaaccaccttcctcacgaggtctgcagaccttatcccaagccaccaaatgatccccacccgacgattcacaaccttcccaaagaaaatccctcatcaacttctccaaggctttagttacagattttggagctttaaatagggaaagaaagtagattggaaaggaggatagaactgactgaatgagagtcaatctacccccacgagataaaaatgaacattttcgaccatctagtcttttagcgcacttgttcagtatcggctcccaaaaagcccattttctaggcgagcccccaagggcatacctaagtacatcaagggccaacttcccacttcacaccctatctgagatgccaacctgatcaccttttcctcttctaggcaaatccccaatagttgacttttgttcatgttgactttaagcccagaaatagcacaaaaggcctccactaatcgtatcagcttctgcaatgagtcatcatcgttgacaaagaataaggtatcatctgcaaattgaagatggcttatatgaaccttctctttccaacctaaaacccagagaagttgcctaaacttactgccttaaccaccaacctccctagaacgtccgcgaccagagtaaacaaaaagggtgatagtgggtcaccttgtctgagaccccgagagctagagaacttccctctcggtcttccattagaaaactgagaatgaggtagaagacaaacacccattgatccattttctccaagtgactccaaaacccttgttgcacaataccaaatccaagaaattccaatccactcgatcataggctttttcaaaatcaatcttcaggaccagcctgcttttgcctctacttctatagtcttc

SEQ ID NO: 222852 - DNA, 2055 bp, Cannabis indica
agggacaaaccccgagcaggtcaatacaaaaccacctactgtgggccatggagtgacttcccctctagctgggatcacaccaggagtgcaagagactggtaacaccagttcagcaaccgatcaatccactcccaacactgaggtcccgtctaccactaatgttcagaggccaattagagacgatactaaaatccaaaacctctgagcagctcttgggctcatgcaaggtcataacaacactttgcaccatgatcaggaggatctctgtgcagccataaaccttgcatttgatgagcaaaggcatcaatttataaaatagagggacagggagatggaaactttgagggctcattaggaagccattgatgattgcacgaggcaggccaccatactgataagaagggcttaccaagtcgccaatcaatagctggctactgcgtctagtattcccttgggaaatttagaagggaatactgcacaaactcacaatggtcagtcgtccaatccacgaccacaagtccaacccgtgggctaaacggtagatgaccagagcctgctgaactgtcctttgggtggagttacacacaccaacttcaccccaattgaaatttttggccaacttgccggccaaacaagtcagatgccaaggccaccttgtacttcagtattcgataggttgggcatcgaacatgacctcaggactgacctcaatcgaagaaggggcctggacgaacaatacgtcccaccaattgtccagccaggtatccgctttcaggatctagttcaaagagatcccaatgtgacacaggttggtcaacaaactaaacaagttcatccatttgtgtaagcacatatggattaacttaaaaacatggtacaaggcctgaccggcccaaaactcagtgatctcgaacttgaccgagtatgtagataacctttctccccggagattgaagtcctcgaattacccccaaaattcaagatcccagcctggaaaatgtatgcagggaaagaagatcttttacgacatctgaagtattttgagatgcagatggatctgcaaggggtaagaggtgatgtctggtgcaaaatatttcatgccacactcgcagaagccacccggtaatggtatttcaagttgcctacagggaggtttgactcatggaatgcattctcctcataattccatgcacaattttccaccttcgtcaacttcccccgcatctcaaagccttggtcaaagcaaagcaaatgccaggggaacccctcagggcttatatcagcaggtttatgaccaaagctacaaaagataaggggttgactgaaaaaggaaggtttgcaacaatactgggggcattgagccacttggagagctgtggaaggacatctaaaggctgactgtggggtcaatggctaaatttttagatcaagcaaatggattcattaagcttgaagaagctgttcagcgtgtggatactatcaggcaaaagaaaagcaagtaacgcgtcgcattggtaggaacatccgttcggaatctacagtaccctagcagctcaaattcaaatgggaagaggtctcacaactgtaacaggtagggtagtggaaagaaaggaaaattcactgccaatgccgaacaacccaggaaaatgcctcaaaatttattaccttctcagtcctaacagatgacctagagacagtctacgcgacaaatcagtctatggtcctgtacgagaaaccatctcccatgaagaaggatgtaaataaaagagatacatccaagttctaccattttcatgtggactacggccacagcatgaacaaatgtaataatttgaatgagaaattaaatttcttatcagaaataataacctgcatttatagaagtatgtcaaggctgaccagaaccaaagggccgcccaggcagataataaccagaaccagttgatgccaccaccagtggacgggcatttacaggtcattattgggggtcgacatcttgctagagactcgggtaaagttcgagaaaagtatgcccgtgttggaaatattttacca

SEQ ID NO: 222853 - DNA, 2265 bp, Cannabis indica
gccggtcattttgtctcaaaaaaaggagtatgggctgaacagacatatatatagaaaaagaagagtttagacagcgggggtcctgggttctctatacggattgacctggtctgcaggggccggaggctcaacgttctgagcagtaggagtgtcgttgctctagtcggtttgaactgtagaagtggttgcctcggggttctctttggctatctgacctgcacagaaattaagatacatatccttggactcaccaaggtaatcaaaatttccttcagggatggccttccaaaattcgtagaaaacttcaagggcggttgtctctaggctctccacctccttcacgagctcttcctctctggtctgcttagtttgggaatctccctttaattttgtgagaagagtgcgaagattctccctcttgtctttaagatcattgacctccttggacaaagagacattatcggcctccagctgctcggtcgaaggtatctcttacatttctttggtcagctcctcaaccttggtgttaatagcaagaagctttttgtttacctccccgagctcatttctcacctccccaagctcattcctcacctccctaagctcattcctcacgtcctgagtttcctttctggccatatccacctccctctgcagtgtgttggtggtggtaaggttcttggcagcaactgatttggctcgagagtaagcatatgccatcttcacattgacctatacagaaaaaatgttaaagttcaagctacataagagagaataagataaagaaggagatagttacccgagtagcttccttcaagactcctcccaggaccagctccaaagatagctcattgtccaccccggatagttggtcactcacctcaggaagtgatctgttcaagaaatactggagcatatccttacccattttcgctttcgtgctcagtgccacggttgttgaagggggcctagcttgatcagactcgtctgagctcccccctctggaactctttaacttcgagaccttttaaactggaaggtccacaacaggtggctcctcaaaaaggtcaatgacctcttcgattggcgccttctctttggacggagtctcaccgcctttaaacttcttggccagaggagactggcctgagctgtctcccactctcttcttcaaagcttggagtaccttctaagacatttctacacgaataaaatgaagcatttagaagcatatataatgtatataaaagcataatataaaagaagtaagtgcaagttaaaaataccctgcacgcgggcagaagcattttcccaaacaagcatggaagggacatcatcatttgaagagtcttcctcatgctccaccagaacggccttcccttttccctccacaagagcggatggccaagcaggcatatcagtttccataatcctgatagcatgctccactagtgcttggtcggttggggaaaccttcttcttcttcttgctctgcttctcctgctctgaatattcttgagcatattgcttggctctgttgtctcctttcaacttagcctcacgcttgagttgaatgagctatttctccttattcttcttcttcttcaagggcttcggtacaaaatcatctgggaagagcttgtgcttcacatagttggcctcaatgttcaacaaagtgatgttccaagcagcttctggcagttgaagaattttttctgccctctgcctgagtcccaatgtgaaaggaggacggtagtacaagggaatctgctggaaccgagtgtgtacggtatccatgtcttacacaaagtagtactcgtccacaaaatgccctattttgctgacattggtgtccacgatacccttcagctatttctcatccaattgagagaagtagaaatatcccgatctgctctgtttaggagttgacttcaggtcaaaaagccagttggtgtcgtgcggagaaggctcaccccatttttgggatgcataaaggatgaatagggtggacaaatatttgatgccctttagagtgaactgggtcgggcagatatgatagtagtctgcaatcctcttgaagtacgaaagcaaaggcaacattgcaccctgcttggtatgagcacttgaccaggcacaatatccctatcttggactagttccccgatgatttggagaagggaaaaagcattcgacatttcccaggtagctgtccctctccaaattcttcatcttagcttgggttactatagatggaggagaaaccca

SEQ ID NO: 222854 - DNA, 1867 bp, Cannabis indica
cccaacagaactgatccaccctcaattttcatgaattcactaaacatttcttttcttggtgtcgtatgaaatgaacacctaagagtcaagaatccaatcacatccaatctcttgacttgtcacaaccaaagcttcagctgactcataaccatcaaaggcaatgcctgcatcacctctttcctttcccttctctctgttcaattttgccttgagtgtcctacatattcatcattaaaatttccttccttcttgcagataacactattttccttgcttggattttgtctttgatttgtacacttgattgtgtcccttgttctgatcgttcttgtaatttgtcttgttgtatctatccttggagtcttttgattcatttttgcctttcacaaatagactgtctgcaacaccatcagacttctcatcattctttttctgtatctccttggaattgagtgttgccttaacctctgtcatggtcaaggtctctctaccatgtgggatagtgtccacaaagtgttcataggatttgggtagtgagctgagcaacaagataccttgatcttcatcttctattttcacacctatgttgctaagatccaaaaatgattcgatattgaactcataaagatgttttctgagttctcttgaatcttccatcttgagagtgtatagtttcttcttcagatagagtttgtcaaggaatttcttcaagtaaattgaggcaagtttctcccataatcccaaagttgtttcctcatttgacacttctctcaacactacttcatctcccaagctcagcaggatggcactatgtgcttttgtttcgatttctttaatcttcttcttgtcatctcccaactcctttaattcttccttgttaatggcttggtatacaccctgatgaaccaaaaatgctttcattttaatcctccacaagtcaaagtcattggctgaattgaacttgtctacttcaaagcgtgcggaagccatggatcactttctttattctattcatgcttcaagaaacctgagctctgatgccgattgttgtgaatgaacacctcggtaagaacacattaaacaaaacaatgatcaatgaaaccatttcaagacaatggactaatataacagcaaacataaaccagcaacaagaacattaaacacacacaaagaacacaagaccttaacaaggttcgaaaaaggtaatagtgaatcaccttgcctacatccctgaccataaaacagccacaacaatggccttagataatctttattagctgatctttaatgagagattacaacaattgaattacacaacttatgaagcttgcttctgtaattgacctcttcttatggtgatgataacacacaatatcacaccaatacaaacactaatgggcactcataactcatctctctcattcacttaaaagcatgagaattcactctttctctcaatctatttcccttgaaaagcaaccaccatttatcgaaccaactgagccttaaaaatagtagtgcaggagctagtgtgtgtgactcgatcaccgacagttggttaatttgattatgtactgtaggggtagtttaggtattttgatatttggccaacacacaacactttaattaatcacattttataaaaaaatttaattaatatctctctaacaaaaaaattaagagcattcctcatatatttttctatcttttacatgattaataaaagtagcatattttttttagaatgttttgtagtttattcagagttaatttatgaataatttgcatattttaacaagaattgatttcttgtttctgctgatttatagccatctttttgttatttttatgttgttgtttatgtgtt

SEQ ID NO: 222855 - DNA, 3412 bp, Cannabis indica
gtgctcggctggaagtttcttcttccttttgagcaaagttacctactcttcctcaacctcgtcttcctgctcaagatgctcctgagcatactgcttggctctcgcacctcccttcaacttagcttcacgcttgagttgaatgagttcattctcctaatgagctccctcagcccggccagcactggatttcctctttttcttcttcacaggctggggaatgaaatccttcacgtagagcccgtactccacaaagttgtcgtttgaggttaacaaagtgatattccgggcaacacccgaaagctgagcgagtctttgagctctatccctgagagcaagtgtgaagggcgaacggtaatatatagggatctgctagaaccgagtgtaggtggtgcccatgccatccaccatgtaatacccgtcaaccaaattcccaattttgctaacggccttgtccccaatgcccgtcaaccacttgaagtctggctgggaaaaatagaagtatcctgacctgccttgcttgggagtagacttcaagtcaaaaaaccagctaacctcgtgaggagaaggcataccccacttctgggtggcatagagaacgaacagggcagacagatacttgatgcccttgggagtgaattgggtcgaacagagacgaaaaaaatccgccaccttcctaaaatacgagtgcaaaggcagcagtgccccttgtttggaatgagcatcggaccaggcacacatccccctcttagggtttgtggctcggttatttgaggcaggaacataagagtttagctcgccaaaatagccagactggtccaggtcccgcaggcgtgcctcggtgacctatgacggagggctcacccacatggcgccaaaggcaccttgactcctgtgaggaattgtagcaataagctcctcgagtgacgaagtccacgccctcgaccagaacatcgtcgtccgcatctactggctccctagcctcgttgtatcccccaagtttgagggtgcggcctcctcctcttcctccgcctcggaagcactaccagaacggacattgccctgttcctttatctcctggacccttcatgatccccctcctcttggatagccggatcctgttcggcgctgggtaaggtggcgtgctaggccacatgagggtcagacgtgttgactttacacattgtctgtttagttcgagccatcatcctatggctggacgggaggattgaattaaaatgtctgtcgcttgaagagggcggactacaacaaagacgacgctgatcctcgtacaagagttgaagcgaatcctggtcgattcggtgttcgcttccccgaaactcaccagggttcatctacaaaagacaacacgtgagatgagtgtttgatcgggatatcgaacaataaacaggcaaatatgccgaccaggagtactcaacagattaaagaatagaaatattcgacgaaaagtcataacttaaaagtttgaaattttcgagagttagggcaaaaatttcacgaagctttgaataagcaaggtgaaagacagacattgtgcattcagaaagcaagcattatgaataatgaagttgcataaatcattgcaaagaaaaatcgcagagtttctgaacctagggttttctacctatcttctacagcaaggttaagatcgcattcagaaattaaatgtgcaaagtaaaagtagagggaatcgaaaacttactcactgattgatgtctggattcactctaagcaaagctccttgaatggttcttgtgaaagtctcgcggcaaactcgaagtgaaaaatctctcttttttgctctaaacttgcttaacagagaagattggtgaaaatgagtttgtgaacaatgctcagtcctatttataggcagaaaaaagaaaaggggtaatcatttcaaaaacctcagacgcctcggtttcccccaaaagcaaatattggaaatcaaaagtaattaagtgtaaccgtcaaacgtggtgagagaaaatcagattttgaagcattcattgcatcagagcatttattagccaaaaaccgaagagacgcctagacgcacctgacacgtgtcacccatccaagcgcaaagacaactcggatgaagtctacacgcaacttcagaagtcccgtacagacttggggggcaaatgttatcccaatttttgcactctgacgtggcatcacacgatggtgacatgtggattcaactctgggtacctgctcgcaagaaataagccaaacaggacaccacgcacatttgctcggaagaagtcctcttagccgggcaatgagcgatccgcgcaacatgccaatacttagcaaatttagctttcgcatcatgagtcatcaaagaaatccctataactttgggatcagattaatagaaatatggcaagctgtctaaattccatgattagtgtattctgtatttactatgcaatctttctacttatatcagttgtaaccagaaaggaaagacttccctcccaagcttatagccctataaatagtgatctatactcacttggcaaagggtcaaaacattttatctaagaattcatattcagagatactattgtaagagctctaagaaaagtaatcattctccttgttcttaagtcaatacaaataacgaggatttgtctattacaaaactgctcggggctgaacctctattaaattcttatgtctttatttgctttgttacattttatttgtattaaattacttatcacttacaaatcaaactcattatcgttggctaaaagcgaggtcaacacatattaatttcaaataatattacttttatttatgttatgcatgccaacatatatatagtagtgcaacattagatagtttctcattttccctctttcataatattgtgtaatttttttggtcttacaatacatttcatctcattagatattgaaatgatttaattatatagagaatgttatcccactctcaatagtgtagataatgcaaaatattaatgatcatacctaaagaattgaggcaatgataacaaatacatgtaaagaattatttttaattcatttatttaaaataaaatttgtgtaaataaatgctaagagttttatatttgtaataaaagaagtttttgttagatttttatttggatttacattaaattttattagttttactaaaacatggattgattagatagttttttgctgtgttagctcatattattggtgatcttagcatctgtgtatgtaaagtctaggtgaagtagaagtgtgggctttcctagttgactaaagcttttgatgagtgggtccagtccaactagggttatgtagctaagtcccctccctaactttataaatacatactgtctcatcacaattgaatacttttggtaatcaaa

SEQ ID NO: 222856 - DNA, 3940 bp, Cannabis indica
tgatgttcagggtcaatccctcatatactccctcaattatttcaatatccagggtcaatctctgacatatcccagggctccaggtgaagtaatcctggttttgtctttggctgcaactggttgacgaccagctttcctcgtgacagcttgacatggcaaccacagcgggttgatatctactcacgacgcaaatttttttttttaagaaaatttgctttaccgaagcaactgccccttgtattcctgtgagtcgctccctcttgggataaccgagatgtcccttcctcttacagaggagggttataatcccaggtcactcgagttgttggggatcatgggcatcgtcctgcccctttatatatcgctgaaggtgtccttgcgatatgagaccttctatctcatcttttagctgacgacactcttttgtggtatgaccaatatccccatgatattcacaccgcttatttggatccctcttgcgccttgcatgtttcataggtcttggctcgctaaaaagggcctcctatacatgtgcgaagtagatattttcctgagtttcgttgagctcggtatattcagcataaagagggatatatttgttgggtttcttatccttaggcagcctttcagaatcgtcttttctctttgatcctgaggcttccgaatcaagttctctaacggtaccatgcctcggttatcttctgagtttcgtgacttgatgccctctgaacttattttctaactcgttaattcgcaaatggaatgaatcctttggccttcaacagagtcgctgacgaaggtcaggtttcttcaagttcagatgctcttgtagatcactcttgtcgtgactgcggttggacctagcccttcctctcaaggtttgattcacctttttctccctataaaggttcgtgcgagtttctttcttatgagcctgaagagagagttggcaattttcgtccgatgctccacatatctcaggctgtgtctccagattttcctcagtttgctcaggttgcatctcctgagagttctgagtatatcattggattgtcccctgccccttggtttgggagctacgaggtttgcctcgtgaatctattctcccaaggttaggtacattttgggtaccattgtcctgcgctgcccttactacggctgtttcacgctctaacttggcattacgccagtttgcttcctccaatcgtcacctaagatggcgattttctaattccacaattggtatgtatctgcttgggtcataggtgccatcctcatcaacctggttgggaagtggctgattgctgtctacccaaggtccgtcaagccagggaccccaatattgggttctcctggggcttgcagtctgttcatgcgatgactcaatagatccctgaggacttaatggttcttttcttgggcaatcattgattccttcttgaggattattatctttgtagtcatccatcacttttatgtcaggagcccttttctgagtttttttacagaggctctcaatgaaagcaccaaactgttaatgcaaatttttcttaaccaaatatgagcctcaccatattgatttcacatagaaaaaataaaacctatcaaaataaagaatatgaccaccaggtttttacgtggctttgcagttaaaattcggcatagtccacgagtcaatcttcttcagatttcagagtatttttcaaaggctctttcatatgagtttttttttttcgtcccctttcttgatcttgtctgccactatttatagttacatagtgggcagtaatttacaaaagtttacaataatcgttacagcaattattcccccaaatcataggattcgattaccaatcaagcaatgtaaataaggcttttatttataattcacacagttgtgagtatcccgcttttattgggctgaggtgaacgcgtaattaaagacatacgataaaccttatcccatacggatgtctcgctgagaatggagtcaagttaactttgatggtgagcagttgcttgtcatctgacttcttgagtttaatattgttttaactctgataactgtattttctggtgttgagatgatcttcctcgcatgcatgccatcttctagcaagataaacacctcgtcgtctgttatcttgactcgccaaactgtctacacttagtttgtatatcgtgtaatatatgctaagtatttttggcgttattgtttctcttccacgcagcgaggttgaggcctcgtcacgcacacttgcatctcatcaatacataagttagcagttcgtacatttctgtctcgcagaaggctattgagccagccgagttataaacatactctgcaaattatgtttccaacgagattgttccatgctaagtgtacttttgtttgcatgtttgagttcttcattcttcccagctcgacacgtgtcttcctctgatgtgcttaccaaattatgcgtgtgagaaaaaaaaattatcactaagtgataatacaaacacaattattctatcctatctttgggttataccaaagagatcagatcaatataagaatttaattttatgttatcttacaatgtcttatgctattttatgttaccacctgtgaatttgtattgtcaatttttaaaatatgaataatgttaaattaacctattaattattttttgaattaaattactatagtaattaaaatttgaaaactggttattaataattaaaaatattatttacttatttatcaactattttaattaattttaaattttaaatttactaatttgttaaaataaaataaaaagtatcattttaaagtttttaactagtttaaattaacaattattttttcattttaaagtttccaatttattaaaatttaacaattattttaattttaatttaatttttttaattaaggtaaactatgttaattgtctatatttaatttaatgaattttttaatttattacttttttgtaaataaattttttaaactaattaatactaaaataaattgcttaaaatattttatatttttcaattaaacttatttatctatatatatatataatattagtggtattctaagtatctttcataaaaatttaatcaatttaaaataaataataatcaaaattgaaaatattatgctctcgaaaattcagcaacataacaccctaaaattgtccattctcaaattttcactatctataaataaaactacaaacacaataccaaaatagtcaaaatattaatattttctactcatccgactgcagtatattttttcacagaacttacttcattatagatgaatatataagatattcaaactctactaataagtatttttatttttcagaactaaagtaacatattataaaatcatactaaccttcaaatataatgaagaatgatgatcaatcggcacaacaagtaaatcgacaccgaaaatctatttaccaaaaacaattattagaatagaaaaataataactataattctatgcacttatatatgcatatatacatacacatacacacaaatatatatataaatatacacatatacgtacacaaaaatacatatatatatactaatatacatacatatacatatacatatacatatacaaaaagttaggggtgttcgtcaaactgcttaaactgcctgcaccacactgcaccgtaagaaaatacggtttgaaattctttgcagtgcggtcgggtttgaatttttcttaaaccgcacggcgtggtgcgatttgcggttttaaattgttaatatgcaattcaaacatcatcgcaaattataaaatacaaatttttatatttatttaggtgtaatatgtgaatgtccaacctacagcccactaataattgtattgttgaaagttaaaatttttttcatagtattttcaagccttatggtattt

SEQ ID NO: 222857 - DNA, 3332 bp, Cannabis indica
gccccttgctggaatagagctacccatacggaggtgtgaaagccaacttttaagtaagctggaactttgtaattgagagttatgaagatgatgcactatcatagaaaagggataccttcagtatggtgtgatagcatctagtttcgggatcaaattgaaaaaggcgaacatgaaaaatctgccaaggacaatgatcctattttcactgcacacacttacgtctgacaagtgtgtacaaatttgtaagtctcctctactaaaataaaaaatcctggttcatattttttagtaacatcatatccttttcctcaacatctactaagtatggtttgttcttgagatactaattagttgttctcttttgaaagcataacatgtatatttataatttgttatgaattttgattagttgcttgctatagattaccttatacatattgtgcatattttatttagtattattttcgagttttcaaaaataaaaataaaaaaataaataaaagagagggaggcgttggtgattttgcttgtgggctaagaaaattttgtgctttgtttggtaagtttcaacatttaatctaaattgatttattttaatatgtttccttttcaagtttgatatcttatccaatgtaatttgtcattgatattgaaggattttcttaaattgcctatttttggaaagtatcttagtaattctagtttccttttattttttaaaaaatcaataattttggaaaaagagtggggcggtttcctttggtgttcgtgggctggtggttactcaaaattttgaaattggtttcctcttttgctccactctcccatgtttatttaaaccaattcttacttgtcatttattcttaccacctacccgattcatatttccttatgttcttattctttgtttttcattcttcttttagaaattcatggctaagactaagaacttagggcatccaagcaagatggtggaatccaaacaagccccctcgaatgctcctcctgctgctccaatcgtgctgcctactgctgcaactgcatcaaacccaggagattcattgcttccttagcgtgaatctcagcctatgaagaccaagccgaaacgaatccccaagcaagttgtaaggaaatttgtgcgtccacacaaattttgcactttcttgtcatcgaagggatctccacctcgtcctactgcgtctcctcctgctgcttcaagtaagggagttgctgcctcaactccaacagggccttccactcgcactcgtggccaacaggcgtctctcgagaaggaacttcgctctaaacaaagcgatgacagacccattcattctgccaagaagctgaaaatgaatcccccttcagcttcttcgagttcttaagaagatgatcctatggaggtctcctctgaagattttgagaccaaatccgagtctctccattctgaaaaagagactccaaaaaactttggagtctcctctgacagtgaggaaactgaactcgaacccgagcctccattgaccaagtctgctccagcacctcctcgtgcatcttcagcagccaaggcttctgttgctgccagaggcaagcagcctatgaagagttcttttcctggtaatatctatccatctcaagctgtcaattccagattttactatcgtgagaatgagcgtgattggaatatttatgctatctgaaagtttgaaagtgagaagaattatgatttgcatgctcataaggtgtatggtatagttaaatttgttcaataccatcattgggaaaatactcttactagttttgagggttatatattgatggaattgtcaaagaattttatgctaacttgtctgatgattttcttgatgagaattctgaattttttcgaaaagtttatgttagaggacattggttctcctttgctgaaaaagacatttccaaagctttgcaactaccagaaaatgtaacaaatgctataatgtatatggatcgccaattgatgctcactgaactcactggtgcacgacttgaatggaaatatggggagagtcttcgaattacacatcttacctatgcacatgcatcttaacagtccatttttgtataagtataaacaatcaccggccaaagagtctaataaaatggactcgtagactaaggataattaacgtctgaatctcgtaaaaatttattttttataatcttgctatttacgctttcattactttcttaagctctataaatatttagttaccgaaaaacctggtaaacataaccgaattatgcatttcaataaaaaaaaacttatctttttgaaaattttatacatctatcagtatataaataaatgaaaaattagaagaaagcaaccacacatagcgagattacttcttttcttctacacgctaagtgaataatatattatatgtattttttattcttattagatttggaataagttttctttgtttttttttggtgtccacataaattagtcatgcacgtagatatttttgggatgagttattattattatttttttttaatattatattatttttttctcttatttaatttttttttggatgttacaatttgtttttggcccacatagtatgataaataacatggtgtgacaaattgatcatgaaaaaaatcagcaaattaataagttatttgcttgtaacgcaaataaattattgttgaatgattcacttatcattgtatttacattgagtaactcattgtttaatttttatttttaagtacacgaacaaaactgctaggaaagacaaaagtgataaccaaaaataagatacattgatcatgactttgaataacaaagatattaaaacaagtattacaatattaattaaagattgagtatgatgataagctattatatgacatgttttataaagaaaattattaccaatgaaaattttggtgccttcaagtaatgagcacaacttaattttaaaagaagaatgatgaatatatgtgaatcagtctaccaacatcaagcaataataaccaaatatatattggttaaataaaacttacaatagaatatttcattatatttttttcttatgactttgtcaaatagatatgaaattgagaagtaaaagtactaaatcaatattgatagtcaatatgttatacattgcaaatacaaactaagaataacatttttttttatagatttttttatttacttttgtttggtttaaagatctacttttgcataaattatctatacatttatctgttttcttttaaagtgagtagcaactttcttgattttaaaattttaatttaaacataaacaattt

SEQ ID NO: 222858 - DNA, 1648 bp, Cannabis indica
acaaggggactcatatgtctccaagagttggaatattcatggacatatcgggccaccggtagtgcatctaagaatgttgtcagtggttagtgggtacgtttctattagcttgctggtatgccgcttgcacaggacgtggcctaaacctccaggagacgttgtggtgggccttggccacgagtcccaacacgagatgacacgggtagtcattcgtgggctagtttgcatgcgcgcatgggacggatgcaccatgttggaaagaggcaaatgtctaatgtatgcaactagtttggtggcttgtctcgagggcctgccaacatgcgtggaggcatactgccatgaggatcggaccatggacgttggggagtccttgggcgatgagggagacgattcggacagtttcgaatggggcatgattagaagcgtcgacatgtcagctgagtgttggcatcttgtcacacatgctaccttggacatgagtgactaggtgagccacggttgccttattatagtgcgaacctatggacagtgcgagtatcttagctagagagcctcgatgcggggatgcactcatggatgcttgcaagcatgactcgacaggacttgttcgagagacgaaagtgtacacgtggcacacgatcgcgcgaaaaataaacccattgttactcggatagttggaaggctgaccttggcttaaagaattcaaggtgctgcacaggtgttccgctgcattaaaaaggtgagccccgtgacaccccgcatgaaggcaaaacttggcctttcataaatctaaattatccaatatatgtatttataatctcgtggctaataaattgtaagaaatgatggttatagtgaagaggttttttatattttaggttaaaattacccaaaataaatatttataccatttgaaggaaaaataaatatttatactatttactaattacaaaaataatatttataaagaaagtttctttattaaaaaaatataatggagagataaattctaagtgtaaagtgggagagtgagatacacatgtggataggacaggcgagtgagactcacacgcgagtggggagagtaaagccatttattgacgtgcacagaactacagtgttagaatgtggcagtgactttgcggctgtcatgtggcagtttggtcaaagtgagcttgggcgtgtagggttattttttcttaatgcaacaattatgcaaaaataacttaacaacaatcaaacttcaaaacaaatttattaaatgttaacatattgcattaacacaattaaaatttataaataatacaacaacaccgtacaagaactactaattgaacatataaaaaatatttacaaattcattacaataaatataaaaatttttgagacacataaactaaaaaaaatatgaaaattaccccaaaataataattttaaaataaagtaattaatataaaatatgctcaattaaaaatcaagtagacaacaatattaaatatttatatacacaatttagacataattaacacgtgggtctatgctatatagacattaatacaatagaacctctatttaagaatactctattcaagaataacctctaatttgttataaaaaaatcaaagtctcaatttgggccagttataaa

SEQ ID NO: 222859 - DNA, 1681 bp, Cannabis indica
ttagagatttttactagtttacttcctaattttttctaggcgtccctaatttatgttcatatatttatgaattaattgtgcatgctctcaaggtggatagtaaactagtttgaatggattctccatctttttttcatgatgtactgctctcttatgatttttcaatgaaatgtttatttattgttaaaaaaaaaatactaattattatccaaaatataactcataatctgtatatataaattactttgttaaaaaattactaatattataaaaaattacattagaaaataaataaataacaacttaagatttaagttgagagaggtgtactttttttctacatgatataacatattaaaaattgatacaaacttgaattttttatactattaattatagtttatagtaaacaaagtaacaattaaattttttgtttcaataataggtactaaatacaaatcttattgatagaagtttctttaattaaaaaacttaaaatactaagaaaataagtatgtttttttataagatttgaactaatgacctttaatatgtgtgtaaaatagcttaacaattataccaaaccttgtattatgttcattaagagctcgtttggtacgtcgtgttatattgtattgtattgtataatatttgtgttagattgtattttattaatattatttaatgcaatattatgtttactattgacttgtattaataacttgagtaaaattatatttttgccataaactcgaccctaactctgacccccattcaggtccgaggtcctaagccgggtatggggccgaagttcgggggttagaaccgagtccagggttcaagtctagggtccatagtttgaggtcaaggtccagggcttgaggtctggttccagggttcaagtttgagtttaggcccaaagatcgaggtcccgatccaggtctgggtctaggaccatgtccggagtttgaggtcagggtcagtagccaggtccaggtgtctaaggtttaggactaggtatgaaactagaatccccaaccccagagcctatgtaaatattacaacacaagctaatacaaatcatttattatgtattaaagaatacaattcatattaaaatttatggttgtaatttaatattttatccaaacgtattgttacttattatttaatacaatgtaacctttatacgcctaccaaacgagctataatgtcaattttaattataaatataaattgtaactaactaaatacaagtctctacatcgcccgccatggtaaataactactaaaaaaaaaaaccaaaataattaaacaaatctccgtcagagtcagagcaggaattagtgagcatcatcccattcccacccattttaaagttgaaggacaaatactaatcctcgtcactactctatttccaatttactgccccattaggagcaggttcacccaaagccccatctccatggaaaaaatatgcatcaccgtgtcactcagctaagatgaattaaatcatcacggataattttgtcacaatcaagattaaggagtgaaaaaacttaagagacccaaccccagcaaatcgatgcaggttttgatacattagaaagtacggtccttggcagggtgttctactgctcattgattaaactacagagatgaagcctgaaaggatatcatt

SEQ ID NO: 222860 - DNA, 2461 bp, Cannabis indica
cccaattcctaggtctgggtcccccatctatgttcaggtcctaggtcccggtttgggttcaggtccgagttcgagtcccagtccaagttttaggtcccaggttcgagtcttgttcttgggtcctgggttcggcccaagtttttgggtctgagtctgggtcggggtctcgatttgggtccaggtcctggtgttggtttaggacccaggtcacagatctcggtctgggtccaagtcccggtatgggatctggtatgagtttgggtttaggtttgggtcctgttacagtcccatgtctgggttctagtctcagtgcagtccaattccagttctgggtctaggatcgggtcagagtagaacttgggacccgatcccagacctagactcaaacctagacatagatctggataagaacctggagtcgaacctagacccagacccacacccagactgggatcgaaacttaggacctggattcagacagagacccagacccaaacactggactcggaccaggactcaaccccgacccagaccctgacccagacctggacaagagcccgaacccgaacagagaatcaaaatcagaactgggactaggacccgaacccaaccatggacttggactgggacctaggacccgaacctgaatgggggacctggacctgggcctcggaacccgaacccggatcagaactcgagactcagacctggacctggaccaggactcaaacccagtgcttgaaccaagtgttgaccatgactgggatcaataacccgaacccgaactcggactaggacttgaaccccgacgaggtcctagacttggaccgggacctaggacccgaacctggacgggggaccttgacgggggacctgagcttcggaattgacacagagacccaggacctaactcgagacccagaccctgaacttggacacggaccaggacctcagacccgaagtggaactagactgggactcgagaccaggatcttatctagactcggggcttggacctaacccattgttgatgattggatttgggacccatacctggactcaaacagagacccaaacttagacccaaacccgaacccagacctgaacttgtactctgtgactcgaaacttgaagcggaaccggaagcggactgggacttgagaacaagactaggggactaagacccgatctcggtcctggaactagaaactgacaaggaaccagacccagaccatgacagggatgcggacccgaatcaaaactcggattgggactcgagacgcgaacccaaacccagacacggacttggacccatacccgaacgcaggacccggaccgggattggagactcagacctacacctaggtccctaacccagattagcgacccaaatgcgaaatttgaaccagaatcaggacccaggaaagggactgggacctaagaccagaccttggtctcggtcccagactcggacccgaacacagaccgggacccaagatcggaatcagacttgaacccaaacacggacctagacctagaccacgacttgaaccagacccacacccaaaccttaaatcgtaccctgtgatgcaaaattggaaccggcactggaagcagacccttaaaccctaaaccctaaacctaataccctaaatcctaaactctttacacttacccctaaaccataagccctaaaccctaaaccctaaatccgtaaacaataaacccaaaaccctaaacccaataccctaaccttgacaagggcccagaaccatacctatactgagatcggaacctaagacctagacctggagccggatctaaacccgaacctagacccaaactcgggacctaaacccagaccaaaacctcatccgggacctagaccttgactgggacccgaatcgtgaccccaacccagacccaaacagggacctggactaagagtgggacccaaatctagactcaaacatgaacccgtactaggacctagactcggacccaaactcgggatccaaacccgaacctaaacttggacttagactgggacctaggatctagacctagattggggacctgggccccaaaccaaaacctaaacccagaccttgaccaaggatgaagacctagatgggggacttggacccgaaactaggccccatattcgcgaccaagacccaaaactcgactccagactcgagacacgggacccgaccctggacctagaacccaggacctaactaccgggacacaaccccaaacccggacccaaacccaaacttaggagccgacccaagacccggggacccgaactggaacaagactgagatccgaatctggacctaaggcttcgacctaacccctagtaaatgtttgtctaggactagaacccagacttgggacagtaaagggacccaaacctaaacccaaactcagaccataccgggacttggacccggac

SEQ ID NO: 222861 - DNA, 1633 bp, Cannabis indica
ttttttagtaatttaaaaataatctacaattttattgtcatattgtttctcttaagtaactattgtttaattaataatattttaaattttgaaaatttatgtataataatttaaaattatacattttcattaattttaatgaataaatttttgataaatttttttttataaataaatgtgtgataattctttcatttaaattcttattaaatttaaaatatattaataaaattataatttaaaaatgataaaaaaaatctcacctgcatgaggttatttatctcaccatgctagatgggataaataatcccaaataaatgagattaactagattagttatccagacttctaacatgcttaaacactggattggacaattagtttgtctaatccaatccagacctgcctaccaaacgggcccgtaaagtataacaaaacttatacacaatacaaataattagtttgtttataaaatactaaataatgaagaaccaatcagtattgattacaaaattgtgaaattatttattattattattttagaatgggattctctttttgtgatagaaccatgtatatatatatagatactagtgaaagttatacgtgctgcgcacgtggagcaaaatatttatgaccatataaatgttcaaaaaaaatactacttatactcaatattactataagatattatatcactattattataattaattaaatattaattctcactgttaactatttgtaaggtgaagactatccccactcaaaaaatatatataaatatagaaaaattaaaagtacactccaaaaaaataattgtacaatatatatctatatcgtgttttcaacacataaatagttattattctattatttttataagacaatgcacactttaactatttagcttctatgtatatattgataaatcaatgagttgtattgcacaaacaaaattttcttttacatcctattcgcacccacaagggccgagttctatatacatcatgttcaatttatacaatcaattacatgttattaaattataaagcaagaaaccattctcgatcactgcttttgatcttcctaggcattaagctctcaattcgaattttaatagcccattttttctctgtaacaattgtaactgggtttgccataacttcttgccatatagtagcattcctagatttccaaagattgtataccagagcagttagagcagcagctaggacgactttcttgaattttgaggttttagctctctcaatccaacgcatcaactgagggagcctactggtttgagtatgccagttcttcacttcaagtaaacaggcattcgcaattgaacaatcaaagaatagatgttgcctactttcaggttgtgcattgcagagatagcagcagcaagtaacctgcacaccaaatcggctgagcctatcctgggttttcaatctattaagcatggccaaacaagtaattacactatgcttcagaatgttaagtctggaccacacttctctgctccaattcattcggtctagggcaggtaaaaacaacttgtaccctgcagctatagtatattgttgtctctaaaacacagctggatcaattggtgttttgagttgat

SEQ ID NO: 222862 - DNA, 2015 bp, Cannabis indica
tgatcaagatagcttttagcagacactactattgccgagacatttatcgatttcttttgccaaactacatcgttccttgctccccatatagcccagcataatgcagcagcaagatgttgtttttctgctgtcaaaaatgaaaaatctgctacacaccagtccagaaaactgctaccagccgagacccccaatgtgccaatgcctaccctttcccacacttgtttaataattctacaagtaagcaagatgtgagaaattgtttcttcaacctcatcgcataaagggcattttgtgttgacaggaacaaattttgaagctaactgagataatgtagggagacaattagaaccggccctccacattaaatttttaatttttggagggagcttcaaagaccacaaggacttccaaaacacagaggcatcattcccattgcatacacctttcaaagtttgaataagttgatatgcactcttcactgtatagttgccagccgcctctttgcaccagtaaagaaaatccaagtgttgatttggaataagagggatccgtttaatcaacaactgatctctatcatcgaagaggtcttgcgaaatttcttcatcccaagataattcattcaccttcaacagattgcaaaccttagcagtgtgtagagtcgggtgtgaagaagttacaaatggttggttttggtcaggcaaccacggctcattcaggatgttgattaaagtgccgttaccaaccttccaacgagcccccgcacggatgagagattgagcttcccaaacactacgccacacaaaacttgggttattgccaagggtagccgatagataattcccatttggaaaatatcgagccttgaaaatacgagacacaagagactcgggtctcgtcatgaagcgccatccttgcttccccaaaagagctaagttaaaatcgtgaagattacggaagccaagacctccgttttccttgttatggcacatccgctcccaagacatccaaggaattcctttgttttccttagaagaactcttccaccaaaaccttgccatggtgctttcaatatctctactaatttctagagggagtaagaacacattcatagcgtaactagggagagcttgcgctacagatttgattaatacttccttaccagcacgagacaagactttagcatcccagccttgaagttttttcctgactctatcctttagaaagcccaaaacagccgacttattacgtcccatagtactagggaggcccaagtacatgcttctatcatcagcttgtggcatttgtaacaacatattgatgtcttcccgaacctggttcgctgtgttagtgctatagaagatagatgacttccccagattaaccttctgtcccgaagcacattcgaactggtggaggagttctctaatccgagtagcttcttgaagagtagctttgcaatacaagtaactgtcgtctgcaaataacatgtgagacactttcggagcaccattcgccaccttacaaccatggagaagacccatatcctcatatcgtttaatcaaagtagataaaccttcagcacacaggataaagatatatggagataaagggtcaccttgacgaataccacgagagggggtaatcggtcccatcgttctaccaccatgaaccacattgtatttggccgaactgacacattttagcaccaaagaaatccacaattcagaaaagtcgattttccttaacacagagtctaggaatttccattctatacggtcataagctttactaaggtccagtttcagagccatgaatccctccttgcccttccgcttcctcttcagataatgaagtacttcaaaggagactaagatattatcagttatgagtctcccagggataaaagcactctgagattcagaaacaatttgatccatgtaaggtttcatacggtttgccatcacctttgtaatgattttgtacaagacattacacagagcaataggcctcaaatc

SEQ ID NO: 222863 - DNA, 1998 bp, Cannabis indica
ccatcaaatggctaaataactataatcatttcattctataaacaaagttgactccaacaacatataataagactagatttaaagtttagagttctgaagcctcgcctacgcggtgcacattaactatcgatggcggtaaaaattagtgtatcgaaaatgtcaccgaaaaaaggagtagtatatatcaaaatgaccacatcaacaagtagatcacacccatgccaaccgtttgtcaaaatagtacacgatatcgccgaaaattcaccataaaggggcagagctacaaaaatgtcactaaaaaaagtagcgagttgggcaaaatagcttagtgtaggttgttattctcgacaagctgactctagaggtgaagacgactcgtcaaacgaacaacggaggtggccgaaaaatctgttcaaagtttgaacctccaaactttgacttgtgattccaggctaacagtggcgaaaggagccgcgctgcttgggggttgaggttgccggcacctgggggattaaaatggttcggaacgtggggtcgaaaccatggccagagagaggtctagagagagagagagagagagaggacgatattgggggttctgattgttatttttatgcatatatatttatttatttaattattctatttttctttttgactcagtcaaaccgagtccttacattttccccaccttaaggaaatttcgtctcaaaattttaaagtacaacctcaagttgaaaattaaacaagtgaggatacttcatatacatctcagactctcctcccaagtagtcgtcttctttgtgatttttccacaagaccttgactactagaatctctctgttccttaacatttttagctctctcgccaaaatttggataggttgttcttcataagtcacatcttcctaaagagagatagcctcatactcaatgacatgttacggatatggtgtatactttctcaatatagacacatggaacacattatgaacatgtctcaactgtccaagtaagtttaatcggtaagcaaccgccccagtcctctcgataacctcaaaaggtccaatatacctcggggctagcttaccattcaccccaaatctcgttatgctatgcataggagtaactttcaagaagacataatcactaacatcaaactcaacttcccatggatggagatcgacatagctattctgatgactctgaactatcataagtctttcttggattcccttaatcttttcaatggtaatagtgataatctgaggtccaatagtgacatgctcatctggttccacctaacacaatggcgatcttcgtggtctcccatataaggcctcataaggagccatccctataatagcttggtagctattgttgtatgtgaattcaacaagtgacaagtgttctccccactacctccaaaatccaaaacacaagagcgaagcatgtcttccaaagtatgtatggtcctctcagactgtccatttgtctatggatgatgggtagtactcaagtgaagttcagttcctaaggcttgttgcaaggccttccaaatccttgatgtaaatcgacgatctccattagaaaattagaaataaggcttgaaggcactccatgtagtcgaactatattgtctacataaagttgagctagcctggtaagcttgtaatcctttctgattggaataaaatgaacagacttagtcaaacgatcaacaatcacccaaacagcgtcatgcttcaaaggtgtcaatggcaacccagtaacaaagtccatggtaatcttgtcccacttccattctggtataggcaaaggttgaagtaaacctgagggtctctgatgctcagcctttacttgctgacatactatacacttagctacaaagctggccacatctcttttcataccttcccaccaatattgtctctttaaatcttggtacatctttgtacttccaggatgtacaacaaatttggatctatgggcctcaat

SEQ ID NO: 222864 - DNA, 1411 bp, Cannabis indica
cataaaacccaacagttatttctctgggtgcagtgggatttcgggtttgggttttttggggctgacaaaagtagtcgttgatttttagttcaataaggttttttgattgtttttttacgattttttgaaagcttatttgctgcaatatttacttcctgttgatgattggaccttgtttaagtctctaatagttcataagtattccttttagaatcaaattttttttctatatttcttcggcagtcgagacgctcattccatagttgtctctgttagtcttcaaagggagttttcttttcctatatttttattattattagtttctatttctctgtgactgaatttctagatatgatgttctgacaaaaccgttatcggaaaaattaaaggagtttcattatccgatgacgagggtggtggcagaataaccggagacgtgatgtgggttgttttggtttaagacttattacttttatggtaattaatatatatatatatattatttattgcatttattattttcatatatatatttattacatttattatttattgcatttattattatatttatgtaattttatataattttgacttttgttattaatagtatcttttcttgattttttctttttatatgtttcgcggtaaaatttaattcttttcatttattgaatttgaaatttctaaaattcttttctttaatattttattttaaggaattttattattattattattattaatactgatttttttcttaatttgttatatttattttattttaatatctttagaaattgttttattttaatattttaaaatttatcaatttatttttcttgatttaagctattgtatatctaccctattgatagtttataaatttatattcagcagattattattacttaatccagtactaatttgatagttgagttgcgccattaataatggttttggtgcctttcaagacttttgcgcctattatatggccgacccctaattatttagggtaatttggttaaaatataagtatttcatgatttttaaattatattaaaattttgaagttaataaattatgcaatgttttgattttattaattgttataaaatggtagattttggctaaggaatgatttaaggaaatatttaaagtgaattggtgtattatttaagaggattaaaggtttatatggtaataattgtaattgacttatgttttatttaggatggattgggatctaccaatttacaaatatgaggaagatttcgaaaattttattaataaatttctaaggatataattaaaaaattaactaagtaaattgagtggcaataataattagaagggctttaatattagatatggtgtttgtgttctaatccatctatattaacagtaaata

SEQ ID NO: 222865 - DNA, 2372 bp, Cannabis indica
ttggggaggaagagtttcccctctcgttacaattcgtataaacagaaagatcgtgggatgaatgctgaatgcaaagatcgtgggattgaggctgaatacactgatagcgggatcgtgtgtatgccacatccacgtaatttcatccctgagttatagagattgtgctgatgactcacgatgcgaaagttgaatttgctaagtgtttgaccattttgtgcgggttattgaatactttgctcttggcatgccagtgaggcattctgctcggactgtgcttctcgagcagatgttccaagtagactccacgtgtcaccattcatgtgatgccacgttagagaacaaaaatgggataacagaaatgattaacaaactcaagtgaatcttagaaagaaaaagaagaaatcaataggtagcagagagtaacaagaatctctgataccatattaagaaagataatattagttataaagttgaaatagtagagtacattaataaaacaactaggaaaattaactactcagttgtcataacaaactctaactcacttattctaacaccttgatccacacatatatttttttttttaataattagaaattttgccacctgaattttcgacgatgttaatttttgtccctaaaatatacgacttattaagaattcgctcgaactattacattaacagaaactccttttgttaggttctgtccaattattccgtttaaatgatggtatatctttctcaatttgcaaattttccccctaaactttgacaactatcaaatcataccccctcaaaataaatatgagaaaaattcaatatttttttagtaaatcataaagatttaatttaaatcttatgaaaactcattttaaatgattaaaaaaatttaaaaataaatgaaaattttaaaactaattacgcgatataaaaaattatttatttttataagaaaattcatttagatattacaaaaatatattaaaaatttaatttgtaaaaactaaattttaaaccctaaaggaagaagcttgaatatattttgttttcatcaaaaaatgtagatttgtttaatttataaatttttttaaaaaaaaattatatttgtatttaatttataattattttttatatgttaaagtatgagtttataaatataaataagtttaattttttctttaaaaaatcttagttgatttaaattatttattagattctaaataattttggtttaattttttaagatacgttgataaataaaataaagttcgaaaatatttttttaagtaaaattaatatttttatccaattttttaataattttaattattttttttttgaattaatagaacattataatttctttaaaaaagatagaatactataatttttaaaattatattttttttaataaaagagggaaaaattttggattgatcaaagtttacgaggtaaaaatactaattttcaacggtaaaagaaacaaaacctaacagaaggggtataattatgtaattgttatattttaaggagaatttttaacaagccgtatattttagggggggaaatcagatagtgtcgaaagtttaagagacaaaaatactaattattctattttatttttaaacaattgcttgaataacttaagaagcctaacattatcaagtacgtgacattgataaattataatagtaagccttgaacttatgaaaattacatacattttatacattgaattagtttattgagatacaatttttattaaaatttaatataatatatataagtgtacttttaatgagtattttacatgaatgagtattattaggaaaattttagtttctatggttaactttttatcaaattcaaacaaaatatcttatctttagattatatgagtcatagttgtttcattagctgagaaaaattaaaaaaaaaaaagttaattgagccaaagaagagattaaaaaaaattgaaatttgaattgtacatttttgatataatgttgttgacagatagaactcgtcaaccaaattagtagtcgcacaatatgtaactattaaaagagtaaacaatgagaagaagtgaaatgaatgaatgatcaaagctctgttctctattgccttgtctctatgagttacaacagatgaacttccaaccctcccccccccccccacatctcaaatggcggtatttataggcactaattgccatgggtacaacatggtcgaaaggtattaacacatcactttagaactatgggttgcaggtccctggagtggccttgcaccccgtactctgaactggtgtcaggtgatccctgtttgcaagcccgtgcttctgggttgtagatgttgttggaaatatttt

SEQ ID NO: 222866 - DNA, 2214 bp, Cannabis indica
atgtgcattgactatcgggaactaatcaaattgactatcaagaataagtatcctttacgtaggattgacaacttattcaattagcttcaagggaggatggtcttctctaagattgatctctgattgggctatcatcagttgagaatctgagaggaggacattccaaagacttcttttcctactaggtatgagcactattaatttttggttacctcttttggactaacaaatgctttagcagcttttatggatctgatgaatagggtattcaaggatttcctcgatatttgtgttatagtttttatcgatgatatccttgtgtactcccaatcaaatgcggagcatgaacaacacctccagatggttttacagtgattacaagaacacaagctttatgttaaatttcaaaagtgtgaattttttctgtctaaagtgtcttttctcgaacacattatcagtaaagatgggattatggttgatacggggaagattgaatctgttagggattgatcaatgcaaagagagttacagaagtcaaaagctttcttggtttaactggttattatcgttggtttgttaagggattttttaagatctcaacgcccttaacagaactaaccaaaagaatcagcaatttttatatacacacaagtgtgaaacaagttttcaagaattgaaatagcttttgattacagctctggtgttagcactaccatcggataaagaaaagtttgtggtttactgtaatgcatccaaacagggtctgggatgtggtttgatgcaagttgatcgggtaatctcttatgcctcccattagttaaaggagtatgaacaacgatacctaacacacaatttagaaattgccacaggagatttttctttgaagatctggcggcattatctctatggagagaaatgtgagatttacaccaatcacaagagcctcaaatatttcaatactcagaaatatttgaatatgagacagaggcagtggatggagcttgtcaaggattgtaattgtgaaatcttttaccgtctcgggaaggccaatatggcggtagatgccctaagaaggttgggtcgtgggctagtatctagcatgattatgatttcacctcagctagcagatgacatggtcaaatcaggtattgagtttattgtgggaaaacttaataattttatgttacaatcagatttgttaaaaaaactcaaaaatgcatagctagctaatccttaattggtaaaaattcgagaagaagttttatcgggtcaagttaaagacttcatagtgttaggtaatgggatgttgttgtaaaaaaccaaagtttgtgttccaaacattgtgggacttaagaatgaaattctcatggaagctcacaccactccttattcattgcatcctagcactaccaaaatgtattaggatttaaaatccttttattggtagtgcgggatgaagaaggatgtggtaaaatttgagttaataatcgttaaaaaaacaactataaactgaaaaatatttaagtacaacataactgttagaagttgtgtcctgataagtggatcagttagttagatattcttgttcctagttttcagttgtatatccaactgtcataactgccttcttgacagttatgacagttggtaccctttagtacttaagtccttctataaatagccttagcttttgttgcttttaattcatagaaaagaatacttttctcagcttgtaatacttacagattattcaataaaatagtaattcgttcaactctgttttcttctggttgtgcttgatctgtgagatactttcgtgcatgttctattggagttcctgtgtgtgtgtatgtatgaatacagattaatacttgccgtttccaataggtggtatcagagcttggagatcaagaacctgaagatcaagattcttgaagatcgatccaagaagcaatgggaaacaccaagtttgacatcgagaaatttactgggaaaaatgattttgggatatggcatgttaagatgagggctctgcttgttcaacaaggtctgcaagttgcacttcttggagaaagaaatttaccagacgaattaactccaaaagaaaggataaacatccttgagaaggctcacagtactcttattttgagacttcgagacaaattcctaagagaagtgtcaaaggaagaatctgcagctggggtatggttgaaa

SEQ ID NO: 222867 - DNA, 1437 bp, Cannabis indica
aagatcgaatccatgatggcgcggttttggtggggaggaactgaatgtagcaggaagattcattggaaaaaatggtcctctctcagtcgatccaagttccatggggggcttggctttcgatcaatgaaggccttcaatcaagcgatgttggcaaagcaagattggcgtattcttcaggcaccctattctcttgttgccactttactcaaagcccgttatttcccgcgaaacacctttctcgaggctgcaaaagggccctgaccttcatttatttggaccagcatctcctggggaaaagaacttctagtttcagggcttaggaaatctataggcaatggtgcaaatacttaaatataccatgacgcttggatccctggttttaacaaagtcaattacctcaaacacctctcagatggttgctcaaatgtatctgatttaatcacccctgatcatcaacgggataccaatcgtattagagccattttccctgctgatattagtaaagccattgaaactatcccactactgccccccagtaccccgacacctattattggccttacacaacacatggaaactacatagtcaactcaggttaccatagagcccatgcactattatgtaagaatgatccctcctcttcggataccttggtacaacaaacttggtggaaaaagatgtggactcaagccataccaccgaaagttaaacacttcatttggagatcctatcatgacattcttcccactagccacaatatgcacacaaggaaaatcattccttctcctagttactgtcgttgtcatcaccacattgagaccctagagcatgctgttttcaggtgttcaactatccagaaggtatggaaattaactcaattctcctctttcattttaaaatatatggaactaacttgcagggaaatctacatgctgctgcttcctcattcacggatagagattatcaacttttcctttgtttggtttggaagagttggcattgcaggaatgagtttctccaccaccagaaaagaatcatccctgctcttatgatacaaactacctctgactacttggatttatacaaacaaaacaacacgaagttggctacatcggggtcccatccttcatccttagctgctgcttctcatgaaaatatgcccaccttcaatctaaaactgtcagtagatgcagcccagaacataaattccaatatgacaggttttggtatggctctattcaacaacaaaggcgatatgttgctgtcagttgctacaccatggacaggcactcatttggctcttctaatggaagctcatgctctcacctatgctctgtcgtggtgccaccagcggaacattcaaccagatctcattgtttcagattgcaaagtgcttgtggattacatctgtagtgaggcatcacaccacctgctgct

SEQ ID NO: 222868 - DNA, 3321 bp, Cannabis indica
atccttgtccgagtctgagtctgggtttgggtccagttcgagatcctggtctgggtttgggttcgggttcggtccgagttcaggtcttgggtgcgggtctaggtttgggtctgggtcagggttcggtctgaatctaggtctcaagtttcaatctcggtctaggtgtagtttgggtttcactccaagttcgtattcgaatccctatctaggtccgagtctgggtctgggatcgggtcccagatctaggtccttctccgggttcgggtccaggtctcggtcatggtctgggtatacgaacgtgtttgggcctgagttttggtttcgctttgggtctggggctaggtccgagtttggttctaggtttgggtccgggtcctagtctggcagttcttgttcagtttccagttttgggtcccgaatttgggtcaaggtctcagtttgggtactggtctgggttcggatcctggtttgagtcccagatttggatccctttcacgtgtctcagtctagtgttaacgtctcgtgtcccaggtttgagttgggttcgagaccgagactagggtgcggttttgggtcccggccccagttctgtgtctcgagtctggttccatttttgggtctgagttcgggtctaggtttgggtctcgagtctaggtctgggttgggatctgggtctgggtcccagttcgggtctaggtcagggtttgagtctgagtcctagtcaggttatggttctaggtctaggtcgaggtctggttacgcttccaggtccaggtccaagtcctggttcggtcctgttcctgggttccgatctacgtccggtttcggttccaatttcgggtcatagggtacgggttcggttcaaagtttgggttagggactaggttcggtcctggtctgggttcggttcagggtcctggtctaggttcaggtctggggctgggtctcaaatccaaacaccgactgcgggttcggtccaagcctcaggttcaaatttggatcctgatctcgggtcccgatctggttccattttgggtgtcaagtcacgagctggtacctaggttcatgtccgagtcttgtatctggtcttgggtcccggtcctagtttcgttgctgatgtccctatcctgattctaggtcaagctcccagttcttgtttgggtttgggtcctagtctaggtttcggcttgggtcctcgttgcggttcgagtttgggtctctgtctctgttttcatttgggtttgggttcaggtttgggtccttgtcgtggtcgttgtcctattcttagcccggttccagttccaattgcgatttcgagttcgagtttgggttcgatgttaggtcggggttggagtcttagtccgagtttgggttcgggtccgaatctcggtctaggttcggatcaagctctgggtgtgggttagggggcttggtctgggtccaggttcgggtccgagtcccaagtttttatcgcgatttgagtttgggtttagtttcgggtctaagtcctgattctgatcccgatctgtgttcgagtttgggtcttggtgcaggactaggtttgtgtcttattctgggtctgggtcttagtttgggtccgacattttggtctgggttcgggtttggtcttggtatgggttcgtgtctaggttcctgtcctggtctgggtcctttgcaggtttcgggtacggggttgggtccgacttcagatttcgggtctaggttaggtcctggttatggttcgagtcccggatttagatctgggtctgggttctagggcctaggtcccccatccaagttgggttcgtaggtcctagtctgggcctaggttcgggttcggttattgagtcttggttttagtccagatcccagtctgggttctagtccaggtctcggtcctagtcttggttcgagttcaggtgtgggtccttgtcagggtctggatcctggtctgggtcacgggtctaaggtctcagtgcgggtttaggaccatgtcaggtcaaggtcacggttcgggtgctagtctaggttcgtatcctaagtctcaagtcccagtcatagtcaaggtctcggccaaggttctggtatgagtttgggttatggtttgggttcggttttggtctcaagtatgggtcctagtcacagttccagttctaattccgggttttgttttagttatgggtacgggtctgggtccaggttgcggttggggtccgagtcttagtctgagtctgggtatgggtttttttaatcctaatctgggtccaggttcgggtcttgggtctggatcccaggatcgggtctgggtcataggtttggatctggatatgcggctaggacagggtccaggtcccgtgtttcgatcctggtctggatctgggtctgggtcggtattcgggtccaagtctaggttcgtgtccatgtcatggtctgaatcacaatttaggttaggggattggtttgggtctgggatcaagtctctagttcgggttcgggttcaagtttgagtcgcaatcctagtctgggttcgggaccgggtctaggtgttggtctgggtctttgtccgtgcccgagtttcggggctgggttctggtctagtttcagctccaggtgtaggtgtaggtcttggccacgaccccactcctattagggtcttggccacgctctagtgcaagtttcggtttcgtgtcctaggtctgggtctgggtccaggtcctagtccagcttcgggtccttctctgagtcctagatcaagacaccgactatgggtcttgtccaagccccaatttccagatcccgggacaagatcaggatcccaatcacgggtcccaatctagcttcggttcatgttcccggtcccggtctaggtctcggtctagttccgggactaagacttgggtgcagttccgggtctcaatcccaattctgggtccctagtcttgttccatgttcgggtctgagttcaagtctgggttcgtgtctcgagtcctagttcaggtctttattcaattttgggacccaattcgtgggtgggtctgtgttcgagtccgggtactagtctggttacaatttcgggttgggtccaggtcctggtcctgctcctggtcctgcttctaagtcccgatccgcttctggtttcgattctagtttcaagtcacggggtacgggttcgggtcgagtttcagtccgagttttggttcaggtcttgatttgggtttccaggttcgggtctgggtcaaggtcccagtcccattccaaaatcctagtgtggttccaattcaagttttggttttggtttgcgagtgtgggtcagggtctggg

SEQ ID NO: 222869 - DNA, 1404 bp, Cannabis indica
taggaaccggaattttggttggttcccaggaaagcactcagaactggaattctggttggggaatcggtctaccagttggggcagtttgggaaccgtagttcttcccatttttgtgatatttaggttatttccatgttatttatcgatagagaaacttttagtttcaagtttaagtccccgaaaagtgatttagcgtgtcacttacctttgttgtaatcgatgtgatttaggagcctataattcgccgagcagttgttccactcaggttggccggcacacctgaattcgaaaacaaggtaagattagtataacggtgtgcatatgtatatacatgtttagtgtgcattttagttagggctgttagattacattagatatgtatgttggcttttgtactatccgacagtatcacatcggtacgtctagagtatgactagcgtaccgagtataggctgatattatggtcgatagtaccgtactacttgaaaatatgacatcggtagggctagagtatgactagcgtaccgagtataggctgatattatgatcaatagtactgttgtacaatcgttcgagactcagtaccgtgtaggtcacggggataggtttctgaatgggggtaagggcgtctgatcataatccgggttattactatgttattgtttatgcttttcttactgagtctgtcgactcatagtgctatttccatgtgtaggtaagggcaaatctaaagctgaggagccgtgagagcgagcaggtgaagattgtacatgtcggggcggttaggcttggagcgtacaatctttgggacatcagggcttttgctgtatagttgcttaacgacaaaacttttgtatgtgaatagcaaacctttataaatatattttctaaacgggatcccgagattttataaatgtattactttatgtttttaattaaataagcaaatttttattattcacgatttttaataacttcgttgattagcaacgaactgcatagtacgttaaagatcacgctaacatgcctatattagttagggtgttatatttgctatgtaggctccactccatgtctaataattcttagtttcttaaacctgtcacacaccataatttgggtgtatcaggcatatgtaatgaacccatactttaaagaaactttgtaaatagacagaggtttaatgcattttcacgaattttaatgcagtattctctattttatatttgatctcactatcttaatatgtgaaatgaatcatttctctatttaagatttaaatgtctttgaaacatataaatctttacttttgtagaaatataattcatgtgagtaatcgttaataaataagatgaaaatatgattccatgtctacaaaattaattgacttgtatgatttctaat

SEQ ID NO: 222870 - DNA, 1919 bp, Cannabis indica
atttacacgaccttatccaagctacctgatttcgacttccccatccttggagcagaagcagcagaaatggccgatgcatttcatgctatgttgcctactcaaacccaaggatgtgagggaaacctttttcctgaggatcctgagattgcagatgcggagaaagtcactgatggtgctataagcaaggtcgcagatgatcccagtactccagcttcttaatttttctaagtttctttttgctattattgaactttaatttcttttgttagaggtacacgggtactcgcgcattgttcctcaaacaaattatatttcttttgttatcaaacactatatcctttcgaggatattttactttcgcacacttatttagcagtacacgggaactcgcattatataagatgtttttgcctttgttgtttctatttgcaatatttttgaccaatatcattaaaacttggtgtaataacttagaatataaaaacttgcaaaaaagataaaaaaacttctgaaaatttcaaatattgaatttcattataataatcaatagtataatattaggttataccccctatacttagtacatttattgaaataaattgactaagtataaatacatgcgactactattgatagtaatactttaagctttcgccattccaagctcttttgatcgttgcaccatcaaggttggataatcggtaagttgcattacctattttttagggattaagtacggtccttgccagttattgccaaaaactccatgtgctgagttatgcatgttaggcataaccttacacatcaccaaatctcctactcgcaggtttcattctttgatctttgagttgaaatagcgagctattcgttgttgataggttgcatttgtcaaatgagtctgatcgcgtttatcttccagaagatcgagttgtaacagttgattttttgtattattgttgatgttgaagacatctctcctcaaagatcctgatccaactttaactggtaccatggcttcgcacccataagaatgtgaaaagggggtttcaccaatcgttgagcgaggagttgtattatatgaccatagaacttgtggaagttcttctggccatgtaccctttctttcttcgagcttacctttgagggtatgcttaatgatcttgttaactgcttctgtttgtcaattactttgagggtatgcgactgctgaaaaagctttctgaatccccaagtcatcgcatagttggtgcatctccttacaatccaattgcttacaattattagaaattaatttgtaagggattccaaacctgtagatgatggcgctatagataaactctcgcaatttagaggctgttatggtcgctagaggtttagcttcagcctattttgtgaagtaatcgacgctaaatacaacatattttactcctccttttccttttggtagtttaccaattaagtctatgccccagactgcaaatggccagagactagtgacataagttaattagttcggtggcctatttacataggctgctatccgttgacacttgttgcatcttttggcaaagctagctgcatttgcccggaatgttggcgagtaatatccttacctcatgatttttagggcaagggaattaccaccagcatggttaccgcagattccaccgtgtacttcccgaagtatgtaattgcattcagtcccatcgatacacttaagtaatagctgactaaaacttgtacgatagtgcttgtcatcataaatgacataccgagcggctcgatatcggagttttttggcttcagttttattgccaggaagctctcctattttcaagtagtcaattatcggggtcatccaggtgacctttctgactgtatcaacctccatcatcacatctcgattgatagttggatga

SEQ ID NO: 222871 - DNA, 1901 bp, Cannabis indica
ttatttatttattattttatttacaatacacctttagtagtattgttgatgtttttttaatttttgtcaaacgatttgttaattgggttgctcaccttgtgattagagcttcttaattatatgttgattgtgttttttctgagtctaatcttccttttgattaggggtggcaaaacgtgtcatcgtgtcgtgttcgtgttatattttatgtgacccgctttatatttcgtgtcaagcgtgtcgacccgttttttgactcgtatctaattatctcaaccctaacccgactcgtaaaaaatcgtgtcgtgttcgtgtcgacccactgtgacccgttttgctattattaaagctaaaattgtagagaaaattaataaatttaagcttcattaaaatagtgtcttcaagtggggacgttacatatttgtgtgttattaagattgagtttgtacatgtatgtacttgactcttgctttcccaattctacaatgaacttggtgttcaaatcgaatgtgcaaactaaactgtcaagcacgaacttcagtttagagttagtacagtccgaaaaagaaatagattctttcaaatagcccatctaatccaacaactccaaagaaagattcacatcttctagcatcaaatggccttgatcatgcatgacaactttcctcaatttgaggattttctcactcaaatgcaatcgtacaaaacagagacatttataacaccacattggtttggaagccatcatctcctctgtaagaaagagagaacatttaccaattttctctgatttaaaatgaaactgtcgtatctcctcgcctagaagttctctcgattcacccgttccggtataagacgacgtgaggaaatgcaccgtttgtgcatctatagaagtcgaagttgagtaggtattagaataggaactcatattgtaagccctctagtgcggctgacctaaggtgtataagtaggcttgccaattggaatatttcttgctctcacaacgcaataagactttaaccgtcttcgattcaacatacagatgccaaatacgatatacaggaatgggtatggttggcaaagtgattctctgtccggtagcaggattaaaaagctggtacaactttcttctaccactgtccacttttatcaaaacaatcccatgtttaatgtcaagaataatggcaccaatgagaggagttaaggagaggttagataatatcctatcctgaaaactaattttctgattacgtttcaccttaatagggaagtacttatactcgcaatatgtgatgaaattgttaatgacttgcctccacagtttgctttctagactacaccttatcataattttcagcgatagccactgataatttcatctagggctttattaggaaagtcacgatcctcgagggaaaattcaaaccctttacttccatcgttaaataaaaaagtgaacctggactagaaatattactatttatatgtacatatcatagagagatcatattaatgtaaaaatgtccaacccacagattgatatacaatcaattgataaacaaaacaagcaccatatataaaattaattttacacgtatatatatacattacctggtgatgttgtgtgaaggaggaaggactgtgattccggcgacagagaagatctacaaaaaagaagtggagagagcgagagagagagtctggtagtggtagtagcccttctctagtgtgaaagaagagaaactgtattgaggcgatagtatttattttgaaaaaatggggtaacaacataacaattctcatttctctacaaaacgacaatatcagatgaaaacgccttagcacaactcttaattatttagttgtttaaccatcaacagaaatgaatatatatacatata

SEQ ID NO: 222872 - DNA, 2786 bp, Cannabis indica
accaaagaatgaacacccaaaaacgaagaaggcaaaaaaaaatatcgaattacaaccttaaatagatgcgagtgggcttagaaaaatagagtaaagaacgccgtcgaagacgtcgtcacacgcgcctccacgcgccgacacgtgggaaaacgcgcagaaccttcagacggcgcgtgagcctcacgcgcgaggaatccggcgactagactttggggtttggtagatcgacggctgggcaacactcttgagtgggcggtgagaataaattcgcactccaaataagattttcgaaaaagatccctaaactcaaaccctaatcttttttttaggaaccctaatttcgaatcacaaagctctgataccatgtagaaaatagtgaatcgaattgtgtgtatatttcatagaatagtacacatttatatacaaagctaggagactaaatgtgaaactaccaataacaaaataggaaactactaaatataagttaccctaattcttttacaactaatatacaagtaatattctaacaatgaggatggtgcctacgatccaaccagatacataccaatcgtggaattagaaaattgtcatcttaggcgtcgattggaggaagcaaaccggcgtaatgccgagttagagcgtgagatagccgcagtaagggcagcgcatgagaatggtacccaaaatcaacctgaccttgggagaagagattcacgaggcaaacctcgcggctcgcaaaccaaggggcaagagacaacccagagatatatttagaactctcaggagatgcaacctgaggaaattgaggaaaatctgggggtacaacctgggatacctggaacatcggacgaaaattgccaatcctctcttcaggttcaatagaaagaaattcgcacaaacccatatagggagaataaggtgaaccaaaccttaagaggaagagcaaggtcctaccgcagtcacaacaagagtaatctacgagagcatctgaacttgaagaagcctaaccttcatcaacgactcggtctaaagcaaacggattcactccattcgtgaatagaagagttggagaataagttcaaaaggtatcaagtcacgaaaactagaagacaaccggggcatgaaaccgttggagaacttgattcggaagcctcaggatcaaagaggaaagacgatcccaaaaggctgcccaaagagaaaaaacccaacaagtatatccccctttatgctgaatataccgagttcaatgaaactcggggaaatatgtacctcgcacatgtacatgaattcgtttttagcgagccaaaatctatgaaacatgcgaggcgtaaaagggatccaactaaacggtgtgaatatcatggagatattggtcataccacagaagaatgtcgtcagctgaatgatgagatagaaggtctcatatcacaaggacactttcaacgatatataaaggggcaggacgatgtccatgatcagctcgatctacctaataactcgagcgacccaggattataaccctcctctgtaagaggaaaggataccttagttatctcaaaagggagcaattcacaagaatacaaggggtggttactccggtaaaacaaatttgtaaaagaattgcaacttgaatagatattggctcactgtggttgccatatcaagctgtcacgtggaaagctggacgtcaaccagtagcagtcgaagacagaattaaaaccaggattactttacctggaaccccaggatatgtcagggattgaccctggatattgaaacaattgtggaagtatgttagggattgaccctaaacatcgaaacctgttttatcaaaaccaggtgctcctggaggattgataaaataagagattgaactggggaagttcttttgagattaatgattgtaaatcacattgctgatgaaatattttgaatttcagttgtgaacaaaataatcatttctttcaaacaagtaattacaaagcgtgaaccctttaaaattacttgaggggcatacatgtatgataaccggagttaatctggaaatacatagtacaatgcaaacccatcgtttcaaaatataaatttttttgaaaacctttgaaaaagggcctcgaccaaacctttttgacggaagaggggtcgaactgttataactccttcaccaaaccttttttacggaagaggggccgaatcgttataacgccttgatcaaacctttctgacgagaaagggatcaaacaactgtaatttttaatttataacctatttgaggagaaaggaaaatcaaaagttatgaccagcgcataaagctgaatactaacagcttgcgctaagggaaagtattaaacgagacatcaaagtgtcttgaaaaaatacttaaaccaaacacgtgggtagaaaatttaactactcatgtaaacaatgaaaatatatacaaaatgacaagttcattgaaaatatatttgaatttgcttaaaataagatcatttctaatgatcgcaaggtggaatcaatgatggctcgcagattgagggatgggcagataagctgctcgcgcgtaaagtaggaaatcaactacttaatgtcggaagaaaatacaagcgatggaaacccctaataaactttatgcatgtaatagtttatattgtgaacaaaacgcaagcaaacatctgcatattaaggtttaacttaaaagtacgaggcattaaaagcaaagttggccatccaaccatgcaaatatgtctttaaaaaaaaaaaaacgtgccaccaggggcaaactattg

SEQ ID NO: 222873 - DNA, 1128 bp, Cannabis indica
caattgtcttgatagaagctactcgagaagccatcaggaccaggggatttagttccagggatgctgaatgcagctttcttcacttcttcatatgtaaacttctgtgttaggacacttgcaacttctggagttagtataggtcctctagccaaaacacttgccttaactttccttctcttttctaacttggaacccagtaatcctttataaaattcaagaaaggcctctgtaatctgatccgggtcatgtactctgcttccatcttgtctttcaatagataggatacggttttgcctcaacctctgtttaatgcaagcatgaaaaagtgttgaattacagtccccttgctgaatccaatccgctttagctttctgttgtaaggacatgttgtctccctgcaccttggttagcttttctctgagtgctttttcttgtagatgaagcttaggatctagaggctgtttgtgtatttgactctgaagaagatccagatcctgcttaatccgaatgacagcactttgcaaatcagaaaaaccttctttgttaatctccttgagtctcactttaaatcgcttcaatttagtcactacttgaaacattttagatcccatttcatgttgcttccacacttctttcaagtaagtgtcatacttaggatgagatttccacatcctaaagtatttgaaaggcttctttccactcaccaatttacgatagagtgataaaatacccggagtatgatcaaaaagaccttcattgagaaagacggcttcagcaaattcatatttgttaatccatgcttgattggccaacatccgatctatcttcgaaaaaattatgtcatccccatgctgcttatttgtccacgtgaaaaaattcccacttgatttgacatcttccaactggcagtagttaacacattgaaggaattctgtatcaggataagtcttggacctaagtcctatcctttcttctttagccaaaatgtcattgaagtcccccattaacacccaatttccacctgttctcaagtcacataaacctttccataaagttttccttgtagctcggttattagaagcatagaccacggttacaaaactgccaaacccttcaacagttgtcatc

SEQ ID NO: 222874 - DNA, 2564 bp, Cannabis indica
ttaattagtgcctcgaaacccggttttttctcatcacgtttgacggttacacttgattacatttgatttcccaatatttacttttgggaggggaactgatgcatctaaaggcatttcacctctctgcctagggctgagttttcctcataactttacttttaccaatttcttcactaaacaaaacttagagcaaaaaaaaaagatttctaccaaaagcatccgaacagcttcatctgtactcagcttagacgtcaaacagtgagtaagtttccaatcttcttctcttttactttgcatgtttaatttatgggtttcatatgtgcattctcgacttgttgtagaagataaatagaaaatctaggcataaactttgtgatcttctctgtaatagtctgtatagcttctcggtttatgaagtttgcctttgatcgcacattgtttgtctttcaccttgctcattcgaagcttcgtgaactttaaccctaaatccaaaaatttcaaacttttgggttttgacttatttttgaacattttccattcttttaatcttttgagtacacctggtcggcatattttcctgtttactgttcgatataccgacctaacactcatcttatgtgttgtcttttgtagatgaaccatggtgagttttggggaagcgaacaccgaatcgaccaggacttgcttcaacttttgtacaaggatcaccctcgtcttcgtgccagtccatcctcttcaagtgacgggctttctaattcaagctttgaagattgggaggtgagtagtgaatgttctcctactccagaacccatagtgcaacaccatcattactccaagcagatcgctggagagggatacgaccgcttcatttgggaattgaagaaaggttggaggcgttatttgccatccaactagacatacattgtctgacgaggtgttgctgacactcttcctgttggctgtctaagttcggggaactttggcattccaattgttgttcctgttgttacggttgcccggcattcgcaccagtgtctgtctagtagtaggatggtggcttgaacaaagcaaatgatgcgaaaggtcaacacatctgatcctcatgtggcctagcttgccacattaccgagtgccgaacaagatctgtctgtccaggaggagggagatcgcgagggggacgttgaggtccaggagattgaggagcaggacgacgtctgtcctggcagcccttctgaggtcgaggaagaagaggaggttgaacctctaaaatttggagggtataacgaggtcggggagccggtgtctgtggaaggcgaagtcttggtttaaggagtagactacgtcaccgaggagctcactgaagcaggtcctcacaggaggcaaggtgccttaggtgccagatgggtgagtcctccgtccaagatcactgaggcacgtatgagagccttggacaaggatggctatctgagtgcacttgagtgttacgtcccttctccaaatcaccgagccactaacatgcgaaaagggatgtgtgcttggtcgggtgcccacactaaacaaggggcatgttgcctttgcacccgtacttcaagaaggtggcatattatttctgcctttttctgacccagttcactcccaagggcattaagtatctgtctaccctgttcatcctctacaccatccagaagtggggtgtgccttctccgcacgaggtcagttggttttttgacctgaagtctacccccaagcaaagtaggtcggggtacttctacatctctcagccagatttcaagtggttgacaggcactgtggataaggttgtgcgcaaactcgggggtttttttgacgagtattattttatggaaggcatgggaaccacttatactcagtttcagcagatctcgatatatttccatccaccccttacactggctcttagggacagagctcagaggattgtcaacctgtcggatgctgctcgaaatatcactttgttgaccttggaggccaactttctggagtacgggctttatccaacaaactttatacctccgcatatgaaggggaggaagaaaaagtccagtgctggctgggctgagggagttgagcaagagaaggagctcattcaactgaagcgtgaggctaagctgaagggaggtgcaggagccaagcagcatgctcaggagtattctgagcaggagaaggagcttattcaacttaagcgtgaggctaagttaaagggaggggccagagccgaacaatatgcttaagaatattttgagcaggaaaggccgctcaagaggaagaagaccctcccgactgggcaaagacccatcgaacatacaatccagatcagggagcctggtttacctgctcggccatccacccctgtagaaggaaaggggaaggccgtcctgtaggagcattagtacttgttcagggatatgcccctgccaaagtgtagggtactccttcttgtatttaactttcttgattatcatgccttcatatctcttatgctttttttttttgactatgttacttttattccgtgcagacatgtc

SEQ ID NO: 222875 - DNA, 1195 bp, Cannabis indica
gtctacctattagtaacctgttattacaggtcaaagaaaaatgtaaccatatggttacaataaaaatgtaaccattgaataatcacccatatataaataataaatgaatgtattaatttatatatttataatatagctataccacagccatatcttagttaagtaattaagaacatttaatttgaataagaaaggtaattagtgagctattgataaaaggaaaccaaaccctattgatgtgccctttcaacctattattatagtaagtatataactactcaataaatttcatctctatctcattatccacatattagggtttttgtagttatagatagtccattaaaaaaggtggggctaaaaaaaggaagaaaaaaaggtcaagtaaaattaatatagtttcttgaggaaaaaataataataaaaagtagggattttttaatttttatacttcgaaataattttttgtttttttacatttttactgagttctacgtacataaaaatttctattgcaactaccgctacaacctaaattgcaacgaaaaatcgtatagaaatccatattgcaattagcgctgcaacaccactttagaaacccaaaccgtaaatttgaaagaaaagaaaaagattaaaaaaatagtatataattttcctaaaaaaatattattagtactataatagcttaaatcaagagttcaaaaaaatcatatataatgctttcatactttcttggattttggattttaaaggacaaatgttattttagattttgtattttataaaaggtattaattgtactatctgttttattaaatgataaatttgactctgtattttttaataaaatataatatcttagttttttgtccaaataaaattttataataactcaatataaaggtattatgataaaactgattatattttctgtatttatttgtattatgaattaagttggttatattattgaaaattgagcttagagtcttatatatttgttctattctcgaaaatatagcatttattttatcatttaaaaatacagagagtctaatcggtaatttttgtaaaatacaagatctaaactagtattaaccctttaataaatgaaaaaattttgtgattgaaatatactgaagaaataatttgagaaatatatttcttaaaattttatttaaaaaacttttttttt

SEQ ID NO: 222876 - DNA, 2592 bp, Cannabis indica
aagccatttaatctcagctgctgtgtttgccaaagcacgaaattcagattcagtcgacgaccgagcgacaacctgctgctttttagcagaccaagagaggagattagagcctagaaaaacagcataacccccagtagatttcctgtcatctatgcagctggcccaatctgcatccgagtatgctacaagggacatccgaggaactggtttgagcagaacaccatcagaaattgttcctttcaagtacctgagaaggcgtttacatgcttcccagtgcacggtagtaggggcatgaataaactgggacaatttattaatgatgtatgctacatctggtcgtgtgagtgttaagtattggagagaacctagagtgctgcgatagagagtaacatcttcaaatggagacccttcatgaagagatagtttctgagctgaagaagttggacttgcacagcttttggctccctcaagatgaactctagtgagtaaatcggtaatatacttggtttgagacaagtataaaccatcactgtttctgtagacttcaacacctaagaagtaatgcagaggccccaaatcttttaaagaaaatgcagagttaagatcagtgataagtttttgaaccaatgttggattaggacccgtgacaaggatgtcatccacatagaccaacaaaacaataaatgtggaaccagtaccatgaatgaagagagaagtatcggcttttgaagcactaaatccccaagcaaaaagggttgacttcagtttctcgttccatgcccgaggagcctgtttaaggccatacaatgccttattaagtttgcatacatgaagaggtttagaaggatcctcaaaaccgggtggttgatgcatatatacagtctcttgaagagctccatttaggaaagcatttgccacatcgagctgtcgaatttcccattgataagagactgccaaagtgagaactaatctcacagtaactggtttcacaacagggctaaaggtatcttcgaaatcaattcctggtttttgaagatacccttttgctacaagccttgactttaatctgtccaaggtgccattagcattaagcttgactctatggacccatttgttgcctatgagatgcatatgaggctcatagggaacaagtgtccaagtcccttgagaagtgagagctctaaattcattgttcatggatgcaaaccaacctggatgtttgagagcagatttaagggtctttggctctgtaggtagcagtgactcaggcaatctgtgtttggtggccaaataagctttcggtttataaattcctctttgagatcgtgtaaccattgaatgtgtccttacaggacctgttgtggtagggacaggcacaacagataagggagcatcactgattgctggtgtaggattctcagtaggaaatgataccgatgctggtagagaaggtgaggaagaattctctgagtcatgaggtacagcagcaggtggagagttctcgatggactcagtggcatcatgattcgcaagggatgtggatggtgaggccgaatcaagaagaacagatgaattagttacaccagcagccatattagtagcaaaagtagcagtaggaaatgtagtaggttcagaaattacctgagatgaacattgatgttgaaatgcagggaagctatgttcattaaaaatgacattccttgctataaacattctcccagctttgttctcacagagataacctttgtgtttaggtgaataacctaggaaaatacattcctcagatctgtagtcaagtttatagtgattgtaaggtcttaagtggggaaaacatgcacagccaaacactttgagaatattgtaatcaggggcttgctgaaatagacactcataaggactgagattattaagaactggagtaggcattctgttgatagaataggctgcacactgaaaagcatgccaccaataagacatgtcaagaccagatttggctaagagagtgagacctgtttcagtgatatgtctatgtttcctttctactcttccattttgctcatgagtatgagggcatgagtgttgaaaccagatcccttgatctcttaagaatctttcaaaagctcgatattcacccccaccatcagcctgaacctttttaatgggcaaattaaattgtttttccactaagcttttgaagtgaatgaaaatctcaaaagattgagacttgacagacattggaaagacccaagagaacctgctgaagtcatcaacaaagacaatgtaatacttgtaattgtccttagatgcaaggtgagaaggcccccatacatcagtatggataagggcaagaggttgatttgctcgagtagtagacagagggaagggtaatctatggctttttccctgctgacaggcattgcaaaattgcaatcctttgagggaatgaggaacatttgcttgactcaagattttagtaaggacagagggtgagggatgacccagtttggagtgccacaaataggaatgtcaatctgggtcattttcgcgggccgggccgggcccccggcccgacgggccgactgtggcccgaat

SEQ ID NO: 222877 - DNA, 2450 bp, Cannabis indica
ttgcctcgcaatacattaaaaaatggtaggcacttatcagtggacttcgaaatgaatttgttaagtgtagcaattcttcctcttaaggcctgaaattcctttggcttggttggtgatggcatatctatcgaagccttgatctttttaaggtttgcttcaatgacccttgcattgactatgaatcccagaaattttcctaaggaaactccaaagaaacactttttcgagttaagcttcatttgtactttttttaatatctcaaagcactctgcgaggtctgttgtatgatctccactctttaccgacttcaccaacatatcatcgatgtagacttccatgtttcttccaatttgtctcgttaacatttcattcacaagttgctaatatgtttcccattatttttcaaaccaaacagcatgactttataacaataaagtcccatgttggttacgaagattgtatgctcttggtcagggacatatatttttatctagttatatctagagtatgcatccatgaacgacataagctcgtgtccagcagctgcatccactagttggtcaatccttggcagtggaaagtaatcctttagacacaccttattcaaatctgaaaagttaatacaagttctccaggttccatttggttttgggacgataataggattggatatccacgagggataaaatgcctcgcatataaagtcgttaaccaacaacttatccacttcttgcttgagtgccccttgtctctcggaatcaaagggtcgcctcttctatctcttggcttggtaattcgagttgacatttaagtggtggcagataatcttagggctgatccctatcatatatcagtggctccaaatgaagtgatcctggtttgccctcaaaaagcttattagttgctatttcaatttttcatccaagttcttctcaatgaacacacagtttgtgggatttcctgggtctagaacaacttcttccagttcctcaattggtttcaataaattcctttcatcttgaatccgaggatcaagatcctcatccttcttctcacctttctcattgaagactacgattagctggtaaccgacctttgtgttctacagttctatgctggagcattcgcgagccatcatttggtcacttcacactactcccacacctatcggtgtttgaaactttagggataagtgcttaattgaactaactgccccagtccaattaatgttggttgacccagcagtatgttgtaggctgatggcaggttgacaactaaaaagtcttgcattatagtggtggataaaggtgcttcgcccaatgttaatcggagctcgattattccttgactggcaacactatcgcccgtaaatccacacagatttaccagcaaggttttaatttggctttttaaagtcccattttcctcagtgtttccttatataggatgttcagtgaactcccgttgtccaccagcactcttttaattctttttttttgcaagttggatggtaattacaagtgggttgacgtgtggatatctcacgtgtttttcatcttcctctgagtagagaatcgaaggttcttcagtcttagctttcttagaaggttatggagcaaaagcagactgctcattcttcacttcctttacatatctcttttgggcattgttgctttcccctgcaatatgtggccctctcgagataaccaggatatcttctccttcaagaggaggaggtggtaatccttggtaacatgggttattaggcgaatttggctagttttgtccattaccttgtcttttcacatattgctagaaatgacctcgcgcgatgagactgtctatcttgtctttcaggtgacaacactcgtctgttgtatgccctatatccttgtgatacttacaaattttggttgcatctctattgtgtctcgcatgcctcatgggctcaagtttatggaatgcgaccctgtgctcatgtgcgagatagatgttttcccgagtttcattaagctcaagcgtaaacggtgtatattggcacgtacttgtcgtgcttcttttgatttttcttgtccttggctgactccttggagttatctttcctctttgaactagaggctcctggattgtcagccttggtcgagaaggtgcttgttgagatagtactgggtttacctcccaagccagtctttaacaacttcatctattttcttgcttcttctttttaagcaaacacttgagctctttcattgaactcaatgatatttttcactgggcgaccctgcaggtcatcccatagctcgcctccagcagtggagatcagtcgtgatccctgcctgaagagaagtaagctgggtactatcgtccagatttctcaccctcacagcagctgtgctaaaacgacttaagtaggggttaagcatctcacccgactgctgctttatgttagt

SEQ ID NO: 222878 - DNA, 2367 bp, Cannabis indica
cattggtggggttactgctcctattatttccaaacttggcagagatggtgatggttccatggatatttagaagaggaaagctccatctacattggtgggctcgagtaaaaaaaattgtaggaaataaggtcaaggtggccttgggggtcactatacctatccggagtgccctcgttgcaagaagcatcatccgagagagtttaatcgtaaaacatgtttccaatttggtctagtagggcattttaagaaagactacacacaattaaagacgaaagaaccaagataagaggcaaaacccactctagctcgggcgtttgccattacccaagccgatactgaagttggtccttcagtggtgtcaagtcagtttctagccaattactctattaactttgtattatttgattctggagcttcacattcatatgtggcagccagggtaattaatagattaggtaggccttgagacagttaggaaatagggtttgaagccatgttacctagcaaagaattagttatctccaaaatgtggatcagttgtatgcggattagagttacgaatagggagttgagtgttgatcttgtagaattgggtatagcagagtttgagatattactcctaatggactttctgtatgagcacatcgttagtattaattataagaggaaaacggtaacttttcaatcggagggaaaataaccattcgtggctgtggaatcggtttagagttctcaatttctagttatctcaatgtgaaaggctagaaactttttatgagaaaaatgtatatgattccttgtagtggtgttagataccacctagcccgagacagttcgttcagaggccattaaagtggtactagaattcttgcatgtgttccagaagaacttctaagattaccaccccagcaagaggatagacctttttattgatttggcacctggagcagagccgacttttagggcacccaataaaatagctccagtagaacttaagaaattaaagttataactttaagggatgtttgatctagggtttacccaaccttatgtattttcttgggaagctccggtgttgttcgttaagaagaaagatgggttgttttgtatgtgcatttattatcgagaactaaacaaattgacaatcaagaataagtaccctcatcctaggatcaatgattggttcgattaacttcaagaaaagatagtcttctcatagacttatcttcgctcaggctatcatcagttgagaatccaagagaaggacattttggagaccactatctacattaggtacgattattatgaattcttagttaggtctttcgaactgatcaattctttggtagccttcatggatatggtgaatagagtgttcaaggatttctttgatgtatgtgttaaaatgtttgctgatgatatccttgtgtactctcaatcggatgcggagcataaataatagttacggatgattttacaacgattataagaatataggttctatgccaaattcaaggagtatgaattctagttaattctaaatatttctcttaagtcatattgttagtaaagatggaattttggttgatttggagaaaagttgaatccttcaaggattggccgaggccatacatagttattgatattagaagttttctagtttagttgagtagtattatcactttgtggaagggttttccaagacctctatgcctttaacatagttaattaagaagaattagcgatttatatagacagacaaatgcgagatcagtttccaacagttgagacaatggttgtttacaacttcagtgttggttttgtgataagattaagacaagttcgtggtttacggtgatacatccaacaggatttgaggtgcattaggaagcaagttgttagggtcattgtgtatgcttctcgtcaattgaaggagcatgagcagcgttacccaactcatgacctagaacttgctacagtggtctttgctttgaagagttgataacattatctatacaaataaaagtaaaaatttatattgaccccaagagtctcaaatatttctttacgtagaaaggattgattatgggacaaaggcatggttgggattagttaaagaatatcactgtaaaattttctatcaccccgagaaggccaatatagtggttgataccctaaataggaaagatcctgggaaaattttctatacaactataatttttcctcagttagtggcgaatatggtcaagttaagttgtaatgaccgcactttagaatatggattagtaaaagcaattagcattgattattagtattttttatagttatttatgaatttgcttaattatgggtcccattattagaaat

SEQ ID NO: 222879 - DNA, 2020 bp, Cannabis indica
gcattagtcaatccgaatgacattaccagattctcgtagtgccaatatttggttcaaaatacagtctttggtatgtcttcttcctgaattctgagctgatgataaccggatcgaaggtcaatctttgaaaataccgtctttccttggagctgatcgaataagttgtcaattcgaggcaaccgatacttgttctaaattgtcaatttgttcagttcctgataatcaatacacattctaagggaaccatctttcttttttacaaacagaaccgcagctccccagggcgacactgggtcgggtaaaccctatatcaagcatgccctgaagctgtaacttaagctccttgagttctgctggagccatcctatacggagcttttgaaacaggttcatctgcaggtaccgaaaatctatttctcgttgtggcgttaatcccagcaactcctcgggaaatacgtcgagaaaatctttaacaaccctgactacctcaggcccaaatgtttgggtctgctggagtcaatcacaactgctaaaaatcctacacatccattgtgtagatccctagctcttaatacttaaacactcggaatctgagaccccagaaccgatccaacatagacaaatggatcttcaccctccggctgaaaagtcaccattttctgcttacaatctatactggctgaatacttggagagaaaatccatcccaattataatatcaaactccgttaattctagttcaataaggtcagcactcaactccctatcttcgattctaactggcatagacctaatgcgcctattggaaataaccaagtccctgctaggcattagggttccaaaccctctttccagaaaatcataaggcctacccaaaagatcaattacctgtgtagccacatatgagtgtgtagctcccgaatctaataaaacaatataaaaggagttgttgacaggaagctgacctatcaccatagaaggactggctgttgtatcagcttgagtgatggcaaacacctgagcaagtacgggttttgtctctaacttctgctcttctttctttgcctgagagtaatatttcatgaaatgtcccacaatgctacactgaaagcttatcttccggttgcactctctgggatgatgtttcttacaacgtgggcactcagggtaagagtaaccctggcgtccacctctgccttggttccctcagaaccgcttgctgtgccccgtgccaccagatgctggggtaacttttctcttcttgtcagtggtggaatcaccaccatccctaccataagcaggagtaggaagagtggggttccaccaacactcagagtcatacggggctcctcgagaaacttaaccacatcctcagctcgttcaaccttctcaaccatctccgcatatgtcgttgcctcattagtagtgatcaccatatcatgtctaattttcacattcaaaccagccaaatatttttctttcttactgaaatttgttggcacaatacccgaggcaagcttggccaaacagtcaaactttgtggtatattcaataactgacataccctcagtttgcaccaactcagtgaattcatttcgcttaacactgcggactacttcattgtaatacttggcgttgaacagatcttgaaactcttcctaggtcattacagtgaagtctcgggtgagggacaccaactcccaccacacgagagtgtctacctggaattgaaaagttgtccaggtcactcgatcattaccgactacccccatgaaattcaaaattcgctccattacagtgagccattgctcaaccttcatcacatcaggacctcccaagaacactggaggtgcttgcttatgaaacctctcgtataatagctccatacagttgccagcaacaagttgttttgctggcaccaatggaattacaatggcctgagcttgtagtggaggcactgcaggaagaccctgctgccttaatctcagaatttcttcttcttgttggcggattcgatcttgc

SEQ ID NO: 222880 - DNA, 1441 bp, Cannabis indica
acagatatgatattaagaatttttaccttacaggtttggaaacacttagcaaagatcaattttggttagttttggtatggcagatttggaacttaagaaataataagctttttaattgcaagtctaacaattcacagtagcccaacttcttacttctcattcaattcacagtaaagacttcaccaaaacaagtttttcaacccctacagtggcccaaggatcttcctcgcgccggcaacctggcttcaagctgaaagtggatgcaacttttaattccaaactcttagaatttggttttggtgcttcaattgtcaatggtcgtaaccagagaatagcaggcctgtcaaggtgcacatggagagcctcaacgccaatttttgctgaagcccaggccctctttacagctcttgagtggtgttcaacaatccctatcccccttagtagcattgaatcggatcgtttgcaattagtttctaaaattcgaagttcctaaaaggataactctgcactttccagtctcgttcatcagattcgggagtccctatctattttcccaaatgctaccctgcagcatattcgtcgtagtcaaaatcaagatgcacatctcaacgcaagaaaagcattaaggttagatttggatttggtttggagagtttaatttctccttctgtagctcttgtgtattactacttcaaaaataaaatatacatacaaatatatatacataaattgatttttaggtaataaatatcaaaatggcaaagtgtattaatatattatatatatatgttatcaattataaaagtaataatataattcataattaaactttaaatgttgttatttattttaaatagccttataattttagtataataaaatgtgtacaaaaatttgtaattattttaaatataatgtgtacaaatttaaattttattgaattttaggcaaaagtttataattttacggctacatgaaaaattttacaaaaatattatctttttataaaacatttcgtaaaataacaaaatagaataattgaaaataatagtgtaacaactaaaaacaaccgtagaacaacagtaaaaaacttaactcagtacacagtataagaaatacaatatttttgaaaagaaattctgccccacagtaaaagaaaaataagaaatttgagtatgtggtataaaaactccttaaaactatttttttgaggcccaaagcaagcctacaattcaaaataaacaatattatattgtatatccattttacttacatgttttaatttttacctttattttcatatttgtttaagatatacttatttttatagatgatgatcccattgtaagccttaagttaataaaaattatagacttaagtagaaagtaagggtatatttaataacgtactcacaaaactgggtatattttaatgaaatata

SEQ ID NO: 222881 - DNA, 2263 bp, Cannabis indica
aaaaatatcaagggaatgatgtttacacaacttgctatgccaacgcaaatatgagttgtactggtaaaaatatgatttctaacgtaaatcttttttatcagtacaatttgcaagatgcgttgagaaaaatgacttttgccagtacaattatgaattgcgctaataaaaataatattttttgtagtaaaataaaaaatgctaagaggcatttatggtgcttaatatgttgtgatatataatatattgttattggtgtaaacataatgataaacaaactgaggctcttgcctatgctcatcttttcttcttaatgtatagaaaaaattaaaataaatattaattatatagaataaaataagtgtctgtactaaataaacatatatagttacatttatatattgtattattttaaagttttattctgtccccacaaatcttacatgagtaaaaattaatattaggtttcacttatttcacattaataaaaattataaaaaaaaggaaaaatatcaatcacattattaagtcaataacttttctcaatgtagtttggtttgtaaacactcaggtctacgaagctcgctacttgaccccaactaattgccaatcaaaatttggtcgctagtttggagaaactcattgagaacgctattaaagattcattgacgttaaacttgattaataacagtggaagtctcccataggtagaacaccacttttgaaaaacaaatacattgaaagtggcctattggaataaatacaaaaacctatctatatctaattgattgagaagaaaacaatagtccaagagaatcttgatgttgtggatgtaaaataatgagtagactaaagaccccattaatgaacacacaaaagattgaaataagtgtgaatggatctcatgcactgacttgactaataacagttgtccattaaaaaacaaaatgaatgttccactgaactttcctatatagctatagcttacattactatatctatatatatactaagcgagttggccagagttaatatagccacttacttatatctctacttaataatattgaagttttgagtaatatatatattatcaaagttatagaaattgagatgatgatgaagatttcatcggtagtgttggtggtgatggtggcattattggtggttacagcgccaatggtgaaagcagtgactacaaatcagtgcaaaaatgagaggactcagttggtgaacgagtgcaggccagtgatatttgggcaagacccctccaacaactgctgccaacgtgtgagggtcatccacgtggagtgcatctgcccctatctcactccaaagtttgctaatctcattaatcttgcacgaacagccaaacaaatccgaagttgtggaagaaacattcctcacaacttcaaatgtggcagtcagtatatatacacttattaatattattatatctatttattctactctttattcgcttgtctttatttatatatttaattgatatattaatggtgtttatataatttttcctgctgcaggtgccacttttccatgatgtgatcagagaaaatgccccagatcgaacctcttaagctttgctttcaaatttatgtctgataccaatcatgttattgggtcttgtacgtctgtactctgttgtaataagaattggacaatttcgctctcttaatagtatatttataaattcaagtaaaatatgcataatattttacttcatttatctttttcactggtcttttatattattaaattattaatattatagggcatggtatatatatgtatgttgcaaggcgggaaacacctggttgagaataaaagaaaacaccacaagtgtttgagaaatttccagaacaaaaattttaccagtaattttttctaataagttctacatataagaacttcaatccccaatatatatatgtaactaaaacgaaatgcttatatatattatatttatatagtgtctgagagaggtcttccaatattgcctaaattatggagaaagccttatagcccaatcaaaacaccagttcaaatcctttcacgcctaggattttcaagtgggaacactcttaaatctaacaaattagagagaaagattaatgatatatctaaagacagtgagagagagcctattactatagtacatatgatgactagctaaaataccaaatgtgcatacatacttgaccatgtcatctttctccatgttatcattttattattcaaagatctt

SEQ ID NO: 222882 - DNA, 3107 bp, Cannabis indica
aaataaaaaaaaattgcagaaattagaaattgtactttatatgatggtcatccgacctgagtactttgtaatttcatccaaacctttgggtgtggtctgcccagaaggccattcacttaagagtaaatgttctttttgtttagtacttgaggtggttatctgacctggtacttctattggtagtattttcttaaatgttccccattccaataccgtggtacaagaagaagttgcattttttcatcatatttaccgaatttttatgctcctgattcgagaacttgaatcacctaatatggtccttccctgttaggtccgagtacaccttccgtactatctttggtgtttagaaatactcttcttaggaccatatctcccacaaagaatttccgagccttcacttgtttgttgaaataccgagctattttttattgatgggccatcaactttaagtttgctgtggtttgtttctcttcgatttcatcaagtgattcgacaaggagtacgtgattttcttcttggttgtacgtcaatcttctgtgggatggtggctcgagctctacgggaagcatagcttcatatccatatgccatggcaaatggagtctgtccggttgctgttttctcagttgttcgatacgaccatagaacttcaggaagttcctccggccagtttcctttagcatcctcaagtcttttctttagtgtatccttcagggtcttgttgactgcttcaacttgaccatttgcttggggatgcgccactgcggagaaacttttgatgataccatggttcgcacaaaaatcagtgaaggactggctgtcaaactgtttgccattgtccgaaactattttgtacggcaacccgaaacggcagattatgctcttcacaacaaagtcttgaacttttttagatgtaatggttgccagtggttcagcttccgtccacttagtgaagtaattgaccgcaaccactacatattggcactcccgctttgcccttgggtaattgtccgatcacgtcaattccccaaatggcaaaaggccacggactttgcatctgaattaactcgttaggcaaaaatcgaggtatcttcaaaaatctttggcaattgtcacatttttcaacataggcctttgaatcttcaatcattgttggccagaaataacctttccttagaattttcttagataaactctgctaggtggcatgatttccacagaatccatcgtgaacttaacataaagtcgtgaagcttcttcttgagtaacacatctgagcaacgacatggagcactctggtctgtacagaattccttccactgtgatgtaccgtgcagccttcattctcctcttttgagcttcatttcgattatccgggagttcccccacgttggggtaggctgctattagcgtcacctagtttggggaagtatcaatcatttcgatctcttttgtgccagtaatgctaggctcttcgaggaactggatcggaaccaagtttgctttatcacttacattactgcttgccaatggagctaacgtgtctgcagttgtgttttcttccctcggaatttgtctgagactgtagcttttgaattgtgcgatcaggtcatgtattttgctcaggtatgctatcatcttttctccttgagccttgtattctccagatatgtgatttactaccaattatgaatccctacagatttcgatgtgtttgactttcatttcttagcctagttttaggccagcgatcaaggcttcatattcggcttcgttattggatgccttgaatccaaacttggctgcagcacggaggtatttccccttagatgtaacaagggtgattcctgcaccggatagttgatttgtagccgatctgtccacttgtagtttccaagtcaacttgtcttcactgtcacttgaacggagtatttgcattggctcggggttgccttctgatatgctttcttcttttcctatgcattctaccacaaagtctactagggcttggcctttgattattgttcggggtttgaaagtgatttcgtactgaccaagctccactgcccaactgagtaaccatccagaggcgtccggcttttgcaatatttgccataatggttggttagtgtacacccgaacaggatgagcttgaaaatagggccttaactttcttgttgctagaatcaggcaataagcgagtttctctattaatgggtaccggccttcggcctcaatgtgtcttttactaatgtaatagaccagttgttgtatgttgttttcttctctgattagcacaacactcaaagcatgctctatgacagctaagtatatcccaagctcttctccgtccagaggtttcgagagtacgggaggctttgcgagttgcgtttttagattttgaaaagctttttcacattcctctttccactcaaattgcttatttcctcacaggatatttaaaaatggaacacacttgtctcttaattttgtagcaaatttcttgagtgtggcaatccgaccactcaaactttatacttctttagttcttgtcggtgatttcatatctaggagggcttgaatcttctctggattggcttcaattctttaggcattgactataaagcccagaaactttcccgagctgactccaaaggagcactttaagggatttagtttcatgttgtatttcatgaggactttgaagaattggtccaggtcatatatgtgcccccatcatttctggatttgaggagcatgtcatccaaatataattccatgtttcgcccgatctggtctttaaacattttgtttacaatctttggtatgtggctccagcatttttgagaccaaatggcaggactttgtagcaatatagacccatatctattcaaaaactcgcatgttcttggtctggtggatgcattttgatttgattgtacccaaaataagcgtccattaagcttaatattttgtgcccaactgttgcgtccacaagctgatcctttgaagtggaaaacagtctttggggcttgctttgttgaggtctttgaaatcaatacacactcgccattttttgttgggcttgggtaccagtacgggatt

SEQ ID NO: 222883 - DNA, 2049 bp, Cannabis indica
atggggataggggtgggcaatattcaattcaatccaattgaactaaacagatccattaaatccaactacaaaaaattagatatccaattacaattgtatttgattggatgctaaaagtgatacgagccacaccaacagttgtgatgaaacccgataccaattattgtagcgtctaagaattttcaaaatttggatgtcgaatcgcaacccaatacttagttaagcatgaaccttaatatgaaggaagatacttcaggttgaacaccacaaggaataccccttgatgagtttgaatagttctttcaagaactcaagaagaaaacgtctcaaaattttattcataattaatttaattttctaacgtgtttataaggctttatatagccaacttacaaccaagaaaaaaaggaaactaaagcaaagataattttccaaatacaacaaagacaaaataaagaaaacaaaattaaaaaggaaagttgtcaatagccttgaaaagcgcaatcaaccacaaaagagtcctaaattgagtctacttggatgagaagcacaaatttttgctttccttcagtgttgaccacgatcttctcttgttttagaattctttggactaggatgttaagttcctatatgaatcttttggctcgcgccctggccaccggaccaactcgaacttgacttgtatctttagccttagtgtcttcatcattcccccctcttgagaaggatttgtcctcaaataatcaccttcatcaaaagggctcaaaccggcaacattaaaagtagcactaacattatattctccaggtaaatcgagtcagtaggcattgtcattgatcctttcaagtacttgaaatagaccatcacctcgaggaagtaatttggaatgtctttgggctgggaatcgttctttcctcatgtgtaaccatacccaatcactgggctcaaaaacctgcttgtgacgacccttgttagcttgctttatgtattgctcagtccatctctctatgttgagtcttgaccactcatggatttgcttcacaaattctgctttctttttgccatctagatttaaatgctcagaaacaggtaaaggtgatatatccaaatgagtcaaaggattaaaccatacccaatttcaaatggtgaaaatttagtagaagaatgcatagaatgattataagcaaactcaacatgtggtaaacaatcttcccaagtcttaatatttttacttatgatagccctcaataaagtggataaagttatattaactatttctgtttgaccatcagtttgagaatgacaagtagtagaaaaaatagttttgtcctaagttttccccacaatgtcttccaaaagtaacttaagaacttagcatccctatctgatacaattgttctaggcatagcatgtaatctcacaatctccctgaaaaataaatctgcaacattagaatcatgatcaattttatgacaaaggtaaaatgagccatcttagaaaatctatctaccaccacaaagattgaattcctcctccatttactcctaggtaaacctaacacaaaatccattgaaatatcaacccatggagaacgaggaataggtaggagtgtgtaaagaccatttggctgaactcttgattcagcttgcttacaagtgacacatctaccacaaattcgctaaaaatctcttttcatgtggggccaaaagatgtgttcttgtaatataactaaggtcttagcaactccaaaatgtcccataagccctcctccataggattctcgaactaaaaactccagatctctagcccttgattcctttctgtagcagagcataatcaagatctgaatatggatctctttctcttcttctttgatgctgattttccatagtcttacatactatgattgaggtaccactggatgtgtgtgggaactactgtatcactcaaggtatttcgaaattagaagagaagaaaagagagagaaggggcggcttggcttttctctaaaggaaacaatgttaaaagttatgagtttcttgaagccaa

SEQ ID NO: 222884 - DNA, 2874 bp, Cannabis indica
gtgtgggttagggtcctgggtctagatcaaggttcgggtctgagtcccaggtttcgatctcgatctgagtctgggtttagtttcgggtgtaaatcctgggttttgagcccagtcttagttcgaggttgggtccgggtgcaggtctaggtttaggtttgattctgggtctgggtgtgagtttgagtcccgggcttgggtccaattttgggttcgggtctaggttcgggttttgacctattatgggttcgtgtctgggttcttatcctggtttaggtccagggtcgtgttcgggtcccgagtcttggttttagtccagttcctagtctaggttcgggtctaggtctcggtcccagtctttgtctgggttcaagtttgggtccttatcagggtctggaccctggtctcggtcgctggtctcaagtctcggtgagggtttagaattaggtcaggtctaggtcccggtcttggttcgggtcccaagtctcatgtcctaatcctagtcaagatcttagtccaggtcctggtcttagtgggttatgctttgagttcggttttcgtctcaagtctgggtcctagtcacagttccaattccaattggggttccgggttttgttctcggtccaggttggggtcggggtccgactcttagtccgagtcttggtacgggtgttttggaacctgatttgggtccaggtctgagtctgggtccaggtcccatgtttcgattctgttttgggtctaggtcggtattggggtctgggtctgggttcgtgtccatgtccaggtccgaatcctagtttaggttaggggcttggtctgagtttaggatcgagttccgagttcgggtcggggttcaagttcgagtctcagtcctagtttgggtccaggaccgagttcgggactgggttcgagcccgagttccggggttgggttttggtcgagttctgggtcccggtccaggtccaggtcctgttctagggtcttggtcacgttttggttcaagttacggttttgagtcccaggtctaggtctgggtctgggtccaggccctggtccagcttcaggtccttgtccgagtcccaaatcaagacatctactatgggtctttaccaagccctggtttttcgattttgggacaagatctggatcccaaccacgggtccgagtctggtttcgattcatgtcctaggtcccggtttgggtttgggtctagatctaggaccaagactagggtccagttctgggtcacgatcccaattctaggtcccgagtcatgttcaatgtttgggtctgagttcaggtctgggtttgggtcccaagtcctggtttgggtttggattcaggttttggacccaatcctagcgtgggtttgtgtccgagttcgggtcctggtccggttacagttttgggtctgggtccaggtcttagtcctggtgcttttcttgggtccccatccgattctagttttggttccagttttaagtcacgaggtacgggttggggttgagttttggttcgagtcttggtttgggtcctgatttgggtctggggcgtggttgaggttcgggtttcggtctcggttaggatccgaacgtgggtcctcgggtctaggtccaggtctcggtcccattccaatatcccagtccagttccagttcaagattttgttttgattcccgagtgtgggtctgggtcttggtatgtgtccgggtcctggtttgagttcgattttgggttcgggttctggtctaagtcctagatctagacaccgactactagtcaggtctaagcatcgagttccgaatcccaggtctcgaggttggtcctaggtccaggtttgggtctggggtcgggtctcagatccctatccaagttctgaggcccaagttctggtcctagtttgggggaccaattcccaggtctgggtcgcccatctatgttcggttcctaggtcccagtccgggtccaagttcgttttcgggtttgggtatgggtccagtccgagtccaaatcttggtttgggttcgggtccgagtttgggtcctagtttggtccgggtttcgagtcctaggtttgagtcaagttcttgggtcctggtttcggccctggtttttgggtcttggttttggtctgtatctaggtcccggtcttggtttaggtcccaggtcacaggtcgcggtttgggtctaagtcccgctatgggttctggtctgagtttgggtttagattttggccctgttacggtccaatatctgggttctagtcccagtcctagtctgattccagtatcgggtctgggatcaggtcagacttgaacctgtgacccgatcccagacccaaactctgacctagacatggatttggatacgaacctagacttgaacccaaacccagacccatacccactgggatcgaaaattgggagttggattcggaccgagaccaagaccatacctggacccatacccaagacttggactcggacctggacccaaacccagatccagactgagatctggacttggaccaagacccaaccctagactcgaactaggactcaaagcccgacctagacggagacccagacccaaacccggacctgggaactgggactaggacctgaacccaaatatggacccggactaggacctaagacccggacctagatgggggaccttgacccgggcctcagaacacagaccaggatcggaacccgagactcagacctgaacctgaatcaagactcaaacccaggactcgaacctagatctagacccagaccaggatcggaaactcgaacccgaactcggactaggacttgaaccccaaccagatcctagactcagactgggacctaggaaccggactaggatgg

SEQ ID NO: 222885 - DNA, 2294 bp, Cannabis indica
tagttgaaacactataaaaggaacatcatgctctcatctcattcaactattgccttcaacctaccaaacctagttttctctgttagacagctagtagatgagagacacattctatagtgatttttaagcctccttcattgttattcatacttgagccttagtgatagagtgtcatgcccacacatagcaagtcaagtactcaatcatagtaagtaagacggtggtaaccaaacccaaaggagagaaagagatccaggctcagatcttgataatactttgcaacagaaaggaacaaggattagagatctgagcggaaggagtcattatattccgctacaaccaatgtaaggttttctaaactctaatgtgtttaatttcattattttagagatattcatatttaggatgttaattcaacatacttgatagtaaatctagctcctgataaaatattcccaacattaagatcatataatgtgaataaaataagttggttgtgtgttaaagtataaaatctttaatatggtattactaagtacggtttttaaagcagtatagtccaatgcgtgtgattttgattcaaaacacataagtggatagacatttagtaaaaatactttgtataatttgattatatatgactagaccggtgaactaacatcttttatcaacacgtggtttatcataaaataattattcatatcacaatgatgatcattagtacttcaatttaaatcctgagtatttatgaactcctatttgtgttcattaggttttttgattcactcgttaaagtttctcagaaaagacgattcttacaacttttagaacctaatatcataagtggttgggaacatgttatacaataatagaatccaagcattccaaaaggatcgaatattagttcttttatagtattaattctaggagtgttaatagttggatccaaatctgtaattggattatagattaattgttcacaattgaattaatggtacataaggaatttaagagataattaaaagggtaaaatagtaattttaaccaactctaattatgaactaataactggattgtgaagtacttatattgattatatcaataggctactaaaaagaattctataaataaaattctatattgtcaaatagtgcatttcatatttatagtagagtaataatggaataaataaatctgattattttattagagagttcaataagaatcatatatttattggagattgaaatataggtccatggtttctaaatcacatctatacaacactgtagatggcactactacaaaaaggtttattcccgtcagttttcaaatcattttctttgaacgtcgctaataaaattaagtgattgtttaaaatcgtcaagaatactccattattcaaactgttttaaacagtcgttatagaatccccaattgtacaaaacagtcacaattttacaatttacaatttttaccattttaaaaaatatagagtatattttgtcatttgaaaaaataaagtgtctaattgataatttttgtaaaacacaatgttcaaaatagtatttaactaataatttcactaaaaaaaaagtaaacaagccacccgcccaccaacctagtgagaggaattctaacaaagctcaaagattataagcgcccaatatggctgcaccacaaggttatgtatttcaaacatatatataaattgattaatttagatataaataatgaactttttttttttgaagaaaaataatgaacaattttaatgtcaacaaacattagtaagtttcaatgcttaaattttatttagttattagaccatcatcgagtttagcaacatatatagtttaggtttcaactcctaggatttaaaaagaatgttgattaatgtttcttttcacttgtatttatataaatagagagtaataatactaagttttgtttaattaatttttttttagttaaaagaaactattttgtttattattatttttttttatggaaaaaaaatgttattattttattagtttggtatacgttgcacattttcctgattcatgactctaacaaagtgtcagcccactaaattttctgttgtaggcctaagaccaaaatatcaagaaaagcccaagtgtgtatgcacatatccaaaagcccaagccaagtttgtttatatatttatgggatttatttacgggttcttataaaaatactgaattttagacaaaagtttacaattttactccacacagtttttttttacaaaattattgtctttttataaa

SEQ ID NO: 222886 - DNA, 1872 bp, Cannabis indica
ttactaacatgcacattaaacatataaatacttatgcatataattatactaatcttacctcgttaccgaattcaggtgtatcggccaacctgaatggaacagctgctcgacgaattacaggcccctaaatcacattattcgtaaaactgatgagtgacatgctaaatcactttctttaaacttgaaactaaatgtttcccgatcgataaataacatggcaataccctaaatatcccaaaagcggaaaaaactagggttcccaaaactgctccaaccggtagactggttccccaaccgaaattttggttgtgtggggtatcctgaggaccaaccggaattccagttcctacaggtcccactgaactaggtgatcggttcagtgcaagaaagcttcaaaaattaatagctcactcaaatcaacccaaatctaaccaaaccttccaaacttgttacttagaccataaagaacatatccaaggtaataaaacaacctaacatggtcaaaattacaaaacaccattaaggagtcaagcttgagttcttaaactcaaagcttgctcaaacctaatagcatccaccaaaaccagctcaaaacaacatgataaaccataatctaactccagaaaacaacaacaaacatcaacaacaactacaacaccttaaaactcaaatcatgcaaaaatctcttacttaaaatttaagaaaactaaaaaggatgatgctaggaacttaccttgagttgagatcactaataacttgctgtaaaacaccttgaagtgctgaagaaaaccaaaccctagttgggttctaagagcgttcaaaagagagagagagagcgcttggagacaaaaggtgttttgttttaatttcttaatttttgtaaaataaatgaaataaaaatggttttgatcaaactaatatcagcctaataaaacataaaaatcagattaataaacttaactaaaatcccactaaaggataaaaccaacttagggcaaaaagatcataatgcccttgcccacactaaaaatcataaaaatcacttagaggtatttttgccaattctaaaatcttgactattctcgacattctcaatttctaactatattgccccgctatactaaaaatactaaaatgtgattctaatagccaaacgtcgcgttccaatgcttgtcgggcacaaaatatacaaaaatataaaatttcatatatgatatataaaatgaattcttaattcaaataaatctccgtaaactgaaaattcataactaatatacaagtttcataattaaatcctatttatctgttaatttctaaattaaagttaagcggtctttacattcaaccttaactcgaaaattaggctaaaaatagtctaacaaattcttgcaaactagttccttactcgcccttgagtaagactaaaacaaaaagcaaacaagaaaactaacagataaatgaacctccaaataatcaaactaccgatgccacttatgaaacttcaattaatagattaaacaagaatttaaatctaaaaactctaacaattaacttggatgctttatatcaaccacaatatataaatttaaattccattccaatattcgaaaaatatcacaatcattctactcttaccaactttctacaatccaatgttgaatatgcttggatgacctgcctctctctactaatgtcaacagccctcgcatggaatcaaatgtaacgtccccgcttcaagcctcaattaataattttttttgaaagcaaaaagttaaacaaatgtagaacaaatttggtgtcttcctcacaattttgactattttatgttttttttagagaatatttataaatggaacacttttcaatgggtat

SEQ ID NO: 222887 - DNA, 2371 bp, Cannabis indica
tgccttctccgggagctacgtcctggaagccaccttacagcataaagacttagcaaatattttggattgtacattacttgatccacgtgtccttgtttggttggtccacgtatattgggaaaaattaggggcaacagtaggtaatttgctttcaattaatctatacaattcaaactcaatcaatacatacaaagtctatctagttaatttcctaataaccactgcttatcatcatcattgagcttgttaggcagccccaaaatcctgagtttactctcttgttggacccgttggatgatgactcttgtatgccacagtttttgatgccaaaatacatcatttctggctttccagatatggtataccagcccagcaagaacagtcttcaagacacttcttctggcagtaggtattgttttgttcttgctgaaactctttgctagcagctgcatatttgttgtagtcgatctccattgcagccaaatctttagcccttgtaaacagtttcggctatactcacattcaaagaataaatggttgcttgtttcctcttcttgtccacaaagcaaacatgtcgaatcgatggctgtgttgtatttgcctatcctttctttggtgttcaatcttccccaacacacaagccaaagaataaacttgtgtttgggaatgatgaatctatcccaaacaatcttggaccaagaagtcttatccctgctttcaaaaagaattttataagtatgttgaattgtatgcctcttctgtacaaaaccaacaacatccaccttttgcttcaacctgttcttcactcctacaatttttttccatgaccagcagcaatccataggtggatcatagtcccaccaactaccatgtttcaaatatacattatgaatccacttaacaaagaggcaatatttcttacttgctatgtctcaaacataccttcccatagctgcaatattccattctttgatgtttcgaaatccaagccctcctgtagatttggtttaacagatattgtcccaagcaaccaagccaggacttgaagtctcttgtgtgcctttccataagaaggatctacatacagcttcaatgtctttcaacaacttctttggtaagatagagatttgagcccaataattgtgaatggccaacaggacagaattaatcaatgttgttctccccatataagacaagttcctagaactccacatccgaatccttcctgtcattttttcaagaagctcctgacattctcctctagaaagccttttagagcaaatagggattcccaaatatctaaaaggcagtgtgcttctagagaagtttgatgcttctaagatctgattcacctccaattctggcatccctgaacaatacactgaggtcttctgaacattaggctccaacccagaagtggaagagaaaagcttcaaaccttggagcatgagcataattgaaataaaatcaccattgcagaataccaataagtcatctgcaaaacaaagatgattcagtttgagggctgtacacctgtcatggaacttgaatcctggccattctccaatcttcttaaaattcgagacaagtactccatgccaaggacaaaaagaagaggggacatgggatctccttgtctgagccctctctttgcttcaaaaaatccacacatagagccattgaggagaagagaaaactttggtgtcctaatacaattcataattagttgaatgaactgaattaggaaaccaaaagcaactaacatctcctccaagaaatcccaatccactgtatcatatgccttccttaaatcgatcttgatcatacaactaggcttacaatttttccttccatagagtcttacaaggtcctggcataccaaaatattatgtgctatatacctcccatgaacaaagccaccttggttttctgcaataaggtcaggaagaattttcctaagtctattggagatcaccttagtagctatcttaaacaatacattacaacaggagataggtctaaaatcagctacacttttaggacaaaccgatttaggaatgagtgtaatggtagtggcatttatctccttaaggatttgcccagagttcaagaaagataatacagcctcctcagtgtctttaccaacaatttgccaacaatcttggtaaaaggcactaccaaagccatcgggtcctggagccttgttcccagggatcgaaaatgcagcatcttttacttcttcaatagtataaggagaagagagaatctcatgatgaacttaagtaagtttaggccccaagttaacaatagactggtgaacatgtctcctgttaggcaaggacttccctaacaatcccatataatagtctaa

SEQ ID NO: 222888 - DNA, 5335 bp, Cannabis indica
ttttaattgttaattataggatatgcatttggttattttttcatgaagtcatgcatgggtagtttttttttagttgttagtcttttttaacatcgacgatgattttgtggattggtgtctggcttccaaacagaatctatagtgttgtgtcatgatccgactacatgaatttattgtgattcatgtcttgaatgtaaggaatggaatggaatagattggattttgatttgcttctccttgtgaagttgcggatgtgttgctttactctgtgatctgttttgaaagaattctcggtcgacagtttgttatttttgttaatttgcaatttgttggctccatgtgatgacatttacattaagatcccattgtgattggacatcttttttgcttttcaagcttgtgttactataattatcttaggagacagactgtataaggtgaatcctaagcaagacttatttgtgtggtttttggattttggaaggtcttgctccaggtttcagtcctaaccagtttcttgcaatgtgtttctatttattatgtactagattcacatatttgatttttgattacatatgaagcatagtgtatttttttttttttgacaaaagaagcatagtgtatttgaaatatctttgaaattgagttttgttggttttgctgtgcctcaatttgataggttattgtgtcaagtttacacttaagcataaacttcaaaggcaatgtcttttttttattagctttggcatcaacttaacttgtcttccatttcctaaaatgcaaaacttagttggttattgaatctcgaatctggtctagaatataccattgttttcatgctaatgtttgtattgctactattcaggaagaatctaaagtgtagttaacatgtggtacttatttagcactagtttattatgctctattcacttattccataccctttttcaattgacagggtcacatagttaatgacgaacggacaaattcaacctattgtgcgtataactcagatgttgcaactggttatggagttggaggctttttgtttcttctttcaagtgaatctctgcttatgggagtgactaagtgcatgtgttttgggagacccttagcccctggtagtgatcgagcttggtccatcatatattttgtctcgtcttggtgagattctttatattgcattttacatgggtgtgtcttatctgtttttcattcatagtatgttgtgtctcttaattaggaactactacaattctgaaacatactttttgtcatagcattaagtagacatcacatttatttaaagataagacccaaaccgatcaaatagtagaaaaacaccaatagaacaacaaaccagaaccagcacaatagatttagtgaagtaatgcagaaaatgaaggagtgaactattattgataggaaatcagtagcaacagtaaccaccccaatacaatgagtccataccctatcagaccaatgatgcagagaacattctcaattctttcataccccaaccactcccttactcacctatatatgctaaccaattccccactcaataaccaccccaaaacaataactctataccctttttttttgctacactcgaccacactttattaaaccagggtctaacattttagcatttctactcatgtcatatgttttccagtttctgctggctcctagaaatcctggacataatattaaatgactatcaaattttagtctttgattggtgcgctaagattgaacagttgagactagtgttctgcaatgtaccatatgaaaacttaactaatttaggatatatatatagcattctttcttaaaaaattattataattattattttcttatttacatactaacttggaactaagatgagccgctacagcatagaagttacattgatgccaaccgatatggtgttctgttgttaatgctagttcctatcattgccaaaattcatttcaatctcagtagttccacttcataacaacacattatttcacaaacacataatttttcacacactccagcttagattaatctgaaaagatgttacgtatctccacagggcgacttttcttgtagcagaggcatgtctaattgcaggtgcaaagacgaacgcttatcacacaaagtaccgagggatgatttatgctcaaaacttctcttgtgaatctttacggaaaggcgtgtttgttgcaggtgcagtatttgtggtagcaacaatgattctaaacgtgtattactacatgtactttaccaaggcaactactaaccagacagctcataaaacaaatcgatcaagctcaactgttgggatgactgggtatgcttagaataaaactatttttatgtgtgttcggaatgcctttctgatgtttttgacttaaaactctggtatccattccgtttatgtagttatataatataggtgacgtttcgttgtatcggttttactttgtagttttttgggaaaggtggaccttttaatgttcaagtaaaatctttccatggaggatcaaagatttaggtggggttttgtcactgaaaaaaataatatatatatttataggagagagtgaggtaggtaaaggcatggtgatgagattggtatggggactttaggaggcagatggaatataattagttgaggttgttgctgtgtttttgtttttgccaacataggatctcaactgttattctaactgtttaggattgaaattggacaaaaattcaaccccatcttatgttgactcagttggaagctgttgcaccctacaatagatctttcttttgcaaatgtttcactgtatctgtcttactaatctcttgttgaaagtaaaagaagtcttttctaatttcttttccttctaatttacaacaaccccatttgagttggagaaacaacatttaggaagtttatagcataattaagtgattaggcaaaggaggcttaaaagtagggatattcataaaatcaatcgaataatttccacatgcggattgtgttgatgtaaaagtaactattccaaatccatatatataatataaaatattatgtatataattagtatttaatgtaaaaaataataacttaaaaattaaaaatttaacatatgatataaatatattttaaaattaaatagatcaaatttatattctatttttatacgaaaatataatttaaaacaattttttttttactttttcctttgaatttgttgtttttattgtaatttattgttggagatataaagtcacaataatttgttatatttaattgttagttaagtgaaaaaagaaatattttctaataaatattaaataattcaatattaaaaagaaataaatctaaattaatctattctgtatatttgtggattgaatttaatttgagctattatgtagattagattcaaaatatgatatttgcaattagtattattgtgtggaatgaattagatgaacactcctactaaaaaagacccaatgttttcattttgctccaataaatagtgattgaaaatataatgatggtttatgttaaaagtgtttgagcctaataattgacattctctttatgtgtctctgttctagtcatgaactctcaatgtaggggggcctggtaatgtgttcattatatagagggaaataagagattttttattgattctctttgggattgcttaagaagttgaatttatgattgggggtgtgattagtaacatatcaatgagttggttaatgaaattcaaataaaattaatgaaaagacatgtcatactgaaatgaagaaaacaaacaattttggaaccatgtctcctataacataaacattcagagctaacttgaaccaacccatctgcttctgtctctcatcactatatttattgtcttttttccatttcttactaaaatgcttttagatacaatcaaaaaaaaaaaatccagtcagtcaaagaaatataaaatatagagtgcttttatggtgagagtgaatctcaattttttttttaatatgatggtatttattgtaactatttaaaagtttaagaaattagaaacaatttatgatataaaaaaaatagactgtttcaactttgtttttagtaggtattaaattttaccaaaatttgtataatatcttatataatcagatgtcaaaatcatgataaagtatatcagttagtacacatattattctactaattttaaaaaaacaggtaatagtaaaaagaattatttcggttacaatttaaattgttctgttaataatgtatgttgctataaaaataaaaaagtgtaatatatagtaataataaaaagggtggtaagcaggcaccgtgaacaccgcaccatggcattggttgatagttgtttgtcatgtgaggtagggcaacaagtgtgataaaactttcaaaacaacatcatattaatctaaattgtatccccttttttcaactctctttaaattttttcatgcaaaatttactcttcatctcttatttataaatatatatattgtacgacactgagttttggtttcgaaattggtgcaccattccttcttctactacacaaacaagaatttattgagcttggtaaatagcctttgtttgactttaacaagaattttaaatcaaaatttcataaccacacaacatgtagtgtagattttttcactagttatgataattttaaggatcaagtgctacttatagaggtcttatatctcattctctcttaattttgtcgtatatatatacacttcgtgaagattattacaacaaactagccttttaaaagactaaatctaatctctcacaataaaagattgtagtaaaatttgaacctttaatcgaaataaaaaaggatgtcagtaaaaacttcactaccactgcaccatacaacacgtagtttaatcaaatttctctcctttgaataacaaaactaaatccctctaaaaaaatttgaacttttttactaaaatgaaacaatttatttatttattcataatttggcttgaatccattgattgaaactttggaattttcccaattaattttggatgcttttgaacaaaaagttacaatgttgctctattgatctgaaatcatcataattacatacacagcatgggaacaatgtaacataacattaaaaaaaaaccatgagaatgagtgtttttttagaggaaaagaaaaagtaagaaaaaaggccaagaagaaagaggcaaaggtaataaaagtgagccataattggcttaaaaaggggtttgaatcaaaaaagaaaaagagtgaagaaagagaaagaaagac

SEQ ID NO: 222889 - DNA, 2123 bp, Cannabis indica
aaattgttcatctagaaattgttctctgatattctcccctctagttccagaactggatttctccagggtgttattcgcacttgtggcttctacaatatggaagtagagtcctctttccatctgttctgtcaatgctctttcactagaggattatggttcaaaaaagggattcgtttagacagcttccattggaataaccttctggattttggtttgtggtggagtactatacaggaccctgagattcaattgttcactgcgtgcatctgtgaaatgatttggaaatggtgcaatactgctctttttacggataaacaatgctctgtggatggagtgttcttcgattgtcttcgcagaatggatgaattctcaaagaacaaggcctgatttgatctggaggagccccctgctgcttgtcctctgctgcatgtgaagagtgatgattactggtgtgtcaaagttgatgcctcggtggtggacattgaagtgggatttgctgcaatccatcaacagtagctcatccccgattcatggatctcaattgggttttctcatgttaaggatatccttgaaggggaactatgcggaatagcctgtgctctgcacctatagccttgtcaaagaggatcacaaaggtgcgtattgagatggattcgaagtcaactgcaatagcttttgagtcccacgaattccccttcagcgggcatacgtaccctctttttttcgttctgtttaactctttgtaagtccttctcgatattgtgtgtcttgcttgatcccctatactatgttcctgttatcataataattgagcttcattaatataagtaattaatatagtgatgataattagtaaatttttatatttaataaatatatatagtagtttttatataacctctttttcttcctttgataactttccatatgataaagaaagcaagtaagaggacaaatagagtggcaactgatgctatgataggaactatatattttttgttcttctttcgacatgaaagtgaggaacaaagatctggattatctgaaacactaaaataaaataacaaacacatgttataaaattaataaaaaaaatattaatttaaagaaatggacaaaaggaaagaaaaatacctcagtagcaatgagccacttttagatttttcaatgagctcacttggaactgaacctgtgaggttgtttcccctcaagtctctgaaaccatgcatggaaaaaatatgattctttgcatatatataataaacaaatttaagtaataatactggaagaaaaacttacaaaacttttaaaaagtgtagtctagaaaggaattcaggcacagacccacttaaactgttatttgataaatctctgaaatgatattacaccgataatcaaattaagttttaaaataaataaattacaatatattttaattagtgacaattataaatgtcactaatgatagttatcaatatgaatcattagtggtccattttataatatatatatagggacttacatagattgtatcatggtcagatttgatatataagaagctatttctccctccaatccacttgaggataagtctctaataattcacatgcatatgcatggaagtggaaccatagtttatgtaagttgcaactagagttaatttgagattaaaaacatacataatatatacaagtaattaattaaaaaaataggagaatcaagaagtaatgtgaatatttgctcccgtgtaattaaggtttttataaaccatcttacttgggttcctattaactttttattactttgcttggagttgcagccacaaattgacaaccaaagtgatttcggcataaaatctaatcaaattaagcttttaatattgaattttaatttgaaaaaaaaaacaaaatccaaatcaataaatattagttgttttttttaggaaaaattaaatttaagtgtagtatacttttattaaatttagaaccatatatatgtatggtaaaaaaagtcacttatcagatatgtagaaaatattttcttctaataacctttcgtattattttctcaatattttttttcctagtaaattaaaattcaaggtccaaagaaagagtaaatgt

SEQ ID NO: 222890 - DNA, 2276 bp, Cannabis indica
tttttttttttttgagaaatagtctgttattataaatcacaaagagttgtttacaacaacagagaagatggttgaaggaatctcccctaaccacatacaatcattatccagctgtaatgcttgtttggccaaactatgagcggcttggttagcgtctctcttaacatgagaaacacaaacattagagaaagaggataaatgaaaagttacatcagaaaccaaaccaaagaaactcgaattatgtgaaatacatccattcaaattattaacaagcattaggcaatcagtttccacatagtcaataggaatttgatattgcttagcccacgagagaccaacaaacattgcttttgcctccatttcctgtgacttaaaattacccactgctggtttagacattgctcccacaacttggccagccgaatttcgaacaatcacaccaattccaattttactcctcgaagaatccaaagctgcatccacatttaacttgtaattgttctctggaggaggctgccatttagcagttggaattggactggtgcgaagaccacctactggtgtggaagtagctggttttgcagcataattagcactctgaaattgctgtaaatatgcagctgattgtgtcaccatttggatagatgtcttaacctttttaccatggatgtagctgtttcggttagaccagataaaccacatcaggcagagtatacattccaggtcttgtttgctatagattgtggacaaatgcataagataatcaccatcgctcatgtgatctgcattcgagaaatcaataataaaaccagaaagtgtccaaacatctttagcatgacagcaagaaaatagagcatgccctatggattcccatgcccttgaacacagagaacaagttgcagaagttaagatttttttatgatagagagattttgcaactggtatggaagattggatgacttttcaaccaaaaatctttactttagatggcagatttaaaccccaaaaagacttccaccatgtctcctgcgtgtgtgaacaggaagatatattatcttcttctaatgaacttgcaaagttgtaaccagtgctaactgaataatctcctgaaacatcatagtgccaaatccatctatcattagttggaaggaaggacaatggaattgtaagaatatgttccacatcatgtggagaaaaatgagtgttcaataactccaagttccattccctattagatgtaatgtaatctgcaacaacatttgaatgatcaccagtgtagcaataaggcttaaaactcttgtgacctggtatccatgagtcatcaacacagctaatactactaccagtacccactttcaaccttaaacctttagcgagcaattccctaccccatacaataccctgccaagtgatagaactcagacccccacccgtagctgtcataaaatcagagcgagaaaaataacgacctttcaaaacacgctgagtaaactatcaggattttggaaaatccgccaagcttgctttgccaataaagcttggttgaagtgtacaaaagatctaaaccccataccaccactaccctttgatttacaaagaaacctccactttttccaatgaatttccttgttgtcagaagtagagccccaccaaaatctcgccatcatagcttcaatttccttgcaaaatttagcagataaacggaagcaactcattgcgtaagttggaatagattgcacaacagcttttaacaacacttccttgccacctatagaaaagatcttgtcattccatgcatgcataagtttccatatcttttctttgatgttactaaacaattgagatttgtcacgctcgctgtatgcaggtaagcctaaataagattcgtgacattcacatattggcatacccaagatctgttggaatgagttttgaacagactcaggtgtattaggtgagaaagacattacggatttgtctgcatttaattgttgcccagaagctcgatgataaatgtcaagtgctcttttaatagctccacaagatctatcgtttgcttgacaaaacaacaaactgtcatccgcaaataacagatgtgagatggttggagaatgacgagaaacagccagccctttcaatcgaccaatttgttcttcatatttaagtagtcttcagaacaaattaaaaataggtatggagagagtggatcaccttgtcgtagaccacgctgaggagtaactaaacccgtaacctcaccattgataatgaaagagaaa

SEQ ID NO: 222891 - DNA, 1115 bp, Cannabis indica
gtttagccaactagaagagttgaagccaagagtgtgtagttaacactctatcaataccgcatttaatccaattagatgtaccacaacctctttctcaagtaaactgatggccaactaattccatattaataagctgtgcttcctgaagagcttgattaaacccatcgatcaaccattggggatacggggctcctcctctcttatcttcttgggccactacattgtttatgtcccccataacacaccaaggcatgtttgaatccatagccatagtagtcaacaactcccaagtcttcatatgttgaatcctattgggctcaccataaatttccgtaagatgccaagtaccaaagttgtccactgaaatttcaacatcaatatggtttttagaaaaatcacagagctttgcttgatccttttctttctaaaataatgataaaccgccactatgtccatctggttcgacaacaaacattccttcaaaacccatttgtctcctaattatctccatcttatttttcttgcaaaaagtctcacacaaaaacacaaaagtaggcatattttgatgtaccacatcctttaggaactgaacatttcgagaaagcccaatacctcggcagttccaactcaacgaactcattgggaaaggcaggtttgacccgcagaactcgccaaatacaaatttttttgtcccacagtgttgctggccttttgaagctccaatcttacctcaatttgggcccgtgactcactttcattattcatcaaactaatgtcatgttccatgcaatcatgatgggccctctttttcaaccacatcatcttcaaggtctacaactgaacccattcccgcccaaattattcccctcatttgccacctcaacttcactcctttgaattaaatccagttcaacactatatacaatcttattattcaaatccattaaatttgaatttttcccttgagtcccgccacttaatctgtgatctttatggatagtcccctgaaaactcgtggcattaaccgccagagatttcctttgattcactgccatttcaaccactgtcgatcgaccaccattgaaacctgcttgaggttgaccactacattcccc

SEQ ID NO: 222892 - DNA, 1997 bp, Cannabis indica
tgtttaaacaacatacttgtgagtagatctaagatcctggtaaaataaattccaacaaaaccctacaaaggtagccaaacattaaagagctatatgaccatcactcttcagtgatgacctttgcacgataagctctacagaggtagccaaacatgaaagagctatatgaccatcactcttcagtgatgacccttgaacggtacgctatgcaagggtagccaaaacatgatttcaaaagcgaactttgatttgtaagcttttgttacacaaaacatgtatgttgcattgcacaacaacaactcatgtaagaccaattgtgtctaaaccactttcttgaaagataacttcttaaagttattgtttttccaattccacatgcgtacaaccgaaagccctccaaaaaaattcacaaacaaggtctatgaaacttagttgcaagtgaccaagagatcgtaagtctgctcgctcacttgggggaacccacaccatacaagcatcgaactagcacaaagaacttatgcagagaaatttaaagcttagtataggcaaaaaaattgaaagttaattcagtgcaggcatatttcgctagacataagaaaagcaaatctggatgtttacatgtctaagcataagaagatagccaagattaaagacttcctggtcagtcatatgtccatagtaaaaggctttaaggctaaacataagtagcattccaaaatagagggcctataggccaaagcaagaacatgaaaaccttaaggtcgaatataaataatgttcgaaagtaaagggccttaaggccatacaacaagaacaaaaaatcagttcaaatgcataaggtcgaggccacgcaagaatcgagcagccagagaagaactagataaagttctataggaaccacgtattgggatgaatctctaaggaagaattctttgtagcttccaagtcataaggcagagttccttgtagattccaagccatagggcatagttccttgcaggctccaagccatagggcagagttctgttgcagtatccaagccaaatagtagagttcctatgaagattttaagccatagacaagactctggtcaatcgtattcgtactgaatggtacttgctagagaatttcattgtacaaggctggtatcaacaaactaggatttcaagtgtaacaacttggacaagttttgggtcttaagttgattattcaactacaatagactcaccataaagtgtcatacacagtttttaagggaacgacatatgagacaaaggttgtgcaggttcgcaaggccatgacaagattcttgctgaggtaaaaagaggacaaaaaactggccacccacttagcaatgaagctctgggtcgaccagagtcccaaggcatcaaagagggtcggccagggtcccatgacccatgcaagaaccggccaatgtcacatgacccattcatgaaccggccaagttcctaagacaaaccctagaactggccaacccccatgacaaacaccatgggtcgaccaggtcttaaacaagaccccaagggctagcaaaggtgtgtaatggatcaaaatatgtgttttttcaagactcaaatatctcctttgtgttcttcgtgactcaaagagtcaagaatcacaacacaattcaaaatcgattctttatcatcaaaaattaaaacattatacattctaaagctatccagcaaattataatgtgaaaagaccatgtgagaatcaaaaagtttctaaaagcttaaaaatcttgaaacttatcaatgacagattcaaagaagagatgtcaaagaaaagaagatgaggcatatatggtgagagagaagatcaaagatctaaaagcatgtgattaaggctcaaatttttatattttaaaggtttaatagcgttcataaaattaatttaattaattattttcatggttttaattgtaaaattattatagttggaaagatttaatttattttaattttttgttattt

SEQ ID NO: 222893 - DNA, 1405 bp, Cannabis indica
ttacttgctcggcatcaggatgcgagcgaaattggagcactttcaatcaagttcatacaaaaaaaaaaatcgattgactacccaaagaatgcattctttggtatgtataatgttcaacaaaagattgaaagatagatatttgaggttggcatctccaccgtcaaatgaagatgatgctttgttgcttgatgatttgccatctgatgatgaatggatcattggtgataacgaaaatgaaaatgtgcaaaggctaagtgataaggagcttgagagattggaattgacccaattaaaccaaaatcatacaagtgctccagaatctagttcaagagcgggttcgtaaactcttattattggtttagcttatatcatatatattacttatttcaaatattgattagtttgtaatttttttcttaggaaagcgacagagactagtagtagacatggatgaggatatatggaaggatattgatggtggcaatgagggtggtggcgatgaggatggtgacgatgaatttgaggatttctaatcatcattgcatgttccatcaatgctttagttcgagtttgagtcaaatatgttctaggatagtagaatttagaattctaattctagaaacataattatctttattttagtttgagttttatgagacatatctttgggtatgtttgaattttatgagacattttatggttattatttttatgagatattttatggtatgtttgaaatttatgtgacagtttatttattcttaggtgctctacaagtattgattctattaattttttaggcttacgcctcatacgcctcgaggcttacgcctcgccttacaaaaaaaaaaaaacgcctcaaggctcatttgcgttttttaaacattgaggccacctgagtcagaagtgtgtctactgcacatattagtcatatgattagcttttggttgtggcaatcgaggaattagtataaagttgaaaatgaagataacaatttaacacattattcttgatatgaaaagtgggtttctccacaatgtggtcaatgtagtgtatgttctcccttgagttttagtgtcaaatgttatctggggttttttttctttgttgtgtttttaacttatcatttatggtaactacttatgatattagagggaaaaaaacaggcttttcaaaatttatgttagaaatatttttcttaaatttagctaaccaaacttccaagacagcaggctcttttactgtaaaaaaaagcttcctttgttttttagttccatgtgttagactatatatatagtgtatgtaatatagcatatacaaatgatatgaaatgcggaaaataaactgtaatcatatcaataatatatgcaataaaaggatcgatgtacctccagccattgatctt

SEQ ID NO: 222894 - DNA, 1800 bp, Cannabis indica
aaaataatttccaacacctggacccaggccgggatcgatacccggaccccgacctgaacccgaaccgagacttgtgccaggacctgcgacccagaactcggaacaaaatacccatgactcaggaactagaccagaaccagacccgtatcaaaacccggacctagaccctgacctagaacaagaccatgacccagacctagacccagacaaagactgagacctggacctcgaccaagacctagacccagactcggactaggacccgggctcgtactagaactcgaactcgaacccaggacttgtacccggactgagatcaggacgaagacccagacctggactaggactaacacctacaccttgattgggactagaacctggattgggaccgggacagggactaggacccaggacccggtacttggacctaagacctgagaacagaaccgtgacccagacctagaccaggccaagacccaagacaaggacaagtaccgaacactgaccgagatctgcactcaaactgggaccataacttcatatccatattccatatcaaacggagtctgttcggttgccattttctcagttgttcgattttaccattgaacttcaggaagttctttcggccaatttcctttggcatcttcgagtcttttctttagtgtatcctttagggtcttgttgactgctttaagttgaccatttgcttggggatgcgccactacggaaaagcttttgatgataccatggttcgcacaaaaattagtgaaggactggctgtcaaactgcttgccattatccgaaactattttgtacgacaatccgaactggcagattatgttcttcataataaagtcttgaactttcttggatgtaatggttgcaagtggttcggcttccgtccacttagtgaagtaatcaaccgctactactgtatactacactcctcctttgcctttgggtaattgtccgatcaggttaattccccaaatggcgaaaggccacggactttgcatctgagttaactcgttgggcagagctcgaggtgaaaatctctgacatttgtcacatttcttaacatgggtcgttgaatctttaatcattgtcagccagaaataaccttgccttataattttcttagataaactctgcccggcggcatgatttccacagaatccatcgtacacctcagaagaattcgtgtagcttcttcttgaggaacacatttgagcaacaacatagagaatcctcttctgtacataattccctgtactatgatataccgtgctgccttccttctcatctttcgagcttcatttcgattatttgggagttccccagtgttgaggtaggctgctatcggtgtcatccaatttggggaagtataaatcattttgatctcttccgggccagtgatgctaggctcttcgaggaactggataggaaccaagtttgccttatcacttacattactgcttgccaatcgagctaacgcgtctgcagttgtgttttcttcccttggaatttttctgagatagtagcttttgaactgtgcgagcaggtcctgtattttgctcagatatgctatcatcttttctcctcaagcctcgtattctccaaatacatgatttacaaccagctgtgaattactacagatttcaatgcgttcggctttcatctcccgggctaattttaggccagcgattaaagcttcatactaggcttcgttattagatgccttgaatcaaaatttgactgcagcgtgcaagggtttcccccccaggcgtgacaagggca

SEQ ID NO: 222895 - DNA, 1954 bp, Cannabis indica
gatctgggtctaggtttgactttaggtcccgagtcttggttttagtctaggtctcggtcggggttcggggctaggtctcagtcccaatcttggtccaagttcaggtttgggtccttgtcagggtcgatatcctggtctggttcacgggtgtcaagtcatggcgagggtttaggaccaggtcaggtctaggtcccggtccaggtccgagtcccatgtctcaagtcccagtcctattcaaggtcttggtccaaggtctcgtatgagtttgggttatggtttgggtttggttctggtctcaggttcgggtcctagtcacagttccagttcaaattctgggcccaagtttcatttcaggttcggtttggggtctgggtccatcttggggtcggggtctgactcttagtccaagtccgggtacgggttttttggatccttgtcttggtccaagtctgagtccgggtcctaggttcgggtctgggtctgcatttgggtctggatctgggtcttggtctaggtcccgtgtttcgatcacgatctaggtttgggtcggtattcgaggtcgtgtctgggtttagtccatgtcaaggtccgaaccccattttaggtcagggcttggtctgggtccaggatcgagtcccgagtttgagttcgggttcaggtttgagtctcaatcctagtgtgggtctgggaccgcgtctgggactgggtccgagcccgagttacggtgctgggttttggtctagttctgggtcctggtccaggtctaggttttggtcacggtcctagtcctattctagggtcttggtcacgttctggttcatgtttcggtttcaggtcccaggtctaggtctgggtcaaggtcctggtccatctttgggtgcttctctaaggcccagaccaatacaccgactatgggtgttgtccaagcacgtgttcccgaatcctgggacaagatctggatctcaatcacgggtcccaatctggtttaggttcatgtcccaggtcccggtctcggtctcggtctaggtccgggaccgagacatgggtgcagttctgggtctcaatcctaattctgggtcccgagacctgttccatgttcgggtctgagtttaggtcttggttcaggtcctgagtcccggttcgggtttggattgatgtttgggaacaaatcccaagctgagtccatgtctgagtctgggtccgggcccggttacagttttgggtctgggtctaggtcatggtcgtggtcctgttcctgggtccaaatcagcttctagttttagttccaatttcaagtcacggggtacgggttcgggtcgagtttgggtctgactttgggttcgggtcttgatttttgtctggggcgaggtttaggtccgagttttggtctcagttagggttcgaggtttggtctcgttccgagtttgggtacgagtccaggtcctggtcctgttttaagatcccagttcggctccagttcaagtttcagtttttgttcccaagtttgggtttgggtttgggtatgtgtttgggtcctgatttgagtttgagtttgggtttgggttctggtctaagtttcaaatccagacaccgactactggttcgatccaagcccccagtatagatctagatcttgatctaaggtcctggtttgattccattttgagtgccaggtgacgaggtaggtcctaggttcaagttcgagtctggggtcgggtactaggtcccagtcctagttctgctgcctaggtccctatcccgtttttgggttcaggtcccggttcttgtttagctttgggtcccaatctaggttcaagtttgagtcctattctttgttcgggtctaggtctcagtcttcgttttaatctaggttcgggttcgagttttaggtccttgtcctggtcctagtgcaagtccggttccagatctagttgtgattccgagttcgagtttg

SEQ ID NO: 222896 - DNA, 8964 bp, Cannabis indica
cgcttattaggtctcgagtccactcaagtgttacactttgtacattattcgctaagtgctttcacaatcgatatgcgtcgcttttgtcttcccaagtgaaacaaatttgatgtctcaatttatgcctcaaatggcatatggtttctcgttaatacacgaaacaatagtttgtatatctttaatttcctcgcataagaccttatagtcagtgaattgcaagtactctctgtcacttacgcaattaatgagttattgaaagtgattccatcgatgcatattccatttatcttgacacatgttccccactgaaatggtagccaaatttcagggataacagatcttatattaattagtaaatctgattatattgaatgagttttatttagggcacaaaacccaacacatagtccattccaccaacttgtttgtaatttacacttccacaaccaaggggtcggtttgtgggaagatgacgtggctgacatctactacagagaatgttatcgttggctcccctacacatggtattttaggtttccttgcttccacggacaagattacttcattttattcatactgcaaggcttgggcatacttttctcgagcattgcccgagtctccagtaagatgcaaacccctaataattaactgtaaatgctcgtccactggtgggggcattaattggttttggttattgtttgcttgggcggtcctttgattctggtcagccttgacatacttttgtaagtgcgggttattctttctgattaaaaattcaatttccttcttcaaattattacattcatttgtgttgtggccgtaatctgcatgaaagcgataaaacttggctgtatctcttttacttacaacctttttcattggagatggcttcttgtacgacaccatagactaagttgtttcatagattgtctctatgtcgtctgttaggactgagaaagtagtaaatttagaggaattttctctggggtgctacttggcattgctagtgaattttcctttctttcccattaccttgcatattgctattgttagacctcttcccatctgaattcgaattactgggatattgtggattttttatggacatccctgctgatatggcgaattgttgatttttcttttgtctgatagtatccacacactgaatagcttcttcgagcttaatgaatccatctactcgatctagaaattcagccattaatcccacagttagccttttaatatctttccataactctctgagaggctcaatgcccccagtattgcagctagtgttccttcttcagtcagccccttaacctttgtgccctcggtcataaacatgctaatataagctctgaggggttctcttggcatttactttactactaccacgtcttccaagtgtgagggaagttgacgggaggaggaaaattgtgcatggaactctgatgagaaggcattccatgagttaaacctttctggaggtagtttgaaataccattgttgggtggcctttgtgagtgtggcgggaacatcgtacgtcacctcttaccccctgcaggtccatctacatctcaaaatattttaagacaaaggatcttcttttcccgtatacattgtctagattggcattttaaactttgggggtaacttaagaacttcaatttcagtggagaaaggtgattcacatgcatggtcgtgttcgagatcagtatgttttgggctggtcaggccttctacagtatttcaagttgatctatttatgcttgcacaagtggatgaactttttttgtttgttgaccggcttgtgtcacattaggatctttttgaactggatcttaggtacagatacttggttgaatagtcagtgcaacataatatttgtccaggctccttctgtgatttagatcggtcatgaggtcatgtgcgatacccaacttattaaacacggaagtacagggtggccttagtgtctgacttgtttggccaataagtaatggtgaagttgttggaatgtgtgattcctcttaaaggacggactggtaggatctggccctctaccttttggcccacagtagtgacttgcggccttggaatggacgactagtttgtaacaccctcactaattacgcatgttaacgtgaatttaaacgtactgtgcagctcgttgctaattaacaaggttatggaaaatcgtgaataattaaaatttacttattgaattaaaaacttaatgtattacatatataaaatcccgggatcccgttacaaaatacatttacaaaagtttgctagtttaacataaaagttttgtcgcctaacgactgtcagcaaaagccttgatgtcctctaagatcgtacgctccaggcctaaccaccccgacatgtaaaatcttcaccagctcgctctcacagctcctcagctttagccatacccttacctacacatggaaacaacactatgagttgatagacatagtaagaaaagcataacatataacatactaatatcccgagttataacctggcgcccatacacccgatcataaccctaatgctcatgtcccacatggtactgagtctagaacgttcatacgacaatactatcgaccataatgtcagcctatactcaacatgctatttatactctagccatattgatgtgacagcatcgatcagtattttagccaacatacatttatcagtaatcagtacaactctatccatgcaattactgctacatgtaatctaacaggcataaaaacattttacagtaaacatgtaataacatatgcatgacattatactaatcttatctcaatttaatcttatctcaattccgaatttaggtgtgccggtcaacctgagtggaacaactgctcggtgaattataggctcctaaatcacatcgataacaacacaaagaagtgactcgctaaatcacaaccgggacataggttttaaaccaaaatcctatctatagcaacttaatatggcaataccctaaactagcaaggaattaaccaaccaaaaacctgaaactaacacaaatagacgagctgaattttcaagataccttgctgccaaattcgggtaactggttttacaagcattgtaaaaccggttagccgtttttaccaaaaaatcccaaaacaatccaaaccctaaccaaatcgattccaaacttaaccaaactctccagaccttcataatatatcccaataaagattttccaagtgatagaacaactacccatgctcagaattgaaaagcaccattaaagagccaagcttgagttctaaaactcaaagcttgctcaataaccaaactacctaccaaaacatgctcaaatcaacctatataaacataatttaactacagaaaacataactaaacaccagcaataagagcagcaaccaaaatctcaaaaacatgcataattcattttcttttaaatcaagaaactatagagggagttgcttaaaactttaccttggcttagatcctcttaaatcagctacaaatcacagcaaaatgcaactcaaaaatcagaaccctagttggttctatagggtttcgacaagagagaaagaggtaggaaacagaggaagcttttcttaattttgtattttttgtaaaaataatttaaatgaaatgattattttgttttattaataaaatatcagcataaacaataataaaaatctgatttaacataatctcattaaagacaaaagcttatggggcaaaatgaccattttacctctcccacacaatgggcataaaaggtacttaggggtattttgcaatattctaaaatcccgactattcctgacattcctaatgtctaactataatgtcccgctatactaaaaatactaggatgtgattctaatagctaaacaccgcgttccaatattgctgggcacaaaacatgcaaaaattatgaaatttctatatatgagataaaaatgcattctaaattgaaataaatcatcataaataattaattcaatactaataaataattttcataattaagccctaattatttgctaattccaaattaaagctaagcgatctttacaactatccccccttaaaaggatttcgtcctcgaaatctaacctgaataactttggatattgagctctcatgtctgattctagctccccgggtcgcttcctccacccctgcttctgagtacttaccaaagttatggtcttgttccgaatgaccttatcctttctgttaaggatctgaactgcatgttcttcatatgacaggtctggtcgcagttcaagattttcataactaagtacatgagcagggcgaaacgtactttctcaacataaaaacatggaatacattgcgaactgctgaaagagttggaggcaaagctaatcgatatgccacttgtcctaccttctcgagaatctcgaaaggttttataaatctagggcataacttgccttgaaatgcttgatccccttcattggagacactcgtaagaacacatgattccctacttgaaactttacattcctacatttcagatctgcataactcttttgcctgttatgagaggcaagcattctggttttaatcttttcaatagcttcattagtccgttgaacagattccggacctaagtctttcctctcccctgtcacatcccagtgaattggagatctacactttctgccatacaacaattcatagggagccatccctatcgtactttgataactgttattataagagaattccatcaacggtaggtacttattctaagagccttcaaaatccataacacaggctcgtagcatatcttccagtgtctaaattatcctttcggtctgttcatcgatctgagtatggaaagttgtactgaatttcaatttggtacccatagcccgttgtaaactctgccaaaattttgaagtaaacttcggatctgtatctaaaactatggactttggcacaccatgcagccttactatctctttaacataaaaatttgcatactaatccactgaaaaggttgtcttaacaggtagaaaatgagcagattttatgaatcaatctaccagaacccaaattgaatcaaacaaacatgtggttctaggtaatcaaaccacagagtccatcgtaatatcttccaacttccactcaagtaatgttaaaggctgcaataaccctgctggtctctgatgttcagccttgatttgctgacaggttagacatctcgatacgaactctatcacattcttcttcattccgctccaccagaagtaggttttcaaatcttgatacatcttggtggtgtcgggatgcagggaatatggagtggtatgagcctcttcaagaatgtcatttctaagttccacactacttggaacacaaaccatggtctagaacaatagcatcccactatcgaacactgtaaaatctttagcttcaccaacaaaaacctcttctctgatcttcactaactctagattagttaactgagcagatttaattcattccaacagatcagattgcagcgtcaagttatgaagtttgcctacaaaaaactcgatgcttgatctgaccatgtattctgctacctgaggtgaaatctgaaccatactagttacctgcccgggacccttcctacttagggcatcagccactacgttgcctttcccaggatggtaaaggatctcacaatcgtaatccttaaccaactctaaccaacgcctctatctcatattcaaatctttctgagtgaagaaatatttgagacttttatggtcagtataaatttcacatctctccccgtagggataatgccgccaaatctttaaagcaaacactacagcgacaagttctaggtcatgagtcggtaccgttgttcataatctttcaactaacaggaggcataggcaattacccgatcagcttggatcagtacacaccccagaccctgtctggatgcaccacaataaactacaaacttccctttatcagaaggtaaggctaacactgacgttgtgattagtctctgtttcagctcctgaaagcttgcttcgcacttatctgtccaaactaaatgttgattctttttagtgagctcgactaagggtgttgaattttagagaacccttctacaaaccgatgataataaccaacctgacccaagaagctttcaacttctatcactgttttcggtcttggccaatccctgacggattctatttttcttggatgcaccttgatcacatctttgctaacaatgtgcccaaggaaggacacctgagatagccaaaatttgtacttcttgaacttggcatataacttatgttctcgaagtcgttgtagaaccatccgaagatgttgctcatgttcctcttctgactgagagtacacaaggatgtcatcgataaatacaataacataaatattgaggtaatccttgattaccctattcatcagatccatgaaagctgcgggagcattagtcagtccaaaagacataacaagaaatgcataatgcccatacctagtgcgaaaagccatctttgggatgtcctcctctcggattctcaactgatgatagcccgattggagatcaatctttgaaaagaacgtcttcccctaaagttgatcaaaaagatcatcaattttaggtagatgatatttatttttgattgttaacttattcaattcccggtagtcaatccacattcgtaaggacccatctttcttcttaacaaacaataccggagctccccaaggtgacacactaggccgagaaaaccctatgtccagcaacccatggagttgaatttttagttctttaagttctagtgcagccattctataaggggccttagaaaccggttatgctccaggtgccaagtcaataacaaagtcaatttctcgctgaggtggtaaacccgaaagttcatcaagaaaaacatttagaaattcctgaaccaccttgatgtcttctggtcgaatagagtcaggccgagtggtatctaataccccgaccaaaacccctagacatccctctcgtaacgattccctggctgttagtactgaaattaccaggatccgagatcgttaaatcgtaccaacaaaaacaaacagttcttcgccttctcgttggaagattaccatcttcctcttacaatcaatactagctaaatacttggacaagaaatccattcccagaataatatcagaatccactaaattcatttctattaaatcatcactcaactctctattctctattctgattggcatagacctaatccaccttttaaagatgactaattctccgccaggaaatagggttccaaaccttgtttcatagctatcatgtggtctatccaatttactaaaaattctggtcgccacataggaatgagtggccccagagtcaaacaacacagagaaataagagttgttgactgagagctgaactgttaccattgaagggctggcttctacatcagcctgagttatcacgaacacccttgctggagtgggtttcgctgcagtctttggtgcttcagttctaagttggggacaatccatttttgtaatgcccttacataccacactgaaagaacccctgccctttacactcccctagatggtgctttttacaactgagacactctgggtgagtgtatcgggtttcggtgccactctggcgattgcctcgaccgtagttcccctagaacctcttattctgacctgagccaccggtagcagtagatgccttcctttttcttatcagtggccaagccactacctcccttgttaaagcctgatgcaggatgtgtaggagccccaccaacaaacagagtcccacgagactctaatgtgcactccactgcgccctcagcccgtagtgccttatccaccgtttcaacataggtggtactgtcgtcagtagtgatcattaggtcatgtctgatcttcgcattaaatccatctaggtacttctcttgcttactgaaatcggttggcataattctcgaggccaatctcgtcaaacgatcaaattgagttgtgtattcagtaacactcatgttctccttctgagtcagttgggtgaattcttttcttttagcatttctgactgcttcattgtaatacttagcattgaatagtttctggaacttttcccaggtcatagtccttacatcatgaatcatggacaccatgtcccaccaaaccagtgcgtcttcttgaaatttaaaagttgcacaggccaccctatcattattggtgacgcccataaaattcaagattctggtaatcactgttagccattgcttggctttcatagcatcgagaccgcccaggaaaactcgaggtgcctgcttacggaacctttcatataggggttccattcggttcactgtaaccacaggtttggcctgcacagtaggggcaggggccactggtatttctggagtaggcacagcagaatcaccctgctgtctcaaccgctgaatctcatcatcttgttcattaatcttggcttgcatcgctacaaacctattttcccaatttcgggcatcttgagcagcttgggcatcttgagcagcctgtggctggttaacatcaccccggctacatgccctacctctaggacctctaccatgaccatggatatttacgggaatctgagctccatgaccaccactagatccaaccgaattatcctggctcctggtgtttcgcctagtgtcgatactaattagaacaacctacgtaaccaagagctactccggtcagatcgtgatcaaataaaatcttactaatgccacttatttggaaattaaaaacatgtgcctattctactatcaggctactaacatgcttcctaataggcttttcttaaatcatactattaaaataaactactaaagcaataaaagcttactgaaccat

SEQ ID NO: 222897 - DNA, 6278 bp, Cannabis indica
agccacagatcttttagtcacaaacacacttcaagaaatgtcatttttatcaacacatttttgtgctggcaaaaattttgtattgtgctggcaaaataaaatttacttttgatgtgttggcaaaaagagttggcaaatcaacgttggtattagaacttattctggcgcaaaatgaaaagtgctggcaaaaatgacttttcccagcacgtaaatgcagtggtaaaagttagaatttttccactacaaatgtgcgctgataaaactttgactttttgctggaaaaagtgacatttcttacagtgaatgtaggaatgataatttatatttagccataattttttttttacttttagtcacaagttttattgtgactataagtaagatttttttgtagtgtaagttattcaatgttagtaaacttgtaattttcgttcaatttcgttaataaaggttctgttttgaatttattaaaattaagaagatctgatagtaactcatactatatgttttcgatttctaggctcaaatttaaaatttggattttaaatgtgtcatgtttaagatactataacgtagtccttattgaccaattattgggcaaaaattactattttattaacattgtgtacttgtgctgctaaaaaatttgagtttataactcaaaaatttaagtacatataccgctacttaccctttcataaataacaaataagtttctttgttttctttttattttaaaaatgagtagaattttattgctcaacaaacaatttacaaccggtcaaccagcttaacaaaagagcggattcaaagcctcaaacaaatctctatccactatacttgttttttctcttttaaaatgataaaacctattacaaatttcacttagttcccaataacaaacattccttgcttcccatatttaatttatacacggaaacattagtggcagccaccaaaacatccctatatatgaaatatattctttaggatctcagcaataacaaaataagtacttgtttcaatttatccagaagaattgttcattattaattggttcgatattcactccatttgatgcacacaaaaagcttgttctgttttgttaaaattaataaacctaatataattaatcatgatcgtgatagttgaatagttacctgagataaactcatgattgaatttgaagcgagatattgatgactaagattagtgtgtgaaaagtgcatagtagttggtagagttattatttttaattatgtgatcttaataaaagattaattaagataaaagtatttaatttaagtttgtgttaatatttgattgggggctaaaacgattaaaataattgtaagagaaaatcgagtaaaacacaatataaatcctagttgaaagcccaaagcatgcatgcagaacaagggctcctgtggacctgtagtaccatcaacatgtcataaaaaataaataattggcttaatttcatgaactatttatgacatgcacattagttaatactcagaattaatttcgagttcaaccaatttatcaacttgatttcaatatgaaatttaatcgagttacctatttttacccttacttattattttgccaaacttaaacatgttaattttatgtcattttctaattaatcatgtcatcatgtgtcttatatattgagtcaacttcatgttcataaatttcaccacaagaatatgggcaatatcaatgagaacaaatattgtcattaaagaggcgttttcattagtaataattatcaatgacgatattttgttggtaaaaaaatcattagaaatagctcgttggcaaaatgtattataaatgatgatattttaaatcgttgtgaaaagaaatatcaataacgacgatgttgtcattgataataattttttttaatatgttggaatattaatgacgacaatgtcttcattgattacattatcaataacaacattatcgtcattgatatacttgatttaaaaaaaatcaatgtcttcattgattacattatcaatgacgacattattatcgttgatatacttgatttttaaaaaaaaatatattataaatcaattttaattttttcttataaaaattaaattatattaaatattttctttttaattaattaatatataaaatcatttaattaagagtaaaaaattaaataattttttcatacttgttgcctcgggtttttctcaaaatacgtggccacggctacgtacgacacgtggaccaaaaagacacctcacccgggaattagctaagagtcgtatatagaagaataagtgtagttcggggagtgagcccccggagttgtacaaaaagcatgccctcctctccgggagttacaaatttagtaaggtacctccgggaccagaagggcttattcgaacagtcgcctcgcatttaatgcagcatggggaaatcatctagaaacgtccataagaagacatgtcgtcaggcaaggtaagctttgtttaaggtgattacacaataatcaaaggggctagtgacggctctattatgaagaatcaagtcaatcaaggaaagataaagattaatctcacctaattcctacaatacctacggcataggttatgcatgccctatttggtatctcttgggaacttgtgctcatagatggctggcactgaaagacaagtgatccatttttaactattcccactaatccttttatcatcttattgtatttagctaattgtgctcgtggattagtttttcccttgtacagctcgatgtggggcatcttgaaattatttggaagcagagcttccgtgatccttctcacacagggttctagatcctcatcttctaaattcgataacaccccactctgtttcttgaccaactaggtcgaagcaactatctgttcttccaacctttttgtatcactctcagggaggttgcgccttcccatcttgtcactcaaatggttcttaaggtcacctccacgtggccttgctttctcacttttgtatcaaaatcatatttggcatctagtcaccgtcgaaggtctgttgtggaccagctgtcttcgaagtgacccacagttattctaccatcttggttaaccgagtcactagggtggtttctacgcccgttgtgcgcaggtactttcgcaccttgtcctcatggcgtagctttgcctctagggtcagaagggcgtctgggctcaaaagcaccggtggccttctctgcctttaagggttgaccaaccatggtattatcctttagaggaggcctaggtgtgggcttttgtgagggcttgcccgctttgcccttacccttatccttaggaggatttaaggttctagcctctgtttgttttagggtacgttgcttggccactacttccaccgagggttcaccatcagattctgccaattctccgaacttactctgtagacgctccatcatctttttcatttttgtagtgagttttttatgttcagccaactccgcctgagttgcctctaaatctttggtcactctcaacaaactaggatcatggtcatagtgatacccatctctgatatagtcgttgtcttcaccgtctttatcatccccttcgaggtactggccatcaccaaggccatcgggtacgttctcagtatcctccgctcgggtctcggcgcgggccataccttcttctttgacaccgccagtttggaggtcagaggtgtgggagtcagcctcctccattactgtgtccagcgtcactttcttacttgtattcttttgcatgttaagcatagctgaagtgagacaacaactaactaataagagcttaaggaaatacaaattattaaataatagataaacaaattttttacgtgattcaggtgttaatgatccttagtcggcgagtcaatagtattagtcttctttggcaaatatttgagtattacaagtgtttacaatagcaatatctgtattcctttgatttctctctaagaagaaagctctttaggaattttagtagagttctgtaagtaaaaattgttctctcttagtacataaaaatgggaggtatttataggcctctaggtaggcgagggcataccctctttcctcactagggttccttactcagcacgcaaatgaggttgtgcaatactacaagaccatatgaccgttgatttggtaggtggctctttcattgtgtggtgcttaatcggtgcaggttatcacgtgcggacagggacacatgtcgttcaaagttctttcctttaaaagcaatatcctagacaagccattagacaataagcactacagtatgcgcacaactataatctgacgcaagagacaatgtctgacttggtgtcagacgaagtgtaaccgtcaaatatatctttaggttagggataacaaacttgaaaagaaaaatatcagaaaaaccaaaacaagattttgtatgtgtaagcttgatgcacggtgacattgaaattgggcatcgctatcagattgtaccatttcttgttagaaggattatttttggttgtcggtgtataagtaaccaatgaaattcgtttgtcatactacacatataaattataatggacttaagtcaacgtacacacaataatttataattatttttacaaccatagacattaatttactaactcaagaaaacatcattgaaatgctgttatcaaataggacctagcagtaaattaatatgccaacatatatgtactgtctattgatgatacaattctaataattaagatttaagaatattaaactttggtctcttgtacacttatcctcttaaataatattgatctaacactgtaaataataaatttttcaaaaatatatgtatatttactataactataatgttcatagtaatatataagaaaataattttaattataatctctctaaatgtaaaactaaaaatgtccataccacaccaaatgtctctgtggtagaatcatcttaaaatttatatatttatataaataaaaaagtatctatattaaaccggtgacagacaggtaatttcagcacaatttattgaattgacatttcttgtaaattaataaatttgttttaacgtggaagaaaaaagtgatatattccgtatgaaaatgtgaacaccacagaaaattattgaattctaatttctgtgaattattgggtcccatccttatcatgaacagaatctagtaaaatcatcactatctgatgcgatctaccgacttcaccttttcattttattttatttgccttattaattataagttaattaagtccacaattggatatagtttaaggtggggttagttagttactcatcatctgcgaaatatctataacaatgtaagaccataggaaaagaagcaaaattataggtcattactaatacacattacatattatataaaagtgggacgtgattttgtcccgtgattgtactttcacggaatgtattctgtgatatacgtcatccgttagatgagaaagttatttgatctgatgactgagattgatctaggggtaattaggtttaaaaaatagtaacgtatctgacacttatctaatgtaccctgagacacatctaatgtaccacggaatacattctgtgaaagtacatcacgggacaaaatcgtatctctatataacgtaattaaatatatatatttttatgtataaaaagtaacttcaacaattcccagcttatttaatttttaaaggttagcggataaagctagtctttaaatgatggatggcgtgttaggaagagtcttaaaaatggatcttctactagattctcctcttcaagtatgtatgaaagggactctgtatttttttattaaataattgataataataatattataaaatgcatgcacacaaaaacagtattcctagaaattatcatgaatttgtctttattattatatctctatatataaaaattcaattttttactatttagaatttggtttgtgaaatttaaaataatttaagaggctaaaaataaattctatgattataatttattattttagatgggtataaagcaagtttcaaaactatctattttgatacttttactttataatcttatttttatttttacataaaagtaagttgttttagaagtttatttttgttatctagtatatatatattattatcattaaaatagtattatattattatttggtatatattaaattaaattttcttaaacaaaatagtaataaaaaaataaaaaa

SEQ ID NO: 222898 - DNA, 1660 bp, Cannabis indica
ttttttttatgtatatagtaggttgaataattttatcctgtttgtaacataaatattaaagtttaaaatattcatcttaacccaatgaacccaccccaccccaccccttatattattgtactaagtagagttgggttgtacaataataaaaattgaatgatttatagcttatccagactgcaatcattgggttgacttattaaaatacctctaactcagccaacccagtccatgtgcacccctaaatgtagtattttgataatcgccatatttagaaaattgaatgaaattagataaaaagtctttaaatctaacaatctcaataatttaaaaagaatttttcacgacttgaagagtttaagagacttaatttaatacgtgtgaaaagcaaaaatatatttttttttaatgagaatttcagctttattaaatcaaagtttcagctaccaaacaaggtagtaaaactgaaggaacattctccattctgaactgacaatcagggtaaaatatagaggctttagcaaaagtatgagccactatattagctgatcgtttaacaaaataaacaggaatattatgcaaatcactaattaagcttttacaatctttaatcacttgaccaaaaatagagaccatctgaatagaactccgtaaagcttgtatagtcgtcaagcaatccgattcaagtgaaacatgttgccattgatgatctttgatccaactaagtgcctctcgtatccccatggcctcagctaatgcaggagcaacggtaccatgaaggagctttgtgtattcttccaacaagaaacctttgtcatctctagcaacaaacccgaagccaaagcaattgaattcctcaaataaagccgcatcaacattgaccttaatactaccaatatgagttgaactccattgctctagaaaaatacattaattagcctcttaattttgatttgaaaaaaatagaggacttaattgtaaaaagtacaactattacgactctcaatggcatggtcaaatcaatgtacctgcctataatcacatttgacactagtaaccaaaccaaccactactagtactagttcatgcatattagattaccaacaaggcaactttctatttattttttattttatttttttattaataaataaataaatttaataatagtccctggtattgtgtttcctgtattgctgaggtggtggttggagttggactaggagaattgtagtgtgggggagaggaataactggatttgaggatgaatacattgcatgtaccaaaaaaccacaccattgttttttgataacgacaccttttattgtcccttttcccaataaaagccttttttttcccaccacttacacatatattccttccttccataaccattcctcacaaacccaaatcctaaagctttcattttttttttctttgttgggttctctttttgccctgcttgttggggtttcttctctcgtcatttcaaatgctcttgtgctttctttggatcttaatctgttttgctgcaaaaagatttcactccaagtttcaacctttttgctctctttggagggtttttgtgccttgaggaactcttcggctttgttcttattcgactgtcctcatcgcctacccttgttaattacagtggtac

SEQ ID NO: 222899 - DNA, 1821 bp, Cannabis indica
aaaatctgcgttaacagtttggtgctttcattgagagcctctttgaaaaagcttagaaaaatccttaccttcttttaaagaaaaaccttctcctttatggtagaagatccagagaatattaacaccctacatgaggaaactaatcatcgttctagaaaagagcccatgggctctagaaggtctaccaatccgcagtccaagaggactcaacctaaggatggtcccagtgcttggaccacacatccctagagaactcaacccgacgttggtcctagcacgcggacaatgcactcgaggagaattcagcgtgggaatggtcagaatcccggggcgaaggatgaagagctcaaccgtggcggtgaatctatgggagaaagaacttatgagatggaaagtccccgcctgagacaccgtctggaagaggcgcaacatcaaaacgctaagttagaacgagagccagcctcggccaaggcagcgctggggacgaacgctcaaaatcaacctgaacctggagtgagaagaccatgaggcagacctcgtggctcacgaaccaggagacaggaaaaggcccgggaagaacaaccctgggaagatgagacactccctgagaatcatgaggaacagccagaaaggagacaattggaaactgatgaaccagaaatccctcatgaaaataaggaggatcttggaactcagtcgggagaacggagatcacctgctaggaatcaccaacgttcttcccaaacccatagagcgaagactcgtacgtaccctaatggaggaaatacgacaaactgctctcgggaggaaagaacagagtgtgaagaagcaagtgtgacttcgaggagatccaaaacccgtagctgatcaactcgaagaggagaaagtactcgatgagctaatgattgagaaagtatggtgacaagtaaatccacgagccacttaaagacaaagtctatgagtaggacgcagtctatgagtaagacgagatttgccagcaattactcccaaccagatctgcgagagcacttgaatcggaagaaacctgaccttcgccaacagcttggtccaaagcaagaggatccaatcccattgtggataaatgtgttggaggacaagttcaggagatatcaagtgggggaattagggaaatcatctggatacaactctgacgaggagcttgagccgtatcacccagatattatgaataccccttttcctttgggattcaaaaactcgaatgtctcatcctatgacggaaccacagatccagtcttgcatttgaataactgtaacacaataacgtgagcgagtaacatgacgaacaatttacattatatttttttccccacctcgcttgttggagcagcgagtagctggtttaataatttcactcgtcattcaataatttcctgggagcagttgtccatggatttcaagaagcaatttcaagccactagggataggcaacccgaagcggccttgctaactaatataaagcagcagcctgatgaaacacttaaggcgtacttaagtcattttagcacgactgccgctagggttagaaacttggatgatagcacgcaacttacaacccttcaggcagggatctccactaatccattaatcaccgggggcgagttgtgggatgatttacaaggatgtctggtaagaaacatcactgagttcatgtgtttatctagaaggaagaagcccaaaaggaaatgaacttgttaaaaataggctcgagaggtaaacctagcaatgtttcaacagggactgcttccacgagaattgataactcgggggcttctggtccga

SEQ ID NO: 222900 - DNA, 2658 bp, Cannabis indica
agatgggtgaactggttcagcctcttggtcgacctgtgtcacgtcaagatctcttagagctggatcttggattcagatacctggttgaacggctagttgaatgtattgctcatccagacctattcttctgttcaaatcattcctgagatcatgggctgtatccaatctattgaatactaaagcaccaagttgcctcaatgattggctagtttggccagtttgttggccagaactgtcagtctggatggagttattaggtacaactccacctaaagaattgtcagatagggtctggccgcctaccacttggcccacaggtggaacctgggatcggggattggacggctgaccattatgattctgggcggtatgcccagcaggaatctcttctgtgcctcccagtgggatactggacgtagtagctggttgctgattagtaacttgatatgctttccgtatcaatacgatggcctatcttgttcggtcatcaatggctgcgtattgagctttcaatgtttccatctccctatccctccagtcaatgaactgacgcctctgctcttcgaacgcaaggcccattgcagcacggagctctacctgatcatgatgcaaggtattagtgtgaccttgcatgagtccaaggggattgcggaggttatgaatcttagtatcatcacctaccattgtctaagcattggttgtggatgggattccaatgctgtgagtgctttgatcggctgccgaactagtattgtaataccctaagatttaaataaatggattagcaaatcctaactagttaaatgtgtattattgaggaattatattattatataatttaatatatgagaatttatttatgctatgttaagaccccgttggtgagccaggggcattttagtaattttggcccgagaagggtaaaacagtaaaattaatttatttatgtgcttatggaactatattattatatagtatgcatgtgatgtctttttcaggtgtgttctgataggttagcgtggtatagtcacaatcggatatttcgggtcgaaccggttgcgggccctaaatataatttgagttgaattattggcattttaattgttgatgaataatctgaaatttaattggatttatttttgtgtgaaaggacatttttgcccttggtttatgcataagctttatttggccctaagggcaatttggtcttttgacctttatttggtaattgattaaaggaataaaattttgaagatcaaaaatagaatttctggatttctcttcctctaacccgaaccctctctccctcaaaccctcttctttttccaaatttgattcttgaagagaatttgcttgattttggcttgaagtgaagttttgagtttgtggaactttgagcttgttcttagattgagtttgaggtaaatttttatggctttagtccttgttttattgctgaaattgtttgttgaagagcatgaaattttgttgtgggttgtgatattgaacttgagatgcatgttcttatttgttgggttgtcttgagcatgtttagagctttttcttgagtttgtttgggttaagcttggtcaaaaattagaggatattattaatgtaattttctgttattgagctctggaaattattgtttgaagcttgagtttaagttcttgataatggagatttgtttgagatttagctcaagttaaagctttgatcttcatggttgattaatctgaatttttcagagtttagtatggattttgatgcttgagcatgtattttaaactctcagtatgattattaaagacctatttgatggttggaagtttggttgtgatttgggaaggtttacttaagttttgggctgattttcgtgttttactgctagttttctgagttttgaacctaggtgccgcggcatggtatttagcatgcagcggcccgcccttttctttctgggcagatcctaatgcaaacttcaaatagccataacttttttatctggactccgatttgggagttctatataccgttggaaagctcgtttcgagctctatgtgaatatttatattatgggtgccaagtatatattttgtaaatgtggaattaaggattaaccttatatgtgtaaatttcagaattgtgactaggattacttgcacttggtcagaagaacccaggaatttggaatatcctcttttgcaggacatcaggtaagacagcagtatgcacatagagttaagtgcagtggcgctcatattgtatgttgtgattgtgattaattaagaattgggattacggttattaccctaaagtgagcgattatttggtctagggttattaccctagtagttaaaagatgtttaatattatgccatgttaaatgtgttagaataaagagttatgtgtctagccataattaagctagactcggtaaactagtaccttgagtttaatttaaatgtggtctagggtcattaccctataatattatgaaggtaagaaagcattaatatatggtaatattattaatctaatgaaaacatgagttagggttattatcctaagattttatatgatgtggtaaatattgagtacacgcatgtatgttaagagttatgtgtataagacataactgggttagacctggtatat

SEQ ID NO: 222901 - DNA, 1696 bp, Cannabis indica
tgagtcccaggctctttgttcgggtcttttgcgccagcaggagctggaggatctgttatttgaaaggaaggcacatcaacattctggcctgaagtagaagttgttgccttgggttcaccataagccacttgagaagcacagtactcgagattcatgtctttggcctcgcccaggtaatcaaaattttcctgagggttagcattccaaaagtcataaaaaatctcgagaccggctgtctcaaaggcatgctctttctcttccagccttgccacctccgatttgtgcttctcgacctcagttgtaagctcctcctccttagtcttcttctcttattgcagtcgacggaagagagtccgaagaactcccctttcctcttgaaggctattcacttctgtcgacaaggtgccgatggtatcttcaagttggtcggaggcctcgaggtccttagtcaactggactattttcctctcagcattgaaaaacttcttgttgacttcacccagctccattcaaatagctccgagttccaccctaccctcatcagcatccttcctggccaagtccacctccgccctaatggtgttggacatggcagcgttcttggaggcagtagatttagctctggaataggtgtaagccaacttcagaccagcctacacagagaaaaaacattagattatgaactaagtaaagaaggattaaaggagactttcaagaaagtcttacccttgtaaattccctcaagactcctcccatcagaagctctaggaaagatttgttgtcagcgccggccaactgctcactcacctcaggaaccaagcggttcatgtaatgagcgagcatctccttgcctttcttggcctctggatgcactggcaagggtggagtaggagctcgcatctgctcagatccgctcttggcgagctcgaatccgccttttgactgctcaggcctgtccaagattcctccccgagaatctttggacttagaaacttttggagtagaagggtatgcgacagttatctcctcaaaaagatcaataacctccccggccggtgccttttccttggatggggttgcctcatcgcccttagatttcttggctggaggagatgagcttgagcttcctccaactctcttcttcagagcatccaacatcctctgagatatgtctgcacagaaccaaagcaacatggttagaagaaaaaatgcatcagaagttgaaaagcatgatagtcaagaagtttaaaaccaagacggaatatcttgcggagcgattgtcggagtatgactcaaaagcccatcatcaccccgaagcatatacataacatggtttatgaaaactttcaattatcctactcgacacataggaatgagtagctcctgagtcaaacaatatagtataagaacaaccatttatagataattgacctttcacaactgacggactagcatcagtgtcaacctaagtcatggtcaaaagtcgctctgggttctgagtggtattctttttcggctcctctttcttggcctgaggacaatctctgataaagtggcccaccatgccacactagaaacaagtcttggcctgacattcaccctgatggtgtttcttgcatttcagacacttaggataagatcaaaatgaagatccacagccttgatggctacctctgtttccccaaaactttctatt

SEQ ID NO: 222902 - DNA, 2120 bp, Cannabis indica
ttttcagcaatgtggatggcagcactattatcacaataaaggatggagggaagcttgattggaacttggaaatctttgagtatggatgtaagccatgttaactcacaagtagcatgtgccatggatctgtactcggcttctgcagaggagcgtgagatggtttgttgcttctttgatttccatgagagaagtgaatgtcccaagaagacacagtaaccagagattgagcgtcttgagtcaggacatgctgcccagtccgcatcgacaaaagcatgtaattggagaggtgatggtgtagtagagtgataaaataaaccttgacctggagagctttttaggtagcttatgactcggtatgcagcttgaagatgagggtgtctaggtgcttggagatattgacttagtttattgacagcatagctgatatcaggacgagtgatggtgagatatattaatttcccaatgagggatctgtattgttttgggtttgggatgagctcaccagattcagtgctgagttttaagttgggctccattggagtggaagttggctttgagccaaggtagcccgtgtcctgaagtaattgcattgtgaaaggtctttgtgtgacagatatacctttgctgcatcgagcaatctcgagaccgagaaagaaatgtaaggggccaaggtctttaagtttaaactttgagtcaagtgttgtaataaatgtttgtagaatagtggtgttatttgttgccacaataatgtcatcgacatatataagtagagtaagaaatgattattgagtggttttgatgaataaagaatgatcattttgagattgggaaaaaccttgtgagataagtgttgagcttaatttagcataccattgtcgggatgcttgttttaaaccatataagctctttgttaatttgcaaactgcatttgggggtaacactcctttgggagtgtatccttgtggaagtttcatataaacatcctcatttagatcaccatggagaaaagcattgtctatgtccatgtggtgaaggtgccaattgtttatggcagcaagagcaaagagtagtttaagggtattgaacttagctacaggagcataagtgtcacaaaaaaatcaatgccttgtttttgtgtgtaacctttggctacaagacgggctttcaatctattgactgaaccgtcaggattgtatttgattttgtacacccatttgttcccaattacatgttgattgggaggtaaggaggttacagtccatgtgtgattcctttctaaggcttcggtttcattatccatggcttttagccatgcaatgaattgagaagcttctttgtaggattttggttctgtaagggtagcagtagctaagatagctgttgtgaacttattggagaatctatgataagaaatataattggcaatagggtagttagtggaggcagcaaccttatcacatatatagtcttgtagataaagaggctttgtgatgtttctgcccattttggtggttgggaggggaactgttgtgtttttattagtggccatagggggatttggagatgttgatagaggatcaggtgagagaggatgttgaggttgcagagaagggtctgctggggttggtggttcattgtgcagaggggggtctgctgttgtgggttcatatggcagagagatgtctgctggtgttattgaaccagggaaaaaaagatcgatgttggtagtgggtgttttggtaaagaagggaaaaatgtcctcatagaaaataacatcccgagagtgaaagatgtgattggtttggatatctaataaggtatatgctttcatatgttcgggatatccaatgaataaacaagcttttgctcttggagaaagtttatgaccattgttatgggggaagtataggctagacaaccatagttccttagatgagtgtaagatggggttttgccatttaataattcatatgaagttttgtcttttagtaacacagatggtgttctgtttagtaaatagacagcagtttttatcatgaaactccaataaagaaggggtaaatgtgattgaaaagcaagagcacgagcaacatttaaaatgtgctggtgttttctctcaa

SEQ ID NO: 222903 - DNA, 1309 bp, Cannabis indica
tctctctctctcctctctctcctctctctctctctctcacatccacctagaggagctagggtttgtcaattttcttcttcagttcaagcttaattcagcaaggtgttggtggtttcaagttttatataagcttctagtaactccctcatatttttcttgagtttgaagttatgaattatgcatgtttttagcaattgagttaagcagctactgtttgtgtgtgggtttgtttttagaagcttgtttatgtttggttatgttgatttgagcatgtttaagtgattattaggtagtttaaccaagttttgagtttagaactcaaaattggagctttaatggcaagttttgattctgtgcttgtagctgtgtttttttgcttgaaaaatgatcttaaggatgcttagaataggtttggaaggtttcatggggatttgggttgatttgaacgagttagtaaagttttagtctttcctgcacaaaaccagaatttcggttcagaggggcctgtaggaaccggaattctggttggctcctaggaaaccccacagaaccgaaatttcagttggggaattggtctaccggttggggcagttttgagaaccctagtttttcccatttttgagatatttggggtattgccatgttatttattgatatggaaacttttagtttcaagtttaagttcccggaaagtgatttagcgggtcacttaccagtgttgtgattgatgtgatttaggagcctgtgattcgccatgcagttattccactcaggttggccggcacacctgaattcagaatcaaggtaagattagtataatgtaatgcatatgtttatacatgtttagcgtacaagttagttgccatcagaataacatatcagatatatattaaggaaatctatagccatcaggttagcatatcagggcaacagtgaggtgtacatggagttgcaccgagatgccatcagatatatgttaggctatcagatagtatggattaactgctaccacatcagtgcgattagagtactgagtataggctggattcgcggttagacatactatgtcaagatcgatcctgattcagttagggttatggttaggtgtatgggcgtctgattataacccgggatattagtatgtttattttgttatgcttttcttactgagtctgtctactcacaatgctattgctatgtgtaggtaagggcaaggctaaagctgagaagccgtgagagcgagcagacgaagatgttacatgtcggggcagttaggcctgtagcgtacgatcctcgggacatcagggct

SEQ ID NO: 222904 - DNA, 1958 bp, Cannabis indica
ttgtttttcagatgaagatattcaagagttgttgtgcagtgaatttttgactcgtgtggttattcggcgtggcctttggacttcaatggctggttgtgttggttgtctagtaaatatcctggtataatcattattgtaattgttgtcacagtttatatgatttggaagaatagaaaccattgtgtctataatgatagttgttattctatgttgaaatctgtaaaggaaattaaagatatagttcactataggttgtatagcatgaaggataggaaagttgtgcttgctgaaaaaggcttgtttttgcgccttcttcagtagcaggttgttttctcctggttttggccagctgtagaggggctattctgggttgttttggggctattttttgtagccttggtgtatttggtttgttttgattaatgaaatattctcttttgtcaaaaaaaaatctcgggatcccatttacaagagtttgctatccatatacaaaagttttgttgccaagcaactatacagcaaaaagcccttatgtcccaaagattgtacgctccaggcctaaccgccctgacatgtacaatcttcatctgctcgccctcacggtttctcagcttatcccgggttataactaggcgcccatacacccgatcataaccctatcactgtgtcccacacggtgctgagtctagaacgttcataagacaatactatcgaccataatgtcagcctaatacccaatatgctagtcatactctaaccatattgatgtgacaacatcaatcaatatttcagccaacatacatttatcagtaatcagtacaactctaagcatactattactactatcaacgtaatctcataggcataaacaacatgtatgctgaacatgtaataacatatgcataacatcatactaatcttacctcaattttgaattcaagtgtgccagccaacctgagtggaaaaactactcagcgaattacaggctcctaaatcacatcgataacaacaaggataagtgatgcgctaaatcacaatcggggacttatgttttaaaccaaaacctttctactataattaaacattgcaataccctaaactaacagggaattaaccaaccaaagctctgaaactagcacgaatcgacaatacaaatttttcagggaacccagcagcaaatactagtaactggttttacaggcattgtaaaaccggttagccagtttataccagaaaacccaaaaacaccaaaacctaaccaaatcgattccaaactttaccaaaccttccagttgcatattataccccaatagacagattccaagcaataaaacaactacccaagctcagaatcaaaaaacaccattaaagagccaagcttgtgttctaaaactcaaagcttgctcaaacaacaaaatagccatcaaaacaagcttaaaaaaaacatatctaaacatatttgaacttcaaaaacatacttcaaacaaaaacaataacaacaacaactaaaatcataatttcatgcaaaatccaatttcttacaatttaggaaactaaggaggaggttactaagagcttacctatagcttgagaccacaaaaaacttgctgaacttagcctgaattgcaaggaacacaccaacactagttggttctaggtgcgttcgaaagagagagagttgagagagaagatgctttctttttaaataattttccaatttttaaaataattgaataaaacgttttgttttattaaaataaactcagcttgttaattttaaaattctgattaataaactccaaccaagtccatgttgggttttatgccctaaataaaactacatttaaatataatcagatttacttattaataaagaatcagaaataacatttaatgttgcatggttcacatgatttatttccatgattatttactataatgtatgaattctatttaag

SEQ ID NO: 222905 - DNA, 2831 bp, Cannabis indica
gcataaaacccaacaacatacttattaaatattttaagtctcttttcacctcttccgatccttgtatacctcaggatctccaagggctgatctcgggtgaaattactgcttctgaaaacgaggtcctcatgtcaattcctacacatgaagagattactcaccatgttttccaaatgcatcccctgaaatcccctggcccggatggattctctggatgttttttccgtaagtgttggaattcgataggacctgaaatcacaagctgtattcagacgatcttcaggtctggtagccttcctcctttgctgaattatactttcatatgtttgataccaaagtgtgagaacccagactcagttgataagtttcagcctatagctttgtgcaactttgtctataaagtggtaactagaatcatagcacatcgtctccggcctctgttggatcgacttgtctcccctctgcaatctgcctttgtccctggtagatggattgctgaatcctctcttctcactcaggagttggttcatacaatcaagtctaaaaaaggaaagggtggcttaatggcgattaaaatcgatatgaataaggcctatgacagacttgaatggaagtttatcgagaaggttcttcaggtatttggctttcattctcattttataaccctaattatgaactgtattactactgtctcctattctattctgcttaatggccggcctcttaagaaatttctccctcaaaggggaattcgtcagggagatcccatgtctccgtttcttttcattctctgtaatgaagttttttctagactgattgccagagatcaatcccttgggaaagtgaatggtatccgaatagctcgcaatgccccggccacctcccatctcatgtttgccgatgacaccattcttttcttcagacccaatgtggaagaggctgaatctcttcagaactgtatggagacttatgggagttggtctggccagcaatgtagtaagcacaaatcgggtattctgttttcaggaagttgtactaatgattctcgacgtcagatcatggagaaattgggatgggggtggggttggtgaaaggtaatgagaaacacctgggtaatcctttcctcttttcccgtagtaagagaaaggactttcaattcctcaaaaccaatctctgtaatagattggagggttggcgtatgaaaactctatctaccattgggagaatggtgactattaaatcggtggctatggcgatgccgttgtataccatgagctcttgtaaaatccctattacctcttgtcaggaattagatgccatagtcagaaaattctggtggaaaggtaatttggatagctctcggtttcttgctactaaaacctgggatgtgctttgtcaacctaaaggatgtggtggcttgggtttcagaagatttagtgacatgaatgttgctcttttggccaaattggcttggtttttggcaaacaactacaacagaccttgggctgtttctttaaaagctaaatattttcccttggactctttttaaagtattcaggaacgcccttcagacagccctgtttggaaagggatcttggaagcttggaagttgatttgcgaaggagcttgtactatgcttgctaatggcgaagacactaatatctggtggcaaccttggatcccgtggctagattactcggaattcagggaaaccatggagatagctcgggccaaagcttcgtctttatgtagggtggctgaccttatgtttagaaggagcaggacctggaatcgtggcttcttgaactttgtttttggaagtgagatgggggatcggattagttctattcagattaatgcctatgctgaaaaagatttgatcatttggaaggactcggaagtgggtgctttttcggtaaaaggggcttatctgagtagccagaagtcgagacttgctgagaagcaggatttgtggaattggatatggaattgtaaaatccatccgagatagagtatgatgttgtggagggctgtggccggagctcttcccacatctgataaatatggtaggactcatactaatgactgtcttttctgtagctctgataatgagagtcctttgcatatatttgtaaggtgcccgatgacccctggtgccactctttctgaagtgatttgttccatcttgcctttgttagaagggtctttgaagctgccttttcttatctggatggcctctgccttcgaaactatttggttgtggaggaatagaattcgatataggaggatagtgaagatttcggttgatgagatgctcaacaatgccttaaaccgttttgtggaaatgagtgatattcacaagccatcttctgaacagatgcttactgtctctaacagcctcccagttccgggagttgtattgaaggtgattttggcaaatggttcttttaaggatgggaactttggagcaactattgtggctactgatgatgtcaacaagcagtggcttattcgaaccattgctggaagattggattgcccgatagcagcagaacttaaagctgttcatttagctctgctgtgggctaaggaaaaacaatgggaagatgtgtgcatcttctctgattctcaggtggtggtgaagtctttactgaaaggaatttctccaagctggaaatgttggactcttttctctagtgttctagaattgagaaatagtttagttaattgctcttgtgcttttgtttcccgtgatgttatttcctttgttgatttgttagctaaggatgctagaagttcatctgctgaacctttgaattgtcaaggggagg

SEQ ID NO: 222906 - DNA, 1345 bp, Cannabis indica
atgaagtcatctcagtcgaaagaattactgagaatgaagctggtgttactgagactcaaccaaaccctgagtttgaggcatggattgtacatgaccaacttctcatgggttggctctaaggatccatgtctgaaggcattgcatcagaagtaatgggttgcagatctgcttcagccctttggacagctttggaggagctctatggagctcactcaaaggccaatatggatgatttacgcactaagctccagactacaagaaaaggtgcacaatcgatgactgactatttgaaaatgaagagagtttgggctgactccctcgcacttgctggaaacccgtatccagagaaacatctcatagctaatgttctgtctggacttgacatggagtatctctctattgtactccttcttgaacatcgaacagatctgtcatggcaagagctgcagggttctcttctcagctttgacagtaaactcgaacgccttggtgctgtctctcctaccagtaaggctcttggtaacccctctgcaagcctggctcaaagacccaacaattccaacaacagaggcaactattcaggcagaggatgaggatacaacaacaatcagggtcgtggaaatcagtatcaaggaaactctggcagaggaaacaacaatttcaacaataacaatcgtggaaggggacgatacaacagagataactcgagaccgacttgtcaactgtgtgggaaatttggtcattctgcagctgtttgttactacagatacaatgacaactacatgggacaaccaccacaaggagatggacaacaaaaccaggacaaaaactcacagatgacagctcttgttgccactcctcagaccttgaatgatgacgcttggtacgcggacagtggggctactaatcacctcacaccagaagctgagaaaatgaccaacaagactgaatatcatggtaaggatcagatgttaataggagatggcagcaagcttgcaatatctcatgttggtactggttctttacacactacaaactctaatcctttagttttaaatgatcttctccatgtcccatccattacaaaaaatttgattagtgtttctaaattaaccagtgacaacaatgtgtccattgagttctttcctgatttttattgtgtgaaggatctaataacagggaaggaggtactgcaaggaacacttaaggatggtctatatcaaataaactcagctttgggcagtcactgtacttcctcaacttctccaagttatcaatctaatgtctccactaagtctgttgtgtctagttttaattccctaaaggatacctggcatagacgcct

SEQ ID NO: 222907 - DNA, 2317 bp, Cannabis indica
gcttaaacctaggaattggtggtatataccacaataatttggcaggaatcccctccttctccttgccattatcattcaacttccatctagagcacttacaaacagggcaatgcttagccaacacaaactcattcctaaataatatgcaatcattaggacatgcatgtatcttttcatactccatgcctaatgaccgcaaaatcttctttgcctcataagtactacttgggatattatttccttcaggaaaaatatcgcttaagtaagaaagtaattgtgaaaatccattatcactcaatccattcctagcctttatattatacatcttaaccaaaaatgacattttgctaaccttggacccagtataaatggatttttctgattcttcaattattcttacgaattcatccgggcgatctgcaaactcttcttctagatcgttaaccatatcaatgtgaaaattcctatctgatacatcctctttgcgagctctttttggaaatgatggttgagacacactctcaccatgccatatccatttttggtaagtttggtcgataccatttatgtataagtgtcctcttacatctacaaccttcaatttttttaaatttccacacttcatacatgggcaagatatcatagtaggatccttttcattttgcatggcgaaattcatgaaatagttaactccatcttcatactcttttgacaatctattctttttcatccaatctctatccatattaatctataattacctaaaataatttaatgctattacaagttaaaaattatatcaaagcaatttttaagcaagtttaattattttgatacttataaatcttcaatgttattaaaaattgggcagagttttctctgtttctataacattttctaattttataagtatctatatcaacaaataacaaacacgataaacaacacacaataaacataattaaaaattggacagagtttcctctgtttctataacattttctactttcataagtaactattatatctacaaataacaaatatcacacaataagtttcttccttatatctccgcagcacacaaatttcccagaacctacttcactacaacacataagtttcaaccttccattatcatcgcaacacacttaatctcaaaacctacttcactatggatgaatatttaagatattcaaactcttctaagatgaacaatattatggcgttaagcaaagaaatgagtgattgtacatacctcttttaatgaaccaccaaacttcacttcacttcaatttataaaatgaatccttactaattaaatccacaacctacaatattaaaattttacaatattatatccaatatgtccaaaataataataataccacatacatattataaatgatatgtaattttttgatactaagaaataaccaaatcaaaataaaagtccaaacaaacagtagaaaagaaaatctaaaaagtgaaacataaagtctaagaaaaaaaaaaactaataggatattggctatatggccaaagacttccatccatgagtgaatagcttggactacatcatgggttgttgcagagtatagcagcagctgctctttttttctttctaaagaatatttaccagtctaatatagaaaacatatcagagtggaattcataaaaatcagtactggtatagtttttctgctatgattactgattttttttcttgtttgtatattgcaaggaaatttatgctcctgccactataattaatttctaggaatttcatgccatttaaaagtgaaaatacaaaagcatagaaaatgtaaaacagtgaattatataaagaaagcataaataactaggacataaaagttttttgataaagaaatatcaactgcagctcttgataatctcttgataattacaaccattattaactgtaaaaatgaaatcaacatatactatagcagtgtgcataaataataaatgtactcaaaacatagaaagagagataagttatcaaaataagggtctgaacttctgcaacagcttcttctaactacagctgttctacaatttatagcacatggctcaatagaaatacttgttttttcaattgttgctattactcaataataggattgataaaatgattaaagcaaatattaaagtctagcaagtaagtagtcttcaaagagagtaagtgttatgttagatttcattaacaatttgtagagtgtagcttattgttgctcagtttgagcaattgtttgatagtggttagtgattaataaaaagtttctttttcttttctggt

SEQ ID NO: 222908 - DNA, 1074 bp, Cannabis indica
gaccaggacccgaacccagactcaaaccttaacttgtacttcgacctaaacacggaccaaaacttgggatccaaacccgaacctgaacttggacctagaccgggacctacgatcgggacctagatgggagacctgagccccgaacccaaacttggagtaagaattcggacctagatgggggacttggatccaaaacttggccccgcaaccaggaccgaacccaaaactcgaccccagactcgagacacaggacccgaccttgcacccacaacttaggacctaactaccgagacacaacactgaacctcaacccaaacccaaacttaggacccgacccaagatccgagacatgaactaaaacaagacttagatccaagaccaagatcagaatctggaccaaaggctttgacctgaaccgtagttagtgtttgaatccaggacccagacctggatccgtacctagacccgtaatcgtaatcagactaggtgtgggattagaacctagacctgggacagtaacaagaccaaaacctaaaaccaaactcagaccagaacacacaccgagacttggaccggaccgggacctatgacttgggacctaaacaaagagcgggacctggaccaagacctggtgtcggacccagacccagacccagaccgaaaatctggggctatacccaagacctaagaaccagagtcagacttgggacccaaaactcgtacccacactaggactgggacccgcactcgaacccgaatcaaaattgggacctagactcaaattgcgactctagacccaaacccgaaccggaacacgaacttggacccaaatcgggacctaggacctgaacatagatgggggacccagaacgaggaattgggcccccaaaccgacacggaacttgggcttcagaacttagatcgggattcgggacctgaccctagacccaaacatggacctaggacccacctcgtgacatgggatccgggatttgatgcttggacccaacccgtagtcggtgtcttgattatggacttagaatagaaccccaacccaaaatcgaactcaaacca

SEQ ID NO: 222909 - DNA, 2107 bp, Cannabis indica
atatacatatatcatatcgaggcaggtatctattccccactctcgtcccgttttcgactcggatatgaatatttaaacccatacccgcccctccccccactcctgaaagtcaacccatgtccccgccccattaggggcgggtacccgaacccgcgggtacgtataattgtcatccctataaaaaatagatgacaccctaaatttattaacaatttagtagtttggaaggttttactgttaaatttctagcttagagagttaactgcaagtagagtaatagttgagagagtttaacagtaagatattctattattttatttagaaaggctatggcactcatggtgcttaacactcttataaggtataatattgtcattgatgatagtgagtcctgcttattttactttaataaatattatagaaagtcgataactaattataggacgatactttattgtggtgctagacatcatgagtacctcatagcaatgctcttattttttaaagcattgctacagattactaaggtgtccaacaccactataaggtagtactttataaatagttaattgttttttataatttttattaaagtaaaataagtaagacttgatattaaattgtatcaatgacgatattatactacacaagtgtcacagtaccataaatgagacgatgtaaaattgtatcaatgtctttttaatatagtgtattaagatcatatttcaaaataatttgaccctcgattataatttttttgtaaattacaatgtccaaaatatatttttttttctaaagtatagagtttaaattaattactcatctgaaatacataacaaaaaatggtgtaaaccctatttttggttaaattgagaaaaaaaattgaaaaatattgcacttaagtcaaataaaagttttatttcaaaaaaaaaaaaaaagaacaaagaaaaaagaagtcaaatattagttagaagacaattgtacattcctcatgaaaacaaaataaaatatatttacaaacacccaaaatagaaaaattaagtcttgtctcttaattagggtatatttaactctaattatagcatatatattaccaaccatcaaattaaaaaaaaaattattaaaaaaacaaataaattaatattaagtactatatagcctgttgccttttttacaaaacaaaataattttgaatctgatgatcctcgtaatattttaaggatcatcagattaattgtaataattaatcaaaaaaattaaagatgagatcattaaaaaatttgtcaagaattgcaattactttgcttgcttgttgttttttcttggagaataaaggtttggtttattttatttttaatcattatttatttatatttattactttagtgtgttaaaaaaattatgattttatgattaatgatttttttataaaaaaaaaaaataaattttaacatgctttgaaatatcatacacccctaaatatttttacttgaattaagataaatgagtttaaaaaataaaaataaaaaattacagaacccattgacttaattaatatgaacaattttattttattcaatttgtatttttcttttaattttaattttggtgaatttttattgtttttgattaaaaattaaaatgtataattgcatgcagtgtatggagaaaattacagttttgatttgaatgtgcatttgaaaaatgcatcaaaacctgaagaattaatgattaaaaagtctgattttccaagtgattttgtttttggggttgctactgcagctgcacaggtatgtaaaaataattatatctatcatatttgtaatgaaaattaaaaaaatatatattttttaatttttatttttctagacatttgctatatataaatttatatatatatatttatataaatctttttgctttattacaaatggggttcagattgaaggatctgtaaatgctgaaggaaaaggagaaagcatttgggacaattttgttaagacaaatccaggtgaatttttactatatatataggatttatactattaattttagtattttattgtttttaccaatataccatttttttcaatttttttctatatgg

SEQ ID NO: 222910 - DNA, 3914 bp, Cannabis indica
gtattggcttcaggaaactcatgacttgcacattgtttcttttagaaaaagcctatgccgccctctctctctttttctctcttcaatttcgaaattccttgagtgaatgagtagcgcccacacacatcaattggtatctcaatcatagtgtgtaagactgtaggagaatccaaacaacaagaaggagaatcagcatcaaaggaaggagagaaagagatccagattcagatcttgataatgctctgctacagaaaggaatcaaggactagagatctgaatggaaggactcattatattctgctgcacccaatgtaaggtttactaaacttcatatgtgtttatttcattgttttagaattcatattaggatgttaataaaacatacttggtagtaaatctaaatcctggtaaaatatttccaacagcaagtccatccatattataagtcacatccaccctgatccggactgcttcaggtcaggaagacatcacgaatagaaaggaaagaataacaaagaccctccatatgagttattgggatgcttctggaagggcactccaagagacgtcatggaaggttatgctgatatggcaatcctcggataccagatcctgcaatattagggccttgtccaccgcgtcagactataagagtatgcacaccaccaaggggaacataccctttgtccgacgaccactactgtggcatttacagtacgcaaaggtaacacgctcatgtcacctgtcggcatcaaatggtcctcaatcttacaaaaatcacagccccacgggttgggctcaaagttagtgtattatatgtatttaccccattagtgggccatgctacacacaaaccctagcgggtccaaggtatgtccatacccgaaccctagcctataaatgctacattatcctttcatgtaaagggttgaaaaatcattactcaaacactatctatcaagtgtaatccacccattagaactaaaaggtccatagctgtccacaattaaagttacagaagataaaaatgtttaccctcttttaaatttccccacatgtccataataatctaagagagaggactgcaagcctccataactctcaagtttcgaaagcttgggggtaaatgttacctgtattttcgaaaggaggacacacgacatattcaagtcacgaatagtcaactaaagcccgaagacgggcccagctaaggtaatgggctgaaatcacatggagagataggctgcaagtccatccagattataagtcacatgcatcttgattcgaaccgcttcgagtcaggaagacatcacgaacaaaaaggaacaataacaaagacccttcggatgagttattgggatgcttccagaaggtcactccaagagacgtcatggaaggttatgctgatgtggcgatcctttgacactaaatcctacaatatcaaggtattgtccactgcgtcagaccataagagtgtgcacaccactacaattgtctcgtgaactagagttcattaatacctaaaccacataaaaatcttcatctctatttcatccattttatattgaatttccaaaaatctcaataaacattaatattaatatatatatctattacttatattaatgaacaacctaaaaaggtccaaaaaattaatgtttaaaaaatttaggtttttattttacttcatcaaacaattattttttgaaaatattaatattaaaattcaattttcttaagataatcgataaataatgtaattgaaaaagaaaaggtataagtcgaaataaatactaaaaataaggtacttaggggaatatctaaaagaaatacactagcgaggtccatataagaaacgggccgacccaaaaaattagtaagataaaagcgaaaacaacaaaaccaaatatttagggctttgtataagtagctagaagaagctctctgtttacttgttaggctagggttttggaagagaaaggctaactcagtaaccagacaaggttgaagacggatctcttcagcgcctccaaccatgggtcgtatgcacagccgcgggtattgtatctatacctgttgataatatacatatttatctttgtccgtgtagttaaattattgagttattttttgtttctgattctgttttcagtaagggtatctccgcctcagctcttccatacaagagaagttcaccaagttggctcaagatctcttctcaagatgtatgtttaaatatttcgttaattgcaagcctaaataaatgtctataattttctgcattaattgatgagtatataatggtgttaggtcgaggacaacatttgcaagtttgcaaagaagggtcttacaccatctcagatcggtgtgattcttcgtgactctcacggtattgctcaggttaagagcgttactggaagcaagattttgcgtgttctcaaggctcacggtaatcattcttatgttttgtttttatgagctcaacattttgaagtacacggatgaatttagcttcttgtagagacttattttcagtcaatgtttagccttaattttctgtcaatgttgacccattacattgttttacttaatgtatttaggtagaataataacattaggtctgtttaactgttttttaactacttggataagcgaaggagatgatgaattttctgattttccatttgtttaatttttggtaatttggattgtagtgtaatataggttgttgttttatttttcttgtatgagtatgagtatcataaattcataatatggttaacgagcgattatgggcttgtggcatttggttgggcaaaatcttatctgtatgttctggttaatttgagactttggaaccctagttcttatatccccaacatgattaagggcttattgtagcctttggttgggaaaaatgcaatgtgtatgtgttgattgattgggttgctttgcttttatgaaatttgttgtgtactaggtcttgcccccgaaattcctgaggatctgtatcatcttattaagaaggcagtctctattaggaagcatctcgagaggaacaggaaggacaaggattctaagttccgattgattttggttgagagcaggatacacagacttgcacgttactacaaaaagaccaagaagcttcccccagtgtggaaatagtaagtgcttttgtttctccatgtctaccagtttgtaacttgttttttactttctgagttgctttttctttatgtctattaattaggttattggaaatttgaactgtctctttacttgacatgtatgtattactgcttgctgttgctattaaccttcagatcaaagggttattgttttcggttttagatttatccttttattatacttgaagtattgcaactgttagataactaatattaggactgtttgataattaatattaggagagtggaaaaggggttaagaagggtataatcttattgttaatgtaatgtgacatagtgttttctgatttgctaaatggaggtgaggaaagcctttttagctgatgtagaagctcccacttctttcttactgtttttagaagctgttctgtgaattttgctgcaattgttattctatatgctgacccattttattgatttgcagcgagtcaacaaccgccagcacccttgttgcttaggttcgctacattaatagttgctgctgttttggtttagaatgaactataagaagatgaattaatttttgtttctgaatgtggagctttgtagttcttgactgtatttgtcttggagttgtgtatttggtttttggcactacttattcttagttgctacagctcttcttttttcggttctcaatgctcattatccttggtatcatcagttctcgggttatttaaaaataaaccaaaaaatatgatg

SEQ ID NO: 222911 - DNA, 1992 bp, Cannabis indica
atcaagttgagcccctacctctctcgagtcattaaattttttccaatagacgatcttaagctctcaagtcacaagcttgaattgtttagtccaatcttacatattactctcacctatatcatcaaatggtcaaataattatcatcatcgcattctacattcaaaatcaagtcgaacgacatataatatgactatatttaaaatttggcattttgaagcctcacctaagcggtgaacattaacaatcggtggcagtaaaagtcggtgtaccggaaatgtcaccgaaaataggggtagtgtatatcaaaacgaccaccttgattagtagatcacacccataccaaccgtttgtcaaaacggtacacgatgtccccagaaaggggcggagctacaaaagtgtcacaggaaaaagtatcaaaccgggaaaaatggtttagtgtaggttgttaacctcaacgagatgagtttagtggtgaagatgtctcatcaaacggacaccgaaggtgaccgaaaaattcgttcagagtttgaacccctaaactttgacttgggatcttgagctaacggcggcaaaagaagcggcgccgtttgggggtgaggtcgctggcaccactgggttcgagtggtccggcgcgtggggctagtcagtggctggaggtgggtcgccggagtgtggtggtgatggtagtttgtgggttttctttttttatgtgttttgaagagagatagatagagagagagggggacgacgatgggtttagctttattatttctttttatatatatacatatatattattatttatttattattatatatataaggtttgactcggtcaaaccgagtcttcacattcttccctccttaaagatatttcgtcttgaaatttcagagtacaacctcaagttgaaaattaaacaagtgaggatacttcatatacatctcagactctaactcccaagtactgtggttttttcataagaccttgactactggagtctctctgttccttaacacttttagctctctcgccaagcttttgacaggttgttcttctaagtcacatcttcctaaagagggatagcctcatactcaatagcatgtgacaaatctggagtatacttcctcaacatagacacatggaacacattatgaacatgtcccaactgtcctggtaagtttaatcggtaagcgacctcccaaatcctctcgataacctcaaaaggtccaatatacctcggggctagcttatccttcactccaaatctcgttacgctacgcataggagtaactttgaaaaagacataatcaccaacatcaaactcaacttcccgtcgatggagattggcatagcttttctaacgactctgaacaaccttaagtctttcttggatttccttaatcttttcagtggtactagtgataatttgaggtccaatagtgacatgctcatctggttctgcccaacacaatggcgatctgcatggtctcccctacaaggcctcataagcagccatgcctatactagcttggtagctgttgtcgtatctgaattccaccagtgacaagtgttctccccaactacctccaaaatccaagacacaagagcgaagcatgtcttccaaagtctgtatggtcctcttagacgttccatctgtctgtggataatgggcagtactcaagtgaagttcagtttgttcagttcctaaggcttgttacaaggccttccaaaaccttgatgtaaatcgaggatctctatcagaaacaatgcttgaaggcactccatgtagtcgaactatattgtctacataaagtcgagctagctttgtaagcttgtaatccttcctgattggaataaaatgagcagacttagtcaaacgatcaacaatcacccaaacagcgtcatgcttcataggtgtccttgtcccacttccattttggtataggcaaaggttgaagtaaacctgagagtctctgatgctcagcctttac

SEQ ID NO: 222912 - DNA, 2390 bp, Cannabis indica
acatatctaacctcccgtcaagttccacagttaccaggcccgaaaatattttactcaaattacggtatctatgatacccacatattccaatataatatccgtaattaataaattacgctttatttattcttatttccctaatcaacttgtatttagtttaagtaggattataatcctactctaatactcacttaatcacatatttaataaaatatgtccaattaaaatattaatatattttccgggatattatagataaacttaccgtaatatctattcaattcaatatcacctagttgatatcctagatcaagataatcctgagattgttaggttctacttcagttgtattatttgtgttcttaaatttgttcgttaaagtcgaccatatagttcttctcgtgacatataggttaaggacatggtagttcaattgagtgggagcgctaatcatagatacagattctatagcttctatccgaatatagaagtcaaatgatgattcccttcgagcttggattaacagagataaatgcttgagtactcatttcagtggttatattagttcactggaatataatttataggtagctaagtgttttatggataaaatacattgaagggtgtaatggtaaattagttcctactcaacaaatcatctatagaggatcattaaaaaaaggaataatctcatagcatatctatatcgtggaacatataaagcgttctatataattgagagtgcaattcaaaatctatagtggtgcaaggaggaattaataagttatagaatttacttggtaaattctagatctgcttattggaagctcggttatataggcccatggtccccatactagttgaaacaaactgcttgtaagacttagttaattgattttaattaatcaattataattccaaagtaagactatgtctagtttatgaattttgctaagttatgacttgattgtgaagaaatagaattttagggtttatttgtcaattaagagactttatggagtctaattaataaataatataaatgacagttttgtttgataattaatttaattattaaataaatagttttgacatttatgggattgaaagtgtaaaaatggtatttgtgaaaaatagataaatgattgagaaaggtggcgagtgatggacccacatagggccgcccactagggcctatttttgctcttattttatcatttttttattccaaataattcaatcctaaccctaagagaattaatataaaaagaaaagaaaggtctcactattcaactaatgcttctataacttttaaacctagttttcattctgtcagacaactagtgttttgagacttcttcttcttcttttctctctactaatttcaaaattcttagtgttcttaaccatcaaaattcacgccttagtgattgagtgcatgcccacccatagcaagttagtcctcaattatattgtgtaagactgtgaagaatccaaataactgaagaagtgtcgggctcagatcttgattatactctgctacagaaaggatacaagggttagagatctgagtggaaggagtcatttatttccactgcaaccaatgtaaggtttctcataccttttatgtatttaattttatatcgtttcagaagttcatatttaggattttaaaaatatacttgttagtaaatctaggttttagtaaaataaactcgaacaactggcattagagtcatggtaattgatttactttcaagtaatttggacttaaatgatgtatgtgattcatgttgatctatgtgtttattgatgattgtttgttgtttgcaaattttttacgttaaataattagaattttgttttgaaattattttttttagatagtatgaaaaaaattaagcaatttatttttttctagaacttgatttcgattttatttgaattagttatgatttttttgaatatttgaaaatatcaaggggtggcatcaccccatgcccacgcggacaccacgtgacacacgggtgttcggacaaggcgtgtccgaagaaatacgcacgcggagcttgtttgaaccctattctgcacgcgaaaatcatgccagcagcctctttggccgagttttcttggccaaccttacttgcttacgcgcgcggatggtatgcagcgcatattatctgcacccaatgcaacgaaattttttttttcattttttattttttcatggaattaatttcgaatttttttgtgtaattttgtatctagatttttattttcaaatctcaaatctaactatcaaaataaacttaattaattttagatattaaaaatttttgaacttgaaaatggataaaatctgatattttgcttaattggttaccttattt

SEQ ID NO: 222913 - DNA, 1147 bp, Cannabis indica
aggaccttgggttgctgcattatattttgggaatcgaagtgtgcagagatgacactggaaggtttttgtctcagggaaaatatatagcagatttgcttgataaaactgacatggcacgtctgaaagcttgctcgactcccatgatagtaggaaaggcattgtctatacaagatggcacaccaatgaaaaatcctacagattatagaagtttaattggggctcttcagtatcttactcatactagacctaacatcagtttctctgtgaacaaattcagccagtttcttaaggctcctactgatgttcattggtctgctgcaaagagaatattgagatatttaaagggtacacaagatcatggcttacacatcaaatacagtgacagactaactcttacaggttattctgatgctgactgggcatgttgccctgatgatagaagatcagtagctggctactgtgtttattttggggattctttggtgtcttggtcatcgaaaaagcaagctgtaatctcaaggtccagtacagaatcagaatacagagcacttgctcaagttgctacagaaatcacatggattcagtctttactcaaagaactgagttttcctctgcaacatactccaattatttggtgtgacaacatgggtgctagtgccttggcctctaatccagtctatcatgcaagaactaagcacattgaattggatgtgcatttcgtgagggacaaagttctagccaaaacattggatatcagatacattcccagccatgatcaaacagcagattgcttgaccaaaagtctgtccaccaattcaaggttccattttcttattgacaaactaggtgtggtcaataccccacttagtttgagaggaggtgctagagaatgatattcatgccactggttactggttactctctgttacttgttaccattatttattcattactcatttgtacatgatttgtcaatcattgtaattgtacctcttctctctcttttcggttagtgtccaagtatattcttttcttttatttgatttgtattccaaccttttgggaatgacgcgtcccttctagattgtacaaagtgttgccctagtggatatataaatgaaagcataccccaaaagctcattgagct

SEQ ID NO: 222914 - DNA, 3040 bp, Cannabis indica
gcctagaaaaagaagttgggctcaatgaaacacaagatttggagttgggccgtgaaaaagtaatcatagtcaaggtgttaaaacatggacatctctaactcagaagacaatgatgttgcagcccaaaatgaagtctcaaaaaacttgatagaggcgggtgctggtttctaggcccgccaagtattatgaatgtgttgagttggaattaccgggggcttcggaaccaacggaccattcaattcctaaaagaaattttatttcaaaagagacccaattttatatttttgtgtgaaacaaagtatcataaatcaaaagtggtgggcctggcccaggctttgaattttgatggtgtctttgtggttgatgctaatgtggcttcaggtggtattgctttgctttggaaaattaaggaatcaggctctttgttgggctactctaataatcacattgatttgcaaatttccatatcacctacttttttgacttggcgtctctccgatttttatggagaacctaatagaaatagaagaagcgattcttgggcactccttcaaagtttaaaagactgttcatcactcccttggtgtgttatagggaacattaacaacatttttcgtcaagaagacaagagaggtgggcgtccatatccccagtggctttaactgagtttcaataaaccttgctgcattgtgggtttgaagattttgagctgcaaggtcatcaatacacttgggaaaaaggaagagccacaaatgcgtggattgagctacgtcttgacagagctccagtttgcacaacttggtatcaactatttaattcggttactctttctaatttgggttttgccacttcggatcactctccgctgtttcttgaacctattgtggtgaataattttgctcctagtcgtagattttgttttgaaaattcttggttgaaggagcctctttgttttgaaattattcgtgatgtatggtcccaggagcaaaatatcagcatctctaataagattaatatgtgtgctgagaggttatccagttgggggaaggagttaagtggcactctaaaccaccgtattaagatctataaggctgatttgaagaaacttcatggtttaagggatacagtttcagtttagagatatgctgaaatcaagaagaaactttatgatgcgtttgatcaaagggagagtttttggaagcaacgggctaaacaattttgcttgagagagggggacccaaatagcagctatttccataaggctgctagtagtaggaaaaaaacaaccagcttactcaactgagagatgaacatggcaattgggtctcatgggagtcggttttgccaatggttgtgtcaaattacttccatgaattattccaagcttcaggttgtgtgtgtgatgaagttattgattgtgttcctagtgctgtgactgatttggtgaattccaaactttttcaaccaattgaggatgaagaggttcgaaaagcagcttttcaaatgcatcctgataagagcctgggacctgactggatgactcctgctttctttcaaaagtgctggccaattgtcggagacgaagttgtcaaaactgttcattcttttttttgaagatgggttacttgctgatgggtgtgggaatgctaatgtggtgcttattcctaatacgagaaacctgtagcatatgtcgaatcttcgtcctattgccttgtctaatgtcttgttcaagattataacaaaagtcatggtgaatagaatgaagcctttcatggattcaatcatatctgaaaatcaaagtgcttttatccctggtaggttgatctctaacaacattcttgtttcttttgaggttttgcattaccttagaacgaaccgaaagggtaagaatggatttatggctttaaaactggatatgagcaaagcgtatgagcaaattgagtgggactttcttgaggcaatgttacagaagttaggctttgttgaaaattggattcagctcattatgaaatgtgttaagtctacaagatactgtgttacttgtggtaacaacgaagttggcccaattattccaacaagaggtataagacagggtgaccctttatcaccgtacctcttcattctttgtgctgaaggcttcactacattgcttcgaaaatatgaacaaagagggtggcttcatggatgtaaagtggccaatggtgctcctagagtctctcatatgttattcgctgatgatagttatctttactgtaaggctacagaagatgaggctcgacggatccaggaagtattactcaaatttgaacttgcctcaggtcgaaaagtaaatttccccaaatcttctatcttttttagtactaataccttgagttccatgaaagatagaatcaattctattttgggtatggtcacggctgttgaaggtagtttatatttgggactacctagttcaatggggagaaataaatcggttgctttgggtttcttgaaaaataaagtgaagaatagactcttggctatggtacaaagtttctatcaagggcgggcaaggagatattaataaaaatggtcgcgcaagcacttccaagctatgctatgagtgttttcttgattccacaagtggtcacaagagatattgaaggcttgatgtcaaaatttttgtggcaatcctcgagcaactctcctaaaggtatccattggatgtcttggaaaaaaactttgcaaacataaatctaaaggaggtatgggttttcgtaacttaagaagttttaacttggctctgttgggaaagcaaggttggagccttcttacaaaacccgatacgcttgttttagcaattttaaaggcaaggtattatccttggggttcgtttttcacaactgatattggtaataatcccaattatgtctggcgtagtgttcttgaagctcgtcaattagtgcttaaaggagttcgttggactgtgggagatggaacttctatctcagttttgggcgaaccttggctatgatccgtgtttcatctcaacatccaactc

SEQ ID NO: 222915 - DNA, 1568 bp, Cannabis indica
gggttggggtttgagtcctggtctgagtttgggtcagggtctgggtccgtgtctgggtccgggtctggattccactttggatttgggtttgggtaccaagtctaggtctaggtccaggtctgagtccaagtctgagtccgagtttgggttcgagtcctgagttctaatctcggtctgggtcttagtcttgctccaggtccaagtctcaggctccaatcttggtttggctttgggtctgggtataggtctggattcaggtctgtttcttggtctggatcccagtctgggtccgggtcagagtctgggtctcagtgtaggtcccgagtttgggtgtcattttgtgttcgagtttgggtataggttttgcaccagtctgggtccaggtttcgattcttttactcggtcaagttttaggtctgggtctaggtcccagtctggatcccaagtctttggtcccgatctgggtctgagtccaggtcatggtctgggttcagttcctaggtcccatgtctcgaatcgggtacagcacctgatcagggtttttttatggttctagtcccatgtcctggtgcgattttgattctgggtctgggttcgggtttgggtccaggttgggttctgagtccttgtctgagtccgtgttcgaatcccaatttcgttccaagtttgcgtctgggtcttggtccatgtttgggtctgagtccatgtcaacgttcgagtctaggcccatgtttgagttcgggttcagatctgggtttcgatcctactctttgtctgagtttgggtttgggttttggtctcgggtccaggtttgggtgtaggtcccgagttccgatccgtgtctgggttctggggccagggtctcgagtctatgtcccccatccaggtccaagtcttaggtcctgatgctgttctgaatcccggttcgggtccgagtctcgctccggtctaggtccgagtctaggtctcaatttgggtctgggtctgggtccgggtctatgtctcggtcaaggttctagcctcggtcgaggttcaggtcctgggtctgggtcttggtcttggtacgggtctacatcgaagtccgggtctggtttaaggtctgggtttgggtcctagtctgggtccgggtataggtcccagtccgggtcccagtgtgagtttgggtcacgagtcgcaggtttcagtcctgatctgggcccaagcccctatttgggatctggtctgggttttggtcgacttttggtcccaagtttgggtcttggtcccagtcctggtccggttccaattttcggttcaagttcgggtcagggtttgagtcctggtccgactgcgggtcagggtcttgatcctagtctaggtctaagttagggtctgggtctaagtcttgggttcaatcccggtctggttttaggtcgatccggttcgaattctggttctgatttggtgtcttggtttgggttcgggtttgtgtcgggcttcaagtcctaggtccgtatcccgatcttaattcgagtgtgggtttaagctcgggtcccagatccgggtctaggtccgagtctgggtctggg

SEQ ID NO: 222916 - DNA, 1299 bp, Cannabis indica
agccccgtcctcctccagatgctcaaaatcccgaagacgaggaagtggcctcaagagtcaacatggattctgaggagcgagaggaggccaacaatgacgaatacgaggaaaactttgacgagtataacgcctacgacgaaggcagttacacagagctgctgctcttaagacaaaaagctgccgatcatgaagctgagatcacagcccaaaaagaacaaaacaaaaagatgcaagaggtgatggtcgccatgcagaaagccatggagacagcagggatttatatacaccctaaggccatcccagtaggactcgaggaagcaccggaagagtcctctctaagcactcagaaacataagtccagggaaccaagccctatacggtatccctctgaagaagatcaacagaaaaatcctacatccatcctagggagaaagaaaaggtgtaggaaccacgaaaggtttgcttagatttcccgaaagggaaaggtccgtagaggggcaaactccgaaaagggagtcttggccctcaggatcgagaggaccgaaagagcgcttctctgcaccaagaacgcagagaaagtggaagagggagccggagatgccctctagttgacttaagacaccaaatcaacgaaaagcacggtgactatcgggaccacctggataaaaagaaacatataccagtagtctccgcaggaacgctgaacgaaagaattttagcagagttggcaacactgcgcatggacatcgctcgagtctccaagaggcaaaaaggggatgattcagactccgactgtgaggaccgggagccatgcgcccgacacatactagaagcggaactccctaaaaattttaggatgccagagatggcagcataccccgaggactcagaccccagcgatcatttatctcgattcaaccgagtaatgacggttatgagggtcagcaatgatgctaaatgcttatgctttccgctaacattgagtggttccgcagaagagtggttcaaaaagttggaacaaggatctgtggattgctggaacaagttacaagttagtttctggagacagtttgtcgcagcgagaaagatcaacctcaaagtcaacgccttaactaacatcaagcaactacccacagagaccttgaagaattttataaagaggttcaaggaagaagcctcaaaaaccaagaaagttgatgagggacagcagcttgcacttcttcaggccaggatctgtacaggaaccccattctggaacgaattgcaacaagaaggagctgctaacctccaggatttcca

SEQ ID NO: 222917 - DNA, 2857 bp, Cannabis indica
ggtccgagtcttaatctgagtttaggtacgggtttttcggatcccgggctgggtctaagtttgagtttgggtcccaagttcgggtttgggtctacatttgggttctagtccaggtcccgtgtttcgatcccagtctgggtccttgtcggtattatgttctaggtctaagtttgtgtccatgtctaggtccaaatcccagtctcgatcaagggcttggtctgggtccgagatcaagtcccgagttcaagtttgggttcgggttcgagtctcagtcctagtctgggttcggtaccaagtccgggattgggtctaagctcgagttttggggcttggttatggtctaatttgggtccgagtcctgagttctgatctaggtctgggttccaaggcctaggtccaagtcccccatccaggtccgagtcctaggtcccggtctgagtccatgtttgggtttgggtcctagtcctagttttgattttgattagtgtctcggttcgggtttgggtctggatttgggtcggggtctaagtcctagtccgagtctgggattggctttgggtccaggttcagatcccggtctgggtctggggtgatttcaggtctgagtttgggtcccgggtgcgggtccaggtctaggtctgggtcaaggttcatatcaggatccctatctacgttcgagttagggtctgggattgggtcctaggtctaggttcgggtccaggttcaggttcaggtctcggtccggtctgggtacacgaccgtgtctgggcccaagtttcgatctcagttaaggtctggggctaagttcgggtttagttctaggtctgggtctgggcccgagttccaaatcccaatctcgggtcttggtctggttcaagtctaggtcttgggtcggctcttgggtcctagtcctggtccttgtttcgttgccctggtccatatctcgattatgggtctaggtcctagttttggtctaggtttgggtcttggtctaggttcaagtttgggtcctagtagcggtttgggtttgggtctcggtctgggtttttatttgggtttgggttcgtgtctcagtcctggtccttgtcgtagtcctagtctgcttccagttccacttgcgattctgagctcaagtttgggttcgagtttgggtcagggttcgtgttcgtgtcagcgtttgagtactggtctgagtttgggtttcggtccgaatcttgttttaggtctggatcgggctccgggtgtgggttagggtcctgggtcttggtctaggtttgggttcgagtcccagtttttgatctctatatgagttcgggattagttttgggtataagtcttgggtttcgatcctgatctgggtttaagttcagatccgggtgcaggtcccaatttcgggtccaattttgggtttgagtccaggttcgggtttggtcgtggtatgggttcgtgtctaagttcctatccttgtttaagttcagggcaggtttcgactccaggtctaggtctgacttcagattcccaggtctaggtcaagtcctgggttgggttcgagtcttggatttagatttgggtctgggttcctgggcctaggtccctggtctaggtcccctatccaagtctggttcttaggtcctggtctaggtccaagttcgggtttgggtcctgagtcttggttttagtccaggtttcagtcccagtcttagtccgggttcaggttcaggtccttctcagggtctggatcctggtctgggttgcgggtctcaggtcctgatgaggatttaggaccaggtcaggtctaggtcccagtctgggtcccagtccaggttcgggtcccaggtctcgggtcccagtcctagtcaaggtctcagtcgaagtttgggttattgtttgggttcgattcttgtcttagctttgggtcttagtcacagttctagttctaattccgtgtttgggttcggttccaggttcgggtctgggtccaggttgggtcagggtccgagtcttagttcgagtctgagtacaggtttttctgatctcggtttgggtctaggtctaagttcgtgtccaggtttgggtcctatatctgggtcccaggtttgggtctgggtctacgtctgggtccaggtcccgtgttacgatgccagtctgggtattggtcggtatttgagtccgggtctggttcgtgtccatgtcctggtctgaatcccagtttatgtcaggggcttggtctgggtctgggatcgagtcttgagttcgggttcgggttcacgttcgagtctcaatccaagtctaggtctgggactaggtttgagcctgagtttcgaggctgggttctggtttagtttcgggtcccggtctaagtccaggtcctggtcacggtcccggtcctgttccagggtcctggtcacgttctggttcaagtttcagttttgggtcccaggtctgggtttgggtccatgtcctggtccagcttcgggtccttctctgagtcccaaatcaagacacctactatgggtcttgtccaagccctggttcccggatcccaggacaagatctgaatcctaatcacgggtcacaatctggtttcggttcatgtcccaggtctcgatctgggtctcagtctaggtctgagaccgagacttgcatgcaattcttggtctcgatcccaattctaggtcccgagtcctgttccatgttcgggtctaagtttaggtcttggttctggtcctgcatcccgattcgggtttggattcgggttttgggacccaatcccagggtgtgtttgtgtctgagtgtgggtcttggtccggttatagtttaaggtataggggtccaggtcctggtcctgttcctaagt

SEQ ID NO: 222918 - DNA, 994 bp, Cannabis indica
actcttctccaaaacgcttaactagtaaagtgatataggggtaaaatagtcatttcaaaaactttgggtattcccgacattctcaatgtctaactaggttgccccactactattaaaaatactaaatgtgattctaatagcaaaacgtcgagttccaatattgtcagacacaaaatatgcaaaaatataaaattctatatatcgcataaataatacaccttgaattcaaataaatcttcatgaaatgataaattctaattaatattctagttttataattaaaccctaattatctactaattctaaataaaagttaagaggtctttacactaaaacatcaattaaagaaaaagcacaaataaaaaatccaaaaaatcagtaaaagtacatagtcggaaaagaggacttactggttttggaatttgaagtcgacactgaagagtatctcacaggaaattgactgcaccaagggtctagtatatatcaggctcttttccttaaaaaatggtggtgataacaaataaatattagaaaaataatgaaggcgtagacacaaagagaagaagtagagagttttggtgctctttggtctttatgctaaaatggtgaaaagtgatagtaatgaggaagaaatgttttaacttatatgagagatgggaaaacttgcaagaactatttaatcgtactaattaaagatctacggttattaacttatgagggcagttgaaaggactaatgcgacgactttaaattttcttggtaatatgaaattccaaataacgttagagtaaaattttcaaggagagacttcaaaaattcctctgagactagaagtacttttgagggagcaatttttatacctatttttcgaccaataaatgaaaagatatagttacacaacacgtgtaaaaaataattaatgacttataaataataagagccagttagccgaataatgaaatgataaaacgaaattaagcacaacaatgttatc

SEQ ID NO: 222919 - DNA, 4886 bp, Cannabis indica
gggtctggattctggttcgggccctggttttgtttctggtccggggttgggtccctaatctagacactgactacgggttcgatccaagccccgagtccagatcctgatcccgatctcgggtcgcgttctggttccttttcgggtgttgggtcacgagctgggtcctatgtttaagtccaggtctggtgttaggtcttgggtcctggtcctacctccgttgccaaggtccctatcccgtttatgggcctagttcccagttctagtttgggtttgggtcgctgtctaggttcgggtttgggtcctagtcgcagttcgggtttgaatctcggtttatgtttttatttgggtttgggttttgggtctgggtcctggtcctagtcctagtccagttccagctccaattgcgattccgagttcgagtttgggttcgagtttgagtcggtcttcgagtttggattggggttcgagtcttggtccgagttttggttcgggtccaaatctcggtctaggttctaatcgagcttcgggtgtgggttagggtccttggtctgggtccaagttttggtccgagtcccaagtttcgatcttgatttgagtctgggttttgttccgggtctaagtcttgggtttcgatcccactctgggagcaagtgcgggtccgggtgcagatctaagtttgggtcttattctgggtctgggtctgagttcgggtcccggattcaagtttgatttttggttcgggtccaggttaagctttaatcatggtatgagttcgtgtctagattcctaacctggtttttgtccggggcaggttttgggtctgggtctaggtccgacttcagattcccgggtccaagtaaggtcctggttggggttcaaatccttgatttagatctaggtctgggttttggggcctaagtccctggtctaggtcccccatccatgtccggttcctaggtcctggtctgggtccaggttcaggttcaggttcgggtcatgagtcttggttttagttcaggtcccggtctaggttcgggtccaggtctctgtccacgtcttggtctgggtttaggttcgggtccttgttagggtctagatcctggtctgggtcgtgggtctcagaactcagcgagggtttaagaccaggtcaggtccaggtccaggtcccagtccgagtcccggtcaaggttggggtcccaggtctcagatctcagtcctagtcaaggtcacggttcaggttctggtctaagtcagttatggtttgggttcagttctggtctcaggtctgggtcctagtcatagttccaattctcatttccgtaatgggtttttgggatcccgctctgagtctgggtctaagttcgggtataggtctgtgtcccaagttcgggtatgggtctgcattcgggtccgggtctaggtctcgtgtttcgatcccggtttgggtctgggtaagttttcgggtccaggtctggcttcgtgtccatgtccaggtctaaatcctagtttaggtcaggcgctaggtcttggttcgggatcgagtcccgagttcggtttcgggttcacgttccagtctcaatcctagtctgggttcgggacaaggttcgagactgagttcagaggctgggttccggtctcgttccgggtcccggtccaggtccaggtcttggtcacggtcgtggccctattccaacgtcctggtcatgttcttgttcaagtttgtgtttcgggtcccaagtctgggtctgggtccaggtcgtggtccagctttgggttcttgtctgagtcccaaataaagaaatcgactatgggtgttgtccaacgcccgattcttagatcccgggacaagatttggatcccaatcacgggtcctagtctagtttcagcttatgtcccaggtcttggtctgggtctgggtctaggtccgggaccgagactagggtccagttctgggtctcgatcccaattctaggtctcgagtaatgttcaatgttcagctttaaattcaagtctgggtttgggtcctgagtctcggtttgggtttggattcaggctttggaccacaatcccagggtggatctttgtccgagtctgggtcctagtccggtgaaagttttgggtcttgctccaggtcctggtcctggtcctgttccagggtcccaatcggctactagtctcggttccagtttcatgtcacagcgtacgggttcgggtcgagtttgggtccgagtctgggttcgggtcctgatttgggtttgggatgaggtttagatctggggttcgatctcggttagggttcgaggctgggtccggttctgggttcgggtctgggtccaggtcccggtcccgttccaagatcctagtccggttccaattcaagtttcgattttggttcccaagtgtgggtctgggtcttggaatgtgcccgagacctggtttgagatcgagtttgggtttgggttctagtctaagtcctagatcctgacaccgactacgagtcaggtgcaagcatcgagtcccggatcccaggtcccgagggctgtcctaggtccaggtttgggtttgaggttaggtcccgaatcctgatccaagttctgatcctagttcggggtcccatgacctaggtctgggtcccctatctatgttcgggtcctaggtcccagtctgggtcaaagttcgtgttccggttcgggttcaggtccggtccgagtccaggtctcgatttgggttcgagtttgagttcgggtcccattcccagtttgggttcgggttttgggtcccaagtccgagtctggtttatgggtcctgggttgggccttattttttgggtctgggtatgggtttggatcccggtctgggtccaggtccgggtcttggtttaggtcctaggtcacaggtctcggtctgggtccaagtcctcgtatggattttggtttgagttttagtttagctttgagtcctgttacagtccacgcttgggttctagtcccagtcctggtccgattctcgttctgggtccgagatcgagtgggacctgaacctaggacccgattcccaacctagactcggacctagacatggatatggatacgaacctggactcgaacccaatcccagacacatacccagaaatggatcgaaacttgggacctggatccggaccgagaccaagaccaaaacctggacccgtacccaagacttggactcggacctggacccaaacctagaaccagattgggatccaaacatggacccagacccaatcctagactcggaccaggactcagaccctgacccagaccatgacccgaacccaaacccggacacgaaatcaatatcagaacaaggactaggacctgaacacaaacatggacccggactgggacctaggacccggacctagatagtgggcatggacgcgacctcgaaacttagacccagatcgaaccccgagactcagacccgaacttggatctggactcgaacccagaccatgacccatactgggatcggaaacccgaacttaaacttagactaggacttgaacccagaccgggtcctagactcgaaccgggacctaggacccagacctggatgggggacctagacctaagaccctggctttaaaactagcactgagacccaagacctaaacccgaacccgaactcgaaccctgaactaggacccggaccaggcctgggacccagactggaactagactaggacccgagactggatcctaatatggactcggggcttggacctgaaccatagtcgatgttttgatttggacctatacccgaaatcaaacttagacccagactcggagccaaacccgaacccagactcggacccgtatcccgtgaccccaaactagaagcggaaccgaaagcagaccgcgactcggaaacaagatcaagggactaggacccggtctcagtcctcgaactagaatcttactaggacccagacccggacgagacacagacccgaatcaaaactctgatcgggacttgggacacgaacccgaacccaaacacggattgggccagacccggacgcaggacccagatctggattggagactcagacctggacctaggtccctaacctagattgggtacccaaaactgaaattaaaaccagaatcaggacccaggattgggacccaagacgtgaccccggtcttggtcccagatccagactcggacatggacacggactgggacctaagatctgaatcggaacgagaccgggacccaagattgggatccgtattttgacccacgacccaaggcttggacccaatccgtagtcgatgtatggatcttggaattgtaccaggacccaaaataagagcaagaaccggattcgggacattggagaaggaattagacattgacccagaaccagatctagacgcagaactgaacacggacccagacccagactcagattgatactcggacccaaactgggatcgatactcagacccagacccgaactcagacccagacttgtgccaagacctgcgctcaaaacttggaacccaggacccgtgacccgagacctggaccagaacctagacccgtaccagaacccagatccagagccaaacccaaacaaagacccaaacctagacccagatttaaacccgaacccagacccagacccagacccggacccagagtcggactcgtaccaaaactcagactcgaacctgggactcaaactcgaaccaaagactcggacacggaccaagtttaggactcggacccagacacggactaagttcgggtcttagtcgggtcttgggtcccgttcctagttccattgcccaggtcccggttctggtctgggtttgggtcccggtctaggttcgggt

SEQ ID NO: 222920 - DNA, 1713 bp, Cannabis indica
catataatattacacatatatagaaaaaatttaataaataataataatatatatttagtttaatgaatagtaatctctacatttaattataagtactattccttaattaaggtaaaaattatgtaaattagctaaaatttagcttatttattttattttattttttgaacactgaatctccacacgaggagaacttacaacaaaatagccaaatctacctaaagagcacaatttggaatagagtgaagaacccaattccacaaagcactaactctagactctagagtatacttggcctaaatgatgagtaataaaattggcttctctaaaaaaaaacttaaacccagccaagccttgacttggaatgatgctcttgatgctccacaaaatgccatctaaatctccccaataagactcaacaaaagaagaaatgggggaaatagcttgagcacaatctgactcaatagagaaaccattaagcttgaggttccttcccatttacaccatttctttcatggcaacaattcaacagtgagactgtcaaagggcttgttaaagaacttaccttatcaaatattaaatattatttagtgtttgggtatagagataggttattcttagttgggtttggtgtctatcctagggttggatatcctccccctatataaagcatttttgttgtatcattagagaataataaaacatttactttctccttttatctctctaatatggtatcagactaagacagagaaaaccctagatccacttttcacgctgctccttgaccaagatccacttttcacgctgacatggctcgcacgcgcagtggactccctccggcgtcagctccgtcctcagctccgccctctggttctctcgccgacgttcctccacgacgcatcacttccgatcccgttcgtgaaactgtccaagaaccggttcacgttgccaacatcacctctgcaggttcttctccgatcgcagcttcagttgatccttcagatcttcctccaatcgtctctgagcaagctccggctcctccacctgtcgctccaccggtcagaccagcacctccgactgttactgcaacagtgaacgttggtggagttcctcttggaaatcttgctcactgtccagatcgtacatttccttcttcttcagccacttttggaggtccatcaatgaatcttgctgctcatcctcctcgttcttctactggctccatgtctcattcagagtcttacgatcgtcccgctaacaaagacaatccatatttcgttggttccggtgatcatccagggctcattcttgttactcctcctcttttggatcataatttccaacagtggcgtcgcgacttcaatctcgctcttggtgccaaaaataagactggcttcatagatggcatcttaccacaaccagatccgtccagccctttgtttcattcatggattcgctgcaaccaaatggtaatgtcttggattattcattgtgtttttttagatattaagagtagtataatgtttcttgatactgctcatgagatgtggtctgatcttactaacagatttagtcaaggaaatgaacctcttgttttttaacttcaagaatctttaacagatttacgacaaggagacgaatctgtcacttcctatttcaccaagcttcgggccatatgggatgagatcaatgagctctgacctcgtctcc

SEQ ID NO: 222921 - DNA, 3056 bp, Cannabis indica
tactttcccatagttgccttgtttcattcctggattttcctaaaactaattcccccagcagctttcaattaacacaatgtatcccaagcaacaagaccaagtccattagttacagcttaacccttccataaaaaaagccttgcaaatcgattctaagttcctcactactttcttaggaaatatcatcacttggcaccaataagcatgtatttccataagaattgaattaacaagaactactctagctgcaactcagagattcctggaactccatgttctgatccttgttgtcattttctcagtaagagcagaacattcattccctgaaattctcttagcagaaataggaactcccagtaggtaaaaggcatctctttcaatgaaaaactagatgttgcaaggatcctagttacctcatcacttggcatgttgcagcagtatatggctgatttttgaggattaggttgcatgccagatgaaagtgagaataattttaatccttgcaatagaaaatatacacttctaaactcacccttgccaaacagcagaacatcatcagcaaaggccatatgattaatcttgagatcagagcacctatcatggaagtgaaaatcatccttgttgccaatttcccccaagatccttgatagatattccatcccaagaacaaagagtagaggggacattggatccctctacctgacatgactactaaagtaaggtatggattttcttacttaaaagtaaggatgaagctcttaatacctttgtgaattggaaaaagctgattgaaaatgagattggaaagaaaattaagaagctcaagacaagtaatggtttggagtattgtttaggcatgttcaaagaattttgtgttaaaaaaggcatatcaaggcatcacacaggtccaaagatccctaaaaatggccttgtagagagaatgaacaaaacactcctcttaagagttaaatgcatgctaagtggagctagtttggaaagacagttctagggtgaagtagttaaaattgattgctattcgatgaataggtgtccctctgctgcaattaatttttttacacctcaagagaagtggaccggtagagctcttagctgtgatcatctgaaggtgtttgggtgttctccctatgtgaacataagcaggacaagctacaacctaaagccataaaatgtttatttcttggctattcagatggagtgaaagcctataagctctggtgtctaaaattaggctttaagaagtgcatcatcaatagagatatcatcttcaatgaaaaggaaatgcctatgaaaatgcagaagaaaattgatactcaagctgaggacaacaacataaggcttcaagtttaacttgacaatggcagagttgattatgagatgagaacagatgaatctgtatccactgaatcttctacatcttagggtggagttgacacatatcaactagccaaagacagggaaagaagagagattcaccctcctgatagattacggtttgctgagctaattggcttcactagtcttgcattatctgtggtagatgtgattgacattgtagaaccaacatctcaccaatatgatataaatagtagagatggtgcaaagtggcttcttgcaattcaagaggaaatagcatcgctaatcaagaacaaaacctagatcattgtaaggaagccaccaggatagaaacttgtaggctgcaaattgataatgaaagtgaatgatggaattctaaggattgaagataaaagattcaaggaaatgttagttgcaaatgggtttacttagagagagggagtaaactacaatgatattttctcacctgttgtcaaacaagcttccataagagctattatagccaaggctacaagttgtgactatgaaatccaatagatggatgtaagaacaaaattcctacatggcaagctagaagaaaaaatttacatgagacaacctaaagatattgaaagtggagatgcaaaagagatatgcttactgtaaaaatcactatatggcctaaaacaggctccaagataatggaacattcgttttgatgaatttatggcaagaatcaaattcaacaagattatatttgaacccccgtgtctactctaattgcaaagtatatcttctattgtatgtggatgacatacttctgattgggaaaagcatggcagaaatagaagtgataaagggtcttttaagcaatgaattttagatgaaagatctggaagatgctaagaagatatttggtatagaaatctcagggaagagacctgaaaagatttgcatatctcataaaacttaccttgaaaatgtattgatcaaattcaacatgagaagtgcaaaacctgtcaccattccctttgctgctcatttcaaactcttagaagaccaagctccataaactgaagaagagagaaagaatatggacagtgtcccatatgcaagtgcaattggcagtttaatgtataacatggtctgcacaaggccaacactagttcatggcatgagcattactagcaggttcatttatgatcttggagaacaacactaggaagctcaaaagttgataatgaggtatgtttaagggatcttaaacactggtttagcctattatgcttacaaaaagtcaaaggaagatgttacagggtatgtatactgataggcgagttttaggtacattttataaagtattttagaagtgtgtttcaattgattatattcattttgtacaaaattacgcttgttttctatttgtttcaggtttaaatggtaaaattcataatgtgaattaaaaatgagaaaaaaagtgttaaatgagatgaatatgatgaattatcatggaatttggagttctaggatataagtggtgaaaatttctaagttttggatgctcaacacatttcgtttatgattgaaaatcaagtatgaagcttcaagcaaattttccactatgatacattcactatctaaggaaaaatattgtgaaaatacacacaaatttcaatataggacgagagcatctatatggtttg

SEQ ID NO: 222922 - DNA, 1654 bp, Cannabis indica
ctgtcattctttcaaccaagatcacacattcttttcctgaaattttccttgcacaaattggtatcccaagatatgtacatggaagctcttgtctcataaacccagaaagttgtagaagcttattcacactcccctgatgcatgttattgcaatatatatagtcgttttactagcattggcctgtagtcccgaggtaagagagaagagcttgagtgcctgtagcatgtataaacacttgtgaaatctccatggctgaatagtaacacatcatcagcaaaagccaagtgattcagtttaagttccgagcatctatcatggaattggaaatcttctttctcccctatcttccccattaatctagagaagtattccatacccagtacaaacaagagaggagacatagggtccccttgcctaagacctctcctagattcaaagaaaccatctaaggttccattgaacataagagagaacttaggtgtagtgatgcagttcataataagttggatgaagcttctagggaaattaaggcctgttagcacttcctccaaaaagtcccactcaatagtatcataagctttctggagatcaagtttgatcaaacagcttggcttgtttgctttcctgtaataatgtctaaccaagtcctgacaaatcataatgttatgccctatgaatcttcctttaataaaacccccttgttattgggatattatttcaggaagaatgttactaattctagagctcaaaatctttgttacaatcttataaataacattgcaacaagctattggcctaaaatccttaacagaattagggcatttgcattttggaatcagcgtaattattgtagaattgatctcttcaagaatgtttcctgtttccagaaaagccaacactacaccactaatgtcttcacctataatatcccaattgccttgatataagctactcgagaagccatcaggaccaggggatttagttccagggatgttgaatgcagctttcttcaattcttcatatgtaaacttctgtgttaggacacttgcaagtttcggagttagtacaggtcctctagccaaaacacttgcctcaactttgcttctcttttctaacttggaacccagtaatcctttataaaattcaagaaaggcctctgtaatctgattagggtcatgtactctgtttccatcttgtctttcaatagataggatatgattttgcctcaatctctgtttaatgcaagcatgaaaaagtgttgaattacagtctccttgctgaatccaatcaggtttagctttttgttgtaagaaggacatgtagtctctctgcacccttgttagcttttctctgagtgctttttcttgtagatgaagcttaggatcaagaggatgtttgtgtatttgactctgaagaagatctagatcctgcttaattcgaatgacagcactttgcaaatcagaaaaaccttctttgttaatctccttgagtttcactttaaattgcttcaatttagtcactacttgaaacattttagatcccatttcatgttgcttccacaattctttcaagtaagtgtttgctctaaagatttggcggcattatctctatggagagagatgtgaaatttttactgaccataaaagcctcaaat

SEQ ID NO: 222923 - DNA, 1639 bp, Cannabis indica
tattttcccaattcaaaatagatttcttcgaactctttatacaactcttatccctttccttgacagtgtttcaaggtggcgattcggggaccataaacctataattttaagctccaataaactagattatttattaagtctcatcaaccaaataatctcttgtttaataattccatgagtactccactataaatatagaattgcactcttagtaattatagaattatatttactgagtttaactacagtgtccattgctataatcaattgcagcgattagtcctctatattttagttcgtaatattttggccaaaataccactttacattttctaattatttatttacctttaggtccattaattcactagtagaagtataattcaagatcccatctgaatttatgcacaatatttcagttccagaagtaacacttaaagagaaccaacattcgatccgttagaaaaattaggattctataattgtacatcatgcccccagccatccatgttattagaatcccaaaagagaagttgtaataatcatattctctgagaaactttaacgagtgaatcaaagaaactaatagcatgaacaagagttcatgataactcaagatttaggtcgatctactattgatcatcgttatgatatgaatcatgtctttatgataaacaacatgttgataaagacaactttattcatattggtcctcatcatatataatctttattatatatagtacattcacttcgatgtcttactacatccgtaatccaaaccaacattacttgcatcgaagaacggacatcagtgacctatactagcaaccgttgatcaaagattttataactttaatatgttgattaaagattacacttggtgattgtcattggcaatatcgtcaaccagtgcaggatgtaccctcctgctattcatagggttagatttgtacgtgtggcaaataactgccaacacacaggatgcctgttactataaccattaccactaacaaaatagtcaataataaattaagaaaactctttttaaaagggccctcacgaatccacgaggtgttaccgtttgagtccatttcgaaatatgtcacaaaaataattataattaaattcatatttaaaactacataaaattcaaattaaactgagtttctaggttgttaattaaaaaattttagacattgagagaagaattcaaactgaaagagtagattctataatgagatgatgatttatataaatattatacaagctgaaaactactctaacaactaatagttaatagaaaaattaattgtcataagaatataagaaaaccattaagttgtaccaaagagaatagatcaatttacttatttggtacataaaagtgagtagtttatgtaagaaactctttagttagccaacatgactatttttttctgacagtgaaattggatataaggaataccctgaagttaatattaattaataaagcataatttagaagggtggtctcttttcttggactaatactactaactatcaaaaaattaaattttactcatcaattgatggagcatttaagaaatcttatatgcttctcttcatttcaccatttttttctcaatctctctctctct

SEQ ID NO: 222924 - DNA, 3216 bp, Cannabis indica
catccatcgcattttccgttctcgccgagcaaaaatattaaaaataacataattcacatataaatcaaataatgcccctagagtttaataaaatctctagaattgagaaattataactctaatactcatttctaacaatggggcccacaaataattaaattcataaataattataaaaaatatcagaaattagtgctaattgtctttactaatccaaattactaaagcggtcattacaatcacaatatgtagggtgaactatatataaaattgtggtgttctctctacttttttttttctatatttttctatttaccgctatcgtttatcaaacaatacggccaaagttgactacttttcagcgtcaacagctgcgatttgtgaggatgctgtggaggctgggatcattgactttgtcttgcaaccacagtctacgaatttggttgcacactttataacaaagattgccttactcgacaatgcattttttgtgtgggaaggaggagttcctcctttggatactgctgctgttatggcagatttgcctctcccttaatgtatttggcttttattttctatactaaaaaaaatcattatgcatttgtttttttaaaaaaaaatctttatgtatgaattttgttattcttgattaaaataatttaaaattagaactaaaataaggaatcaataaaagaatactaattccaactaatttttttttagaataattacatctaaattcgaatataacaacattcaataaagttgcactatatttattaaataaaaaagttaataaatttaaacctgtatatatatatattaaaagtaactatttaacagtaattcttaatttaatgttttattttattttttttgttaaaattaaccctacattttaactctcaccttaacctcctaaaaagaatcaaatatatatacatatatacataaaagtcaaatcgtaccatgtaagcctaatttcctacccaaaaaaaaatatatatataaagtgaaaccagtttgtctaacttcttccaaaaaatcgtaagtttgttaaaagcctaattctcctaaaatggtaagtttgttgatgacaatgatataattgctatttccttataaaaaaaaataataaagacactcaggaacgggcatgggtgaacccacatagatgcgagaggaagcagtggtccccttaaaaaaattgagaaaaaaaaatgtatgtgtatttagttagttacgacatatatttgtaattaaatgtgataaatgtaaatataataatagctttgatatgttaattagattatttcacacatgctatagaagtcaatggttcaaattctaataaaaacatctttagtttagtatttagtttactttttgcccccctcacaaaaaaagtatccccttatcaactttagttttgggtccgcttccttccttttgtcgcatttcgctcaaagggttgaagggagatagtgcatcaagctgttcgcaaggggtctccttccgaggggctcgagccatgagtgagataccactctggaagagctagaattctaaccttgtctcaggacctacgggccaagggacaatctcaggtagatagtttttatggggcataggcctccccatctatcctcctgaggagaagtttggtttcaaaccctggttcgaacaggagcagtatcccatgctaatgtgccttggatgatgcacatctcaggatcaggcgctgatgagcacattgaactatccatgtggcttagagccctcacagtccaggcacaacgacgtgaaagctcctctcttctgcaacataaactgtacatcccaaaatagatatggttatattgcaaaatttgtgtgttgccaaattagcacgtcgccagggtattgcaagtaatatgctgtattttctgttgaatcagctatttcagatggtaagataaaagtttaaacaagaattttgttcatctttttctgtattagaagagttcatttgattaacattttgtgttgaataggtttatgtgcatgtgtatagagataacaaagttgtaccgcaagatgggtttcgaggtaaactatacaaatttctattgttaatttatttgtactcgtcttaaatcatggtcttgtattcatgctcaattcttaactctcttatcagttagttcaaatggcaagctctcaattattagaggtgcgaacgttgttgctttatttcaaatcttgaaaactatttgattcaaacttcatctcatggtgtaaagaaacatatcgtgggtgacttgtagaatgtttagtggctgctatcccaatgaatgtttttggccattatctttaatttgcgatactttgaacaatattcttctatattttagttttttcttttatgtaattttcgcaagttgaaatggaaaataggaaaagaaaaatagagaagttgtcatttatatctttttcatctctcgaacaattgtcttaagcatttacaagatcatatttgatgcaaaaatcatataaaaaattggttatgtgtatttttattatgccaacaaattataacaataagacttaacatttttgttttatttttcatcaactttgtaaaaaatctaatgtaatcttgtttaatcactgtcctagatctacaaataccaatgcccactcacaagctaaactatgcttcctatatttgatcaagctaggtttggttaccatgtttaccattgttttgggctgagatgaaaaatcactatgaactaagatgcaaaataactctaaatttggaaactaagttagtaaattagttaatttttaaaaaaattaagaaaatgaccaaacataataaattaactaataaaaattataaaaatacatttactggatattatattattttttttaaataatatataataattaaattaagttatacatttttttagaattacatataattatattgtaacaaaaataaataaatatattaaatcattaaatatatacaataacatttgatatatcgtatcactgaaaattaatatacggtagtgataaaattatatactataaaaaattataataatattaaattaatactcaatatatatatattatgctaacaaaattatatataccactattaaaatatgtatacataccaaataatttatatataataaaatagaaattaaatatcat

SEQ ID NO: 222925 - DNA, 2290 bp, Cannabis indica
tgagtcttacaagcaatattgtctcaactagtatgtggaccatgggcctatataccgagcttcaaataagcaaatctagaatttaccaagtaaattctctaacttattaattcttccttgcaccactatagatttagaatcgcactctcaattatataaaacgctctatatgttccacgaaatagatactctatgaaaattttaaccatcgttttaatcccaataattaaagatcctctacagatgatttacactgagtagggacaaatgtttcacccatcaatgtattttatccttaaaacacttaggcgatccaacactacttggtgagatcgaaagatgtactcttggtcatccatccattttagtagtttgcatctctgctgagagagtacatcgcaatcagaagtgcgtggttcttcaaggaatttgcgtctctactgagcgaatacatcgcagtcagcagagcgtggttcgtaaatttggccgacttggtaaacaacctctttatgtctggtaaactcgagatcttctcccaagtccacacagcgcataccaatagtaggctcgccaattccttgtctcgtctctcctgcatagtactgaggatgaaactcgattgttgttcttggggggtgccccccatggagtcttccttcagatgaaggcatctatggagggtcctcccttagaggcaggggcctaccacttgtatccaccaggatgcctatatcagtctgaccactatagagtcctaccaggttaatcctggtcacccaaagacctatagaggaggtctggtcacccaaggcctgcaagatgaggtctagctgcccaaggcctacaggatttggtaggtgaaggcctgcagacttggcaggtcactatagctctgcaagaggaggccagactcgtgggcgcctattgtgctggcaggatccaccacatcttcagtattcatcaagattctaattgtgacaggaacctgagtatctgttcctacaatctgtgggtcttgagggagacccaatgatgcagatggaattatagaagttcttctcgtgttaaccatggcattttgatcatatacgatatccacgctctcaatgaaagcaccaaactattaacctcaaaaagtgatcaactgacaatggggtcataaagatctaatgcttgccacgtgttacacaaacatgaatgaaaatcaataaacacatagatttgttatagaggttcgacccccttatgacaacgggtaatgacctactccccttttggttgtattgatacctaaagataatactattaagatcgctataggtgagatctgatatagctctctataaggatacaaaacatgaatcaataggtagatctctaatgtgagttagaatgccttagaggcgtgtgagagatgaaaagaggagagaccccttgggggcgtctagcaagagagagagagaaagagaggcaggggtttctaacttagagtgatttggaggcatagtgacttaggtttctaggctagggttaaagcctttatataggaggcctaaaccctagattacagtttaaatccctagatatttgcatgggttgttagataattaccaaagactaaagtgcccttgaatctacaaattagttagctattatcttgggcttttaagtcccaatttgtagcctaattagccgtccacatgtagagttgtccaaaaattcctgtcgggtcaatcttggcccacgatggtcctaccaggtcaatcctggccgaccatgctcctaccaagtcaatcttggccggccatgctcttgctacggtctgacaggttatgttcttgccaggatctggcaggtcactatagcttcaccaagaggaggccagcctttggatgtggaggccagccttatgcaatttgagcatagctttgtaaactatttccatgtacaggtcagattcccttggtcgaacggaatctccccttgtccagaagtcacttcttgggcaaccagcttgtgcacagatcctggccggcctataggctcaccttggctggcctataggcttctcttggctgaccaaggatgttggtatagctccttgagggctcgcttcactccattcggttgttgcttgatggtttttctatatcttgcatggaggccctgttctgctattggcaagggtgtactccacctgtactctatctttggattatatggacatgccacattaggtggacaaaatttagggtaacatgaagaataaaaaatcgaaagaggaaggata

SEQ ID NO: 222926 - DNA, 2366 bp, Cannabis indica
atcagagagatgcgaccataggagtacctctccaaaggacactaggagatgctaacgactctaataggagggcttcaattcaagttatttgggttttatgtttatatatatactagaagaattgttgatgatggaagacttcgaagataattatgttagtacacacataactttggacaatcttccaaatagaactcttttaagttgagggaagaatactccatgttcagtgaattacttttcctttcactcatgaatattttaaaaatgcaaaatttttaaagattaaaatggcttacacatgaaaaggccattagagtagaattcaaacttactacgatcaaactgttgtatccccgaattttaagctttttgaggtatagtagttgtctaagcaaggagcaacaacttcgacaaaaatgcagacacacttttactacattcgaaagaaatatgatatcctaccaattggagaatgttgtacttctctgtatcttagttggtgtgaggttagaaggcatctaatactttcatttctttttgcaaatcatatgtgccaatggcaccaatatcctatctcaaaattagcccaataaaatacttcaaccaatgaagacagtcaaaatccaatgaaatataatatctgcaacaattaaacaaatactataaaagcatgattagtttattacaaatagatacatttgtttatgtaataccaacttattctagatccaaaaatatgtatgtaagacaattataattgtagagaaaatattctctgatacgaacaaagagaatgtttatcactgaaagtttacaactaaaaatagttcgtgtcatttggaaaaaaatgtttctaacaaccaataatacttacactaatcatatatacaaatacatacccaaatattctaaaggtctactcattccttaatggttttaaaaaattgcatagatctaatagttaaataatcatcaaggtcagtcaaaataaaatcaaaagattcatcttagctaccactataatatattttacagtgcaaaaccaattgagcaggaaacttacaatgtgattccaaacaaagtattttctaacattaaataatttcattttactatgaaatctttgataagattacgtatggcttcttaaaatttattttatcctcaacaaagtaattcattcaagttttccaacagtcactcatttaatttgatgcaagaaactcattatcaagttgaacaaataccaaactaaaaaaattagaaaaatcagtgtgtttttttacttaccaaattcatttcatgctgaattctccaaagacaatgaacatggtaaaaaagattatttgatttcatgtaaatactgtcaaaattgatgtgagaataatcattaccatttaaataaaggactgcaattttttattttcctttcaataatcttgtaccaaaattattcagagacaatgcacaaaaaacagaggagcacatgtacaaagtataataaatacatgtcatgaacaatgtcatgaaatagataacaatgacatataaactaatcaattgaaagccattaattttgtgagtgttgtgagtgtcacatgtgtgattaagcacataggcaagcataaacttccagataaataaatgtgcacctacaaacatgcttgatgtgtttaaacgaagagaaaacattctgattacgaaaagccttaaatatgaataaactttcctaatgtatttgaatctggactaagtatagttttaagcatttaacattttgattgacacatgcataaaacattagtaaatatttttctaataataacactattacgcctctacttgttagttagatttttaaatacttggtggacatcatcagaagtaattggctttgaaaaatcagaagattcctgcaaaagaacaacttcacattgagtcttctatacaaagaaactaagaaactttctaacatcaacacctatgctacaataacattaaataaaaatataatagtaatctgaaagaaaaggaaacataccaggaaattgcgaattccattcaaattttttatttttctacatcgacaaaattattaagtagacttcactccactccctcttggtttacatctgcaaagaaccccttcagctttatgaaagaaacactggcttcctatctgtagtaaccagcaaatcaatgccaaacaaatagaatcaatattaggaaacaaaaatagaaattaaaaaagaaaaagatttgaagacatgtgaaaatgaggatgaaattaccttaaaaaaccatggatgcttagatcaaaagccaaatgttagaaatttaacttacccatttcgattatgatt

SEQ ID NO: 222927 - DNA, 2286 bp, Cannabis indica
catacatatgtaaatttttatttttatgttttccatatgtatgacatatccgttagaatgatagttgctgtacatagggttggatcttgatatcgtgaatgtatgtgttttggcaattcaaaaagtatgaaccaatgctaccaacactagtacgccagattactaagtgcatatggtattatggttggttatactttcgaaagcatgaactagtgctaccaacactagtacaccaaagtactgagtgaatgtggtattatggctagttgtacctatagtatgaattgatgctaccaacactagtacaactagagtactgagtgcatgtggtattatggtcaattatactatggtcaagaacgttcgagactcaattatacatgtttgcatggtttatgacttgttgataggtgtatgggcacttagtcgtaggttagttatatatttatgttttatgtttttcttattgagtttgttgactcgcagattctatgttatgtgcaggtaaaggcaaagctgttgttgaacgacaatgagttttgagctggatgaagattgtatatatcgagacagttcgacctggagtgttggatcttcgggacaactaaggctcacgattttgtagtcgttgtgcgacatcttttgattatgtaaagttgaaaatatagacagattttataaatgtgatacaatatatgtttatttattcaagtttgaattttatcacttttgataaatcctttgattagcaaaggttgcacagtaatatttaaaagcactgtagcacgcttaaactagtagggtgttacaattttggtatcagagccgccaggttgtctagtagatcgtcaagatatgtacaatcatcatcagatataagcttgactaacggtttagtaagcctttacatgttttagtagcttattataattagaaaaccaagatggaaaatgttagtgatatattgattaattatgtgcgtgtctaagatctcatgtatgcagtcttaagtttattatgttgaccactacctaattaagctaacttatgggttcataggctactatcatatggatactaggagaaatgtacgaagttagggtaatgtagtcagaactagtggcggtcaaggccaccaaggatcacctcctctccgaggccaaggtagaggtcgtggataggctcatagtctgggtaattttaatccaccactagctccacaagattgggagcaaaggtattctgagttgtaggctagaatacaacatgatgaggagattgttaggctgaggcagcaaggccttcaggttgctcctcttcctcgggttggtattgctccagtaccaatattgtcagcagaatatcctatagctggcaacaggttagtaccactgtatgagtgatttcggaattagggacctccgatctttctaggaggccctgatgttatgaaagctgagtaatggctaacaactatgaattagatactcaattttatgggagtcatcggtagcgacagagtggcctgtgccacatttcagttccagggatatgccttgatatggtgggagttagtatcgctcacacatgatgttgctgttatgaactgggacgaattccaggatctttttacctccaagtattatcatgaggctgttcttagtgcaaaacggaaggagtttacacaattggttcaagaagaatcaatgtcagtgacaaagtatacgaccaagtttgaatgactagccagatcagcctcaggtatagtacctatagattacactaagaaggaaaagtacctgggtgggcttaatgccaagatccgtcatgatttgacaattatagccgatgatgctaccccatatgcacttatggtacagaaggctcttcgagggactcagggttcttgtggagtcactgctttgactccttctagtttgggtaggagtagtagtgattcaatttttgattcaaaaaggaagactcctttcacaccaaggaattctaggcagaataagaggttcgcaggaaccatggtcggagtggtggtcgtcggcgtggatttatgtacccagaatgtcctcgttgtaagaaacatcatttgggagaatgtaacaagaattcgtgcttccagtgtggtaagatgggacactttaagagggagtgccctcagttgacatggggagagccaaagaacgagttcatatccactcctgctcgggtatttgccattacacatgctaatgctgaggctagtccatcagttgttataggtcagcttttcat

SEQ ID NO: 222928 - DNA, 1462 bp, Cannabis indica
taataaattctccaatcacaacatctatccttattcttgttataattccagtaacctttgataaaatcctttcattttacaaacttgtcctagaactcttcggtttaaagtattcactactaatgtacttcacaaaatggtagaaaatcacaccattaaaatttcaatcagctctaactatcaccactgtttcccatttaaattcttccaaaagaaatagtatttgaggcttttgtattccgtatagacttcacattttcaccatacaaaaaatgtgcccaactttcagtgcaaaacaattactaccaattcaatatcatgactgaaatatcattactcacacttcttcaatcgtttaatagcataggcaataatcctcctagattgtatcaaaatataatcggatccttgtttgaaagtgtcaacctaaatcgcaaatttctcctcatcgaccgatagtgttaacattggtacaatagttaacctttgcttcaattcttctgccttaactcccttaagagtgtaaacatccctcaacatatatattctatagaattctgtcaattccagaaaacttctaatctcagttgtagacttaagttaaagtcaactctgaaatgctttattcattgtcaaatttatcgagatactatctatatccatttcatgctccaagaaacttacttaaagtcggtaaatttgcatccctacaattagcataatgtttaagctcctaaaatattacaatatcatcaaaaaatacctctcaaatgccttatttgatttgaaagaaatcaaaatattaataatgataacattcgcgaagtcatcgagtatgaaaaactgctttggaaataaccttctcttaaatcttcaacttgtaataaccaaatcgaagaccgatctcagagaagatggtacttccctaaaattaatcatcacaactactatctttaacaaaggaatacttactcttcatcatgaatttaattaatttccaacaatcaatactcttttgtaaagtttcatttttcttcttcacaataaagctggcatactccagataagggtactcaaaccagaaatttcaaactcaacattttcgtacaacggaactttcacccctttcaattctgcaattactatccagttcaaaactttagataaaagttgtactcccattgtcacttcaattcagaattaatttcccgctttatcaataaccatggtggctcttctgaaaaggcatctattaacccttgaaccacaagattgtgtctcaatctcattgatgttccctttgcaatatttgctgcactaattgagaggttgatacatccatcccatataaaccttctgtcttaaatgctgtagttaatggaattcggaatccttgaaccttgctcacatacacaaatgggtcctcaccttctgtttcgaagttaccatctttctttcacaa

SEQ ID NO: 222929 - DNA, 1746 bp, Cannabis indica
tcatcatcatcatcgtccttcctacaactcatcatcatcatcttcatacctttcttcttcttgtttttctcatttgtagcttctgaaactaatacgttggcaccagccttatatgtgtttggagactcaactgtggatgttggcaataacaacaactttgataccatttctaaagctaatttttcaccttatggcatagattttgacgatggagccactggtagacccacaaatggttacaatatggctgatgttatcggtaagtaataattaaaatatatttattcaatacaatattaaattgactctttaaactcgtgacttcgtggtcactagttacatgtatatattatttgtttggtacaacaataacaactatttccaattgcttttttttcttttattttaaggaaataaataaataagtctttttccaattgagaaataagtatttattgggtctctttattgttggtatgcggttgatgttctttgactaaaaaacatgttatgattatataatttaattaattaataataataataatgcagctttgtcacttggattgaatatcccacctgcaatcagaagcgttgatttcaaatcatacgattgtgatcatggttttaattatgcttcttcctcctctggaattcttcctgatacaggcaccaatatggtatttatattataagaacattattcaaattaattatgttattatatctttatatgatatagattttattatgacattaattaattattaatttcagaaaggtgttatgagcttgggagaacaaacagatatgttcaataaaacagtccatgaatttttgagaccaagaatgaaaaatccaaccgatctgaagaatcacttatcaaaatccatattctttttggttactggttccaatgattttactatcaattttcttatgtccaaaaatcgcaccaatagtgatcgtttcaacttttccaaacacctcgtccaaaaatatgctactcaattacaggtacatatctctctctttatattatatatatcataattatgacgtactacatttatattgtagttttcttttttagaataatagtcggtgcaaaacaattagatcattaaatgagttatggtggcattaagtggacatgctcataggtgcagaactgataggattactctaataccatgttgagaattatgggttccatcttcttttatatgacttataaatattttaccatttattccatatgggacaatgtgctaaaattaatattgatatagtcttcgggctagaaagattttgtcaattaccattaacataattaaattgtagttgtttatatatgtgttttgagagtaagaagtcaaataaatatataaagttatctagatgcagtatgaaagaactatatacgtacactcaatataaagctatatatattttgtactttttaaattattattttcgaataatctttttcaattaccattgaaaaacaatgacataattaactaacttgtttgtagctgtaggttttggataagagaatattcaacaaatataataattgtaaagtttctagatagaatggaaaagaaatgcatgattactttgtttttgacatttactttcatttggaactattattctcatttaccatttaccaaattaattattaattaagttatacaaatataacataaaatattgattgtagtttttttttttttgggt

SEQ ID NO: 222930 - DNA, 2004 bp, Cannabis indica
gtttgtgtaatgaatttcacatggtataataattcaaaaattaaagatgcaaaagataaatatttgtaaatttttttcattgggacattaattttaacgcattgttgaggataacccggccgctagaatgacaacactaacataagtgtagacaaatacccactctataattttgatttcaaagcaaattttgctctcaagtcaattcgagtaaggttgttctctgaagaatagctgcatgttcaccttgattgcatgcacaatcgatatttttttttttcattgtacgacacatcgatgtcttttctctttcaaaaaaaaaaaaccattaatcatttaaaacacatcaaccttatttaaactcatgattccaaaggaaagaaaataaaatagtacaaatgaaaaataaaaatgataagaagttaaatagtaaaaatgaaagaaaaacaaaaaataaaaacaaaatacaaaaaaaaatagagaagaggaaaatctagactccaggacattcttttcatttatattcaaaaaaccaatcaataaacaaagtaacatctttcaagaaataaaaaattatgcagagtttaataaaaattatataatttaatactcatcgaccaatgtactttgatacccttttattgaaattttgagcaataacatttctatgatttacttctcttccttctcttatatcatttaaaccaaacatatatttttgtcagttttaattcttgaatattgaattaagagaagaaaataacaattagagaaccatagccagcatggcttttgatttcttacattgctatatgaactaattatattttcaatttgaccatatataccaaacaaaacacacactcaaattctaaattgtcatagacaattttaaagctagaatagagatttaatatagttgtagcatagcaaaaacttaataacaacaattaacttaatcagaaattgaaaaagaatgaaataaataacaatagaatttaaccttagaatcgctaagtatcacattactccttggcctcaccatccatatatccttcctccttcccacttccttcaagattctttctcctttcctttgacccatccccaacaaaagtgtcaacattcaagatttcatgccggaaggatccaagccagagaacttcccttgtttcttttatattaagccaaacataaaaataacaattagttgtgagattataaattaccagtagaagatagaataaaactaggttaattatgtcttgggtaattatgttaaaagtacaaatgatgctaacattagtattaattcataaagagacaaataagacagtttgtaatcttaaaccagtacaaataaacttacatgcttcgagacagtgttgtagagcaaatcttttgagctttatcactttttggtaagtcttttccaacctgaaaaaaataaacaaatgattaatcttccataacaaataataaaaccagagtccaagcaaaaaaaaaaatgaataaataataaaaccaaaaggagaataagcagagacgcatatatagagtgaaatgatcaaaaagaattaaagagtaataaatagtaattttaagtgagtaaattaatgtatgaaataagaaaaatttataaaatacattcacagttattactatactataattgatcatatttggaacgttaaagtttcacttttgttgtgtaaataaagggaaaaaataaaaagcacacataatcaaataagagatactgaataaaaagaattaagccattaaatatgggagaggagagatcaatttttaaaaaattacggaaaaaacaattaatgtgcattaaaaaacaatggacggtacaaatgaatacaataaatatttaaacatataaaaacccattaaaactaattaatgagtttgagtaatgccaactaaaacacaaaaatagaataaaaatttaactaaaacagaaaaattaggagaagagatattaagaaaaaa

SEQ ID NO: 222931 - DNA, 3172 bp, Cannabis indica
aaaatttaatgatttggatcaatcaaaaattgtcacgtgacaatttacttaggtatttatgctataaatttaattttttctacatcaaaaaatttatgctaataaataaatcatgatcatcgagaaatatgttgatgagtgagggaaaatttagaatatatattatatatatatataaaaaaaaaaagtaaagtacctaaagagaatattgacaataattaataatctaccaagaaatatattataaaatatagagagaaaaaaataccaataaaaaatcgaggctaaaatcatgaataattcaaagttatcaatgatggtgaaattgtcaacataaaaaaagtgtatgtgaaatattttgatgagtgaaagattaaaaaaaaatagatgatattaacaataattagtcatttaaaaaaatatattataatgtatagaaagaaaagaaatactaatagaaaatcgatgccttgatgttttctattgatgtcattgctactgtttattattcgtcgaggtactctacacaaacaaacaaaaaagatttaaaaaatatataagattagagaaagattgtacactaaaaataaaatataagaaaaaaatagaaaaagaaaagaagaagatagaaaggaagtgagatagagtgaatgtgataaatatataagtttaaggttatatattattttaaaaattagtataaatttaatattagatatttttattaattaattaattcattaatatttataaattgaataaaaattaaaaagtgagagaattaataagagaatagtttagattgtttggagtaattttagaccgccacgtcactgcctcatacttctcctttatatatatatatagatttgactaaatttaagtaaaattttaatcgttttccgtgaagctcaagagttaaggagaaatttagttcaattttttttctcttttattttgattttatgggtatatttttattttctgtctacatcgctaactacccactctcttataactcatgatcaccttcattcttttctcttcttttttattaattttcttcttctttatacttttttttcttctaaaagttcaatcattttcagttgtcagaacgttttctaggattttcgagcatcaatgaccaagactaagaatgcccaaccctcaaagaggatttctcatgaatcctcttttgcctcactgtcgtccccacttgcgtcgactgctccaacaccatccactattcctgcaaaaactgcccagaaatcaaagaccccagctcgaaagtccaccacacctcgtcgaagtctccatctcctaaaggtgttgctaattttgagagagctattgtttctttacccatggtaagttctcgaacaatatcaaagtcttctactccaaaaaaacccgagtcttcctcatctcgggcaaagaatctcaaggaatacccccttccatctcttcatctgattttgaaacagaagaaaaatctgagaatggctatcaagaatcagaggctaagtctgattcacgtgaagagattttaccaaaagaaccatcaattgttgattctggctctgagagtgaagttccaaaagatgatcttattactgtagaactagttcttgttcctgttgctgctcaacagaaagctaaaggcaaacgactcgtggtttctccaaaacttgttcttcgtcaaagaaagaaaaagatccttttagtattactcttgaaaactttaagactcatacttattatttttgttactatgataatgatagagatatgaaattttatgagggaaggtagtttactacggagaaaattttaatgtgcttgctcataaggcatttgggttgtttaatagaaagacaatggttgaatactttgatcgtttttgatggttacgtgggtcaaattgtgaaggaattttatactaacataactgatgagagtttagatgaggactctttcatgtttgaggaagtgtttgtcaagggacattggtaatcttttaatgtgaggatgtgattaatgctcattgattgccaattgaagttgaaccaactaaagttgaatttgaccgcgaaaagatatttaggtatctcactggtgacaatgatctggagctctcggacaaaatgcacacgtctcaaattgcctatcaccatgttgtatttatgagatttgtcttgtccaattgattttcttactctaatctggtaaatatttcaatgaacttgttttatttttctataaaatttcaactgatataaaaattgaaattgattcaactgatatgcttcggaagcaaattgtctctattagaaaaggcaagaaacttaagtttaatctcattttcccttttgatttataatattttatctgacaaaaaggaattgattcttaagaatgagtctattgaagcttttgctgttagtactaccttcaaagtatcagaaaaaactcctcaagaaaagtctaactaaaaaaagactaggtctgcatcccctggtgctccaaaagagacagttgctgcatcaaaatctacttcttcatttacaaaaatgacaaaattcaacttgcttcttgggtaaaatgaaaacaaatcaggctttacttcttaagaggatagacaacatcatgaatttctttcaacctaatgaggatacttaaggaattgactttttaatattttgcttattatctatgttttgttgaactttttacgacttgtttattttgttttttaatctttagctccttcatagacaaataaggggagcaatactttattttttgtgtttttcaaaattacaactattgacccttgttttaaggggaattgtgtttgtggtttgtgaacttttttgttgaaaaagttatcttttatgtgtaagtatgctttcatgcaagaaagtattttctatactatattgttttgtttttgacacttcatgtaggttttcttcttataaaatattttgtcaatcaaactgggaaagaggagatttttaattctattttgaaagtatttaggttgacaaaaatattttataaattatttttaagttttaattgagttgtattttttaattctatatatttatagttaattaatttatttatataagatatgaaaagtgattaatttttctttttatat

SEQ ID NO: 222932 - DNA, 1491 bp, Cannabis indica
aaggtcagagcatctctctctaatttttctctctagaaatttaagttgccagacttagccatttttctataatccatctcgtgagaataaaaactcgaagtagacataacaccattattatcacaatacaaggagataattactataaattgttatcgccaatctactgagatggagtggccaaaaatttgtgtctatattcttatgtcaatattttggtactttcattgagagccacaactcaagtaatcatttacaagatggttgcaaaatgctcctcaagtggtgaaagaagatccacgacaactggccagtagactgggggcaagtcagtcactaagctgatgatgggactacacctgcatcttagatgcccggtggagaccttagatctactccacaactcgtcaaccaagaccatcaactgctcctggtactgaaaccaatgaacaaactccacttggggaaccacgtgtgaactggaagctccaaggaggctgatcctcaggttgaacacttagccaaaaggggaaacccttaatgcacaaaaccctactaccacacatggtaacaatgcaagtactaagaaaacaaataggtgttgagactccacagagggaaaaaaaactttgggcaagagtccaaaagaaagtcaagctcaaacgagccaaccaatgggccctccacctgatgtagagcgaccacagactacagagagaaccaacagaactcctccatcaatttcttcttatttctctaatgacattaaacctcgcgaccctgcaaagggaaaaggacctgctactcacaccgaagggggaagtcaaagactctactttgaaatcaaatggtatgaaattggcgagtaaggactaacaaaccacttcatacttgaaagtacttctgagatgatagaggtgagttatgccgttactttgctcgtggccttgatggccaacaatatgaatacttccctcgagtataaggaaaaaaactaaaactagagcaaccaactcaattctcttcaaacttgtgatcctgctaaagactatttcgagggaagtagtcgctacaatgctccggatgatcaatctcacagcgaatcatcctgagacaacccagacctcactctagaaacatcactagtgttgccttcatgactgcgtggtcaggagacaaaaaccaattctaagttgactagagttcatgatcgactttgggagaccaaaagacctgcatgacatcctcactagaagattgctagtggaagcgagagcttctataggtgaccctgattgggcaatagaagttctgatcgggtacgtaaaccacctacccatggtgttaatatgatagagtttgaaagtctagcagccttagtaaaagaaatcacgaccctgaagttgtcaaagtttgaactagacagagagcgacactcctcactctcagattgaatcaaagctctacgaatccctctaaagttcaagaatc

SEQ ID NO: 222933 - DNA, 1847 bp, Cannabis indica
tatctcataaaccgcacacccacgcccaaccttgacaataagagtccttatgaaattctatatgatgaattacctaagtatgatcaactaagaacttttggttgcttagcttttgctagcactcttactgcccaaagaaacaagtttactcctagagctagaacttgtgtctttattgggtatcccaaaggcataaaaggttacaaattatatgatttaaataccaaagatatttttatctcaagaaatgttatttttcatgaaaagatatatccttttcatcgccttaataacactacagatcatatagaccctttttcgaaaatggtttttccttctcatcacatttctgagactcatgttcatgattttcctaatattgttgatagtcctccttgcactaacgttttgcctcaggatataaatacgggtcagcacacagatgctgatgatgaagattatactgatgaacatacaccagaacagcccacgagcaatgaagttcctgatgaagattatactgatgaacatacaccagaacagcccacgagcaatgaagttcctataattcaacaagaacagatgccatctgttcctcgacgcaccagcagaatacacaagacaccagcctatttgcgtgattatgagtgtcactcagttctccaagacaaaaattcaactcctcacagtcttgataaatttttgtcttataataaattgtccgatactcacaaggcttttatttctgtcataacagctctatacgaacctgccacttacagccaagcttctcaactccaaatatggaatcaagcaatgcaaaaggagctgtttgcattactcagaaacaagacttggacctatgttcgtctacctccaaacaagaaagccataggatgtcgatgggtgtataaaataaaactcaacagtgacggttctgtcgaaagacacaaagctcgattagttgcacaaggatacactcaacaagaaggactcgattttttcgacaccttttccccggttgctaaaatggttaccttcaaattactattggccatctccaccatcaaacaatggcataccttgcaacttgacgtcaacaatgccttcctaaacggagatctacatgaagaagtttatatgcagctccccaaaggcctagttattccccctgaatttgctaatgaatcggacatagtttgcaagttaaacaaatcgctctatggcctcaaacaatcatcaagacaatggtacaagaaattgtctgatgctttaatacaagaaggatttgtgcaatcccaagccgattataccctattcactaaaggatctcatgacaatttcattgcactgttagtttatgtagacgacattatactcacaggcccaaatcttgctctactcaaccaacttcaatctactttgaatgacaaattctctctaaaggctcttggcacactcaaatattttctaggatttgaaatagcccgtgcaaaagaaggattggtactctcacaacgaaaatacactttacaactcctagaagataatggctatgttggaagcaaacccgccaagactcccatggatcctagagttaaacttgatgaccaacaaggagaagctcttgacgacccttctccctatcgacaacttgttgggaaactgttatatctcactctctctcggccagatataacgtttgctgtcaacattcttagtcagttcatggcttcaccacgaactccacacctgcaggcagcccaccatctcctccgctacttaaaaggcagccctggacaaggtttactctactcagcatcctcttctctcaatctaagaggctt

SEQ ID NO: 222934 - DNA, 1795 bp, Cannabis indica
aatttttgcactctgatgtggcatcacacaatggtgacacatggaattgattctgagtatctgcccgcaagatatagtctgaacaggatacatcatgtgcatgctcgaggcaaagcaatctgcaatccgcacagagcgacaaacacttagcgcattcaactttcgcatcgtgagtcatcaagaaaatccttataatttggggatcagattacagagatatggcaagctgtccaaatctcacaatcagtgtattctgtatttactatgcaatctttctgcttatatcaattgtaacgagaagggaaatacttcctttccgagctcgtagccctataaatagtgatgcacatttactgggcaaaggatcgaaagattttacttgagagatattgtctaagagttcatatttagagatattgttgtaagagctataagaaaaggaatctttctccttgttcttgagttaatacaaataacgagaattaggctattaacaaataacgagaattaggctattactgaactgctcggggctgaacctctataaaattcttgtgtctttatattgctttattatatttcaatcgttataaactacttgtcgtttactaaattatactcactatcgttggctaaaagcgaggtcaacaatgatcttgatgaatttggagttgctgttgggcaggatgaggctcctactggagatgatcgtaatgatgagggtgttattgttgccgaagttgtttcaaaggatgatgatactggcaaggtggattcttcttctaaagattccaaaattgatgatgctaagaagactgaccctatggaacctcttgcagaggttaaacaggtatatttttttgtcccacctttctgtgttgtttttatcttgttgttttaatattttcttaatgttgtttttgttgtcagtctgaacaacatcaagttcaggaggagaaaattgatgttgatgcaactattgcatctgctgttaatgctgtggagaaattagtttgttttttttcttttttttttgtgtgtttctgtaatattttattgttgttttactagtgttttgattgtattattttttttttttgtaaatgtaataaatcctttttcttgaatttttcagatgggttcctcaactacttgtctcgttctgctgagatttctgagaataatgatcttgaaatggttgtttttcaagatactcctattttacgtcctcaaaagaaggatcagaagaaaggagctattttgaagtctccgtacattgagcttgcttctggtgcctccaaatcaagttcatcttcggtttctcctgatgagtctgtttataaggtggttaaatatgtgtgtggtttgcgcccgttggacaacaagattggtgaacctatcgatccgcaattggaatctgagtttgacatttcgcttggtacaagtcttagaaagcaaaaatataagtaagtatttttaggtgttttcaattctatatcttttattgtttttttttttgatgtcttttttattttgtttttttagcacaacaactaacgtgtattgtaagggtaaggacacaatatttctgccatttcattttggggttgaggacgttagcaacaagatgtggttttacaaccttagctatcctaattgtttccttaccaattttgtaagtttttttatttacatgtttgtgttgtttatttttattgtttctgttttttaagtgttgttctgtaagtttttttttttgattgaagagagttctttgtttttaattttttttttt

SEQ ID NO: 222935 - DNA, 1079 bp, Cannabis indica
atataaatctccgtaattaataaatctccgtctttctcggtggaacccctcctttcccctggttcttggtgcacagacacgctcctcgatctccacgaccctaggggctagtttttcccttgggaaacttaccccctgcagacctttcccctttgggagatcagaatgaactttctgtggatcccgtgctattttgttctttcaggtacgaccgtagggctcccttttgggggaggtcttttaggagggcacctgattgaactaggctccctatacttctgcttttggcttcctgtgggatgagaaggtccttcccccgtcttctcttgcacgaaagggacggcatttgggtacacatgaatgcatgttctctattgcctttttcatagcgatcaatatttcttccattcgtttattttgtttttttttgttctaccaactcagcctcatggtcagtagctttttgcatcaatgccaccaatttcgcttgttatttctcaagaacagagaaacgacaatgaagaaagagtaattaatttcattgattgaaaagatattacagaggttcgaatttatacagtggagaaaaccaaaactaataacagaaagttagttagaagaagaagatagttggcctaactaactttaactaacctcactaactaacaactaactaggtactcttaacaacccctcttaaacttagggtggtgaagtaatccacaccaagtttgtcacgaagtaaagagaacctagagcttgagatgggtttaatgagggaatctgcaagttggtgttcagcaggaacatgttgaaccagaatctctttttgcagcactttgtcacaaacatagtgaatatcaatctctatatgcttcgtgcgtgcatgtaaaatgggattggctgagagttgcacaatattgagattatcgctgttgggctttgtgccctaaataaaactctatttcaatataatctttatcattcaattatcaataaagagacaaaagtattttcatcacttatttagtgtgtcatgtgattcatgttgatctatgtgtttttgatgattgtttgat

SEQ ID NO: 222936 - DNA, 2486 bp, Cannabis indica
gccaattgattttctacaatgtaacactttaagcccctcgaaagcgtggcagtggtattttggggtaaactcagtttatagtagtggcttcatcagtgttggtaggaattggtgctatagcttctcttaggcaaatagttattgatgccaaaacatatcgcttgtttgctaacatgtagtaataacagaatagatattattgaaaagtcaattaaggcatagaggtaatcagtgatatcactttgaaaagtcaattaaagtttccacacgttttagaacaagacaccacttgttactgtctaatgttaagactatattcatatcatttagcaagtaacatcatttgacaaaaatgcaaaagatatacaaaaaactatacacaccttttacacccacaataaatatatatatagaaatcatattaattttaattgtgtacttaaaaataatcacataacatatggcatgctataattttttctattcttttaattacattattaaaatcttactttatttattttacaacaaatttttatattatatcatctatcaacttctttatttctttctctaaattctatcttctaatatattttattcatattttaaatatataatattaacatattacacacacacacatatataaaaaaaattaaaatgtaaaacaatattattcatcgctgtaaaattcatgtaaaataaaatatctgttgaatgtcatatttttgataaatttattcttcttttttgtagtttagagaaaaactaaattttgatcattatttgatttggagtgttcttagccaataaaccaagttggttttacaaacaaaaagcccaatttgcctctttcaaaatcctaaatccaaggtcaccattatggacctttgaagacaaatattttatttggtgtagttattatgtcagcataacataaactttaattaaaccattttaaaagatgtctttaatttcttaaaaaaaaagtttcctttaattaaattttcacccaaacttcctacattgaataaaatggacttattaataataagaccttgtacgttgtcatattctttaatgatagtaaaaccatatataattatcattacctagtttgtttacactagaataggtaaataagggtaacattagtatatatggttgctctcaataacaactgaaaagaaagttaattatttttttttttgaatgaaagctgcaatttcattaagttaaaagatcatattcattaaaacggatgtcaaattaggagagactgatgttatagtattagaaagttattataaatacaaagttggatgactaatcatataaattgaaagttgtggtctcccttccatacaaagagagcgaaaagaccaaagtggcattgcttaaatggtttctttttccaatttagttccgccactaatttcgtttcactttcccaaataccatttcttttcaacacggaaaaaatatacatatatatcaaatttctgttcatacctttatagaaaattttttgaagagaaaaaaaaggtaatcaatgttgtttccatctctggttgtagataggaactattatatttcctcaaaattaggaactatattaattaatgaaaagaagaaaacaattaaaattaaaaaagacttttttttatataattagaaaaggagaacacgttgtgcagatctctttctcattctttcggtaattacgtgccattttatctcatcatcccttaattgagtaattaatatgcatattgagggttcccatcctcacaacaaactagtctttttaaatagtcaaaaataattcttctaaaaaaaaaaattgtgctaaaattcaaattcttgacccaaataaattagaatattaataaagacattcttatcactacaccagtataaaataaaaaattgataaaccatttttcatagttcactgttttccatgcaatttcacactataacaaagtgatctgatattggcttggaacaactttcatatataattaaactaaacttatggggtaacatttagaaaagttgcaaatggcttcgaggcagtaattattggtaaagactaaagaaagagtaaagactatggaattggaaggtgataattctctttctttttctcctttttatgtgtgtgttaaaggaaaaaagtttaatattggtattggtgtgacactatcatcatcattatcatcaatatcattttattaatattcaattctacgcttcacaccatatgaataaataaataaaggaaaatatatggtaagagattctagtccacatcttttcttgttgttaaattttatatagtttatattatttgagtggtactgtacctgtacagagaagatggaattggttatgaacattaaggatgatccaatagtaactaagcatgtgaatcagaaagaaaattcattaaagtttctcttcactcacatgaacatata

SEQ ID NO: 222937 - DNA, 2266 bp, Cannabis indica
ctaatataggccgtagtaaagccgcattatgttcatctcggacaataggcacaacacagtccaacacatcatcccagctagtaggttcagcagtaagagttccttatagtactcaaccatgacattctccagtccactatcccattgtctcaaattaccctttgagtctttcaacctagtaatgtgattattttgttttctcgcagaagctttagagtgaaataacttgctattttgatctcccgcttgaagccataactgtttagatctttgtctccaaaaaacctccctttgattaagaacagcaaagagctcttttttagcctcataaaataatctcttaccgtcctcatctcgtcgcttcttatattgctttaacaagtgattgcattgtttaatgcgagacgagaacttgccaaacacatcctttccccaatgctgaagagcagtaccacattcctgtatttttcgaacaatattttgccccgctatcgaagaccaattacgtctaagcacatcttcacaatcttgatgactagtccaaaaattttcaaacttgaaagatctcgcctgagaaatagtctcccgaaagagaacatctagtagaaggggactatgatccgacgaagaaatctcaagattaaacaatttagatgaagagaaaagatttaaccaagaattacttaccatagctctgtcccaccgggcttctatccaatgagcagtgtctctactcttctcccacgtaaaaggatggccacacagatccaaatcaatcaactcacattgctgaaccacctcctgaaagccatcaataagccacgatgggtaaggcaaccctccgagcttctcaccctgacaaagcacattgttgaaatcccccattaaacaccaaggagcggtagaacgcccatgtaaagtccgtaatagatcccaggtgttcttccttaaacttctattaggttccccataaattccagtgaaccgaaattccctctgcccatcgagcgttgtaagactatctatatggtttgtggaaaacggctccaccttgacctcctcttgattcttccatagcaaagctaaacccccactccttccttgggccacaacaacaaaaaaaccctcaaagcccaaactcatacaaacctgatccatcttcaattggttacttaacgtctcacacaaaaaaacaacactaggccttttttgaaccacaagttcttttaggaactgaacattccgtggcggcccaagcccacggtagttccaagacagtattttcatgatgattggcgagccccattgccaaggcccgccaaagatgatttttttgaaacatcagtaacatgctgtatcacctcagcattatcgttaccgcccacacttactttcctttttttattattaagaacaaccatgctattatctgaaacattcccgatatccttccccatacttttagggactcctccttgattgacacgtggaccatgagataaggaaggagccataaccacacctccaccattaacgtgattcacgacatccccaacgaccgaagatcctcccccattgcctgtcgacaattccatcccctcaggtccgccaccaccaaccaccaccacccccaagttctgagccatcgagaaccaatattcttgtgagatcgttggggaagggctctcatgaactcaccatatggcttcactacttgctcaattggctgatgaaacaacttatgacaaaacctttccgagtgaccaattataccacaaatgaaacaggaagtcggggccctttcgtacttaaaaattgatccaaaaccagttcccatcatccttagtgagcttcattcttcggcgtcatggtttatcaatattcaaagttactctgatgcaaagaaaatcactccatactcctataaaatttttcggatcaaactctatatacttccccatagtattaccaaccttagcaacaacaacctcagacatacatccaggctccatatcatggagttggacccatatgtcaagagtgttcaacggtaatgccttcggatccccactaacctttagcctctctataatcagctgcattctgtcataggtccagggacttccattgatgaccctttgaatatctacatcatgataaaattagaaaagaaatacattattatccaattgtttgacaaacatacccatacctggctgccataatgaagccaaaatattctgcatcttctcaaaatcaatcaccc

SEQ ID NO: 222938 - DNA, 2209 bp, Cannabis indica
tctcgactgtattgtacctattcttgctcaatcaataaagagaaatcacggtggtgttctagaactggagtagagccataaatcacatcgatctaccagacatgaactagtatatatcttggtgttgtttttttttttattttctgcatttagtgttttctagtttttatcactctgtttgtccctgtttttaatctccgataattgttcttgttgataatcttgtcattgctaatttggttgattattataaagtttcattgatttgattctgcacaattaatttttattttcccataaattagagcttggtaattaatcaagaacgtagaatcgagattcttttcgctgcaatcttaaagaaacttgaaagtcatcagtggcgagattcgaattggaaaaatttgatggaattggggactttgctatatggagagaaagtctgaaggggatgcttgtgcagcaaaagtttccaaggttcttggagacgagaagttattggtagaaaagaaaccagcagaaaaagtagaaaagaaggagatggcttactacacgatcatcatgtatctatcaaacagtgttcgaaggaaactcatcgcagagaagacaacgaaaagagtctgggataaactggaagaattatacttaaaactatcaattgctagtaagatcaatttactagaaagattatacagttttagaatgattttttccctttctttagatgaaaatattgatagatttaatgagattattgtaggattggctaatataaaccacaaggttgatgaggaaagtcaggccatcattctattgagatcacttccaatcgcgtattaagaagtcaaggcagccatcaagtatggcagagacgttattacattggaagatgttcttaccgcacttaagtcgaaagattttaaattacaattggagaaggaatccaagaaagaagaagtgtatttggcaagagaaagatcacccaagaaaatgagatcgaagaataaacaccagcactctcaatcaagatcaaagtctaaagagaaggacacaaggaagtgttacttctgtggaaagtcttaaacttgcaaagatttatcaagaagtacaaggaacaacaaggctttaataaatctcacaatggagataggaaggactttcaggaccatgggacggattctacagcaatcgtagaagatagagacaactgctccacagatggagaattattttccatctcagaatcttcaatgaacagggagtggattctcgattccagatgcacttatcacatttgtctaaaccgagagtcattttttgattataaatcagttgatggaggtaaagttctaatgggtaatgatcatttgtgcagggtcattagaactgggaaggtggccatcaaacagtatgatggcaaaattaaggtgctgacgaatgtaaggcacatcccggaccttagacaaaatttcatatccctaggtgcgctcgaggacaaaagatacagatacaagtccatgcacggaagcctaaggatcaccaaaggttctttggtagtgatgaaaggtgaaaagatcaatggtttatatgttctccaaggagagactgtcccagctggagaagcaagtatggtgaaaggagtagtatcgaatatgaaattgtggcattacagacttgggcatatcagtgaacaaggcctcaaaggactacacaaacaaggtataattaaaaatttaaattcttttgccttaccattttgtgaagcttgtgtttttggggaacaacataagttgaagtcactcacacacaactaaaaagatacttgagtatgtgcacactaatctttgggggccatacagggtgcctactcactccggtaagtaatactttctttcaatagttgatgattatgtcgttgtttttagacctacttgttcaccactaaggatgagtgtttggaacaatttagaaattggaaaactcaggtggaaaatcaaactgatcttaaaattaagaaccttaggactgataataggttggagtttgttaactctgaatttgacaagatgtgttaagaatttggcacaatggtgttcctaaaaggatgaatcgaaccttgttgaacaaagttagatgtttaatgtttagttctgggttagaaaaaccattttaaggggaagtcttgtcaatcgcaacctaccttgttaac

SEQ ID NO: 222939 - DNA, 2609 bp, Cannabis indica
ttatatcacagtgctaattattagtgaaatatatatatatattcaattaccatgttttatttcttgtgtacttttttctttaatgaagttggtttttattgcattcatgaaaataagttgtgaacgtaatatataatgcaaaagtttgaataatttaagtttgaaaatgtgtttaaacgtaatacattgtttttgttttttaatttacgaaatatatgttttttctaggtcgttttgttaatttttttaggtatgaaattttcacattatttcacttcaattaatatagtaaattaatgtgcacaaaattctactccattaatagtcttggattttgaatctataccaatttggtataccattttttagcattctaacccttataattttattttattttaaaatataatcttacatatattttaattctcaaattataatttatcacaaaaataataattaatttaaaacactagtatatttaaaaatataaaataacaataaaaaatactaatactaataaaataaaaacaacatacacttataaaacaaaaaaaaaaaacattaaaaataagataataatttaatagtcgaattgatcacttgtgaattttagccatgaagaatatcaaaatattgactttatatatgaataattttaagtattttgagaatattcatattcttaaaatgcttgatagttgatattattgatgaggtttttttttttgtataatcatttttaatttgctcattttgaaaatggtcgcatataatagctaggatcaactatagtacttcaataattattttttttaaaaaaaaaaaagaatgtgtagtgtttaattgatttaatgaatattatatcactacaagaaatgtcacttttaccagcacagttcgctactgcactagtaaaagtaacttttaattaccagcgcatttcacaaactgcgctagcaaagaggtcaaaggtttaccagcgtacatttacagtggccaaaatctaatttttaccagcgtacatttacagtggctaaaatctaatttttaccagcgcatttacgcgctgggaaaaatcatttttgccagtgcttttcattttatactggcaaaagttctaataccaacgttgatttaccaacccccttttgcaaacacatcacaagtaaattctattttaccagcgcaatactaacttttgcaccagcacaaaaatgtgctgacaaatgtgacatttcttgtagtgtattttactaaattattttaagattttaaattcttactagtggccatgatataatttttactaactatttcataaattagttatttcgggttattaatataaataatataaaatataaaatattttaagtaaaatatatttatttagtagaatatttggtgtgatatttaatgtaaattattaaaattattgcaccaaaaaataaaatattttacactattagtggtcttagaatttttcttcattattgtcaaaatataaataagagtaaatatcattttggaccatgtgttttgtaaaagttattaattggaccatctattttattaaataataaaatagaccctgtactttttaaaattgtataaataggaacttgaactgatttttttgtcaaaataaaattaaataataatctgatataaaaaagaccatggtcatgcactttaatttttttcatacgagtaaaagccctaaagtctcaaaaatatacctaatccaattgagaacaaaactactggaccacttgagcctgaccaattcagtaattatcaattttaattattgattctttttcaatttataggtaaaaatactgataatatggtcaaccaatccattgaatctattaaaatttagtccaccatgttctcattcatgaactggtttcatttctttttagtactattcacaaaaatcattaatgtaattatttaaattacgaccttgaatattatttatttggaataattgtgccaagaataattattccaatatggaaaattatcatatgcatgcagtcttggttaataattccttatataaatttcttcattatttcggtcttactctataagcacatgttttgaatttaattatatataattattatgatctgctacacttgatagaataataaagtgatatatttatatgatcgtgatttaaaaataattaaatattctgaagaaaaataaataaataataaatagaatataccatacttgaccaagaaaagactataaaattctttgtcaacacatatgttattcatgatgtgggcttttcttcgaattaattaagggagtaaatatatatatgttgtctctaagttaataaatttttaaatttaattggtttcaaaaaaaaaaatattaaaatttaattatatcatatgagtatttatatatgcggtgattattttaataaataagaatgcgcgttattattaatataaattaattaatatatattaatataatattggagagtgttgatttgattacatcactacatgtactgctgtatgttaattttaattaattaattaacatttagcgtttactactccttaaagttt

SEQ ID NO: 222940 - DNA, 2054 bp, Cannabis indica
atggcaaatcaattccacaccagtgaagaaaacaaagaaaaatcagaggaagctcacactcttttgccccaactaaatgccaatcaataccaacaacttcttaatcttcttgccaatcaacaaaccactgtgagtacatgcgatcctagcagttcaacaggtaattcaggtataattcttacctatgcttcatctaaattctttgacacatcatggataatcgattctggagcaaccagacatatatgcaataatcctaaaatgtttcaaagtatttcttatgtgccctcaactaggttgatcttaccaaataatgaagctataatggtgaatcaaggtggtactgttgctatctcaaaacagctggttcttgaaaacgttttatatgtccctggttttaaattcaatattgtatctgttagttgtataactgggactaatgaacttaaagttaagttctatactgacagtttttgcatccaggaaaaactatccaagaatgtgattggcaaaggtaaagcttggaatggtctatatgttctggaagatggtcagattaatgcctgcaacaatatcattacagctgatatgtggcattgtcgtttgggccatccctctcataaacgactggccttactttgtaataaaattcactgtagtattgacaatattcataaacaaactacttgttatgtttgtcctttggcaaaacaaaagaaaatacccttttctaaacatactggttttgcagaatctaagtttgatttaatacattgtgatacttggggaccctatcacattccctcacatacaaatcacaaatactttctcactcttgttgatgataagacaagatttacttggatttttttgatgaaacaaaaatccgatgctgtgaaaatcatacctgaatttttagcttatgttcaaacccaatttaaatgtgtgtttaaatgtttcaggtctgataatgcacctgaattaatctttaaggatctcttttcaaaatttggtatcttacatgaatttacatgtgttgaaacccccgaacaaaatgctatagcagaaagaaagcatcaacaccttctaaatgttgctcgggctttatattttcaagccaaaatgcccatacacttctggacagaatgtatactcactgctgcatatttaataaatcgaactcctacaccaaatcttgacaacaagagcccctatgaagtcctttttgacaaattgcctaagtatgatcaattgagaaacttcggatgtcttgtttttgcaagcactcttactgctcacagaaacaaattctcaccaagggctagaacttgtgtttttattggatatccacaaggtgtaaaagggtacaagttatatgatattaatactaaagaaatttttatttctagaaacgttatttttcatgaaaaaatatatccctttcatcgtttaaatgtctctcaaaattacattgatccattctccaccatggttcttccttctcctaacatatctaatactgatgttgatgatttccctataattactaatgataattcctatactaatgaatcctttgaagagcaagacaacgatccccttctggacacaccagcagcatcacctgctgaacatgctactgctgaacaagaaatcgaatctcagactcctctagtgcagccaagagaaacccctcctgtacccaggcgcaccagcagagtcacaaaaaaaccagcatacttgcgtgattatgaatgccattctctattacaggacaaaaattctactccccatattcttgataagtttttgtcatatgaaaaattatctgacactcataaagcctttatttctgtcataacagcactttttgaacctgctaactacagccaagcttctcaacatcgcatatggaatcacgctatgcagcaagaattatttgccttactcaaaaacaagacctggacctatgttcgcttgccttccaacaagaaagccataggctgtcgttgggtatataaaatcaagctcaatagtgacggttctattgaaag

SEQ ID NO: 222941 - DNA, 1395 bp, Cannabis indica
caacacagcaaaaaacgcacataaattagatccaaaacataggctaaaaatagcctaacaatattatatagacattagatgcagtgacatcattatatatgagataatgtgacatacaatgtggtggtacggttatatgcacagaggcgtaatgtatgaaatgtgattattataattgttcatactatattattgttttgtcttgctgggtcttgactcacgggtgctctaatgtgcagacaaaggtaaagtggtgtcaggtcagccatgagtttgagggttttgaagatgaattgtacatgttccgaccaagctagaccacaagggttgggtcgaatagggaattgtatagaaattctattttgcagcttaggacaacctgtatgaaataacttctaatattttgaaaataattttacgggatcctaaacatgtaactttaatattttgttttaagtaatgtatgtcttattataagttatttatttaattaagttaaatatatattattaattatttggcttatagaccccaattaatgagattagcatattgtaatcatgacatgtggaatttctttgagtaggacgttacactggtcagcccttaatttctctctggaagagtggattcttcacatttctattgtccctgggagtgtcatgcatgggtcttggtgaatagttctttctttggggttcatccacctttttcttccccttatctttttcttgatttgagggcccaaccccaagatggttaaacttccttgttggcatgactttggcattgaggtttcctcatgctaccaagcctttcagctctaagagggtttcttgtatttggcacgcaacttcctcttgttccgccacctttgcttgttggtccaagactatctgtcttaaccttacaacttcagggtcttcctcataatactcctcatcttccttgttgtagtcgtccatttgatcctcgtcttggccttcttcgtcgtcctcctcgaggggagtttcttcaacatgatttttcagttgatggcctttttgaggtgggtgactgaccacatgcgatgcttcactgtctcctacggcgtcaacctaaaagtttgcctaaacatctgctaggagagagcaatttatgtcatcagtagtagggtcttctttgtcgttgcaaaaagttggtttttcaattgcggttctagttgcaaccatcgttatatatgacatcaatggtgaaaactttcttcatctctcaatgaaagcaccaaaatttttaccaagtttttcaaaaacgtaattaaaaatagatttagctcaacaaaatataattagaagtaaatgttgaccgaggttttcggcaactcgtaaaatatgattataataatgagctgtaaga

SEQ ID NO: 222942 - DNA, 3326 bp, Cannabis indica
tcatgaatttctagcaatggtaagaggttaaagatcttgcgaaataataggagttgacatattgaaatgtttgaaaaacttgctgcccttcttcaaatactttgtgttgatcctcttatcatgccatctcttagttttctccttgtacaacttggcattttcataggagaaaaacctcatatcttcaagctcatttagttgcagcatttgagcctctccagcagcttggagatcaaaattcagcttctttatgggccaaaaaggcttgtgttctagctctaccaacaagtgacaagccttcccatacaccaatccatatggggacacacccaagggtgttttgtatgttgtccggtaggcccaaagagagtcatctagcctttgagaccaatctttacgattaggattaacaactttttcaagcacacccttgatctctcggttagaaagttcagcttgcccgttggttccaggatgataagtagtagcaatcttatgtttgacattgtatttagctaacaataagaattttattcacaaaatgagtaccttcatcgcttattaatgcccgtggtgttccaaagcgagtgaaaacgtgcttttggagaaacttcatcaccacttttgaatcattagtgggacatgctaatgattcaacccatttagagacataatccactgccaacaagatgtataaattgccataagatggtggaaatggccccatgaaatcaattccccaaacatcaaaaagttccacttcaagaatgcaattcaatggcatttcatttcttgttgaaatattaccaactctttgacaacgatcataacttcttgcaaaattgtgcgcatccttgaaaatggaaggccaatagtaccccaattggaaaacatttgcagccgttctttgtccaccaaagtgtccaccatagggagatgaatgaaaatgtgctaggatgcttgtgacttcctcttccggcacacaatgtcgcattattcggtctgcacactgcctatacaagaaaggctcatcccaacagtagaatctgacatcatgaaagaatttttttagttgctgcctattcaaatcaggaggctgcaatccactcactaagtaatttacaaaattagcataccaaggagtgtttgcttgggctacaacaagcagctgctcatccagaagtttcttgaattttcattttcgcttccttctcaccacttgtttccaaccgagataagtggtcagccacttggttctccgtcccttatctatcttgaatttctagatcaaactcttgaagaagtaaaacccagtgaatgagtcttggcttcgcatctttcttggcatttagatatttgatggctgaatggtcggtgtagacaatcaccttcgttcccacaagataagatcggaacttgtcaaaagcaaatactacagccagcaactcctttttggtggttgagtaatgaatttgagcatcgatgagagtcttgcttgcatagtaaatagaataaaaaatcttacctcttcgctgcccaagtaccacaccaatagaaaaatcactagcatcacacatcaactcaaaaggcaaccaccaatttggagctataataattgggttcatcaacaatgcctttttcaaagtcacaaaagcatcatgacattccttggtgaactcaaatggtcgattttattccaacaacgaacaaagaggctttgaaatcttcgaaaaatccttgatgaaccttctatagaacctcgcatgtgcaagaaagcttctaatacccttgattgtggtaggaggcaatagcttttcaatgacttccaacttagccttgtccacctcaatacccttgtgagaaaccttatgaccaaaactatgccttcttttaccataaaatggcatttctcccaatttagtaccaagtttgtttcttcacacctcttcaacaccttctccaagttagccaaacaagtgtcaaaagatttcccgaatactgaaaaaatcatccataaagatctcaagaatgctttctgccatatctgaaaaaattgccatcatgcacctttggaaagtggcgggatcatttcatagtccaaatagcatcctcctaaaggcaaaggtaccatatggacaagtgaaggttgttttctcttggtcctccggcgctatagaaattcgattgtagcccgaataaccatcaagaaagtaatagaactctttacctgccaaacgatccaacatttggtcaataaatgacagcgggaaatgatcctttcgagtcgcattattcagcttctgatagtccatgcacaccctccaaccggtcacgattctagtaggaatcagttcattgttcttattagccaccaccgtgactcctcctttcttaggcacacattgaacatggctaacccatgaactatccgaaatcgggtatacaataccataatcctgccactttatcacttcttttctcaccacttccttcataacaagattcaacctttgttgatgctcaatgaagttactatagccagcttctaagagtatcttgtgcgtgcaaattgttggactaatgccttttatgtctgccatagtccacccaattgctcctttatgttttttaacacttctagcaataaacctttagattcggcttctaaacatgctgatataattattggtagcatttcattctcccccaaataagcgtattttaggtgacttggcaaaggtttaacctctagctttggtggttcttggatggaagattttggaggcttgaaattgctttccttcaactctaaagactcaaaaggtctcttgaatttggggaaaggctgcactggctctacccaagcaacttgggtttcttcatcgttactcatagcttcaagctcttcaagagaacttattaacctttcatctttccacacttccttgtgaaatttttcagccacaatagaatcaattacactcaaacgggagcattcttcaatctcatccagaaatctcatagcattgaacacattaaaagtgactttttgatcattcactctcatagtgagttgcccatttcgaacatcaatcaaggttctcctggtcgcaaggaatggccgccccaaaataataggaacatctttatcgacttcataatcaagaataatgataatcggccggaaaaataaacttatcaacttgtacaaacacatcttcaatttttccctccggatgagccatggaacgatccgctaattgcaaagtgacggtggttggtcttgcttctccaattcccaacttcctaaaaatagacatagacat

SEQ ID NO: 222943 - DNA, 1769 bp, Cannabis indica
aagaagacaggtttgatcctccaatattttcatcttgaaaagcctatctttggttttcaatctctggtgcattgataaccatagcacaaagctatgctttggtgaatttaacctgctccagacttgtttaggccactgcaattttgttcctgctggtttcatcaggctatacccttgagacactgtgtatttttgttgcatcaatgctccacccgatgtctccttgagttgatctttgagcctaaccaaaaacttccagtaccagctactttgacttgaagttttgtaggcccaccagtcttcattatgcagattaacactattaacccatctcagccatagtgtgtgttctttgtttgtaatttcccacacatattttcccatagcaaccctattccatgcagccacattcttaaaaccaattccaccaactgatttaggttgacatatggattcccaagagatagcccctagaccttggtagattgctttcccactccacaagtaattcctgcatattgcttcaatagcattcaccactttctttggcaaaatcacaacttggcaccaataagcatgtatagccattaaaacagaatttattaacactacccttccagcaaagaacgattccttgtgctccatgtcttaattctagctgtcattttctctgccaacacttcacaatctttacccaagatcttctttgcaccaattggaactcctagataattaaagggcagagacatgcttgtaaaaccagatatttgcagcaatatccttaggtgatcatcaggcatattgcttgaatagattgttgattttgtgacattaggatacaatcctgatgttacagattacagctggagcccctacaataagtagtgaaaaacttccaaaatcaccattgcaaaacaataatgcatcatcagcaaaggcaaggtgattaagtttaattgtagtacatctgtgatgaaaatggaagtcatttttttctccaatcgtccccattattcgggataagtattccatacctaacacaaataataggggagacattagatctccctgtctaagtcctcttttagactcaaagaatccatgcaaagttccattaaatataagtgaaaatcttggtgttctaacacaggtcatcactatgttaatgaaactagaaggaaaatgtagcccttgcagcattttttcaatgaagtcccactctatagtgtcataggctttttgcaaatccaacttgataatacaactaggcttattatttttcctcccacaatgcctaagtatatcttgacaaatcataatattatgtcctataaaccttcccctaatgaagcctacttggttttgagagactaaattaggaagaatattttttattctagagcacaaaagcttggttgcaatcttgtaaagaacattgcaacaagatattggcctaaaatcttaaactgtattaggacattttactttgggcaccaaagtcagaacagtagtgttcatctccttatgcagcttacctgtttctaggtatgatgtcacaacttcaaacaagtcctctccaaccagatcccaattgtcttgatagaagaaactcgagaagccatcagggccaggagccttgttgccaggtatatcaaatagagcttgattcacttcttctttggtgaactttggagtcattattttagcttgctaagatttaaaacaggtcctcttgcaatgattctatgcaccactttcctcctatcttc

SEQ ID NO: 222944 - DNA, 3472 bp, Cannabis indica
ctgtgacctgggacctaaaccatcagcgggacctggacccagatcgagacccgaacccagactcagacccaaaaactagggccgaacccaggacccaacaacaagactcgaacctgggacctaaaactcggacacagagttgcacagggactcgaactcggactcgaacccaaaccgggacctaggacctgaacatagatgggggacccagacctaagaattggggcctcgaactaggacaagaacttgggcctcagaacttggatcgggatctgggactcgatcccaaacccaaaccttgacctaggacccacctcgagacctgagatccgggacttgatgcttggacccgacccgtagtcggtgtctggatctaggacatagacctgaacccaaacccaaactcgaacgcaaactaagacccggacacataccaagacccatacccacactcgggaaccaaaactgaaacttaaactggaactggactgggatctttgaatgggaccgggaccgggacctagaccgaacccggaatcggacccagcctcagaccctaaccgagaccgaaacccaaacctgaaccttgccccagacccaaatgaggacccgaacccaaacttggacccaaactcgacccgaacttgtaccccgtgacttgaaactggaaccgaaactagaagcggatcgggacccaggaacaggaccaggaccaggaatttaaaaaccttggctctctgataccaaactataacgccctaagaaataggcacactacctaaggtgatgaagaaaccctaatcccctaaattggattactagaaagataagcgcgggtaatttaaaatttaattgaaaacagagtgaaaataaaagttgtaataaacttaactttacaatcaaaaattacatgtctcgggatctcaaaaatattttacaaaatattacaagccttttcactagctgacctaagcggcaaaattagagtttcaaaagttcatcactggtagacccaatctgcttggtctagtgtggctcgaacatgtacatacatcgcccaactctcgcactcatggatgatctgagacagatttatcctttcctgcacagtacagcacccgtgagccaagcccagcaagacagtataaaatatcaataatcataattatcacatcacataaacatcaatgccatttcacatttgtctgtatgacacagacccgtgtgttacgctcgcacgcctatttatgtgtatgtggcatagacctacttgttacacttacacgtctaaatacaataaggccttaaaacggttcatctcggttctagtcaccgagtccaacccgattattccttgaacgcataaccctaaatctcaatatacacttatatataactatgcataacacattcacattaatcatcactagggtaataaccctagaccattaaaccgctcatgttagggtgataaccctagtcccggttcccaattactcacatatatcattttcaatataagcgccaccgtgcatactctatgtgctaaatactatcttaccatttggttctggtctcaggtccgggtcctagtcacagttctagttctaattctgggttcaggtttggttatgggtccgggtttgggtccaggttggggtcatggtccgagtcttattccaagtctaggtgcgggtttttcagatctcgatttgggtccaggtcttagtaaaggtccaagtttcggtcctgggtctgggtcccgggttcaggtgtgggtttgcatttgggtttgggtctaggtcccgtgttttgatcccagtctgggtcttggtcggtattcgggtttggatttgggttcatgtccatgtcgaggtcgaaattccaatttctgtcaagggctcggtattggatcgagtctcgagtttgggttcgagtctcagtccttatctaggtctgggatcggtccaggactgggttcgagctcgagttttggggctgtatttagtctagttccgagtcccggtccaggtcctggtcactgtcccggtcttgttccagggtcttggtcatgttctggttcaagtttcggttttggatcccaggttggggtctgggtgtaggtcctggtctagctttgggtccttgtccgagtctcaaatcaagacatcgactatggttcttgtccaagccctggctctctaatcccacctagactcgaacccagatctggacgtagaccaagatcggaacccgaaccccgactcggaccaggacttaaacaacgactgggtcctggactcggatcgggacctaggactcgtacctagatgggggacctggactcgagatacggtcatcaaaactaggacagagacccaagacccaacccagacccaaaccctgaccttggacccagatcgggacctgggacccgtagtagaattagactaggatctgagaccgtgaccttgattcagacttgaggcttggaccagacatgtagtaagtgtttagattttggacccattcccggactcaaaaccagacctatactcgcacccagaccctgacttacacccagacccgtactcctgagttgggttcgagttcgagtcttggttagagttcgggtactggaatctaactaggacccagaccgggacgcagacccgtttaaaaactcgaatcgggactcgggacacaaactcgaaccaaaacccaaacatggacttggaaccagacccagaccaaggacccggaccaaggacccagaccgggattggagactttgacctggacctaggacctagacttagattacggacccaaagtcaaaattagaactagaattgagaccaaggattgggactgggacacaagacccgaccccgatctcagtcccagacccaaacccagacacagacacataccgggaccaaggatctgaatcgaaacgagatcgggacccaagattgggatccgaatcttgaccaacgacctggggcttggatccaacccgtagtcagtgtctagatcttggaaccattgccagactaggacccaaacctagactcggacccgagacccaaaatcagaacaagaaccgaaatcgagatcctggaaaaggaattggaccctgacacaaaaccagatctagatgcagaactaaacacggacccagacctagacaaggattgatacccgaacccaaacccgaacttggaccaagagttgcgccaagacctccgatctaaaacctggaacccaggacccatgacctaggacctggactagaacccaaacccgtaccaaaacccaggcccagactaagacccagacccaaacacggactgatacccaaactaagacctagagtaagaccctgacccggactcgtactagaacaaggactctaacccgtaccgagattaggactgggacccagaccaagattagcacctagacctga

SEQ ID NO: 222945 - DNA, 1175 bp, Cannabis indica
gtggagtgtcactaaaacccaattttctagtagtggtagtgcagcagaaagttttcaaggttcttagagatgagaagttattggcataaaagaaaccagaaaaaaaaaatagaaatggaggaaatgacatactacacgatcataatgtatttatcaaacagtgttcaaagaaaactcatcgtagagaagacggtgaaaggagtttaggataaattggaagaattgtacttaaagccatcaattgctagcaagattaatttgctagaaaggttataagggtttagaatgatttcttccctttctttagataaaaatattgatagatttaatgagattattgtaggttttgctaacataaatcacaaggatgatgaagaaagccaggccatcatcttattgagataatcgcatatcaagaagttaaggttgtcatcaagtatggcaggaatgttattgcattggaagatgttcttgccgcacttaagttgaaagatttcaaattacatttagagaaggaatccaagaaagaagaggtgtatttggcaagagaaagatcacccaagaaagtgagtttgaagagtaaacaccatcactctcaatcaagatcaaattctagagagaaggacacaaggaattgttacttctaagggttggacatttgcaaagattttgcaagaagtacaaggagaaaaaaggcttcaacaaatctcagtggagataagaaggacttccagcaccatcatcatgggaaagactctgctacaattgctaaagataatgacgattgctcgacagatggagaattttttcgcatctcagaatcttcaatgaatagggagtggattcccgattcttgatgcacttatcacatttgtccaaatagagagttattttttattacaagtcagttgatggagataaggttcatatggctaatgatcattcatgcagggtcattggaaccgggaaggtggccatcatacagtatgatggcataattaaggtgctgacaaacgtaaggtacatttcgaaccttagatatgcatgaaacctcatatccctcggagcacttcgaggatgaaggatatagatacaagtccacgcacaaaagtttgaggatcaccaaaggttctttggtagtgataaaagtcgaaaaggtcaatggtttatatgtt

SEQ ID NO: 222946 - DNA, 2545 bp, Cannabis indica
tatttataacaagctgaatagattaaggggcataatagtatagtgtcataagtacagggggtaaaaaagataattattcttcattaattaagcacataaacgaacatgaacacatacaaatcatcaaaatcatcgttttaaatccatatttcatgaaagtaaatcattaccatggctctgaggccatgttttggaagttattgtacccggatttagatttactaacatgtatgttgattatatcctataatctaacaccctaaacatgaattttcttaaaaaataaaaataaacacatataaagtttagaaaatcttacattggtggcagcagaataatataacttcttccactcagatctttaatccttgttcttttatgttgcaaagtaataacaagatctaagcctggatctccttcagatgttggatatttcacaatctttcatactacgattgagtacttgacttgatatgagtaggcatgatactctatcactatagggattgatgaagagaagggggagatagaattcgaaatcagtagaaggaggctctcaattttcaattgtctgacagagttaggaaactaggttatgagaatgagagtcatcttattccttatatagaatttcatgtaggttaggtttgaattatatgaaattaaaaaaagacaaaattagctaaaaatacacttaattggtcgaccatacaatgggccccactagttacaatttcgtcattttattcaataatttatcttttctttcactaatgtcatattttctaatttcaatcatttaaatgtcaaaaccatttatttaataattataattaattatcaaataaaattatcatttaacttatttattaaatagaccttacaaagtctcttaattaacaaataaatcccaaaatatcttttcttctcaattaagtcatttcttagtgaaaattcataaataagacatagtctaatttaatattataattgattaattaaaaccaattattacaagcagtattatctcaactagtgtggggaccatgagcctatataatcaagcttccaataagtagatctagaatataccaagtaaccccaacttcttgattcctcacgactccattatagattcgaaattacactcttagttatatagaacgctctatatgttcttttatacccaaaattcggcctcacttcagaaagtgacacatgtcttgcagtggaatatgaaccacctaatataatgaaattatgtcatttaatgcaaagaaaaagaataactcgttaaataaaagattaatagaaaatattcatactcgctgactacatggtcttaagcgagataagaataaaaagctattaaaaattatattagcgagacacacacttgtctcggagtacacaacctaagaagataattcatttatttaaagtagagtggatacagttttgcaaaacaaccgcgggttacgaatagcgagacagccatctcgctattctaaagaaacttgatgaggcgaaccatctgttaacacttagcgtttttttccacattacaatagacaaggataataactcagagataagcgagatacaattgtccaaatcagcactaaccatctataaagataagaataaaaagcagttattctgtattatcccacatgcatttaaatgaaatgtgagaattgtccacgtttcatgaacggttatatcgtttccaaatataaataactgtcaacctatattcctataaataggggcagatttcacagaaaaagagacggagaattttatagagaaaaaagatatattatcaattgtatcttgtattcaggaagtatcataaataagataaactcgtggagtatgcaattttacctgtaaaaccacgtaaaaatatctggtattatatatacatttattatttcttattaattctgtgacatatttattacgtaaaggcttgttatttttagttaacaaaaatttatgtaaacatgttccaagatatagatacactattaattattcattgtcataattaaaataatcaaagatcctctatagatgatttacatcgagtagggactaattcaccattctatcattcaatgtattttctctttaaaatacttagcttcctataaatgatagctcagtaaactaatattattactgaaataagagctcttccatttatctttattaagtttagctaaaagaaaatcatcatttcacttctatgtctagattgaaactatagattctgtatccatgattagcgctcctactcaattatactaccatgttcccaagatgtaactattggatcgatcgaattggtcaactttaacgaacaactctaataacacaaataatactcttaagttagaacataaccatatcatgattaagatcttttgatctaagatcaactaagtgatattgacttagaaaaatacaacggtagtttataatatattttccaagttcaatatcggtccagtcatatatatacttcatacatccgata

SEQ ID NO: 222947 - DNA, 910 bp, Cannabis indica
tatccagttacataaccttcctcatgagtatttttcagtggataatggaaagctcttgggtagcctggctggtgaagttattaaagtggaattagacgaagctaaaccggtctcctggagtgattttctcagagttagggtggttatagatatcgccaaacctttatacttgggctgtttctttgaggtgagttcaggggttaagaaatggattcagttcaagtttgaaagaataggtattttctgttacaattgtgggtgcctgggtcatcaacggcgggggtgtgccctctctacccctgtcacagtggagaaaggaaatggtattccatttcctctttttggtccatggctctcaacctcttcaacatacctggatgtattctctggggctaactcgttcgtgccgaaccgtgcatcctcggtgatcccccctcctagtcgattttccagtggtgctccaaaggaggcgactggtagtgggttcgcgggtacaaaccacccgggtttcaaagtgggtggtttctcgagactgaccaagaaagtgacccgtcgatcgcctgtgttgctgggaaagtcgaagtcggcagcctgggttcctaagtcgaagcctggtgttgatgaggccaagatttctggatttggtaatggggttcaagctatttctttagagcaggtaaaaggctctgatttaattcctcatttatcgttgagaaagcctgttgaccgttcctcgtttaatgtgaaaaatttaaatatggtgtgtgttcctgaggcggtcaaggcacagaatcatgggaatattagtgatgggccgaactattctctacttgggcctaattttattaattcaaaggtcaatgggccggattcaattgaggctattaaggagggcctcccacgtgtctct

SEQ ID NO: 222948 - DNA, 1862 bp, Cannabis indica
ccttcttccccttgtcttgggtaattttgaggtgcttcttctaattgtatgaaatatcatgtatatagttattgtattacctgatgttggtctcgatgtttgttttgataggcgcttgtctattctttccttttgattcttagaaggctccttgtacactggttctcactgaaggttggcgttcttaggtataagcttgtgttctcgcaattttgcagtagtacacaacagtcgccaatcgcgatcttgaataggaaagctacctagaactttgacaatttccctatgagtagaatccaatacaggtcgatccggcctatctgcaatcaacaaaaaatagacattagtgactatacagagtaataaaaatatactaagtgttaagagacgtgacatactaggtcaacgattgaagtcaatgctaactcctggtacgttaaatgcgtagaaccatttagatttctaatctcccatattagaaatcgtaccttctagcccgtttatatcataattgacccatttgctaaaacagtaaaagtcattgtcatggtcaacattctttatttaatagaaatagctaaattcttccatgattggttccccttgaacatactccatatacaatgcataaaaccccagaattatgcagtaattattcgaagttagttcgaagggagagacatcgtaatgtctaaggataactttgacaaatggatgaaaaggtaaagttacccctcatcgaagaataggaattgagaccaccacgtcttgcgtggggataatcacgggggtgggaaaaggaagataaggctgccgagatgctgaaggacgtaaagtccctattcaaacaaaattcaaccgtgcaaatgtacgcaagtctgattttgtgactcgcgagaccagatccttggatgaaaatagttcattcaattgagtgttgtcaactgaatccatctcactttcctcagcgtctccctcttcctccaacccccgaccaggtacctcgaagtcttctcccatttcttcaacttcgatgttaggggcgtgtctcgagtgagtgagattctcctgagttgacactatagattcgctatcgcaaatttcaactgtcactggttcagcaagttcctgaaccatcctatctatctcgtcagtagatagcgagccctaacgagctctggtagcaggggcctcctccttagagatcgaggtgggtatgaagttgtccctcttctccagctcatcagcaaaagccccacctccagagtcgagcatttggctatccgataagtcgctcatctaaaagatagaagttcttttcagtgtggtgaaagtgcaagaataacaaagtgccctcagccgcataaaagaaatttagagaatctaaaggattaaccagacatttcaagaaatggctgggtgtatctcaataacataatgatcatgtcgttacatgagaattaaggtaatgagacacacccaccattttgcgaactcaaccaatactcgtaaagtataagtcccacacgtacaactaacggtgtacctcaagtaatggctaggggtttcccagtatcctcgcataacaattgagttaatgagacacccccaccatttcgagaaacttggttagtcctaacatgtgactataaaacaggaaaagtcaaagctagctgcatgtctcaaatggctgggcgtatgtttgcatgaacattaagttactgttacacacccaccatttaaaagactcagatagttttcataacaaaagcacatataacctaaaggctaaaaaataaacccaaagttataacagggattaaaatagctaaggtacaaatttactaagtcatttttgatat

SEQ ID NO: 222949 - DNA, 3356 bp, Cannabis indica
attatctttgtaataagatctaatagattatatgtaatacaaactttctccaccattccatctccttagtcacaaaatccttgatattgtgaaactcctgtctgtatgtttactcctcttagggtactgaattctttactatttggcaactatatctgtgttagtgatgaagtaacactagcagttaatccatgactggaataacgccaaaaaactggatagaactttcaataggctgaaaaattatctagcaaccttctaggccactttaacattcagtcttactggtagagttatagactccagattagtttttacatttctccaaaaatccctactccattccagagtaatcaccatctcataagtagactttctagcattaacgcaagtttagaaacctgatttggtgtagcctaagagtattaaaataccacccttatcgactaacatatagttcctcttttgatcttaagatttacttgattatcttccaatgttcatttcctggattaaattgatacctactcataactcccactcaatagtaggtgtcaaatctaatgcataccagaacatacatgagacctctcattgttgatgcttaaggaattcttttcatgactttttatcttttctggaatagttaaaactgttccttacataaataagatctatatcaaggatccaaaagacttcctttagaattattcattagaaaaatgctctagcatcttactaaagtaagttgcttgtactagagtaagtaaattaccaagtataccacaggccataggtttagataatctcaaacctatgatactaggatcgagaagttttgttaagtccattgaatagacttattatcaaaattttccttcttgtccttgtaatagaaaacttttggttactccatacaaatggttttaatcatagttttcttggctttgattcttagctccttattctgactatccattacttgtttaaactaacaatagatttttatcacaagtgtcttctaagtcataacagggtgagttccttaaaaccctcccactatgatgaggtaccgagactttctgtctaggaacataatagtattgtcctcatcggttatgtcaatataatagaggcagtgggaccatcttatatggaataagatgattgaacactttgggattgaaaataaaaagtatctcctctactttgctactttgtttttagatttagtcacattcttagaaaagtagtatttgttgaaacaaacattttcttatcttaatgacaataggatggtccacccctaatcactttagaatagctatcaaacttgcaaaccttacttaacagttcaagcttttcataagttcatgattaggatatccatgaatttagacttagtattttctagagggactcaggcagctactagtaactaatcatagacctttcaatttaattaatatgcaatccaattttctagaaaggtaagtttggatacaattcgaagttcaacttaataatcattgaacttcatagccaaatatttatccatccctatcagttcgtaagatctttaatcacaaaccttaatggttttccccattgctagaaattaatgaaatttctcaaacatttcaaatttctttttacaaggcataatctagagtaatatatatttttaagaatttaaggataacggatatccacccctgagtgtacatccatatgtttgaatatagatgattctacttctaggtggatattggcatattttctctttgcagagactgatcttgtcaaaaccattatgaacaagatgcaaattccatagatatattattgtggtttgatgaatcttagatctagttataacaaagattttttaaaaatattcaagtggattctggtcacaaaatagaaaactcataatcccacgatttcaggggataattgttgtaaagattacagtcaactctgtaattaactgcctgactatgtaattataaatagaggcaagttaaactgaaaatgggacgaaaaattcataagagaaaaagtccaagaatagtattataaatctaataagattgactcgtagactatgcagaattttaactgcaaaaccacgtaaaaaaccttcgtgttcattcttttcttttttatttctctactacttttatttttctatgcaagtttatcactaattaggctcaaatttggctaacgaaaatctgcattaacagaagttaagaagtattatatacagttcaaagatcttttatatctattgaactctagagtatatctaaaactccacagaatctctataatacttaggggtggaagaaattattgatatatgaagtttaaataattttcttcattgaactctagattatattcacaactccatagaatccctataacacttatgggtggaagaaattattgatatatgtggttcaaactctttgaacactagactatactcaatacactacagaatctctatgacacacatattctgattagacgtggatataatataatatataaattagcaaattagtagaacttattcatgatcctgttaatattccagtgtctcctactacagtaattgataccaataaagttcttggacatataatcacagtaccttatcttagtgggagggttttcaaagtacaacctattattatttggatgacactaatgatagtctactatgttatgtttaagaaaagaactttaaaaataaaactaagaaaagttaatctaaccatgtacatggataataataacatatcagtattgtgaggataagatagaaaattttacaatgtttattcgaaagacttaagcataattcctagtccttaagaaatgttttattgtacctaaagtgattacttaatcttaagcaagtattttacattaatgttaatactagaatgctatgttgacgacttagtctagaaggaacataatgttccacacgaagataaaatgtcacaacaagaggtccctaagcaccaatagtaagagattaaatgtacacttgtgtattaatttaaccaaacacctacgtttgagtgggatccatcaaagatttaatcaaacaaggaatattaggagacaatcaagaaagaatctctgaaagtgacctttatgttagatgataggggtgtatattaaaatccttatgtctacaacaactcaaaacttaatatcaaatatggtggttactctgggggtggagaaattattctagaatgatgtaaaaactcatctataataatttagttccaccagtgaagctaaataacttagttgctttcgaaaagcac

SEQ ID NO: 222950 - DNA, 1059 bp, Cannabis indica
ctttgccgtttcaagagctaaacaacacggagctgcctcgccacaacaagcatcagagaaatcagatcttgccgtattatcccatatcacctcaccagaatggtgtttagccaccaccgcaatgcaagagttttccgatcctattctgacatcacagttaagtttgagccgatccagaggaggaggccaccaaatctcactctagacaattgatgcaataggaagaagagctctttgcaaatctacataagaatagtggataacatcaatacattggttcacattataatggaaattattgttcactttttcattcctaactcgccagatagtatccaccacgaccaaagcatataaaaagacttcattcgcattgatgcccttactttttaagccctagatgaacttgacccaatcgtaaccacggatagcagagtcggaaaccagataaataccccacggagaagagcgccaaaggaggaaagccaagttgcaattaaggaataaatgtttagttgattcctcctccaatccgcacattaggcagttaacatcatccacacggaatctctttggtccatatccaattgtccttttcttggccagttgggtctcctcctttcaaaacagcagagatggtatatctttgtcaaaaatacgcttcaaattctgtagatcccatttcccagtgcctaataacaggtcagccaccttgtgtaaacccttagcaggtcgcccattagaaactgggtaaaaagatttgccatgagccacccatggatcatcccaaattcttatatccctaccatctgacacaagctctttttcaaaagatcttattcgcttttatcacatttttccagaagcatgaatctgagtctttatatttgcaattaagcagctcttttcctctgagatacttgtctttcaagatcttctagcaaagtgattgattatcatttagcaagttccaaccccacttgaccaggaaggcttgatttatttcattcgttttcaaaaacgcaaggcccccttaacttggggagacacaatttatcc

SEQ ID NO: 222951 - DNA, 2781 bp, Cannabis indica
gaggcacccctatctgccactattatgcaagacttcttattgtcgacctgccatcgacttataacatattgttggttcgtccagcactgatcggactaggggcagtcagttcgatcaagcacctatccttgaaattccacacacaagaaggcgcgggagtggtgtgtagcgaccagatgctggcttgcatttgctatcgtattgagctgcagcataggaaagccagtcatgcgttgatggcgatcttgacagaggataatgagaagaaagacgaagatcttgacccccgagttcaagatgagagaaacctattgaaaccaattgaggaattggaagaggttattcttgaagcaggaaatcccacaaggtgtgcatacatcgggaagaacttggacgagctgctcaaatagcagctaataagttctttgaaggcaaaccaggatcaattttcctggagccatggagatctgacagggatcgaccataatattatctgacaatatttaaatgttgatccaaactacccagcgaagaaacagaaaaggagccccttggatttcgagaggcaagggtcactaaaataggaagttgacaagttattagtcaacgactttatacgcgaggtgttttatccctcgtggatagccaatcttgctctcatcccaaagcctaacgaaacatggagaacttgtattgatttctctgatctgaataaggcgtgcccaaaagattattttccacttcccaggatcgactagttagtggatgcaacttctgggcacgagcttatgtcatttatggacgcatattctggatataatcagataaaaatgtatgtcttagatcaagaacatacaagcttcataaccaacacgagacattgttataaggtcatgccattcagactgtagaacgctggggcaacgtatcaacgactggtaaacaaaatgttcgcaaatcgaattgtgcggattatagaagtttatgtcgatgatatgttggtaaaatcaataaagagtagggatcacacctcaaacctcgcagaatgctttaagatgttaaagaagtataacatgaagctaaacccttaaaaaataatcctttggagtttcctcaggaaaatttttgggattcatagttaacgcgaggggtattgaagcaaattccataaaaatcaaggcattaatagacatgccatcaccgacaaagcctaaggaagtacaagccctgacaggaagaatggatgcacttaatagattcattttaaagtcaactgataagtgtgtgccgttcttcaatgtattgggaggcaacaaaaagttcgagtggacaaaagagtgcgaagaggtctttcagaacataaaaaggcatctagcaacgccaccagttttggcgaaacccataactgaagaaatgttgtttctctatttagccatctctgaagatgcgattagtgcgagaagagggcaaccaccagcaatgtatttactatataagtaaaaggttactaggggcagaatccagatatctccctctaaaaaaactcgcgttgtgcctagtccatgcgtctcgtaaactataaccatacttccagaaccaccccataaaagtgttaaccgatcagcccttgagacaagttttatcgaaacaaaatgcttttggaagattgataaaatgctcgtttgaattggggcagttagacataacataccatccttgaacatccataaagggtcaagctttggctgacttcttgatagaaggtataactccaaaagaaattccacctatccagcgagacgcagaaacctggaagttatacgtggatggtgcatccaacaaacagagttcgggtgcatgggtaatactaataccgccagaaggctttaagtttcactacgctttgaggttccaatttgacgcatcaaataacgaggctgagtatgaagccttgatcgctggcttaaagatagctgaggtgtttaaagtcaaaaacctcatctgtcgtagtgattcccagctgattgtgaagcaggtcctcggggaataccaggccaaaggctgaaaaatggcgaggtatttagagaaaattcggaagaacttggaaaagttcgattactttcaaatcgaacaaattttgagagaacataactccaacaacaatgctttaacaaaactggcctcacagaatgacttggatgaattgaacttagttccggtagagatgctgagcgagccaagtatatgtgaaatggaagacgttgagatgatagacgactctcctacatggatgactcctattatcaattacttactcgagggacaacttccaaatgacaaaaatgaggcaaaaactattgtattcagtgcctcgttacacaataattgaaggcaaactatatagaagagggtactcgatgcccctacttcggtgtgttttccctacaaaagcaaatgaaatcatcaaataaattcatgaaggcttttgtggggatcatgcgggttggcaaagcctgtttaaaaagatcattagacaaggatattactggccaacgatcagaggtttgtcatgaaatgtgataaatgtcagaggttttcacatatacctcgaatgccaccaacggaactaagaatgatgacctcgccctacccatttgctatatggggaattgacttaattagggcattaccctctgggcgaggatgagctaagtatgcggtagtagcagtcgacttcttcactaaagggacgaagactgagcccctcatttccataacctg

SEQ ID NO: 222952 - DNA, 2634 bp, Cannabis indica
gtggcctatgcacacatcaaacagggaaaacttgatcctagagctagaaaatgtatttttctaggatatcctgaagaaggatataagatgtggagcatagaggaaggaaatcatcaaagaaatttcatcagtagggatgttgtgtttgatgaaaacaccatgtacaaggatctggcaaagaattcacacactgcaaatgagaatttcaaggagaaagttcaaattgaggtggagcaaactgggaaaattcagataacagatgatactgttgaacaggaagttgaacaagaacttgaagagcaaactgatgaagaacttggaaatgatgatgggcatcagaattatcagttgactcgagatagagagagaagaaatatcagaccaccaagcaggtttgggtatgctgatctgattttctatgcccttaatatctctgaacttgatggtgaggaacctggctcctatgaagaagctatggtgtccatttacaagctggaatggaattcagcaatgcagcaagaaatggtatcattgaggaagaatggcacttgggtagttgttaagaaaccagtagggtgtaaggtgataagttgtaaatgggtatacaagtacaaagaaggcatacctggaatcgaggaagcaagattcaaggcaagacttgtagctaggggtttcacacagagggagggaattgattacaatgaagttttttcccctgttgtgaaacacacctcaatcaggcttctcttaagtattgttgctacagagaatcttgagttggaacaacttgatgtaaaaacagcttttcttcatggagatttagaagaagaaatctacatgagacagccaaaaggttttgaagaagagggaaaggaagatcatgtttgtttattgaaaagatcactatatggcctaaaacagtcccctaggcaatggtacaaaagattcgatgaatatgtgctaagaattggtttcaagagaagtgcctatgatacttgtgtgtatgttagacactcaagctgcatcgtttatctcctcttatatgtagatgatatgttagttgctggaaaacatatggaagagataaacaaagttaagaaacttttgagcaaggaattcgaaatgaaagaccttggctcagctaaaagaattttagggattgagattacaagaaatagaaaattgagaagcttaaagctctctcaaagtggctacatctctaaaattctatctaaatttggtttcaatgatgtgaaacctgtttgcacaccttctactcagctgttcaagttatcctcttctcaggctccaatcaatgaagaagatatcaactacatgaaaaaggtaccttatactagcattgtaggaagtttaatgtaccttatgatctgtacaaggccagatcttagttatgcagtgagtagggtgagcaaattcatgggacaacctggtgtagaacattggaaagctaccaaatggatacttaggtatctaaagaaaacatctgaggttggtctcatttatggggcatgttcaactacctcaaatgtagttggatatgtggattcagactacgctggtgatcttgacactaggaggtctcaatcgggctatgtatttctgctgaatcaatgtacaataagttggaaatccaatctccaagctgttgtggctctttccactacagaagcagaatatatagcctgtacaaaagctgtcaaagaagccctgtggctaaagggaataacaagggaactagaaatcgatcaacatactgtcatcattcattgtgatagtcaaagtgctttgcatctcagtaagaaccaagtctttcatgagagaacaaaacacattgatgtaagacttcacttcattcgagatgttctgtctactggcaaagttcaaattaccaaagtcagcacagaagataatgcagcagacatgctcaccaagtctttacctacaacaaagttcgaacattgtcttgacatcctaaagatttctgaatcttagcctactatctgttcccccatattagttcaaggtggagaattgttagatgttatgtcctaatatgtggatcagttagttaggtattcttgttcctagtttctcggttgtatatccagctgtcataactgccttcttgacagttatgacagttggtagccttttagcattttagctcttaagtcttctataaatagcattagcttttgatcatttgtaatacatagaaaagaacacttttctcatcttgtaacactaacagattaatcaataatagagtaattcattcaactctgtttcgtatggttgtgattggttctgtgagatactttcgtgcatcttctattggagttcttgtgtgtgtgcgtgcatatgaatacagattgaaacttggcttgtttccaacacttttttagcagttatagtcttcattggctcaacctctgtccatttggtgaagtagtctactgctactattgcatactttactcctccctttcctgttggtagggacccaataagatctatccccgagaccgcgaaaggccaggggctagtcattagggtaatctcattgggaggagctctcgatatgttcgcgaacctttggcacgaatcacattt

SEQ ID NO: 222953 - DNA, 1015 bp, Cannabis indica
aggccacttgtttttgtaattcctttttaattataaatttgtaatatagagtaattttgatctggacaatggatatagggggattcattttaacaatttccacttgaatcccatatgcactggtagaaaatagttaaggtcttctgaaggtcttagctcgaacccacgaagggtcttaccaacctatgtcaacccataataagcttaattagggaagcttaaactcatttagagatgccaccttagttcccatgtttgcaggattcacttttgtaggcactttctcaattctaatttcccctagagtaatcttatccctgataaattgatatttcatccctatgtgtttagtcatgtcatgaaaaatagtgttttcatataagtagatattggtctgactatctgtgtagataatatggtctttttttagctaggtttagctctttcgtaagaccttttatccataggtctttcttaatttcctctgtagtggaaatttactcagattcaataatggattgggtcactactggttgcaattgcacttttcaactcgtgcaatgacctcctcttaagaaaaaataggctgatgtaaatctccttgtgtctctatcccttgtattgcatagtcagaatatgtaaatccctcaatattctgttgtgcttgaagtgcctaatacatcaatcttactttagttgtgccctttaagtatatgataagccatttcatggctttccaatgattttttcctaggttagacatgaacctgcttagcacgttgattgcataagcaagatcaggtttattgctaatcataaatacattatagagcctactacatttaagtagggtacttctatcatttttttcttgttccattgtaattttagagcacatggtattagacataagatattggtgggcaattggctgtgtaacagccttgacaaccttcatagaaaatttttctatgattttgacaatgtaatcttcctagtgtagcatcagtttctc

SEQ ID NO: 222954 - DNA, 1777 bp, Cannabis indica
atagtatatgaagtaattcccttattttttttctataaaataactttttaaaaaagaaagaaaaactatatttttttcacacgttgcatagaaaacccataaaatgctcgtttggtacgccgtataagggtcgtattgtattaaataataaataacactatgtttgaataaagcaatacattgtattaattattacaaccaaaattattaatacaatgtatgttgtattatttaatacataacaaatggtctgtattagcttgtattataatatttgcaaaagattcagggtcaacattaatcttcgacctgaacccaagacttgggacccggacccagacccagacccggacccagactcgggacctggacctgggcccagagttgggactcagatgcggatgcggacgcggacccgtagttggtgttggggtcgagtgtattgaaaatatattataactttacacaatctataaatacaaatcaataccaaacatagtattgtattaaataatactaatacaacacaatccaacacaatacaatacaatacgacgtaccaaacgagcccaaaatgtcttatttcctcgttgggaaatggaaagggaatgaatataaatgattttttttcttattcataatataatataataagagatagcatgtgaccaacggagcagaataaaacattgcctcaatcaaagaatattacaaacctaataaatacgagtgattaatatatagtatcttaattaataatcttgtctcttgacatggttttaaggtgaaaggtttgttccttggtaaggttggtgtggtgttctgttcttgttggtgtctttgtctggtgtttggctcctaggcgctttttctattctctaatggcttcaagcagtttgaatgttcatggtatggatagcctttatgctgagattcatttggatgaggaagatgatgatgttctggtttataataagggcagtatcgttgataatactgtcgacgatcagtggtgcttagttgggcatttcttaacggataaaccaatagattttgatgcaatgcaacatttgttggcttccttatggcagctgggacgtggaatgtttgtgaaagaacttgatactaatcgttatatatttcaattttaccatgaaattgatattcaacgggttatggagcgtagtccttggacgttcaacaatttcctgctggtgtttaaacgattgaaacggggcgaaaatccaagagaagtgaagcttgatgaagttgacatgtgggttcagttgcacgatctacaatcagggtttatgtctgcaacagtggctagagatgtagccaataggatcggtaagtttgttgagtcggatccgaagaactttatgggaatgtggcgtaattatctacgagtacgagtcactctcaatgtcaacaggcctttgaagaggcggttaaagcttcgtaatgacgagggggtggagttttacacaaatttcaaatatgaacatgtcccaacattttgtttcatatgtggaattctgggtcattctgatcgtaattgtgaaaggctttttgataccccagatggtagggtggttcgtccttatggagaaggaatgagagtgaagccaagacgtcgtaatcacaccattggttcgaagtggctgcggcagttcatggtgacttccgatgaagctaacggcgacagaggacaacctggagtgggcgattcaaatctcccagttgttcacgtccccatgatcacggaggaaattat

SEQ ID NO: 222955 - DNA, 1377 bp, Cannabis indica
atgagggttatggtatttgcagccaagcttaaggagatggatcctctatgctctaaccttcatctcaaggtagtctacaccatgaaatatttccctgatagaggagacgactttatcaaacaagaaaaagttgttactcgagctaaaaacttaagaaaacaagaaaaagaaatttccagactcccctacacctaacactaaggcagtaggaaaggagggaaaatggggggaaaaagatcgaacaatggcagtaacacaggctaacatctctaacggaaagaaagctagaactggagagagatccaacaaagagtatgtgcctagattcaccacctattatattctcttatccccaaaagaagaaatctatctagaaacttagtcaatagtgccatacaaaaagcctcttcccttcaaagagctagggaaaaaagacatgaacaagttctgtcgctaccataacaattacaaccacgacaccaatgagtataatcagttgcaggatgagatagaatttttaatttgtcaaaagcatgctgccctccagcggcatgtgagcttgaggaacctacaggaagcaacgctcctctctaacccgcagcagtggcaagtcagttcaatatggtagttggaggtccatatcttgttggtaactcgagaagagcactagagaggttagttagatctttgtgccactagccaaaattagaaatgttagaggttgcaaagcatcctctaaactatctatatttcgagtgtgatcctacatttgaggaatttgactcagaccacgtccactaccctcgcaacaatcatctcgttgttgaagttcaaatagccaacatgatggtggctagagtgatgattgaaaatagagcatcatcaaacatactttttcaagaaaatattggagagaatgggtttgtctttaaaaaacctagagccatgtgaccaactcacgtatggtttcagcggagatagaatcattccctatggtaagattaaattaccaaagattttcggtactaccccaaggaaaaacaccatcatggaaactttcataatggtcgacactaagtctccatacaacgtgataataggaaggccagccctatatgacctataagccatctcgtccatctaccacttgtctatcacatttatgacagcagctggcatcgatccccttctttgtaagcaaagagccgctcatgagtgttacaacacattgttgacatgagcaaagaagaccgcctctactgcaaccaaggagacgtcagacaatgcacccaagactacttgaaggtgcgtccaagatggcgatgacatcgaccctcattttgggtacattgactcgggagttggtctgaccgagga

SEQ ID NO: 222956 - DNA, 1550 bp, Cannabis indica
ggacttccgaagttacgtgtagacttcatctgagttgtttttgcatttggttgggtgacacgtgtcaggtgcacctgttcgtgattcgatgtgaggctgacttggcatctctttagtttttggctaataaatgctctgacgcaattaatgcttcgaaatcttattttctctcaccaagtttgacggttacacttgattactttttaatttccaatatttgctttttgggaggaaccgaggagtctaaggtatttgaaatgattaccccttttcgtttttctgcctataaatacgactgagcattgttcccaaaatcattttctccaacttatccattaagcaagttcagagacaaaagagatttttcactttgagtgtgtcgttaaattttcacaagaaccatccaatcaacttcctgtagactaaatctagacgtcgatcagtaagtaagttttcgattccttctacttttactttgcacatttaatttctaaatgcaatcttatccttgctgtagaagataggtagaaaaccctaggttcgataactatacaatattcctttgcaatgatttatgcgacttcactattcatgatgtttgccttttgactgcacaatgtaccttgcttattcaaagcttcgtaaaatttttgccctaactctggaaaatttcaaacttctgagttttaattcatcgtcgactatttctattctttaatctgttgagtactcctggtcggaatatttgcctatttattgtccgatatcccgaccaaacactcatcttgcatgtggtcttttgtagatgaaacctggtgagttttggggaagcgaacaccgaattgatcaggatttgcttcaactcttgtacgaggatcaccctcatctttgttgtagtccgccttcttcaagcgatggacatttcaattcaatattcctgtacagccacaggatgatggctcgcactaaatagacaatgcgtcaagtcaacgcatctgaccttcacgtggcccagcacgccaccttaccctgagccgaataggatctgcccgtctaggaggagggggatcacgaaggggacgctgaagtctaggagatagaggaacggggcagtgttcgtcctggtagtcctttcgaggcggaggaagaggaggaggctgcaccccaaaactttgggcgatacaacgaggctggggagccagtagacctcaaagaatcactcagctgctaggtgttgcccggaatataactttgttgacctcgaaggacaactttgtggagtacgggctctacccgaaggatttcattccccagcctgttgaggagaagaagaggaaatccagtgctggtcgcgctgagggagctcatccagagaatgaactcattcaactcaagcatgaagctaagttgaagggaggtgcgggagccaagcaatgtgctcaggagcatcttgagcaggaagacgaggttgaggaagagcaagtgactccgctcaaaaggaagaagaaactttcagccgagcataggcctatcaaacatacgattcagat

SEQ ID NO: 222957 - DNA, 1807 bp, Cannabis indica
tcacaaacttaatttcatttgttcaaagacgtaatatagaataaactgtcaattaaaaagtaaacaaaatatattaataaatataaaatataaaataaatataaagtataagaaatttatatttatagtaaataatcgaatgatttcgtcttttttgagtgttgtttttaacttactttcctagttcaccattctcggaaagcgattcgattttttcactgcatactccttgtccagctctaagatgacctcgtatgcctaatactgcaacgctgcaatatagtcgtaagatgagtatttagcttctttctgactaactctttttttaatattctttaattattcttcacatctatgtagactttattacaagttttcgtaaacttgttgtacggaattatttttcacggatactcgtagaagaatgaaaggttgtcaactattcttatgacaaaaggagggactgcagtcttctcctccttatcagtgaggacgcccataacaaacaaagccatccccaacttgtagacatcatcaacttctgtgcagctctcaaaaattctgctcagttggtcaaagctgatggaaggattaccgttgaaaaattacataatcaaccggttcaaacgtctattctcttcaatttcttcttcagtttgtccgggcaacaagttcaacccagtcatcaaactaaactccagcctatcgaatctgcatcttttctctgccaaataaaaatgtacctcgtctgacttgtcaaatttaatcttgtacaatattaattgatgaatcaatgccctcgaaaattgtaatggttgtctctcgaagaactgtttaaaaggggattccctcactttatgaatttctcaaattataccttaattttcaggtggtaataacttctcccgccccaagttatacggcttgtgtaatgtaccgagaatggaattattagctgtagagatttttacaaaaaaagtgaaagttagaatcggatccgacccaaaatagccaagttagaataggatatcggaccaacatcagacgcatcgggccatattaaataaaaaattaaaattttggcaaggccattgggccctatattgggcccaacatcggacgcatcgagcctatcaaaatttaaaattttgtcaaggccatcgagtcctatatcgggcccgacatcgggccacaattaaaaatgaaaaacttaataaggccattgggctgtattgggcccaccatcggacccattaggccctaaccaattttaaattttttacgaagccatcgggctccattgggccaactatcggacctatcgggctttcgtctactttcacaattttgtaaccccattggacgtcggacctacatcgggcttgtatcgggcctcgacaaaatcaaaccccaaactcaggtttttgtccaaatcacacgttttaagaaatcaatacctaaatcgaaccttaaatttaacaaaattcacggtgcacacataaacacatacattataatcctaaatcaatatctatcaatactctcaaaatcataaatcacccaaaaaaataatgacaaaaataataaaaaaatatcttaaggcttaccttcgacatctctgttcgaagcttaggggtagagggttggagttgcgtctcacggtggttgtgggttggttggatccgttgctccgtggtctgggtaggcccttggtgatttggtgtgggtgagacggtgagagaaacaacgagagagatagaggaagagagtgagttgagatttgaaaaatgaaaatggtatttttaaa

SEQ ID NO: 222958 - DNA, 1388 bp, Cannabis indica
ttcaaaacgcttctcttctctcaagttaaaaaattaaaaaattaaaaaaaaaaaaaccaaatctaccttggcagtaacaaacaaatgaggtctgacttttattttaattataaaaacgcctttattcaaaaaaaaaatacaaaagtaataccgtcaacctcttattacaaatttacagcttaaagacttttaaggatatttgcggtgggggttattaattttttttcaaattgcaaccgtatcatactacgagatcttaaaactacaaaaatcacaaaatacggtgtagtgcggtgcggtataatttaaacaatttacattatcattatttttaaacattattcaagtttaaatattataatatatatatactaatattcatcaagtaattatattgagttgtctctaaaaaaaaaataatcaaatgcacatataataacatatatttttttcttatataaaataaaaattatgttgtaaaaattggtaattccataatacatggtatggtccggtttaaaccgccttaattaaattcaaaactgtaaatcacactgcctgcccgatttgataaaaatacaaagcacaaccgcaccacaaaagatttaaatcacattttttatgtagtgtggtacggtgcgtgcaatttatgcggtgtgagcagtttgatgaacaaccttagagactctaagatcatttttcaaacttgctctcatttcgaatcaagagatagataaataaacacatcccattacactaatcgggcgtgctcgtaaggggatccaaagaccaagaaataagttatttatcaaccaagtattcttcttacgaattttttaattaatgttcatacttaaaatcgtacggtaggattttttttcttatttttttacaaaggtgttcattatacttataacattattcttgtaaaaattttaataatttatactattaaaaataaatttaaaattttttaaagacgcttggtaatctgaaatattaagaactttatttttggtattataaacatttttaaaaaaatttataaaaataatatgataactataataaatactgttataaaaattaaaaaaataaaataaatatttgaagtatgaaagttgagttgtaattagcactatttgttgaaaagaaaaaaaaaacaaatatctattggaccttgtgtattacaaaacttaccaattggactctctgttttgttaaatgacaaaatagactttatattttcaaaaatagtaaaaataggaccataaactcaatttttaacaattgtattttataattaaatttaagacaatttataacatgaacagatacagataatgtaacctgttttgtcatgatatctctaaattaaattattatta

SEQ ID NO: 222959 - DNA, 2433 bp, Cannabis indica
agtatattttgacgcaattttttttaacttttgtagttattaaaaaatgcattcgaaagagaagaaacaatctgtgttaagtgatggtgacatgccaagcgatgcttacagtgattcctgtaacgattcactggattctaatgtccaaactaccattgaattgccaaagactgttcaattctttgacttctagtaagtacataaatttcacatagtaatattaccaatgttaattttatgtctagtttatttattgtatgcgttctaatttttgggcagccgaaaaaattacgaagcttttaaaattagtcatcccaaattgaagctgaatgaagtacgtgaacttgttaaaactcaaattttagaatggtttggaattgggaagcgtttgtaatgacttgattttctatattatacagatttgaagtgctatgggtgagttatgggatactttgaaaccatcagagaaggcaaagtatggtgaattgagattaaaatcagactagcatcaaaaaaatttggtaaattgttgttgtaaatatagctcattgttaagggttaatgcaaggttgaatgataagcagaagaaaacagtgcgtgcagttggatttgggtcatttttagagatgaatatagacaaaattaaaggctcattaatataccatgtgatggactccctggacattggtggaaaagtccttaatatgaatggcactctgcatgtgttggaaccgaaagatgtcgagagagtaatgggtataaaagatggaggtacacccataaatttaactcattgtgatattgaggatccttatcaagaattattgcttgggcccgataaactttgcaaactcaatgatttggaggtccttttgggaaattcagctgctgatgatgcaatattcatcatggggtatgtattgtatgttgttggagccatattgtgcccaacatctggagtgcgtgtgaagaatacctacctttctgttgtaagagatgtcaacaaaataagatcattgaattgggcaactcacatattctcacatttgaattcatatatgcaaaattaaacgggggaaaattaattatatgctaagttgtagcctttttctccaggtaattggaatattttaaataaattaaatgtgaaacataccattgtacattaataaggtccaatggcctcgaggacatgttgagagaagcatacctcctattattttttgggacaacaaccatttgaagaaattttggagtttcatcagtcgcaaaggaggttttcgagatagctctgtatgtatttttacattttatagctattcttttttttattctttgtaagatttcatttttatgttgtaccgaacatttgtgtgattgcttttgccgcttaattttgtgtaggttaagctaactgaaaagaaatctacgactcctagcaatgtcgtagacccgatcattcccacccaaaagaaaagggatttttttcatgttgctcactgagaggcgacctccagcactagccaatctgatcttttgcttgagactatactgcatcggtttgaaacatttgctgagcaaattgactagaggctgaatgatatacccgaccaatgtagagtagaggttcgtaaacaattaatggagctccaaaatactggtggagtgaagcagaagtttgatgacaatcctcccacacgtggccgagatgaggctggtggagctgtcggttctgataatgctaaggactattctcttatgcttttgggacatttgggaaatactcaagaagcaaaggaaagtaaaagtgaactattggaactagtggttgagaaaataagcaagtttccaaaagaagaggtagcttggaaggattttgagacaaccaacagactaaaattgtgtgccttcaaccaaaagaagaaaaagacgagcaatgaatgaagtagacgagcaatcaatgaagttggctcagtttattttcactgataacctggaaaggcggtattacttttgtttcatttcgtcatgttttttctctttggaatattttgaatgattttttttaatgctgccacttattccattgtgcagtgaagagttatatgctaatgggagtaatactctggttagagatcagttcaccagctttttaccatgtcatcttatggatggaaatgtaaataattttggatacgaataactaatttcaatttgccttgtaattactactgcctttttttgtttgccattaataattactgtagtaacgctattatttgtagattattacttgctatgctcaaattttagcaaagtaagaacaaaagggcaacggaacatattggtcacgccaaccactgtttcggtatgccacttagtgttcttcaatgtataaattacttataagaagtgtagtatagtttacttggt

SEQ ID NO: 222960 - DNA, 929 bp, Cannabis indica
ttttttgtggtaaaaatacccaaagtattaaaatattattgctcggagtaatacctttaaaattatttatcgagattttcaaaaatcaattaaatagagcttaagaaagatataaagcgataaataatagacaagtaatttttacgtagttcggacattaataatccctagtccacgagtccgttgtattagctttgttggcgagtgtttaaatattacaagtgtttacactataaatattaactttgtattcctatcgtttctcttggagaagaagaaatctcataggaattttagaagaggttgcgtaagtatctttacacatgaaaataagggtatttataagcacatgtgtgggtgagggcatacccttcacccaactaggatttcgtattcaacacgttacaatggctaatgatgacaacatgacgatccgaccgttggttggtagggagccttctcatcatgtggtgtatggttaccgcaacctaatttgtgggactaaggacacgtgttgcccaaaaagttcaccttgcaaagttggtgtctagacatgtcgttggacaaaaaagagctacataagcacatacggacattatcaaggtctgacgcaggggacaagatctgatttggtgtcagaagatatgcaactgtcgccttgagctccggataagacacacccaaatttgttccaggagcatctggctatagacttctcggatcagattaacctactaccatccttgaacacttatagcttctaatccttcccaatagcaaattattaatgagcatcacggagtcctttctgtcctcactgacagggagagcctccaggtaacttctggtagatagcatcttccatgatgttgaaaggcagaaggtacatactaaccatgcatgatctgatgtgactgttgggttttatg

SEQ ID NO: 222961 - DNA, 1667 bp, Cannabis indica
accctctatttgtaaaattagtaaaaaagaaaaagtaccttacacacgattttggtcaataatattttcatatggccaaatttactctctattttcaattagttaaactatgttgtttgtttaccatattttgaaaaagaattaatattatttaaagtaaaaaaaaaaaaaaaaaccgacaaaaacataaataaacgacaataattttgaaaaacgacattaaatttcttataaaatactaaaatagtgaatggtggaaagaagaaaacgacggtaatatcattgtattacggtatttatataataatataataatattgctgctccctacatagtcttacataacataaaaatgacaaaacgacgtaaatgtagtgaaacgacaatatatatgaaaaacgacacactaacgtataattactgtggaaaaaggaaacgacatgttctgaagaaacgggaaactaacaaaacgacataaatgtaaataaacgacaatatatttgaaaaacgacaaactaacgtagacttactgtagaaaatgaaaacgacatgttctgaagaaaaagaaaaggacaaaaatatcggtttgcgacaaatcgaaaataaaagggggacgtcatcttaaaacgacaatacatattaaaaacgacagcaaaaataattataaggaaaagaccgaaaaagaacaggaagagagagaatatgaggatgagagtgagagtgacgttagtaattagaaaacgacaaaaggagaaaaaaaatatcaaggaaaacgacacaatatgaatgaggtgcaatgtacaattaattctttccacctaaactaaataattctatcatgtgatttatttaaaataaaaaaatgaaaagaatatacagttaaatttagagttgtaaaaaaggttaattttttttaaaaaaatctttttcaatatttgattctaagaatacatattgaagtattattttaaactttttaaaaaattataaataatttactatactgacaataaaattgattattatttcgatttatcatgcttgaaaaattaaatttattgtctcccattataaattagaatactttcaaaaattacaaaaaaataaaaagtaaaatacattttcataaaaataattaagaaaaatattgaaataataaaaaaaatatttacaaatagttttatgttctttacaagaataaaaaaaaattaataagctatgttttattttttattagaaactaaaataaggaaatgacacatgtcaaccatctatccataagatgcataacctaaattaatataataaataatagtgaattagtgatgtgttctagatcttatcgattattaatatttataataataattaaaattttttaaaatatgaatagtatataataatcagttcttattcaaacttttttgttgtttttttgtttttgtggtgctgttcttatcagtctaaactttctataaattaaaaattaatcgacgttttaatttaatcagttatgttttgatttttttttattataataaattataaataaaaaacgacacatgtcaactttatctccatatagtgccaaaccataataataataataataataataataatggagtgttcttatcaattatgaattatttttattttttaattta

SEQ ID NO: 222962 - DNA, 2502 bp, Cannabis indica
atattcgcttttgggggaaccgaggcgtcttaagttttatgaaatgatttgcccttttcgttgtttgcctataaataccattgagcatttgttcacaaactcatttttaccaaccttctttgctaagtaagttcagagcgaaaagagaggtttttagcttcaagtttgctgaagaactttcacaagaactgctcgttcagtttggcgtaacctgaacccagacgttcgatccttgagtaagttctcgatttctgttacgtttactttacacatttattttttgaatgcaactttaactttgttgtagaagatatgtaggaaaccctaagtttagaaactctgcaattttcctttgtaacgattcatgcgacttcatcgttcataatgcttgttttttgaactgcataatgtctgtctttcatcttgcttattctaagcttcatgaaattttttgccctaactcacgaaaaacttcgaacttctgagttttggctttccattaaatatttttattctttaatatgttgagtagtcctggtcagcatatttacctgtttaatgttcaatatcctgaccaaacactcatcttgtgtgttgtcttttgtagatgaacccaggtgatttttggggaagcgaacaccaaatcgaccaggacatgcttcaacttttacacgaggatcatcctcttctttgctctagtccgccctcttcaagcgacggacattttgattcaattttactgtccaaccaaagaatgatggctcgtattaaacaaagaatgcgtaaagccaacacatctaatcctcacgtggcccagcacgctaccttgcccagcgccgaacaggatccacccgtgcaggaggagggggaccatgaaggtgacgctgaggttcaagagatagaggagctaggcgatgtccgtcctggtagtcctttcgaggaggaggaagaagaggaggttgcattcccaaactttgggggatacaatgaggctggggacccagttgatgttgatggcgatgtcttggtcgagggtgtggattacgccactaaggaacttactgatgcggttccccaaaggaggcagagtgcattgggcgccacgtgggtgagccctccgtccaaggtcactgaggcacgcttacgggatctcgatcagggcggctacctgggcgagttagattattacattcccgcgtataacaatcgagccacaaaccctaaaagggaaatgtgtgcttggtcgggtgctcatgctaagcaaggggcattgctgcctttgcacccatactttaggaaggtggcagacttcttccgcctctgtccgacccaattcactcccaagggcattaagtatctgtatgccatgttcattctctatgcctcctagaagttggatatgccctctccccatgaggttagctggttttttgacttgaagtctacccttaagcaaggcaggtcggggtacttctatttctctcagccagactacaagtggttgacgggcattggggataaggacgttagcaaaattgggcattttattgacgagtatttcatggtggaaggcatgggcaccacctacactcggttccagcagatccctatataccacggcccacccttcacacttgctcttagggatagagctcaaaggcttgctcagctgccgagtgctgcccggaatatcactttgttgacctacgaggacaacttcgtggagtacggactctacttgaaggatttcatccctcagcctgtgaaggagaaaaagaggaaatcccgtgttggccgggctgagggagctcatcaggaggatgaactcattcaacttaagcatgaggctaagttgaaaggaggtgctggggtaaaacagtatgcgcatgagcctctggatcctgaagatggggctgaggaagagcaggtgaccccgctcaaaaggaggaagaaacttcatgccgagcacaggcttgatgaacaagcaattcgaatcagggagcccagtttacctgctcagccatccacttctgtactaggaaaggcgaaagctatcctagcagagataagagacttgttaggtgatgatgagccttcaagtcttgctcgggaaaatgcttcgcaaaatactccgtcttgtttttaatcttcttaatcataatgcttttatacctctcatgcttttctctaaccatgttgcttttatctcgtgcagacatgtctcagaagatgctcgaagctttgaagaagagagtgggaggaagcttaagctcgtctcctctggccaagaagtctaggggcggcgagacgaccccgtccagagagaagacaccggttgaagctgttattgatctatccgaggagcttaccgttgtggacccttctcctccaaaaaactgctaagtccaaggtttctcgaggacgaagcttagacaggctcgagcagttgaagggcggatctgagcatatctgggctcctaccccacctccatcactgcatcc

SEQ ID NO: 222963 - DNA, 5186 bp, Cannabis indica
ccattcaccttttaactctctaggccgtaggtttgttttcaatttgtgaccacgaatataagataaaaaacaaacaaaaaagcgtacattttcctttcacaatatacattacaaaatatttacattaaaaaccaaaaaagaaaagagaaagagaaccaaacaaaaaaacagaatcaaatattggaggatgattcaaatatttgttagattatttttccttatagtagtaattaattgtttaaattattaaaaaatttctaaaaatttataaatgatcttatataattagacacaattttccatatatgtggtgtatttaattggtactacttatgcaggaggaattaaagagagtaaagaaaatgatggttgtaagtattttgatgagatttggagttaatattataatatctatctatctatttatataattctgaaactaaaagatgtcaagattttatttttctatattatcttattttttacttttttatatattttagatttaggatgacatactcaataacaatatatgtttaaaaaatatatggtatacgttattttgtaaattataagtaacatattaaattgttcatttttatttgtatcaaaattactaacttttatttttttttcagctaattaatttagtgttacccaattaatatatgtacaaaagtatgtggctttctatattttttcattttattttttaaattttgtgagaatttcatatttatgtcattaaaaaaaccaaaattatttactaatcttacttttctaaaaatcccacacaatttagaaagtatagtagtgttggaatttatgtcctaaaaacaagtaattaataatcccacactgacgcccgtacctacgcccgatacgttgccaggaagaaaccttacaacggtttcattctgtgccataacctggcaatgggaaaaccttacacggttccattctatcactgacacccgtacctacgtctgatacgtcatcaggaagaaaccctacaactgtaatgcccgcatttgaaaatttactaattcagatttaaagttatttatttatatctatataacctcgtaaattgcgatcccaagtttaaaaccacttgatgaaaatacatgtaatatataaggctacataatattttttttttctttacaaacaacggggtaactacaaaatataattcaaaaatgttgaaagactgaaaccctccaagttgcactaccgcgatatgtacaatccttgccaagcccatctcactgctcctccagcttagccttacccttacctacacaaggtagcaaactgatgagtcgaccgactcaataagataaacataaacatatataagcaatgctattcagactttatgtttaagccgtcctgagcccagttgttaagcttaccaaatggttaagaacattctcaacggaagtacgaccactgtaccatatgcattagagtaccgactccatactcatgttggtagggccattaatgtacttccaggttttactgagtgttgtaccacatgcacgtcgtaccttctggtactcgtgttggtaacactataactaccctaaaaccgtacactgtactaacacctttaaaactttatctttatcagtgctagtagtgtaaataaataaaaacatgcatacattcacatatatatactttatgctatcttacctcacttccgtgctcaggtgtgctggtcagcctgagtggaacaacagcttaatgctttatagggccctaaaaacaatattcgtaattctgatgagaggcacgttaaaacacttctcggggatttaaaataaacattaggaatatccctatcgatgaatagcatggtgataacttaaatatcataaaaatgggaaaactatggtttctaaaactatcccaaccagtagaccgataccccaactgaaattctggttcaatagggcttcctatggaccaaccagtcgaccggttctaacattggcatttattatttgcatttctcatttccgacatggaaaactcatttgaaaataaagagtttcgagtctgtcatttctacagaatagcaacatcttcaagaactcgtgaccaacttccccagagcacataaacaagctaagtgatgtcaaaatatcacttaggcatcttaaagtacatcccttggacatttttacacttacccagcttccaagttgacgtcatatgtcaacctgggcgttgggatgtcaacgaaggtgctggatgtcaacctgggcgctaggtcatgaattgccttcagtaaaacatttagaactcactcaatattgattcgattgacgtgattcaacttgagttcgaagataattcaatgctctatcaagtcatgtctcacttcaatcaaaattttgaagctatcatcgtcaaatttcaccccaaaggacttatgaaaataagctccaggttactagcagtatgacccgtcgggcttcgaaaaatggccatcgccaccaagagctaatttttatcattagatcgtcatctacggtcaaaaacatctaattttaattttttttcctatttttgtgggcctccttcatctataaaaggagctcgcttagctcattttataagttgagaaaactacccacaatgtcagtgcttctctctctagaaattggggcttttgatacttagcctttttctgtaataccatttcgtgaaaaataaaaactcaaactagacgtagctccattactatcgtgatacagggaatgaactactataaatttgatgtgtctctcttataattacttaactactttattattatcgccaatctagcaagcggatgtggcttataagtctcgtctagatttttaagtcaacaccttctccctcattcggcgtcagaaccaaaccggagtcaccatctccggtcccacgctcacctcaagtggacctcgggtcccttttcacgaaactcagaaccccgaaaatccccaaccccaaagcccaacctccctcgctctccctttctcttctcgaccctttcgttataacaatgtcaccaccaccatcagcttaagcgaagctagacctgagaacccaaggaaaacccgaaggtcccaccctccttgcgaaccttctctttttctctctaatttctgccttctctctcaccgaagttgaagtttttcggccctgattgcgtcatctccaattctgtttcacctactctcttctctccattctgcctcatcaacctctattctctcatcgtcgaccaagaaaagtgatctctttttctttgttttttatttgatttgaagttgagttttattgtgtgtaatgatgattatttatgtttaatgacttgaacaaattaaaaacttgtggttttatttggattggatatttgtatataattttgttttatgtaatcatgattttttttttcaaaacttgatttattattattttgaaaaaatgttgttggtggtggcactggtaatggtagcatggtggtgataacagaggttgtaatggtagtgtggtggtaataatggtagtggttgtggtgtgatggtggtggtggtttcagatcagtgggctggtggtgggcagtggtgggggctgatgggtgtgttgaagaaatgggttaaggtagtggtggtttcctgatggttgcagggaagagaagaaaaaaaaaatggattgggttttgattttgcttaaggtttccttttaattaaattttgggttttatttatttttatttgagtaaatttgaagttttgttttattaggttttaaatccactcaagcatgcctatgctgacctgaatggtgccatgtaggccaattttgctttgtagatgagtcatgacactattttccccacgggaacaagtcaatgttatgaccctggcctttaaaacttgcctagcaaatgccacatcaaatgagaataataccttgaacgagttgcacattaagttacaattacaaagaatctaagaagcataagatgctaataaattaacaccccttttctaatctaaccccttgatgaaaactcattactcaggctcactagccgcatattttaaccaaataaccaaatcgacccatttgttcctacttccacatgaaaataaacaaaacaaaaaaacaaaatcacaggaatgttccctagtgtttcaagatatgtatttctcttgctgctcttggagaagcttagctgaagacttggcatccagatacaatgaggtgacttcctcgagatccgcctgcagatcgtgcaaatataagcatgaaatcatagataacaataaggtttaaccacttcattgtaataatgactgagtcccaaattattgataccttgcagatactgtcccgaccattcatttttgcaacaatgctagcaggagatataagctgaacagcatgtctgagaaaacaaaacacaatggcatcattcagatcaaattatacactggttgacacttgacagcaaggacaaaacaaataaataaatttaacatgtaagccaggaccttaaagaagttctctgtccaatctccccaaggtaagccaaactctcctcatcaataaccagttcctctacttgtgcacgaatcgctaaaatctagtccaagcaatcatcaggatatttatcagtgtctggtcgtaacgttctcagaagtggaaaacaaaatatttgcatcttcctttcattaatttgggtgggagaagcggagtagacagaaaaagcacaaaaagttagcatataccttaatcatctcatcaggaccataagtttgtgtccggataatcactagcctatccaacaaatcaacaggtattccatgaggactagccatatctgtacctctgcataacaaaattatactctttaattctttaagaacagagttaatctacaggatgacactaaatataaatatttatacatatgctatatataaagttaagttgtgaacattactacgtcatttaatatacataatctcagattatcgagaataaaaattactgttttcaaaataacaatccaagtcattaataaacaaaagttccaatggtagaagttgtcattgcattaaaataaagtattcaacttatagtcaatatgcccaaattaccaactaccaagtgtc

SEQ ID NO: 222964 - DNA, 1163 bp, Cannabis indica
tcgtcacttggaggatagtatcaggcttaaagacttaggttttttacgttagagttaaggtctttatataggaagcctaaaatcctaatttccaacttgaaaccttagatatttgtatatttaattaattaactacaaaagaccaaaatttctttaaacatagatattatttagctattctgttgggcttttagttcgtagcccaaatcatgtagtctacatgtagaattgcacaaagaaccctggaggtctttccccggccggtcaggcccctatagggagcaggctggccggccatggtaatgttcagaggctggccagacatagggctggtcagcttctgtgaggaagctggtctatcatttgatgcccgtttgagtgctagggtccccgtttactaaggtattgacttggtcttctcgggggtgagttgtactgccacgtggtactgattttgtccatgtaagcacttccacataaggatgacaaaaattaagataacacttgccaagaagtcactcagccgtgcaacttaggaagtcactcggccatgtatctaactcggacatgcttcctagaaattcacttgtccatgaacttgaggaagtcactcagtcatgcttccaagtcgaatgtcactcggccatgcactctaggaagtcactcagccatgcttacaagaaagtaactgaggcgtgcttcctagaaactcactcagccatgtactttaggaagtcactcgaccatgcttcctagaaagtcacttggccatacactttaggaagtcactcgaccatgattccaagtatgtcactcggccatgctagcaccaatgtcactcgaccatgctagacaagaagtcactcggtcgtgctagccaagatgtcactcaaccatgctaaccaagaggtcacttggcatgatcctcatgcatggcactcgacatgcatttcatgtatgtaactggacataaacttcataatgtcacttggccatgaccatgcacatggaaatttgatttcataacaacataactatacttagtaaaattttctgaagtattggagaagagggcaacaagagtacaatcacaaggacaaggcatgcatgcaaggtttgtacaatcacgttttctgcaaattttgaaggcaaggaagtacaag

SEQ ID NO: 222965 - DNA, 2383 bp, Cannabis indica
ttttctatcctcttttgacctcaacaagaatctggtcatggccttgtaggcatatacactttatgaaacttaatggtgagtctattatagtcgaaactcaacttaagactcaagattggtcaaagttgttacacattagactttacttcgttgatacccagtcttgtacaatgacattatctgacaagtaccctttggtacgattgcctgaaattttgtctatggcttagaacctgcaaggaactttgccttgccatagagatttagcccagtatgtggttcctataggaactctgtctggttcttctctggttgtacggttcttgcaaggccttggatttatacatttgaactgattttttattcatattcggccttgaggctttcatgttcttacttttccctataggcactctatttttgaaaactactattgtttagccttaaatccttttactatggacatgtgtctgttctgactctcttcttattgcattgacatgtaagtatccaaattaacttttctttatgccaagctgaagtatgcttgcacttgacttagaaggaggtttagtcgcttatactaagcattaaaatttctctacataagttctccgtgctagtttgatgcattgtacagtgttggtgcccccaagtgagctcgcaaacttacggtctcttgttcacttgcaatacaccaagtcttatagaccttgcctgggaattttcatggggctgccaccgggtgtacgcatgtggaactgaacaagaataactttaaaaagttatctttttagcaagtgggttagacaaaattggtcttacgtgtaacaaaagtttaatgtccacttttgaaatcacattttggctacccgtacctgagatgtcaggtagaggcctttactgaagagcgataggaggccatgctaaaaaacaatgggtactagctcttttaggaattcctgtacggcgaaacattcgaggaaccactatacaattagcgagtgagagcactaaacgagatttttttatccattatatatttttgtagaagaaccaactccaagttctcattgtacttgtcaagcttgtatgcacctttttttattattatcttgtaacttggtgcggacctttccagtttggtcaaaacatgcttactgtaggatctttgttgtcaaggaagattcttcagagaactaagtctcttacaaagaatttccactctttgatttgttagtcagagtacctggcaactttttgctggcacacaagcaactttaagttggcttggtctcttctttcttccttttaatcaagggattctactagcaagatgtggtttatttcttggtcatagtagaccaaaagtatgagagtagactattagtggatcaggctagccatggtacaaaccaggtggtcagccacatttagggagctttgcctggccagtttgatgaggctatggccgaccattctgtggaggtagtggtcggccaggttattgattccaaggtcggccagccttttagaggccaggtcgatgctacagttcgatcccatctacactcagttagaatttacccctggcaagattgttgtagagcctttatgcactcctatcattagctattcagcttttcactggtaacacatcttagaggtggtattgggatactacgtctatgtgttacactatcttgaattggacacctagtagctatcccccttatccctgctttctagcaaggttttgtttggaagaatactattatgggtgtcatccatatggatggttgttcaacatgtctatatttttaaaataggaatgcttagtgctttaaagaacaaagcgggtaacaagttttccttggcagtcaaggcactgctggttagttgcgggagttcatcggctattgtattttctatggggactttccttttagtcaaccgatgagcagacttaacaaatcttgaaattagcttaaataggccatcatctttttgcattgcactacgtattcaactaggacatgacctataactagatgagagtcatggtgtatgtctaggctttgagctctctcttcatgtgctagcttgaggccagcaatcaaagcttcatattcaatcacattgttagaagctttgaaattgacctttcttgcctcgtgcagccactgcccccaaatgccctgagggccatgcctgcaccaggcaggtggtcaatgcaccttctaggttgagttatcttgcttgtgctcttgcttcttctctggatcttgctttcctcctggatcttgagagatttagggagatatgcttttatatttagccatgaagctggcaagagcttggccttctatggccatgctaggtt

SEQ ID NO: 222966 - DNA, 1735 bp, Cannabis indica
gcataaaacccaacagtatttagcattaaccattgggtaaataaatcaataggattctcttccctattttatcatcttcattaaatcttttgttgttaatttctgggtaaatgagccagtgatgatgccatccgcttgagactgtttccattctcgttaagagagtgagccaaaagttggttgatctctttgccatcgaattctattgcaatatggactgatttggcaaccaagttcttgtccaagttttttcctgtagcaaagtctgccaagctacaaggagaaattaatatttttttgtcagctggacagtgaatctctccattaggcttgggagaggttcaaagatctgatcaggaaatgtccacatcatggattgaaaagtggatgttggttcataacttttacaacaggctgattggtaacatcagaacgaatatagatgtcgtagctggtggggaatttatgagaaaaagttcaaacgaggcctatgattttcttgaagaaatagccatgaataatcaacaatggcaaactgaaagaagtcaaacgaagaaggcagctggtatgcacgaggtagatgccatcaccaaattgactgccaaagtagaggccctaacaaagctggtggctattcaggcaaaacaggctcaagttatttgtgagctctgtgggggccctcacatctatgatgaatgtcgggtagatgtgaatagtttgtcaatggatgaagtaaaagccattaggaattattcccaaaataataactttgtgtacaatcaaggaggggatcgatgaaatagtggttctaatcggcaacaataggggttctataagtagagaaatcagtcccaatagaatcaacagcaaccacattaataaggttctagtggagggtctagtattcaaacagatttgttgctacagtttatgatagagactagatcgtccattaaagccttagagaatcatatggggcaattggcaactcagatagctacctgtcctcaggggaacctgcctagcacagcagagaaccaagaaaactgtaaggcaattaccctgagaagcggcaagaagtatgaagggcctaatgggagacaaccagtggaagaagaagttcaagatcaactggcaccaacatcagtagaaaagaagactactgagagtctcgccccaaaagaagcttctccaccagtcagcatagaccaccatgtgaagatcccttatccatagaggctccgagagacaaacttagacaagcagtttttgaaattttttgaggtatttaaaaagttgcacatcaacattccctttgcagaagccttggaacaaatgcctagctatgtgaaattcatgaaagaaatcctgtccaaaaatagaaaaatggatgattatgaaacagtggcattggctgagggttgtagtgcgatactacagaagaaactccctcccaaactcagagatcctgaaagtttcaccattccttataccatcgggagaatatagggaataaatgtgttgtgtgatttgggagcgagcatcaatttgatgcctttgtctgtttttagaagattgcagttgggagaggcaaagccaactacagtaaccttgcaattggctgatcggtcgttggttaatccaaaggggtcatcgaagatgctctagtcaaagtggataaatttatcttcccagctgatttcattgttctagatatggaagaagacagtaatgt

SEQ ID NO: 222967 - DNA, 1124 bp, Cannabis indica
acgtgatagtggctaatggctctgctcaatccatttggtgaaataatctactgccactacagcatattgaactttgcctttccccttaggtagtgaacatatgaggttgattacacagacagtaaatggtcaaggtgtttgcatactattgagttcgtttggggtagctctaggtattttcaaaaatctctagtacttgtcacattttttgacatattccgtccaatcttctgtcattgttggccaaaattacccttgtctcaagatcttttttgagagtctttgccccaggcatggttgccacaaaagccctcatgtacctcgaccatgaggactttggcttcttttttcgtgacacaccttagaagtggcattgaaaagcttctttggtatattacttcgtccatgatgatgaagttagttgcttttctcatcaatctcttagcttcatttcgatcaattagaagaataccttgttctatgtattgtgcaatcagggtcataattgtcgatcatcaggataggccccacgtcttcattaatgctccatttggttaggtatttaacgggaactacactgatagtatgaaaatctgttgtactagctagtttagctaatgagtctgtatttgcgttctattcacacaacacttgttggatggagtagtgcttgggctgggctaatagatctttagctttgcttaagtatgcgatcatgtttgaccctcgggcttgatactcgtcaagaatctaattaacaactagttgtgaatcattgtagatcttgagtgactcagctttgattgctagtgctaatcgcagtcctgtgggttcgtaatccctctagacctggccctgtttctagggtctcaggaatgtttttctctccaattttgctcgaatcttcattatttcttatgacagaaaaaatgcccataacacattttcgagaaattgattggaaacagctaggttgacaatatgtcaatttggacggtgggtcccccttttggcccttccaaaattctatttggttcccaaaaatagttgaatcttaatcttttttgaaaacggtgatgatggtcggaagagttctcgaaaaactatcatcgaaattggtccca

SEQ ID NO: 222968 - DNA, 1684 bp, Cannabis indica
ctcgttcgccaagtccgaactcctactttatcgtgtttaaaaaggcatttttgaggtgcgccttgaggcatttgaaaagtgcatcaacgtgtgcaccttgctgagaagaagtgaggtgtatacctcaagtcgtgaggcgttgagttgaggcgtgaggtgttgaggcgtaagaggcgtgcacctcaaattttgtatgtaaaatgggctatgtaagccctaaagaaaggtccaaattggtattttaaatttagttttctgctgcctaacataagacttaaaaaactttaaataagcacaataaacattaataaaaaagcccaataaaatacttaagtgaacccaaataaaattaaagaataaaaccctagatttatcttcttcgtagcagctcatctcttcttcacaacagcacacagctgctggatatttcttcaagttcaacccacgaaaaaaaagcttgttgccttcttccttcgaattggtgcactaccctgcccctgccttccttctcactgctcctccattttcactgccttcctccacgactccaccttgctgctgccttttaccttttctcataacagaaaaaaaaaccttgctggtttgctgctgccttgtccgagttaggtgcttcttggttgctgctacctttctttgttccataggtaaacatttgaatattttttagtttttttaatttataagccatatttagttgtccttaggttcattaggtggtgatttattatttgattgttactttgttttgtatagataagaaaataaatagaaaatcaaaattgagtcatattggtgctggacgagctagtcgcagtggcagtgttgatgataataataataataataatcttagaaatagaaaagatctggcttggaagcatggtgttgaagttgatacttcaggtgaaaatgttgaaaacaagaaaaattatatttacatggagtgtaaatactgcagaaagcttattacgggtggtgttgcatggttgaaacaacactatgctcacactaggaaaggtgttgcaccatgtaaggaggttcccgaagaagttaagaataaatttgtggatctcttgaaacaaaaaacattagaaaagcgtgtggctcaaatgaaattcgaagaaatggttgagtcgggatcttattacactaagactagtgctcccgtgtctgctagaggtgtaagaggaccaattgattggtttgtgtgtgatggtggtgataggacagccgctgaaaaaaccactcccaaaaaagagacaaaaatgcgtgataatgtttgcatggacattgggaggtgtttctttgagaatgctttgccttttcatttggctaagagtgcttcctttctcaatatgcgtcgctcgattggaaattatggtagggaattgaaacctcatagtatgtatgagcttaggacttggatattgaaggaggagataaagactaccgacactatggttaaggatattaaaaagacatggccatcaacatgagtatcaataatgtctgatggatggtccgacggtagaaatcgaagcattcttaacatcttgatcaacaatcctaaaagcactgtgtttttgaaaagtattgatgcctcctcatttagtaaaaatgtagaaaagttgtttaaaatgttggatgacgttattgaagaaat

SEQ ID NO: 222969 - DNA, 1488 bp, Cannabis indica
gaagaagtatgaggggcctagtgagaaacaacaagtagaagaagtgattcaagatcaataagacacagacatcggaagagaaaaaaaatacgagggtcttacatcaaaagaagcgtcaccacctgttagcattgaccaccatgtaaagatcccttgtccgcagaggctctgaaagatcaatctagacaagaagtttttaaagtttttagaaatattcaagaagctgcacattaacatcccctttgcagaagccttggaacaaatgccaagctatgtaaagttcatgaaagaaatcctgtccaagaagagaaaaatggaggattatgaaacagtggcattaactgaggagtgtagtgcaatattgcaaaagaaactccctccgaaacttagagatcttgggagatttaccataccttgtaccatcgggagaatagagggggtgaatgctctttgtgatttgggagcaaacatcaatttgatgccgctgtcagtttttagaagattgtaattgggagaagcaatgcccacaaccgtaaccttataattggttgattgttcattggctcatccaaggggggtcatcgaagatgttctagtcaaagtagataaattcattttcccaacagattttatagttctagacatggaagaagacagtaacgtccccatcattcttgggagaccatttttggcaacagaccaagcattgataaattttcagaaggataaattgaagctaagggtgcaaggggaagaagtggtttttaatgttcttcaagaaatgacttttccaaaggctagtgacaattgtctctctattgatctcgtgtacactataatggataagaagaaattgattgaggattcgttaaaagtgagtctaaccgaagaggacttgaatgagcaagacgaaagtgatgtgatggaatatgcaaaatagcttgactcttatgggccattgaatagaaaatattttgaagagttgggggtcgttctaaagaggcatgtgctgtctatagataagccaccagggcttgagttgaaggttcttcctgatcattttagatattaatttttgggttaaaacaagtcgttgtcaatcatagtgtcaacttcactttctgatgtggagactgataagttattgagagtacttagagcacatacgaaagccattgggtggacattggttgatatcaggggaatcattccctcaacagttatgcactaaatcttaatggaagatggagctaagtcatgcatcgatgcacaacgaagactcaacccaccaatgaaagaggtagtgagaaaggaagtgatcaagtggttagatgtgggggtggcctaccccattttggacagtaaatgtgtcattccagtacaagtagtgctaaagaaaggagggatgatagtgatcaagaatgaaaagaatgagttgacccctaaaagaattgttactagctggaaaatttgcattactacctaatg

SEQ ID NO: 222970 - DNA, 1786 bp, Cannabis indica
ggtgctctactgtgcaggaaagggtaaatctgtctcttatcagccatgagtgcgagagttgggcgatgtatgtacatgttcgggccatactaaaccaagcaggttggggtctaccagcgatgtactttttgtaactctgttttgccgcttaggtcggctagtgaaaagacttataatattttgtaagagatttttgggatcccgatacttgtcacttttgattgtaaagtttaatgctattacaatttttaatttcattctgttttagtttaaagtttaattttcccgcgcttatctttctagtaatcctggactatgggaattagtgtttcttaaattgctagggtaacgtgcctaatttttagggcgttacattgtgaattggaatttttttggctgatcttctaaaagggttatgttttccctatgttgggtgttggtttgcttaagtggtacttcttactcgctaatgttgaataggagattctatgactctttcaaagaacaaagaggtttttgccaaggtgatcctattttccctttgctttgtgttttggtgatggatcatctcactaggttgttaacccaagcctctcgtgcttagagctttgggttccatcctatgtgtaaatctctagagatggccaatctttgtttcgcagataatcttattatatttttcaaagacaatgccagatctttgagtttagttcatggggccttcatggagttttgcgctacaacaggcttgttgactaactatggaaggtcttccatttaatttggtgtggcatcaatgatgattgtaagaaagagcttttgagtatttcaaagatgacaattggaactttccctttgcaatatttggtagttcatcttcaccctactaaatggaaagaaactgactatgaggggatcttagagaagattagaaggaagttatagctgtcacctatcttttactggttgatctcaacttatccactctattttattgagtattcacaacttttagatgagtatattcattatgcattaaaaggttacttatgccatcaatgaactttatcgtaatttcctttaggacagtaatgggaatgacaataagttgcatttaagttcttaggaacattttacttaaggactatggtggtttggctttcgtgaaagaaaaaagtagaacataactttgatgtttaaatatatctgggccatctcgactaagtaagattgcttatgggtttggtggatttaatgcactttatctgaaggatagtgacttctggatgataactccaatccatgatgcaatatggtactttaagaaacatgtcaaacttatactttacatccacaaagagactatgattaaggcgggtgattgagaaaatacaaagttgaaaagttctattactctctaatttgaaaatacaaagttgaaaagttctattactcactaatttgcaaatataaggtgcattattattaaattgtttggcataaacttaatattccaaaacacaagcttattctctgggaagccttgaatagtggtaggccagttttaggtgctttttataaagtattttagaggtatgtttcaattttatattcattttgtatgaaattatgcttattttctatttattttataaaaaaatggtaaaattcataaattatgaattgaaaataagaagaaacatgttaaatgagatgaatataattaattatcatagaatttggagttctagggtatgagtggcaaaaaattctaagttttggatgc

SEQ ID NO: 222971 - DNA, 1727 bp, Cannabis indica
ctaaatgtgtaaattgtagtagttgtgggaccagattttaaatgtattttgacaatgtttgtaaaatttttagtacgggatcccgacttatgtaaataactctataaaagttcataaaatttaatagttaaatcaaaagtttcaatttgacatgattttcaaggaaaaccctttgattagcaaaggttgcacattaattgataaaaacactgtagcgcgcctaagtatgagggcgttacaattttggtatcagagctgccacgtttgtctaccaaagatcgtcaagacatgtacaatcatcatcaaagaaaagtcgagctcacgattcagtaagcctttacttgtttagtaatgtatgtaattagtaaagcatgctaggaagcatagtagtttataaatgtttattttaatgcattgccttaaaatccatgagtgcagtagtaagattgcaaattgagccgttgtcaaaccaaactaacttacgaattgataagttagtcctatagaatggacacctggtgcaatatggagagtcagaataatgtggtcagggctagtaacagtgggagagaatggaatctaagttgttcccataaccgaggtgaaagccattggagggctattggcgggggtgaagattatctgccacagactttgttagattttgagcaaaggttcacagagatggaagctgtaattcaatggcatgaagaggaaatttagaggttgaaacaacaaagatcttatatagtacctttaccagatataccaaaagttttcaatccattattaacagcagaccaaagtatggctagtaaccaagtggaaccattccaagggggaaactggatgcaagaatctccaacccttcaggtaaattcagaggtgaaggacaccttttggactgggagccctaaagaatttgttttaaagcctcaggaggttatgacagaaggtctagtaactgctccccttatttccatttatggtggaggttgtaggggctccgtggttgagcagaagaggaaacctacatcgacagtggtgggtttaagaagaaataagtggctctgagggaatcaaggcagaggtggacacaaggggtactctttccctgattgcccacattgcaagaaacaccttcccagagagtgtaatcggaaagcatgctttcagtgtggcatgattgggcattttacaaaagatttccttcaagtggagaaagaagagatggagcaggaagcaaaacccatacctactcaggtgtatgctattactcaagttgatattgcagctcgtccttctatgatgtcatgtcagtttctctttaataactcctattttacggtgttatttgactttggggctacacacttacatgtggcatcacggataattaatcaattgggttgtaacaccctaactaattaggcatgttaacgtgattttaaacatattgtgcagctcgtagctaatgaacaagattaatgaaaaacgtgattaattaaaactttcgtatttaattaataaacttaaagtaatacatatataaaattccaagatcccgttacaaaatgcatttataaaagtttgctatacacatatagaaaagttttgtcgcctagcaactatacaacaaaaggccctggtgtcccaaagatagtacgctccaggactaaccccttcaacatgtacaatcttcacctgctcgttctcacgactcctca

SEQ ID NO: 222972 - DNA, 2457 bp, Cannabis indica
ttgaatgtaattacactgtgtaattgctaaaaactttccatattagacattagctactaaaaaatattattttcccatgtaattactaactattttaccaaacaagatattaagaattcatatgtaataaccacctcatatccaaacacaccttgcattttaaaatatagtgtaattactacactgtgtaattactacactgtgtaattaccaccctagtaattactctacctagtaattacatagatacttccaaacgcacccttaataattataaaaatacagataaaaatttattagaattctgtttaaaaaaattatttagtctatgtaaatgataatatttataaaacttgtatagggttgttcataaaatagtccatccaatgcaatttagggccagtttggcacagttatgctgtaggaaaaaagcagctgtatttttttttttgaataaggatgagattgaaagaatttaagaagccctaaaattaattggtaaataggaaattttaaaattagatgagggcaattgagtcaagtgaaaaattcattaaaccaaaattgtagcttccctttaaagctaaaatctcaaatctagggtgagccaacttttcctaaaagctataaatttaacttaaatttttgagaaagctattttttaaattttaccaaacacatattaactcataactttttctaaaagtgattttagctttttaaaaagctctcccaaacggggccttaattcgcaaatgcggatatccgcacttatgtagattggattggattagaaaattcaaaatttgtacttgtgcattggaaccagtaagacagcaagtcactcaaggatgagatccatgaataggatgaggtcccagagcaagacgaggtccgtaagtaggactcattcagtaagtagaacgaggtccgctagtaattatacccaaccggatctgcgagggcacttgaatcagaaaaaacctgatcttcgccaacaactcggtctaaagtaagaggatcctattagacgagttggaagataagtttaggaggtatcaagtgggggagttaggaaaacaatctggatacgactcagatgaggaactcgagccgtaccatccaaatatcatgaatacccctttttctcgtggatttgaaaaccctcatgtctcgctgtatgatgggaccacagatctggtctcgcatttgaataatttcagcactataatgcgagccagtaatgttacaaacaatttatattgtattttgttcctacctcgctagttggagcagtaagcaactggttcaacaaatttactcatcattccattactttctgagaacagttgtccaaaaacttcaaaaagtagttccaggccgcaagggataggcgacctgaggcgtcctcgctaaccaacataaagcaacagcctgacgagacacttaaggcatatttaagtcgctttagcacggctgttacaagagttagaaatttggatgatagtacacaacttactgcccttaggcgggaatcactactgatctatccgttgctgggggaaaattgtgggacgacttacagggtcgtccagtgaagagcatcactgaattcaacgagagggctcaggtgtttgtccgaaaagaagaagctcgaaaagagatgaacttgttaaaaactggctggggaggcaaacccagcaatgtttcaacaagtactgtctcaactagagttgataactcaggggtctctagctcaaagaggaaagatgattctaaggggtgttcaaggacaaaaagaaacaaaagaagaacgacaagtacgtgtcagtttatactatttttaccgagcttaatgaaactcgagaaaatatttaactcgcgcatgaacacaagattgccttcagtaaacctgagcccatgaggcatgcgaggcacaaaagagatccgaccaggtactgcaagtagacattgggcacacaacagacgagtgtcgtcaactgaaagatgagatagaaagtctcatcgcacggggccacttcaagcagtatgtgaagagatagggcaatggacataaccaacccaatctgcccaacaacccaaacaactagggattacaacctcctcctgttgaaggagaggataccctgattattttgggagagcctcagattgcgggagaaagcaacaatgcccaaaagaggtatgtgaagaaaataaaaaaaaaatgagcagtcagtatttgctcaagaactttccaagaaggtaaaaactaaagaacctccaatcatatttttggagaaagatgagaagaacgtgaggtaccctcacatcgatccgttggtgattactatccagcttgccaataaaaggataaaaagaatgctgatagataacgggagttcagtgaacatcctttacagggaatcactgtagaagatggggctcgaaaaggct

SEQ ID NO: 222973 - DNA, 5496 bp, Cannabis indica
gatccaagggtccctccatatgcaggtgtctcgaccatgacccactagcttacaagcccctttcctcagaattgcattagctttgaccacatttttccagaaccacgagtcagaatctttatacttgcagttgagaaaatcttgtcctcgaaggtatttggccctaagaactctgcagcataaagattgacaaccgatcaacatcttccaaccccacttggccaagaaagccaggttcatctccttcgtcttccgaaaaccaagccctcctagagacttaggaaggcagagtttatcccaagctctaagatgcagaccatgatttcctttctcaaaaccccaccaaaaatccctcactagcccatctatccttttcaccattttatcagaaagtttggtggtttgcatggcataaagaggaagagaaagaccaaccgatttaattagagtggcccgtcctgctttggatagcgtcttcgctttccagccttgcaattttgaagttagcccctcaaggatgaaattgaagtccgcatccttttgtttagatctgaaaagaggcagacccaggtacttgatgataccttctggagagccaatccccaaggcttccttaatgcttcttctcattccattggaagtattcttactaaaaaatattgacgttttgagcttgttcactttttgaccagaccaagagcaaaacttctccaaacaattccagaaacctttagcttcattcacattggtccgccctaccataattaaatcatcagcaagaataagtgtgttaggaccgggccacccctacttaacttaatgcccttaaagaccccttttgcaagatcatcttccaagagtcttgataaaacttcagctacacagataaagaggtagggagaaagaggatccccttggcgaagaccacacgagggcaaaatcttgtccaccattcctccattaaggcacacattcagagaggtagtagagatgcattaggtaacccaattacgaactttctggggaaaaccataccactcaagagcttgcttaatggattcccagtttaacctatcataagctttaacaaggtcaatctttattgcaaaatatccctccttgcctgtcttcctgttaaaagagtggataatctcctgaactatcacattattatcctggatattcctacccggaacaaaagccgcttgagtagggcagatcaaagaagggaggataggcttcagtctgttagcaactatcttggagataaccttatacagcacgttacacaaagatataggtctgaaatgattcggtcttttcggattctgaatttttggaataagaaccacattggtcgaatttatacctcgatgcatcttacccgactcaaaaaattcggttactgcatcacagaaggcatcgcccacagactcccagtagtgcttgaaaaagagaactgacatttcgtccggaccaggagccttatggttattcatgtcaaataacgtccttctgatttcatcacgagaagggcacagagatgtcccttcttgatcctccctggaaagtctagacgggaatagatgactgcagtccaaagattgccacggtcccgaccccgagaagatacctttgaaaaactcgatgaactcacgcccaattgactcccggtcattaatccagacattattgctatccaggatgctttcaatggcatttcgtcttcctctaatagccgcagagaggaagaagaatttagaacatttatctccattcttgaaccaatcaattctcgccctttgcttccaataaattgccttcctagtcaatgattcattcagtaactgacgaatatcacgttcctccttccaatcccggcctctagcaggtaacttctggaggcgatcaagtttctgttccaggtctttgattacccagtccagtttaccgaattgagtcctattccactgaagaagagccacacgagtagctccaatcttcttgaagacactagcaggagcccatcgatgctcgaccgtcttccaagcattggccacaatcagcttactcctctcatctctcgtccacccttcctcaaatctgaagcatcttttaaactttggcgggggcccccccgtgtcaagacacagcggtctatgatccgagttgcacgtgtgagaagagctaaggacagcttttggaaataattggagccaactacccttcacaatgcctttatccagggcagatttcacatggttactaccagaccgatggttatcccaagtcattttatctccttggatagtcaagttaatcaaacctctagaatgcaccaaattcgaaatgatagggacaaacgggtcccttcccttcgacccttcacgttccgagtgactaagaacaaagttggtatcgccaaagatcaaccagggacccccaaacctatcccctaataccataaggtcggccctaaaattttttcttagcatggaggtaaggaggaccgtaaacacaagataaaagccaagggtgagtaggggggtccgaatagaccaagcccgagatatggttacgagaacaagagacacattcaaaactaaaaccaatcttccaagccaaactaatgcctcccgcagtgccaatatgcggaacatcaatattaaaatagtagtgtagggatttaagaatacgtaccagaggagttgcatccactttcagttcagtcaggaaaacaaaatcaggagagcgcgatctgatcagggtcttcagctcgcgaactgtagaggtctgccccaaccctctacagttccaagctatgcctctcatggctcctgtggaggagataaaacatcctcctccacaggggtattagagtgaattgacaggctggagtccgagtctttaatcacaaaagatccggccagagggttcttcaaaattccatcagaaaagctcggagagctagagctatcctcagacggttcatcatccaccaccttggactcaagatccggccgaactgggtcccaagggaaatcacgaactacctccgggtactttctgtgcaccttatgaggtctagtgcacaacgaagcagagccttcaaacttccttttctcgaacggagtagttctctcatttgtctctggagaaggcggaacaccaatatcaccaccaattttctttatttcaaataaatccaaccttccaaaatgctttagatcaaagagcaactgttcttgagcattgaaaaaactagccaacgccctctcctcttcatccttaggctcggtctcattacctcccacgaggcctaaagagcttccttcacctataataggtccaccaatcttcaaaggagcctcagaattatccacggttttggtcaaagacggcttgataaaacaagagggaagtgggctcacttgatcaagaacttcaaacttgtcattgggctgagaagataattcggcctcaagccttttcccaccagagaaaccgtccccaggcccactacaatcgggcaggcccactccaacctcagtattaaaaatactcggcccaatagctgccccacacgaattaataggaccagcccatggaccaccaaatgtggaaataacattcccaacacataagttatttcctaatttatttaaaacacctgtgggccccatctgtacacgcggcataggaagaggagagaagtcatctcccttacctctagacataggctctaaacttggaaaaatagcagacccctttccttttccatttgaattacttctaaccccattaccaaaaccagaatggcttcgtacaccatctcctgaccgagtcttgggaacccattttttccttgatagcacagctttcccagacgacggtcgagccgtcccactcaactttttcctcgagcctcgcaccacatcgagcgtctcttcctccacggtatcaccgttaccattgccagtcgatgtcccaacaggaggagggtgcacaggcagtatcgccaaacactgcgccggcaccgactgagacaaatcgctggaaaacacatcatgatatttggaagcaggggatagccatggaccaaacatgggaaagggggcacctttgaggctctcgacagtcaccggagaagacagagaacgtcctttcctttgatgacccaaacatccacaaaaataacagaacataccaagtttttcatacttgaactgcaaccattttttcatcccattagctaaatcaaaatagcatccagaaaccagtggtttatcaatattaacctccaccaacaccctgagaaagaggctccatgacattgggttgtcttctaacaactcaactttcatcactttgccaatcaaactgcccaacagatggccgtttgcaatagagaagaactcatggggtaagttgtggatttgaacccataacttgatgctatcaatggacacacacccctcacagcttggactccacatacgaagcgcaaaggtataacctttgaaggaccaaggaccatgttccaaagcccaatccctatccacattgttctcaaaaccaagcttaaaatagttcacaccagagtcggccagagaactcactacaacccttttctgccatttttttgtcacctcatccgtgacatctccagcatccacaaccatgggagccaccaccttaccaactaagcagagagaagacaatatctttagggaagtggcactaggggacagagaaatagaagcctccatgcacgtaaaggcttttccgttaagagatacattatgagtattaactatatccatacctacccgacagcagccgacaaaaggaaggagaaataaaagctacacaatacaaaaggaattttccccaccttaccaggacacactcacacaaacttacaaaacacacacaaaaacaaaacagaacaaccccaaagacagcaaacaaaaggaaacacacgcttaacacgagagcaaggagcagacccaaggaaaacgagagaatgacaaggaaacgggacccaaaaaaacaaaacacacacggaagaaacactgggagaaacctaacaaggatcaaaaggcagggagaccacaaacttaggacaggagcaaacacacaatgagaataagtagaagacccgttctcaggaagagagaatagttaaagaccattctcccaagtaatgggaatcaataattaccaaaaacatatttagtagcttgtaatgatcatataaatggacactttattctttaataaagttctatgtaaatatatacatctataattatcaagagtacaatattactatatttatagtggagtaattatgggattaatttataaatatataattatttaatcaaaaagttttgattagtaataatacaatcactactacaatatgggcctttagcttccctttttttaacccattttataaaaagggaagctaaagggtgtgagaaaacc

SEQ ID NO: 222974 - DNA, 1806 bp, Cannabis indica
actcccacaccttctggtgtttagaacttcaagggtaggtgattgatcgaactaactgctcctggtccgatcaatgctagacgacccaacaatatgttgtaagccgatggcaggtcgacaactaggaagtcttgcataatagttgcggataggggtgcctcgcccaaggttaatgtgagcttgattatgcccaggatgttattgaatggtgagtaaccttattaaaccagttgcttgctgctccaacaagcgaggtggggaacaacatacatcgtaaattgtttatcacattacttgctcgcattattgtgttaaagttgttcagatgcaagatcgaatcggtggttccatcatacaatgagacatgcgggtttttaaatcttgaaggaaaacgggtattcatgaaatctgggtgatatggctcaagctcttcgtctgagttatatccagattgtctccctaattcccccacttgatatctcctgaacttgtcctcaaacttgtctattcgcaattgaataggatcctcttactttggaccaagttgttgacgaaggtcaattttctttcgattcaagtgctctcgcagatccggttgggagtaatttctgacagaccttgttttactcatagattgtgtcctactaaacagacctcatcttgctcatggaatttgtccttgagtgactcgtggatttactggttcccatgctttctcgatcattagctcgtcgagtactttctcctcttcgagttgatcgactgtgggtccttgacctccttgaggtcgcacttgcttcttcgcgctctgttctttccccctgagtgtggtttgtcatatttcccccattagtgtctgtacgagccctctctctatgggttcaggaagaatgctggtgatttctcgcaggtgacctacgctctctaggctgagtcccaacatcctcctcattttcatgaggaatttctcgttcatcattatctggttacctcccattctgatttctgtgagatggttcttgctgatcattttgatttttagggggtatctcattttccttgggttgttcttctcgagaattttcctatctcttggttcgtgagccacgaggcctgcctcgtggtcttctcactccaagttcaggttgattttgagtgttagtcccttgtgctgccctagtcgcggctgtgtcactctctagttcagcgttctaccgctgtgcctcttccagacggcgtctaaggcgacaattttctgtttcataagtatcttctcccataggctgagtacgtccataattgggctcttcatttctcattccaaggttttggccattcccacgctgagttctccttgagcgtgttgttcgcgtactaggaccaactacaggttggatccttcgagaacgtgtggttcgaatgctggggccaccctcaggttgagtcctcctagaacgagtggtccgtctagactatgggtttgtagaccttctggaacccatgggttctttccgagaatgatggatgagtttcctcatgtggtgtgttaacattttctaggttttcagccatgaaggagattatttttcttcaaaagaaaggagggttttttttttgagctttttcacaaaggctctcaatgaaagcaccaaattgttaatgcagattttcgttaaccaaaatttgagcctcacagtgataatttcacacagaaaaatttaatggagtaaagaaagaggtatgaacacaaaggattttttacatggttttgcagtaaaaattctacataatccacgagtcaatctt

SEQ ID NO: 222975 - DNA, 2545 bp, Cannabis indica
gttataatacatttttttttaacttaatgaataatacttttctataataatataaatattatattaattttattaatttttttaatatatgagtgtgtcataatattatattaatgtattagatttctattataaacgcatttttttttaaaaaaaaaatagtattagatttctaaaaaaataatacaatatttaaatgatatagataaaaaatagatggtgtaatgtaaaagtgtgaggtaaaaaaattaatgaagtattttaaagaataaagtagagaagagtgctctaaacctcctataatataaataaaaaataagcatattaaatctttcgggcatgccttattcagataaaaaaaatcaatacaagctctccaagtcctgttaggctttgggacgagaataggattggctattcacgagggataaaacacctcgcgtataaagtcattgactaacaacttgttcacttcctgttttagtgccccttgtctctcggaatctaagggtctccttttctgtctcttcgctgggtagtttggatcaacatttaaatgatggtagatgatgttagggtcgatccctatcatatctccatggctccaggcgaattgatcctgatttgcccttaagaaacttattagctgctatttgagttgcttgtccaggttcttcccaatgtttacacactttgtgggatttcctgggtcgagaataacctcttccaattcttctattggttttaataggtttctttcatcttgaactcaggggtcaagatcttcgtccttgctttcactttcttctgccaagatcgccattaattggtgaccggctttcctatgctgcaactcaatgcgatagcaatcgcaagccagcatctggttgcctcgcaccactcctacaccttctggtgtttagaacttcaaggataggtgtttgatcgaactaattgcccctagtccgaccaatgctggacgacccaacaatatgttgtaagccgatggcaggtcgacaactaagaagtcttgcataacagtggcagacaagggtgcctcgcccaaggttaatgcgagctcgattaatatgattagaggttcctcagttttcaccttcttagaaggttcttgggcgaatggcgactgctcattctttatctctttcacatatctcttttgggagttactgctctcccctgtgatatttggccctcccgaaaaaccaagatgtcctctccttcaataggaagaggttgtaacccttggttatttgggttattgggcaaactgggctggttgtatccatagccctgtctcttcacgtactgtttgaaatgacctcgagagatgagactttctatctcatctttcaattgatgacattcgtcgtcgcgtgcccaatatccttatggaatttacaatacttgttaggatctcttttgctcctcgcattcctcatgggctcgggcttgctgaaggcgaccttttgctcatgtgcgaggtaaatattctctcgagtttcattaagctcggtataagtagtatacactgggacgtacttatcgtgcttcttctatttctttttatcctttgacggttccttaaaactgtcttttctcttcgagccagaagcccccgagttatcgattcccgttgaaacagtacttgtcgaaatgttgctgagtttgcctctcgagcctgttttcaacaaattcatttcttttcgagcttcctcttttcgaacgaacacctgagccctttcgttgaactcagtgatgtttcttactggacgaccttatagatcgtcccacagctcgcccccagcggttgatggattagtaaagattcccgcctgaagggctgtaagttgtgtactatcatccaaatttctaaccctaaccgcagtcgtgctaaaatgacttaagtatgccttaagtgtctcgccgggctgttgctttatattggttagcgaggccgctttgggtcgtctatccctagcaacctggaactgtttcttgaaatccctggacaactgttcccaggttgttattgaatggtgagtaaacttgttaaaccagctgcttgctgctccaacaagcaaggtggggaataagatacagcgtaaattgtttgtcacattacttgctcgcattattgtattaaagttgttcaaatgcgagactggatcagtggttctgtcatacgacgagacatgcgggtttttaaatctcaaaagaaaaggggtattcatgatatttgggtgatacaggtcaagctcctcgtctaagtcatatctagattgtctccctagttcccctacatgatatctcctgaacttgtcctccaactcatttatttgcaattggatgggatcctcttgctttggaccgagttgttggtgaaggtcaggtttcttttgattcaagtgctctcgtagacccggttgggagtaattgctaacagcatcgtcttactcacagattgcgccctactcacagacctcgtcctactcatggacttcgtctttgagtgactcgtggattt

SEQ ID NO: 222976 - DNA, 1022 bp, Cannabis indica
ccattcgaattgatgtgtgatgcaagtgattacgcaatcagagcagtcttgggacaaagagttgagagggtatttcataccatctactatgctagtagaaccctaaatgatgcttagctgaactatgtcaccacgaagaaagaaatgctggcaattgtgtttgcatgcgataagtttcggccctgtctgattgggaataaggtgattgattatacgaactactcagcaataaaataccttatgacaaagaaggatgaaataccaaggttgattcggtaagtgcttctgcttcaagaattcgacattgaaataaaggacaagaaggggactaagaacttagttgctgatcatttgtcaagacttgagatagaagaaaaccaaaatgcaaaggaggtgcagataaatgaagagtttcctgatgaacagctctttagtttgaggaaaagtttgatggtaccttggtttactgattatgtcaacttcttggctgcaaatgtcactcctccagagatgtctcgtcaataactaaaaaagttcttttctgaggtaaagcattactattgggaagagtcgattctctacaaacactgcgctgatcagataataagaagatgtgtgcctgaagaagagatgtaaatagccttgaatcactgccatgccttacaatgttgggggtatttcagtggcataagaactgctgcgaaagttcttcaaactgggttctattggcccactccttctaaagatgttaatgacattgtgaaggtatgtgatcgttgtcagagaacagggaatgtttctagaaggaccgaaatgcctttgacaagtatcttggaggtggagttatttgatgtttgggggatagatttcatgggtccttttcctacttctttcagcaatttgtacattttattggttgtggattaagtatcgaaatgggtggaagctgctgcaactccagccaatgatggtaaaactgtaacgccctgtccaacagggacgccacgtgtgtgcactttatt

SEQ ID NO: 222977 - DNA, 1699 bp, Cannabis indica
cttacaagcagtttgtctcaactagtatggagaccatgagcctatataaccgagctttcaataagtagatctagaatttacttggtaaattctctaacttattaattcctccttgcaccactatagagttagaattgcactctcaattatataaaacgctctatatgttctacgatataaatacgctatgagattatccatttgttattatcctaataattaatgatcctctatagatgacctacactgactagagactgatttgccgttacatccttcaatgtattttatccttaaaagctaaaacacttagctacctataaatgatattctagtgaactaatataatcactgaaatgagcactcaaccatttatctctattaagccaagctcgaaggaaatcaccgtttgacttctataaaagagtaaccttcgttccaatggttcagaagtctgggaaatctttatttgaaatgtcctttctctccacagtgtgaacatagaagaatacgtctgctcatttgttctctaattgtttcaattgctggctcaattttgattctagctctcaaaattaaacttgaagaagcagcataagaacgcagttctgcatgcaggttgtttatgtcaaatgagttaaaattattgatcatgtatgatacaccaaatccattatactcaagtggaaggctgttgagaatgaattgaacccattgctcttttgataaattaattcccaatagatttgctttctggaacttcaggttcatcatgagtaagtgtgaattgatgctcttaccaggagacatcttcatactatagattcatttgcaaagacatgtaaaagatgaggattcgggtgtgggtcgttcattttgacactacaaatatcaataaatagaaataaattacttggttcaaataaatttatacacagattcagaaaataacaagtaaggaaacatgtttgtaaaactaccaaaaaaacatattcaattattttccaaggtttccaacaaactgatacagtgtcccgtttaggcgagagtcaaagatatcatttattgaatagagtagtcagctcatctaaaatagaaactattttagcaacctttattcgatcgaaagagaatccgacgttgtcccgtttaggcaagagtcgaggtcattcctatttcgtgagcttctaccattgtttcatactttgtaagccctactcttactagccaatatcagggtggacgttactaagaataaaagacttacaataatacttatctttcgagattctgcggcgttaaattgctaatgaacgaacatccattagggatgaatctcactaaaacaagaaccgtgtagaaccaacaatggagatcgaatatctctttgattaaagctcattatttaaaataatgtatttttaattaatcacttattttcatctataaatttttaaataatgaaaattacttaatttaagtaggtccaaaattaattaaaattaatttttaaatttaatttaattttcaaaatcaaattttgaaaaaaatacataaaaaatgtataattttgaaattatataaaaatataacaaaataaattcctgaaaaatatctaatataaattgttcaaaataactaagttttcaacttaaataattttttaaaattttattaaataacaaattaagtatcttga

SEQ ID NO: 222978 - DNA, 1902 bp, Cannabis indica
tcctctgtttggctcgaacgatggtagcacgcgaatattaggaaaaaaataaatttgaataaaaagcgtaacaaaataataataaaaaaatacaaaaaacaacacaacaactgcattaaaaaaagaaacaaaaaataatatctcaatatccatctttctgttcaaatcagcaaaaacagacataataatccgttgctggctaataacaagagacacatccttttttaaatcctcgtactcaatacgagttacatgctcatgagccttagacgatgatggaccaacttgatcaccttccacagtatcattgggccacatatttataaccgaattcacaattacctttacatttatccttaataaaggaaggagtagtgtcatcagaaaaataatcagtcaaatttaaactggatctctcaacagaagttagagaaatattttcaagttgtaactataacgaaaaaagccaaaaaaataaaaaaagaaacaaaagtgaataaacatagaattcataaaaaaaaatgaaaaaacaacactaaaataactaaaaaaataaaagaaaaacaacacacatatacctgctttaaaggccaattgaagatgatgttgttcacattgtccatttttagctgagaaactttaagttttggaattttaggccagttaagaagcctaggtaggccaatgtttgaatacaaagaaattttcccaacgatgtatggacaacactcaaaaaatcaaacttgcaatgaataaggaaaacctaacaacttataaaatctgccatccttatccttctttctaacagtcctaatactaacattaatcttacccttaatagatttaatagtcatctcaaaacacttatttccccacccatactcattataacgaccactatccataatatcaagatccttaatagagacaacctttccaagaggacctccgagcaagtaacactaaacaaaatacaaaatagccaacttgactgcaatataatcattatccctaaggttgttagtagtaaagacaacttgaatcgaattcttggtaatttttttattatcctttaaataatattcaactagcatattcttgtcctatttgaactgaaatgaaaaaaatcagattcaatgtggcaatctagacctgtcactaagacaaattcctatacactaaatttcagaaacttcccagcaacaaatacccaaaattccatctcattaggttgttgaactttccacaacaatagaccatgcaagacttggaaatgaataatgtactctggaatttgaaggaagtgaccaaaaacagtttgagaaaatatttttaattgggttggggttagaatagttttaatatcgttaatgactgaataataaccataagttattactttagaagggagaggaggtcacttctcaaccaatcccagaatcttgaggaaaagagtggtacaggatagttgtggaaagttggcaatgctctcccttggagtgatatttcatgcgagagttgatatgttggtagtgttctctcttggggtgacgtgtcatgcaagagctgtggcatatgggtagcgctctccatggttgtttttatgcattttcttttgtttgcgataacatatttgtgtttatgtctccttttgccatatacaagtttcttgattgcgtattgacacttgtgccaacatgggtgggtttacttatgtccacttggtgtggagaactcgttagttaagactaacaagtccttttcaaatctatggaactttttaagcatatataacttagtttattccatatcttggtgactttggaatttaagttgaacataatttttttgtcgcttattttattctgatgattattatctttgtaacatgggattttaaag

SEQ ID NO: 222979 - DNA, 2243 bp, Cannabis indica
atttggattagatttcaaaggtggaacagagtttcgctattcacaattgaactgttcaatcatgcacacggggagagagagaattattgataccatacacatttatatataatttggttatataaatatggctaatttcaatttttacctattctgaactttgacatgtactaaattatatccattgaacttttaaagtcgttaaaaatatccactgaactattaagattgttgaatttaaggagtttttattcaattttagtaaaaaaaaaaaatctaacatatatgaaaatttaaggggtatgatttggtagttatcagaatctgggaaacatggtttagtatataaataattactgaaatagtaaaattgaatgaaattttataaaagtccttaaatctagctaccaatctcaatagctcaagaaaatttttaacagccaaaaaaattcaaaaaggataatttggtacatgttagattataaatatcctaattaacctataaatatttatatatatatatatagggacacttcaccatgttgcatgatgagtacttaataagtttgtttggatgagaatgtcaatgctgaaaaagtgaacactgccgtgtgcatattttgtatatcgacagttgaagtctttttctttgtggtgggaagaaacttaattaataccaaaacaaaacaaaaacagcctagcctagataaagatatgatcatcatcatcatcatcaagataaatattattatataagctttttgccttattatatattcatattcatgaaacacacatatatattgatagggttgtgattttacttttatgattttattggtaagagtgtcttttttgggttcttggagaaattataatttaaattcttttaattatataacattatatatatattttagttatttaaatttttacactaatttttcatgaattttttttaataatttatggtactgaaataattatttcaaaacaatttatttttcaattgtatatgtaagctaaggagtgtcggttaccatctaattttatattgatatattattgtttattttgagcctaaactctcacgaatttatttttggacggtacttttacaaaaaggcctcaaacaaatgattcttttgtctttctttagacgattacaaatctaaacttgagtaacactctagatcctcctaagtaagctagatgaatccttttactagcaagattcaaaatctcttcaaactaatgatattatttacttttggcttaagctctcagaatttatttttgggtacatttttaaaaaacctcattctaataaagatagtgttcatctttatagaaatccagaatttttcccatttcatttctaactaatatgggattttaattgtatacccaataatataaaacaagcttaagacaacttattttcatattttcaatatttttaagtaattttcttaaaaattagtgccgaacttcaaaataaatttatttcatgatattgttaattacttttaagttttctaaaaacaaactgtaggagattctaaatatctacattgctcttcattatatataaaaaattgcatggtaattaacaatatcgatgtgccaaaaatctgaaaacaggtagtttaataattaaacacgtaaaacatatataaattatttgtaaggtctattttttttattttctttttttgaaatgtttgtaaggtctattcaacaatgtaacttattcaaaattatattacaattttttaaataactgcaatattatcataaatggaattattttgtttaaggtgtaatttaatgcctcacacgtgcatatagatagatacatttattttcatggacatgggcaagactatttctttttccttttttctttttcatctattggtgaattaattaatgtgtttagtacaaaagttgatatatacatatataaatgtatacacatatacatgtgtgtgtagtgtgtagagtggtcaaatttttagggctgaaatttctcagtcagtcactctttttcttggccataacattattgtcccggcttattggaccaaaccatgtgtatataaataaataaatactatatacctatatatgtgtaggcatgtcgactcttatttatagaataaaatgtttattattatagtcgtgtacatgagtcactaggccacgtatgctgactcatatattattcgtatataaaatat

SEQ ID NO: 222980 - DNA, 4244 bp, Cannabis indica
agtgacatttcttgtagtggcaagactaaactctacaaaaaaaaattatagtttagaggacaaaaattttatttattcatatttttattcatttatagaatcggacttattgaattttattcaattagtaaccaaacatatgacctcaaatttttttttttggtttttgtaagggaacatatgacctcaattaattcctaaaacaagtgcaacattatatgcttcaacttataaatgcggtatatcagatgcaatttgcaatacatgtatatggaaagcgtgtgatggggtagttaggaaaaaccaagaaaattgaatagaaaatataaagaaagtacatggatggttgtgtcaaactcttctacgcccaacacgcgtaatttgctcttcatttctattttccctcttatatatatgtatataagacacaaaggcttctcatcaaaatcaactaaaaagaagtaagttttctatcattaaattaatttctattttctatacaaaaagaaatatacacatgagctaggctcttttattaagtttgacgttgtttttttcttcttcactatatatagtcatatacatagttcaatcattcagatatgttattacatgattcaaaggaggatgaagatttagacattgagtctctacaaacaagaagtggttgtagaactgggttgctcgtcccaacagtgaagaaggttgcgtggtggcgcgtgctttacgcgatcgttcgtgtgaaaaaaatgtttgtgttactaaagcgaaacaaagctgagcatgatcaaagtcaaagttacggaaaccgacagccacttctcactcatcatcatcccctagctcttcctaattacgtctctctcccctgcattaatactcatcatgatgatgatgatgttataattcaagtatgtactttcttctctatttaattaattactactattgcatgcatgttcctctcattacttgatatctactgttaatatatatatataaataattaattaagtaaaaacgaatacatgccgtaccttatagtcaatttatatataacgatcaattgatcgaggtatatgggggtcagggatcctggctaaccttcaaattttttgatatatacattctcttacattgaatttatttatatataattatcttcaaaactactgtttttataaccagtgtactccagtttttcatcttcttcttcattttggccactccagtcctgatccgtttcgttcctgataatgttctaccctgcatatatatgcttgtaagtcacgtggcaatttacttaacaattaataatcaggtacctacaaaaatttcagaattataacttaagtattattatcgccaaaaattaaacttagatatttatttacaactaggagttaaacttacgtatttatgccacaaattactctaatattaaacggtcatgtacataccgagttctaaaaatataacttaagtattattgtattattattgccaaaaattaaatttaaatatttatttacagataaaagttaaatttaagtatttatgctgtaaattatttttttatttatttaagttttatacatgacaattaaagatataactaaaataaaataataatatttacaaataaaattaaacaaacatgtctatatttaatatatttcatattttttaggctaatataaacaaatacaaatatttacattttgtggaatagagtatatcgggaaattttttttttttttttgttttgtttgtttgtttgttttttctctttttatgaaaggagaaaaattcccattaaagccagcaagccaaattacaaacagagctcgtcaacaaggagctcaatcattttacaaactattcataactgtcaatatgccattatataataatctctagagattaactttctcttaaaactcccaaattattaattgtacatatatttttttattgtaataagaaatatttgtatatattatttgtatatataatatatattatatattttttcaaaatgtgtgtacgggtataaactaaaaggtaaataaaagcatgagcttcacaacaagtaaggcaagatattgttatttgtgaggtatatatattatatattttaatttaataaataatataaaaaattattattaattattgggttgttattgttttaaactctgtattttgtaaaagttattgattagatcttctgtttttttaaatgataaaataaattttatattttttaaaatagtacaaataagaccttaagttcaatttttaataattttttttaaaatataactagttttctcataacatatttaattacatcaagttattaagttttattttacaaaaaaataaaaaaaaaatcaatttagtgttctatttaatattatttttaaaaaatacagagtccattttgttatttaaaaaaataaaagatcaaattagtaatttttacaaaacaaagagtctaaaatagtattaacacaattatttacaagacaccaccatttaattttattgtgttgagctatttagggtgcctaataataacgtttttcttaaaggtaaatactattggatcccgttttgttaaatgacaaaatagatcttgtattttttaaaaataatactaataggatcctgagctcaatttttaaattttttttaatataacaaacttgaagacaatcttaacacaaatacctgtagaaaatataatcaattgtatcataacacatttagatcaagttattattaaattttattttgacaaaaaatcagtttagaagcctatttgtaccatttttgaaaatacatgatttattttgttatttaataaaatagagaatccaatcaataatttttacaaaacgtaaagtccaaaataatatatatatttttttttaatgctacatgggattcacccacataaggtcagggcacatgaccccacttatgttttactaattaaattgtaattttgtattagatttttttttttttttttggtattagaaaatttttagtaattttgattttgccctcatattttttttttattattattgtttctataaatttttttattgttaatctcacattattctttttatatttatcttcataaaaagtatattattcatttatattctcatatataattttttttatcactgtaaaatttataatttttatcaaacaaaattaatatttttcatttatattctatttcaaagaagaacactatttcgttgcctccccaagataagcagttggttccaccattgcccctattagagggagacgggatactttttcattctcaaatgtcgaacggacaaagatggaaatgacactcctcactctcacccttatggggttcatgtaatttttttatttttttgacgaaagaaaaaaattcattaatcaagaacaaccaatacaaacaatggctacaaccaacaagccacttaccgctacaacaacacttctactgagtcaagcgcaaaaataagcctttctcagccaatttctggtttaagccaagtaagctacaatctatatttattatgctcttaattttctttataacattcccaagcaaaaattattatgtacacactttgagaattcgtgtaatttttatttacatgaaattttattagaaatagtaaaataaaaaattatgaaaataaattaaagtaagtattttgaaattatcacaaattagtgtaaaaaggaaattaaaaaaagtatttttttttctttttaatattgaagaacatttataattttaaattttgtaaggtacaaataaaagttagagactagaagaaggaggtactcccagccatttaggcggaaaagaataattaagattaaacagattcctactccttcgtaaagattaatgagatgagaattgacatcttaccatattaaataccaatgagtttactactactacttttgcttatagtgcttcctcctaccccaactcaactcaactcaactcatccatttttccgaagcaccactacattggaaaaggtgattcctcaatggttacatttttattgtgactatgatagttacatttttttttgtgacctctaatagcaggttactaataagtaaaaattcttttcttaaaattaaattaatcataattaataatttttctaaaacaattattataatttaaatattta

SEQ ID NO: 222981 - DNA, 1367 bp, Cannabis indica
accttgatgagatttacaatcaaagagaagttttttggcgtcaacgttcgaaacagctttggttgcgagagggtgatcaaaacagtaagtatttccatgctaaggccacctctagaaagaaaaataacaccattcgttcattgaaaaataattctggtgtttgggtagattgggaaggcggtttagatactgttattgtggattatttcaaggagctatttgaggcctcaagtgctgaattcgaacaagttactaatggcatttctcctattgtcactagtatacaaaatgctgagctacttcaaatcatcactcccgaggaagtaaagaaggccttgtttcaaatgcatcccgataagtcgccggggccggatggaatgaccccgggcttctaccagaaatattgggatattgttggtagcgatgtcatttgtcaggtaaacgatttttttcaactcttgtagtctccctgatggtatgaatcaaactaacatagtgctcattcctaaaaagaaaaatgtgagtactatgggtgatcttcggcctatatctctttgcaatgtgttatacaaaatcatctctaaagtgcttgccaaccgattgaaagtggtgctccctagtgtcatatctgaaaatcaatctgctttcatccctgggcgccttatttctgataatatcatggttgcttttgaggtgatgcactatttgaaaagaaagaataaaggtaaaattggctttatggctctgaaattggacctcagcaaggcctatgatcgtattgaatggggtttcctcaaggctatgatgcttcgtatgggtttccatcctcgttgggtggagattatgctagctacggtcatgaatgttgagtacaatgtggtgcatggaggtaaatcgatgggtccgatcaagccaagcagaggcattcgccagggcgatcctttatctccctacttatttttactttgtgctgaggggttatcatctcttttacatcagtttgaaaggaatggcgatctgaggggatgtaaggtggcaaatggggcgcctactatttcccacatgttgtttgctgacgatagttatgtctattgtcgggccactgaacaggaagctgataatgttattcgcctattgtatatgtttgagagagcttctggccaaaaggtgaatttcgacaagtcctctgtcttctttagtgcaaatgttccaagtgatttgcgtgtaagactttgtcaaagattgggaatgagggctgctactgaggacagtctgtacctgggtcttccgtgcattattgggcggaaaaagaaggcaatccttggctttttgaaagaaaaaatggagaaaagaatcttgagttggga

SEQ ID NO: 222982 - DNA, 2049 bp, Cannabis indica
ttagaaaagattagctaaatatatatagtttttgttaatcaggaaaacaaagaaataaagaaagaagcaaacaagtgtagggtgatgggcgagcctgttacaacgatttgcacgacggttgtggccgaattaatcaaagatcaaatctattggtgcgtgagacatgtgaatcgactttgtcactgtgcaactcacagaaggcatgtaaagacactgaatgaacagctagaagaactggagaaatacagaaatgaattgtcaagggatgttgagtcgaagaaacaaaaactagaacaaattcacaaagaggttaccgattggctccatgaaacagagaataatatctttgaaaagcgtgaagaggcagagcgtgcaagccaaaacttttgctatttcacattccatccaaaagcaacgattgatgaggacacctttctacagatcaaaaataaaatagatggtttaatcgaacgttacgtgaattttaatggccggtattcttatccttctccttatttagacaaagattacatggcctttgagggaagaagaagaatttcagaagatgtaatgaatgcactcaaagatcccactgttcagatgattgggctgtgtggaatgggcggcatcggcaagaccacacttgtaaaagcaatagctcgacaagcaaaagaagtgaatctgtttgataaggtgatggatagtgctgtttctcaaactcctgatttttcaaaaattcaatgtgaaatagcaaatcatcttggttttaaattcgacactgttgagaccgaacccataaaagcagataagcttcgccaagagttaagtaaacaagtgaaggttttgattattcttgatgatatttggaaggaaataaatctgtttgaaattggaatacactttagcaataatcaaaacgggtgcaagattttattcacttcaagacgtcaaggtttatacgtttctacttctacaagtgagtttgctctcggtcttttgaaagagggtgaagcaaaggagttatttcacagagttgttggcgaaacacttgatgaagaacgcgaagacctctcaaaggaattggtttcagaatgtggaggacttccgcttattattaatgtagttgcatctgcattaagaagaaaacctgcatatagatggaggactttcttagaaaaaatgaaaatagcagacccggaaaatgttggtgatgaagtgaagttagtgtttcaacgtataaagcttagctaccaatttttggatagcgaggaggccaaatcactactattgctttgcactatattttcagaagatcaactcatatctgatgatgatttgttaatgtacagtgtgggttggcccttgttagagcatggcaacacattgcagaatgcaagagacaatctgcacaccctaatagatacattgagagaaaattatctattgttgcctagtgatgtaagaagaaatcacattcgatatcactgggtcaaagttcatgatgtagtccgtgatgctctcaaatcagttgcctcggaaaggaattggtttcctctgtctaagtatgcaaagaatggagaattgcctaaaggtgacctcaaagatgttgttgcaacttcgttacgtaatgattttaccaagatgtttcctgacaaattggcatgcccaaatcttgtttcattcattgatgatgactttaacgatgaaaaatgccttttggatggcttttttgaagacacaaaaatgctaaaagttctgaagttgtatcgtgttgatctgcgctcaccaccttcatcctttagttgtctacttgagagtctcgaaactctttgtctaaacaattgtgacttagaagacacaacatttctcggaagtttcaagaaattaaaatgtctagatctttcagagtctagatttaaaacattgtcaaaacaggtgggtcagctaactcatctacaattgttaaatttagatttttgtggagatctcaaagtgattgaacctaatgttatctcaagcttgataaatttagaagagctgtacatgaga

SEQ ID NO: 222983 - DNA, 2353 bp, Cannabis indica
caacccaacaacaaacaaacaaggaacaactatctgcaacaacaattggatcagttccaagatgattctatttttatcaacactgtgactttaacatcagagtcaaccatacaacaacgaaaaaaaaaacaaaaagaaaactcctacttaagaagaatattttgaaactacggaaagcttgttgttgcaaaaatggtacagaaacttaaaaacaactagaaagaagaagaagaaatcaacaacacagaaatgattatcattactgataaacgacacgaagcaatagaaagggacaaatttacaaggacaaagatacattgataagtgtcttatgctactatgcaatcaagaaaacatttcaatacaaagtagcgaaatcttgctctaaagaatacaatattgtttgtttggactcaaattgcaaatggagtttaaagtcttcaaaaaataaaaacacaaaaacattcataataataaggagttatcaagaagaacacacatgtgcggttccaataagatttggagatcaatgacaagcaactgtaaaattgatagcagattttgtaaaaccaaagttcttaaacctgaaaacaaattgtagtcctacagatataaagggagaaatgaatgacaaatacagaataaagatgaattacatgaaggcatggcgtagtaaagaacgagcacaaagtcagctacatggaaatgctaaagaatcacataatctcttgccaggatacttgtacatgctacaaaaaataaacccaagtaccataaaattattttttgaattatttttatcaaactagaaaagttgcttttgggttggtaaatgattgactaacagttgctaaatattactgttactgaaaaataactaattaaattacaagaacaataattgacatatagaagcaagaaaatgatagtttccaatatgcatttgttgcattgaatgctgttattaaaggttggccaaactgcaagccaatcatgattattgacggcacattcctaaaggccgtgtatggaggcacgttgctcacttctaacacacaagttgaagaatcaaaaatatttttcacttacatactgtattgttgattctgagaatgacaaagcttgggagtggtccttcataaaaatcaaagaaacattcggggttcgagaagatcaatgcctaatctctgaccgacatgaaagcatcatcaaaacaataaaaaaaaaagtgttaccaaaaataacacatggctactgcagcttccacctcttgtcaaatctaaaaaaaattaaaaaaaaaatagcaaaacatttcagaggtccattctttgtagtggaaaaagcttacacagaaatggagttcgaattgcatatgagggagctagacaacttggatgagcgcataagatcgtatctggaaaaaaatagacacgagaaattattaagatatcattcaaaaaacaacaggtaaaacaataaaattaaataataaaaaatatataataaaatgtctgctattgaaaacgttgcttttatgttactttaagaaccataaaacagtcagaaatcaataaataaataacattaccatcatctcaacagctttcacaactgactgaacagtagcctcaacatcaattttagtaactccgtcattgacatcaataaaattcgatcttgatgataaaaaatacaaaataaagaataaaaatattgtaatttttttggaagataaagagaaacttaaaaacaactttaaacgaactaaacaaaacaaacggtaaaaaaaagtaaccataatcaaaatataactattctaaaaatataagaagtacataaaaagagtctgaataatagtagaaaattaatacataaaaagactccaaaatataaaacaacataacaacaacaacaacaaaaaaactaatccataaactaaatgaaattaaaaaagaaatataacatacaaagttactaaaacctagttacattgtctaatgatctaccttcttctcactatcatcgcattcatcatcactgcccttctcatcttttcctttggactcagaatttttattatcatcctcatctttttgctctccatcactataccctcctccttttcatcaccactaccttcatgcgaatcttcatcttcagcatcttgctcttctttattatgatctgtttttttcattacactctcaatcaatatcttcttcattatcactgccaacatcatcattggaagagtcactagctttgtcctgttaaaaaattgtaaataaaggcatatataagcaacttgagaaaaacttaaaaataaccataaaaaactatcataccttagcaa

SEQ ID NO: 222984 - DNA, 2007 bp, Cannabis indica
tcatgatattttattctattttactacttggcagtattgttattttagttacattaatcttgtaaagataatatctttatggagtattaaacttaaataaattgtaatatttaatttttatgtatttttctttctttttagttaatattataaattaagtgtgtaattagatatcaaattaaaaaaccaatcaaagttagattaaattttgaggtctaattagattggatcagatgataattctttttaactcgaattagtaatcaaattaaaaaaaacttcgatcggatcggatgtctaaccctaatctcactcttctactgttttggtgtaattttttttactaatttagtggaatctattattttaataagaatttattactcttagtatactaacttcaataatttataccaaacataacataaaataaatatactttacttaaaaaatcttccaacttttatatatatatttaagaaaaatatctatattaataactaatttataatataattatgttatatacaaaactatacaaatttttttttatataaatatcacattaaatttaatgccactaaatatagcatttcttaactaaacaaactaaatatatgagtattgtttattttgacaatagtgacgtgacaaaaatgataacacgtggcatgagaatactaggattgaattgaaaaagaatgtgtaaagtcatgaccgttggaagaaaattctgatagtcattcttccccctagcttgagcaaggtgactacccctaggattgcggtggactatcaccctcataaacaggataaacgatcaccaaacacctgcaggagttaaaccagtctagggggtatatactactatccctacctcaaatataatgatctacatgtaattagtctaggagtacaccccttaccccctacggggttagtctgggggtacaccccttacaccctaaagggttagtctaggggcatacccctaccccctacaccctcatggttcaagtcacgtattctacctatgtaacacatagttgatatagtacatcttcatgatgccaatgatacccacaacatcaaagatcaagtggaaggggtttcggggagaactagctcgagatgacaattatcatcccccttcacaatgggcctcgaggatgtcacccaaagtaatggctaatactttagaggaagtcaaaacggtcatactgtactctaagagggaccctcatcttttgtaactaattcaaatattcaaatcctgcaagaagctcagcaacaattacaaatccacgaaaatagcaggatattatgaaaagaattagacttcaaccacctccgaaaaccaaagagacaattgagatatctccgcaatggtcgtgtctcatgaagcgagaaacatcaaccttcccctatataaggggttacccatgacctgggaaggggatccgaaaattttgagtacttagagaaaaagactatcattgttatcttttgcattcaagagcatgttcttgagtttgcaactttgattaataaaatacaatgggagtaggttattaccgatatttggatcgtacttctttaaattatggtgtcattatttacatttattgcttgtttttttgatttaaatctcatttattataattccgtgtcgattggctaaaagtccaatcaatattttggtactttcattgagagcataaaccaaaaccttgaattttttcaccagaataaatggtgcttaccaaaagatctaaaaattgatctgatgaggagatggataatgctcgacaagtttcatcaacaagcaatctcaacggaaaaaagggacaacaacccccacatcctggtataggtggtgcagccaaagctcaagccactacccagactactgctggtcatgagacaatcgacaaaactatcactgctgggaaaatgatggctaggcgtaccaccaacgctgtcgccactagaggcagtgctactgac

SEQ ID NO: 222985 - DNA, 1720 bp, Cannabis indica
tagagatccccgcatgaagggctataagttgcgtactaaccctagccgcagtcgtgctaaaatgacttaagtacgccttaagtgtctcgatgggctgctactttatattggttagcaaggctgctttgggttgcctatccctagtagcgtagaattatttcttgaaatctctggacaactgctcccacgaatttattgaatgatgagtaaacttgttaaactagctacgcgctgctccaacaagtgaggtggggaacaaaatacagcgtaaattgtttgtcacattactcgctcgcattatcgtgttgaagttattcaaatgcgagttcggattagtggttccatcatatgatgagacatgcaagtttttgaatcttgaaggaaaaagggtattcattatgttgtgatgatacggctcaagctcctcgctagagtcgtatccaggtagtttccctaattcccctacttgatatctcctatacttgtcctctaactcgtttatctacaattggattggatcctcttgctttggaccaagctgttggcgaaagttagatttcttccaattcaagtgctctcgcagatccggttgggaggaattgctggcagaccttgtcttactcacagatcacgtcctactcatagactctgtctttgagtggctcgcagacttactaggtcccatactttcttgatcattagctcattgagtactttttcctcttcgagatgattgtctatgggtgcttgaccgcctcgaagtcacacttgcttcttcacgctctgttctttcccccgagagcagtttatcgtatttcccccatcagggtctgtatgagttcttgctctatgagtttcggaagaacgctggtgatttctagcaggtgacctcagttctcctagttgagtcccaagatcctcctcaatctcatgagggatttctcgttcatcagtttctggttgtctcctatctggctgttcgttatgattttcagggggtgtctcgttttccctaggttgttcttcctgggtgttttcctatctcctggttcgtgagccatgaggtctacctcgtggtctcctcactccacgttcaagttgattttgagcattcgtcccctgtgccgccctggcgaggctgcatcatgctctaactcagcgtttcgacgctgcgcctcttccaaacggcgtctccggcggcagttttctgttccataaataccttcacccatagactgggcagttccacgattgagctcttcatccctcatctcgtggttctgaccactcccacgctgagttctcctcgagtgtgttgtccgcgtactaggaccaacgtcaggttgggttctccaagaacgtgtggttcgtgcactgaggccatcctcaggttaagtcctcctggaatgggtggtccttctagaccgcgggttggtaaacctcctggagcctatgggctctttcccaagacggtgattagtttcctcatgtggagtgttaacattttctggatttttagccataagggaggttgtttttcttcaaaagaagggagggtttttctgagcttttttaaagaggctgtcaatgaaagcacaaaactgttaatgtaaattttcattaaccaaatttgagcctcactgtagtgatttcacacagaaaaaataaaagatgttgaaataaaaatatgaacacatggtttttttacgtggttttgcag

SEQ ID NO: 222986 - DNA, 1567 bp, Cannabis indica
tttctttattgatattgaataaaatggattacactgaaatggagttttatttagggcataaaacccaacattcttttggtcaggagggttttttctgagcttttttcatgtaggcactcaatgaaagcaccaaactgttcacgtagatttttcgttaacgatattaaagcctatttcgtgattgagttgcacagaaataatcgtagtaaaagaaggagaaacaacacaaatctttttacgtggttttgcaattaaaattctgcatagtccacaagtctatcttattagatttctctaatacaaactaacgttctttatcctaaggatttttcgtccctttttcagtgtattctgcccctattaatagttacatagggaggtaattaattattaagattaatatcccacaacaatattcccctaaaattatgggatttgattacgtcccacgtaaaataaatgtggttattatttaaaaatcacatagctatgattcatccgcttttaccgggtcaatgctaacatggatttagatacgctgcaaagtgtatcttgctgggtcacctccctaggatagcaacaataactctgacagtgagttggagcttttcccatgtctttcgaggttgataatgtaaatatcgtcgtttctgctattgaaggcataacgctccatctggcaatcgcaattcttggtgacaaggtgaacttcagtagtcaacatcacttgaatgtcagcttctatctaagagagctgactcaacggagttgtggatatcatttaaagatttctgaagctcattaatgaaggtaccatgagtataccttcctatagcgagatggatgtctcgctatccgatgtttggattctttcaactgttatgcttagtttgtatgatgtatattatacgctaagtgttttaacattcaacatgtctcgtcttcatctctttatacgtggcgaggttggtgtctcgctttgtattactgatgtcatccttatgattgtgtcttcttatgccaaatggtttctcgtcaacacacaacccaatagtttgtatattgttatctcgcttaagactttgcagtcagcgatttataaatatactctatcagctccgcatttaatgagttattccattttaatttcctttaatgtaattgccattatattcgttgattcgtattctcccaagttgacacgtgtcctcctcagaagtaccagccgaaatttgggtataacaatatgtaattaagttatctttatcaaacatgttgtttactataaagatctaattcatatcatcaggatgatcagtagtagatgaagttgaatcttgagtaaccatatgaacttatgttcatggtattagtttctttgattcacttgttaaagtttcttagagaagatgatacttacaacttctgttttgggaatttaataatgtggatgactgggaacttgatttataattatggaattttgattttcctaacatattgaatgttggctccctttaagtgttaatcctagaactgaaatgtaacaccctaactatcttaggcg

SEQ ID NO: 222987 - DNA, 1591 bp, Cannabis indica
tactaatttcattttttaaaattatttcttttttcaaaatttttctttaactctaaaatttatttgatttcaaatgacaattctttatttttgcttaccaaggatcaattttcaaaacaaattttcaaccacgaatcatacatcttcttgtaagattcacttaaagattcatcattcaattcaaattcatcactatcttaattttcttcatctttggagatattattcaaacacacaaaatgtttaactttagatacaaaatgtggtataacagaattcacgactctcggagtcattatcactctaagaggctatcatacattttctattcctcttcaaaggattttcatattcttactggatatgaccaaattactcacaatcattgcactgaatatttttcctgttagattggaaagtttaagagaagaagaaataccttttggagtcctaacattagacttcttatttccaattttctttatgtatttctgaaaaattctttgcaagaaaagccatgtcattatcaccatcttcatcatttgatgcttccttttcagtacttttaaaagcaatagtcttctctttttccttggatgtactcaatttctcctttgaaggaatattttgattcaaatcaaaggtacgaagagatcccatcaattcttctactttcatagtattgaaatcctttgcttctttcatagccgtgagtttaacattgaacatgtcagcgagtactcgcactatctttctcaccataacagaatcatcaagtttctcaccaagggtaaaatattcattaaaaatatcagataacatttcatagaattcagatagtgtttcagaattagtcattcttagatcatcaaacctagtttgtaacatgatgaacctagatcatttgacatttgcagttccttcaaactaggtttgaaggatagtccatgcatctttagtataaatacaagtggaattaagtttgataaaactttctttaacaacattaaagatagcatgaagagctttatcgttataactagataacttctcttcttcaatattccataaaagttcatattttacctttgtactaccatcctcattttcctttgagggaggagaccatcaaggaaaaatttatttccatgctttttcatcttgtgctttaatgaaagttctcatcctcactttctagtaggatactttgtgtcattgagtagcggaggacgagataccaaacttcattctataaagaaagacatttcatataagaaacaaattaaacagaaattaaatacaagatctcactaagagcttagtgaacttctctgatacaatgaaatttttttataattaccaagtgaaattattagacaatttaaatagtgcagatttgtaataaaattgtttgaatataatttatctctattctatcaaacacaaaatctgaaagaacagaaatatactgcagaaagcaaaattataaaaaataaacgacatacaacactttatacgtggtatcagcaatccttttgaattgctcctatgttgggttttatgccctaaatgaaactcatttcaatataat

SEQ ID NO: 222988 - DNA, 1147 bp, Cannabis indica
gattgcatcaatattgttcattcattatagtttcttttacttctttaattttttttttattttttatattcattttcattataatgactagtatggactagtttctttttaattaaaggttatttcaaaacctaagacatgaattcttaatttctatgatgaatattattttcttagttaccaatatattgaattgtttatattgaattgtttctattcttctatttttaatgccataattatgattttagccttatttaaatgatcactaaattaggttttactttaatctattatcatcttaagattgatattcaccaaataatctaagtttccaggtctttgtgataaattgcaatttttattatatatttcattaaattatttcctagattaatctatctccattgaattcaaagttttatctaagatagataagttgtatgcttcatagatttattgctcagttaaaagagttaattattgtgtgtttcgccttgattacttacaatagggagattgagataattttctgttttagcattatctgcgggattaataatttgattgaaaaattaaaataacatttgttattagtaattaaggatgattgttgagggtaaagattaacttttaactatttcttgaatatcgtagtacacattttatttgttttattaattttatttgttaattttgttctacaaaaaaaaataaaaacaattcccatttttattattgttatattttgaataatagagtaaacatagttatcgtgggatcgaccagtactttcttttatactaaaataattaaaagtattataattaaattaattaataaatttgatacagcaatatacgacacgtatcaaggtcctttcatgttagtctttgaaacttttggtacccaaataaccttagcgaaacaggcattccttttcacatggcaataagatttagtgtgaccatcttggttacaataggtgcaagttaagttaaaattattagatgatttaacaaaaaaattcttaagaaatttttattttacactagtgttgtatcctatactgctttttgaaaaagtatatttctgactcccaagcatcatttcaaaattatgtttttttttttttgtaaaattgtaa

SEQ ID NO: 222989 - DNA, 1477 bp, Cannabis indica
tggatgaaagctgcacaccaaaacctaccaggccaaagtctatctggccatgcacctatagagtgcatgctggtcagccatatgatatccaaaagttggctgacctatgctgaccatagggccggccaacccccttgaggtggctggttcatcattttgttgtccctcctgagtacttggacctctcattggttgaagtgctgagtagatggattggtcttcttgttggcgagttgtactcccatgtggcattaatattggccacgtggacatgccacgtaaggtgggcaaaaattgggataacatttgttcctaagttcctgtgcagatgtttgtgtggatagggactttctagcttagttgggactgatgtagccttaatcgggcaaacattacagtaaattagcctttgaatattttctcttgactgtctgatcacattccttagcagtaaattaactacattactcttctgcatggtttttagttacacgcagcgtggcaagtaaaaaaggggtcccacaaaagctatatatgcttatgggagggaaatcacttttcaatccccacatttcaatctctctctagaaaaagtaactcttgaaagctcttccttctctctagaggccgacgcccataatgctctatctctcgagatttttgtgccattttaacggttcaagcttcccatctattgcatcaacaatttctagtactgggtaaactttcaaattctattattcacttgtgtatttgatttttccatggttgtttgaagcttttcttcacttttaacatttttcgatacccacattagattgtaatctttttggaagttaaatctgcatgatagttttaggatgtataatgtgtgatttttggacgaaaaatatctaattttgaccttcgttgtgattctttactctttgagtcataaataacacgaagaatgtattttgttcttaaaaaacaatttgatctgtaatacaccatggtcgaccatacgtgtcttgttcaagacttaggtgaccatgggtattctcatgggagctggctagccataggggtgtacccaaaagtctggccgaccaatgcctagacttagggtccttgctcgaccctaggctgggtcatagaaccctagtcggccctatctatgcttgggaatcctggctggccaaggcctagttccaagcaggtgacttagtttttgttctcttttgagctcaatagaggttttgtgaaggccttgtaggcatataaatttgtaatctcatatgtggttcccttggaaactctatataagacttaatggtgagtttattatagtcgagtgtacagcttaaaatttgccatttgtttaattgatactgagacggtacttcactgatacctagccttgtacaatacaatttatatagcaagtaccctttggtatgattggccaaaatttagtctgtaccttgtagctttgtca

SEQ ID NO: 222990 - DNA, 1393 bp, Cannabis indica
gtgatagtagggacatgtagcagattagtaatactcagttgtttagatgtaaaaggagagttgatagaagagttacctatgttttcaatgtttagccccatgccattgccaacatacacttgctcattgccagaatatgggttgctggtgtttagatttgtcaagtctggtgtaatatgatgtgttgcccccgtgtctggataccattgttcatcattgaccgactctggtgtagcataaagagcttgaatctcagctatgttagccgttggattgaaattggtgaagcattctggccctgtaaaagacttgtcaaatcgataaaaacactgtttgacagtgtggccaagcttatggcaaagctggcattgtaccttttgtccccaattgttgttctgacccctaccataagatgcagagccgcctctgtttggtgcatttggtgagggaccacttgagccacgtccactgaactgaccatttctagctgctgagttgttgaatgggggaccacttgaggcacgtcctggaccattgtggaaacctggtgggacagctggtgcatgataggatgaacggccatagttgttttgtccaggatatcgagattgggagagatttgcttcagcttttgatatatcaagagtcttggcatttttctcgattctaaccgattgagccattaaaagagcttccacctctgctactgtatatttgtcttttcttgttgtaatagaggtgacaaagacatcatattccggaggtagaccattgaatatcgcctcgatgtgatcttgagtagtttgtgtttggccaatggtggcaagtcgatccacaatgcccttgatcttgaggagatagtcgccaagagaccctgtcatttttgtgtttcgaagctgggttttgtatagaccgacatttgctgcgttcaaggctgtgtagtattcagtcaggttctcccagatctgagcagtggtgtcgcatccgatcatccgattggtcgttttctccgacattgaagacagtagccaagaaacgaggagattatcttgttgttcccattcttcaaagtctggattaactctgttggatctttcatcagtttctgtgaggtattttgctggtgcacgtgaatcatcaagaaatttttggagtcggctgcctttaatcgaagccataacctggtgtttccagggaagaaaattatgctcatcgagctttatggacaatgaatgattgaaggagatcggttgcgatcttggtaagtgaacttgttgattgttgagtgtttgagcattgttcaatcttgatgctccacccgttgctgagtttggattctccattgataaacgattggagctctgataccatgtcaatttacaaagagagagag

SEQ ID NO: 222991 - DNA, 1450 bp, Cannabis indica
ccgccaaaacccaaagcatgcaagttttcaaaaaagggttaagacaaaaatacctttataatcatttaaaaagttttatttaattaaaaaagtactttttaaagagcaattgttatacccaaaattcggctgtactccagaagctaacacatgtccaacagaaggaatatgaatcaactctaaagatataataatgttatatcaataaatgcatattaaataactcgttattattaaataaatgtttgatagataatattcaaaactcgttgactgtatagtcataagcgagataaggataataactactaaactgagattgacgagacatatgcctaccttgaaatatacaaacaaggagggaatatttatccactcgagcagaacaaatgcactaactacataactgcctcacattacacatatcgagacagtcacctcgcaatactaatgagaagataaaaacgaggtaaataacttctcaacacttagcattatttccttattaagatgggcaaggaggataactcatatcaagcgagatataaccttccaagtcaacaataatcgtctaaaggataaaactaaagagcggttgggcagttattagatattatcccacatgtgattaaatgaaacgtggggattgtccacgtttcataaaccgttatatttgaatcaaattcaaaaagagtaactaccaacctatattcctataaatagggcagattccatgggaaaatggacgacaaatttgagagagaaatattattattcaaattttgagattgtattttgtactcaataaatatccctaatgataaggactcatggagtatataaattttaactacaaaactacgtaaaaatatctggtgttattctatcatttattacttatcaatttctgtaaagtattattacaaaaagactatttatttttggttaacgaaaatctacattaacaagtagaagcacaattaatccagtcaataaaagagattgagtctacaactgaagagtaagactacttgaattggtcttaattcaaaagttggctaaaatagaattttacttgacaaataatgaatgtagtatgatgaagtgaattctatccatgatcatgaaattattgaatatcaaatcacaagtaaggttatgggtagtcaagtagtgagtgaacaaccaaaaaaaaaaggttgttagatgaaggtgaagaaaatgtgatattgggggatgaagaagcttatggtatcattgatttaaattcatcaatgacatttattgatacaccaccaattgatccatattttttatcaataccaccctcaccatattatacatcctctaccagctactaaaagcttctccccaagttcatcctttaaaatcttgtgttgttgatgctaaacatggaacatattatgtcaagcttgagggcattcataat

SEQ ID NO: 222992 - DNA, 1114 bp, Cannabis indica
gagaccctatatttataggtaaatactctatcagtctttgcgccacattaattgtcataatattttgacaattaatttgggaattaatctaagaaatgaatgatatgataaattgaaaactgactatatttagaatattcatacttataacatatttatttgtgatcaaatataatcattgagataatgcaaaatcaatttgaatgattttgtacaaatataagaatattctaatattactggaaattgaaagaccaaaactaggtataatcaagttgtattagaagaagtacttgaaaaaggtactaaaaaagttcaagatggacaaggcaaatgatgttacaacccctctagctattcacttaaaattctcaaactcaatgtccacaaacatagaaagatagaaaggctatgggaaaggtacccatactaacattgttggcaacctaatgtattctatggtatgtactagaccagttctattacatgccttaagtgttgttagtaggtacatggctaatcttggagaggattattggaaagctccaaaaagaattctaagataagtagtccaagggaggcttgggacttattttttgaataaaattaggtcaacaagctgaagcctatggctatgttgataatgattattcaaccaatattatagacatgaggaaatcactcactggttttctgttctctgcgtatggaaagacaatgagttggaagtctaatatatagaaagtagttgttctctaaactactgaagctgagtacatgacagcagcaaaagcattcaaagaagctctttggttgaaggacttaacttaagagattgactccaaggaaaaagtgtagatatatcttttgtgataatcaaaatgctttgaattaaattaagaatcctatgctgcatgaaaggtcaaagcataaatgttgtgatcgatgatcaccttgcaatcaagtttgaacaatgagaaccaataaccaaaaacaatagaactaacagcagcaatgctgtagcaatgttgcagcaacactggtataaaaccagtcaagaactaatgaacaaaattgatgaacagattgaataatcttgaatgttttatttgat

SEQ ID NO: 222993 - DNA, 3863 bp, Cannabis indica
taggagatgtcacaccttgaccctcggtaggtggttgcgtgtttgattgttcaggattagtggctggtaggacctttgcattccctagagcatgcatgcagtgcaggatctgtcgccagtggatccacctgatcaaccacgcctcttcgagtttgtaccaccatagtgtttctgatcaaatttgaagtaaagagcaagcttggattattgctctcaatgaaagcaccaaaatgttgacctcgcttttagccaacgacgatgagtcaaataataagcgataagaaatattattaaagtgaagtatgaacgaataaataataaagaacgcaaggttttaaagaggttcgaccccgttcagttcggtaatagtctgatccccttggtttgtattaactcaagaacaaagaatacaatatttcctctcttgaagcgctcacaatgaaatctctgtgtatgcctcttaggtttctctaaagtaattctttcttcccttttaccagtgagaatggatcactatttataaggctaaatgcttaagggaagatttcccttttgcttacaatgtctatagttggtaagaacatatattacatatttagaatatacagattatgggatttggacatcttaccatatctctgtgatacgatcccagattataggaattgcttttatacttcacgatgcaagttctgaaattgctaagtgttgatgcgctgctcgaattgtccactgctcagctgggaagatattatctgtgcaggtgtaagctgagctctgtttggaacatctcttcagccagatatgggaaattaggtccacgtgtcaccagcatgtgctgcctcatcatagtatgaaaaatgtggtgttgagaatgacagttggtattggttttgggaaatgcatggatcttagacagttaaatttgcttattgtaagatttaagaagccaaggaaggtaggaggtctagtggatatgagtttttgaaagatgatttgattggctaagattcctccgaaaataaaggactagattttgaggacagtcacaaagtcttcctactagtgttcaattaatggataagcgagttcaggtgccttgtgtgtgagctctataatgacactattggccactatttggtgtgtcttgttttttcgccaatctgagttggtcttttgcttgttttgaggcggtggatcatatggagattgcttgatggttcttcttcttcttcttcgaacctgtagaatgagatggtgtgaaataaaaaggaatgtattgttgaggaatttgttttttcagcattctcttgtcttaatcaatgggtgagagataggaagctaattggtatccgtctttgggtcgtggtgcattggtaatggagctaagtcttggaccaaaccattggaaattatgactaagattaatattgatgtatcgatattttccggggagggccattttgggtttggggcggtggctcatgatttgtgtagtgcgcttacagaggctcggggatggtgccgtgaaggtgttgtttgcccggatgtagctgaagcatggggtgcaaagaggtacttagttgggtcaaggattgttcatagaaaaaggttgtttttttgaggatgatagtttagtgtggttcaagctattcgtagtacaaataaaatgcaatttgtgttttgattaattatcgaagattgtaaaagtttaattaatttttgtgttgcttatatttttttgtatttcgtaaaatgatctgtgaaattatgttgttaattcgagcttcacaggctaaggtaattgtgtttcggtggggaactttgtacctactctgctgcgatggtttccttttgttgaatgataaatatataaatattatattgttctaattgatggcattgctatagacgtcgtctcccttgaagtttaagaaattgccttgtattttactttatttagaaattacgtacactaatatgtaatataaattatatattttctttgttattatctgtcctcattgttcgactaaaatgaattttcaaagttggatcatatattatttattctaattgtttgacttgggagtttattatttcttgaaacttggacaatctgtattttagaaatgtaaagcaattcaaaattacttttgagaaactgctataatataatttttttttttttgaataattttttaaatattttaattattaatagccatttactaattatttttctttaggacagaatgcatcttaaaatattattatattgcaatgtatatataattataaataatctgctaaatttaacatttgttaatttttgttcaaaattatgtataatatttacatctcgtattggaaataatatgagtacaaaatttagccgatgcaaaaattatttaatttgacataagatataatattatattaaatttagaatacagttataaatacaacttttttaataataatttatcattcatgattaataatatactttaacacaaactttcttattacaatattaccattaattagtttttaaatatttaattaatgaatgatcatgctattttactttttgttctaatttacaccttaaaatattattgtgctgaatacaatagcaacattgtagaaaatatagcattcatttatactttagattaaatttggtacaaattgtacatcatgcacttgagatgctctaaatgtgctcgtgcatgaacaaatctctatgcaaatatattataactgaaagtcacatataatcacatgaaaatggaaatgagtacttataaaaactaatatgtttatatagttctagtttcaaataagtcaaaagattttgacaaaataattttatatatatataccttccccatgtattgtaggaaccgaattacaattatataaggaggagggggcctttggttagaaagaatacaaatataggaataagaatagaaatgagaatgagaataagaatagaaatagaatgaaataaaatttaaaatgcacaaaaacaaaaaaaaattaataaaaaaatcattaaattttttcttttagtacatttgaatagcatttactttcttttggaatagtcattccaccaaaatagtaaagagaattctattggaataccattcgttactttaaaatgcaacaaaaaaaaaattatttctttttcattttattacttccaaccaaacgctatctaaatattatttttgggtattacaagctgaaagtaagatttcttgttcaccgagattatttaaacaattttttttccatatataaagatacattatttagaatattggcttcattctccgcatgggcattttcataatttaacttatacggagtgtaataaattatgatatataattgtattatttaagaaaccactacggccctcttggattatttaattcataatgacagagacttgaacatacatatttataaattaattaatgaatgaaaaaaatctatattaatatatacatatttatttgttaaggatagaaaacgacgtcccttctgaaaataatatagatgggttttggctttgtaagttttgttatgaaatgacagtgatcactacagtgcaaaaacagtagggtataggactccatagccacctttaattatgatatacaacgatgactaacacataaagcatttctttctttcttttcttttctttttctattcctctttttttttttttttatttcaatacgtacgtcacatattatttcaataattgaagaaaatcataacttttattttaaatgttaaaatcattccatatttctggtttatcttgatataaattattg

SEQ ID NO: 222994 - DNA, 4491 bp, Cannabis indica
aaaacccctcgtggacgcggtagaggccgcggtcatgctgctagagatggccaagagaatccaccccaagctccacttgattgggagcaaaggtttgctgctcaacaagaaaaagagataggagactgagacagtgggatgctcctgttcagcctccattgcaaccacctactactgtagttcttgtggtgccagcaaaagagcctgttgttagcaaccgtatggagcccttatatgagagattcaggaagtaagcaccccagtgttcttgggacatcctgatgttcttaaagcagagaaatggttaactgtgattgagagaatattaaatttgatgggagttaccgaaaatgatagggtggcatgtgccacgtttcaattcaaggaagatgctctggtgtggtgggaaatggtgtccctttcaaaggatgtcacgagaatgacctggaagaatttcggcacttatttaatgctaaatattacaatgaggcagttcacagtgcaaagcggaaagagtttgttgagttggtacagggcgagaatatgataataaccgagtatacgacaaagtttgatcgcttggccaagcaagcttctgggattgtgccaacagacttcagtagaaaggaaaaatatttggcgggattgaatgcaaaaattaagcatgatctggttatcaccaccaatgacaccacaacctatgctaaaatggttgacaaggctcttcgagctaaaggagaagtaaagtttttacaagaaacccgagaggctcttagtgctggtggaaccactactatccctatttctagttctggcaaggagagtggtgattccactattgagcggaagaagagaaatttcccacctattgggagttcagggcaaaacaagaagtttcgtggaaaccagagtaaagggggacgtcagacctactcctatcctaaatgcctgcgctgcaagaaacatcaccctgggacttgtaacaggagggcttattttcagtgtggatcaattgcgatctcagaagagattgtcctcagttgaagaaaaaggaactcaagctagaagttaaacctgcaccaacacatatgtttgctatcactcaggcagatgctgccgccagccgttcagtagtcacaactcaacttcttattaatggcactacttatactgtattatttgattctagagccacgcgctcatatgttgcaacaaaagttcttagttagcttggtaggtctagtgatgtttttgagatgggattcagaacactattacctaatgggtaattgattatttcgagaaagtggatcagatcggtgttaatcaaaattgagggtagagaactaagtgtcgatcttgtggagttaccattggctaagtttgatattatactcggaatggactttttgtctaaataatctaccaatattgattacaagcagaaaatggtaattttccaactggagaatgaggaaccatttgtttttttggtttcagttcaaggttctcgtgtcccaagaatttgagcactgaaagatagggatttactacaagtggatgtgtaggattcctagcagttgtaattgactctggtaagcctgtgttactcgaacgtgaggaggtcaaagtggttaaggaattcctggatgtgtttccagaggaattaccaggactaccacctcaccgagagatagactttaatattgatctggtacctgggggcagaacctatttcaaaagcaccttatcgtatggcacctgcagaattgaaagaactaaagatacaactccaagggatgttggatctagggtttacccgacctagtgtgtcgccttggggagctccggttctgtttgtaaagaagaaggatggaactcttcgaatgtgtattgactaccgggagctaaaaaagttaacttttaataaaacaaataccctttgcctagaattgacgatatgttcgatcaacttcatggcaagatggtattctctaagattgattttagatctggttatcatcaattgagaatccggaaagagaatattttgaagacagctttttgcactatgtatggccattatgagtgaggttatgtcattcggattgacaaatactccggcagccattatggatctcatgaatagggtattcaaggatttcctcgataatttcgtaattgtatttatcaatgatattctcgtgtactctcggtcataagcagaacatgagcagcatcttcgtatggttctgcaacggctcaaagatcataaactttatgcaaagttcaaaaagtgtgagttttggctatcacgggtatcttttctgggacatattgtcgggaaagatgggattatggtggacccaggaaaggttgaagcagtgaagaattggcctagactgaaaataagaatagaggtacaaagtttcctcagtttagcaggctattatcggtgttttgtagaaggattttccaagattgcaatgtcgtaatctgagttaactagaaagaatcagcggtttgtataatcaaataaatgtgagaaaagtttccaaaagttgaaacaacgactgattacagctccatatttagccttgccatatgatcaagagaaatttatggtgtattgcgatgcatctaggtagggtttaggttttgttttgatgcaagtagacaaagtcatagcttatgcttcacgacaactgaaatactacgaacagcgttatccaactcatgacctagaactggcagtagttgtgttcgccttgaagatttggtgacactatttatatggtgaaaggtgtgaaatttatactgatcacaaaagtctcaagtactttttcactcaaaaacatctgaacatgagacaaaggctgtggttagagttagtaaaagactatgattgtgagatcatgtatcaccctgggaaggcaaattttgtggcagataccttgagtcggaaaggacctgatcagactttcaatatggtaataatttatcctcaactagcctcgaatatgtctagggaaaatattgagtttgtggtcgggaaatttcataatctgacatttcagtcagacttgttggagaggattagaatggcataacttgaagaccctgaactgcttaaaactcgagaagatgtcttagcaagcaaagataaggaccttttgatctctagtagtgggatgttgttgtttaaatctcgggtgtatgttccgagtaacattgaacttaagaaatgatgaagctcacactaccccctactcactgcattcgagaaccaccaagatgtatcaagatctgaagccctatttctagtggtacaatgaaaagggacctggcggattatgtaactaaatgcttaacctgccagcaaattaaagcagaacatgagcgaccaccaagattacttcagccattatcatttccagaatggaagtggaaagacattgcgatggattttgtggttggtttgcccaggatcacaggaatgtatgactcaatttgggttgtaatggatcgctttacaaagtcagcgcatttcttgcctgtaaaggtaacaaatacagtagatcagtatgttgacatgtatgtgaaagagattgttcaccttcatggggtaccaaagtccattgtctcagatagagatcctaaatttacatcgaagttctaggtgagtttacagaaggctatgggtactagtttgaagttcaacacggtctttcatcctcaaatggatgggaagtctgaatgaactatttaaatacttgaagacttattacgagcttgtgtcatggattttggaggtacgtggagcaaagattttcctctggttgaattctcctacaataatagttaccaaagtaccataagaatggctccctacgagctgctgtatggtagaaaatatcattccccaattcactgggacaaaataggagaacagaaatatttaggccatgagtatgtccagaagacaaatgaggcaatagataagattaaagctcagatgcttgcttcgcaaagcaggcagaaaagttatgcagatcccaagcgtcgggacattacatttcagctaggatatcatgttttcatgcgtgtgtcaccaatgcaaggaatcaggtgctttgagaataaaggcaagcaaagtcctaggtttatagaaccttttgaaatacttgagaaggttggacaggttgcttattggttagccttaccaccaacattatcagttgtgcataatgtatttcatattttgatgttgaggaagtacgtatctgatctaatgcatatcctaagttatgaagcattagagttacaaccggacctgtcttatgatgaacagccagtacaaattctcgacagaaaagagaaggtccttcgaagaaaaaccatagcattagttaaattactctggcaaaatagtaaagtggaagaggccacttgggaattagagtctgacatgaggactcaactgttgggttt

SEQ ID NO: 222995 - DNA, 1163 bp, Cannabis indica
ttttggcttaagtattatttttctagccattcttgtacctcgtttataatacatgccagaataatgcgagccgttaagtattcaatttcgcatgtagctttatgtttttttaggagttgatctcatttacaactgctactttttgacttttttcctttctagaggaaaggtatttcaattccatgactttatattgtccataaataattttaatcaattatcctttcctttgtggaaaaaatttaatgtgggtttgcaatatagtatgtatttctagatgaattccttttaatatacgcatatatatgctgttcaagtaattttaaagaagataaatattgtaattacttgaacaaactttaaatttattaataattaaaatttacatattacagagataaatacatcatttatattttagctttattggtaataaggtcgcaaatgttcactattccagtagttctttattagcgaacagttaaactgagctaatttataaaccccggttcccactaccgcttcaataacatgaggtccttcttagtttaggttaaatactccagcagccggatctcgtgtgtttgcaaatactcgttttaacaccaaatctccaacattaaaaagtcttttcttaactcttttgttaaagtatctcgtgattcgatgttgataggctgcattagttatttgcgtctcattacgtctttcttcaagtaagtccaaagacaggttcaggagctcttggttttctactttattatagaattcacgtctatgggtcacaatattaacttctactggtagcattgcctccaagccaaatgctaacgagaatggagtatgtcccgtcgctgttttctctgttgttttgggagcccaaagtacctgtggtaaatcatctaccaatcttccttttccagcatccaacttcttcttaatattatcttttaaggttttgttaatagcttctacttgtccgtttgtttggggtcttgaaatcgacgagaagctcttaataattttattcctttcacaaaactcagtgaataactcaccatcaaactaagttccatttttagatactattttaatgggtattccaaatctacaaattatgttcttgacaacaaaattgagaacttttttacaagttatggaaa

SEQ ID NO: 222996 - DNA, 1964 bp, Cannabis indica
attgtgaaggctcatttgccttagtggaacaattgaataggttaattgcactagtttaacctaataaaattgattagcaacataattaattttcaaaatatatgaaattattttcatcaaattattttgaaattaatttaagaaaaacatacttagtagaatgaaatgtattcaagataaactatatgtatttttttttttttttgtatttaattaaataaagaagttataacttattagatttttctagatacttaattatttgaaatttccttagaaatatatttaagttgaaaatcaattttttaaattgattttagatcaacttaaaattagaatatttttttttttaaaattaataaataagtaaatttttctaaaaaattagtgattaagatactttttaaaaatatttttaagttaaaaaattgttaactttagatcaacttaaataggaatattttttcaaattaatgtgattactaagatacttaatttggtatttaattaaattttgaaaattatttaagttgaaaatttagttattttagaacaacttaagttagatattttaaggaatatttattttattatactttatataatttcaaaattatgtatatattttatacatatttagattttcaaattttatttttaaaaattaaactaaagttgaaaattaattttagaccaacttaaattaagtaattttcaccactaaaatatatagattaaaataagtgattaattaaaaattacaacattttaaaaaaatgagcttcaatcaaagagatattcgatctccattgttggttctacacagttcttgttttagtgagattcatccctaatagatgttcgtacattagcaatttaatatcgtaaaatctcaaaagataagtattattgtaagtcttttattcttagtagcgtccaccctaatagtgactgctaagagtaaggcttacaaagtatgaagcaatgctataagctcatgaaataagaatgaccttgactctcgcctaaataggacaacgtcagattctcttttcgattgaataaaaggttgctagaatggtgtatattttagatgagctgactactctatttaatgaatgatatctttgactctcgcctaaagaggacactatcagtttgttgaaaaccttggaaaataattgaatatgttttattttggtatttttgcaaacatgtttccttacttgttattttatgaactcgtgtatgaatttatttgaaccaagtaatttatttctatttattgatatttgtagtgtcaaaatgaaaaacccacaccccaatcctcatctattacatgcctttgcaaatgaactctatagtgtgaagatgtctcctggtcagagcatcaattcacacttgctcatgatgaacttaaagttccaaaaagcatattttttggaaattgatctatcaaaagagcaatgagttcaattcactctcaacagtctttcacctgagtataatggatttgttgtatcatacatgatcaacaattttaactcatccgacatagacaagttggacgctgaactgggtgcttatgaatggagtttgccacttgcaaggagggctccctccagtgttgcagataagggcaaaaggaaagctgaagaaattgaggatgacatctccaacaatgctacttcttcgagttcaattttgagagctagaatcaaaattgaactgaaaattgaaacaattaaagaacaattgagcaaacatactcttctatgttctcactgtggagagaagggacatttaaaatctagatgtcccagacttttgaaccatttgcacgaaagtaatgcttttgtttttgaatcacgtgttttggagaatgacaaatctatttggattgttgattctggatctactaaccatgtttgttcttcattgcagctgcttgaaacttggaatta
